United States Patent Application Publication US 2014/0325702 A1 - sequence listing, part 47

SEQ ID NO: 126588 - protein, 188 aa, Heterodera glycines
MSISYRQLLFIAAFLFIGCHAHAGVDHTHLASFTCATAKDGEINGFRAVDDGLLIGSDATNATGAMILFGFQTNKKEDLYFKVFVPTSSSCLSSVNNFVVSGRFCELGALETETESANCPDGGGAGNGCNSRSVTCQIKTVKEVAELPDGRVFKVNLGNLTQVTALCTKWKAYFTNVRQVMESGGGGE

SEQ ID NO: 126589 - protein, 67 aa, Heterodera glycines
MANNPSVELLHELAFMDNSKLQFLLSLGTGVAPTVELATTESTFPTATIEGLGNTYRILMSQGKNYE

SEQ ID NO: 126590 - protein, 156 aa, Heterodera glycines
APFYLNIWHKFGQVEPTRRRLMPTTLGIALVHGYQRVDPDLILPTMRANVERQLDLIAKGKADYQTIKNQTLEIFRQKFLNFVQNINLVDALFGDSFTSLADSGKPFSFTSLADSGKPFSKCGKCRRYMKLVETRPQRLYCPICDVNYNLWVQIIL

SEQ ID NO: 126591 - protein, 44 aa, Heterodera glycines
MKKLSICQSLRCPGRLCNHTSPGTGRLSFPGSSPPGRINPPADR

SEQ ID NO: 126592 - protein, 177 aa, Heterodera glycines
GSTPEKGPEKWPLRLRMAAGAQITHSQREEAWPFLVRGAICLVYSDNERDSSLLNSWLIASGHNFLEGFSVFSRTKLSNNRSVMPLDVRGCTRATLAKSACLPSPKGVGKPVKICRDWDRTLQLLSVNEEFLVGASHQLALNTSLPFVHTARRCPGLSHFEKFGDGCSGRSVCRLEP

SEQ ID NO: 126593 - protein, 216 aa, Heterodera glycines
VSDVVSSWSSGTGGAGIFGALAFAVLTDRRLLALQPQNALLAMLVVPLLLMWTFWRLLHFPSSANTVHHSLPSSLLPFSTAVATDAFDDYGTANADAITEPLLNTTTTTNNSSSGNALTTTTVILPPLLKYMVPLCVVYFSEYFINQGLLELLVFDCAHSFALSPTSQYRWFQVLYQANRLLSVFSRSVSLNSIKIKNYSLLVYRGLYVVIINDFF

SEQ ID NO: 126594 - protein, 178 aa, Heterodera glycines
MAALAIKRGNEKILELRDTEKSDEKNPTEPINNMDCPSSSGIGLRCTDTLAWARVKPESDEYQKRQKRDKNSDDQLRMIIFQRMGECAMAVRLVPKVEKLEYFSSSNSELYSPNPNEESGTIYNIIKSVRNEIKAIDVDFNVYDDESDDNIYQRFFPHQIGPDVENLDLVDEACAQIQ

SEQ ID NO: 126595 - protein, 33 aa, Heterodera glycines
MVAKQTGTCKNLIMVAKQTDKILKQINSSVKTS

SEQ ID NO: 126596 - protein, 23 aa, Heterodera glycines
KPKLFGLFKKELKIFKNFIHLPF

SEQ ID NO: 126597 - protein, 80 aa, Heterodera glycines
MHRHSPIVWPSAVVVAAADFVDRQKAAFAPSEAEMSQDEDPYAVSSDSEDEKGPPPKIAIERETDISQIVRQQSNNYLIN

SEQ ID NO: 126598 - protein, 534 aa, Heterodera glycines
SPKLKAELNSSLNDKNFVNLPDIHAWTPVMLATILGHFECAEVLLENGADANTQNKEMWSLSHEAIQWKDHNFLKKVLTFRDYQRAIQTINVLLELNKSDYQRAIQTINVLLELNKSLQDSSDFFVEMRWEFTSWLPFVKNMCLQDSSDFFVEMRWEFTSWLPFVKNMCPSDTYKIYKSGTNVRIDANILEIIYKSGTNVRIDANILEIGRGETPSNTRQQSFIFRFVNNTTAEVIFIDPNEQIATYVNVDNVGFERTTKSTGLFSWIGSNGKEEEVEGFTCRLMNASNVEIVTKTRLDHLSIADRAKVSDNKTLSLLMSLFEKKRVMNNSLPENTSNSSADDVYGGVSAIEYLSRRVGNCHIGKRSEEQIKRSEEQIKSNAFNASLWLSETFPLKLHEQIFPVIDLLAVRNTKFSRLKSFIQLQLPSGFPIRIKIPIFHLIIFHLINAQITFRNVNDPKEEAIERIAEHSEDDGPQMLRLRQSLFQIPDGFGCELSGSFSVNRAGEFERTQRGAADERCKLNHFFIYFDLNDF

SEQ ID NO: 126599 - protein, 227 aa, Heterodera glycines
MTGTFPSEPTFAAASSNAVVDDGGESHQTERPTETEDTSAAFLPHNSSLRSVIERFGEENVLKEWTEEDCAGLLVQLLKSLDAFLCSLFALSNLRNFCDYEGAKRIVRCFRETSVDEINDCFNLCKELNKRAANERVRMGNCVSCAPLPQESLPTFPNWSSVLAQAKKSRGIPDDSSAVVAKMLSEISAKYNDDNFAPDSPNYKFIYEHLASLVRGYAMRDARRWGQ

SEQ ID NO: 126600 - protein, 199 aa, Heterodera glycines
MAPLPGVIQLQGDITEIFRAKNVNLLYAQMKCFFKEVSCCKPKSSRLSSCEAFIVCKNYSPPEGYKPTLVNPILASDYNECLAQLEGPMNAALVPFMACGDLSGFDSDRTYPLNLEELSNEFKQFDYKYSHKDVLQPPTEPAYKKACEMKRNSELETNLDQQRQRTQSKKPAKNREAKEELQNDVIAELEEGCFERLLL

SEQ ID NO: 126601 - protein, 393 aa, Heterodera glycines
MDASSLSSLVGYQDSPLNKTVSSVHSRSQLNHLLENETCDSIIDPTDCSAYFSFNLPGPSHFYQPGTPQYLLTEEDTAFNGIRSFIDEHKLSKYSRRPDKRLFQHSRADDSPKVHLLSELKEVLETYGLREQDMEMYEVKLRIWLCNTILRPLVAKIDEVNAELCEKCPSSHLKVGTSSMEMLLTHKQHFSDTFLPFVLPYLRVHSNQQYVVSRLRTLCQNIALEEFKWDGGGEQTVRDESDSFDRFIGWGPQLPTDTELIWHLFCTYLDFHISPSSDGVSELSKPFSNVFFVNSSDGKFPLALMHATIQPTKQQIVPDELADEKYFIRLASARPPTFEIVVDGGETVILPCKNQPQNFWYVLILFLAHVTKMSHSRIGHIHLTSLSLNIFDA

SEQ ID NO: 126602 - protein, 86 aa, Heterodera glycines
MKFAHTVPRGFAKFSHTHYMPKTLLQLTFVGLLSPNGDLFCNSSVPFSVLTKMSVFENSEIPALHAENIAPIDICRHFKPKWGLIL

SEQ ID NO: 126603 - protein, 172 aa, Heterodera glycines
WAKPGPGPFRVENPGIFGGKTGKKSGLVPVKTGTSVLSCTQLSVKSCPPLWSIHYVPDFVTEEEERQLLERVYGVPKPKWRELARRRLQNWGGTLVGGGGTVGTEEERQQAPVPVARRTVAGGAKPNHVLVNEYLPGQGIMHTDGPAFYPLISTISLGSHTVLDCYDPRAPF

SEQ ID NO: 126604 - protein, 63 aa, Heterodera glycines
DQIGHSDSVQQVFLLHKVSAAGQQLVGLVSAQVEPIVGGVRAGQLKGHQRLEPGGDVAQQSAA

SEQ ID NO: 126605 - protein, 201 aa, Heterodera glycines
CILAPYNEINIYNEQILKRFQGREYVFKSVDDASKGPPILPEVLNKLQTNSLPDHELKLKINCVTKLIRNLNVNMGLCNGTRLQILDIEKNVLRVMILTGDRTGEIDFIPRITLIEDKKLPYVLKRHQYPLKLAFCMTINGAQGQTFEKIGIDLTRDVFSHGQLYVALSRTRSWDKIKIKYSKENSEKKTQNIVWLEAFCF

SEQ ID NO: 126606 - protein, 41 aa, Heterodera glycines
MSNNNDEGMANGGKGNYQQYVKLEKTVNQCRVKTFAVRTFA

SEQ ID NO: 126607 - protein, 30 aa, Heterodera glycines
DYFSKHLVDWGIIGDCGINRDWAIIRAYTV

SEQ ID NO: 126608 - protein, 97 aa, Heterodera glycines
MANTLKRKRRKAEEHSPKENIRSSVPLKHSVSFAVDSSGGSQLFIEDTDFGLVTLEDAQKAPFQSKAFEWNGEGMDKRQQRKVARGEGGQMTKIKAD

SEQ ID NO: 126609 - protein, 143 aa, Heterodera glycines
PSAVVLQCGADSLNGDRLGPFNLTLKGHGKCVKFFRDCNLPLMLLGGGGTLKGHGKCVKFFRDCNLPLMLLGGGGYTPRNVYTPRNVARCWTYETSLAVDIDISDELPYNDYFEYFAPNYRLHIDASNETNHNTEEYLRTVQY

SEQ ID NO: 126610 - protein, 60 aa, Heterodera glycines
MQIDESVEHDRANPDRRLPVEFSIINPLMVNLSSDSSVDYSEDPCPGEHLHHGIFYDGNA

SEQ ID NO: 126611 - protein, 89 aa, Heterodera glycines
MENCVVVPRRISFVRSTLDQFWDCSALTVPMTNGQEFLVIYSNGEMEVYIQSENRGGLVVHLSFVDLDLEAAYSRSEQCLRDYIVVTII

SEQ ID NO: 126612 - protein, 182 aa, Heterodera glycines
MSVHSELARSKILTCRNRLAVRRLALLEQYFELNKSVQCLLDDYRLNIMKAKSTSPGFVVGSVTALLSSQRELSPTIWVETAKSDCGSFLALNWPSKCAGEKGNDLRRRGGETFDGKGAEEAEGNGGHSTDFHPFGVLESQSVKAARKNIQKLLLILCDLANIQRQILSLGKEADETKLAEF

SEQ ID NO: 126613 - protein, 94 aa, Heterodera glycines
MGGEKGGKCGRKEAEGTERKRDGKSRRNNEVAAKPHGGRNAFRNFTDSKNTPRNGELCFHYVEPIIVKKTLNGFVQLEVLFEQSQPTHRQTISA

SEQ ID NO: 126614 - protein, 103 aa, Heterodera glycines
MFVLQSLITGTISKASAKQRAERAGRTQDGVCYRLYSELAFANQMLEHTPPEILWSDLTSMVLKMKSIPSISEHLGDLRFRDQPPKAAIVSALQNLYFLGAID

SEQ ID NO: 126615 - protein, 120 aa, Heterodera glycines
MVSELAQCSDQLRSNGASTAMSVEESKPDENLTYDEQILSSAKSITQAVQTLVKVIFGLVSAAKLVAAATNQLCEAANGLVQGHSTEEKLIAAAKQVKKTKEENQGIYHGNYWTNYRHKS

SEQ ID NO: 126616 - protein, 21 aa, Heterodera glycines
MRTRPIWQVKQRLLTSQKKGF

SEQ ID NO: 126617 - protein, 79 aa, Heterodera glycines
MGKLSAKSVNIIIHTFVYIRCVNDKIHETDSHTREKNLCMKFWPALYTNGFTLSPVEEGVASISLIEMTYFTESGQNNK

SEQ ID NO: 126618 - protein, 497 aa, Heterodera glycines
MIRNKLESLQKSRKKRYLSDILNTTEEAVNLGVELVEPNDVRTSDSVEQPNLKEAEVSTVLLSAEKPILGEIAYGFRFTHHSGNRWRCTNRSCSAYVNITNNGETGTSGTLGQKEYNHLPAPQKQQVCLNSTLREKVGEDIVLYDSRNVRQGEKDVVLIFGSVKTLDILRQCGTWHLDGTFKCAPAMWEQCFVIGASVHQRMCICLWCLLPGKQRRYYEEALNFLRGRISTEVPSKIMCDFEKAEIAAVRTAFPTAQIKCCMFHYGQSLFRNFKRLGLVHLYGEKTERGEAVRNTFRSVLSLPLLPPSVVRMAFSIIVASAPAGMHEFFLYFSRTYIGLTQRQLLDGANAFGATQISFLSSTDHSELVTTISTINSEHSYAATPIQFGIGSPAPSTLTWPTTKGLCHHPALSDFICGVNESIDRQVDAARSARHFIHKRQKRYILQDALIMRILADASYNNNGEIHDLMTALGLQIEGYAGKLKDFENFDDSIVHVP

SEQ ID NO: 126619 - protein, 87 aa, Heterodera glycines
MATFTLRQGIDIAKKLEPTGENQFLLLGRQSAIKAAQNGTDWAKSVDAKLGTMVDEHILKRALEKVEKSAGSVPLYMDLAKVFKFIF

SEQ ID NO: 126620 - protein, 379 aa, Heterodera glycines
KLVPKSRVPKCRVPVSGSKVSPQMSGSLSVGSPKVPKCRVPKCRVSKVSPQKSGSLSVGSPKSPQMSGSLSVGSPKLVPKCRVPSVGSPKLVPKSRVPSVGSPKLVPKCRVPKCRVPQVSGPQMSVPKSRVPKCRVSKSRVPKCRDPQKSGPQMSGSPKVGSPNVGIPKSRVPKRVPKCRVPKSGSPNVGIPKSQVPKSRVPKCRDPKSRVPKSRVPKSRVPKCRVPKCRVPVSGSKVSPQMSGSLSVGSPKLVPKSRVPKCRVPVSGSKVSPQMSGSLSVGSPKSPQMSGSLSVGSPKLVPKSRVPVSGLQSSPNVGSPNVGIPKSRVPKSGSPKVGSTNGGRYHQQYYRLLCPPAAVASKVCGLLTSANSVPKLVMF

SEQ ID NO: 126621 - protein, 104 aa, Heterodera glycines
MGLYFLNVLKLSSGQTTVLINVKKIIGAFFALLGSAVADGQFFMAPLFTELAKSFSACTHFHFFVADFTLKALPWPRFMYNKNPPKGNVFADVYDTVVVAFFDN

SEQ ID NO: 126622 - protein, 297 aa, Heterodera glycines
MTISPAVTRLRQHATTAENALDEDEMDQEALDTLRQEHQHITRILTRLEYDLNEWNEVIHRLQGPARDAEEAIFTAFIRDDRHFTEWMEDAREVLAHIEDELNGPPVAAQAHLAGGGQLPGASCNAHIPLPAANQQFQPVIAANAQGVSAVDRLPLEPVDKFNYLHVCLRGKAARAVTSYRGGENYAHAVAALKRLFGDPWKIAEALQSELMNLRPVDDDVRSLQDFLETFERVCRQLSNLEMPDDSPLMYQVVRSKLPATVLSELVKMERSAGVKLHTPQLRTGLAKVISIREEVE

SEQ ID NO: 126623 - protein, 60 aa, Heterodera glycines
CIYKLGWTVGYGVHAWLGNIWPSFVILKHTKHYQLSSVAVGKALRAQGRGFTASLEIDVI

SEQ ID NO: 126624 - protein, 277 aa, Heterodera glycines
EKHDPEDIVESEEVHHEVEAVPAPIPTERHELDDTVETEEVVQEVEAVSAPIPSERRESDDIVESEEVRHEIEGVPASIPTEIHESDDIVESEEVRHEVEAVPASIPTERHEPEDIVESEEVRHEVEAVPAPIPTERHELDDTVETEEVVQEVEAVSAPETMASEEWARPAAAEEVIEFGDLSPKSDHFGDQKDEEEALVESEDVKPDEHRDKAVDDHFKTAQETDQQRPDSLMVRWAGDEQRDAEETRALYTVTEQQANQLVEEALERVLSDESSL

SEQ ID NO: 126625 - protein, 285 aa, Heterodera glycines
LINLRIWHFLNLITYRNDDSSLSTRSSASSTSFACCSVTVSARVSSASRCSSPAQRTIKESGRCSVSAVLKSSTALSRCSSGFTSSDSTNASSSSFSPKSLFGDKSPNSITSSAAAGRAHSSDAIVSGADTASTSCTTSSVSTVSSSSCLSVGIGAGTASTSWRTSSDSTISSGSCLSVGIDAGTASTSWRTSSDSTISSDSCISVGIDAGTPSISCRTSSDSTISSDSRLSDGIGADTASTSCTTSSVSTVSSSSCLSVGIGAGTASTSWTSSDSTISSGSCFS

SEQ ID NO: 126626 - protein, 84 aa, Heterodera glycines
MSEMITHNQHQLIKWVKKWGQTQMINKKEKSFENLKDRHFEKSLDLDSMLDLDLDFLDKNLGKSRSRKNPGSSRPGSRPGPGFF

SEQ ID NO: 126627 - protein, 215 aa, Heterodera glycines
MHPSEPGPSSSNSEIHPTSLPPPSTTALNYQCNYNNIDDAQHRQLHRIWETSPEGELLILQNTTSIGSGETKNAVPSDHSTVIRPMFLDIYLPNGVLLPIQCPAQRALALLKQDVFIQARKLQLFETCREAERQRGTCSFGHYAFPENPLLMVHPVSMNGATVVSHGQFGPIEINETDLDYAQFPEQPGEVEQRAMEKLRRKVQFSDAYLEAWHH

SEQ ID NO: 126628 - protein, 82 aa, Heterodera glycines
MPCSKCRTNHPHNQLTRHRMRECRAAAHSGPTASALVSEALEGRNAKSVQQIKLRIGLGSYQNFHRILLLTQLFFEKCTKIR

SEQ ID NO: 126629 - protein, 395 aa, Heterodera glycines
MSELLRITIAPIVKRLKLYIETAQENLTKDLTEEIKTDLLAERQNLCRAVSLLEKNNDKWEAVFHRVKGPALQEEEQNYKDYKPEGKAFMEWADQARGLVDTIDRALGLSEQGDDVVHHAQVQQPAQNIQPQVVVAPQRHEVMLPPISLPKFSGEPREWPLFWKLFETSVESLQIEDFKKHIYLLGCLPEKSVARRAIDLYPPSDENYPRVVEILKKRFGDEKSIVETLQSELLHLPKPSDSVQSLRQFSESIERICQQLSDFGENEQNKFMASTIKSKLPYHLLTQVVEKEMRSGGTFDCSDLHKANTSIVEVKEEVQRCTQVFRGEEKPRNFPPQMQRNNFQGRGTNFSPNQFRQGHWRPNNRNESVGMMSPQIHRSFNTVNPRVLCPTTVYI

SEQ ID NO: 126630 - protein, 231 aa, Heterodera glycines
MHSMNIYICMTEIIKHERHRNEIEQQRNASENHRNEIEQQRNASENHRNEIEQQRNASENHRNEIEQQRNASENLRNQIEQQRNASENHRNEIEQQRNASENHRNEIEQQRNASENLRNQIERNHKDEMTKLINELINRIAELEEQNGQLKQQVAEHERQQRDINFEAQPPNATDSAQPELTAPAMATNDGTNYDFAELSPTSAPTQSLARNDGTGGQLMSHSSSGLFNTF

SEQ ID NO: 126631 - protein, 272 aa, Heterodera glycines
SKNIAILPRRDSDLEAFSHNPSDGSFAPLVYRPSTTKCLNLRFLSYAGLLLATGLGKTNLSHDGLNPAHVPYWWVNNPTLGEFCFAMIGRADIEGSKSDVAMDAWPPQASYPCGNFSDTSCWKLYTLKDRATLSRSVFVLKIRIKAFAFLLYERFPSSLSALGHLRYALTDVPPQSNSPPDTVIGAGRRARVARLNTKMDTRRTPVLPIKGIDESSGISLAPCGSHLCYTSHDSSQSQTRVKLNRVFFPAKFAKPVPLAVVSLDSRGQWESR

SEQ ID NO: 126632 - protein, 75 aa, Heterodera glycines
MACGVLDKLPEIIGHRSVLSTWYRVGMAQLFAKRLLVQMPRCGPRDTPWLFCLLCRSSAERTALRAHLAMNGIET

SEQ ID NO: 126633 - protein, 71 aa, Heterodera glycines
MTSKCINCKLLVYPWFAKLCRCEPTQESRASTNPPSPAWTIGKRIYLFCIWSHFCVLITFGNILIILHLIN

SEQ ID NO: 126634 - protein, 25 aa, Heterodera glycines
REKKIMFFSGTLYLLVHISFFETVC

SEQ ID NO: 126635 - protein, 197 aa, Heterodera glycines
LSDRGNRPMVGMAGAVLDKQKSKYNELEGQYLLEWINEKVKEDFHCRTRTNFWEQLKDGTLLCRFLNAVEPGIVKKVMKPISNFFLNAVEPGIVKKVMKPISNFNCMENINQFNCMENINQFVSEVSEARKMGVIDQETFQSVDLLEGRDLFSVCVTLQSLARKVKKGIALPKQVPKDKIREGIALPKQVPKDKIRE

SEQ ID NO: 126636 - protein, 270 aa, Heterodera glycines
GGGKHRINAKAIGRMNGIQMTRHLRSETLQIAACAGCNQMDAWGTIVTGVGAGLIYMALSGLMLRLRIDDPLDAFAHSGGGLWGLVSVCLVSTSGRGVVPSLATGDGLAIVRSLAVIECFSQLGWNILSSLAIIVQLGWNILSSLAIIVWSSAVVLPVFGLLKIIGKFRVAPEIEQKGIDIWKHGEEAYPLVAYGHGWDEAEKVKQKKRNELRAEEFGSGRRIAWHPIATIYHDPNKYRETDGSRKVSERREMGQNERKAINWSYRGPME

SEQ ID NO: 126637 - protein, 67 aa, Heterodera glycines
DLYQVLMPLIGGGVGRDCIVHVDIDVDSEMRYPKGAARICFSRYDAFVTAIRKQFVNIPDGDGGVKR

SEQ ID NO: 126638 - protein, 110 aa, Heterodera glycines
MPNLCIVKSNRRGRFVLISNSDESDKENCPSTSTAIPQNNEVVKWLVLADKKSTIRCSEYSRKTAWGPCDGADGPVEGCKENWKKWGRVQFLRAVRSKCSDYFGEKTNSV

SEQ ID NO: 126639 - protein, 47 aa, Heterodera glycines
MVKTTKLSHLKKSRKRLKPLTGQATSSLASSSSTISTTSAHKQPFDC

SEQ ID NO: 126640 - protein, 80 aa, Heterodera glycines
MNKKAVFYNYSFYSRVIGAADHEYDIRFFAEHTEAEFAQAGAVASADISLPAGPMPAELHLHGAMEPQLRKLGMPTRLEN

SEQ ID NO: 126641 - protein, 29 aa, Heterodera glycines
MKGPFDWYIVSKMQKPIIVNIIALANLGT

SEQ ID NO: 126642 - protein, 109 aa, Heterodera glycines
MSVIACHELMHALGFHHEQSRSDARNYIILWEKDGKIIICSDSCKGHEDKCQNGGYLNPNDCTKCHCPDGYGGKYCKELEENLNCEDLSGIPRELVANHSAVLLKTKAK

SEQ ID NO: 126643 - protein, 213 aa, Heterodera glycines
MGQRKEVGKGREGKGREGKGKEGKGREGKGRERKGREWKGRERKGREGNGREGKGKERKGMEGKGRERKGREGKGMEGKGKERKGKKRKGMERKGKERKGKEGKGREGKGMERKGKERKGKGRERKGREKKEKEGKGMERKGKERKGREGKGKERKGKEGKGKEGKGRERKGRERKGTERKGKERKGREGKGRERKGREWKGREGASFKTTRL

SEQ ID NO: 126644 - protein, 138 aa, Heterodera glycines
MKMEMEVAVCRNRQAQEEVALARTKAPDVSQAFVAAQTLLGRTVPAHANTFCKSAVIWLRCPTQPNHAPKRPRTVALYRTFAPMTLWPFVVVLTRAIVAITRLHIWHKEGARMCSNGINWHTDYSNGLKALALSFPIM

SEQ ID NO: 126645 - protein, 59 aa, Heterodera glycines
MNIGPVFISTEVSFPLRDTTGTVMSGVYVLQFFIFANLALGHIFITFDGNAESFFCIKL

SEQ ID NO: 126646 - protein, 384 aa, Heterodera glycines
MSHIYSTLGLNKHSTSAEINSAYKRLALQNHPDKGGNPEQFKSIKDAFELLTDKKARDFLDTFGEASARAYLWSQTNIIEFSSDSDTESNIPGNSDYNTNFAGRTPPSRSENWSNSSSANCEAANQPEFDFPSPDNNDFLDQLISGIVHSDTEDYQQPHQQQQDGESNFTGNDGQHSQQQDQEEPTIRNLRPRKPQQQKEYKKTGVRARRQRKHHRRGTDKSVRIDANPRPKNVQADKNQKYCVKNILALFTTLDKHGHTRHAFYIDWKGHADRESWTLSEDLDALDTAMDFAANAHQNATVEALNGLSVPQFVLSRLTANPEFIKLCRRLNTKIAPPAPKNILFSSNSSVRQKNKAINQLDSFIVECMTNALWQGELDDSDDE

SEQ ID NO: 126647 - protein, 25 aa, Heterodera glycines
MPALIRVRFSVKRFIMFFRPDSLLK

SEQ ID NO: 126648 - protein, 311 aa, Heterodera glycines
MLASVSNNAWPATCGATKTETSPKKSVEAIEKKIIKPKINLENELGGQNATVSNIFQMPSQRIFARCCGLSRLLSQSAIENNRKNCTEFDFAVLTSQNWSIKKQQNSNEPIFDGILTFDHFSVIRQNEFEFDDEQLAGNLKIEFNEMVEKKHNIGERLGVIRRFAALPNVVQQQTSHGQLGAKAPFGHGIYGKMGFSKLNQFNGMYKTDDFVPGDFGIVPLKPKTRWIWMPESGRDETGEMALVEERIGMEQDYIVKLRSIVSEFLQNNQKMQFNYSRFAADEENNAPQKKLFDLTKNSVSFYFYEKQFIY

SEQ ID NO: 126649 - protein, 95 aa, Heterodera glycines; identical to SEQ ID NO: 125597

SEQ ID NO: 126650 - protein, 116 aa, Heterodera glycines
MGMALLIMLINLAGTISGQPPIRASGMDPNLPFREGPRVPCTKECAERVQHNEAQCQSENGFENPLLQLMDTRFGASTVKGRRGQCRQFFHWRREGGSIPAYCTNERDGTQSKQKE

SEQ ID NO: 126651 - protein, 505 aa, Heterodera glycines
QSIFTKLITCTVNKANKHHGTTNDDFLSKLHFDVLAQICEADDQMKENVLKNKIHLKDFLNANWYKKFLDLLEKEDEYFSVSESFNESDGSENEIFDDPSETIIEENENSKNLMEKHSIKNMNFEFGEKSAEKCENKNFKNNLTTTKMDEKNSDDEFLALNTENEEQWTKKKEQQNKKAKNINVRKNKNNNNSEKEMTEQKRKGKNGKNKLEENDENLNLNKKNYDLLDESIFKKIFQNFLEKHWEPQSMEKQCLEYLGTIALFARAIQAKMNFIEQMSKHWANKSVNGIAKKWEHFIFNEEIIFELQQQNQFVQIKLYFLHNQLDEYAFEQSINFLENFIQIIDENETDKIKNYGNYSPQSPNNHQTTQFGTYNSDEFNAIFATLEMHECSMLIAKGVINFEMIKQIKLAHYLNGETFSNAGNPPSKKCLCVDAKIEQQYVDKLKKMLNQKKLEPRLLVGGSLLMNGFVDGSDMDLLCVLPDEIKFDQLFNEEDNCLYKFLKKK

SEQ ID NO: 126652 - protein, 75 aa, Heterodera glycines
MGQKGRTNCRWLQNGPALPTKCDNNFFYNDWGGKLHRQAICQHQKEGRQRHRNGAVPITSALVSDQIVQRRSAIV

SEQ ID NO: 126653 - protein, 269 aa, Heterodera glycines
MFQEFIAICLVKNPDDRADADSLLKHLFIQSAKGPKVVREMIANAQDIAAQYLLQNAHYAKAAKGIDYYAQLNEAAEGQIERDAEERTISTKTGLMTYDGGTLIQHGEQSLKATAENCGVSVSQKAFHPSALSQPIDDNAEMTQTEAAKMNVLSAELSMVKLTVDQKIPNTLDSRHGDGTVEFWDQSPSATWETSGYNSAMDTAFRRAMNGQSDYSFLRDLSTEELVKRKEILEKEMETELNELQARYHAKRKAILDAIALKRNGTVQF

SEQ ID NO: 126654 - protein, 28 aa, Heterodera glycines
SISSDPTHLLISTRDVNEQDENKKHGLF

SEQ ID NO: 126655 - protein, 53 aa, Heterodera glycines
SSRISLEYLLLPPRSALVEAPAGPTPKAFNATTTTLLHVMARLRDKHVYKPMT

SEQ ID NO: 126656 - protein, 1324 aa, Heterodera glycines
MSAKAVNEYSGKELLYRSLNHVQALVKPNAVQLDENTNFQDAIINCDWISKEGQGVLKPDQLIKRRGKHGLVKIGTSDELAKWFDEKKGQNVQIGKTTGRLSKFIGKTTGRLSKFILEPLCKHGAKDELYIAIYSKMNEDVILFYEEGGVEVGDVDAKARQLVVPVQLKDEEMALGEQSIDAKARQLVVPVQLKDEEMALGEQSIDQLIGSKVEETLVKQFVCELYELVKQFVCELYETYKKNHFTYLEINPLGMLNGKIFGKIFILDLAAKLDETAAFLCSENWKTRSGSEVEFPARFGRDLTTEEKYIADLDAKTGAEKYIADLDAKTGASLKLTILNRKGRVWTMVAGGGASVVFTDTVCDLGGASELANYGEYSGDPNETQTFEYAKTILTIMTEGEAHPKGKVLIIGGSIANFTNVSATFKGIIRALEGIIRALEMFAEKLRLHKVTIYVRRGGPNYQGGLRKFKEAATKLDLPIHVFGPTKLDLPIHVFGPETHMTSIVGAALGVRPLPEASLTPHTTGQFLLAPERGVSSVANGYPKSNGANGYPKSNGTTPEKKAKAETMEEQSKEAIRSLFERDTKAIIWGQQQRAIQGMLDFDYVCKRSAPSVVASTYPFTGDHKQKYYFGQKEMLIPAYKSMEKAFKSHPDASVMVTFASMRSVFQTVLEALEYPQIKVIAIIAEGVPENQTRKLIKVARQKGVTVIGPATVGGIKPVARQKGVTVIGPATVGGIKPGCFKIGNTGGMMDNILASKLYRSGSVAYVSRSGGMSNEVAYVSRSGGMSNELNNIISHNTDGVFLNNIISHNTDGVFEGVAIGGDRYPGSTYTDHILRYQDDPRVKMMVLLGEVGGEEEYKIVVKMMVLLGEVGGEEEYKIVQALKEKRINKPLISWCIGTCADHITSEVQFGHAGASANAVKETAAHKNAALKSAGAHVPDSFDDFGVMISKVYKQLVENGSIVPRAEEPPPPVPMDYAWAKELGLIRKPASFMTSICELGLIRKPASFMTSICDERGEELLYAGVPITRVLEDNVGVGGVLGLLWFQKRLPEYANRFKRLPEYANRFFEICLMLTADHGPAVSGAHNTIVCARAGKDLISSLVSGLLTIGDRFGGALDGAAKSFSEAMDTGLSAMQFVNEQKRLGKLIPGIGHRVKSINNPDINNPDKRVEILKEIAKNKTFFKQETPLFDYALKVEQITTSKKPNLILNVDKPNLILNVDGAIATIFVDILRHSGMFTPQEARETIEIGSLNGLFVLGRSLGFIGHYLDQRRLKQPLYRHPWDDISLGFIGHYLDQRRLKQPLYRHPWDDISYIMPEHEFAEQ

SEQ ID NO: 126657 - protein, 25 aa, Heterodera glycines
MSQNRDENSQPPVLDGPYRLAQERN

SEQ ID NO: 126658 - protein, 70 aa, Heterodera glycines
MARAHLAALKWLALSWPYTPPTPMGGYRNPVKWSPLTTRSYQMYKPDQSHRIIMGIRENDMSGDKKSDRL

SEQ ID NO: 126659 - protein, 48 aa, Heterodera glycines
MPIYRCYHHHFAGSTSRATKSRITKKLARLLMLLFLNFTTDMSLMNHT

SEQ ID NO: 126660 - protein, 95 aa, Heterodera glycines
MCQISAGRSQLNAAVWAPYKFEKRKLSWAVKMPTNLLDWVRPIEETKSCYRLIEPVKSFRMISRLFDSVNNFKSYIDSKLAQTELARRSWPVPAI

SEQ ID NO: 126661 - protein, 338 aa, Heterodera glycines
MASLIQKGITFTLKALDNARTTTALSLHPDADLSNWENAVKLEAQCTRVSREVQTIEAQLDNLRDLSNNWIDLLNRLEGSEKDKGEKEYVKFDTYEKIAERHDAATTKLRDLRDLEATLSADAKLYRGRAEREARADQQANPPPQIATPPMAAPTFTAPLYQFQPIQLDKFFGQKRKWPEFYESFKSAIGSQSISKAQKLNLLRNLLGGEARELIAGFRLEDQNYETVLQLLKDTYGAPEEHIRALHFELANLKTCRSLRDTKDFLLQLERLTRELNNAGEDIEGPQVFLMLEKKLTPAFLRNILNKKGEDPANWTTTKFRDVLNEAVRKEVQIQEVM

SEQ ID NO: 126662 - protein, 204 aa, Heterodera glycines
MADDPSLHESAVLSVLWWTNSVSLPVSIQCKYLHLKSLSIPLGYRHCRPPLQRTQPFGFGYVGGSADAVLLVFTLRRIVRRDSSASAGTATTVAVAEERSGGVVVTNPAVPAVNPPSIFRVSIQRTNGEEHCPLASSFLLSHSLRHFPRLFLQIILEDGHAQQQQQRLNANAMLFAVVLLLFVCIGPQVPARLLYEWWDGMPNF

SEQ ID NO: 126663 - protein, 50 aa, Heterodera glycines
MEKELLATMKTKGREQLRKDIGAMFDQLQNVVGEEIAGLWAKIEPCLTEQ

SEQ ID NO: 126664 - protein, 393 aa, Heterodera glycines
FIESSDKMGPSRVKDKEDVPFLLTIDEDQRIDKQMLEKETVVDPILAQVISKVKDNWAEPVNEDLNPFFRERANLFLEGNLIRTGMQIVIPHRMQNQILKLIHRAHFGIVRSKARARGIVWWPNLANEMENYVKSCEICQRNAPSAPRTDPEYKWPEARYPFERVHMDLAGPIWGTNFLILVDSYSKYPFVCQMQSTHSTSVINYLREIFGMFGSPKCLVTDNGRQFVSEEFESFMTNEGVRHLTTATYHPASNGEAERFVRTFKESMVKLLAEGMNIKVAQFTFLQEYRATPSAVNEGESPAHQFLGKELRTALDKIRMPRMELILENQSREQMQQQGNLKNFDPGDPIWYKEPNGKWVRAVLIQPLGERMWEIQTEGSTMTRRVHLDQIKG

SEQ ID NO: 126665 - protein, 1731 aa, Heterodera glycines
PQVVVAPQRHEVMLPPISLPKFSGEPREWPLFWKLFETSVESLQIENFKKHIYLLGCLPEKSVARRAIDLYPPSNENYPRVVEILKKRFGDEKSIVETLQSELLHLSKPSDSVQSLRQFSESIERICQQLSDFGENEQNKFMASTIKSKLPYHLLTQVVEKEMRSGGTFDCSDLRKAITSIVEVKEEVQRCTQVFLTWDTHQASVQNIQHLEHAEGGLQINNDVFCLMQGHNSQQCTMQLIKEGDAPRGSTPKHTTKGGTVQKKQSSNIREPPRPTQNHFSTTNEPLRIREKPSEIAISDGTTNVLTNVVTKKSHAFLMTRRLRKRWKSTVSVVKGMDQYGSIHLSTPFKFNGVTISGRKSSSIEPSKFPLHSKWWSGTQMIITEEQDVFQALTLSEDEPEILISARHFWKFFQSKKEVLPGLFVIQTTLGPLVNGESDFGPKVQNPGLSMMTIDESNQKQMPATKEIEYFFNLESLGIKEDPNEDDDQTAIQLFDKSIRRENGGRYSVKWPWKEETPNLPSNYRMAFSRLMSTLNKLRHSPELLQQYNNTIHDQLSKGIIEEAREAPGTLEHYIPHQGVLAKGKKLRVVYDASAHTRETNSLNDCLYRGPVLLPDLIGMLLRFRCPAFPLLADIQAAFLQISLEPEDREVTKFLWLKDMEKPLSSDNLIIYRFCRVAFGVISSPFILAATLQYHLKNCRSILAKELAESLYVDNALMECETPEEALTKYKEAKAILKEGCFNLREFITNSKEVMEAIPPEDRLEKAKVKVLGLIWDIDQDEIVFEFPSVDSLKIVNRRLVLSFLASLFDPLGLMSPCIQPLKLFFQSLWEEKKGWDDALSEEDSTRWSAFQDSWKDKRIRVPRRTMVKGECSLQLHAFVDASIHTFATAIYLRVESSNKIQNWLIFSKNRLKPKSASKALTIPRMELMAILIGIRGLKFIQTQLRRAIEHSYLWSDSQIALNWVASKEVQPKFIERRIKEIRSITKCSFHFVRTAENPADLATRGATPEELSTNSSWWNGPNWLTKDQNCWPHELFFDIKEEELYDPPKEDEKVFLAHTSEDVLLAEYLIIRLDQLNDPDEFTKFPSLIDSEGILRLKTRLARSDQPYGFSHPILLGKNSEIRDLIILQCHQKRHHLGVDSTITEFLNIYWTPQSRTAVKRVIKNCRRCRRMKAYQFALPKMRPLPEERVCRQMPFKSMGIDFLGPTETRLAGEKVKAWIIIVTCLTTRAVYLEAMLDRTAESFLNVLRRFISRRGKPDFIWSDNATSFKLSQKTIEQLTTPKGVEQNKNEFLALNKIKWKFIAQISPWAGGVYERLVQLCKNCFKRTLGRKILNYDELNTFVAEVEATLNHRPITVVSEGAYGIQPLRPIDLLQPDLQINWETTTEETDPNDKQISSSEKLAALFKATREAHESFWNKWHNEYLLLLRERSKWDHKGTHLQDKGEPKEGMIVLIHEEFTPRNQWTLGKIIELNGKPGAIRSVQLEMPIHGIKSKRYGTMPRKVVITRPVNKIFPLEVGFENPTEDGKENLKVIKDETANSSTEKTILHLENKLPNEEEKNEDKNSHLVEPKANQNKHGMITRSKAKVMTVLNCLTIFCIFGLAGAYPTNQCNECKLICSNKGVLAKIPKEIRKVELCCSENCYIHENVHKLTYELPKEILLNDYQCQGHFWMDSKHMFKKDILCPAVDECVLIECYLCMEQLANPTCYPLVSSMLAGGLFLSLMSISFM

SEQ ID NO: 126666 - protein, 236 aa, Heterodera glycines
MSELLRITIAPIVKRLKLYIETAQENLTKDLTEEIKTDLLAERQNLCRAVSLLEKNNDKWEAVFHRVKGHALQEEEQNYKDYKPEGKAFMEWADQARGLVDTIDGALGLSEQGDDVVHPAQVQQPAQNIQPQVVVAPQRHEVMLPPISLPKFSDFKKHIYLLGCLPEKSVARRAIDLYPPSDENYPRVVEILKKRFGDEKSIVETLQSELLHLPKPSDSVQSLRQFSESIERIVSS

SEQ ID NO: 126667 - protein, 33 aa, Heterodera glycines
MPEIESQRLNCWWVESQRLESLRIESQRLKCCK

SEQ ID NO: 126668 - protein, 114 aa, Heterodera glycines
MGLKSPAFQTLGLKTPTFNDIPISGTQPTSISISELNSQAFQSLGLNPPAIQSLGLNLRHSKQWDSNLRHSKHWDSKHQLSMTFQSLGLNPPAFQSLGLKSPAFQTMGLKSPAF

SEQ ID NO: 126669 - protein, 320 aa, Heterodera glycines
MGDAAIQRLTDILQQLLAAQQQNTPPAQNASQLPTLPDVECFDASQHSGCEIEDWLKRFMFVLDCATPNLQDELKVKLLFNCMVLLISLKSPKNATLRSRILAKLAADGDTVKYDGVVDDLKIYMSTIAEAKALEQPHISKLLLTAKLKGQKKRKNSDHSSNASIISTGTRRRNRSQRECWRCGWNHSSRKCRHQETVCRKCKKNGHLERMCAKHQAWLKKNGGKKEKAVNNVRVGKIFLVKGENQRKNGMIDVPIDVNGTKVEFIADFGTEGTVLHEDTVRKIGALKLSRCEERALYHDGTTRPFVGKGKAAFSFGEHS

SEQ ID NO: 126670 - protein, 59 aa, Heterodera glycines
IIFIQKKFFFGFRGSTLNRCAQIYGETESFGNTFPIACTLILRWIFAPHSCLSTPNGHL

SEQ ID NO: 126671 - protein, 50 aa, Heterodera glycines
TTPALFFFNYFFHFITQRSRLIRSSPNFAGKLLRTLQMLINFLRIFCLEE

SEQ ID NO: 126672 - protein, 73 aa, Heterodera glycines
MGAGFAANKVLDTLRLLNFPTRGPRLRIPSRITGHLQYGTGPLSTKTELARRNWPKTEPAPDGTGETELARWN

SEQ ID NO: 126673 - protein, 31 aa, Heterodera glycines
MAMKKVKNLGLRSGSADRRCKAMQGKKFGIF

SEQ ID NO: 126674 - protein, 39 aa, Heterodera glycines
AVQHHQAAPAAQPAAAAMPGGAGAAPAAAIIPLAPPPSP

SEQ ID NO: 126675 - protein, 15 aa, Heterodera glycines
MRINSSTHNCFALVT

SEQ ID NO: 126676 - protein, 118 aa, Heterodera glycines
MNDPMPFVYCLETLLYENVKFDDATKLCFNLINPGKFVLDRITYYEIRQCFDGSEGILLQNLAADKTKTIWPNKHQFVPWILVNNVIIETMQFLRYSLPSLICEQRAEGEYMAECESW

SEQ ID NO: 126677 - protein, 63 aa, Heterodera glycines
MARPRSAPQRPCSTAPAVPCDRRPPSGCALFSCYAQNKASKLNINVNALNALVQALNSTMRRG

SEQ ID NO: 126678 - protein, 389 aa, Heterodera glycines
HLNSSVSFASMNPLRYRYPNNRGPYCFRIYGQIYHRMNLALNPEDGDDPAYGQIFIVDTEHAMRAMRHANVDIDPQLLRTAYEVIRNVNPFAEAYMMMKEEEDEEVERARNENREPAEIKLLFETGRQLDRRLGYNVPRANEVAAVYVPGADGEVPNAKIVVRERGKEFKILKSTDSMVTPMTYPLFYPRGTLGWHPEMKHRNSNRRVTRLQYVSYTVAIREREFNPILYGGKLFQQYCVDEYVKIEGDRMNWIKCNQKKILADAYKNDAMAVVRRFGKPDMFLTMTCNPHWDEISENLFHEQTSCKFFGEVIAWMYPVENQGRGLPHIHLLLTLTEQDKMINGEDVEKKGISARIPDKELETDLYALVKRFMIHGPCGDLNPNCPCME

SEQ ID NO: 126679 - protein, 49 aa, Heterodera glycines
MVRRAGDLTDAFVVEVGPGPGGITRAILEQPCKRLDVVEIDKQFLMPLQ

SEQ ID NO: 126680 - protein, 111 aa, Heterodera glycines
MLFLSFPSFVLRQIRPSFCRCFSFLLMLAMLFDLISIGRSLPLGSTNDRIYFSNALRDPKDIVLQLVTVPPPMFKFADFSNKFVRLEKRRRQFGPVQAKKYERNCKLLFFI

SEQ ID NO: 126681 - protein, 130 aa, Heterodera glycines
MASNFGTFLITFASLLFVIYVISPTVYALIIAQSLLIPQSSIIPQSTRNRSLIGRRHRWMTAEIYILVLHSFSSGWDRLKVDSVPFGQHQVKRHETREVPGFYFLAGGRKEYSPDRLANKKREKDIEWLS

SEQ ID NO: 126682 - protein, 30 aa, Heterodera glycines
DYFSKHLVDWGIIEDCGINRDWAIIRAYTV

SEQ ID NO: 126683 - protein, 80 aa, Heterodera glycines
MSDNRKEADEKMAKAIFISGDGWLSVFDLLAPSQLGLGIALISHRFDCYVDEQTQCQHIHQLINFFRRQTAEEKAHGNVN

SEQ ID NO: 126684 - protein, 46 aa, Heterodera glycines
VYESLECVHVFCARAHFVSAHHCVLVDTILRNAKAEELATIPFGGI

SEQ ID NO: 126685 - protein, 114 aa, Heterodera glycines
MDLLTALADKMKNEEQDEVGEEEEEDEFPHIANGTAAHLPTIIEDEAEDELNAMLAKARRLKQTETDKMHFVKSEQYNNDGTSSDDEETTPATLAGGHSTSVVFDSTSEKYKSI

SEQ ID NO: 126686 - protein, 100 aa, Heterodera glycines
NKFGGSVKPVLNVVHTAEPPPTYNRTNKFTSVFQGIVDSYGIASYLELNPAPYTIITFPFLFSIMFGDLGHGILMFFCGLFLVLREKNLEARQIKDEVKY

SEQ ID NO: 126687 - protein, 93 aa, Heterodera glycines
MNRRWICNDVWMDIFPSFDRPQLGLKLALLSPRFNALVDKHFDGKSELTIWRTIEIRRKDKGPGPKLSVQMDDKSLPDRPLPSKIRFKWLRIE

SEQ ID NO: 126688 - protein, 44 aa, Heterodera glycines
MSNEFCPSNWPILPTTVQPDSEQFKQNEAEMAESISESKMWSMR

SEQ ID NO: 126689 - protein, 210 aa, Heterodera glycines
YLRGEDIREAQKGINCLDWNFNDSSRLCAAYERNRGTDHAVVVYDLNRTTRNVREVPMSIFEANFAEKVLSVCWFSQLDPSQRKGLDIDGHSYGVHFYSLPGMSSLTSFDWHPTISDRLALLPAQEKPIAFAHSVASTKRIAIIKLRDDVNSVIGPSGDFCISAGPQLNFENGEKLLAKPNCTSDIDTETLFKRRVLVGYGYGNSLNALA

SEQ ID NO: 126690 - protein, 18 aa, Heterodera glycines
MRTRPIWQVKQRLLTSQK

SEQ ID NO: 126691 - protein, 182 aa, Heterodera glycines
VAYFTATVPYAIIVVLFLRGISLDGAQLGLDFYLFISLDGAQLGLDFYLFRPNFSVIFDPATWRAAATHVCFSLSVGFGGILSLSSFNSHSHNCFTDALIITAADGFMSVFGGTAVFSVLGFMAKQLDQPIDQVVQSGTGLAFVAYPEAMSRMPLSAMSRMPLSSLWSFLFFSMLFILGISS

SEQ ID NO: 126692 - protein, 25 aa, Heterodera glycines
MPAKLTYYQGTDLFLMRSNFAIQID

SEQ ID NO: 126693 - protein, 147 aa, Heterodera glycines
YIRECFRILIMNSLRRTIASFDQLKMIALIFIRSVRSQKTLDDFRRRSRPPFARNSVSSSPRPSDGSPLHQLRPMTPSLAHLADFRHPSSIDQHHNAQHSLGAAFSNFCAKISGGGKLKIRHNYGTSFRTSFAAGVDQYPPAFGTES

SEQ ID NO: 126694 - protein, 125 aa, Heterodera glycines
MKLIRGGLIESLMALESEFIFVPLLLQFWVDRQCTLNRTNSRTEAPNSVTAAQTVRSAKNAGRLPAPLAPSLRAEQCLLVAASVGRLTAAPTQAHDSVLGTFGGLSAPVQHRPAPQCAALTRSGV

SEQ ID NO: 126695 - protein, 70 aa, Heterodera glycines
MLQYLCCLKVEKDGQNSECRDRAFGYFKCRMDNGLMDRDEWPKLGFKDLAEQQQQRKAEEKAVVATELQR

SEQ ID NO: 126696 - protein, 51 aa, Heterodera glycines
LVIRCLLSAPRDGRSPIGEIKWGGGKGKGHFRSRPYTSGPPKDRPWSLKFK

SEQ ID NO: 126697 - protein, 70 aa, Heterodera glycines
AMPLNTLNLNIQRFRQGIHPPKEYDFGQSSARLSDNEQHAKDDDEEEDEKELKLVDNDAQLNTKSQTASK

SEQ ID NO: 126698 - protein, 24 aa, Heterodera glycines
MKTVCLTNYATYEVKQTIGDDSVY

SEQ ID NO: 126699 - protein, 54 aa, Heterodera glycines
PSTPSLKHYSRIDINIFFNDNKALRSEYNVNYSKKLVPYLIPNLMLSHFLSWKE

SEQ ID NO: 126700 - protein, 25 aa, Heterodera glycines
MEKACKIWRDYIDFSALEKASESLI

SEQ ID NO: 126701 - protein, 80 aa, Heterodera glycines
VFGAVPLNRCAQIYGETESFGNSFPIACTLILRWIYAPHNCLSTPNGHLKKSIFLFSGQSPRPDAPQIYGETESFGRASL

SEQ ID NO: 126702 - protein, 366 aa, Heterodera glycines
KILIFLRKKAKTRRFFNALLRSSHAISHCLLSQFILSEHGSLFCELVTLLRFYVRFEIDDVNGQQLTAAEVTKRHYDSIVTKRHYDSISDLQKATFKFLKDKLGEFCLLPIASVDTSKFLREHLGTLRLEELQHIAKYLRLIPDKNHDEINGDENLEELQHIAKYLRLIPDKNHDEINGDENDPTFDPTFLREAIIFQCERHPSQLQKLNAEPLYPTEAILWDEKSVPYEHYSVPYEHYDGKNVLPLNKLNLQFLTLHDYLLRNFNLFRMESIYEIRQDIEDVLFEIRQDIEDVLFRMKPWRHEFNEQEVVWGGWARMALPVGECRVVHVGKPMVGEVSSATSEDDAEFNYYYRSALSALSENLGN

SEQ ID NO: 126703 - protein, 159 aa, Heterodera glycines
MATNKTMSAQYVSVRLSRGQWSDRCRVRFMGGNITCPLCREKLQISQTAQTMTMANHLGVMAPPGGIVAPRVQVSGGTNEGQVRHGTVTADQHEVVIDIGTNANQNDGNTGGGTESQVPETPRHEATENTGGTMNHGTATPRHEATETRLNNGSENETK

SEQ ID NO: 126704 - protein, 144 aa, Heterodera glycines
MKDGEEELQWRREHEEMHRKHRGHDAMHAEMFIIFIVSMVVAQIILMLWKRRHFRSYQYFTHDGLPKRVLESDMCAVCGNNLHKPSSNQNNFNSLDEANGGVMTEAVELPEEKTYALACNHVFHEFCIRGWQRKGGPQEDVQEP

SEQ ID NO: 126705 - protein, 245 aa, Heterodera glycines
MNVLMRNVCDLVPEQLTPDVVSSRLVITRCEECSKCPQKLPSIQRMLSQISLDASIQSLLVILVKDFESARGIARLAQQDPTVKFVFLEDDDLDSPTVCELTDSNDGSSLKDADSLKSFSKTSVLFVSISFIILMVISLAWLVFYYVQRFRYAHAKDRLQRRLFNAAKKALARIPTRPVKAGDKELNSDCPVCIDPYRQGDICRQLPCRCLDTAVEGVGVREREFEIDLSRVSDVFLRVTNYVNR

SEQ ID NO: 126706 - protein, 76 aa, Heterodera glycines
YQKGRWRKNFFKIFPYILVISFCFWWGAWNSGIMRTRPIWQVKQRLLTSQKVRCRDETNQHCLPRGTRHGPPKEWI

SEQ ID NO: 126707 - protein, 83 aa, Heterodera glycines
GGGGGLRLLQFATGSSSVPYEGFRALRGSDGPKRFCIERWGEGESLPRAHTCFNRLDLPPYRDKSTLKSKLMAIYESSSYAIE

SEQ ID NO: 126708 - protein, 146 aa, Heterodera glycines
MAARPIKKANDWHLHANCAPFIAVSLRHGHYSTESAPSWLALAVGYGLVNALNSLHEKGFIHRFVTPWNFMVPMPFTMDNITKKMIIMDLSLAKRWDPNSDLCNTSPADCPAIDNVKEAFESALKRRDGDDWSIKPMPDWLEMPTE

SEQ ID NO: 126709 - protein, 437 aa, Heterodera glycines
LIHANHGSSAIDYLSDQLSRASTSAVRHGACLGLGLAALGTRNERVYEHLRDVLYQNEAVSGEAAGTAMGLVMAGSMNQMVLIVFYLVFEIDFLHLKRQAFDEMYQYILDTHHDKIQRGLRTGISMLAYGVAERAEDWIRLLYNSPYAIIRQTGVCMIALAYAGTGSASVIKRLLERVASDPNDEVKRFATIAIGFVLSNNPQQCLDYVELLTEHFNGHIRYGAAIALAISCAGTGYKEAIALLEPLLQAKENYVRQGALVSLAFVLIQQTTSTCPKVADFRKTLIKMFGAVVAQGILDAGGRNVTLSLHNQNNQNDMPSVLGIFVFLQHWHWHSMTHFISLALRPTCVIGLNKDLKMPKMDFRCNAKQSMFAYPQPIEEKRKEGMEKVETAVLSTTKKKPNLEKKAEDADGKAEEKMEVDQKSEEKSNNNIIQLKI

SEQ ID NO: 126710 - protein, 123 aa, Heterodera glycines
MALFHRIGVKTKLGTVAVPLYQTVVRPFGIPTLSSYVTSLFTPLNGGHKMNFVERFVNFINDLYDWLYLNNVMASYEEPVIAEAFGQNFPPLKQIMRNVSLLFTNSNEVGQNIMPKMIGKIHF

SEQ ID NO: 126711 - protein, 50 aa, Heterodera glycines
MCKMDVENSNNSPNIVGVKEWSMCKESIKDLLGPNFTTYFILNFYDLNSE

SEQ ID NO: 126712 - protein, 186 aa, Heterodera glycines
MTSPFIGLYSFLFIRAESIHKKKRKGEEQKAKRKRRGRGGRERGRGTEEEEEQKAKRKRRGRGGRERGRGTEEEEEQKAKRKRRGRGGRERGRGTEEEEEQKANGNKRLRGREWRNGNRTERVEGEEKREDRDDQKEERMKDQNDDIPGDKSFNLTSYKYEPSICLTKLATINLIVVLRMDTKTLG

SEQ ID NO: 126713 - protein, 55 aa, Heterodera glycines
QLPPALLHSASVHSIGKVISDQRPFRMAFRCPFEFFAFSPFIFPFALVPPLSFCA

SEQ ID NO: 126714 - protein, 206 aa, Heterodera glycines
PGLYSHLNTGITRINKTENGKEIGANCQCSADQLPLFTIDRLALHDGSDPSKPIYLAILGRVFDVEKGRRHYGIGGTYNFFAGRDATVSFVSGDFSPSGDCSDRDATVSFVSGDFSPSGDCSDANELSESELLSVFDWVAFYEREYRLVGLLDGEYFDAKGRPTEKMQRVEKTENGKLREWKPFGERTHGKSEAEESGRTQRTVAA

SEQ ID NO: 126715 - protein, 165 aa, Heterodera glycines
MLNHSLNELQEALSSAAFLDDFMPLVLAFEFGATFCTENGGTTKLFKEKCLSQSLVATKTKAPFVGPTKFHRTTTTFGIVPTTEQTFGFVPLVRHVDHFGTNCTNIFFPTEVDKFLLNITITPYDIGCKKYQRPLKMNDPEGPPSEKHRYFDACNKVPTEEKCGK

SEQ ID NO: 126716 - protein, 34 aa, Heterodera glycines
MARKQSNRRNMPKTLGRNFGAMALAPCLMTMNRK

SEQ ID NO: 126717 - protein, 100 aa, Heterodera glycines
MAKRKSKRKAPTKAKSIVALETQFNCPFCNHENVCEVKMKYVILHVYFNTQLMQFRDRERNVGFIQCRVCMEDFQSNITALSEPIDVYSDWIDACEAANQ

SEQ ID NO: 126718 - protein, 146 aa, Heterodera glycines
MYGIFQGPHIYEADAPPGWLEAGGAAAATCRTESGSKAAATRDEQSACGTAQRMLLLACSAAAVCAAAHAALRNASADYLPLLPLLALVSSIGIVCSVIVWLCRLRVDYGSTATDCGQYYYSQQQIGRHPLEGKWLPIGAKNFLIH

SEQ ID NO: 126719 - protein, 190 aa, Heterodera glycines
LVAILVLHRLFLVTPLPSALGVILVLHRLNRLELAITLETRPYNQGSRLTAFELQQSGVPFRLIADSAAASAMRHFGVDVVLVGDQVARNGDTANKIGTYALAVLAHYHRVPFFVVTPMASVNGRIASGCEIPIEERPAQELTQWHGVPICPSDCSVWNPAFDVTPAELITKILTEKGNFSPTELTDQFS

SEQ ID NO: 126720 - protein, 160 aa, Heterodera glycines
MVVTSPLGVGAVSLPSENVGQTALLPPSDDDVPQQNGPPLIRPSSAVDRHRPLRLDHPPISVPSAPSLPFPSARAIEAFFRRGSAIGTAGSLPSPPTRNVPPPFNLGGLFMLNGGSSTGGSDGGTGEEEKKMAETEEEEAEGEEEEQRKDEEEKRREDDE

SEQ ID NO: 126721 - protein, 157 aa, Heterodera glycines
VNNNRNCQILKAVAAAAGCKTEHILDMDMFLYDTQPATLSGLNTLSGLNEEFISGARLDNLVSTYTAIKGLVESLEDTDAFDTDPNVRMVACFDNEEVGSRSAQGAQSHCFEWLLRRVLSSVDHPTAFECSLGRSFMVSADQAHSVHPNYAHKHEVN

SEQ ID NO: 126722 - protein, 93 aa, Heterodera glycines
MTTSSSPAAFRSSALAFLQFLNKSVTPFHAVESVEAILKSANFVQKSEYDKLQIQPKDRFYVKKSETSIFAFAAGGAFKPSEAGVSIVVAHTD

SEQ ID NO: 126723 - protein, 209 aa, Heterodera glycines
MTTKEDLKNILEAQQKQFLDLISKILPQNTAPSASSSDLFSQINSQLPQFHYDPEADETFSLWWDRFGQFVEKDGKDLTGDMKVRLILGKLSATDYLRRFECFQLSCGPSQNVMEFGAMVNARCERADMTLSKEEVKCLIFITGLSDAHKELRQECLRQMEKARKSTPPRSMTLEALLEECRSIQSLQNSAAALSGPGQIHSVQVRPQR

SEQ ID NO: 126724 - protein, 325 aa, Heterodera glycines
LAVNANFSYTWRMCGCFQPWAVGYATQLVLTENVDALIGPPCAIAAGYVASFYNIPLYLWGATVASEFYNTTVYPTLNNVNVNSDMLALALQSVLVQFNWTEVSFVYTPDNERMVCNSVKQSLTNVLNVTNVTIVFQHQMESNVDSMKATLRNLRNRSRIVLSCFDVEVDRRNFLLSIFDTGLAADNEFVFIMGSLRNQGMLQQVSSSEDGSVKYANIWVDKNSPSDGRDSDALAATKHVIMIDLENQSSDQIDEFNRNLTTKFGTYPFLCNGSCMGDAGEQSVAIYRIKIKITKHLIVIFYPSQYARALFDTTYAYFRALNRTM

SEQ ID NO: 126725 - protein, 360 aa, Heterodera glycines
LAVNANFSYTWRMCGCFQPWAVGYATQLVLTENVDALIGPPCAIAAGYVASFYNAIAAGYVASFYNIPLYLWGATVASEFYNTTVYPTLNNVNVNSDMLALALQSVLVQFNWTEVSFVYTPDNERMVCNSVKQSLTNVLVCNSVKQSLTNVLNVTNVTIVFQHQMESNVDSMKATLRNLRNRSRIVLSCFDVEVDRVLSCFDVEVDRRNFLLSIFDTGLAADNEFVFIMGSLRNQGMLQQVSSSEDGSVKYANIWVDKNSPSDGRDSDALAATKHVIMIDLENQSSDQIDEFNRNLTTKFGTYPFLCNGSCMGDAGEQSPSQYARALFDTTYAYFRAPSQYARALFDTTYAYFRALNRTM

SEQ ID NO: 126726 - protein, 193 aa, Heterodera glycines
MDSNRSSSLRANKSEQQMECRNWARKSPLEINNNGINDFDIRWINRTDSLNMLGAGAMGCFFYGAEEETEDSGGTLRIPCADGEENNSQENSRSASSLNLSASAVSTAPLAAATTPTATAAPGAGACIVEALVECHAEAGAEELSANADDNDGPSTQQQITLTALGAPTATKPDNGDDTSTEEEETAAPDDGK

SEQ ID NO: 126727 - protein, 263 aa, Heterodera glycines
TQLSDFPIAGTQPTSISLDSIHQHSNHWDSIHQHSNQRDSTHQHSNHWDSIHQHSIQRDSTHQHSIQRDSTHQHFNLWDSNLRHSKQWTQISGILNTGTQPTNFNGTQSTSISITGTQSTNIPINGTQSTSISITGTQSTNIPIIGTQPTSIPITGTQFSYISITGTQSTNIPITGTQFSYISITGTQSTNIPFNGTQPTSIPITGTQPTNIPITGTQSTNIPFNGTQPTNIPFNGTQPTNISISGTQPTNFNGTQSTSISIT

SEQ ID NO: 126728 - protein, 68 aa, Heterodera glycines
IRRGTTVIRRGTTVIRRDTTVIRRGTKVTKRGTTVIKRGTKVIRRGTSTKAIRKGTTVIKRGTKVIRR

SEQ ID NO: 126729 - protein, 76 aa, Heterodera glycines
MTSCAILKIKDIGNASKPNEEPLAQIVHWYWDKNGAQQINDTHTLNKGSEINCACANASSIVIRILKKREKKPDEK

SEQ ID NO: 126730 - protein, 51 aa, Heterodera glycines
MLLKLADYFQNYFLHFDVNKFRAFFNANHEQFLPVISKEFLYALSVRLSEQ

SEQ ID NO: 126731 - protein, 34 aa, Heterodera glycines
MTLVANRHKTRPSIAKLKYLAISLFGTGMGLIEK

SEQ ID NO: 126732 - protein, 70 aa, Heterodera glycines
MTILKGQGQTISTVGIDLERDVFSHGQLYTAFSRATDGNNVRVYAPRRETDGQGGVKVLNIVATKMLKLQ

SEQ ID NO: 126733 - protein, 229 aa, Heterodera glycines
NLKLLAFLLNRLILAPHIDTCDEINEIMMANVPGQVREYLSSDKPLDERPLDIDEIESEVAALNRRTDSGMPPHRLRLKVGSVVVLLINKSDKEGLINGTRIVLEELGDDRLVGRVINSNAVGGQVKLNEHAMSTRTKRLAIKYERLQFPIKPAFAMTILKGQGQTISTVGIDLERDVFSHGQLYTAFSRATDGNNVRVRSQKGDRCTRQSQSAEYCCNENAQFAIKQT

SEQ ID NO: 126734 - protein, 255 aa, Heterodera glycines
MQQNRRPSNSFWPRRSTGANNCPQCSIEGTKGTKKCANHCRSSPSYGNGHCVPLPTVIVLETVQHPSKMPSELHFMVWQQQGGALQKGLNTTMDTFTQKELDHGFVRFEIDEAKGVPDTKMGFHFLLNDGRHQLGPEFFLLQFDEILPSKKEDGTMPTQSTLSSTPTIHLPVPSVAIGPKIERNAKLGTAPGVPAVIGPNLLKATGGGKIPVEKVIFHLTKQPMHGRLVNGFPRTARDCCPLLFSCSTAPWGGWS

SEQ ID NO: 126735 - protein, 434 aa, Heterodera glycines
MPSKQEKLRKKEQERYQRRTEKSVSRDNSPVPDGSADGNGEASASLQGTSTPSLSALQISTPASSIGSKKRGRPLRAGAKPILATQETVSAIDTPRAAFTQSDQGSPCKKIGKVAECDQPTFANEAIASTPVSTQSRRGRPVKQLGGHAGKGRGKTNESMSKCSEMDQSVENALSPAPSHIVFEKIDFSTVQINFATSRNFACKIWRWAAIGLYERDGETALGPRSGPRFIETCWNRPNEWLNDSFIVAYLAYIASISQRKTVVVDSLASRTDVSRFSNVKNYTFGYDPNAVPEVVLMPLHFPNHWTLIVYDVAHGAYFVDSLHMSSLSDERMALIQSIIAEIVPGSPSLAVEYVQQLTKQNDGNSCGYFVCLYAESWLMNNCTFVLPDLNINYEKKRILWHINELYGSDIVPFHPRGRVFHIFRSCVSSQWGM

SEQ ID NO: 126736 - protein, 104 aa, Heterodera glycines
MIFGQTQTNWRSCESLSDRSDGGRFSMRGTHNQSTKGQPKASAAKAVVQQQSPEMVAWLRRKEYDPRKAAADQSQREAQQRQQQCVEFAPTDGGRIDAKVPQVD

SEQ ID NO: 126737 - protein, 132 aa, Heterodera glycines
RLLLSPSDAFPPKFCPFDRSFRPRFCPCDYKYNHSLFASDKTSSSNWLQWALFICPHRRRKRRRIRNYRRRGQRRTEPFFEGKPMTDEQSMGRKQTTVKMVSLYKIVKLKNRKSHESFKIFLLISKLCGEMV

SEQ ID NO: 126738 - protein, 188 aa, Heterodera glycines
MFKSQFHHLALAFFCATVNGFELLCQKDLVSTQKVLLDSALSVNFSIEDKFFENWLHEYATEVFCCEKFGENFDDFDFDINHLLEDAQKLRNSFCLELNKSKHLEVAAKNVAHLTQKLTNELKKDQKIRQKIQNTVKNNGKEGDKKLELSEIRKMKKEFEDNFSSENMKKLTNGFYFSLNELFNSMES

SEQ ID NO: 126739 - protein, 37 aa, Heterodera glycines
CKAGTGNGLYPSPPPHFISPIGLLPSRGALKRQRITS

SEQ ID NO: 126740 - protein, 383 aa, Heterodera glycines
MDGKPLIKCVAIKSVILEFDNATPEIIQGFEKEEHFLMMFRNNAKIKHIVHLHYMKKDYAKNRLIIILELGRHDLTKRIKLMRDQWKMYWGSTAVSIDRQIIKVLRQVLAAVNEMHGKTIHLDFKADNLLFVEEFNASGRKIGEVLKVIDFGGSEIIDPLAEKSNEASAVANVCRVRTSMWSDDRYSSPEQNVTCAEQSTDTIEYTVSTKSDIWSIGVMLVEFLLMTPHFPEIDPIAERGSDDANNIYNIVIGINHFHYSPADKTNAVNKQATDYMHKIQKLFPMLSSIIKACLVINPKQRPTAKGILQFLDGKCQFGEFENEKADHYQFDGKQYGQELERRKKRSVSSMLDGQKFSLFSHEILESPPEIKFCDIGNLNGTNN

SEQ ID NO: 126741 - protein, 252 aa, Heterodera glycines
MHSFLVLTILFANLATNAFGQQWPKATSEETVKATIKVSGGVKDFGFKRLTASSALGSGDQSEGQKALIRAEKNAVIKNLIIGQNGADGIHCYDGCTLQNVWWEKVGEDAATFRSSSGCKEYSFTVTGGGVKNAKDKVFQMNGGGTLTIKNFVAEGIGKLARACGNCKTQCQKRKFVLENIKVTGLKTLLCGLNENYGDVATIKNVQITGSKKVCAEFQGNNQQKEPPMLRSFDVGSKGDGKNCIISGTTSG

SEQ ID NO: 126742 - protein, 70 aa, Heterodera glycines
ASALLIIVAASLVLPQCAAVGGMAELKALTGDAPYLGTGNQEQAPEFFGEALSRQYYQNPAYRYNDWYGT

SEQ ID NO: 126743 - protein, 76 aa, Heterodera glycines
MEIPLPLEPRRRRLFEHFTSGKIALNDDQLNKLSQDSFGFSATQILATVNRAGAQAILDRVPLTFSYFDKALVKIC

SEQ ID NO: 126744 - protein, 99 aa, Heterodera glycines
MAKSDKSRKMTEWKCNCSETIHQNEKGGNVRGLVSDCCCKIKTQNDGPAGHHTVKGQQLLAKQCWDTVTVTGREKPQNVLNMAYLKNYSIIFSIEFKTG

SEQ ID NO: 126745 - protein, 182 aa, Heterodera glycines
MANVICHCFGAALAQAQKLSTDSAFLDKEDKVLKKPIVVKGVQLVDGKMDFAIVQLNTANLANRKGVKNMVWIKPGLPFYKTKPMHENLKAIEGLNSETVRKKALIPLLQMWYERLPMIIAAVSIPAFCTSDYYPLHWYGTNGCKHHRVLKGHEQSALLIRDRELTGYEYNLMGIDSIPEED

SEQ ID NO: 126746 - protein, 74 aa, Heterodera glycines
MSIYHNNHHLTEDSQKYRFLIDKNGEIWTVLLLFMRIDPSLAGVFSFIASNELGYDENSIFMRIDEAANQNIAQ

SEQ ID NO: 126747 - protein, 136 aa, Heterodera glycines
MDSLEFTKASMDMNCSHNRSPLGTQYLNVDIDIEAGQETSSTDGIIGLESIEYAESESSVALIEEDYMDVDVEIVDFEKEEDTGAILSTVVPPKYQNIVERVRIQPKMDAISRLLEDEVIAEAEEGGDMGNKHPIN

SEQ ID NO: 126748 - protein, 59 aa, Heterodera glycines
MASDGQAMAKWLFTPLPDDVPKVFNCGLKEYDESWPLKIEAFKAINGNAKSTWQKFKHG

SEQ ID NO: 126749 - protein, 307 aa, Heterodera glycines
WSRWSGALPVPYRLTGSLLVRLDVWTRTEYRPIRNFVAVMRGREEPDRWVMGSIDPGTGTSTMMEMARVLSKYSAMTGWKPRRTIAFCQWDAEEFGLIGSTEWVEQNLHLIQKRAIAYVNVDNLNGNNSLVVKSVPLLYRLIAEAASKVEQPVKSELKSGRNTLLDSWQFHNPRPTLPGDRSVPHILPPHSGSDFQPFIAFAGVPVADLRMESAPQYSYMLYHTAYEVPWLNDNFVDPEGDASVAMGQLWLEIARNLADNMVKADQMIGIDSAMDVQIYNERIGFLNDSIRRFQEKAVKFQRLIHVL

SEQ ID NO: 126750 - protein, 125 aa, Heterodera glycines
MEFFFFDPVKFVRFYNCSSYDVSMVQLDRRQKPLVGALTVALGTILTVFVPDLAVPTFPFKCLYLPCLFALSRPKLIRQSCYQLMFFLGLVNVTELCTTAICTGAFAIFGTVFCSQPTFMFWHDG

SEQ ID NO: 126751 - protein, 177 aa, Heterodera glycines
MSEIASKFSAAEIVPQILPEAPQQKLNVFDGIPVEPGKEFSVRNLKNAPRVTLNVDPESTFSLVMIDPDNLSRKNPDNLSRKNPSVAEWLHWLVVNIASNILEGINGGQHQQPYGSPAPQPRTGEHRYVIVLFEHQGKRLAVPKFNTRAKFSLKQFIEKHKLGAPLAGNYFIAKNDQ

SEQ ID NO: 126752 - protein, 21 aa, Heterodera glycines
MRTRPIWQVKQRLLTSQKKGF

SEQ ID NO: 126753 - protein, 198 aa, Heterodera glycines
MATIDLFSGFPFFTPELCHRLKEEVPKKVATVAVDIFSPTPTPTLALNSAIQQQQNTSALAPSPVRFVFTSAPSSVPSSSVPFPMVRPPLTLPNCLWPFMNCQAFGWTAEAEGQKQKSEEKKHWGEEEEKGQKVRGERKTDQSAGRTDRREEASETEPGTPDNPGEEIEVDVESVEKTSDETQREGAKEEQDSGVSWK

SEQ ID NO: 126754 - protein, 316 aa, Heterodera glycines
MPIYCTFDNKNRKWKWPRKGPHKVIGRIYTINPKNKELYYLRYLLLNKHAKSFNDLKVVNGFKYNTYAEACLALGLTRDDLEWDKCLNEASQFKFPKGLRSLFANILINCEPKNPKLLWEKYKDELSYDLKKLYTQNDAYQMALLLIEQNLSNHEKSLKDFEGMPKINETIKNISEYQIINPKDELNLALNKFSLMNKEQKEIFENIKTIFEHPTENQTKCFYIDGPGGTGKSFVQTAIFHLARGFNKKVTNMAFSGIAATVLKNGRTVHNRFKLPLDLNGNSSSLIENNSKEANEIRETDVFILDEAPMAPKYVI

SEQ ID NO: 126755 - protein, 116 aa, Heterodera glycines
MMYRNAKDCAFYTCYKSRNDRDKGYIKGVKGPFDWYIVSKMQKPIIVNIIALANLGTGIKLNSLTITECEFKYNPRKFNAAVIKCTRPIKATALLWGSGKMICLGTKSLIDCENAI

SEQ ID NO: 126756 - protein, 101 aa, Heterodera glycines
MAQPYGMGMPSTMACQNWAPIAYHQPDHYHQQQYYGEFWHHQQNPGICATNSNLSQLIWPTTAMAPTVPSASTTTFSGQMPMVKQCKRRATLASVSTSAVP

SEQ ID NO: 126757 - protein, 87 aa, Heterodera glycines
MHQRRPPRKLNKCMLANNNLDEFRTEVMRRSAIVEEERDEFEQTLDQIMDTYSPAVRFIEPFTGCVTCRLPISNIFGLRAPIECQNF

SEQ ID NO: 126758 - protein, 219 aa, Heterodera glycines
YSADSSFTNSNTSISAKWGFDAVSGASNQYTLSNNADIAPGATNSNGGLNIQGTNPNGPPATPTLQLIEAKYYSNVIGGGHQSICMGCLASSGTSGPIDSYIGKSISNSVFTFYGGGGRGACGLDSGVPKMSAAGSGKLFKSDGQWKDACRADKQYMLDDPICKDICIKIDYNGKSLTVPINNKCPECDVNHVDLTIDAFNYLEPRGGEVGKATGQRIC

SEQ ID NO: 126759 - protein, 391 aa, Heterodera glycines
MSKIVFACTLQIALFFVWTQKNGAPNPSRLSSSEDGLLVDGMHKLFKNDSSNAKQQNRDKHVNANDDDDDNDNDDDQHRPPIECIVCADSFTNDQLCFCDVAADHADASSSSSSSSSSTAACRQAQEKHAFCIECLHEYTKAAHEMVPFAPSGLGLKCMALECENPITWKKIKELLPNDNHRSIETLENHCDFMRMTIAGNCCKKYCPCCNCAIEMDNSVDKSRPFQCPKCGKDLCRKCNVPWNNKHKKATFCEIQNNCGEEKRIICEDNATKCQLCGKCTLYGNVKDPSSSTNMDIPSTSTKGRKGKEKAAEVISDDLAQKLKEMRLKMEESLSEVTLHQCACRNEYFIKEEGPTYVNCPACEKLYCFCCRKSKVTSFKDHFCGCKKILN

SEQ ID NO: 126760 - protein, 269 aa, Heterodera glycines
SGFVFNGFANWTTMDGRHSYQGRHSYQRMFGDQQDGEFLNGARIDWVLSQEQVDRVMAFTLPLHTCINYPLDERFLEYSHDYVHYFISGDMQVHYFISGDMQERFSSSNDPIFFMHHGFIDWIWEEWRQTKQNRLQRERDYPRDDADCMPEWHFSYAYMPLLQPLRNMDALSNNYTDHMYEYAPRPSCAKSGKSSECGNTELFCLVRPNSPGPPVCSSKVKPGGNCKGFEEWEICYKGKCVGGRCSKQRKRLTDGTKLAFNPRILPFAS

SEQ ID NO: 126761 - protein, 31 aa, Heterodera glycines
MGSKNPTQNYSTDYREAIPEGFGLPINLGAS

SEQ ID NO: 126762 - protein, 41 aa, Heterodera glycines
MYNSPPPPIRWQMLIYACVLNQLDIALTVAASLSVQSPFTN

SEQ ID NO: 126763 - protein, 175 aa, Heterodera glycines
TEAVPTRTAHLPKSDGNPRKIGRKPNHNHCGGHGLRQKHTALAQRVACELLKQFDSHIAYQTRFDKTKTSATRMLFLTEGVLLRQMVDDPGLQRYDVVILDELVLMSATINIDLFQGYFPEAPVISVPGRLYPIELRYMPPLIREVDTSKRAVRIDPGPFVNILQLIDKKYPSTE

SEQ ID NO: 126764 - protein, 575 aa, Heterodera glycines
MESYRFVAFDLETMQHLPVDPRVPERRNHEPNFIAAKVICPMCIENGSWKQGTAGCWVCGPHRTVAFCQRPFNGTSVDKQVVTDNPMQAFVGWLINDLPKKANTYAYSHFGGRFDMVITFRELFRRGFNPEMIRRGNKMYEMKLKAQKNKNPNIIFRDSFNLMPCALGQLVPAYGLDVEEKPFFPHMANRPDNYGREIFPTPEDYLAQGMMPEKRRQFDQWYEQHRREPFLLDEALASYCTNDVEILMAALVAFRREFLEITKRQEYVDGVDNRENHDGIDVLKQCMTIASACMKHFRINHLPANHLAIVPERGYDNAQNQSLLALRFFKWYAEKHGVQLQTAHTAGGEKRVANYSLDGWIESEKRGIEVNGCVWHGCRKCFPEDNMLLPNGKSAGEVRERDAKRLEFLRNQVGRVDVYWECEIERMLTTDPEMRQAFAGYVDDGPLEIRAAFMGGRTGPLKLYHKAREGEKISYFDFTSLYPFINFTTRYPVGHPKVHVLNEDVEWKCAADNPYDLSLLKVWVVPPRRCDVPVLPVKVDERLCFPLCFKCAKDYPTGGVDNEYNCRHTDEQRGW

SEQ ID NO: 126765 - protein, 593 aa, Heterodera glycines
MKKQLKQFRNEKDSKIISRGQNSVNKFIRNKLSKFFEIPTLIDNAGNMFSSNVQKCKILAEIFQKSFLRKSIVNGPQTQSTQNKTKLFDIELNAGIIWNILRRLPRSNSTSPDNIPYILLKNCAEPITKILADIFRLILDSGQIPEIWRTSLVVPIFKKGEKTDPLNYRPVSLTSTVCRVFERILSSKILEFLNSTRFFDKEQFGFLKNRSTTTQILKTMDDIYNSLQKDQQIDIIYIDFVKAFDSVPIDLLLQKIKKIGIEGKIQNFLTNFLKNRRFKVKIGEELSESFRIFSGVPQGSVLGPLLFLIFINDLPSFITNEAASVGIKMYADDVKLYYAHENDDHSNQLDKEIEALEKWSKINGLEISTEKCFVLYLGKNNMKKEYFINSKKISESDNVRDLGIIIESKLNFSEHISKIIRNAYLRSFQILRVLKSREIKTLTAAYKTFVRPQLEYATEVWNPNLKKDIDKIERVQKFFTRKAFRKCGFVYKKYMERLKITSLHKLEERRKINDLTTAFKIIKGFTSLDTGKSFVFSERSRRPLLLRVKRHTAKTQNNFFHRIVRNWNNLPVLAVQINKAKEFRGLLKAMSSE

SEQ ID NO: 126766 - protein, 128 aa, Heterodera glycines
MICTLLRLYRNVLEFGPLYVNHAIPRMLSVWLDLAPKCAIAEAIASGTGTTVGGTARTSASKRGGKAAAAAAAAAAVATQPHDPNREMRDAFKRLDRAYFFSSYSQMISRITHSDAATYALLKVQRGK

SEQ ID NO: 126767 - protein, 136 aa, Heterodera glycines
MRKKGPLMTPTELQRLLGDQTSRGDRLKAFREVCARHPLAMAQWIRTTFLDACSWYNARLAFTRTAATMSMVGFLLGLGDRHGENMLLDIVPFRLTRNMVDGFGATGVEGTFRKSCEKALKVGTWMDGFIRQSLSN

SEQ ID NO: 126768 - protein, 102 aa, Heterodera glycines
KPFQDLIHVDFNILFDKGEYLKVPEIVPFRLTRNMVDGFGATGVEGTFRKSCEKALKVMRAESRMLRTVLHAFAHDPLLEWTTTEARNQQYRQVRLVARAVY

SEQ ID NO: 126769 - protein, 151 aa, Heterodera glycines
MYQICIKTFHGNSVLKVQQRHADEMRSELQMEQNEPEADNGRAADTLSAFGDDEQHLEILNIVGTVEAFSVEHLNAIHAHIMEGHPSAGEIRTVDVNIIDRDGNVIYRPPPHSHVLQLMSDFCANLNEAMKSVKKRRMEALAVAGGPTTNW

SEQ ID NO: 126770 - protein, 32 aa, Heterodera glycines
MPTFIFFKNGQKLQTIEGNNYESLRKTVENNK

SEQ ID NO: 126771 - protein, 128 aa, Heterodera glycines
MAETANLRETTIFSRMVSMRMRRRKPREWTNQSKGRPMSERRPNNGSVSRRGHSLDGKPSKNGAECPLAADECAAEENGAATEEIRIRRKDLNFEEPLLLAVKEGGRWTSDKSIEPPTSITLMALISR

SEQ ID NO: 126772 - protein, 492 aa, Heterodera glycines
LWDCFLYEGPKVLFRFAIALLGFHEEELLAHSDTISVIKMLKAAVRLTFDVDGLIKFAFEQIKFAFEQLSPFPSKAYLRQRQSLYLRVLQEQLFKRQQLRQLLNITVNCVATINWVNVVVFSQFVPGRGYVCAGNQKRGKLSMIQLHQETASLDTLELEFDCRLISMVLFNSFDCRLISMVLFNSEMAFVSLLSGYVIALHLNESGEAEILWELKLNDVALKLVNCPQRLYSVNCPQRLYSCLANGTLAVLENAFERMPSALDLYHIPIAAAPITDALLDDDKLYLAVACKIVVLNRSTLSTVASVYVASASVGSQVPMFEKIRNLAPSPFGIWLLTAHSSLIQKIRNLAPSPFGIWLLTAHSSLIQLWRDGQCEMLFDIRYDHSHRSLRLALSADPTDFPFRKPSFDEDDDKLEQVELCSILFHLDELWVGTVDGRSFFPNSSVVFPPPVHPFRLFNALSRPCSRQTIANRPKRVLPSVDSTRKASLSSTW

SEQ ID NO: 126773 - protein, 16 aa, Heterodera glycines
EAIPEGFGLPINLGAS

SEQ ID NO: 126774 - protein, 371 aa, Heterodera glycines
LNPLHTDALDSSNVDDSSVTDDKSSDVDDSSVTDDKPSDVDNSSVTDDKSSNVDDCSVTDDKSSNVDDCSVTDDKSSNVDDSSVTDDKSSNVDDCSVTDDKSSNVDDCSVTDDKSSNVDDSSVTDDKSSNVDDSSVTDDKSSDVDDSSVTDDKSSNVDDCSVTDDKSSNVDDCSVTDDKPSDVDDSSVTDDKPSDVDNSSVTDDKSSNVDDCSVTDDKSSNVDDSSVTDDKSSNVDDCSVTDDKPSDVDDSSVTDDKPSDVDNSSVTDDKSSNVDDCSVTDDKSSNVDDCSVTDDKSSNVDDSSVTDDKSSNVDDCSVTDDKSSNVDDSSVTDDKSSNVDESSVTDDKSSNVDDCSVTDDKPFNVDRLLRE

SEQ ID NO: 126775 - protein, 263 aa, Heterodera glycines
MACGDGDQPEEWRMEKPNNKSEGLQQPLPIPQHVHQVPGWPPNRGAIRQESGLALPGTYSSGYPAPCREVGIDEEERERRQQDYINKPWEGNKVCLDANNITPNPGLRYLSKLCLNSLWGRFALRNRLTKTEIVECHAELAKLLNNTKIEISSIDQLTEKFWMVCYKACDEDVVEHGTSNDTDSIFYDFKSELSDPLPGGQQLGELTDEYPNHTIMEFVCAGPKAYGLRNNATGEDEYKVKLRGITLDSDACERMTFEKMKDM

SEQ ID NO: 126776 - protein, 125 aa, Heterodera glycines
MPYYVLMLCLMFHTVFMEFILPKFSIFYKTEMNQIVPILKNEINKMFRNKDWDYATFDCMHTIEWNLLRIDLAKMGQTQKEMEKLLKEWRILYNNWVLNKSEMNRPNFAKIMQKIVQNLEMMSIK

SEQ ID NO: 126777 - protein, 230 aa, Heterodera glycines
MPTKVNSQLFKLLFSLAIRLSAQMESERLAEKYVNLFISVNKCISISADDITDYCLLQTQIKINQKIIEIELPNWKDNLLFARSLGMLQREQIKSGKLILIFKSFLNKENFDFLCLLSDYSPTIYEIIQMLKIVGEANNAHFWVEPSAPQIFLRILNFSMSTEISDDKVKVPIRKSEFCVLVNFSNDLLERIMKNRKNQNILFNGVEPIEVTISKFELIKQELCSDTEHS

SEQ ID NO: 126778 - protein, 42 aa, Heterodera glycines
MSWPDLVNNNLIAGCCARLWTSFRRRKVRKSAKFGVGQWAPT

SEQ ID NO: 126779 - protein, 74 aa, Heterodera glycines
MHQSLPLFLPLFIFFVYTTDCLNGLNCQQGAEIKPNGQKFNNTDPKCPQKGAKYCVTSICTTGQPARPIKWGGE

SEQ ID NO: 126780 - protein, 107 aa, Heterodera glycines
MANPIATKKQKGAFNCRHPSIFHFIDVLRREQKTTDVKYASFIAGEEPPPKKRKFLATDERILNLVRLYVPMNAGNINHDHNYHNRNQFHIILEFLRGISRNYRMNP

SEQ ID NO: 126781 - protein, 119 aa, Heterodera glycines
PNCNQKTKSKIVLRRPPLHFAKMSSDGMTKFWRCEFKNSTDKCNGRIWTDLHDQFIRLATPHTCPADASRVDAQMVTTAIKRRAIATFEPPSVIRAEALQNVPSPSAILVSKQAAKDVK

SEQ ID NO: 126782 - protein, 125 aa, Heterodera glycines
MTSHFLVGAAAFGAGICFAKTYMEKPKSEDDKEAPKKEEATTGGDAEEKAKKKDKKGDGAAAADKKEEKRKDKHKSKEGKSDDSNRRSKKDKHGKKDKKDKKKDAAEPAANAGEQSTAETTQADE

SEQ ID NO: 126783 - protein, 23 aa, Heterodera glycines
MGDLQSEKGGKTGKRQKKIIQIV

SEQ ID NO: 126784 - protein, 218 aa, Heterodera glycines
MREALATRIQLPESRIQVGMGLNQQIVSMFRSGSRTDVPNFGVPFPRNRIAIELFSANKKSEEIAHKIHQLASAKFPSGNANDSPPPAEPTVAKNESLKRAQMETAITLSTASGEQPASEAEEAKMAEPTADDFGTMFAPSALKLEPQTTHAIASASLPVSVDRTTMASTLWDGNGLAAVESTNHLTTGGANGTAMDWLAAAQWHKQQQQQNTQYQLS

SEQ ID NO: 126785 - protein, 172 aa, Heterodera glycines
MPFDPDRYGCWRNVTKPCSCPCSKLRAIKFCRIECDFMDREAKEWGNAGRVAAGVGSLGLAFIPIVGPFLAVGAIAAQAKNWGEDMTHTALEVHFKCEQCGQIAYKTYEILRENITSNRWGRYTNTYGGEQICGIDTTAFDEIEQVFRGMPKAYNFAYNNCKDWTSEMTRRL

SEQ ID NO: 126786 - protein, 40 aa, Heterodera glycines
MGRTDPLRLQKFGFLITKVDINLNQSLTELEQAENLILRT

SEQ ID NO: 126787 - protein, 543 aa, Heterodera glycines
NKKYSRKEIKLRDKTRLSYLRKYFKPLEDPPVIQYNTSFISDSISKAEIFAKFFSENYIVNNYSLDFDNSCSSSTINDVEFNIVSVGKVLRTLPNRNNTSPDGITFRLLKNCFLSFTPFVTEIFRLSLDTGKLPTIWKQSIIIPLHKQGDKSNPMNYRPIALTCSLCKIMEKFICWTISDFLLKKFLEHQFGFIRGRSTTTQLISTLENWYDGIYNNKNIDCVYIDFRKAFDVIPHNLLLYKVHKIGIRGKILNWISDFLSSRTFRVRVDSTLSSEYKMSSGVPQGSVLGPLLFLIYINDLPELIPKQISIKLYADDVKLYSDDRIVMHHALNILSDWYKKWYIKISINITFIIYFGKNNPREQYKNNDNAICEVETIRDLGILIDNKFTFSEYISKITRNAYYRMRLLFRVIKSKKIAIWKNIYDSYIRSLLEYTPESWNPQLKSHIIKIEKCQKYFTRIAFRKCCLPNIPYDQRLRFFKLATLEKRRKIFDLLTTYKILHGFTHLDHNLNTRNKSFFRLNVKLQSKKSNESFVNRSVKAWN

SEQ ID NO: 126788 - protein, 45 aa, Heterodera glycines
NLGERGDRLNSTVDATEQLRNNAQAIQSRSAKLLEKYERRKWYQL

SEQ ID NO: 126789 - protein, 149 aa, Heterodera glycines
MMQQIRDKPKLRHIVPPWASPPPATPSMPFPPMPALPPSTSSSSSRTTNFDNPLLVQLRNRIPLGPILENDAGRGEVGGTADEVAKGVNKRRVQMNYNEAGWVMIAMDITGKTRKICKDTYNVLIYNEICNGKCRTCIAKEEDISYHDH

SEQ ID NO: 126790 - protein, 142 aa, Heterodera glycines
MPCLKDGRLFEFHRRWTPFEGCESDAIGKRRQNISEQCRRMGQLGHRWVAQFALFPEKAFSGVCQHTETETKVGEGMKEEEKEEEEGRLDDDQTDRTKWKKPNEVPNYGSPMANVMDYANTANGANFDEKLENNLRARTKRT

SEQ ID NO: 126791 - protein, 66 aa, Heterodera glycines
MGNFFSTGIAEPDVEQPFGPDQRPSAPVVCVCRRVMTWAWNERVTMLLLFILLVLMCQFVFWNITI

SEQ ID NO: 126792 - protein, 71 aa, Heterodera glycines
MSASSSLFLVVVLACLAMSANNDNIRVIGMGCEPNSSVCDLAYFDNKFIKCENIQCCRDDFCNGVPDRVDP

SEQ ID NO: 126793 - protein, 342 aa, Heterodera glycines
MSDNPKEAEKQMEKAIFISADCWLKVFDLLPRSQLGCGIAMVSRRFDCFVDEHFKTRKWKLGDMIIEGKIGLNGAKGMKIVQIANLGGKELPIPQVPLPNKVIGFGRISINFIDQNVLTFLRRFDRFFASCTTIFDIYVENVRISEFVLRNIWPMLKDTVLYVQTEAIVFRQMRQLGLSTLNDYPSLRILSLTEIFPKFPPDDSANASDGQVVTKWLFSPRPDNLPKVFTCIVDSPEMASVGQWLATMEQIKTAFSIASSPVNFGFSVFLPPSDPPLTVQPFDLTNELTGEKLTLLEEDDDALVVLRCPTASDVLKWRKTAHHGMNDRQNQSVSMITGDVFD

SEQ ID NO: 126794 - protein, 38 aa, Heterodera glycines
MAKDLAEQFDAFRSLCKMIRATGEIGGQLKQLFILMSQ

SEQ ID NO: 126795 - protein, 63 aa, Heterodera glycines
MSSSSGSPDSFFRSEINQAEAEEVGKYEVLSWHGLWGDQLSAELFVTDQQLLKFLLVNWRHFW

SEQ ID NO: 126796 - protein, 87 aa, Heterodera glycines
MSYVLRLIDLTRYIRVYCHLGPMSSGSQRLWYDTLFSLQLPSILCFHAFLCGLATKLRPILGQVSNLIWLLFEESRRNNGKGRLIIH

SEQ ID NO: 126797 - protein, 189 aa, Heterodera glycines
MNYSILKKIALIIGSTRDQVLLEARNEVQRLLEPLKNKMETIFLCSKKRDSKTGLTYTTRKWGVLIKKLFIKRTMDRTDVFGVMNTLPMSEKSGDKEGDDVLRYDADAEEDENDEEPDQQEDGQQGQQHEGQQQGQQMEEDEVEDEEYEDDDETDEEETEEGGDEDDDETDEEETKEGEAEEMEDDEVE

SEQ ID NO: 126798 - protein, 71 aa, Heterodera glycines
MPNFNCLERPLSQLFYRIIDNIRIKLLNDIKLIQISTTLKEFYTKKESRVGATRNRKRNLTPCAYTILHRN

SEQ ID NO: 126799 - protein, 77 aa, Heterodera glycines
MKDEEEYQNNRVRLFEIDQTRGIADRPRLKKYIENDSAIRQLVIAYDAKEEKNDDDLIRHIHALQYRVGMKGFEGWD

SEQ ID NO: 126800 - protein, 34 aa, Heterodera glycines
MPPRRDRSRERKGKARQGRHRSRSNSQTRLSKLL

SEQ ID NO: 126801 - protein, 201 aa, Heterodera glycines
MKNPPKEIGKNDDTEIKQFVRDLLDHYNMVGKVLFVDQSQAIDYSVIEAILYKSDQTKINNLSKSNSNIEEIVNGIGKITLTKFDKKGKNDSSVKPTLMDKFEILKWIDQLDKPMADLIRKLHKSVNELSASINEDSLDQNAKIQNLISLIKEIAIGTANRLQISTNEIMPPADGQQIDQKSMLEELTKFWHKFRENGEQN

SEQ ID NO: 126802 - protein, 122 aa, Heterodera glycines
MQPNFNFLIVLILFGVSICTASSYTWKSEPNLANNVQTFAKFMDDLYVEYKKTVKMGQFNAKYTILRNPSTILLTNYSDKQKRTVFNLTFVKCVGGIAYFQVLSQNDDSKDAYLILKWAFSM

SEQ ID NO: 126803 - protein, 49 aa, Heterodera glycines
MCGSFPIIVGEMRGQRTSKMYRPFLIATVITAIVGIIATITFFTETGNV

SEQ ID NO: 126804 - protein, 238 aa, Heterodera glycines
VFFPVFPAKNSFSTDLASLYPTMAELRVIKTELELAVLRYASKIANEAHKEVMRHVRPEMYEYQLESLFRHISYYTGGCRHLGYTCIAASGENAAVLHYGHCAAPNDKVIRDGDICLFDMGPEYNCYISDVTCSFPANGKFTEKQKIVYNAVLRANRTVLGAAKPGVVRWTEMHLLAEKVILEDLLRAGILRGDVDEMLGKRMGAVFMPHGLGHFVGEYYKFLNKHKRNSKGWVGLSF

SEQ ID NO: 126805 - protein, 195 aa, Heterodera glycines
MFNRDWHDNPAPTIDFTGEFDQSGADEPVIPAEQHPPVPPVVADDKAERRGATHSPVRRPSIRTTIDFSAASPEPEEERTASSSGRRRRVGSTAADRSAQAAAAACAAGEEATDEVDNNEEERQNMAVVTKRMANLTAQSEDERRVRTASGGGRRRCDDSGAAADRSAAQAAAAACALKVQNIGNIFENTREAYL

SEQ ID NO: 126806 - protein, 45 aa, Heterodera glycines
MCKIRRTSLTEEFGLELNWGVTKRIRTKNSFNKILYAYQKPLTAT

SEQ ID NO: 126807 - protein, 42 aa, Heterodera glycines
TVFSLIKAPGELFFNLFRKGDIIGDRAFNGDGGIIFQQIFND

SEQ ID NO: 126808 - protein, 88 aa, Heterodera glycines
MEKLKKSPVHSRRIELSSYSMRRDYSTDYSIVIVGLPLDLLHFMSPSDFYESEVFYESNQIIIPGFYTATLFMFEQTLIFGIIRKNKV

SEQ ID NO: 126809 - protein, 189 aa, Heterodera glycines
MLASRPCQLLLLILASAHFLQAESKIDVQVNNDPQKTASSSGVDEDHRNVVVNVKHHHNNVERDEATTAKSEKVYNEKSTASSSSSASSEEKNGHKRHKFVLVQHEVNGRKKHVLLKVRGHRLMELYRERDGKHGLKKHLLLKVKTPHHHRKYVQDEYVKKDEKNDDDPKKKVSVRVHTSREGGIIDDN

SEQ ID NO: 126810 - protein, 355 aa, Heterodera glycines
ILQNKIFLNFGRIMHRSAIRRLFDVAIVGGGIVGCAVARQLKIVKPNLSVVLLEKESRLASHQSGHNSGVLHAGSHQSGHNSGVLHAGIYYPGSLKAKIYYPGSLKAKLCVSGIDLAYKYLEDNEIAHKKCGKLLCVSGIDLAYKYLEDNEIAHKKCGKLIVALDEAEIRRLEALFDRAKQNQCALFDRAKQNQCKSIEMIGEDGIRQIEPHCRGRKAIGRKAIWSPYTGIVDWTMVTRKFAEDFQRMGDFQRMGGTVFCDWSLEGIGPSDDSAHPLRLIGAPNGAQIDSKFLITCAGLIDSKFLITCAGLFSDRVARLSGCPKLPKIVPFRGEYLKLKPERRFLIKTNIYPVSE

SEQ ID NO: 126811 - protein, 161 aa, Heterodera glycines
LKIFSLFVKANRACEELRMIPTMFDLADKEKSYSGKACWGQILSSFSLFHPFNSIRCQSMKLSGQFLCLRPISSLIRNSSGLRFTLLKKLLSTTNASKSSKDYSERITKLEKEKEKRKEKVTDLRKCRSEIRPAKNRKNEHFDESTEQIGGSFGGNWPFAF

SEQ ID NO: 126812 - protein, 174 aa, Heterodera glycines
MSVDDDDDDEEEIDGWSGDEEDELEPIEPNCVDRCLAVGQAPDETAFSDKWKREFSKRPTWFNADMALHQILRGRAIGFRWPLYSRILIQRSLFGIGCFVQRHAWLIIVLVLSLFTFFCCGLRYVYIETDIVKLGWSSERGAEFSVHSAAGEPPTSSKCDKTAQRRGRTDNRGI

SEQ ID NO: 126813 - protein, 173 aa, Heterodera glycines
MMERRNSTKNGGLSPTPQETTINLPVSSNRRASSASILFAQASFDTGLDVSRASQLSSQRNVLSTHVMDLGSGRPCSGIQCKAFKWDKSHSEWIQIGDTVTNAQGRIPLVHPGTSLSKGLYKLRFATKEYYARHQLKSLFPQVDVVIEVDDASEHCHVPVLLNHFGYSVYKGH

SEQ ID NO: 126814 - protein, 131 aa, Heterodera glycines
MAIYQDSHSYFDAKFLAITFLKFNKIFRFWHANREYIRLSNALNSFTSDNYEKSYAPKTRLEPSWLQPSQPSPLKITRVVNYRGATFGDLQLGDPTFGELDIWGPDFWKSRHLGTRLLGIERLLGIRHLGN

SEQ ID NO: 126815 - protein, 52 aa, Heterodera glycines
MASAFCCCTQLDSKVAFNFLNALDEFLFPLALGKGVLNKNWKGCTLLSVKDR

SEQ ID NO: 126816 - protein, 111 aa, Heterodera glycines
MGLQTQAKMENKPLKYLFLGINYQRVLEGIKKNLTNPKIRAFAGSAVKQMVDDYICACKNSDTCLFRNKYVTYGQSVKCTARKGPINIGPLNLHIGGGGQFMSLVSRSAGT

SEQ ID NO: 126817 - protein, 55 aa, Heterodera glycines
MVLLGFFKKMISSASIYTHQQIAGFGAGRRKPTTTTFYTVHKNDTHNNGMFNDNG

SEQ ID NO: 126818 - protein, 69 aa, Heterodera glycines
MPTTPMSGNMTENATVATDASGHHHLTALAFILPFVIGNPAFHAEHGIRFMKNLTWTWIHEKSRPRSRS

SEQ ID NO: 126819 - protein, 50 aa, Heterodera glycines
MEIEKVSEFALEELLMDPLKGFYNKNEDQLTLCIEIREISDSELVWQGQF

SEQ ID NO: 126820 - protein, 283 aa, Heterodera glycines
GLKVAQNAAAQAKLAEQQRQTANSTQKTTPTTQTTPTVTAAKVGKEKVREQRDSSKQRTTQQTDKEMDSVDSASVNSAPRTNPSQQQAPPKKAVAPPPPPPPPPPPPPPLFVQPKKVVQNGPKAAGGMPPPPPPLGLFVSTAEAVPKKKIAKIGSKMPMINWTALNPNQVKGTVFNNMNDEKLAEELDLSKLEAMFSLDEKKPSSESQQQNVDANAAVKPRGQPSPNATVNCGKNTVLSTKRLQNIAIIRRKIGKSAMDIMTAVHRFDFSVLTSDQVDVLLHN

SEQ ID NO: 126821 - protein, 187 aa, Heterodera glycines
MDKLRIGTEVQILRSDGRVHAALVTAINERGVSVEWMEEGETKGKQLDIEVIVRNNPSLFPSRVHKPEKSCADPKTASNGVVSNKNRHSIAASSSMQTVVGRQIDCGPSVGYISKSPPPPPPLQPIAPVKDIKRICAGMSVKIERSNGRVQTALVTTIFPEKNGAAVEWQEQVRVCLSQNSFVLLTP

SEQ ID NO: 126822 - protein, 141 aa, Heterodera glycines
MDEGRAAHYFADLSRQCMLEVDVGEAVTEKVNRLKRAMLDDSLMILAALCKEMNVNGNLSEGQKNVAKIIASNETVLFIYHSILRMDTISMFKLQKTVLLTLNRITKSGALPAVLDNGPLLSEALLNFLFSSFDSSNVAKL

SEQ ID NO: 126823 - protein, 40 aa, Heterodera glycines
MKCEMKNDHLNTIFENWIAKANFGERNWTLEKGSGRSHPN

SEQ ID NO: 126824 - protein, 197 aa, Heterodera glycines
MTVRHFVIIMPFQHRYNIDARGQRKFRRNIFFIFLNHSVIERIAWSSYICVLKSGNAFAIFEPGPANVLERRFARFRIRLALFDAVSLSQNEAVQFVGTKFVDDDNYGTFGRLKIGHFATNYAKDSAVVDDDTTNSKTITDFGPIAYAIQTSGSTGAKFLFFVPTDFCVKVPKFRFFRIFRHSEGRLGSVLCHFAKC

SEQ ID NO: 126825 - protein, 329 aa, Heterodera glycines
RAMGNPELAHEWVDKKALEKKETDDILKLLMQYESIFAISDAESQTNLIKHQIDTGEAEPIRCKMRFVPYAYREKVAAMLQDYLQRDVIRPSHSPWSSPIVLVPKRDGTLRFCVDFRAINAVTRKDSFPLPNIDNTLLMLGGRKFFTTLDFMTGYWQIRMDENSIEKTAFSTEFGLHEFTVMPFGLCNAVATFQRFMTHLFDGYINNFVFVYIDDVLIASDSYEHHLKHLALVFERIQEAGLKLKLSKSHFCAKELPFLGHILTREGIKMDVDKVQPITNLPMPQTRKELHSILGFFTYYRKFINFGIAAPLFLLQKNVKFSIGEVEKE

SEQ ID NO: 126826 - protein, 164 aa, Heterodera glycines
KAREHAQPEHIYKNAAKHGNFSAKNPVLLSEIVSVIDLFRTMPHFPMLEPSDQAILLSFVAVPLIDVNARFYSSKINSQIVTVLPNNSFSPLYLYYNNPFYAGDKTSYRSVRCWSSHPAAFIRTLCRSVDAPFAHQPRQHGGRTSLCRIDPSDRVGVLHRETAP

SEQ ID NO: 126827 - protein, 39 aa, Heterodera glycines
MRKMSSLGTLINGCANLYNSLNIICQETENINLFVMRLK

SEQ ID NO: 126828 - protein, 61 aa, Heterodera glycines
MFSCGAKYVGTLQRLKRIIEEVHADYSECQKSMKQMDEDEQMAFGKGHGTERFAMIDELIN

SEQ ID NO: 126829 - protein, 55 aa, Heterodera glycines
VRLLFHANLQKVFEHFLKAKPKQAKCADAFSDEGKMMEKKGETTNKTKTNYGDEL

SEQ ID NO: 126830 - protein, 119 aa, Heterodera glycines
MPSQVPKINKWTVSRVSVKCRKMQQKSQQKEKAISKRAEDSKIMRRGPTIAMVLQRQKQQKSEAEEMAPADVDDDENGAGGRGGGEGRGRHVPIEEEDDGAAESGQQIQCQFHANEELH

SEQ ID NO: 126831 - protein, 74 aa, Heterodera glycines
MPSAAVADASSAFAQPTLAGTGHSRLFESVIALKYSVSFTFVRSEWHWTKNRRNRNRTLISLANKMLKLLLIFH

SEQ ID NO: 126832 - protein, 218 aa, Heterodera glycines
MGTKLEFNVNTNETEDGQRIWDVLARQIWPIFATNIRHLCFYDSGNHLDKLRRRTSPTLLTDSNQLISIESCGLLPDAIGDDGPNATAGQALSKWLHTPTKDGQPKEFCSYLALMEINNWFDNHKQTFLHATTSVSYNVRIIFYKTTTPIEPFELVNERTKEKLTFMKKDGGGKLLNAWLLKRCPIIVGETAAAVQKDENLDHLNGVHFRLYDDYCIG

SEQ ID NO: 126833 - protein, 249 aa, Heterodera glycines
MIIVLYSIINPINSRIGISVLISIAHPQKVEEKVEEEQKVEEEQKVEEEEKVEEEQKWKRNRKWKRNRKWKRNRKWKRNRKWKRNRKRKRKWKRNRSGRGIESGRGTESGRGTESGRGTESGRGTESARESGRGRESGRGTERGRESGRGTESGSGTESGRGTERGRESGRGTEKVEEEQKVEEEQKVEEEQKVQEKVEEEEKVEEEQKEEEKVEEEQKVEVEKKVEEEQKVEEEQKVEEEQKVEEEQK

SEQ ID NO: 126834 - protein, 193 aa, Heterodera glycines
AEDEEEEHKRSLQLYVFVAKCIAYHFNAKQPTDMARRQLKVNKHELSRTKERFNAFLKGDIQIPADEAFTKAIESYFEGFLKSERVAKVIQAGGFSIQAGGFSSNDFREVFRCNVERRIRSLPEIDGLSKDTVLASWMAKFDMIMKTEDRDPPATCQAKNNGIFKKKVFGILYFFKLKIVRVWQFKKKSRVSR

SEQ ID NO: 126835 - protein, 103 aa, Heterodera glycines
MTNVGIVLEKLGKLMALAMIKLKSIFLNCCHCDGKLGNELAFDGKIGNELAFDGKIGNELAFDGKIGNELAFDGKIGNELAFDGKIGNELAFDGKIGNELLPL

SEQ ID NO: 126836 - protein, 123 aa, Heterodera glycines
MLAIMRCYNEQYGHRNQKKSKAKSLRDRLKDELHGDVERLALDLLEGNRNERTDFVPNCERAEEQAAELHNPGEGPLGKIRKATARVLLGQESTSLSVKYFIEFLANEHFRQLRLMFEMVKIV

SEQ ID NO: 126837 - protein, 72 aa, Heterodera glycines
ISLDESGDFSLYLDGTKRVALVHIADGNVPHEYPTEHEWTARTTIERSNAILSPNIRFHLSSTKKIQQVQPN

SEQ ID NO: 126838 - protein, 265 aa, Heterodera glycines
MVESELDRLEHLNLVSRVVTELENHFGISERDVAEFIIELARTSSTFDKFKKSLEEHGLADGLEGFRRRTEGLVHISQIKNERVNAVADVLRRGQRVKVKVIKTVDSKVSLSMKEVDQQTGKDLNAAMPISAAAVAGSDNSFLTNPDAPWLNPSSEKMSTKLTQNSKPSRIRLSTPERWELRQMQGGGAITMMDLPDFDQELGVLKNYEEESDGEDIEIELVEDDPDFLKGYGKHVADLEPVKVVKNPDGSLAQAALMQVQWIEF

SEQ ID NO: 126839 - protein, 80 aa, Heterodera glycines
MADVESEELLASQKLQNALDYVEDSVNRGINIVVHWPNPSFLRQLEVFQKLDYRCDLLTLRNSKLFKEFECISENPSEVS

SEQ ID NO: 126840 - protein, 19 aa, Heterodera glycines
SRYGASIPFEKAMRPEVII

SEQ ID NO: 126841 - protein, 33 aa, Heterodera glycines
MILFVKTKEFDYRVWSAQMLSELEENNALTEYI

SEQ ID NO: 126842 - protein, 65 aa, Heterodera glycines
MGGRNRSGTTFSNSAGTFFQIEGYALKLKDSKNVMIQCPCSVMNFIECLIKLFFSMCEAEAFISQ

SEQ ID NO: 126843 - protein, 45 aa, Heterodera glycines
MTFERGKTNFGYTRDNNFDYQLGTSYAATPRVRHRHHQLLHGQPL

SEQ ID NO: 126844 - protein, 194 aa, Heterodera glycines
MVTKEGITLWCTRIEKAQFVPFDIVYELPGHCFFRVKNKARVFSVPYSELPSSDRCAQPLPPPPPPPPPMTTAKHQRTPDDEEEKNLRRKAKVALDLVEAGLAADAMMQDGTRWKKAKTAINVLANLLLAESLTDVSPTFDQQQQQQQLSSKEEEKREECTNNSSAAATTESAPDGDVMDDFVNSIQAATSNMQ

SEQ ID NO: 126845 - protein, 68 aa, Heterodera glycines
MERYKRQQQRQQQQQQQAKVTQLIKDNANWLCALSKAKCVKRCGRLIRKANTDQLLSLVEVCLNIVAS

SEQ ID NO: 126846 - protein, 126 aa, Heterodera glycines
RGILGKIFPSKNKEAHAELDEVDEIIEEPFLLGSALASAADGGGGDDGDDDHLIVVGEDIRIWSVDQCTSIHTIAIHGKAVNDVSFHPTGDFVLCSSEDSHWSLIDLNAGRPLVKVGEQSENNIFY

SEQ ID NO: 126847 - protein, 90 aa, Heterodera glycines
  unsure (1)..(90): unsure at all Xaa locations
MRCFFPRVVRSVFPSPLSFVRSSLSTFYPIDDQLFGLDEEQRQLRQLVFRLAQKELAPFADEXDRQNEFTKLRDFWRLLGQQAFCGSQCQ

SEQ ID NO: 126848 - protein, 180 aa, Heterodera glycines
PPPPPGLMQAACDVAFEYAHSRIAFSSPIGTFQLMQGKLADMLMQGKLADMYVRLSASRAYLYAVAKNAADSDVIIKDSAGTILFLAENATQMIIKDSAGTILFLAENATQMALDAIQVLGGNGYINDYPTGRVLGGNGYINDYPTGRLLRDAKLYEIGAGTSEVRRLVIGRALNREYMK

SEQ ID NO: 126849 - protein, 90 aa, Heterodera glycines
MFYQPWSFMKRTPSVAKANDFQKRPEGRQFLLRWPSADHFGKRSTVVPLMRFGRRPAERAAPLIRFGKRAYIRTDAAPLIRFGRSSEERK

SEQ ID NO: 126850 - protein, 94 aa, Heterodera glycines
MPLVTDITVWQGPNTEEKMMREIMTNGPVQVAYNIYEDFHRCCANGEIYQHGVNSTKTEFAHSVTAIGWGEANGTKYGLLANTWGTELNRATNY

SEQ ID NO: 126851 - protein, 51 aa, Heterodera glycines
MILHWFTPKKARDVCQEVLEFAQERGMPCEKLTKWMKILNKICAPRLEESK

SEQ ID NO: 126852 - protein, 191 aa, Heterodera glycines
MSDKRSLVNQILAQSDITVTTSGITVSGPRLSTPRFIPFDECGRCRACKATEVEVDLMVTKEGITLWCSRISKAQFVPFDVVYDLPGHCFFRVKNKARVFNVPYGDLPSDTCTPTPTTTPTQGTQAGEQQQDLKRKAKVALDLVEAGLMADAMQDGTRWKKAKTAINVLGNLLLAESLDKKVTNSPVEEEK

SEQ ID NO: 126853 - protein, 191 aa, Heterodera glycines
MSSTERVMSEEEFNEWFGAGARVRGTCEKPTMFDNVRGLIIDLRHLFGMLSLFKVLGVESPSSGQGQITASESITTEGSSAVVRKYRRYALLCHPDKRMNQFPEEKKKDTERFQIIQNLFDCWKAAADYFVTGCWSHADTHAENKYNFWTDYINDCDAKIKVCPHSEAINVFSDLSQSTQRWRKAVRFQSM

SEQ ID NO: 126854 - protein, 31 aa, Heterodera glycines
PVMCRARQNPIPIKSPIPIMAKNPINCDSDY

SEQ ID NO: 126855 - protein, 79 aa, Heterodera glycines
MGMTIACGRPCPMAVARHSKNNELVAAHHTFATIQSHPLVSHFAIKKYNSISLTVNIVRPKIVLVSACVSAWDQQPVTK

SEQ ID NO: 126856 - protein, 71 aa, Heterodera glycines
MREDLGMVMCLLSYGAGLDEQADSGKMTALHFAVSNRSLQITRLLLCLGADPNVNNAHGETPRHLAAILNE

SEQ ID NO: 126857 - protein, 328 aa, Heterodera glycines
TLGLNPPTFNGIPISGTHPPSSISISENQPTSISISGTQHTSISISVTQISGIPDTGTQPTSISMSFQSLGLNPPAFQALRLNSQAFQSLGLNPPTFQSLGLKSPAFQTLGLNPPTFNGIPISGTQPTSISISTLGLNPPAFQSLRLNSQAFQSLGLNPPAFQCLGLKSPAFQTLGLNPPTFNGIPISGAQPTSISISETQPTSISISGTQHTSISISGTQISGIPDTGTQPTSILISFQSLGLNPPAFQTLRLNSQAFQSLELNPPTFQSLGLKSPAFQTLGLNPPTFNGLPISGTQPTNFQWPSNLWDSTHQHFNLWDSTHQHFNL

SEQ ID NO: 126858 - protein, 249 aa, Heterodera glycines
MADEIQQKIVQRIDQDFFSVTSDGWSQITKSPALLSVTLHHVNEYFERADFVLDVIPMTNHTGIYIAEEIANSLRTNGNPEKIICLVCDNAKNMIRASNISNLNSFQCVCHFLHLVMGDVLGLPELAGLISKIRSWVTFFRTSKGMSLLRGYQEKTNSKPKKLIMACPTRWNSTFEMMMAFREQKNVLLTIEGERRGFGVGPSKKSRLDIVAENLPNLEITDFDFLRELCPLLGVFHRETLKASEICKN

SEQ ID NO: 126859 - protein, 34 aa, Heterodera glycines
MAKNMKNICKNLTSLRKTKGLPNSLAKKTQKKGG

SEQ ID NO: 126860 - protein, 115 aa, Heterodera glycines
MNTHRSGGGHGLSIMEKCYNKQIGQKSCDNQFCECMERATAGKKRCSIWEGPGFCRHYRLYGGSAYREAAPPFWSSCGTVLNSEKYLGCPCGTYKTWERCDFTCKSIGSKNCQNR

SEQ ID NO: 126861 - protein, 53 aa, Heterodera glycines
MDAMECDEQFSVCINYSERPVKNGLNDIPIDSSQGAKHGKICLELRKCQKTGF

SEQ ID NO: 126862 - protein, 116 aa, Heterodera glycines
MQIRFADLEMDCDSVVLSSSSSSLSKTMESETNEDEIDQEEQGNEHTQAEEDTSHHQQKCYVAKCLDSIAKLQRTFQLSNASADVLDRAADYMQLYLDRYANGKFGADVRLFSVSI

SEQ ID NO: 126863 - protein, 137 aa, Heterodera glycines
MVRQQHIREQLEEADQLHDQIVEAEQQNDENEDPALQQQQQQRQIMLQEQYERKVRLQLRESRRFSSGAASSLVVPPANLYWERECLICTDAPANFFNRSCGHVCLCSDCAVNCVLHKIPTCILCRAVVSGIYAFVR

SEQ ID NO: 126864 - protein, 21 aa, Heterodera glycines
MDILTVNSFGLKQTIGQRTLR

SEQ ID NO: 126865 - protein, 79 aa, Heterodera glycines
MLGERLKSCTGCECRRCCTLSSCCAMTENCLKNIQQKKGNKIRNTLSHITCRQTEGYMDERQVDYGTQLIFLGCELLNA

SEQ ID NO: 126866 - protein, 225 aa, Heterodera glycines
KKKKKHLMDRKTNINATSHVLPVNVGGLSPSDWNVGGLSHVDWNVGGLSPSDNTGGLSVGDNVGGLSPSDWNVGGLSPVDWNVGGLSPSDRNAGGLSVGDNVGGLSPSDNAGELSPGDNAGDLNPSDNAGGLSPSDNAGGLSASDNAGVLSPSDGNAGGLSPSDLNAGGLSPSDNAVGLSPSDWNAGGLSPSDNAGELSPGDNAADLNPSDNAGGLSPPVIEMLV

SEQ ID NO: 126867 - protein, 46 aa, Heterodera glycines; identical to SEQ ID NO: 124738

SEQ ID NO: 126868 - protein, 233 aa, Heterodera glycines
MSPEIQFQVPNHQESKVAEECLEYQKKFDKKINQIASHWHGVRVSAPKAFGGIMIELSIAKEKYNLSDTQNFNIEFGNPKDLMTKITDETGREIRFSKDEAIRKAYLSNKIKRDAKLRNYTGLWMLGLDVLPMNNQDKMQLHVYRDCRCEMHAWEVDSHQFALPEPVGVGRAIRMRQRLNKNPEGIELRFGNENQKDLLMLRVDKPPYGIINISTIAGDVYPSSIEEPQVKER

SEQ ID NO: 126869 - protein, 44 aa, Heterodera glycines
SRGNSVGHRRFRCPIFGHIVFNSNLTFAILTWFLIGYSFLNINV

SEQ ID NO: 126870 - protein, 125 aa, Heterodera glycines
MSFFILTVRGGAVRGGRGAFIFIGALAVAAVLQGANADQAADSIQINVDISATISIRVELGLQALRPIVPLPDHRIWPLKRPEISSPRGRGLTLILSKFIKWAVFCGPLAHKLESRVNYSITNLV

SEQ ID NO: 126871 - protein, 68 aa, Heterodera glycines
MVVTVTDTVTVAVVEDATDAVVENDSKAHQLYNVLLCFYFISQLHIKRAPAEIIFIYFNCIFWQWFHL

SEQ ID NO: 126872 - protein, 241 aa, Heterodera glycines
MVKMNLVIIITFFLYLIIVLIDGIEEDLFDDLWKNSLLSTSKNYEQQKAKKTIIKSENCFEIEIEDIKPKVQQKIKTEQLDDQTNFLMPKSIKVPKTEFVQFSEEGSFVNQIDEQTDQNDLHTIIHSNAVGDQGSSDTEAEKRKEMEILNKFSAMKKELRHKKVYKKLPFPKFEYEIAKKLGTSRDNIYQFKKQLGQTQKKRSNTMVKDIDKDTMIGLIRKFDQMRKEKIHGFKYDEKKRN

SEQ ID NO: 126873 - protein, 167 aa, Heterodera glycines
MARATLNFVFNPLTEDEREELCQTWFYNYSASTIECLNIRKHIEISVSPAAGAHETEKWMNNLDLASTSKLFQLNIIVCERIQERIFRWQVYTPDLETSLTNLSQKETQHQYFCIIIRVPLDREFLPKPGPGPEKPGPGPRFFFGTGTARKTGNRDQPGNFKNSKKF

SEQ ID NO: 126874 - protein, 62 aa, Heterodera glycines
MAFGAGHYSGAAVVSIIWLGILTALMVAAFIRMKNHRYREDRRSNPNADVLIDREINGQMLF

SEQ ID NO: 126875 - protein, 62 aa, Heterodera glycines
MGEMQNYSSVKRLKCNKSGRAILAPQENVWSSPDPDPNVPSTSAAWEHNYVPISADYAATLM

SEQ ID NO: 126876 - protein, 428 aa, Heterodera glycines
AQQHYLPTHLKTTTEEAEEVAASDKHISEQYPQHNPDDCSKVPAVAASSVASFALSRNSENKENRRPSPSAVISEKTKEQTQAEAARESPKRRIGRQIRHGQQQKQPKRQTDASPQALPIGHAQRQSPEASMPPAPGSPKQQQPDSSVDLEQVLKSEAARAPFHQFLQQQFCAENINFYLAVEEYKKIPENEFGRRTDFGRQIYDRHFAANCIEPVNIDNSTSNQIREAYKNNRFTSDVYDVVQYQIFHLLKYDCWPRYLRAGGQLAEELGGDAKSHAMFGGWCRQRQTFAAAPQVALPLSDESGKNRRLGQRVVQRGKRKQRGGRVLYMFRCGIPTTTPLGRAQRRHCACIAATTCALAFTKQARRLAAPCAAYLRGKDDRRCDECHCRTRGRTDAERVHHQLPRWSKETTRTNVQRRNKNFNVYIF

SEQ ID NO: 126877 - protein, 69 aa, Heterodera glycines
LFEYPKRTLEKIDFFVFGAVPPNRCAQIYGETKSFGNSFPIACILILRWIFAPHNCLSTPNGHLNKSIF

SEQ ID NO: 126878 - protein, 193 aa, Heterodera glycines
MPILDKSGCATPTTVTGRGTPNTNCGIVHPNGDDKTPIANPTEDMANKAKDGGGGEGGHIAEQDVQTEQPNPIAEKETASTVAASKSVKEDKEEAIAIAPGEPTDSVAPMAPPSAATSPAPPKTPASADDVSSSAPNSTGAAAAIILSSSAPSTNSTTTPPTNPSQSDTTDENGTKQRVAVPLASSGVTVRDF

SEQ ID NO: 126879 - protein, 39 aa, Heterodera glycines
MSNQSAAQIADEYERGDGEVIKSNQGKRTKSEQVGSFVV

SEQ ID NO: 126880 - protein, 288 aa, Heterodera glycines
PTCVFRVQPNTLLSLWYTIGCTLLNSWLLWYTIGCTLLNSWLLYLAFVRYRLYTDMQWPAGAFPRVWLTAYISLLGTCIPILALFLVFGLMKTGNLAGNLAGDNDRLGARPKRTIELIKGGMGNTAGLCHCLRSAWLHAPPAPQCLHVLLALLQLFVQQTMLAQLYRWGFINSGDFLNTELDWLLQRARQLATNLPMGETRLQSFRISTEELSASPVAPNILPILMHTRLFGILMHTRLFGIPLEFVNFLIALVAFSTAYPSVFWRVSKSFALLFTAFLGVHSLCLVG

SEQ ID NO: 126881 - protein, 63 aa, Heterodera glycines
MCKKYILIHKFVGSKLIIFEVKFDLNLKLTQSKNNFSDHYSLLTIACRCTVDTVQRPGTVTRS

SEQ ID NO: 126882 - protein, 130 aa, Heterodera glycines
ILLIVLQLVVCTVCAGEVTSASSDWYWKILASIGALLSIAAYIWAMVHLLVTSKIDVVLVKIDGMKTEMGLRIDLLKAELNEKMTEKVKSIKTELNEKMTEMNRNVESIKHEVTSIREDIKPKPKQGLFW

SEQ ID NO: 126883 - protein, 115 aa, Heterodera glycines
MGPENDGKNGPIIRKENGGPQIENHEICKKEHEEGAEQRPFLFLNCQCLSANRIYFNFTTKSEKYEDWLEKGRGELFEQINSNYCLKSTEDAIFVSTLSHYQWSSACFHRPQFIS

SEQ ID NO: 126884 - protein, 171 aa, Heterodera glycines
MELTQKIKQKGRKYPRKEWNKIEGKIAKKLGTNRQYIYEWIKELGLNQKTNKCYKSKTDEEKLDTVQKFIEMSNEFKQKRKYSSKEWDKNYEEICKKIGVSLKTITKWKNQFGISRKFITEKEKTEKMKIYWQIKREMPKMSDKEIGKTLKINRRTISNWKKQFGEEIMED

SEQ ID NO: 126885 - protein, 23 aa, Heterodera glycines
MNKYFYKFIYLTKTMGHACPFDN

SEQ ID NO: 126886 - protein, 33 aa, Heterodera glycines
MLKTSSFTKSRLFPNFNNLERTDDAKWVKKIIC

SEQ ID NO: 126887 - protein, 84 aa, Heterodera glycines
MLKLLISLLILNVQSLKNFSFLIRLIEHVKSIRMIPRLLDLDNKEKSLSGKTSWRRNGSAETGGHKTEKNRDLIGALLAGVASI

SEQ ID NO: 126888 - protein, 102 aa, Heterodera glycines
LDESSGPDDVFAEAHPMQPVAADGTPTLPGGIPRNSQAQIDVVRKSTSARGKKNSVNAEGEADKAIVAKNKAGPGQPSDPSDMIMLPSTSDAPRRSRRIVAN

SEQ ID NO: 126889 - protein, 64 aa, Heterodera glycines
MAMKINLLILFFLNFVQIFVSFSPYQWDPTNSVTNVHTFAKFIDNLFMTYTMNNKMGFLIRTRP

SEQ ID NO: 126890 - protein, 80 aa, Heterodera glycines
MASIPALINHLARNVDYSDPWDVAVLKLYAETMGNIWDPLFTYLDEVITSLEDRTNSPSPPTLNGTNLAFRQTQAQHLLW

SEQ ID NO: 126891 - protein, 162 aa, Heterodera glycines
MLKSLLQPFDDDVEEDSEEDSHLAAIIDTAQKLADRQLSTEGEDPSVGTVDRAAKPAWKRLKSQLGRSIARRFERRCKYIYASSVESCHKRLQQSQPWDVAVLKLYAETMGNIWDPLFTYLDEVITSLENGDMPPYISESSPNNSANSLENLPSVEAPQSDD

SEQ ID NO: 126892 - protein, 218 aa, Heterodera glycines
MASKNGLIMKHLKILFPHIISNSRLPKPAKIASPTQSESVFFYRSSSSSLLSLDSATSTTTSSSNSSGIGTSDAETPPLAFEGEQRQQQKPNSSSRSGTSKSQNLCGGTALKMAADGKKQQKVGHKTAPTAAAHCCPMEEEEQQQSMDKEQQQFEASSTAHCSPPSSSSGGQSGAAAASVLLVDLSNPMLQQFYVQQRLFFRQIYAQQFAALSARLGM

SEQ ID NO: 126893 - protein, 84 aa, Heterodera glycines
MPKYAHIICTKCQNMQICIWKVILEASKQAKNMFFIGRARNEKIDFTIAEHQRISRYACRIVAERNAPANVYIYAAGFDQENNV

SEQ ID NO: 126894 - protein, 67 aa, Heterodera glycines
ILFYTLKDFLLIQNFLKFPKIRNPAQDPADFKCRICRINPAGSCPVKNFEFQSCNRIRKFEISGLYL

SEQ ID NO: 126895 - protein, 229 aa, Heterodera glycines
RPSSLHYVNSCQLYQYECAISAVLEICEHYNRSKLFEAYGFGAKIPPAFAVSHMFPLRLNNNERVVHGVAGVLEARLNNNERVVHGVAGVLEAYRYAVLNTHLFGPTNFAPTIREFIHKTSKLRDGSRYQVLLILTVLLILTDGVITDMQNTVRAIVDASHQPMSIIIIGIGSDEFAKMDALDAIGIGSDEFAKMDALDADDRTLSVDGHTAVRDIVQVGEETTISKLI

SEQ ID NO: 126896 - protein, 85 aa, Heterodera glycines
MTLAQFGTAGTFPLSLKFFLTKPTANIVGKDPVRNRYPDSVEEFGPGTGFAQISGPMNRTQNGSTGASFFQIQQRNRFTGIMKIS

SEQ ID NO: 126897 - protein, 138 aa, Heterodera glycines
MKNVKSSKPSAIPPISCILYNLGFQLNSLLSEPTQKFGEFFAKHKRGCGGELHKWISEVVDDTVLDDVYGLGYSIEQIDLELLKEPIKRYAKAIGFKETEKTEKPTEKPTKGKGKQKTDAKKVDQKLKGKKANQKKGQ

SEQ ID NO: 126898 - protein, 23 aa, Heterodera glycines
YTELTMLKESNLLREEISRCSDE

SEQ ID NO: 126899 - protein, 111 aa, Heterodera glycines
VFSFYPSSPILQSCNFVSMALFRNGLPVPLFPKPIIGMVAGSNSVSLLPKPIIGMPVPLMNWSYSTSLRFPIFSKLSKNRSVDKLKGITAKHSLNSRKSGRVPSLNFIKAS

SEQ ID NO: 126900 - protein, 42 aa, Heterodera glycines
RQANTLVMSEENIAVCFLHLKVIEELKVQCDRSEAKSKTIHL

SEQ ID NO: 126901 - protein, 19 aa, Heterodera glycines
MSIKKENTKIKQIPRKCEK

SEQ ID NO: 126902 - protein, 149 aa, Heterodera glycines
MPSDSTDNSTNRGAKRSADAVKRSMDLEKLKDDKRKRRQHRHEEGIRRQKALLLLQSEFRTAPIAPVPLASVVVSTCPPPPVPPKLQSVAHSGPLTRTAAGSSKMHSKNKAQKKPYSSDDSTWSDGSEGPSEPKRRMIICSDDDEKMEG

SEQ ID NO: 126903 - protein, 633 aa, Heterodera glycines
MLVHFMNVFYAGIVLSCVPSRLQSELINVDFTVDNQNYFDSGKYRTFSKDATAAEHFGYSRNTACRIEKCERDSEWAVSLQNVYTLHSYQSVFFEMKSLVKMSPLACFEYNGHSFTFFEDSESGETTIFRGHQHKIVQRLSKHGRVVFDHLSGRLFLIDKYQRRISEIELEYLEHWWLRKNQSSAHTILKSNFVAFLPPDKSDFTLADNHVFVIRDQRIYKFHIGDYAKGNRALTFVTNSNDVRFNYLIYKPKDQNVSRGVFAHLRMSDAWMPISYLFNLLLIVLCTYILKQLRRVNRQSPLNVSDSADYYSSPFIDDAYSPQHQQLLNIPYETETSSDQSGGARSRKKLLSFYIIVTIYLPAYCMQRAIRYLIDSYGLSSVDDLYTCLKEEIKSGPEGGNCLYPNPLCAVDCVHVANADHPNQPVHIDGSLELIADVELYSTCYPKRKFEGIERTSVCGAERSEDLSGRLAAVSIAPFRTTEQQQQQHGPDSRRAGSIQLLERRRARKRDYNLVRVLCRFNNCGPYRLAKQLQKRRTENLTYLNRLDIETAHLRKNIKVIPDALCPNGANQVFAYRGFLGITVQQHLYSRHRVMLKYPGLPCIVQFGGGYHRDLFPIELLRVANAEMHSEIA

SEQ ID NO: 126904 - protein, 143 aa, Heterodera glycines
MTKVATAERTTTMVARKIQGRRAEALDNIEKKYSKMEADIGGEESDEDTVDFFVDSVEEIMEKYVSKENLLRANSRFILIRIRRSEEKAKKWMDTRGRDEAKTVSVEFLSAQAQAVKKEDMDSSNSEKDLDEPTSTVYLDRKN

SEQ ID NO: 126905 - protein, 676 aa, Heterodera glycines
MRNNEETKAVNCHSLFSVCMTIFKGQFLKENQLAIVPECGYERNDRASVFAIKYLDWRSKKDGTRIQHAGNGLEKRWQQFRLDGWIEEQNKCIEVLGCYWHGCERCFKPEDKLVDGKTCRELNELTHLRLLKLRGPPGDLHSRLEIEAVWECQIREQLKRDDEMRDFFADLGTDRGPIDPRQAYYGGRTGPLQLIAEPKEDEKISVFDIISLYPWVNYSADYPVGVPSVIHPTAEEMLVDWTRAEQLQYRGIYRVRVIPPRGLRIPVLPLKIDDRLLFCCCHHCATAFRKTNTRRTHKCIHTDEQRAFTGNYTHIELERALESGYRVDRFWRAWHYDEWYGSDEIFKDYVRLLIKLKVSDHIYVTEHRFWQIEASGFPDGVVCAEQRHQYAEEYRRTYGVNLDLGHVCKNPGLRFIAKLMLNSLWGKFSMRNELGVNKVITRPQEFFDIILDHAIEVTAIIPLSDRAVRVLYKHKRNFITEHSSSNIVLSLWTTSRARLKLLDFMTQIERTEGAKLLYTDTDSVVVLHKRDVAPIQTGEYLGQMSEEYLNYNIKTFVCGGAKQYGFRMKDKSTGAVEYVLKIRGITFDVNNSKALQFENFQQKVATYGRNVNIGNNDHHNDDSDNNGNAPSVFRYNKIMPTRDSRIITREMRKKYVPVCQKGIINEQYEVFPFGYE

SEQ ID NO: 126906 - protein, 408 aa, Heterodera glycines
MKRVEADTVKASALTDHRGGDEECMVKRPRRQSWDFKTMSHFDMDAATGENRPKSPPLFEQRHYYVHRVERFAMQRHVTEFLLNGQHDEPEEELQRTFKHIIERAIRNAEDPKQQTGSGARGDLSDSRRKRQVTRLGILLNGRGLSDPIVLPIRPPEQNTAEVLMAELDKLGQSDGDEDVHGGGISKRSLLLSEPIEIIVTCIAPPVGAAPRFHQYQHWGYDDRQMIRIMHMDDNYCLFHALIATRAYTDQEFLKLSSRRAAEAEEDGGPQGAVPAEIVRRVMTRPDFCAGYEALNRLVSNRERMKTAVAELMHTAGIPTDEDAYGMEHLVQIQQFWVNAISKISLFFNTKNRTKPTLVCTGLFCSKTIPRNCLARFGRALWDAASMCRFLCPKDTILASKRYTASSN

SEQ ID NO: 126907 - protein, 192 aa, Heterodera glycines
MNCLKRFEIAASPKKRVSEEFPTVLKHLRDLKNFNAPGVFYANAKVTDLQFSLYKACPLKNRGMLCKKKLDDDSFCGICMHRANRPLRGLYMRLELHDCGDMEISQHATMFASVAESYLDMKAKGEHGLLDWVISALIEGEKMQMEEPTVTNNGQFGDGDGAEDGEIIALDSSDNAFAPSGGGPPKKRAKKN

SEQ ID NO: 126908 - protein, 1685 aa, Heterodera glycines
MITRSPPLTRQRALNLRMFGNVENRPAAAATQQNQEENRDNTNFTNNPISPNITHNLEEHNQNQSHFSEDEIMGDDEIRNALLRVSIEPSHARQQNVLGAEQQQQGNVTGIAEFRNIGIVIDRNNERGRDPDNFGTQNVAMNRQVAQFDSMVVLAQNIPQNNHRTSTPLPDNGLTHNIQRSSVGVFDQYNMGNRQLHQNHHLSHHPLAPFVPIEQNNARIRNVEERVQNRHAIPIQQLRQQIPVNADAFPAFQFQHGQGFEKGVQWQLPEQNPMFFERNNQVRVETLPNLPQNRGGAIVNQTQRPNPIFGHSKTDTTVPSNLELNLVLERIPDLTGKEGMDKVRKFFKKFDVYTEGWPEKTRISALQSKVYEKAERALEAALSTQPFRYECIRREMLQQMEETDSRNLNAFDELMMGVCRKPNEGIDDLANRISTLVRSAYPGLTSNLSDEYSIKFLIRAMDNPELALNLELDETVPAIGKVMAVKVQLFGQETEAMLDGGAQISLISAYFLYKLLKEEKVDLGTLKPSKSLARVLDVNGKHLSCLFSVKLPLCRRGLKFPTNIIAHVTKAPIGFDLLIGTNGLAKLGFKLYDNLNDEMVEFEKFEAKAKAQNFLTVIYRTVIEPRSTKIVEFEIDQNHNDSEILISSVQTDKLHIEPTIGKVKGGKVIAPITNLSMTTITLEGKQKIGQFESITEIGESDDILANPLIVSSLCKQLDSIELNPNLKIWDLWKEKTGMLSENELARLRTLSKDFTEIFAVVDNELTQTNLVEHRIETGDAAPIKLKMRPVPYAYREKIAEMIQDYLGRGVIQPSISPWASPIVIVPKRDGSLRFCVDYRSVNSVTRKDSFPLPNIDNTLLMLGGKKFFSTMDFMTGYWQIKMDKESVEKTAFTTEHGLFEFIVMPFGLTNAVATFQRFMTRLFEGVINDFVFIYIDDILVASETFEEHLQHLGIVFSRIKDAGLKLKLSKCRFCADELPFLGHILTREGIKMDIEKVKPVTDLPIPSNKKELHSLLGFLTYYRKFIHSFGTIAAPLFKMLSEKVKFEIGEKEKEIIEILKTKILEDVVLYFPDFEAAQNDPNRQFIIMTDASKAGISAILSQPDFDNNVRPIYFASRQCNEHEARYSATELEALAVRFGVKKFAQFVTMIPTRVITDHKALIWMFKRKNETGNARVDRWLLELNSRFHLKVEYQPGKKNIIADVLSRSFASPKTPEICQNDEEIAIIGQIREIEPNWDELAHNYQGWVEETKLSEMGALYDFLERRIIPKDPREQQSIFDKCHKYSVISGLLYLFESGSNMRLFVPKKFREELVKAHHEGNCAGHMSGKKLCKQLSEQYFWPNMLADCVKAHEKCRICAHTRNPRANEPPLNVVKSTEPLELICMDILDVGPSHSNKKYICVIVDHFTKYLVAEPIPDKSAGSVAKIFVEKFILVYGTPKKVHSDRGKEFLNSTMEEISKMLSIKRSFTAGYDPQANGLAERVNRILIGILKRSTASNWTWDERLAYATFSYNITPSNTTGFSPFALMFGRIARFPLDQNVPFSVNPAYTVDSDKYIQLFRENLLNMLEQANKNALEARKQNKLWFDSQPRVTANKFKVGDRVMVIFPGLHRRNPHKKLIWSNFGPFLILEIGESSAKVVPIDKQKDEPIKVPIERLVKVPKGIPDISTLPKGKKNAYKETKLMA

SEQ ID NO: 126909 - protein, 46 aa, Heterodera glycines
MFYLDVKEKSYHGKRAGAETQNFCVLKVFKITNKYYKIVHKKRRRN

SEQ ID NO: 126910 - protein, 20 aa, Heterodera glycines
FGSWNSYPKNVGNRKSFRAI

SEQ ID NO: 126911 - protein, 169 aa, Heterodera glycines
MKRELTDRRIVEFVAGGPKNYGIRHTARDGTDERANLKIRSFRLSYTAQQLLTFEAMKDLTLATYNIDGPIDDALDNDDLYVYGGGEHRAIRVNFPQIDRNVYADLYTHEAHKDYRPFYAKGRVRPGMQTRPFGYVEDDGQPNEGQRTHRRKRNFVEQDPTQPGHSGWF

SEQ ID NO: 126912 - protein, 655 aa, Heterodera glycines
MLFKAGRQIGECFVIERSTAMRNVPRNTRGEICELRFLALEEAQQSDLLMEATSSNSSTVCWLVTRAHGWSDYSSTRRDLIVHMSSGFVRRSKTTQRHWRQLSSGSMSSRQPALISLPEQQSSKSWRSGPLTPFVLIPKGEQRAVTCPDSQPQRPALPCACRSLGEHDRETRMAGGGGKAAFNLFASRQDQHGPAAAQMLTRAGIAANRDMYTLDDVQRLQQWLNNQHGVGQIRLAVFEKEQEYRIVFKGDGLAAKFNLCLVLERGHFNYIGRVEQLFDVPNYCIDCERRADARYHAFGCKVVCRLCLRNHAPAPMDGRGQRQRRPICQWRRVCRACGRIAYVATHQCPHDQPADDGICRRCNGPHTVDEPCYIQPIDDGSVRQRASIAVDNDDFDDDEDDEELPLRLCFFDAETSQDMPLQLNNRTVQKHVPLLIVAEVICERCLQAGISVNDGLGRRAPGCVCMTGMVRGQLFRQWSSPPFANAPGDNSASPVGAPAFNQRRFFFHSFDNDGNDPVDQFLDFLLQHGPKKAHTVCIAHNGGKYDFHLVLEALHRRNRPPKHLCTTGLKIYSMRLSGRNQRRITFKDSINYFFCALDALVKSFQVPDHLATLKPFFPYLYIRRQHLSQRLNGLPAQEFYAPDTMKAEKRAQFLR

SEQ ID NO: 126913 - protein, 33 aa, Heterodera glycines
CSPPPSSDLFICYFNLSSINYLFVRPFDISGTE

SEQ ID NO: 126914 - protein, 166 aa, Heterodera glycines
MRIHCLENVDKGLQFLRDQHVHLENLGSQDIVDGAPRLTLGLIWTIQDITFEDVDNQETRSAKEALLLWCQMKTAGYRNVNVRNFTSSWRDGLAFNALIHKHRADLIEYEGLQKSNALHNLNNAFDVAEKQLQLAKLLDPEDVNVEQPDEKSIITYVVTYYHYFNK

SEQ ID NO: 126915 - protein, 338 aa, Heterodera glycines
MALNMQDKKGLLHQILGEADITVTTSGITISGPRLSSPRFIPFDEAGRCRSCRGTEVELDTMVTKEGITIWCTRIDRVQFVPFDIIYDLPGHCFFRVKNKARVFNIPYGDLPAITFPNHQEQQQQLQQQQQQNDLRQKANTAMDLVESGLLADSLREEGVQRAELKRKAKVALDLIDAGLTGDALHEEGQRWKKAKTALSVLGNMLLADSLPEKKTAELPLPPAEKIETLPLPPLEKMKTPPLPPADKMPSPLPPSSKVESDEQQFYDSISAATTMMDSASMQQQAPLKRKQLTPKGKSNNGMKKAAEPQHHHNVGDMDKTLDEFFESVSAATTNLSI

SEQ ID NO: 126916 - protein, 171 aa, Heterodera glycines
MPEWFNALGTDEQQMKQRIDTLIEMERQMHEDDQSIEENNIDTIELSLGELRSDFPNGFAVDWQKLFNAIVHDRNFTASSTVLLVAQKMNGRTERQTPLDVMAEYMRNFGPKNDTLNKWEQYVEWLLILQHAALSDNKMYTWGKTDWNYFCGYLLSDFIVFSAGTRGQPMP

SEQ ID NO: 126917 - protein, 191 aa, Heterodera glycines
ATGDNFLFGIGASKTTAPMTATTTALTTSAGSPFAFGSSASTTASPVATTTTASATLPLLFGTQQKTTAPAAVPSSVPTFSFGTAKFPSFGSSAAGGTLFGSTTANTLTTISSADVSKAGKVTDKGGDSDDEAAEEFVPTGTFKPIVPLPSKVDVKSGEENEEVLFSARCKLFRYDPMDKKNKERGIGELK

SEQ ID NO: 126918 - protein, 84 aa, Heterodera glycines
RRARAVLSPLARPPRPPLPPSPPQPPPRPLSRFSLALSRKRRHPPLCLPPSPPSLSAPPNSLLLAPPPPVALSSVRPPPTPSRQ

SEQ ID NO: 126919 - protein, 386 aa, Heterodera glycines
MYEMRIRRQKKRNPNIVFRDSFNLMPMSLASLVPSFGLDVEDKPFFPHMANHPDNYGKQIHPTPDDYLVNGMMPDKRQKFDDWYEQHRQEPFFLDEALASYCTNDVEILMAALVAFRHEFLDVTKRNEGIVAERAAFYEHHDGIDVLRECMTIAGACMKHFRTNHLPKKHLAIVPERGYDNAQNQSLLALRFFHWYAEEHGVVVQTAHSAGGEKKLGQYSVDGWVEAERRVIEVNGCVWHGCNECFPNDNMMMPNGKTAGEVRERDEKRLEFIESQVSRVDVYWECQIKRMLNRDPDMRESFGDYVDDGPLDIREAFMGGRTGPLKLYHKAGEGEKISYYDFTSLYPYVNFSTTYPIEHPKVLILNENVEWTTARDNPYKVSLLKG

SEQ ID NO: 126920 - protein, 70 aa, Heterodera glycines
MTVTSNTEFRLIECVKGFLRQEDGTSQKVVNEYYEKYDGLNGFAEFIRNWAFTFFCLHAFDDDDDTSDED

SEQ ID NO: 126921 - protein, 125 aa, Heterodera glycines
MNIFCFCLLQCCLAKRSMNFNNLTTPIDEQTMIETLSLDEPSNELRSVEKMDEELNKKEEPFTLAECCTAFDLVAFMFDCKIPVPYERSTSVTYSSTRTSRVSSTSPKMETRLSSRELSNSLDTS

SEQ ID NO: 126922 - protein, 23 aa, Heterodera glycines
MTARKGDMKFGHQKFWHREVWAP

SEQ ID NO: 126923 - protein, 69 aa, Heterodera glycines
MPKIVRIDFLLPRDLMEKIFALESDSELDKMEVERLTDQLLKEVPRSVLDRLELPRFYSRLPFSSETIN

SEQ ID NO: 126924 - protein, 103 aa, Heterodera glycines
MDVPRDLADVCAGTCGRVFGKIPLKSLHCIKWHHQCNAPQTEDPTPVNENGPEPKDATVKTFQNQRRLTRQTSKTKSQIHSPKLTILYPPTAIFSKTIHPLIQ

SEQ ID NO: 126925 - protein, 79 aa, Heterodera glycines
MIDQMWQKVYELGDDCSMCQKMRKKWEPHQNETFFVVNTGTLISLAKKMLKLVIFYLFIFKNKITKLPLTLLMEIRSNG

SEQ ID NO: 126926 - protein, 90 aa, Heterodera glycines
MLALCRFLFPLDLGFLFLIIFPIVNAEQQQQNLWSGFYQNFALELPQEERSDDTLALFAEMDEVDTVLTDGIGAAIMAPPSPAHPAFQAI

SEQ ID NO: 126927 - protein, 50 aa, Heterodera glycines
MEEGNYEQKTLAQLLKPLTIVTRSAQRGAAEEDAVPTKRQMGIRRGPLAN

SEQ ID NO: 126928 - protein, 135 aa, Heterodera glycines
MIKRFPKLTSKLTFTNLVKLDEKEVYSPVKKISAPQKTKGNCQCGRTEKATMAKLTLTNLEDKKPIELRFKEDDVLGEGTYSKSIGTTMFNKCVALKMTRKDLESSDWQKHTKEWKIQKAFDQLKEQKHVIKLFA

SEQ ID NO: 126929 - protein, 137 aa, Heterodera glycines
MNRRWICNDVWMDILPSFDRPQLGIKMALLSDQGYIDYSVIEFVRSNKQIWDRMGTNLELSIDNDQLIWDVFCREIWPNFATNIRHLSFTNDNHLDNLRNGISLTILTDLNHLNSINSNFLLPDAIADDGPNASAGQ

SEQ ID NO: 126930 - protein, 171 aa, Heterodera glycines
MKRILLFSVIVLLIVQIEIGAEKKKTEQKTFDEIFGEKWEEKENEQKMKEIIEKYYQIKEKIKQRGRKYSAKEWSKIEWKIGKKLGTNRQYIYKWIKELNLQKNKCYKSKTDDQKIEIVQKFIAMKNEYKQKGRKYSAKEWKKNYAEICKKIGVCKRVIEKWKKQFGLSRQ

SEQ ID NO: 126931 - protein, 70 aa, Heterodera glycines
MGYKRAYTSNVTVVETVIANAALSFHFYYFLYKYLNSLRRSAHLAGLIGDRYLIIGIVIMFKNLPDESII

SEQ ID NO: 126932 - protein, 192 aa, Heterodera glycines
ALSSEGRISKLYVECFNEREKCLTVIGGGKMATALVHGLVSAGFIDKSEVNICSRSKETAFRWTTQGYQNAYTNDEFYSKVKKPRGIVIVAVKPQIFPGFLDELRKNGWLNFVGPELKLVGFNGHAARFMPNVNCLVSAGIVLVCADDCVPTEMVTLLLEMGSKLGYSVRIDESLFDAASALASCAPAYVRM

SEQ ID NO: 126933 - protein, 143 aa, Heterodera glycines
MPKQNEIVLKYSFLDLTWFLDIEAVFYAISKTKKCLVVKTIFHISLHNFVSSARIETGIRPLERAARALQEVKKLFEFLQFCFHNFRKLFGIIMPKQNEIVLKYSFLDLTWFLDIEAVFYAISKTVIPNPRFLNPVFRKNALW

SEQ ID NO: 126934 - protein, 113 aa, Heterodera glycines
MMEVSQIQLKMLRPLLIAIYDKIREKYTEDYNQYGFGTIELVKEFKTDEREPFVMRDDVELWHEDLDEYKTMEQCGIRKGSTVSVFYARRLDKEEYDQGFYIRPWPTPKKICF

SEQ ID NO: 126935 - protein, 21 aa, Heterodera glycines
MKLVGLDSYCLFRKTSKESLK

SEQ ID NO: 126936 - protein, 154 aa, Heterodera glycines
MSSSAAANAQMSHAAAANNNHHQFAPHAPPPVPVPPPTNLLANPGAPPPPAPPIQQQQQQNTTTTAQDKQVDDSSDGKAGQQQHPQSEGEDDEQHNFRHCAETYSDEETASANNVWWATTFGWTFSPFLTMLNWPQIGALFNALVGKHFDGKSE

SEQ ID NO: 126937 - protein, 126 aa, Heterodera glycines
MALLSPCFELWWTNISMHISNNVWMEIFLFFDHAQLGLKLALLSPVSISWWTNILMKKQNDCGPQIERTNLNVLVFSDVWMGSFPLFDRPQLGLKLALISHRFDVLVDKHFDGQTRIFSNFESFSF

SEQ ID NO: 126938 - protein, 66 aa, Heterodera glycines
MEEDDDEDLQEEAGTDVQSGPTQKAKKKTLAQVLAPPKNAGKDVQSDEMSMIVFQLHELEKGNMKD

SEQ ID NO: 126939 - protein, 86 aa, Heterodera glycines
MPTGSRVPLIVERRSDETEEDTWTVYPTAGICIKFKEVTVDVLVNSEFFHKRISQSEFFRQLTLRIVCQAIEVKWLKMANIYFFIQ

SEQ ID NO: 126940 - protein, 155 aa, Heterodera glycines
VFGMPENVPEIESKGFDSEFDDIANEPPLLEELGVNFQHIWLKTMAVLNPLGIASAEVIADQDLAGPLVFCLLFGASLLLHGKVSFGHIYGIGLCGCVGMYALLNLMASQHNSISFTCTASVLGYCLLPMSLLSLLGAVLSLKSVSFFPLSPKNH

SEQ ID NO: 126941 - protein, 139 aa, Heterodera glycines
MERQRVGDVQQVEGGECASDHTARGGQTTARFSMICGNDTNQITMANLGISLSSIVHHHFAAALLVQNTVTTLPATDRVFGPDFVFLVAICAMRGKQMNTIKQIGQNPPPQMYVTVPSETVPMPPPVDALVGAVPPPND

SEQ ID NO: 126942 - protein, 79 aa, Heterodera glycines
MDSAATTPHHQSFGGGTAPTRASTGGGIGTVSLGTVTYICGDCHKENEIRPKDPIRCRECGYRILYKKRSRKMMVYDAR

SEQ ID NO: 126943 - protein, 198 aa, Heterodera glycines
FQNGILIQAVVTVFHRGFHGDLNETFLVGDAVSEENLKLISVTYECLRQAIDIVRPGVKFRDIGNVIQKHANANGFSVVKRYCGHGIHRLFHTAPNVPHYAKNKNVGVMQAGNAFTIEPMINAGSYDDDQWPDGWTAVTKDGRASAQFEHTLLVTETGCDVLTERSVAGAPRPWFRDQLEQLGYNRKAAAVVPLRMRM

SEQ ID NO: 126944 - protein, 78 aa, Heterodera glycines
MRRKRKRELDKQQSTGEGDSVSTSTDSEKKEDSDQTITKSPQSETSEKSEMVAEDGHKKPQNPDGIILDFVFDFRFGQ

SEQ ID NO: 126945 - protein, 25 aa, Heterodera glycines
MTTFLKQIKCIKIKDSIRISMVAGY

SEQ ID NO: 126946 - protein, 252 aa, Heterodera glycines
MPSEVGISKHLDLLRKEHVRLQRTLWGAPMEFEVLKMFPLQILSTPFCTLSPNFTTRICTGRSFLSRLWTLFFCGFSDITIHFDGHQLRGHRIVIAARTDFWGDLSTVERLELTEIPGKVAKVMMKWMYTNILDESIGDSVLLPLLEAALKYHFEDLKTRCEEILIVRIDVENCAKVYQFAELHSLDRIRDFCAEVVSDRWSEFTPEHFLDMPAQLLYRLLKRKSGANLLGSLIRLQREDVLFLFLIENDAR

SEQ ID NO: 126947 - protein, 21 aa, Heterodera glycines
MLPSNPDDKIDEVDKILSKLD

SEQ ID NO: 126948 - protein, 299 aa, Heterodera glycines
MDFVFSFGFSDITIHFDGHPLRGHRIVIAARTDFWGDLSTVERLELTEIPGKVVKVMMKWMYTNILDESIGDSVLLPLLEAALKYHFEDLKTRCEEILIARIDVENCAKVYQFAELHSLDRIRDFCAEVVSDRWSDFTPEHFLDMPAQLLYRLLKRKSGANLLGSLIRLQREDVLFLFLIENDARLKTILNDFDCDGQLPLGIAFELKQLKMAKCLLTHGADVNKLDERGNSLLWKAIEKGNADVCDFLIENGANLNYVHEESGETLLHVLAKSKAKSQWTPGELTNFDVNALNRNGRW

SEQ ID NO: 126949 - protein, 276 aa, Heterodera glycines
MHDNASRSALQIALLERHNLEIAEKLLAIDGLDLLCADKKTGQTLIHKTVAFSDQIAAQFLAANGVPVDVPDAKSGANPSSVDGVSGCTALHYAVSKPRAVLDALLPHCDSATIGTTDRDGRSPLWCALLASKFDTAALLIGAGADINEKSADGVPLLIKAIALKRDDISRFLLANKAIAAVTSPDGFTPLNLAVQNGLTSTVDQLCKLGANLNHPNPLNGLIPLWTALENGDFGTAEVLIAHGAVIVHSNARKFAVCAFSVGYRRIVRQRRTNDG

SEQ ID NO: 126950 - protein, 227 aa, Heterodera glycines
MSCRIDAQDADGRTAAHIAVLEQDQHTLELLLAHPDPSPLGVRDRYGHTPLALAMRAKQNKMAEAICKRLTSTLQPKTRNGSRHCTFVVAWARNSFCAIWQQNILHLCAINIGHVSAEAFVEILRVHPNYPLEVADLYGNTSKTMAWQQQQPVSGLAISVFLLAFINGNSELCKLALKNGACMGTMNSQGQTVFNFSTPTQQLLIGLLGTDGLPFNGLFCHCKNKNW

SEQ ID NO: 126951 - protein, 33 aa, Heterodera glycines
MALHRRTELRLLRHTRDQTLHLLLLGPSGHSFV

SEQ ID NO: 126952 - protein, 86 aa, Heterodera glycines
MTGDKMKANYEVAKKAKREHQRQFTAEEERRAAKQNLVKAKPTKCQSASNQKAIQCYLDEMTEKANNSWARVGKRTEMPRHRLMLA

SEQ ID NO: 126953 - protein, 250 aa, Heterodera glycines
MNRRWICGDVWMDILPSFNYAQLGLKMALLSDRFDVLVDTHFDGKSELTIWKAIAIRKDKGPKAKLSEWIDGKRVEFPLPDRPLPTKIRFKSLWINYIDHSVLAFLRSNKPIWDRRGTKLELSIWSNKTEDDQRIWDVFTREIWPLFATNIRHLSFPNGDDLDNLLRLVSPTILTDLDQLNSIDSGYLSSSAIADDGGPNAISAWQALAKWLHTPSKDGQPKRLRCDDFSKSINYFKEAIVAASGRRRSG

SEQ ID NO: 126954 - protein, 56 aa, Heterodera glycines
RKVFKIAEKIDNMKQYYKMKKQNSELTDHEIATELGIPRSSLYKYNSKLMGDEKKF

SEQ ID NO: 126955 - protein, 495 aa, Heterodera glycines
MLEQANKNALEARKQNKLWFDSQPRVTANKFKVGDRVMVIFPGLHRRNPHKKLIWSNFGPFLILEIGESSAKVVPIDKQKDEPIKVPIERLVKVPKGIPDISTLPKGKNPFKNELKLMALYAGINWKFKNAYKETKCCKNEAPLQLGTIAFDCLGVELGKPKLISARVNVEKGIMIGFGWSSTCAGDIPGHDLCEPITLGSLDPVLGLTKLGSMVAKTPLQALLGIFLLRSGVASSLTAAQTLVEVIVKAQPKLELCMYFGKRGDQISSGKYPTEEDQRKALEKWAGSCYVARQALAATGFNPLEMEEPEGVNSLPESEKLKWKEVFGQSAWALECVRATVVHKAGRFLAHQRVLLGDSSAAALSQYIPNSFCIGQEGSMADIIRQFQPTILSSRVKAMLIITGRDSLVAGETAESIAEQFEMVVELCRRFSHVKIYWCPPPYVHNKSAEYDQLIDKMRALINNGPIISICITEKGRSVLEIFRFGGARRSQFPS

SEQ ID NO: 126956 - protein, 176 aa, Heterodera glycines
MREEANISPADHLALQSLRSSALARKTNTTTKLTRDCRKLFADLMTGEEDGEEKQKKSNEKKEKPKMKEADEKKKEQANCEKKEQKREEKGGENERERGSGAELMARGPIRVPPVVGRSPAAPRGGIANNENSPQFNTKGTAKAKEKPRPAKERLRAMIRSEDMDNAWAWTCKCIQ

SEQ ID NO: 126957 - protein, 115 aa, Heterodera glycines
MSGCETVYNEITQIVNILCAHSSISLNAQNGNGLTPLLNAFKNHAERSEESQSQINNFGTIEALLRFGADVSLADSASGKTVVHYAVEKMDLQLIEVVHFIHFITIHRTCTKKVK

SEQ ID NO: 126958 - protein, 70 aa, Heterodera glycines
MEKGHNVWINEMGLSLLSASVCSASDQCQTHLFPLGFFHAVSHSAQIVHWCLTTKIFLINQLGHSMLTDI

SEQ ID NO: 126959 - protein, 105 aa, Heterodera glycines
MNSLILNIGLFKKSKNGKIGICLVCKEQNRQKSEFSINDSSTKSLIVHLNSSLHKGSEYDKKFQQLETEWKSAKQKQQKEQPKITNVMNMTSSDFYQEISFPRAK

SEQ ID NO: 126960 - protein, 129 aa, Heterodera glycines
SKNIAILPRRDSDLEAFSHNPSDGSFAPLVYRPSTTKCLNLRFLSYAGLLLATGLGKTNLSHDGLNPAHVPYWWVNNPTLGEFCFAMIGRADIEGSKSDVAMDAWPPQASYPCGNFSDTSCWKLYTFKR

SEQ ID NO: 126961 - protein, 60 aa, Heterodera glycines
KPSSSSSRRSSPLPVQVGQDYVSTIELSKRGGGAAAGGGDQRGWPLKSPTTMTASTSSAC

SEQ ID NO: 126962 - protein, 68 aa, Heterodera glycines
MSAHPTAYCPLASSGNTLPTGGDGDGAAATGGGCCGSDGVVPFGGGGGDGDGVVLDGNNPIANKDMKI

SEQ ID NO: 126963 - protein, 52 aa, Heterodera glycines
MGLLPSKTTPSPSPPPPPNGTTPSLPQQPPPVAAAPSPSPPVGNVLPLLANG

SEQ ID NO: 126964 - protein, 36 aa, Heterodera glycines
HALATGLRVHGWGGKLPGREHVQDEPLPRLGRRRQK

SEQ ID NO: 126965 - protein, 18 aa, Heterodera glycines
YREAIPEGFGLPINLGAS

SEQ ID NO: 126966 - protein, 161 aa, Heterodera glycines
MATAQMAAHMAAASAAGGFGFLDMLGQAGAFPKASPTAEEQSHAFQAVPALCAADSSPADHGTNGVNDLLTNGTGANGRRATAAATMRASAPPNDEAVVDGSGGGTNIGPPRAKRARAGSTPLIAGGAALQQTTTMALMGNNEGATTNGSGRTSRESGGGI

SEQ ID NO: 126967 - protein, 241 aa, Heterodera glycines
ECRELIESRTKFWSILAGVGSYFCAGNDLSNFTRGVKTSDDLRAMADRGERVLERYVRAFIEHEKPLIGLINGPAIGISVTVLPLFDLVIASDKATFHAPFSSLGQSPEGCSATFHAPFSSLGQSPEGCSSYTFPLIMGTSKASELLLFDKKMSAEEALERNLVSRVIPNNSFGTETERMVNSLASLPPESLRLNKSLLRDVHRDALLAVNTRECALLKSRWLSEECQNALRKFMTRKSGG

SEQ ID NO: 126968 - protein, 72 aa, Heterodera glycines
AEQQQAAQAQTQKAKEQRQTQQPQKPREVEQQQTPQTQQQPKKAKEDEQQQQAAQSQQQPQKSKYVPPSMRK

SEQ ID NO: 126969 - protein, 25 aa, Heterodera glycines
CRAHPPHDPLEIRKCRNETRTWGWN

SEQ ID NO: 126970 - protein, 58 aa, Heterodera glycines
MANLFGLNKDTIYLSVCLYATNNLQGEPQRNDGEELIMLGWTSVYVPGLVEDCSVCHL

SEQ ID NO: 126971 - protein, 44 aa, Heterodera glycines
MPTNFGELRERICEEIGYGNDTMKLIHKGVKNFFDKKWKKAIDF

SEQ ID NO: 126972 - protein, 322 aa, Heterodera glycines
IEFKRALFASSAINCFIFRFFTKKGFYGRPWTAEQRKHLFTLLRKFGMNTYLYAPKDDLKHRAEWRLLYTPEEAALLESLLESLIRAAKDNGITFVYALSPGIDIVYSSAKELKAIREKLTQVFSLGCTAFSLLFDDIEASMNEMDRKQFSSFALAQLTVSNSVFESLGCPLFFFCPTEYCESSASPSLSESDYLNLLGTKLHPDIHILWTGPRVVSRFLTADHLQRVSTVPRVVSRFLTADHLQRVSTVLRRKPLIWDNLHANDYDPKRVFMGPFLGRSVTIKNVTSGLLLNPNCKYEANYVPFFTLADWVFFTLADWVQS

SEQ ID NO: 126973 - protein, 133 aa, Heterodera glycines
MSMPGESAYTKVIPLSLAALISDSNNAKQQKTIGSFICGASALAQPTRFLRRVQQPPLRPVLQVVLWRIQIRVHAELSQQCEQMLPLFSSPWRSQILERHPEVKEFFGIGRPKLQICRCFDGPFPIAHGLLSQ

SEQ ID NO: 126974 - protein, 116 aa, Heterodera glycines
MDELIEQAGGISVNRCVQRAAFRHAFPRSGKALLYAPATESFDLLVPQVGELAGGGVREWEADKLSERLPPNSNLDWYVELRRRGHPRSAGFGLGIDRLMQALFGITNIRDTIAFP

SEQ ID NO: 126975 - protein, 22 aa, Heterodera glycines
MLCEILERDELQIREEISMWNA

SEQ ID NO: 126976 - protein, 31 aa, Heterodera glycines
FVAFQNFAQHFLVNLQKSIRFDQSVGIFVNV

SEQ ID NO: 126977 - protein, 234 aa, Heterodera glycines
ISADQIFFILLLKSLSPSNISPSDQWAVKMLNQSKSRHFNSPPPLSQEIYKLLENDQFPRFRRSPLYLGFLEALLPRSYAERWTTSFDALLGNQVGRHHFRQFLFNVHAEENLRFWESVIEFRQLKNKSTAMQNMGKTIQQQFLRENMGKTIQQQFLREGAHNEVFLPFGLRQRVEVFLPFGLRQRVEKRIREKDVDETLFDEAVKHVEQILKNDPYVRFLQSKEYNDLLAKLH

SEQ ID NO: 126978 - protein, 57 aa, Heterodera glycines
  unsure (1)..(57): unsure at all Xaa locations
PPPLKLCVGYPFHCLLRLRKGIISAAVXQVTXKIGAIKHNANIVFSFDTRKKGTKNG

SEQ ID NO: 126979 - protein, 117 aa, Heterodera glycines
MTAALLVGGGAAGGVAQRRPSATLVLEMPNHQPQQHQQQQQQLRHHQPQQSIVPSSSALAKDHGNASDEGQQQQGKAVVELPNSTQQPKKQLNQMNKLTGDDFPLKVWQRIGLMVGH

SEQ ID NO: 126980 - protein, 125 aa, Heterodera glycines
MFRSPALFAMFLLMLIVFQLFGVGIVQGSKRSKGRARTKESEGISNRGKESAKESERIWKKEGKGREKEKKKQFRSGRIGGQKNAEKGRGGAKGGEGKGKKGPIDGRGNWNGTDGGTKSTSRRRR

SEQ ID NO: 126981 - protein, 583 aa, Heterodera glycines
MMFHFMNAFYADLVLLSCVPLMLHSELINVDLTVDNQNYFDSGKYRTFSKDATALHFGYSWNTACRIAKCERDSEWAVSLQIVYTLHSYQSVFFKMKSLVKMSPLACFEYNGYSFNLFEDRESGETAIFRGHQQKIVQRLSKHGRVVFDPLSGRLFLIDKHQRRISEIELEYLEHLWLRKNQSSAHTILKSNFVAFLPPDKSDFTLVDNHVFVIRDQRIYKFHIGDYAKGNRALTFVTNSSDVRFNYLIYKPNDQNIIGGVFSHLRMSDAWIPISYLFNLFLIVLCTYILKQLRRVNRKNPLNGSGSTGYYSNPFIDDAYSSQHQQLLNIQLFSFAKTDTPYLPTYCMQRAIRYLIDSYGLSSVDDLYTCLKDEIKSGPEGGNCLYPNPLCAVDCVHIANADHPNQPVHIEGSLELIADVELYSTCYPKKKFEGIERTSVCGAEGLEDLPGRLAAVSVTPLRTIEQQQQQPDSGRAGSDQLLERRRTRKRDYNLVRVLCRFNNCGPYRLTKQLQKRRTENLAYLSQLDIETVHLRKNIKIIPDALCPIGANQVFAYRGFLGITVQQHLYTRHRVMLKYPTLPC

SEQ ID NO: 126982 - protein, 74 aa, Heterodera glycines
MYNSFSLEKISKRIKKCKGWKLIESEKSSTLLYPMIPNLYPLFDNNSRGSLVMWRTVSIGYSTLTGHAMQRVYL

SEQ ID NO: 126983 - protein, 60 aa, Heterodera glycines
VLRRFGGPCPWHGTDLRARPRPVGVAWLRAPSALGGLQNFGRAKQAAQVRDNHWHERHNL

SEQ ID NO: 126984 - protein, 37 aa, Heterodera glycines
VMWRTVSIGYSTLTGHAMQRVYHREVVTASVIGQSDQ

SEQ ID NO: 126985 - protein, 158 aa, Heterodera glycines
MDVILINKLIVVIRKFKIYLMRHRSAAFGLGILPFVFRPDFGPLRPKRTERETQCRVHLRNHRDGFEKSRSDSFGLNIIRGAWKNYEEIMAKIEEKSGGERMGMVVVCQLWNFMDGLKKLVEFMSRDAETTKKEMDRTMEQLRKMTNNRRCRLKQMQN

SEQ ID NO: 126986 - protein, 118 aa, Heterodera glycines
PKNGYLFFLIFLPQTWYQQLPSLVWPYQTILRYLKRKQKKFLTKKWLSLFSHFFTANLVPTVAFSCLALSNNLTIFETQTKKILDQKMAISFFSFFYRKLGTNSCLLLSGPIKQSYDI

SEQ ID NO: 126987 - protein, 178 aa, Heterodera glycines
IVPPGKYRLILWDKLSADGQSLQNNRWPNVGDRSLCHRDEIFCYYCAEPDNLLFYTDVIKFRLNELEKCFVNFYTVETDERGHFLVYKRNKKAFDQFNFYILPLKNSVPISGDDFVPYAEHKIIVKENLRKNFFDPLNLVDYFESSNDWKMNVLDLLNHWLSDEGFSYELSEKANSNN

SEQ ID NO: 126988 - protein, 151 aa, Heterodera glycines
METTKAQLLGIFWDFFSEAAKANLLWKRLRFADQRIVELVDQFCRIDKQYLLSHSQITLALRNVDNAMAFCQNWLVACAKAANAMQTTIVMDAFSHWIYSGRPPLNGAIEIVHFWIELFSKRTATNDIRRMCRWPEIDKNLFRRIGDFGTF

SEQ ID NO: 126989 - protein, 28 aa, Heterodera glycines
VIEAVVTDCFLLTKVQFTTHFSHIYFLL

SEQ ID NO: 126990 - protein, 237 aa, Heterodera glycines
CEFSHEPLQLPEPIGEVTVRQEKVFVPVKQYPEPEGEDDLKKKQLMELAIINGTFRSTNGTAGGGASNRASPSSYGKGGAVACNASAAAAAASLLQLDPRLLGCPTTAFSNTSAGLAGTPLIMPSAAALASPHTSAAQLFAASPYSAGLASVAQAATAPNAIDYQQQLLALGQLQQQHQPQQSQLDVAAQSQQLSALFQQQQLALSALQQFDYGSGAVVGYGGGGGKTDSSPSSSAA

SEQ ID NO: 126991 - protein, 35 aa, Heterodera glycines
KNDKTPDLGTLMRAIEMEIGPVTSPDLFHSYVIAH

SEQ ID NO: 126992 - protein, 162 aa, Heterodera glycines
MLLKAMIGGMCANFTFSGDEHLIKREIEKISEFVKDITGNATQWIRAELENSWPLEIIRHVKIGIKNPIIDPYSYNYTANLIDDIVSPRGPFGYVSQILVTNDFDRIENFWQRCPASYCAVVKGYKGINFSLFRHKVGHLTRAHKAERWFERKRDKMYDIIL

SEQ ID NO: 126993 - protein, 71 aa, Heterodera glycines
MIAIPIILIFFVQPAICLKIVCFTHSKMFEANSFLQQQPNCSHLVIKDFAKIGLKEFKADLNARYKAQYLK

SEQ ID NO: 126994 - protein, 30 aa, Heterodera glycines
TFSNFHLINLRRILPFLINSLVKRQKNRLF

SEQ ID NO: 126995 - protein, 44 aa, Heterodera glycines
AFFLFSLVNLFKFSIFLAFFENFFVFFSAGTASDNVFYLFRKIN

SEQ ID NO: 126996 - protein, 53 aa, Heterodera glycines
LFFENFFVFFSAGTASDNVFYLFRKINFFFLLIYFNYISSLNFLINIFKLSPY

SEQ ID NO: 126997 - protein, 53 aa, Heterodera glycines; identical to SEQ ID NO: 126996

SEQ ID NO: 126998 - protein, 21 aa, Heterodera glycines
KRARSARLEPRCGLKASNNFL

SEQ ID NO: 126999 - protein, 111 aa, Heterodera glycines
MPPKGENWDKMPKQQQKEFSAGFSIVTNDRNRSFTVSAVQMLCNTAGNAPKIVEEANVEDYLFGWSEVSKRMSERFFCTYGIVESEKRRKGRIGGKVAMEHLTKEQQPINQ

SEQ ID NO: 127000 - protein, 42 aa, Heterodera glycines
MDRGTGPDEDGAVRKKLAGRTLPVPVPVFQKELQIQVSPVLY

SEQ ID NO: 127001 - protein, 109 aa, Heterodera glycines
LFEYPKRTLEKIDFFVFGAVPPNRCAQIYGETESFRNSFPIACTLILRWIFAPHNCLSTPNGHLKKSIFFVFGAVPPNRCAQIYGETESFGNSFPIACTLILRWIFAPR

SEQ ID NO: 127002 - protein, 31 aa, Heterodera glycines
MNQNLREIMKEISFYWYVSRSRTNTVFGYVA

SEQ ID NO: 127003 - protein, 53 aa, Heterodera glycines
MKMKNDQKYARDNAKMRECWISVPVIQNIFDEGGRENNFNRERNGKGVMSLLR

SEQ ID NO: 127004 - protein, 113 aa, Heterodera glycines
MSIFPYCACFGIKMSIPNVEPSYLWSSTVGKLKFQALGPQNVKSSNAAPHLSIHTVPAACETGIWLLVLRTSALAVLAAILAPLRTVFGILFLATVVTAARHIQCTVFLGAIF

SEQ ID NO: 127005 - protein, 89 aa, Heterodera glycines
MNGAHPKSPTRETEYAPGKMEVSEPPSLSRVDRPIELSVTVTNPDAVVQAQAYGDHEVRLQLNDTEVDESPLICRVYDPASEGNQNLLI

SEQ ID NO: 127006 - protein, 196 aa, Heterodera glycines
HRLSSFSDAFTFFLPGFATLGINFPPAFAMLRHIVPLEKGDFLVQNASNCGVGRAVIQLANYFGYHTINLVRNRKEIDAFGYHTINLVRNRKEIDALKDELKALGADFVFSEEEFEKNLKRNAKSLPKPRLALDCVGGRSAAKSLPKPRLALDCVGGRSALLLSSALSKGDTIISYGGKATSPIESRISLLKFDRK

SEQ ID NO: 127007 - protein, 41 aa, Heterodera glycines
MNEAKEKGIQQNRSHQLIADVWKFDMNTAQWVRMRNNLAKA

SEQ ID NO: 127008 - protein, 418 aa, Heterodera glycines
SVSPHSLPMAKRAKSSSPALSLSHCQLYCSLLLFLLSILLSVLITFLLTRNAINETADEAKEERPEKRKEPGAEELRLPFQLFPIWYNLSLKVFVPGFGELRLPFQLFPIWYNLSLKVFVPGFGAEISPQLNLTFNGDLLLNFAVNRTTRTIELNALKLRFDPNNLMAYELKRTDNLATGDEVDRTPKVIGILDEAREKASKRAGKIPYSGPIASKLSGLYLTTYTTLSGEHKCAAVTQMEPTDARRMVPSFDEPEFKAIFRLSVTHPKGSRAVSNAKELREQQQTTEWIRTDFETEWIRTDFEETLPMSSYLLALVVSDFEFVEGNTSRGTRFRIWSRKDALNLFRIWSRKDALNLTSYALRATSYALRAGIKVLEFYEQYYGIPFPLPKQDMVCLSHLNSFLFAVLPFQMAFSRFC

SEQ ID NO: 127009 - protein, 139 aa, Heterodera glycines
IYLTRFKYRNAEHSDLWDALTEAVPEGMKDWKGNKFSVKQFARQWTERTGFPIVQVKQIDGQRVQLSQQRFRMNADAAETGAGGNSSGTWEVPVWWSKDGQNGPMEWLKDGGSPASVCIDHPIHCQSRPSTRPTPPFWC

SEQ ID NO: 127010 - protein, 95 aa, Heterodera glycines; identical to SEQ ID NO: 125597

SEQ ID NO: 127011 - protein, 528 aa, Heterodera glycines
MLADQQKMVQDQSQQIAQLIAIGQNAPNAAAQPNQGANSVPILPDISPFEPTDDKSRISEWIERFKFALDCTAPTADDEVKVKCLMNKLSESAFSEYSRSVLPSSVTDLSFKVTTEKLEKLFAKAQSIFIDRYECLKAVRGEGEQFRQFINRHKKLLTDFKFDELTKEQFNCLMLLMALKAPNEAALRQRILTKLSADCANISYDGVVEDLISFQSTISEAKAIEATSSSRPVNSIRQNSKPNNSTNKYVKESPKPNNLPNKFKERTNTEATTICWRCGFGVHRPDECRYKTSKCRKCEFVGHLDKQCERVQEWRRRQNAKKKGNNRVGHLRIGMTTHAVNSISLLKTAVLFNKKPVEFHLDTGSDIVVIDQLTHQYVGRPPIEKCNEIGKAFDGTKISFIGKGFGTFKFGKIEVEQTFFVAKAGSLNLLSCKMMDLFGLLDELKLKISNPAVNACHANGKKAENFIPNEATQIAGTGTEIQALEKEFHEIFSEELGHCLKEKAHLALKDDARPVYRKARPVPYNSLE

SEQ ID NO: 127012 - protein, 141 aa, Heterodera glycines
MAELEQEVADDQKNAQQKDPSRASAPKRMELAKKLESKVGSSLFVQIGRSGQELSVRGFGAVFGRAQKDANAESDQQFVGHFPTDRRPTDQNERPLTLKRSLLLLTNFYGPVICRVLVPKNSVVNAETTTIFGDVNNADRL

SEQ ID NO: 127013 - protein, 86 aa, Heterodera glycines
MKKFSIIPMPLLLVVVVLLIIPFVPFTLSQLCLYDSVTESCLKVNCLNECYVDSPGTCGCNARSNDAKIRSEKMLDSGILVAMEHT

SEQ ID NO: 127014 - protein, 152 aa, Heterodera glycines
MTAAANGFAFSTDWSNGGAPPRFGKQRRERTTFSRAQLDVLEGVFKNTRYPDIFVREEMATKINLPESRVQLQIKLEKIEDGTLNSSAQNGGIGSGGISPGSQLEVGGPPQSVIGQYTSYYSPFRNGAAHPYMAAYAPSACSMDMYTAATLA

SEQ ID NO: 127015 - protein, 139 aa, Heterodera glycines
LPPVPMPSALPLSLPFCLALLFLLLLSPSPCFSSSPPDDSPIVSTKFGKIRGQLLHVVDPVDGQPVALTAFLGVPFARPPLGKLRFEAIEIVAINQIAEILQKPLKPEKWSGVFNASEMAPACWPIARAEIYAEVHNEC

SEQ ID NO: 127016 - protein, 179 aa, Heterodera glycines
MELLDPGKGFYDKDENKVKLAIDVIVDEPKTEKIISDPNKSNGTLSMEIEKLSEFEREIEGSHRKSETAVYIKGMPWKIFAYIKMKNESTEKWLGFALLCDASEKDGNWSRKCSGTLRIVSQKNGVEDFKKELDETVFNNESKSWGNNFISFVELMDPSKGLYNKDEDNVTLAIDFTCE

SEQ ID NO: 127017 - protein, 154 aa, Heterodera glycines
MSFCGSFQRLGRSSKDAPEMVIDWAKNEICAHFSIPIEIFDNVEFTEKIKTVYPMFKDVNTDKLSTHRQLQRKISFSESPPTHPNPTHPYPTHPNPTHPYPTHPYPTHPYPTHPYPTHPYPTHPYPTHPYPTHPYPTHPYPTHPYPTHPYPTHP

SEQ ID NO: 127018 - protein, 192 aa, Heterodera glycines
MQRTLADYNIQKESTLKLKKTRLSSRGVDAIITKVNRSPPHRFTDEISDDEIRQLSQSGNGRLPNAADARQNPPAGRHRGRHPWTIRGPEEDLLNAWPPAGAAVRLPGRLRRQRTPVVGDDHPPLLLQGEVPLQLHAAAREPRVRQHQQSLWLLRGDRPPLPATGRSSTLRPLQSSLRLDAIRRTGRREDPL

SEQ ID NO: 127019 - protein, 213 aa, Heterodera glycines
MRGRTVDLRDDRVHASAGQPRFFQFKCRFLLDVVVGQDIDTFRKLMNEYNTLSGPAFDVLGNLLSVSENSKLLMKLTGPAGSLLAACIEIAFKPESPTLKALATFHDWADRKFTEQNNMVEIAMNSIRVAHDLNDFDNYINEKVNDNCNTMPRRIMPILSELRALFAGVFWRYDEQKLTIEYNELKKTYLRVLEKFAIASEEDAREIFIQIRD

SEQ ID NO: 127020 - protein, 146 aa, Heterodera glycines
MRWGALDARETLKDELSAEFFLKNEKFSKFKNKIPFSESTNDKAPELGTLTKAIVEKVGPITSDPFYHSFVFLHVSAFSSSNCKIPTGISSGSYMGQEGFSFLEDLQGIFVYQHENQGYDWASITKVFKEPVIINNRFKNIVIKCY

SEQ ID NO: 127021 - protein, 19 aa, Heterodera glycines
MSALSDTLFGSLKIINFKK

SEQ ID NO: 127022 - protein, 71 aa, Heterodera glycines
ALVECLAKYKKPACKKICPTTKSLVRKVGTVRRKVSALLWLKIGEEQSEQLDLCEENNETDFGIANLFNDN

SEQ ID NO: 127023 - protein, 77 aa, Heterodera glycines
MRHSVGPTNSAVKKASNVPLKIDEKCLTQFCPTFVFHSYQKRILQKALVINNILMIREFAILKMLEPGLDSLLDLDL

SEQ ID NO: 127024 - protein, 83 aa, Heterodera glycines
MEEKEMEWTERETEWTMRLENGERELAMMRELGREQRGQQRRKKVMKELIVSYFYGYPKNVWSFKCMKLFKDQLIHTALYMKR

SEQ ID NO: 127025 - protein, 173 aa, Heterodera glycines
MIISFLTRLVLLLPQISYTDSVRLEQIAASRRLSAERISLLQRRNCEKRIWSERKRARKRRRGQRQKREKPTRECIPIDDNRRKALIQVVAENHYDKNNLPSSNHTSVIVELTVQSITEISEFSSSFKADVWFSQIQIWRDPRLDFSSLNYCLSNISLPSHKLSSLWTPNVCF

SEQ ID NO: 127026 - protein, 75 aa, Heterodera glycines
MPQKRRKETRAINRIRKRRAELELLVSGNKDGGQNMDSKTDTKRAKETKTEDEEHLFAELRQQHLISRDFLSLIC

SEQ ID NO: 127027 - protein, 44 aa, Heterodera glycines
MFLISTVLFSVPSYLFAIRNDRRLRAVTPYGGVLAMLAWFSFVL

SEQ ID NO: 127028 - protein, 126 aa, Heterodera glycines
MDELVKPYNKIIDYITFKSGITEKMLSKVNTRLKDIQKRFCALLTDDAILCGHSLENDLLALQLSHPFCIDTSLLFNFSGRAFVRSGLKALADIFLNEKIQNSRQGHCSLQDAMATLKLLKLKLEN

SEQ ID NO: 127029 - protein, 28 aa, Heterodera glycines
MANCGGGGDRCAKGCDDNDPNYGDNIGM

SEQ ID NO: 127030 - protein, 486 aa, Heterodera glycines
MPFHQQTQHTAKCKWKCHNCLRVGSAFRGNCVQGNDNFFETCLGCNKHHQQKEHVCGQKFCKICLGFHAPRDCYIPYRPKVKKEKRFVFFDFECTTDFKPDPQLMRFKHQVNFCFAHVTCTRCIEKGIWDQELERACALCGRFRTYAWSPFEFWHTDVECRKVVEDPLATFTKWLLNFETEVLGMEPGAKKRRKRKNIDNTDGDAMEGEEDEDAVDEDAENNWMLGYEEAGEKPESVTSYAYAHAGSRYDHVLIYGEMLRMGVRPELIRQGNHLLEMKARKTGVYTTTIFRDSYKLIPIKLANFVKTFGLEIEGVDNKKYFPHKFNKAENYGTVLDTLLPMEDYYPGGLFPAERAKFEQWYDENRETGFELNEVIADYCKTDVQILAHGLVKMRQLFLSETRHDITDSVTIPSGCMKYWVQLAHHDKERVAIIPHLGYEKRGKQSTIARKYLKWRAEEELRENGRVLRHVESPGGEVKFGTTALDG

SEQ ID NO: 127031 - protein, 397 aa, Heterodera glycines
MYPRGLIDPEYNCDHFEDSERGFSTTVTHIELEAALRSWYKVTHVYRAYIWPLACDWSNGLFHSYLLKFLKMKFEASGYPASCTEAGISEEESARRKQEHIDKAKEKAQVPLEADRIKHNPGLRYLSKLCLNSLWGRFALRNRLTKTEIVECHAELAKLLNDSKIEVSSIDQLTEKFWMVCYKAKDEHVVEHSTSNVAIALWTTSAARIHLLESLKKVYGPAPGVERYDTRILYMDTDSIFYDYLTRLGDPLPGAGPKAYGLWLRNNATGEDEYKLKLRGITLDSDACERITFEKMKEMVQNKLGQPDNNVRFNYPTKNFRITKKGEIFTVPLVKQFNPTVNKGVVRDHGLKVVPFGYSDEEWCKWNCPGACTCLFNPDLNVNMFTEEELNDPDIMP

SEQ ID NO: 127032 - protein, 190 aa, Heterodera glycines
MTTIDQEIQFIKNEIVKRWKRERKIVQDANHLVTYCNKISFYAKTYMIIAFSAPGIHEIYEKFLELAQKIRQLYLQISNEYKNISKILGEFENCLKYKNIQRCHENENSSKHSMATCYKYRKQLRKFRIEIDDLFQNIVSLAINYLNPPEEPIKEQNENHQNEIFYTPYRRNRIIHGQLSEIFYSPYRRN

SEQ ID NO: 127033 - protein, 152 aa, Heterodera glycines
MIQRTEKGTAILLEALKKEAERARKEVSVLADEADEYAKSARGALNRAIKSREKAPYAPGVREWFVKMSDCIWEIFTILDQMNAEFETVESIWREAERSKDYDQVKKLEERVLKGLSEAKILHLESRRIHTKILELENRIQSVVWDFIGLHE

SEQ ID NO: 127034 - protein, 325 aa, Heterodera glycines
KQRTYTIHKPIRKRFPRLKTIPSGFHTDWQCDLCIFDQLKKHNDGYKYLLVCIDVLSRMIFSAPAKSKKSEDMIEAFDRVFEKSKIIPMKIYSDSGLEFQAGKMKKYFEEKFIIKNVMYSPDLHAGVVERANRTIKELFGLVFDQTNGNCCCLSNEEKQQLNAARKTIEKAFRDTTRLNNEARDFAAASHRAITEAEKIKVRHPEAPGMKTWFGRLLEGVRKVQGISEKINEERQKIGHIRKEMDKCLDRKDVLMCRELADEAKGAFEIVKQYRQDVGTAYRNAYTQSDLGIGELADKVKETMKEYLYRPGPSPRPTFKDQFISD

SEQ ID NO: 127035 - protein, 31 aa, Heterodera glycines
MRVNHRKEKIYSENDQSDVMGLVSEHVFVYE

SEQ ID NO: 127036 - protein, 85 aa, Heterodera glycines
MDKQKKSRGRPPKNTEKREIPQKENLEKKEIPHKEKIKILRPKIKLKGRKIELDTENSTNSVPTKIKLPPIYIFFSEKYVISGDY

SEQ ID NO: 127037 - protein, 115 aa, Heterodera glycines
MSKEYADSKILEVVCAGPKQYALKLQNQKGEIWYKTKIRGMTQNKNNKIDYEEFKDMVLNYEEEKKIRFTHPNKFGPTRESYVISRNITKDYRPIQKKGIILDDENLTVLPFGYW

SEQ ID NO: 127038 - protein, 167 aa, Heterodera glycines
MIYYYLQIVLPLELGAVIDRFYRGYHYENFDGNLFKNYVRKFLKLKVEATGWPQDVKTEEEKIEFVKTYRETYEIELDPNNMNFNPGLRHIAKLALNSLWGKFSMRNKLCSTKMISKPSEFFELINDYTIEMGKPIRFNDNTLRVIFCKKDEYVKEHKCSNIMISIW

SEQ ID NO: 127039 - protein, 141 aa, Heterodera glycines
MNVQFAAVLMRAIVLLVCVLLPKICEASPKKEKHYNVPKDQFASSVQFLTGTDTTRSNTNFQDRSTLLKPTLDWANSSSFKSWLMPVEQAGGSASSATSPSDYFQPHEIANSSIGNQINGMEKRLFMPPKWLEDANNKKKS

SEQ ID NO: 127040 - protein, 87 aa, Heterodera glycines
MSEEICATISEVFRADFQLQISAHGTNSIALLVNKKAASVPAALLATFLALNITYDKQIGKIDAELKEAIETEAKSTKTQLVKRRDD

SEQ ID NO: 127041 - protein, 95 aa, Heterodera glycines; identical to SEQ ID NO: 125597

SEQ ID NO: 127042 - protein, 285 aa, Heterodera glycines
IQSLGLNPPTFQSPGLNPPVFQSLGLNPPVFQSLGLNPPAFQSLGLNYQTFQSLGLNPPTFQSLGLNPPAFQSLGLNPPAFKSLGLNPPTFQSPGLNPPVFQSLGLNPPAFQSLGLNPPTFQSLGLNPPTFQSTGLNPPAFNHWDSTHQHSNRRDSTHQYFNHWDSTHQHSNHWDSTHQHFNHWDSIHQHFNHRDSTHQHSNHWDSTHHIPITGTQPTSIPITWTQPTNISIAWDSTHQHSNHWDSTHQHFNHWDSIHQHFNHWDSIHQHFNHWDSTQQHSNHWD

SEQ ID NO: 127043 - protein, 234 aa, Heterodera glycines
MVTCRMGRMFAMPLMTTNSPTFHGEALSCSPQFRRVSHHSVFGMDEDLMPMPNLAFCKRFLQIKNRDNVCQEIVLDLNIHKSSVYKLLAHYRNPTEVNVELEVKLVPVQTQTPDSEQFAKAVFAPSGGHPQNAFVETNPEHTFVLSPGRWNLHVRSPKRLYLDYLVLIPADYYQGEALTERIIEPCRANETENCVELLYPPIPIASKVDAITDLAKFEEVEPGTENVQNILSHV

SEQ ID NO: 127044 - protein, 158 aa, Heterodera glycines
AGVPGPIGRRGKNGRPGADGKPGPKGPPGDYGPAGPAGPIGPPGPPGTDLHSWARGVGVKGPSGPPGSPGDAGQPGVKGPSGPPGSPGDAGQPGTNGEPGQDGESGPPGQVGLRGLRGDDGTPGKPGNVSESGSPGKPSPDGNYCPCPPRSDAAKSGA

SEQ ID NO: 127045 - protein, 201 aa, Heterodera glycines
AQKDPPPPLHPNSAVRFRSLLTAVSFSRAKNVCARRNPCRNGGVCVYDELTEKSICKCAAPFTNDFCTERIDFDPCSPNPCQNGATCSAIAGTQRTEFDCFCARGFAGRHCEFRPPCEDNPCKNGGTCRTTRAQSLFFCACPPGWAGKTCMVGGGGEFANKYFNNTTRQLSSGKAEWIEELKREEGEPGGGQENACPEILQ

SEQ ID NO: 127046 - protein, 83 aa, Heterodera glycines
MKQFLLLSLLLCCLFFAVFSLSFNDQVELPTFCSGPNKENARVLSCCEAVKAFEGSEMSESGGAAPPELKECVQCGTELCPRE

SEQ ID NO: 127047 - protein, 105 aa, Heterodera glycines
MPLGLPDSRARESGETQFDSRLFNQTGGLDSGGIDDETYAAYDKPWRPQDGIQQHIYRPRKDIDSSIYGADLDRIISTNRFVPDKGFSGADGAGKEGGQRSGPVQ

SEQ ID NO: 127048 - protein, 300 aa, Heterodera glycines
MALKIHATGFPSWCESEEQKSEYIEECWMKFAIKLDKEKMKAEPGKRYIAKLCLNSLWGRFSMRNLLSKAVINNDPCVLRQYTDDKKIDIMDIELMDEDNDVFMLTYKPKEEFVDENKYSNVVISLYTTSMARLYLYEVLKKVADTPGCEILYFDTDSIIYVHPEENDPLPTGKGHLGELTDEKPDHNILEFISAGCKNYGLKLERKDNGEIEYDLKIRGITLDEQTVQTIHYDSVKDQIMRYGSDDPADPIIVTYPHFIRPNLIQGKVYTQSLTKHYQPVFTKGIINDSFQVLEFGYRK

SEQ ID NO: 127049 - protein, 119 aa, Heterodera glycines
MPPPANTSALPTNYSQKRNEFDAFQKAPSLPISFIKKIPILVEHILNFHKNFFPLMLMCFNCIFFTSVRMNWLPVSKANGPHWYSTKRFHKSAKDTSAMSQIRLDFEFAIACVGMPEPN

SEQ ID NO: 127050 - protein, 48 aa, Heterodera glycines
MRVFVHISMVRLLGFATWGPDIWGSDTYGIRHLETSFTTYYCFIYIFL

SEQ ID NO: 127051 - protein, 147 aa, Heterodera glycines
MPTNEQEILDAFEAVLAKKDLPPDKMRILRDCDLKKKWDLVCDEHQFTHNQCITEPHVYLNQLMAIMDKKKSTKKKKKILAGDSPTQILKHLEISLRTNSIEWVRSFLSPQNNGQSHNQSLLLCQQIFPFRTPSCGGISQPSAAIIE

SEQ ID NO: 127052 - protein, 60 aa, Heterodera glycines
MKKSYRSYNLKSPNQDQKFGNRKLLTLQKSATNQWVTEKMKITLKALKIFILTFLPFLIL

SEQ ID NO: 127053 - protein, 52 aa, Heterodera glycines
MATLLEYPASVVEQISVKLSAPNLNTIAMAYPKVEVPKYSRATLSAGIVHFG

SEQ ID NO: 127054 - protein, 21 aa, Heterodera glycines
MRTRPIWQVKQRLLTSQKKGF

SEQ ID NO: 127055 - protein, 99 aa, Heterodera glycines
MTQPQKALTEPSANESNIPEKVPKAEPHSEKNELSSSKFEALCEPPTPDQNAHCEEVRYAKSAFFGWHCPRLYVNHLVTVRPLGAALIHFLLTKKEIFH

SEQ ID NO: 127056 - protein, 36 aa, Heterodera glycines
MGPAAAKVEKAPDNPSVDNPSVMNNPSTLQQILYLK

SEQ ID NO: 127057 - protein, 22 aa, Heterodera glycines
MGEFRVKFRQLEADIEELKGKN

SEQ ID NO: 127058 - protein, 68 aa, Heterodera glycines
MRGNEAVVRLLLFPQSFAILRQNDLFAGQIQSTSDDVTGIEFGQVLLGAAYNSVATYIAIVEVGKSAG

SEQ ID NO: 127059 - protein, 156 aa, Heterodera glycines
EIVYYEVKIFSAEQKDFGTQNDSIGIGFAPKSMPLGTKVGTHPGTFAYFNDGNVRGHRIVGSTKQNLAKFDAGDVIGCGLNLTSKEIILTKNGERLGKKEQTYHRFISSHYGSELFDTNFFFASKDADDLYPAISLNNPGDEVEANFGPNFKYTLN

SEQ ID NO: 127060 - protein, 203 aa, Heterodera glycines
MGSSSSSSSSSSSNYTSSSSSSSRTTIKINFMDFSSNDNGSSSGFIEEGYCSCPWSHLRSISITLLEYHFAGSDNSRSPIETAIGIGSSLLSSIVPLIDDEDKELKTIGKLLGIPSVICGKVSKETHAFCIDCLGKYTNAAHETMPFAHSALGLKCMAKKCENPIPWQEIKNWLPKELKSIGALENYCAELSVEMAGLSYLER

SEQ ID NO: 127061 - protein, 121 aa, Heterodera glycines
MLLYQVFQCKIIDKLTRNGLQEQQLLQNVDKTEEVVPKAAVEIDQNSQQNVPQRPNYSRDQLKKLECVFEGKNYISSNESEQLAKEIGLTKEQIEKWFKNRRAKQRAQKRVEEVISETIKS

SEQ ID NO: 127062 - protein, 105 aa, Heterodera glycines
MSKIYFHYFKLTIRKLVRSRNNPGVLIFINLEVHIQKSIAARNPDFQRQIPVIFVPWNFGFPFQKFLGSRNAIQLNTRARVIYGSSPTIWEKSRGTGIKFPEDYL

SEQ ID NO: 127063 - protein, 52 aa, Heterodera glycines
VSLFAFAFRIIRIFWRFAFRFLARKATFTPLRIGLNSHKIFQNFTYKLANFQ

SEQ ID NO: 127064 - protein, 109 aa, Heterodera glycines
MAKEFANYGENRHGESEGQMEKPKSEIEMAKTNSDNEAEPIVTIMKDGRIEVEETERREKPKTKRNAGGGAKKRTMSPDAMDAADSMLKLAFTEQQKVKKRRGKEKQKG

SEQ ID NO: 127065 - protein, 43 aa, Heterodera glycines
FLFEGEKAKGTVERQRRIFGVERRGEEGKREEEQRGAFWGGGG

SEQ ID NO: 127066 - protein, 25 aa, Heterodera glycines
MAKGTPRRNVATNVLEANWTTNCWR

SEQ ID NO: 127067 - protein, 251 aa, Heterodera glycines
MDMFRFNVHNAVKDTDDAAADSAAHDQCQQRQQREVASPRTMPLSLLVEEQAHVSAAAEAAAEAASAVDQKMSAAPNDTPAITDTKIDFMTDEQTVAAAPPPLFSEIEPTQQQQQQKKQQGRTAEIIAPKVELSVEDNGDDDDDDEAGQQVKQEADRNGMDAHHSNCAKGPLLFIDEQENEEEESEEDEDISTTHRRQGMDSSFDYEDDDDDDDNDDDDDDDEMESVSGCAESDKCGHCHHPHQLPRNALE

SEQ ID NO: 127068 - protein, 205 aa, Heterodera glycines
MLKLSFPFLPIIMMDFAIGRIALNDKCQKDFFATADQLQEMASEIFAAADKQTENGKFFEKGFDIFCCIAFEIEKDALNKDELAMIEDFEAKQRNFCHQMKKGQNIWEAMESPAGNAIVTAAKNLKVNPQTYEEGLHERLAQTLLAGGGQTVSDQSSALSAQPAPTRSDQLPKGKSHGEGKGRVNGQNALVLLHWPAFPAMCAVY

SEQ ID NO: 127069 - protein, 164 aa, Heterodera glycines
ENARFVPNFVISFTFLALFCICCSFTLSSRHAFAIDWIRSKPYVACAGLFNTILALISSFGFLLLLGIPYNVINTIIPFLIIAVGIDDMFVMNSCWDQSDPALSPDQRMAQMMQNGGVAVSITNITDILAFLIGCVTELPGIELFCLYAFAAVLFCYVYQASFF

SEQ ID NO: 127070 - protein, 100 aa, Heterodera glycines
MDDPAYVFTPRDARWKKELGTFSKLWPLEENKFIPGKSFEMKRFVNVLCKAKDGHAGIFGHCPWRHRIERHGRHGDGSKSHTAVLLPETGPTRRTTVLHG

SEQ ID NO: 127071 - protein, 18 aa, Heterodera glycines
LDISWAGHFVGQRKTVIK

SEQ ID NO: 127072 - protein, 20 aa, Heterodera glycines
ARFKPPNSSGQLTGTVCTER

SEQ ID NO: 127073 - protein, 141 aa, Heterodera glycines
YVLVLLLFSKFHKLESLGFKKSRRTTQFDTFMSTHLIQNFCSLSDYGRSVDWWGVGVVMYEMMCGRLPFYSKEHEKLFELILQCALRFPSRLSPEAKILLSGLLVKDPNKRLGGGPDDYREIQATEFFRPIDWDRLYRKVR

SEQ ID NO: 127074 - protein, 100 aa, Heterodera glycines
MKHQYQNELNTQSSRAVTSPLADDDETLDESRERAYKLVAYTAVGFSLVAILAVAICLPVVFNFVDHIQRQTKRELDFCKNPAVRSGKMALRILKAMHLL

SEQ ID NO: 127075 - protein, 54 aa, Heterodera glycines
MNLMTTFLTTKRKSWVLISFHFQNCGPEQRLLRQKRGQSDIGHRCDSERSKKRA

SEQ ID NO: 127076 - protein, 65 aa, Heterodera glycines
MKPSTGRELMTMTETQPKDVDIIILCGIILADVSAAVESLNEIRLGIMSGSREILHLSNGITSQG

SEQ ID NO: 127077 - protein, 57 aa, Heterodera glycines
MPLSPTRAQVLLLLPPAEVVARVVVALAAVVLVTGADWSQGGRTLVFHFLLYKLNAP

SEQ ID NO: 127078 - protein, 42 aa, Heterodera glycines
MPPPPITLLLIETFMAIECWQQVRSIRTRSKISNILIPHYFI

SEQ ID NO: 127079 - protein, 185 aa, Heterodera glycines
FFAFCQDTDFGFTTFVGGHDILGGGDCEVNNGDMKYMFKLADGVTIKNAILNTPGMGIFCRGTCTLENIYYKRLCYHAAGFGYEDINQVNTYKVIGGGGMGSPDKYFTQSGQYFTQSGQGETQISGFCGDGRFRVYHYDKIYHTDKKIENTSPKQVSGRFLKILEISLFILNAESNQIEFLINSS

SEQ ID NO: 127080 - protein, 65 aa, Heterodera glycines
MDTGFMALTEDIDFYVDSSCEEDDDGDIVLEPPVAAETEPEESQKEEEQREEGKAEEEAANSKAI

SEQ ID NO: 127081 - protein, 96 aa, Heterodera glycines
SKKEKEICSQSAKDTQHKINCLETLSKYYRIINCHSNCFAIGRLLFGFSLLPLFLLLLRFLRFSFSSNRRFEDDVTIIILFTRRINVEVDILRQRL

SEQ ID NO: 127082 - protein, 41 aa, Heterodera glycines
MLYTIEVVKKKFGRARSEAILEVEDEEEEQEEDMEWDEEEA

SEQ ID NO: 127083 - protein, 67 aa, Heterodera glycines
MNAYQQQQQQQLLQAYYSQFQPQGVAGADGQVPAKYKSTLCNIWLMEGICTRGKQCHYAHGIKELNY

SEQ ID NO: 127084 - protein, 29 aa, Heterodera glycines
LIIFVCNFLEMLELSCFLVLLHYSDFVLS

SEQ ID NO: 127085 - protein, 53 aa, Heterodera glycines
KVCSISITNRPSVHENGLEDQCCFVCTRPVNTSNECNAEAGPILRDTPWPSSA

SEQ ID NO: 127086 - protein, 123 aa, Heterodera glycines
MVSTKFRAAAIDEMVPERRTKIERRPCIGVLTVLVCLYFCIVNEAMSNYYGRIGHLVGFNPPSNRNEAEEMIIEEDARLLLEQSLDENGLLVDQYFEEMGLNEVQDENSHDVNSEDGEVDIMN

SEQ ID NO: 127087 - protein, 113 aa, Heterodera glycines
MPAVDCLNGYRSYTDRCGEFFMGDPLDPNMETDFDFAGNLALFDKAVKLSMTFGNSPTQERKLGEQETQFDETITRTGIACDRIRLQLKKCIKESDCIQVDNLVLRLDHVPFI

SEQ ID NO: 127088 - protein, 59 aa, Heterodera glycines
MFVAELSMTFGNSPTQERKLGEQETQFDETITRTGIACDRIRQQLKKCIKESDCIQVDI

SEQ ID NO: 127089 - protein, 61 aa, Heterodera glycines
MGLTRPAIVLGTIAMMRMFFRILPVLSRGPKIPLLMMMTIKTILPPLRSTDLIKRFEHRPI

SEQ ID NO: 127090 - protein, 168 aa, Heterodera glycines
QQSRPNSPANGVSKLILPRSRVASIRRESDCNSEKGFGEAEAAHEKMVKSAQQVAMGFEDFCLDDKAFEERKRAKSLSEPICIFTNAFLPQCSSPSPSRGSMDGQKVRTTDSDFDRHSVVIRSAMLFSVCPASRPQQFGVFSESESNSVWHSVNAPNEVLRESNAPSR

SEQ ID NO: 127091 - protein, 498 aa, Heterodera glycines
INSQTYVLIIVIGGGLAGMSATLEALSNGAKVILIDKEPTLGGNSAKASSGINGCGTKVQEINGCGTKVQEKLGIDDTAERFHSDTMAAGDRENDPGLVDLLVHQSASAIDFLTENGVVHQSASAIDFLTENGVDLADINLCGGHSVPRTHWLLSPLLSPKEGKPLPVGVAIIRTLNAKLEEWKARDPERLKIILGTAVLGLVTWNDYVTGVRIRDGDNKISALINGKAVILTTGGFSSEISALINGKAVILTTGGFSSETSLLTSLLVEFAPSVLPLPTTNGPFATGDGVKMARAMGAGLVGMGKVQIHPTAFVDPKNPTAHTKFLAAPKNPTAHTKFLAAEALRGKGAILVNEKGQRFGNELVNEKGQRFGNELGRRDYLTEKEQSEPLNCARQKSVNCARQKSVADLPIAWMLMNDQMADSFGRPAFNFYAKIKGFFTHFANVDELATEHFANVDELATEIGCSGEMLRKTLAECNEYAEMSTKSDKFVDPFGRS

SEQ ID NO: 127092 - protein, 204 aa, Heterodera glycines
MATDIKTILLRLSSIETLLSNNNNNTLATQMAEQFNAIAERLNEIERKINSNNNDNSSAEEKERKRSLVLIGLPEAVAEKPSERAKEDAETVAEVLDALDVEVCPQMVYRMGRRIDEKRKGPRLVKVVLPATTFQRFALAQWGRNRTELKQHVGWQRLLVRPSLTKEELAAEREIREQRRMNYEESKKNEMVTTRRGGNMGKNF

SEQ ID NO: 127093 - protein, 270 aa, Heterodera glycines
MSKSGAKGLSRFEISSSTGAAGKRRGSSAEELPANLKGLAEVVDFGSVGVFYVRAKLVNLQYSLYNVSFHQYFIKFVVVADGSIRSQACPLKFSGGLFCRRKLDSELRCPSCDHRAKKPLVCMYCRVELKDIENPEVTQCATMFSYVAEKYIGIKAASMLDMRDQNPDKLEKLLEAKLEKELVVKMTIKEATAEDFEGQFDWLISKVFASDDEAEGSSQTAKKARIVEAEREEDEDEIVVVDHKTAVTAPSTSAVDEQEGKEKPNSEKTK

SEQ ID NO: 127094 - protein, 594 aa, Heterodera glycines
MGRENVVPIFLENGHWDGLKNYVCFFNRGREFCIDCECFYDKDIYHTFDCRARCYYCNKVGGVPCQKESGVKIECPKCCRYFYNLECYNYHQEHQTCKLWRRCVICDKTYRFNPKKGHECEETYCQLCSVSHDPKRGCYIIPIEEKEEKAVYRIVVWDTETSQDSIYKGDQKEHVINYILVRVTCTECCDDKNRTNCKICGEERTKDWSEAEGHEPTKAFVEWILTAFSNYDTYIFAHNAGRFDGHFVFNYLCRTGKNPIPLINGLKIYEFKVRNSKKHSMLIWRDSCLLMPVKLESLKATFNLGCEDKPFFPYYYNKKENYGVRLQHLPPMEDYSPGSMNKNKYEKFEKWYNENKDTPFYLNDELRNYCRNDTEILLLSIIEFRRILINDITKGFDPLPRSCTNAGVAMNIFKAMFLLTEQLSIVPEKGYERCDRASVMAIKYLEWRSKRDEIEIRHAGNGREVKIGNYKLDGFIANNGARDKCIEVMGCYIHGCMNCYDPAAELIGGRTAQELNDETQERLAELRKTLDVEEVWGCQIEELKKDEEMRDFFDDRGNEKGPIDPRMAYAGGRTGPMKLFAKSDEKKKISVYDI

SEQ ID NO: 127095 - protein, 64 aa, Heterodera glycines
MVGQRRFGQRRGPLASPTPNVVAHLSLLHVGTVHAHLQQIWTNVDKKFGRIAGTARTCGPVTIV

SEQ ID NO: 127096 - protein, 42 aa, Heterodera glycines
MVQLYVGACKWWVANKFIIIMLDGETAKVINNLMFKYSICFS

SEQ ID NO: 127097 - protein, 238 aa, Heterodera glycines
MAINISDTKSLFNQILAQSDITITTSGITVSGPRLSTPRFLPFDDCGRCRVCKATEAEVDIMVTKEGVTLWCTRINKPQFVPFDVVYDLPGHCFFRVKNKARVFNVPYGDLPSGTCAKSKPTDHQQQQQQQQQQDLKRKAKVALDLVEAELMADAMQDGTRWKKAKTAINVLGNLQLAESLDSTNRNSTDVPTQANEAADIKEEEENVQGEEENKEDIGDIDKTLDDFFNSLNASTSN

SEQ ID NO: 127098 - protein, 100 aa, Heterodera glycines
MKTLRNQVGRQTMPMVVNFDQTGDAQRTGQVGGRRSMPPSVVPANLGGGPPYQWYNWFTPTTAKQACVEALAFAREGGLKHENILKIMKTLEEREKRDKK

SEQ ID NO: 127099 - protein, 78 aa, Heterodera glycines
MIFLLSPVIDIELWSESSNTSYTYSSTDKILATTTTAHPAFQPLVKATQLEWRKPEHDGGNLYQKWTAINDKWLVVHQ

SEQ ID NO: 127100 - protein, 512 aa, Heterodera glycines
PPTTKASSTKKPPTTKASSSANDEPCDEDATNEHPTTKASSTKKPPTTKASSSATEATSQASSSVTEEPCNEETSTSPSCAFVCSGFGWTIYNGNCYKVIEGLMNQSQAVAACNAEDSKAQLVSIADEAENRLLGRIIAQPLARSLLTYQLSSTIFNTFWIGLRRVRVGNLYQSTWANGSPATFGNVPEITTAATTTGTKNQYPWAEGQPSGTNKYTDPTGANEECVHMINANGQWNDARCAIQMTGAICKKAAQAVGIGSQAAVTPVGTGQIRVQSAGSSAAPPQASSSSFDLCNPSVSVCGGFGWTIFNGKCYKVIEGLMNQSQAVAACNAEDSKAQLVSIADEAENRLLGRIIAQPLARSLLTYQLSSTIFNTFWIGLRRVRVGNLYQSTWANGSPATFGNVPEITTAATTTGTKNQYPWAEGQPSGTNKYTDPMTNGLLYISESDLFPRVTLYNSGDVILANFGHNFMHNFNVASRSQKLAEIDQTITKMKDKNRNKRSCRCSGITML

SEQ ID NO: 127101 - protein, 223 aa, Heterodera glycines
MTAMRGIKIKAKITLECSPIEDEGKGSSSSKESASSEESSAEHCSSDEDSSPVTKEPPTTKASSSATDEPCDEDATNEHPTTKASSTKKPPTTKASSTKKPPTTKASSSANDEPCDEDATNEHPTTKALSSATDEPCDEDATKKPPTTKASSTKKPPTTKASSSATDEPCDEDATNEHPTTKASSTKKPPTTKASSSATDEPCDEDATKKPPTTKASSSATDE

SEQ ID NO: 127102 - protein, 107 aa, Heterodera glycines
MREMNRCPRVSYQQVTTMTALNDPSTDNKPMIVINGQRAITPTINTLMREDDADTSKQQQQKEQQRNSSKIFYNSLMDTLIRVLATRNGNSWQFELMESSRDELKVY

SEQ ID NO: 127103 - protein, 136 aa, Heterodera glycines
MRGGKRFLRQMSSHNRVGGGGSIGPYSNRVVPGHPNPETRIPTFFSSRNPNPDPMILIGIRDKISTEMREMNRCPRVSYQQVTTMTALNDPSTDNKPMIVINGQRAITPTINTLMREDDADTSKQQQQKEQQRNSS

SEQ ID NO: 127104 - protein, 88 aa, Heterodera glycines
SVAASYEFTTLTCRGRQVIAVAKTADLILMMLDATKGEIQKTLLEKELEAVGIRLNKRRKHLFQKKKWGRTEITHTVPLTLCTRTDPN

SEQ ID NO: 127105 - protein, 51 aa, Heterodera glycines
MDMGFGIIQRLIPGKKSETHPAACSLTRDCKLRKLLAFRKSPTLQLRPKKG

SEQ ID NO: 127106 - protein, 333 aa, Heterodera glycines
MLIVIKCLLGFDGIIALFVIFVFLNLAAANTITAPTASALIGREALKKRTGISASTDGEVGDKADVGPQTATTTTHGEVLKEKILEQQKHTDNDDKADVGPQTATTTTHGEVLKEKILEQQKHTDNDDKADVGPQTATTTTHGEVLKEKILEQQKHTDNDDKADAGPQAATTTTHGEAVREKILDQQKRTDDDDKAAVGQQTIPTATKTHGETLKEKISQEQKHLVDDKSNSANAKQDDGSGTDEKIAHGQTLIARLKQSEEQKKEWGDPSQDNDDDGRAPKHGEMLWKLLRSTVPTNQQQMGDVIHHQFADAEQTRGRGTDGAVEKHFRRKN

SEQ ID NO: 127107 - protein, 85 aa, Heterodera glycines
MVLCEFSELPNFAIRRRCSQPIGQCDDPKTQHPRQQTVQQSEAGLGAVQRGGPTRPLRPPLSAYGEHCTPRMAGRVGAALSHHRR

SEQ ID NO: 127108 - protein, 34 aa, Heterodera glycines
MTKRKKYACGAIGGVYTTTKKDTTMLYFDKFQAT

SEQ ID NO: 127109 - protein, 39 aa, Heterodera glycines
MEGKDDDDKITVEELARKKFSQQGMALNVRWLIVNKSML

SEQ ID NO: 127110 - protein, 103 aa, Heterodera glycines
MNPSIEEVDGSEIEMMNDTELFRKCFGQLSPAAIPLFNSLNSISQIKVKRKGKTEKKKKQNNGYFFPFCCGNAAFATFLFCFNLSFMCQSSTYIISLLNVKRV

SEQ ID NO: 127111 - protein, 22 aa, Heterodera glycines
MRGRHLRNGQGLSAGTDSLRGA

SEQ ID NO: 127112 - protein, 77 aa, Heterodera glycines
MPPRGKAEENRTNCTAIQRTAKPNEPNKRMAKLTGEEECQLEALEGQMVELLGRIDTERREAEKSERQSATSRQVKD

SEQ ID NO: 127113 - protein, 290 aa, Heterodera glycines
MTSNGALVAAKTPPEVQREFASLAQVPVVAGTVNRGSELIGAGCCVNDWIAFTGEWWWCRAESENVDDLRASCERMSAELEQEKKEKEEEKKQKEEAKARVAELENENEQLKNEIEQLKNALNAERSKSKKEKEGKTDEKEEKEKQKEEEEKKGGEVEEEEENEKEQDDEQNGGNKPKRARFMDFDRTTFEHSEHIQSLRDNPNLSAQLGVPLGCARSSGLPSLSAKFAAAVRHDAGGMSPSSSAMPTAQQLRAEQSAKLAMAHVRRGAELTRDNKCFEAIQVVHGTGIG

SEQ ID NO: 127114 - protein, 64 aa, Heterodera glycines
MQNLQQIQSQRAEQKYTLNGYMYVKDKRTLEGSDRTNNYAEACNRKLKIGFGYAHPHICVLLTI

SEQ ID NO: 127115 - protein, 18 aa, Heterodera glycines
YREAIPEGFGLPINLGAS

SEQ ID NO: 127116 - protein, 46 aa, Heterodera glycines
MYPLQLKLNFLAIVCAKGGQNERKYSLKMSPGPAEEKVNGLLGNDK

SEQ ID NO: 127117 - protein, 111 aa, Heterodera glycines
MQLLGKWCPNGCTLRQKMDSRSDCVKFIGANTSVNFIVHFLLYPSTPIVPFALVNNRINQKLTLSKETDYYWVMKRCQIGQIVQWEEQNLADNLNNVNFMLYADYIGSRIK

SEQ ID NO: 127118 - protein, 121 aa, Heterodera glycines
HLLNNTSSSSSSSADDGPSSSSSPSSVSAADNTNKTPTSSSSPSPIRFCIRLTVNDWGEPVQRLPFRWLGSSLSGQCVVLVERRPVDNLNVELCIVRCPYMEAVQRGLMDNAVTMNDLEAS

SEQ ID NO: 127119 - protein, 74 aa, Heterodera glycines
EFHEVCVITDVRLPRTEKLNGGELAFLQLIKISFLIGHKFTEKHWWHVPGEQLQPHAIHRRQDNVGSGKWHRAI

SEQ ID NO: 127120 - protein, 270 aa, Heterodera glycines
MAFSGIASTLLKSGRTIHNRFKFPLNLNAQTVSGVVQGTKAAEEIINSDFFVIDEAPMTPRFALDVIDKKLRELTKCNLLFGGKTIILAVKSEIVDLTIKKSVLWNNFEQLKLTINIRAKDIFAKQILDIGDGVSPNSFIQLPPECILSNESDLIDEIYGDIFLKHNFNELKNHIILTPYNNLTDNYNEIALDKFPGKCVTYLSIDEVETSNNFPITPEIMNSFNSPGFPLHELKLKQNCKVMLMRNISIENGLCNGTMLQVIELKDNML

SEQ ID NO: 127121 - protein, 340 aa, Heterodera glycines
MTPKVYPCSAELTKHHVVAMEHVVGAALQIEMEREVDMMIEARFEGRARKFDGADCLIVFGSRSKKEVNELAKVWEPESQVKVFKELGEKHFALGVVKDVEVLHAEYEKLELHIVIFLNNIQERKNVDIARKVDEFIQGGSVVIHPVPATAVEDRLFCFRCNVPSIIADEDSPRGRIMAVLLGRPAMEGIRMEKQSVDDSTDSWMEEEGPLHPAILALNSRQRVTARLMLGGGLVQQQAPPGTGKTKVAAAIIKAMMDSNPGFRIVVMACANIPVAKLVQEAEGTCAEKDLDGARAIALFSGFARCKYTDQIRDVQRHTLPNKVNSEEFVKQLSPNVQKQ

SEQ ID NO: 127122 - protein, 20 aa, Heterodera glycines
MEGRKKERMARLLNIVPTVV

SEQ ID NO: 127123 - protein, 327 aa, Heterodera glycines
MKNDYSDEKEFKFFKNRSEEIYENYPALSQLLEGLFAAVVSANEAMKKENNNTLSSRKNELKQSLAYAVFFMAKRGQIPLESPLGEKEKEPKEISIELIDIYDELQMDDGITVESCQKSDEKERRENGQKGRGKYGQKERRIVQFDARSLEIEWNANAFIADGQNKDGDDNDVSHFPALNVVYLYINLRHKSSSETRQTAQCAGAGIRRMGILETKFHEDEDFQQVSDHYLSRISFLLLQMNSKGTATRKEEKIRERKRQFKSSEYDSIEYSSSEPALVESGSSENYIRAETPDILFSEAPTKELLESISIGPWQVVKLPEKRAPLF

SEQ ID NO: 127124 - protein, 63 aa, Heterodera glycines
MPNVYFLFFVCLAAMAPAATAGDSSLGNLVYGPPNCGPSPAPQPPHAEKLAMEDDGTGTNFGW

SEQ ID NO: 127125 - protein, 74 aa, Heterodera glycines
KIISKCNWLNFILIKKRCFHIFIQFSVDHFPIGFFSDCALLEIDAKFEKENGNGFFYLHNLFNGNWEIARHFDA

SEQ ID NO: 127126 - protein, 309 aa, Heterodera glycines
MKKTQFSMLYPIKAFINVKLSDAKNPLSSDVGIWKLCNGKNGTILVENGCTKLLLCYQSEMATNRKIGKRFGVGKGNIGKLKFVECAEEIAEDQWHGLIITKHQDGCLSQTLVAPKTKAPFVGTTKFHGKTKTTTTTSIPTTTERQTFAFEPFSEFVSHFGTNCSKIVFPVEVAKFILNITAVPYRIACNEYEQDYEIGQSVELYLANSNKSFFNACMEVPTTKCAKHVELSACYKSMKTVGPNDNVVAKLCQDHLNETNVAGFSVQICIHRDEKEQKLVFETFLNLSTTDELYGQIMRDLMMSLINFT

SEQ ID NO: 127127 - protein, 23 aa, Heterodera glycines
TRRSRVPEREALSPQQQNSIDNV

SEQ ID NO: 127128 - protein, 144 aa, Heterodera glycines
MGEKKQNQTLQKLTQTPPIYVHNASQQPRQVRLFVVQRFVDTNGRTIEELVSAPSPIAVFSSLKTPNESPKKRNLQSQQPQQGMSSNKATGSAVVGRKSANPYPLPKETKMSLGKKVRRMASWLRKTVSEKDCALIVLISYIIN

SEQ ID NO: 127129 - protein, 60 aa, Heterodera glycines
MSAIFRPLMSRQLGKMMRIKEAIQRRKLIQQLNEDYLVSQIESESHPFLRSRSFNLLIYR

SEQ ID NO: 127130 - protein, 192 aa, Heterodera glycines
MGRFKITKFFISPFFIIGSISLLVNGRNDNLGPNSDFKIGISSAKKGQIGEQNVKGKSQQIIEDGTEKRNDLFSIFKKKEIFDELIEKKRIEKGKFDEFVEEMRENDQLIKMAFEPQQSDDYQEEKLEKQTIRAISKGLNNVKIDNEKITETQQEKQFKEKYREFRGHKRKRPGVVSINGTIKFVPYSNGVG

SEQ ID NO: 127131 - protein, 187 aa, Heterodera glycines
MGHLIVVCKSSSQQQKYIVGEANGPLANFELLIMDQEAIHSDVSKDVQETVAFLVDNVVDNIFKEYKRQEKELLFEERRKRNITLPELMAYSNMFKHQTATKKPKLHDDEDDSIVFIKEVPAFDKHVGLDLLLKQKDSFNRGDDTNLIAALKMDEEAQKVKEAHNLLSSNSENNSTELINLSSDSEN

SEQ ID NO: 127132 - protein, 263 aa, Heterodera glycines
FYSFFDFKFLSEKQLKMLLLDLFFAGSETTVTTTKWGILLLLHHPEVQQRCHAELIELFRFSVELRHRSRFVYLNATIAEIQRLANILPINLLRTCTENVSLDAFFFPSGTMVLPQISITLNDPAHFPEPDRFSPERFIPQISITLNDPAHFPEPDRFSPERFIDPLNGTLRRIDAFLPFSIGKRQCLGESLQCLGESLARAELFLIFSSLIRHFEFRTDRPPSRQRIYGLTVSPLPFKCQVSPLPFKCQIIRRKISNSERKE

SEQ ID NO: 127133 - protein, 322 aa, Heterodera glycines
PSLLVQATLWLVLSPLTFAVLASALLPSYALLPSYNVSSLFLFLLFGSYVFHELYWKRRLLPPGPIPWLIAGNMPQVHGAHNIDALLQRWHVDYHGAHNIDALLQRWHVDYDGIFTFWMGPIPICMVSRVDLLRRFFVSHGEAFSGRWQNFITHTFMDGHNGVVQIQGEKWREQRRFALHLLRDFGLGRALMEKKIQDEVWKMIGQSINPQFDLSTFQVKSLIAHCIANIIDNILFGCTYAHDDPAFIRVQQDDPAFIRVQQMVDRQSSLVVRPVMGLYLCAPFTGLYLCAPFTTRLPWICSAWRQWLAIRDDFWAFLDTHI

SEQ ID NO: 127134 - protein, 57 aa, Heterodera glycines
MVGAVNSLFYPHNSIRFFKVAYPRGCGSLVFDSLNAAQLCLAAGEKHSVNGHSIEVK

SEQ ID NO: 127135 - protein, 128 aa, Heterodera glycines
MGSNELSGGWVGRFMCQTLDKYINSMTLLMSPFSSLIIVNDTLPIEHKNLLAILSNGIVTTVVHRTNFSKKPPLCALIVVTWTGNCVRRCPFRRIRSAHSAQLFRTPLKVTISSTCSTSSTFIDFPMH

SEQ ID NO: 127136 - protein, 345 aa, Heterodera glycines
MERYKRQQQQQQQAKVSQLIKENANWLCALSKAKCVKRCGRLIRKANTDQLLSLVEVCLNIIASRFRLTTRQKKRLMPYVDTMRKEHADRPTKVELTKGISVLMNRGGEEGEVVDTPRRPPAPPPPPPPPGRPPRRPPPSPPGGPGGPSPPTSPPPRPQRPPRPSRTSRRGGRMEQWRKRRYDIQQQQRQPPPLVVRDLLAEAAAAPLPESDDDDDDDDEYMLENGFALPAPSQYYGDLPVLPDNAEEIEEMDTAQRRIAIRRKLKKDEADADDDLQRKKYMMIYQPPPLPRAKVKVEQPRPPTPRPRPNVKREQQQKPKSEFKPPSTSKKNRSPHSGKKSARVW

SEQ ID NO: 127137 - protein, 228 aa, Heterodera glycines
MGGITLSGPRLSVPRFIPFEENGRCRACKGTEAEVDTMVTKEGITLWCTRIEKAQFVPFDVVYELPGHCFFRVKNKARVFSVPYSELPSSDRCAQPLPPPPPPPMTTAKHQRTPDDEEEKNLRRKAKVALDLVEAGLAADAMMQDGTRWKKAKTAINVLANLLLAESLTDVSPTFEQQQQQQLSSKEEEKREECTNNSSAAATTESAPDGDVMDDFVNSIQAATSNMQ

SEQ ID NO: 127138 - protein, 118 aa, Heterodera glycines
MPPPGMMRPPHGSFMLPPPPPGASVGDEPPNKRPREETLEPEERWLQKVHGQIAVQIATPQNDEWNLKGNTVQIQLDISSSVTALKSLIQEQIGVPATKQKLVYEVNTNLIPILSHLH

SEQ ID NO: 127139 - protein, 202 aa, Heterodera glycines
PPQDSIIADLLSLDISGPPVAALPSQTANIMDIFGIPSAPSADTTASSAAPAVPPPNIFDAPPSSSVFDNAPPPLQPQHPLTTLSSANATNPLDQIFCASISQSSAITTSQSPDQFANLFGGSSAGTGVAPSLQTLGPFVPPYEVAVKNNVDVFYFAIVVPLNVFFEESGQMDKRDFLQLWKEIPEQNEVQFTVQNNRNLTA

SEQ ID NO: 127140 - protein, 29 aa, Heterodera glycines
MEWYSGDVTTALNIYQEKKGILIVYVFSD

SEQ ID NO: 127141 - protein, 31 aa, Heterodera glycines
CNLRPSCIVFRFIHHHEMYFNDHGTINSSNS

SEQ ID NO: 127142 - protein, 288 aa, Heterodera glycines
AKRFVGEGGGRDQAVPFISKAECLVPFISKAECLAHRSEALRIDLRPLAWAVHLPEYALFAVLHSNSEMYKAASAYYNQRVVECRIAAQVIAKQSGSEKLFLAKFQLLHCSAKMAIEQMLTLVDEHLAKRIHTREEICAILDCSDAQLAQWSLNANKRIHTREEICAILDCSDAQLAQWSLNANTQNMTEFWLAKRARHVYAEAARVLEFEWVCREGREDNGTVAKLGELMNASHLSCAQLFECLMNASHLSCAQLFECSCPELDETVANCLSAGCIGARLTGDFHGG

SEQ ID NO: 127143 - protein, 269 aa, Heterodera glycines
MEPYRIVAFDLETMQHQPVSPREPEKREHQPNFIAAKVFCPECIDNSRWRNGTAGCKVCGPHRTVAFCQRRFVNTTVDKQVVADNPLEAFVGWLINALPKKFDTYAFSHFGGRFDMVLVFRELFKIGFNPEMIRQGNKMFEMKVKKQKNRNPNIVFHDSFNLMPCALAQLVPSYGLEVEDKPFFPHLANRPENYGRHIYPTVDDYLANGMMPEKRRQFDLWYERISMSHFNWMRHWLPIAPMTWKSYRLLSSPSAANSLKSRSGMTTLM

SEQ ID NO: 127144 - protein, 175 aa, Heterodera glycines
MEIFDGFIIVDEKVISINLLNCDRCIGTFCEITQFAALEFTISDYPILQITDVGNASSSNPSNEEPLAQIVRWDWGQNGAQRIKETLTLNKGSEINCGSNASSSFVIRILKKRSLFPAPSNSSTDHDQLTVKIGDKQVAALKSRCETHLINCVEIPLIDRFLLIERFGLDNLKVI

SEQ ID NO: 127145 - protein, 71 aa, Heterodera glycines
MAFSSVMPARAFGQGPAEQSEAFNQKETVDQWNFNTIDQMQFATRLQRGHLKTEQLVSLIISLMNLKMSKK

SEQ ID NO: 127146 - protein, 192 aa, Heterodera glycines
GLNPPTFRSTGLNPPTFRSTGLNPPAFQSLGLNSSAFQSLGLNSPAFQSLGLDPQAFQSQGLNPPTFRSTGLNPPTFRSTGLNPPAFQSLGLNSSAFQSLGLNSPAFQSLGLDPQAFQSQGLNPPTFRSTGLNPPTFRSTGLNPPAFQSLGLNSSAFQSLGLNSPAFQSLGLNLSNGIQNYLKGIQKLKYNP

SEQ ID NO: 127147 - protein, 52 aa, Heterodera glycines
MLLKLADYFQKYFLHLDVDKLRAFFNANHEQFLPVISKEFLCALSVRALAGL

SEQ ID NO: 127148 - protein, 119 aa, Heterodera glycines
MEVFDEFIVVDEKAINEISAPKCGGCNCSFRDVTQFAALEFVTSYFPILKIKDIGNASKPNSEPLAQIVRWDWDKNGAQQINETLTLNKGSEHNCGIYTNASSFVVRIHKKREKKSNET

SEQ ID NO: 127149 - protein, 52 aa, Heterodera glycines
MPTNVSVSQWKWTSPVCSNPYSFNVFSSSNFFFWYLLSNATASGKKLKITSE

SEQ ID NO: 127150 - protein, 311 aa, Heterodera glycines
MCRQISPGETGEHFWIPPQFLVKSKEELIDYVYPNFQQLLGNDKELLNRLILAPHIDTCDEVNEIMMANVPGQVREYLSTDKPLDDRPLDIDEIESEVAALNRRTDSGMPPHSLRLKVGCVVVLLINKSDKEGLINGTRIVLEELGDDRLIGRVINSNAIGGQVRFFLGRTRNVYEDKSPGGIKYELWQFPMKACIRYDHSKRVRAKQSALSALIWKGKYFPTVNCIRPSLGRQTETMSVFMLPTGKLMPKAEPKAVGHMVFGEMPIPFPSALWEEEEDKPPPTSILVAPFNENAPEFILFNTCHVQKAAV

SEQ ID NO: 127151 - protein, 131 aa, Heterodera glycines
MKIVHFLKICVCGAFIATIITGTIFMVRSSADDRNGKQMKAPHEDGMQKSEDNEWDDKAHFPEQQKASKKGVNSEEEKQQQENDGDGVGQAPAPPQKHPKDIKKQVFLSEVLLGDILGWEIDNFYRLMPQF

SEQ ID NO: 127152 - protein, 92 aa, Heterodera glycines; identical to SEQ ID NO: 125147

SEQ ID NO: 127153 - protein, 33 aa, Heterodera glycines
MIGRAVRNRPFIFEGIFKFILYPRKMAISFFEK

SEQ ID NO: 127154 - protein, 497 aa, Heterodera glycines
QRPELLDENGHRYVGLFNQAMTCYLNSLIQTLYMTPEFRNKVYSWKFVDTPTDWKFVDTPTDEDNKNIPYQLQRLFLLLQTSEKASLETKELTTSFGWVSNEAFEQHDVQELCRIMFDALEQRWRKTENDESVHKLYKGTVEDYVKCLRCKRENVRKDDFLDKGTVEDYVKCLRCKRENVRKDDFLDLSLAVRPFGASESFKSIEEALSAEEALSAFIKPEILNGNNQYQCEVCASPQDAEKGLRIVEFPYLLTIQLKRFDFDYAALHRIKLNDRVTFPDYLDVNDFVYSPRRRPNRSRVTQKWPKSFSVYEFLEIDMVLFRLPEQDTAVQPSTNGQCTSATEDEVAADSQLLKRGKYIYELFSIMVHQGSASAGHYFAYIRNLDNLDQNKWFCFNDSSVHVASLDDIFRTFGGHANGWMNNMNAYMLMYRYMLMYRQIDHSQNEHFVRSTELPEHLILLKDKWRRRKNEVDNDRLTQNSAQVRRILSIFMKGVKQE

SEQ ID NO: 127155 - protein, 627 aa, Heterodera glycines
MYEDCNTIFARCHDAKKARLFITFTNNREWPEFKENIYKNGQMFTDRFDMWMRVWCGKIAVFHQELYEKGFFGTILGSGESMEFQGRGGPHAHIVAQTDLDAIPEVIQEYIWAHIPPLPDKDDDSPIAKMHREVRELMHMQLHRCSDSWCGPRDPNFGRCKKGFPAPFSKCTILHPDRPALYYRPSPSDGGAKIEVNGLIYDNSQVVPYNPYILLRYRVHHNVLFAYGNKANIKYALKYPFKGPGHCYVECKEESGSKIGIDEPAQYAKMNFRGATEAFAVVHSIPFAKLSHQVVHLSIHLPNQQPVVYRAFQLVSKAEEIQRGELPETPCSAYWKQWQTEWQHVPSLKDMLFEKVPEQFRWAKDRWLPYKRKPAKRPPIGRVVPVPPTDRERFALYALMRHFPGDPDHLKLVNGQQYNTFTEAALQHGLLEDDQIWHKTLGEAALHRWPDQMRWLFVSILVFGQPSNAIELWNKYKDQMYNPQGITSAAIRQARELQALADIDWRLHYFNLSCVHCGLPDPPNSKAKNTNLAVEEFFFGDDGLNMPHGQPNQRPQQNTPPPLNSDQQKVFDAVVRAIQSDPKDQTVPRRFFIFGDGGTGKTFLFGQIIKRLRKPPYTFKVLATAST

SEQ ID NO: 127156 - protein, 622 aa, Heterodera glycines
MTFGYDPNVPAEVILLPVHFPGHWTLIVHDVQFGTHFADSLPTPYGRLDPQLTDKIRKIISDILSSTVLTGIFNVENLTEQHDGNSCGYFVCLYAESWLMNNRTFVLPDLSINYEKKRILWHINELYGSDNVPYHPREGVPTPCPIVYRHTDEAQSTSKAAESMEVDDKNDIMIIEPQTSGQAANAILTQAQVDGENQVDTLGLVSESCVPQEPIAQADDAIFVRPKTPPRRSSRIGRRQSASISRSPSPAPRRSLSAKAVEKVTAFTQRCYLAHKGWCCAAAAAKHYPGYSNSGKLGEKKCSHCGALLFPHEDSRVCCRQGRVVLPKLNPHPKELEELIVCDKQPREGKEFVRNMSRYNNLLQFASVSAGNKPCPAGGPMAVILNGEFHRRISSMQAGTTQIPGFGQLYILDPVEAMEQRRKNPTFTGEKITNEEEFVQGHQLNDETLEILEKMIQENHPAASAYKQAREQLQELLRQQRTEELRFFRMTLLNERSAPGGMKDPKLHPHQIITPSTGEGMFAIHADPTGAPAPKGIWVENKQGQLNEIAPFSPWTDSLTYPLIKPKGDDGYTIGIPYAKPAQRRRKSNMSADMLDTEAMSDDDMCETESIAESDAGSEASM

SEQ ID NO: 127157 - protein, 399 aa, Heterodera glycines
MLKKRKKEEHLRRTEKSVSPGRSPIPNCPPKGNSNCPILDKPLVADENGVVSHPGTTTPNIGALQLSTPASSIGSKRRQFTSATQNVESSPSSKKWKVNEVDRPMSANEAIASTPVSTQRNRGRPAKKNRGPGRGKTNDSMSESSSIDQGSEATTSVAVLPTVPEKINFSTVQINFATSRNMACKIRRWADVGLYERDGETEQGPRSGPKFIETCWNDLTQFLNDAFVAEYLAYLASISVRKVVVVDPIVWQIGIDRVMPYKNMTFGYDPNVPAEVILLPIHFPGHWTLIVHDVQFGTHFADSLPTPYGRLDPHLTDKIKNIISDILPSTVLTGIFNAVNLTVQHDGNSCGYFVCLYAESWLMNNRTFVLPDLSINYEKKRILWHINELYGSDNVAYHP

SEQ ID NO: 127158 - protein, 92 aa, Heterodera glycines
MLGWTFFPLLTMLNSASNWHYFRHLVCSDVWMDIFPLFDRPQPGLKLTLISPRFDVLVYKHFDVKGEVFPNFATAQQFSNCVTVWMDIFPFY

SEQ ID NO: 127159 - protein, 60 aa, Heterodera glycines
MLGWTFFPLLTMLNSASNWHFFRHILMPFSLFDRTQLGLKLALLSLRFDPLVNKHFDGKK

SEQ ID NO: 127160 - protein, 35 aa, Heterodera glycines
MRRGTTVMRRGTTVMRRGTAVIRRGTTVIQRELLE

SEQ ID NO: 127161 - protein, 286 aa, Heterodera glycines
MHLCGLAQAPGNPVIACQINLDKNFAFIEFRSIDETTAGMAFDGINFMGQQLKIRRPRDYVAPTTNYELLGRMPVSNIVVDSPFKLYIGGLPNHLNSEQVKELLSAFGQLKAFNLVMDTTTGMSKGYAFCEYLDQSLTDQVGPIFTSFLQKSFKAVVGLNGMQLGDSRLLVQLAAAGARQSVTHPSTAVQIAGIDLSRGAGPPTEVLCLMNMVTEEELQQDEVYEDITEDIRVECNKFGNVVSMEIPRPGYDERGVGKVFVEFQSKEECQKAQAALTGRKFDSRVV

SEQ ID NO: 127162 - protein, 222 aa, Heterodera glycines
MDDENTHQANMERVREDEDEKIGLMDIKREIKAELNEAIGRQTEDGETEPKAERERERKSDRERERKKKSKRTSRDRSRGWHCPIHVICFLNLIKTRTPTKSLAVEGTPPRERAKPRKGKGRKEVESEEQQILGCATRWLRTHEPEGVQRTPSSGRPLELRKATGAIPRATLQSSVPVVGPSVTCQARRLYVGNIPFGSNEDAMLDFFNQQVNHGLFNGWDS

SEQ ID NO: 127163 - protein, 163 aa, Heterodera glycines
WWGASRKRKSSGSGGSAWPFLVRGAICLVYSDNERDSSLLNSWLIASGHNFLEGFSVFSRTKLSNNRSVMPLDVRGCTRATLAKSACLPSPKGVGKPVKICRDWDRTLQLLSVNEEFLVGASHQLALNTSLPFVHTARRCPGLSHFEKFGDGCSGRSVCRLEP

SEQ ID NO: 127164 - protein, 279 aa, Heterodera glycines
MALFSMLLMLLLLLLHLSGGEWINVELSVDPPNFFDRTFRSLSKTSPIQHWFGYNRNTACHVERETNINRLYNSADMWNIALTDVDNFMSMGRQTIELLSSALPWACFGHDRHSFVIFDLRNDANEVAVVRGHQHKIARNLSAYGRILFDHISGRLYMVDKHERRIHELLITDFVRWWTLNNTDGGGGGGGHNGGGENSTATHSLRSNFVGFLPEQKTDFFIAADHVYLIWRRRVYKFRVGHYFNDPSSQLQFLTNSSDIRFNFLIFERDDDATIGRQH

SEQ ID NO: 127165 - protein, 136 aa, Heterodera glycines
MIKTFQSLLNPPTFQSLGLNPTAFQSLALNPPTFQSLALNPPAFQSLALNPPTFQSLALNPTAFQSLALNPPTFQSLALNPQHFNHWHSTHQHFNHWHSTHQHFNHWHSTQQHFNHWHSTQQHFSHWHSTHQHFNH

SEQ ID NO: 127166 - protein, 115 aa, Heterodera glycines
PIPSFMRHQLHSFLVLPNCLKCIPKNALKMIKPVFSRISCQYFPIRNDTVNSFASLIFIRALLRISLKISGRQFYILANFYFICDRQFLHTSHFLFYCDQAYLSSYFWDFFRMWS

SEQ ID NO: 127167 - protein, 51 aa, Heterodera glycines; identical to SEQ ID NO: 124998

SEQ ID NO: 127168 - protein, 32 aa, Heterodera glycines
MRRPRLGGGPPTLFVLSLFRLTGAQMDADFGH

SEQ ID NO: 127169 - protein, 69 aa, Heterodera glycines
MWPSDQPTKEPRAFNLRDMDHPDAVAALELGLLHHYPPLLNASANHDDDSKQYFRLLELDGNHLLIGAA

SEQ ID NO: 127170 - protein, 22 aa, Heterodera glycines
MAENYGQTNGLIVVPKSIFLNF

SEQ ID NO: 127171 - protein, 240 aa, Heterodera glycines
MLSLNGTFPPQSLKPLALAFVLDGGIGSQLEELGYPINVYRCRGGYNRDEQLPRQHSETHGKPGLFAGTGRVHPPRTAPTLPLATLLTLPLFSYFICLSQKSVLIAREAIAASGRPVALVGAVGPYATYLRDASEYTGAYVKKPDFQEQVVTLLAIRSRQIIVSKFVWHSLQTIIDYYLLQCRPLIAAGVTTLNFETIPSVKEVECVAKVMDQLDDTVQAWVCCSCQVKVDKQIKRSKSI

SEQ ID NO: 127172 - protein, 117 aa, Heterodera glycines
FQSLGLNSHAFQSLGLNSLAFQSLGLNSLAFQSLGLNSLAFQSLGPNLTWSFGIAIIETQFCDIPITGTQLTSIPITGTQFSCISITGTQFSCIPITGTQFSIIPIPGTQSHQHSNH

SEQ ID NO: 127173 - protein, 134 aa, Heterodera glycines
MSRLFILLLPAELIFEIVCNIPTLSLFGRNGPPCITGIVNRQFETFRDLKKENFKKLNDLIDIISIKCKIQITYWGHINRRFYVHEHAVKRDLVDLVYNELHYYVRYGRSEKNLLEGVTWFSPVNEVIYEREYR

SEQ ID NO: 127174 - protein, 98 aa, Heterodera glycines
MATVIKKIRIFVQVRGRDPELCRNKCHIREQRPRKPTVLHWWLSYEIRRLTTDGHPRVSASVSSDEEEEQQGKAEEEEEEIIGGERMPNRRAQQTNNL

SEQ ID NO: 127175 - protein, 343 aa, Heterodera glycines
MVNGLLCTSFTEAAIMHGLLEDDKIWDKTLAEAALSRWPDQMRWLFMSILVYGRPSNAVELWNKYKDQMYFPQGITTPAQRQAAELEALADIDWRLHSCFNLSCVHFSLPDPPNSIAKNTNAAIDEFFFGDDDLNLPPGQPNPRPQQITPPPLNSDQQTVFDAVVKAIQSDPRDSTVPRRFFIYGDGGTGKTFLFGQIIRRLRKAPYTYKVLATASTGCAAILLPYGKTAHSTFRLGREVSLDKLPSIPLESFFARRIREAQLIIIDEITMLHNTVIEVIDRVCKEMAIRQHKDLLFGGKTVIFSGDFKQSLPVVPHEGLTAQVTACFQSNNSLAMTRSCSTA

SEQ ID NO: 127176 - protein, 303 aa, Heterodera glycines
CISAGVYAAQNEILTTGRTTKQMDELTSKTPISLPVPQCPIILVHQIDRMQEDPTSFSATNPMQTRTVMKCLTFLRPCFNGLIRVVCFYAGQAKEIGTEVSALNMPNVMVTTVDGCQGHEAEFVFVVTTKAGLSSNDNSGAFWNDERRVNVALSRSKFGMMVVGDLKLLWTADGIWRRFLRRALDKAIAVTPEYIHAMMDPKPQFVDGVIATSNGSVKAFDFYDDWQGSDGPSLPRQQQSARQPGSAHPNMPAGLCHYCLRPGHFLRDCPDRPSPSPNMPRPTSSRPGQWTNRTNDGRGRRND

SEQ ID NO: 127177 - protein, 458 aa, Heterodera glycines
MTLVYPQDQQQQVLIEQPNFSQNHQKFTRQVFQIPETNQEPRHFPTYPQPNVAPSNLEFNLILERIPDLNGNEGTDSVRRFFKKFDAYTDGWPNAKRISVLESKVFNKAERAFEAAKSTQPYRYEHIRKDMIQQLEETDSKQLNAFDDLMLGVRRRQNESIDELAGRISRLVKSAYPGLTNNLCDEYSIKFLIRSMGNPDLALNLELIRTPGMTLDHFVSLAARAESTQRASKRFSTHPNDGFQQREQQPKWRQNFGGNSSQNMAKVQNFAGNINQHPQPKEDTRNQWKCYNCDEYGHLSRNCSRPRTFMQNQPINQQKNFVAIGANRTQIQPPNQNRNFQTPKPNSANFLKQNCLVVQHEEVLAEARVNKIELAPEVSEFYEKLERITESKNEIFLPTIGKVMSLKLEVFGTETDAMLDGGAQISLISGDFLHKLLIEKAITLETLKSSKRKPKFLT

SEQ ID NO: 127178 - protein, 61 aa, Heterodera glycines
MCDFEGEFAGVNVRLEHAYGLRIEGRFARMTRYNRKLLLFGVSTRSSQLITCLKNRIAYEK

SEQ ID NO: 127179 - protein, 202 aa, Heterodera glycines
MKFAKKMLMIPEAEYLALRSAMNSGDYLQNEKASLDAKISQNLQDPGISEDLKAKRHDWLYKERRTVKGILKNRPQKVVIENHVPGPNVAPYLGLKNQSKPQETEEPRKIIIPRKRLKEQTPDPESYNDTLEELTPERQTTSTLKTPIPIKTIIHPTLLNGLFRYVKENKDLFKITAAGKKGYIKGVKGQFDWYIVSKCKTR

SEQ ID NO: 127180 - protein, 77 aa, Heterodera glycines
MPPNENSDRPFQQPDNVQPDQQPHQQQPDEDTELRAQIEDAEEDLLLNWWREDPTIIRFLFWTQTRPCHRSCASSTR

SEQ ID NO: 127181 - protein, 223 aa, Heterodera glycines
MHVDFDPLQVDWSTFSSEYVQFGGYNIYRGLPYQRGAGVGAVFRSLMRYLLPIGKQIGSAIGRQGIESGNRVLTNVLEGKDLKESLVSEIPPTNVSVVRSFFRQVLPLATITQESPYLFRLYSDNLWTDLSRIYLYLELSIEKPGANDKWVAIEDTDTGVSAIQGIGQTFVQQLKVTVGNTEVYDSGNLYPFKAYITNELSFPINAKKRFSLFNGVLLHRKPR

SEQ ID NO: 127182 - protein, 532 aa, Heterodera glycines
VSEEGQVLRAGGRPFITSSVDDIVSHLLNKDKRGQNKEPTAFKEFVERARQNPLLSRHLFPEAIIMDLKKLRLLEFLYKDLSSPVAFTSVEPLLREARKSQPKINRNDVQNYLTSQRTYTLHRQAKRRYRRLPTLAPGLHTEWQADLAIFDRLDKQNHGFKYLLVCIDTLSRQVFVEPVKTKTSANMIIAFDRIFKRSKYIPWKVLTDQGKEFTARAVQQFFRTKDVEHFCMLTSPQFHAGMAERANRSIKERLYRYFTERNTYKWIDVVQDIVRAINHSPNSSIGMRPADVNFKNAEALRQKLHDAAENVVRRQPKYRVGDRVRIEKYKHVFQKGYLPRFTNELFTVAEVHSERSPVVYRLRDDHNEIISGWFYANDLCKSLEDKQQKMYEIEKILVKKRQNGVDYALVKWKGYSARFNSWIPVEWQTGNTVRIELPSSNVTNPHELGKNLYRLLGEGSDPLAKKVRSTQNSFMLTINKARRWTREEYIKRKTKEKRGVRDEELLLQALLTDTETVVDLNIMTHGLLAREK

SEQ ID NO: 127183 - protein, 140 aa, Heterodera glycines
MICIHWKGPLVLQQFYLIVVSALMALLFIKYLPDWTVWTVLAILSIWDLVAVLSPKGPLRILVETTQERNEPILPALIYSSTVTVLYSYVLHGVVSSAFIVAAGVGTNGDDEDEQQQRQPQPNDGRQQGWAKSENKTRNL

SEQ ID NO: 127184 - protein, 50 aa, Heterodera glycines
MRRQQIMLMVIDNNNNDDDADEPSQQQRKQCATQSMISDQISDRSDQCAA

SEQ ID NO: 127185 - protein, 37 aa, Heterodera glycines
KQNESNFEFLGFSGSLNTNIYEYTLYITPCLTLGPSE

SEQ ID NO: 127186 - protein, 57 aa, Heterodera glycines
MDRLKVQSIHIEPDYGTGLNYILPQNYSVDKIVFFLLLRMLIIKNFLYEYVMVNLTS

SEQ ID NO: 127187 - protein, 980 aa, Heterodera glycines
MQLLRQQNIERRNVSPLRSPFEQNFRENVIVNPIRNENRGPNQHFADGFGGQPNPNARLQVFRQQHAEIDRHYSSAFHAPVPMRQTCHGQIQQAAYMEQHGAHQPMLLQQQNMRGVMHHQQPMAGRNEYFPEYYGGRHLYPDGREQPNSGNNELKIGNMEYVLTMDRLPELNGNEGTDKMKSFFKKFSNVTEEWPEKKRIKALESEVNGRAERAFNAALNTQPYRFDSIRRAMQQQLEDTDCREMSAFDELMSGVKRKPNESLDALADRIQSLVSRAYPGLTQNLCDDYAIRHLIRALSNPDLSLTLEMSRRPGMSYDEFVALAARAESIQRATKVQATENRSTDNRNRNFYTSNNPIRQQSGGYESNPQQTRKGVVCYNCNEPGHISRECQSVRGQRNVNTGADRSRQQFATGANNISLRNNADNQRNAIRTYPAVKSQNFLKQNCIVMQEDKPPDAFCRGVKLTSEISSFIENELGEATQTEMSKGKDRVGKILVINVETYGTQTVAMLDGGAQISLIGAGFLYELIKERGLDLKKSDFSRTSARIADVNGQQLKCFGVVTIPITRKGCSQIPICFHITTAQFGYDLLLGTNSLSKLGFLLYDTANKEMIEFEEISQNDSNSARVIFSTKIQPRSTRLIEIGVGDQWNGKDVVISPQTVKGNVKVEESVGKVENGKVVAQITNLSAFLAQIDEKTEIATVESAEIVFDSENSIIQAEIYSPIAKPNSGNRNVGNDFNVGKLSESQMLELSELISGHAEIFAFSEEELSQTDLVQHTIETGDAAPIKSQMRPVPYAYREKISVMIQDYLSRGIIQPSNSPWASPIVIVPKKDGTLRFCVDYRKLNSVTVKDAFPLPNIDNTLLALGGRRVFSTLDFMSGYWQIKMDHNSIEKTAFSTEFGLHEFLVLPFGLCNAVATFQRFMTRLFSDCLNKFVFIYIDDILIASESWEQHNKHLKEVFERIQNAGLKLKNQQMSFCVK

SEQ ID NO: 127188 - protein, 607 aa, Heterodera glycines
MKIVATSEPFELVCLDILSIGPAHSSCKYILVAVDHFSKYLVATPIPNKNADTIAREFVKNVVLIFGTPKKIHSDRGKEFVNETLNEITKILQMEKTLTSGYDPQANGVTERVNQTILGMLKRSTASNWEWDDRLPFVVFSYNTTPSETTNISPYHLLFGKPANFPSNISLPVNPLYTIDVNGYIQLFRENIAHLVEKAREHSENERQKMKSYYDKQAKVTANKFVVGQRVMVIFPGSNKRSPHHKLMWNHFGPFKITEITDSTAFVIPVDKPNDVPLKVPIERMIRVPDGVPDTSTLPKGKNPYKNQLNTIICFVSLICEEKVDNGKVGGVGKKEKFQEVEQEQLLEKEVEKNAEVFDQFPKLKSKVGGELNFGANVCQLRTIFSSEGVEDMEMDTTEFAITWDLQCGGLGPEHRNCVQLIAADLDPVLERAGFGLKVPGEFRTRKKGNLGLKVVGTPLKALLATFLLKSDAISSSAVGRKLAQSVIGSPVGFELITFIGSREDQIKSGRIPTEEDLETILRKWADCCAVTRAKLTKSGFGRIHVPMPQSIEDLPDGERKPWAELLEKTGFLLEKVKATSVMRKQHFVTSPRIIMGDSNAKQLVER

SEQ ID NO: 127189 - protein, 190 aa, Heterodera glycines
MDKLGRLVQMCATFPHVTFFWLPPPFVRDRQFEHETLIGKLRDFFGQKTKNIQFVATTTNGRSLLEIWRYGNGYNTDHVSPEGVMKEKGLNMLKAWLLTQVKEFPGDQELGIEKKKPESGEKGKGAGTAADRQHGRTEPPPFRRDGPVFRRSNSRPFVQHPYSRTAVDRHPFRPFRTPNLPNPNRRHFDR

SEQ ID NO: 127190 - protein, 331 aa, Heterodera glycines
MPYIHQVQGLWNVKYPGEYKIFIFNDYQIRPITKSDVTDYQFPILLYHNNNHFDGIKTLPKFWNKRYYCLSCESAFSNKPQHSMNCTSLCHGCREVGVDYPCEAQQGYFKKCLHCNNYFYNNDCYERHLHKDLCTKFQRCEDCGRLPSSAPIALSMGDWNKSLQGKKCQICGPHRSITFSPFDYTETTVDQKIITQHPLRDFVQWLLFDHNKKFPTVAFAHFGGRYDMTMIIKEVLAQGIHNPDIIKQGNRLYELKINQNEHGPLTILHDSYNLMPIKLSGLIKSFGLHIKDKQHFPHMFNKSSNYDNILSHLPPREQYCPDQMKIPDQQK

SEQ ID NO: 127191 - protein, 168 aa, Heterodera glycines
MAFLGESKTFNWLLCWWWTISAGAKQSEENAKSTTAKRKQRIGRRRKRKWGEKRGKGRRKGAAAEAEEKEKKVAVEHHQKQQQQKQEVQAVQQQQQKQILVGMEMKMDNSKNGETREEVEKEGNSIGEGGETEEKERKRKRKNSAEGREERGENEAEKREEQQQIDTF

SEQ ID NO: 127192 - protein, 90 aa, Heterodera glycines
MPSSSRAIGALFYDPATDQIVADGTTTAQFEAPAAAANPRQNPLAAHPVLNAIEHLSANQRQTTARTDGREEEGEDEVPGAEFSAQYLAT

SEQ ID NO: 127193 - protein, 77 aa, Heterodera glycines
MLAGLTNLYTDYWISAAMRNNKQKRGRKGRWLWKIADKKERRADDERHSSPLHGFLRFNYPSLRYLAYPAHNICGME

SEQ ID NO: 127194 - protein, 23 aa, Heterodera glycines
LSTAVRQRSSKIYSMPQILWAGY

SEQ ID NO: 127195 - protein, 77 aa, Heterodera glycines; identical to SEQ ID NO: 127193

SEQ ID NO: 127196 - protein, 77 aa, Heterodera glycines; identical to SEQ ID NO: 127193

SEQ ID NO: 127197 - protein, 77 aa, Heterodera glycines; identical to SEQ ID NO: 127193

SEQ ID NO: 127198 - protein, 209 aa, Heterodera glycines
MFNDATTRNADSSENEEENDDEDEDDFDEDDDDEPSDEKTLRDIPLDKIDIWCFMRLFKDKDEDGQGDRMICISLAQRFTDESHYIMGASDAGQLPMDVPLISINHCLADFIKPEDIEGSRCAQCSNATPPPSAPPTLVKQLMFTQLPDILVIIDHLLIDHRLVIPLFCLFHRSFASSASSMNHLITDTSNSVCPFRSRWTTKMDRATA

SEQ ID NO: 127199 - protein, 57 aa, Heterodera glycines
ALTTSPRTIPERTARSHGQKPPVSRNSPADPTFRDNSFPEVTNLICRLPLRYIILST

SEQ ID NO: 127200 - protein, 154 aa, Heterodera glycines
MPIILNFHFLLFNWIHLFSRGKAAEGKCWSTEQKHRTEIGWKICRGGQKQCFGFAAIGFATKEVPLDGSIGQILNSYGYRSDGSFGCNGITRPCKMPMSLFGSSFSPVAMQSADVEMAYKSSEFSTGDVVGCGIFLDTRLIFLTKNGQRMGGPN

SEQ ID NO: 127201 - protein, 248 aa, Heterodera glycines
MQKNALGRSDGTEPKYVVVSPEKSSNSAAGGEKEAEGEQAQVPAEQQPLPVAPAAAEAASAENAPTENAAAVPSSGYSGGEPAQAQAVAVQTVEQQQAASESEPTAIGTSNGNNEINDANSSSTDQQSDTADQPKQQQMVEQIQSKQRQRVHASKALTPAPGTWGSMCNSAELRQMMDSQMVPGNANASKRRIYELLNRKQFTEGVGGAQRLLDVICANSMFSYRIATDLFCEHTKANVTCFVYQQQP

SEQ ID NO: 127202 - protein, 189 aa, Heterodera glycines
CRCYNFEFFNGRQPSMFETSPPPPQPPLQPLPTSQPPLQPPPQPLPHPPPQPSPHPPPQPPPLPHPPPQPHPQPPHPPPHPPPLPQPPQPPPSPHPPLHPPPPPHPPPQPHPPPQPPTHPPPPLHPPKPPPPPQPPPPPHPPPQPPPPPPHPPPQPPPPPPPNNPSPLNPPHPPPQPPPPPHPPPQPPP

SEQ ID NO: 127203 - protein, 518 aa, Heterodera glycines
MQVAKVPEKRQANKNCCRCGAADHWGSECRFIGAKCRKCKFTGHIEKQCENVQQWRLKNKGKRFGNKRIGHLQIGMVNPKNEANSLRTKIRFNQKPIAFALDTGSDVNVIDEDSHVEAGSPPIEKCREIGRAFDGTPIRFIGKGFGTFEFGGILIENEPFYVAKRGSLNLLSRQTMDKFGFLDGIKQRISEHVINSCRATDQIGKHILELRKEFPGVFEDALGHCIKEKAQLKLKEGVAPIYRKARPVPHHSKEVIERELDRLEGLGIIRKVEHLDWAAPILVVKKADGNARLCIDYSTGLNDALIDYQHPLPIPEDIFATLNGGQFFSQIDLKDAYFQVELDEDSKKLCGLSTHKGNFAMERLPFGVKSAPSIFQSIMDKMLAGLNFATAYLDDIIVASRSFTDHIQHLKDVFNRLQSYGFRVKMTKCSFFHEEIKYLGFVIDKNGRRPDASKIKAITEMPAPTNLSTLRSFLGMVNHYQQFVQNMRFVRKPLDDMLKKDAESNWVENCRKAFEKLK

SEQ ID NO: 127204 - protein, 245 aa, Heterodera glycines
AVGDPKRQFVMLTDASKIGLSAILCQSDELGQLRPIYFASRQCNQHESRYCPTELEALAIRFGTKKYAQFITMIPTRVITDHRALVPMFKSKKETGGTDEAMETEQQKGKANIEEDTIYVLGEDEAETPKVISWSTCCTGDQHKDCADLLMADLDAVLDRSGMGLLKIDNPLKALLANFLLKSEAVKSGSAGKKLILQILEAEVSWELATYCSSREDDVKSGAFPSESDVEKTLEVWARALPNRE

SEQ ID NO: 127205 - protein, 167 aa, Heterodera glycines
MSSGSSGPEEGEIGAELFANEAFEEAEEPAGLVQFFRAESKRGRELIRSGGFEYAFEADSGLQEGANLGIFCPNPKLGIEFWHCINRPPYCPGRVHVSSAWHHDNQGRAYKLGRIVGRDHNHPVKHESVRDAQKILKENAEADNPIPARDAVTQARAQMPADVRAGQ

SEQ ID NO: 127206 - protein, 65 aa, Heterodera glycines
MPQTVVVENLSEESFLPEEDYSVYVKGETITSKMIFEDSARVQCSQKSVSIFVQTDKAIYKPGTT

SEQ ID NO: 127207 - protein, 123 aa, Heterodera glycines
MDMFLYDTQPATLSGLNEEFISGARLDNLVSTYTAIKGLVESLEDTEAFDTDPNVRMVACFDNEEVGSRSAQGAQSHCFEWLLRRVLSSVDHPTAFECSIGRSFMVSADQAHSVHPNYAHKHE

SEQ ID NO: 127208 - protein, 148 aa, Heterodera glycines
NLNMSPPDWQLAHVVPALIHKCFLAKRDGGPLVVAGSGKPLRQFIYSLDLGRLFVWAIREYEDVEPIILSVDPSDEVTITDVVTAIVKAMQFKGEVIFDTTKADGQYKKTSSNAKLRARLPDFKFTPFERAIAESVQWFEANYEKARK

SEQ ID NO: 127209 - protein, 161 aa, Heterodera glycines
AAIRVLVTGGTGLVGSAIQQVLVATGCRDEQWFFVGSSECDLTDLEQTRALFRRVRPTHVVNLAAMVGGLFHNLRHNLQFFVKNLAICQNVLQCCHETDVERCVSCLSTCIFPDKTPYPIDETMAHNGPPHDSNFGYSYAPRMIDVLNVLNRGYAQEHNRK

SEQ ID NO: 127210 - protein, 324 aa, Heterodera glycines
AIRVLVTGGTGLVGSAIRQVLVATGCRDAEQWFFVGSSECDLTDLEQTRALFRRVRPTHVVNLAAMVGGLFHNLRHNLQFFVKNLAICQNVLQCCHETDVERCVSCLSTCIFPDKTPYPIDETMAHNGPPHDSNFGYSYAKRMIDVLNRGYAQEVLNRGYAQEHNRKYTSAVPCNIFGPRDNYNLENAHVVPALIHKCFLAKRDGGPLVVAGSGKPLRQFIYSLDLGRLFVWAIREYEDVTPIIFCVDPADEVTIADLVDAIVKAMQFKGEVIFDTTKADGQYKKTSSNAKLRARLPDFKFTSFERAIAESVQWFEANYEKARK

SEQ ID NO: 127211 - protein, 238 aa, Heterodera glycines
LDGSQRICQKCQLNLGCDRVLSWPIVLSLVLSWPIVLAGVLSWPIVLAGVLSWPIVLAGVLSWPIVLAGVLSWPIVLSLVLSWPIVLALVLSWPIVLALVLSWQIVLAGVLSWPIVLAGVLSWSIVLAGVLSWPIVLAGVLSWLIVFAGVLSWPIVLAGVLSWPIVLAGVLSWPIVLAGVLSWPIVLAGVLSWPIVLAGVLSWLIVFAGVLSWPIVLAGVLSWPIVLARVLSWPIVLA

SEQ ID NO: 127212 - protein, 109 aa, Heterodera glycines
DTCKDNWPTKDTSKDNLPTKDKGKDNWPTKDKGKDNWPTKDKGKDNWPTKDTCKDNWPTKDTCKDNWPTKDTCKDNWPTKDTSKDNWPTKDKGKDNWPTKDPPIDYLIK

SEQ ID NO: 127213 - protein, 24 aa, Heterodera glycines
RTLSTAVRQRSSKIYSMPQILWAG

SEQ ID NO: 127214 - protein, 24 aa, Heterodera glycines
RTLSTAVRQRSSKIYSMPQILWAG

SEQ ID NO: 127215 - protein, 188 aa, Heterodera glycines
GQREAELFGLRHIGDGTPLEQKRVEQAANDNNAGDEAQTLANSAETTSEKREAMHDWLNTFLPLLHANKLDTQCANQPQSESTRLFMALKAQDDAREGNDDGTAAAPHELLLAKQRTTVEEESSEFRLRMGCVALILTVLVCPSKVGKYDMPPISKGLEGRIMLLLVLDDFTCKGSAKTVSEKRTMKD

SEQ ID NO: 127216 - protein, 390 aa, Heterodera glycines
MQATMVRTVGAMTRQHFYDYLHGIKTMIGKLQRETTEMMNAVNAPLNLLNYDAEIYVPRIIDWWNDEKFARQWKFKAFIFGSAGHYKPLFKYGADDYDVSILLYFDEGHFNGVQKNGNLFGKPYCLSCEGTYDRPKRHSKSCKARCIKCSQMGPIFPCKPIDGFRQKCSDCNKMFFNQACYQHHLSLNFCKTSKECKHCGVVWDLNNNTKNGREGHKCNERWCENCQIFHEFERGCFIRPLEPNHKKETMGWRLVTFDLETHNTRLSTRIFRKKRKHQVNFMTAKVACPDCISSGRWKESLRGKFCNVCGYHRTVTFSQMPFHETTVDKQNIDRHPLVAFVKWILYKLPKQYDTIAYSHFGGRFDMVLVFRELLLEGFNPSMIKKGNRLF

SEQ ID NO: 127217 - protein, 89 aa, Heterodera glycines
MNPNVTFRDSWNLIPGPWASMVPIGRVLNVQDKPFFPHLANRPEKLRMRSLPYKADYLADGMNIAKRKEFDKWYPENRNAPFLLDESLA

SEQ ID NO: 127218 - protein, 131 aa, Heterodera glycines
MTKRSAGADGKADRAAYTTPHNGIDPIRHCITIASACMRHFRTNHLKPAHLALVPEKGYDSFGDNQSDLALNFMEWYAEKFDVQIQNAYSANGEKSFTTDYPIGHPTLHVPCEEVDWRRPEDNPYPLAILK

SEQ ID NO: 127219 - protein, 278 aa, Heterodera glycines
MCLPDHDSAKIYCQCRDIKLEPALADPEKRLPIQLKNLLIRNEKRDIFAEITYAPIQLSIQFEGLRIATEEDLTKCHAMSKGLFGCYSCHNGAYLHLQCHTDFGSALGYVRCSDGTEFTALCHKTPEVLNASLSFNRAEVDINCTIECSGGRNPFVINGHLRYVPKHFQTPNEGSSFASKAKPSNSCLIWCPDWNFDFSDVFWYFFGLQNALRTIGIITLALFIVYVLLRCNPALRSWRAISRIVLLFLALWPTTDSSAAGGLSHLLSIQNSAPKLQF

SEQ ID NO: 127220 - protein, 55 aa, Heterodera glycines
MREEDENPIEIPDVDIEAFKTMLNFIYTDNLNAVNGNNAIDVLYDVFYDLRQGWS

SEQ ID NO: 127221 - protein, 274 aa, Heterodera glycines
MNRRYIDYSVLAFIRANQQIWDKGTKLRLLLPCTSPTTNVEPVWDTFVSQIWPIFATNIRHLTFRNSTYLTKLLHLISPIILTNLTKLDSIGVGSFKPDQIDEDFDGPNATPTAGQVLSEWLHVPTKDGRPKRLFCYFHPSGNTQWINSFKELFLRATSSVCYKIFIRTKATFEPFELVNERTNEKLTMPKPKEEKLAKQWIMKRCAIGETAAVQWEDNTDNLNDVTFCLQKVEVCIGPVSPPPTEEAGQSVEKEGQSSEKEGQSSEKGTSSDK

SEQ ID NO: 127222 - protein, 113 aa, Heterodera glycines
MSTLCFAMPNDALGEQQGWHGIRPPKKLWTSKFRFLKKFGSRNSNSQKGVNLKLLMRQTDLGLKAFVSTSGKTAKMVSNYVRVTTRLLKNRQLRTFTFYLYNYKKYFPKGQWK

SEQ ID NO: 127223 - protein, 196 aa, Heterodera glycines
MASPVEKRNEFSGAVISSSISENQQQSLGSFVKTSFGTRRHWNPDHSVLAFLRANQQIFEKATNLCLSVSSCFHDCLSLFVDNNVQPIWDVFACEIWPIFAPNIRRFNFRDGDHLDNLRRRISPTILTDLNQLNSINSGDLLPDGIADDGPNATAGQALAKWLHTPRNDGQPKRLRCGGGYMSKTEFVNIFKEVWP

SEQ ID NO: 127224 - protein, 93 aa, Heterodera glycines
VTMDTIIDAICASKLPVSRILCDQIRSVGKSMLLVGPVESSKSRTKFNNSLVIAEVLGIEAARGSIISEILAIMGKHGIELDRQHVLADLMIY

SEQ ID NO: 127225 - protein, 137 aa, Heterodera glycines
MTSRLLELVQARKDNLFPGSRHAEAGRIQKEAWSTVTETLNSEFPIDVPAGGLKARYDSPAFGRGTPISRGSSRPPSSRPSSSDIAELQLKVLQGDLERIELQKQLCEDAKQFLKEGRDFFAKGAKFYDEKKGEGEG

SEQ ID NO: 127226 - protein, 71 aa, Heterodera glycines
MVHYPKDVFKEVSDLCSKNREDRAAKLVSFASVGAANFEPDHVEHLIKEGHRCASGCPMRNAPISSARRST

SEQ ID NO: 127227 - protein, 33 aa, Heterodera glycines
MCQCSDCGAEKQLGHLEKECIPYKKSLEHLFAP

SEQ ID NO: 127228 - protein, 160 aa, Heterodera glycines
MVERTVWEWQKVNTMKPIWMRKPAEVEEDEYKEFYKSITKDFDEPLAHVHFIAEGEVSFKSLLYVPKTLATDAFQNYGKTEDNIKLYVRRVFITDDFQDMLPKYLAFIRGLVDSDDLPLNVSREMLQQHKLLKVIKKKLVRKVLDMLKKISPEKFDEFWK

SEQ ID NO: 127229 - protein, 690 aa, Heterodera glycines
MQEACAEMSNLKRLQHYFAMLLAHAHPSNPQALFDEFLDEMNPPTAANHPGAVPKSAEVRAAEVMLNLEYYLNCMATNTKDVGLKGLPVGYDFQHQAQLLEEDNILDSFYGDDAGQRRKPPQQVAVEQIGRLNTDQRAAFDAISTSILGGCDQKLFFLEGAGGCGKTYFYNTLIKWCIAGKPPFDGNANAQWVRNQVLQRDTVVAAASTGIAALLLIGGGTAHRHFYVPNDVSQETPPMLNFESAKAEQLRHAQLIIIDEISMLSNTVLDYIDRLLRDVCANATPFGNKVVVLSGDWRQLTPVVEHGTREDQVGTSIKMGALFRLFKKISLTINMRTAQGEQSLRDWLQEIGNGIHRVGTDTQGFTNQLRIPPELLVDDLDHTIHFCFPEAMFDDPLANADAIAHNAILCPTNNDVQHINEVALGRMSGCGREFLSIDEPLEPNDEMHNFRTDFNMEAVHNEMPSGMPPHKLTIKVGTPVMLIRNLDVTQGLCNGTRLQVMRTSENNLFCRILTGPRAGAQNIIAIPQIQFEYGRARHHRGLRFRRLQFPVRLCFAMTINKAQGQTLQRMALVLNGRQCFSHGQVYVAMSRVTQMDGIRVYAPFCQSGYGTHIENVVYHELLDLETQQSRTPNRGLMDVDNDPDAAIPDVGPRVPDVANDPDVERDNGHAAGAHDQEPNDLDSSFDDFFD

SEQ ID NO: 127230 - protein, 269 aa, Heterodera glycines
MTNPTLNDNQRKERTCEEFLDRIKPNIGFLLRLVGLNSTKDLDRIKAQAEELEALLLTEKGQISDNLAHTVHALSGQRFGNRQTEQNRESNYRGPPFVSEANATPLNDRFAPRNFDNNNRNNNGNNNNRTQFRRNQRPNDRRPNFCRNRRSQFINNRPDPQPNRGRNGRNANYGTVNSVDAIPSNVSVLDSDQLIRAIANLGIMNQQPPLGNSVKREDANALNAITTVKSKPKIETKGIMNDSKNCEIPVIDSKNIKPPSPQLKASSWE

SEQ ID NO: 127231 - protein, 43 aa, Heterodera glycines
  unsure (1)..(43): unsure at all Xaa locations
RXFGEDSVIAFDEWAEWFTDYVGAVGRNWNEDEKVARFKMSLI

SEQ ID NO: 127232 - protein, 227 aa, Heterodera glycines
MLIAFMRNGQQMQISEYSKQKYEIHLGFIYYMRMNWKCDKIVGEFEEFERTECQKYRKYLDILYEYLFREYLGIPTVKPIFVFKDKIEINGPIIYAVNCLARISQFYFIKWEGRLYEYKLNELFNYQFEPKLLNNEKRLNYDEQKLSINEMILELAIDTANDWQTNESLDEIIKQNCGDKFEVNLEEMLKKADEWEEENEEGWSANEINYGKHRIIVGSKFDDKWKW

SEQ ID NO: 127233 - protein, 134 aa, Heterodera glycines
LLANICSGILNIIGGCSWWQIWVYLLVSLQQIPHAMFNLSVVYMMYQPDHWCKVPGLNSGAANASGAPYQWDVTDTLAGSVVYPRTRNKQRDMLNFHSQCHYYDRGGWHDGGEPFNQPPPSPRKGETHIWRERE

SEQ ID NO: 127234 - protein, 40 aa, Heterodera glycines
YSYYKHGQWKIGMMKGHSKMWRERREEILRWDPNADLWKY

SEQ ID NO: 127235 - protein, 28 aa, Heterodera glycines
GERAIELNRHNAFWRRIFLLVSAEALVN

SEQ ID NO: 127236 - protein, 47 aa, Heterodera glycines
MATHWVEAKAATPLSPLFLCFLSSTMLGDGFVIVIFPAVIALCIFVY

SEQ ID NO: 127237 - protein, 95 aa, Heterodera glycines
VEERADEKKSSDWSANRSTKGQQVNAVLNCSGGGGEINLRIFIPFKKILTVPFLSSSCLIVSGYERKIFWRRFGSFPRQLLIFFKKNNSISLKNK

SEQ ID NO: 127238 - protein, 135 aa, Heterodera glycines
MQILDLCDVEALPITQYRMGKLGTRPRPMKLVLPTRAHVRKCLLMARKKDSALRTQMPNVFLRESLTGEELKKRSDAIKLCSLLNKNPRFSVRGTFVVYATFHVLLKTQIPIFRNDNSFDGLSALNIDLNDPALS

SEQ ID NO: 127239 - protein, 674 aa, Heterodera glycines
MPAPIDKSTLRSFLGALNYYGRFVKCMRELRAPLDRLLQKDVAWNWTSEQQNAFEKAKEMMTSDLLLTHYDPARPIVVSADASKDGIGATLSHTFPDKKEKAVEHAACTLTAAQQNYSQIEKEALAIVFAVQKFHRMVYGRKFILQTDHKPLLAIFGSKKGIPIYAASRLQRWSMVLANYDFEIRYVNTTSFGQADVLSRLIANYSRPEEDILIANICADTDCYINSVFENRMDQLPVTTVEITAEMANDQPLQTVLQFLRNGWPAKVADSEISPYFPKRDKIFEVDNCLLYEDRVIIPTSLRSRILKALHIAHPGIVRMKALARCHVYWPGMDSAIEKVVSTCEECQLGQKNPTKAPLSPWPTTDKVFQRVHIDFAGPCSDGHQYLILIDSFSKWPEVYRMNTISAYATVFVLRSIIFRLGIPEEIVSDNGTQFRSAEFATFCKEFGIKHTFTPPFHPQSNGQVERFVDTFKRSMKKMSKSEKDWIEKMLFSYRTTPHVALNGFSPDQLFFGRKLRTKLSLVHPKGEKAENFDQNSFKKGQTKYTDKMARNFDRKHGTKVINFSPNDHVLLINYRNNKTEWLQGKVVERLHKSPTYRVYVPVLRRLVHRHANQLRRRHLLEDEAEEEAPQVEQPPPVVEPPRQPQQIQPANYPLKVRRSSRIKKPTQFYSPSR

SEQ ID NO: 127240 - protein, 132 aa, Heterodera glycines
QLDKCKFLQPELLFLGHIVSANGIRPDPSRSDAIRKMPAPIDKSTLRSFLGALNYYGRFVKCMRELRAPLDRLLQKDVAWNWTSEQQNAFEKAKEMMTSDLLLTHYDPARPIVVSADASKDGIGATLSHTFP

SEQ ID NO: 127241 - protein, 253 aa, Heterodera glycines
MAKVANRKRNERRIRAVQDLARHLNHRMNRHRRWQRDGKRDPSEERHIRMTAERYADQLSRLGDDHIHRLQHQFPQLPNPRRRRSEVGGNLKGGKSQPKLASMVVRLPQGELLPSKDVGGAAPGASDSHGRNENEEEGREKAEKERGSRPRVLPPPGDSFGELLEKEAKARAEVAELEARAKKAKMEREEEEQKLKSAKEARLRDLETQADDLRQMLGDASWPWSRGKDGKNGGGGGSPRWESGGHASSADGG

SEQ ID NO: 127242 - protein, 154 aa, Heterodera glycines
MTTSDNDSYESCITIAEDPTELAAHDNDKIKQTKHSAENEENKCLAKLENVLSNATATDESVSSSSFTNSISAASINSRTALGVKNNNNGINTTNSTSSALSSSSAAGGAATASVRHHQQRNRVLSFHLNGTVVHRRRPNSASKNPIHVIKIFI

SEQ ID NO: 127243 - protein, 45 aa, Heterodera glycines
MITTDDDDKNNNNNDLVDTTHFFLTNLLAIVNCRVERDRDLNTDN

SEQ ID NO: 127244 - protein, 242 aa, Heterodera glycines
MNLLPHFLIFGCLSIFASAFLPQKGINRNDKSTAWHAFHADVRDEVAIANASRIFKPIENEEEAEEILGRDRGIRCGQTATNRVEYGQQSPNEEWPWVASVQLECVTKRTNQIELLQLCTGVLIGEKHLVTAAHCLYLPAETFMKCKDNQIQGEFDEGTSFLVTNKYVKVTLGGGDFRNSSKLGIKRFFKLQTFRQHELNDDISILEDDSGAPLMRQLADGRWALIGIVKGHREECQSKCKE

SEQ ID NO: 127245 - protein, 254 aa, Heterodera glycines
RHPDWDNRTLLEWFSEKRWTDEDNFPPFSEKHLQIIDQAVAEMKLLIRYAQLFGSDPSRIVFQPSLARGLDYYTGIIFEVVMKDSAGSLAVGSVAAGGRYDKLVGMFTDMGRNKDDGGVATAPKKRPEVPCVGISFGIERLFTIMELKARADSNAVKVSPTQVYVASVSVAKEETDKMLEQRMRLCAQLWNAEIRAETGYKANVKFLQQIKFCETQQIRWMLILGPEEIAKNSVKLRYIPAKDKGEEVRLGIGK

SEQ ID NO: 127246 - protein, 61 aa, Heterodera glycines
MGFIDKTNGNTFVFYVSNFCSLKCRNSESIDGQSFADESIVEYCSNSTESKHFPDSCGAVV

SEQ ID NO: 127247 - protein, 402 aa, Heterodera glycines
MTVKSSDGKGKHKVWGAIFVCALTRMIHLELVTDMTAKRFLLAFTRFVRRWKIPQRIVSDNGTNFVLGNKALTEIVQQSIKEKEHWLKVLKDEEVQNFSNQQKIEWVFISPFAPWRGGQYERMIGTVKYHLKREIRNKLLSFEELWTLFSEVERIVNERPITYTSQSEVIQPLRPIDLILPNIGNNRLEINTRSVENSDNDYILENSNTANVVQRYQKAMNMAEKFWQNWKDSYLLGLRERHQGNKHTPGKAPKLGDVVIISEPQTPRNCWKLGKIEEILSQRTARVRISEKSIIERAIKHLYPLELAENANNSDSGIKQQEHSFVKQIHYNWAKGLPQNKALVKANSPNHYKWAKQPPKIINDITNVTCISEMNRDFDAVSLDCEEMGRDLEDETRKKNRG

SEQ ID NO: 127248 - protein, 54 aa, Heterodera glycines
QDLKKHIAPKIDRLFLVSSLDKNCSGVIVFAKSQVKQLEIKAQLQNDALLYRYR

SEQ ID NO: 127249 - protein, 69 aa, Heterodera glycines
MGNEQSQSREERPRKLPKQNNGEPNENIVRINRTEMPEEFQAVLLSDNVVQQVMKSGQNTTNDLRTREL

SEQ ID NO: 127250 - protein, 175 aa, Heterodera glycines
MRRKNMLIHIIYNPNNDETPINSVEINISKNFAATIENCNKFDEEFHLSDDIMTKNLMIDWVHNVLVPVLRPGEQSLLIWKQFTRKITEFVMIYDVKINLHDRDNIIKLQSLIHNQFQAERFNGWINFAWRKAGLSQEFFVALYFSHKNAICLGNIKIIIEIIIMVTKLINRLKI

SEQ ID NO: 127251 - protein, 122 aa, Heterodera glycines
MALCNGEPPSKRSSRTVSSPIEDPAPHLQLLYPAMAPTPPIVNTSAATPFVNNQYNDSNDNYNTIPMDEDDDDDIQVLEVLPRRPPPPIMPMPSTPPLPVTQPGMMNGSFTLPPYHKALEHN

SEQ ID NO: 127252 - protein, 242 aa, Heterodera glycines
VPKSIPICLISPHLSPQIGLLLMQRVILLLEKMAPDAVKQHLLPLIYNSLTGDNVRVQELTLIEVPNIVKFELTLIEVPNIVKFVDREQMRTQLIPKLIRLMLESKDLSIRVQTMVCLAKLLPHMEPWMVTDQLLPALPKITSKDPSVLMAVLGIYKIVHENTKFGINKEQCARSVLPYLISTAVEPTLNLQQFGQYMELVHQLIRRVETEQRHCLEQLSASQEEQRSLTLYVRGSSAPFCV

SEQ ID NO: 127253 - protein, 106 aa, Heterodera glycines
MDPQQLQQLLNALQQMVTNAAPQNAAPANLSNANLASSIDARLSAFHYNPEVGTTFESWFKRFGKLIEDDGSTLPEASKVRLLLGKLGEEEYSKYRDTISPTQPDQ

SEQ ID NO: 127254 - protein, 50 aa, Heterodera glycines
ECVESAIRNFNHFCFSPFCPIPGLLAVHHPIHPKFPFLFQLPIFMTFPQS

SEQ ID NO: 127255 - protein, 1089 aa, Heterodera glycines
MTTNLPQGKEAQNSGSDFDPIYFSPEENQKWANLLVRMRAFEQAVCRQFRQIETQFVQISSQIQISNTVDRVRELESSLRELENTMEMDTFQTQEKMIDVEQEVGKVNMRMDYQERLTKVRFGKIIEKMKAEVSKVLESLDTLQARVQILEYEQDEEIGRTMWMEDGHSEEHAQLPTNQEENGENNQVQEECEIMISDPFLGGISPLEGYDGNPSVSFSRWVARFEDMLTLYPQYTETQKLSRLRILLKGQARAEFEAMEPPPTSLSVALGHLKSKFENENTRSIARQAMASCRQAPGERVYEFANRLSEAVRTALAGEKEEIIRKRLFEEFLEKLTPELQFEVKSGRPSSYSNAYELAQHFELLLATKRANHVSVADSVAELSHKVEALTIHQQPIPNRRGSERRACYYCKRPGHIVKDCRDKRRDEERRYRGDQRDGHKYFGGERRWSRERNFRDNRNFAPRGRGQRDGRIHRTPTPYGEENGQNFESARRHSPGRRVSFGGRVGAARIASPLFLALIMVISLFGRNSATSQMASPMICHPDSPASLWSIPVDPICPTWSPTEIPVTMKLSVYRLNTIQYKTAATACKCIKTKISRRIGFFGGRYEEVATSPIEMPTATCRKMRENGESPAGQLVQINGIFRATQNSLEVGWRNWPAAMFWRSTEVSNCYAYETVVFTRHGMEGLNTPTNDCPTCAYQSGSCRCPQISLIWKPDLTQRCAYVKIAEWQGEYSSRIWTAESGDFALTFVNISEKTDTNGNDFVISDQTFAVPKVEFVEMLRKSEQANTKLRKKRSHAFINGVRREYVINETDTTVKWLEPDQETKELEKVGLVYSSQLAAQLTALSVKVTANTQKLFAETVHKICTSLRFLADQTLTLAEANPTLLARFFLANPYLTARLVTKDMLEIRPCFAVNERELHFHWQNGRCFERLPVTFRLFGSYEKTKHGFLDPKTLIIHSNARENSCKDFRYLYVQTKGTHSQYDQITGDVKEISSESIHYLSRQGKIDFPEMPIQFFRNKVIANLSVLYSPDNFAETIEVAKIAQEIVRLNRPNAWEFISEKSDHMATNIVSNGLFSFLRGGLISANQ

SEQ ID NO: 127256 - protein, 48 aa, Heterodera glycines
VESAIRNFKPFLFFAFLSHPRPSGRPSSYSSKISFLFQLPIFMTFPQS

SEQ ID NO: 127257 - protein, 363 aa, Heterodera glycines
YVYKTHEDVFSTHDYDSGMLNKCPPILTNSVPERVKPYPVPEKYEKELKLHMKMLEAGVIKESCTPWAHNVVLVKKSNGQLRPCVDFRPLNKITIPDPYPIPRMDKTILRVAGQKYYSTLDLSSGFWQIPLDSESSYKCGIVTPWGLYQMLKLPFGLRNAPSVFQRTMDKILEGISNVTVYIDDILVHTNSIEEHLKTLELVFARLRKNGLKLKMSKCMFLKNKCTYLGHILTEKGYRPSLNNQEVIEAFPEPRNAKEVKRFLGMMSFFRKFIPSFASVASPIQRVRGKSPEFRWEEPQRKAFLELKGKLLNAPCLRAPNYGLPFYLFTDASAVAYAGALMQTQNGEDLHAVGYWSRTLSTTE

SEQ ID NO: 127258 - protein, 135 aa, Heterodera glycines
PSVPLPCCAHGFAHDDCDPIDVSNTDPNYGFRISCVPFARSLAAPHENCALGPREQANLVSSFLDASQIYGNWRKKNKMPQGDHYCQSENGRRKCFLSGSADVNLLPGIALLHTVWNRQHNTVTEKLTFVTYKWT

SEQ ID NO: 127259 - protein, 72 aa, Heterodera glycines
MDVHVQKAAEKIAALTLDLAYLENVQMIIDRIKPYFIYILDPHGCCAEADWKTFTKYCKSEVSKPIDGIKDL

SEQ ID NO: 127260 - protein, 22 aa, Heterodera glycines
MNNLNDFQVECSGTVAGTFIEI

SEQ ID NO: 127261 - protein, 30 aa, Heterodera glycines
MVLDKPQKLHQQPEREHRPRQCHRLRMLSP

SEQ ID NO: 127262 - protein, 84 aa, Heterodera glycines
MTDKNDDNRKKGSSSHGAGGDDDGQRKENKLKEYNKAAAKCNKLTTREECEKLKKNDINLCYWNPNVQYPDRRIGQCEPSQYTK

SEQ ID NO: 127263 - protein, 87 aa, Heterodera glycines
MFKLAQKLPLLIIEKNYFMEKKEHTSIYKNLIFVYFYLTIFRVKRLMVNMATMGRMVVAFLTTNSRQMTMNYVLIDRVKKRVMVMVK

SEQ ID NO: 127264 - protein, 91 aa, Heterodera glycines
MAESTADLILAFNRCLDFFSPRFSNFLFAGHRTLLWNLACSLYAFYWAFFLRPAVYSSVYFGSFYNPFAGYRTDEKHRSSSIDRDREKKSF

SEQ ID NO: 127265 - protein, 44 aa, Heterodera glycines
EHKESIDNNKMVGQEQQDEQRLTNGPTEPEKEITDLKATGWLNN

SEQ ID NO: 127266 - protein, 89 aa, Heterodera glycines
MAGEWLTATCNTNIVIIPSKVPQLCSALAQTIGKIVFPMIPILSSFNIPVDSQARMNPEALEECIIKCKDEVLNFFVNYSKKDFQVFPY

SEQ ID NO: 127267 - protein, 777 aa, Heterodera glycines
MDQLASGIPGVVGYMDDFIIASSTVNEHFSTIFKFFKRIQEFGFRIHMDKCKFLVKEIKFLGQIVSSDGIRPDQNRTRALQEMPAPTDITTLRSFLGAINYYGKYIKNIHQIRAPLDELLKQGVEWQWNEKHREAFEQAKSILLSDLALTHYDPNLPIIVTADASNKGIGATISHRFPDGKEKVFQHAARTLSKTEQNYSQIEKEGLGLIFAIQKFHQYIFGRKFILRTDHRPLLGIFGSKNGIPIFSASRLQRWALILLNYDFSLEFVRTDNTGQADVLSRLISEQRNSAASEDMVIAQLCAETESEVEHLLNVQLEQLPVTVDEIQTAQQDDELIREVIKFTQNKWPNHGINPEIKPFFSGRQKLSIVSGCLVFNGRSVIPPSLRHRVLKALHLAHPGIVRMKNLARTLVYWPSIDSDIEEIVRKCRQCQEAAKQPQKQPLQPWPTTTQVFQRVHIDLAGPCSDGNTYLVIVDSFSRWPEVFMLRHTSSQHVIEQLQWLFDRFGIPKTLVSDNGPQFSSSHFKDFCDSNGICHLFSPPYHAQSNGAAEKFVDFFKRQLKKCSGDKNWLKQSLLSYRSIPIAVLNNRSPAELFLGRPLRTKLSLMKPERPNPFFRGPYQQRMAQQFDKKHGAKRVEFNIGDKVQFVNYRDGKTLWLFGEVVTKKGLIFGIRSPQIANRIVTRHANAIRLTQALGTDQTWPNFDEEPKKNKSPVRAPQIQRNVTPTPPAERNHDQFEQNEEEQNQQQTPVLRRSERVTKRVRFLSPRMTGQRHNIRQ

SEQ ID NO: 127268 - protein, 20 aa, Heterodera glycines
MTNSKLIHLNNGKVLSSNAT

SEQ ID NO: 127269 - protein, 20 aa, Heterodera glycines
MTNSKLIHLNNGKVLSSNAT

SEQ ID NO: 127270 - protein, 319 aa, Heterodera glycines
MQKGDKDWQPSLGSILELQFLSTNNGGLGVPIEGITSPYFYLRKAGSYFTAHTENSDLYSVNLLCPSSGTDNVGITIWYSIPAADFLKFKNLLSTFFVKEFTNDPEYLRNKSILVNPNIIRENRIRCIRTRAGEGIITLPGSVHFGFSTGLNCAVAYNFGPPSWIPYGIDSKPCSGVYTYAFIEAFELAKLYVLKCEDGDTARAAELWNTKYKNILNYGHGFDPIYPNCRPTITESNDIIPRKYVLLSGIWFRSEGLIEKETGIRRGIRYRCINYNCRASSTYDLSTLLFTNTNPAHQPVEHNFEPNRSLINLPYYVLF

SEQ ID NO: 127271 - protein, 118 aa, Heterodera glycines
MCDYDSIVGAKTITPSSDDLGSNIDYFFDNIISLNVWSRLIGVIRFRIPESFQLPICRITNRNRVLVRQCQLKKRASGFYHQNVLSEEYKTIADYKQNTQWPCLETDQYEKCGLFVNL

SEQ ID NO: 127272 - protein, 362 aa, Heterodera glycines
MFRYNVQNSKNSIGKGHATKKNLILVPDIEIGAFKTMLRFIYTKSFDGLDANNLLEVLKAADKYNISGLVKECANFCAKVSIKKLPNVFVAFEQALLLNMELFYFYRVVRDRDLILKERTTEYLRPGFDRDREKSRVFPCFASQKFPVFQPEKYWSRFSMALRWSDEQCRQKGIECSAENRGKILDPVLSNIRFPLIPKEDFTKSVVPTGVLTIEEVISVYQHYSHPKFDVPGLIKLKFPTHQRYKNGEKIEMEIEKVSEFAVEEVGSERFSDAMDIGGFPWKIMAQIETKYKSNEKWLGFYLSNDGPKKENWSCKSSATLRIVSQKNGTEDLIGTFIDRIFNKECSSHGFYYFISFAILKN

SEQ ID NO: 127273 - protein, 67 aa, Heterodera glycines
MNPPTFAPFRLLRQHFDRLAVILLNSPPAAVVPCGDFAFPADWAKIWNSANIRLCTDGAANHLMKLC

SEQ ID NO: 127274 - protein, 28 aa, Heterodera glycines
MCMCAVAECPCRPTPTWVLTIFAKMHWT

SEQ ID NO: 127275 - protein, 34 aa, Heterodera glycines
CPFGVLEHLWGAKIQRRIKVQAIGKLLPKDSVSP

SEQ ID NO: 127276 - protein, 274 aa, Heterodera glycines
MNVLITVVPLLITFVRFVITFVPLLITVVPLLITFVPLLITVVPLLITFVRFLITFVPLLITVVPLLITFVPLLITVVPLLITFVRFLITFVPLLITVVPLLITFVRFLITFVPLLITVVPLLITVVPLQITLLITVAPLVITFVRFLITFVPLLITVVPLLITFVPLLITVVPHLITFVPLLITIVPLLITVVPLLITFVPLLITVVPLLITFVPLLITFAPLLITATPLLITAVPLLITLLIAVVPLLITLLIAVVPLLITVTPLLSLLYLF

SEQ ID NO: 127277 - protein, 492 aa, Heterodera glycines
SNPLASYRPGTGCVGRGTTVIIRGATVIRRGTTVIRSGTKVIKRGTTVIRRGTKVIKSGTTVIRSGTKVIKKRTKVIKRGTTVIRRGTKVIKSGTTVIRSGTKVIKKRTKVIKRGTTVIRSGTKVIKKRTKVITRGAAVIRRGSKEVQKGTTVIKRGTTVIRSGTGTTVIKRGTTVIRSGTSIKKRTKVITRGATVIRRGVTVIRRGTNNDKRYKSDRRGVTVIRRGTTAIRRVIRSTTAIRRVIRRGTAVIRRGVAVIRRGAKVIRRGTKVIKRGTTVIRRGTKVIKSGTTVIRSGTMVIKRGTKVIRGTTVIRRGTKVIKSGTTVIRSGTKVIKKRTKVITRGATVIRRVIRGTTVIKRGTTVIRSGTKVIKKRTKVIKRGTTVIRSGTKVIKKRTKVIKRGTTVIRRGTKVIKSGTTVIRSGTKVIKKRTKVIKRGTTVIRRGTKVIKSGTTVIRSGTKVIKRTKVIKRGTTVISFIIKIFFTKFNLKN

SEQ ID NO: 127278 - protein, 173 aa, Heterodera glycines
MENPCQKPSKVLAEIRANTKDETFVSMGTDLALVALLDVLKRAKKISVDGTFKVSPAAWTQCFVIGAFVNRRLALCVHALLPGKQRKYYEEALNAVKAVMAPSTPAHKNGAKWAWRNCMPTTKEQLIGDALDEAEYNTDEDVMNILSLLSLQMQGYVGGLRARGAQHEHEDRE

SEQ ID NO: 127279 - protein, 41 aa, Heterodera glycines
AREGLFFGIPPSVGELETKRKRVLMHFTRHNFFVVVLIHVK

SEQ ID NO: 127280 - protein, 91 aa, Heterodera glycines
MSGCCVTPPLDSSTQRFVYSTIRLLDDSSTQPKSDDSSTQQKLNDSSIQRFVYSTIRLPSQKVTIRLLSKKATIRLFNDSSTRRFVYPAKK

SEQ ID NO: 127281 - protein, 338 aa, Heterodera glycines
MKTRLLVVKPQREKERQGRQRQFSTSSQSGHFNEGRTRSQSVNGRQSSKPRPPFPCKTCGGNHWNNECRNKRGGSQRNNECNNKRSQKCFNCNRVGHFARECRSKKQANSNDSMSVMNVSDDTDGWITVDCLINGRLVSLVADTAARKTIIQTPIWEKLGKPKFKTGKTFGKSYSGHNFELIGSFDCTVEFAGIKLELECFVAPTGALNLFGLPWIRAFELALQRPIATTLQIVQPEPAFMAMASSADLASKLKRKFPEVFSSELGHCTKMRAHLYLKPEAKPIFCRPRPVPHGAIDAIDTELDRLLAIGAIKQIDYSRWAAPIVASEKEVGRRPSLH

SEQ ID NO: 127282 - protein, 15 aa, Heterodera glycines
MPMGPAKGQLLFLRL

SEQ ID NO: 127283 - protein, 223 aa, Heterodera glycines
MCPGNLSPLFALLLLALSLNANVLSAHEDTLLDEMEPVKEDDAGEYLTKFGYTTPSQLNVKTDGMAGDLSNVFEMAVKAFQEIAHLPVTGVLDIKTRKKMAEPRCGMPDGVEMLTEGGGAAFKWKKTDLTYTFHNFSPDLPRNTAREVPTSQQADINIKFASGMHDDPWPFDKRGALAFLQFDVPSPSHSSGGVLAHATMPPSGMLHFDEAENWVYMDAEKIR

SEQ ID NO: 127284 - protein, 42 aa, Heterodera glycines
MIDRLRGIRPNSAEREDNQSNETHSFNPRIERQGPIRIMEKD

SEQ ID NO: 127285 - protein, 45 aa, Heterodera glycines
MGTNVHLRRKPTAGKLEAGKGVGNGQRNGGRRRESVAAENEQRKK

SEQ ID NO: 127286 - protein, 24 aa, Heterodera glycines
VTGVSIIAVLFLVFLMPLQNLVRF

SEQ ID NO: 127287 - protein, 258 aa, Heterodera glycines
DIYDEVLDKLPEVSSDEDTPPDHNFINVLSLDGGGIRGLVIIQLLICVERIMGEPIFPYFDWVGGTSTGAMVTAGLAMGQTLHQIQRLYLRFKDMVFDNRRPHNTQVLEKFIRQEMGAETMFSDLKWPRLMFTTTRAEFFPVQLELMRNYKLPTNDEENEELGYRTPDDLLLWKVLRRSSAAPTYFASVDNKYIDGGGKSIFGQLHKYKNFPNAVNVGCFLSIGTGVIPPTPLKPTYIEVAQNWIAQPLTSINAFWTI

SEQ ID NO: 127288 - protein, 114 aa, Heterodera glycines
TTTRAEFFPVQLELMRNYKLPTNDEENEELGYRTPDDLLLWKVLRRSSAAPTYFASVDNKYIDGGIIANNPSLELLQEINFWTASQNFPNAVNVGCFLSIGTGVIPPTPLKVFF

SEQ ID NO: 127289 - protein, 41 aa, Heterodera glycines
MHTGSNNRIGIRSGSAASSASAGAVSDEQFRSSFEAVPNVR

SEQ ID NO: 127290 - protein, 112 aa, Heterodera glycines
MQLFVRNLVGKTIVVETDQQFGTVRSIKEQIEFLLDTFCTMTSSWPAIVLLLLLAICPLAVPFICLFGLMAAVHKMGILIFKMACGAWPDNRVPTELWPIPSHQGRASFNYF

SEQ ID NO: 127291 - protein, 156 aa, Heterodera glycines
TKNNTKGASYGLAMSLSVSPAGRTFIGRMPSGKGSHWAYAQPICVGYAPKGLRKDQTVGWADNTYGVDSTGQIFNNGKESEYVAPFSKGDKIGVFHNKRENCLSYFLNGDLLGQNKQFIADSNSGLWPAVTLRHPGDRVEFRVDSELGQMPGGLWK

SEQ ID NO: 127292 - protein, 630 aa, Heterodera glycines
MSRFCPLVETKELGRLSAPKGKFSLFYSLEFARNYRLIGKEITEDKFRYLMKTEKKQREMAVKLMEKAGISGEEKTFGLQHLGLIQNFWDKEYPEMFRIVAFDMRSGIKPIFKGEGIRKNEVCVIKDGDHWDGMKSVTQFFCVRNFCVSCEVTRERPERHRLECKERCKKCCRMGFGFPCADVCAGIYCAECNRNFYNTECFESHKKTACREYKKCEKCGETHNTRNKHTCGEKFCRICKIYHPKRGCFIQKLKIRSTRKYRIVAYDLETTLYNGVHAPNLVCAALTCSECVGEKRKCEICEEPRMLTWSAANVEDPIGGFIDWIMGFKQFETVAFAHYAGRFDSHFVLRVLTERGLNTELMMADLKIYQIKAKGVYFRDFWLLSQNKLADLPKTLGLSIPAKLYFPHKYNKNENFGKRLSHLPPFDDYNPNAMKEEEYEKFEGWYNENFETEFELGEQLKVYCENDVEILMEAILKFRQLFLDITDGMDVLKDSVTIAGVVMRIFRTKFLKDRHIPIMPEGGYERADNQSKIAVKYFEWLAHREGIRVRHAENGGEIKFGDLKVDCVIGGQKRIIEFQECEVKAELKKNKEMKRFFESVPDKGPINPRDAYAGGRTMPFCLYAKATEAV

SEQ ID NO: 127293 - protein, 402 aa, Heterodera glycines
FLGPNLFLIINRIIINFQFPSDVEERLIADLFRGYNHLIRPVPNVSSTPLEIRFSLALTLLINVDEKNQIMQTNVWPTMRWIDYQMQWNPLEYGNIRTIRVPPDKVNPLEYGNIRTIRVPPDKVWLPDIVLFNNADGNYEVSFNNADGNYEVSFYSNVVVEHNGEMLWVPPAIYKSSCIIDVEFFPFDEQICAMIFGSWTFNKDEVIISYLNNKRQAELNDYSESGIWDIMEVPGQLIHQKSKIAYQIKIRRKKTLFYTVILIIPTVLMAFLSMLVFYLPAEADEKITLAISILLALVFLLLVSKILPPTSDTIPLIAKYLLMTFVMNIITILVTVIIINIYFRGMNIITILVTVIIINIYFRGPTTHTMPEWVRTVFVRTVFLRYLPIFLMMNRPRNDPSE

SEQ ID NO: 127294 - protein, 18 aa, Heterodera glycines
MRDEGMQWVGQMETIRLY

SEQ ID NO: 127295 - protein, 52 aa, Heterodera glycines
MHQQQPSSSSAAHNGPQVPGAEEQRTASLTVPTRPTDGQQQHQQQNAVEIIN

SEQ ID NO: 127296 - protein, 249 aa, Heterodera glycines
MAKVANQKRNERRIRAVQDLARHLNHRMNRHRRGQRDGKRDPSEERHIRMTTERYADQLSRLGDDHIHRLQHQFPQLPNPRRRRSEVGGNLKGGKSQPKLASMVVRPPQGELLPSKDVGGAAPGASNSHGRNENEEEGREGKRQPPEGAPSAGGQFWRIAEERGESSGRSGRARSPGKEGENGEGGGGTETEIGEGSAPSGLGNPSRRLAPNVGQCELAVVEGQRREKWGGGGSPRWESGSHASSADGG

SEQ ID NO: 127297 - protein, 100 aa, Heterodera glycines
MMPLLLLLLRTVLTLLGALALVLQPLWARQTLFFLISEKNVYSMPLPFGDSFFPFFILHFPQGFRSAHRDLEAQLLLVTDNDALREQIAEVAKISTKAQK

SEQ ID NO: 127298 - protein, 30 aa, Heterodera glycines
RLACLSLHLISLFILISLCHFCIAIKIHVI

SEQ ID NO: 127299 - protein, 30 aa, Heterodera glycines
MYEHYALDFVRRAVQANQTVHVTREQCRNV

SEQ ID NO: 127300 - protein, 83 aa, Heterodera glycines
MGLFNVNQEVELFSKLFSSCTTTSSQNGDDDLRRLEFTLISAYFNLFDPYADLILHKCRDPFKIVFASPQVFFDCNFQLAQSN

SEQ ID NO: 127301 - protein, 705 aa, Heterodera glycines
MGLLTLGTPLSWPRIVEHLQYIKAHGIDQFIALYHRVKGRERDQLRWGDEIEYTIVKFDDEHKKVRVSLRAKDLLDALMASEDVNRSLGEENRSLWRPEFAAYMVEGTPGTPYGGLMSCFNIVEYNMRLRYDDVSALLRPNESLLSISFPALGAPDFTDPPAVPRPTHPDSVGHSVFYPDEAIYSGHPRFRNLVRNIRGRRGEKVAINVPIFRDQNTPSPFTCIFKETFENAECIFKETFENAEASRAALPDHIYMDHMGFGMGLCCLQMTFQAVNVMEARWLYDQLTPITLIFLSVCSATPIFRSYLSDVDSRWPIISASVDDRTPFERGLVSSASVDDRTPFERGLVSSASDGYSKFHAIPKSRYDSTDCYIYPCSAQYNDIQLQYDEQLYQQLIAGGCPTVLFSHIAHMFIRDPLQVFEERIEQDDQKSTEHFETIQSSNWMNMRFKPPPPDANIGWRVEFRPTEVQLTHFENAAYCCFLVLLTRVIVSYRLTFLIPISLVTENMQRAVRRDAISTQKLHFRKTLAHCWHTPEGKPCPEGRPPAAGARADDNNVAEMSIDEIVNGGNTDFPGLVPLMLQFLNSADVDVDTRCTVSQYLSFIQKRARGEIKRARGEIWTTAKWMREFVHQHPTYKVHQHPTYKKDSHVPDECIYDMMKTMDKISRGEHCEKLLGCFKTKTEQRIPSAVKRAEEEMTMLIARRK

SEQ ID NO: 127302 - protein, 30 aa, Heterodera glycines
MADASPPSCPNKANIGYLGLSNDTKKVGFG

SEQ ID NO: 127303 - protein, 110 aa, Heterodera glycines
MGDFVLLAHPIQGPPVCFAISPLNCPLYPIRTATSPIQGAYGIPGEPGESGTPGTPGLPGEQGLQGYPGDDGFPGIAGKPGSPGELGPPGDQGKQGGCDHCSPPRTAPGY

SEQ ID NO: 127304 - protein, 159 aa, Heterodera glycines
MNRQMFLFLFLLTIVQSNFEFANEFGTTKNRRAAEMNFGKDAEKQHKHHNHHEAWGYDDHDGPHKWGKQLEFATINELQFVNYDVSGAVEIKNNGHTVVVSGFEKWQNRQRPYIYGGGLNGKYLLAQFHFHWAADHDDGSEHTVNALHYPIEVRNLELF

SEQ ID NO: 127305 - protein, 56 aa, Heterodera glycines
MKIRNSTCAGKNWLFGPAGHGYSGKIQENPAGLGKTKFISFFFFFLFPFFSKYFVK

SEQ ID NO: 127306 - protein, 285 aa, Heterodera glycines
MKLTINQRLGQGQQAYLQMCRQIGLGETGEHFWIPPQFLVKSKEELIDYVYPNFQQLLGNDKELLNRLILAPHIDTCDEVNEIMMANVPGQVREYLSTDKPLDDRPLDIDEIESEVAALNRRTDSGMPPHSLRLKVGCVVVLLINKSDKEGLINGTRIVLEELGDDRLIGRVINSNAIGGQVRFFLERTRNVYEDKSPGGIKYERLQFPIKPAFAMTIQKGQGQTIRTVGIDLEREVFSHGQLYTAFSRATDGNNVRVHAPNREIDAQGRAKVLNIVATNMLKLQ

SEQ ID NO: 127307 - protein, 38 aa, Heterodera glycines
MAFDEEKPVDLLVHPILPTILRISKSAEHITMLGVLED

SEQ ID NO: 127308 - protein, 98 aa, Heterodera glycines
MAIVYTEFTREEIDEAIEEAVLKVKGGTERDGMRAALETIVSSPHLLLNDVAARHNIDYRKVSKYRNRFNDDAQPARETEHHYGDYESEILGYFKRRQ

SEQ ID NO: 127309 - protein, 223 aa, Heterodera glycines
HKNLIWPISNVPLKQILRSRLIWVVWLNAFADLFSGVFLLMYIPSYLNYVLHYGIEKTGFLGALPSLSHIPLKFLFGYCSDQFKCLPERTKLILFNTIAVGVPAIAYLAIGFVPVDRPMWTVLIFTAILMLLSTAGGGFYKCGTLCSRQYSHFVVANIQFVKYSHFVVANIQFVKSLTLFVGPALLWLFVEDETDRDQWRKVFILLAVMLIVVRVSKKYLTVN

SEQ ID NO: 127310 - protein, 209 aa, Heterodera glycines
EKIWLHAFVRYFILLLSWLCLTSISSNMLALNFTLICMGSVPTNGTDLSGAEVGEINDFTLMSMPWHLWAVAVGSMLGTFPFSWLYTRFGARFVLFGAGLASAIATALIPIATSFSFNLFLALRFVQGISYAADFAAMGMICSRWASLKQNALFISVLTCYSPLSTTITNPISGMVGTLFKSAFSAYLPAYSGIFPTILWHFPSNPLPY

SEQ ID NO: 127311 - protein, 63 aa, Heterodera glycines
MTLKTFHFAGVASMNITQGVPRIKEIINAVRFISTPIITVALADERDEKLARRVKARIEKTTL

SEQ ID NO: 127312 - protein, 28 aa, Heterodera glycines
MAAGDGLILVANREHLGLSNDTKIIGFG

SEQ ID NO: 127313 - protein, 147 aa, Heterodera glycines
MYPKLVDQIAGGIAKAVQKATDSHAFHEFPDCLSLAHTDRLSIKLNAAHSQIHRSLHRSANLTQLDAISFKIRNEEQKKKLVMTAEVQKGNGLLLKNEAGKAVMLVRLSTHTADSLGKLMHPSQATLFKVGMVTLASSAPGMGQIEK

SEQ ID NO: 127314 - protein, 139 aa, Heterodera glycines
MPKTPRQQRICQLKGTDGVAVVITNVPVSSITHPNNRSKPYINTDKRPSEEKQMPYLYAENANQIRAHHNYATEESGKWMMFFEKGSELDDHWDMAKRLYNEGKLDGITSMKVSTAFDNPRASDNRKVAKNSEWTDKME

SEQ ID NO: 127315 - protein, 62 aa, Heterodera glycines
MDEIYKRSELAAQNSNHKMCIFLTENRKKRTNLNEKRIRKTEFRQCLAKNGIHCTKIGEHME

SEQ ID NO: 127316 - protein, 217 aa, Heterodera glycines
VMIIIRCFSIVSSSGSFASCFQCSTISSRRFFCHQRRAKVSTPCPPPPDPSAEFRVVPTSSVIPPISGTENPSLGRGEARRISSLITDNFRADVVARRYRLDRLRPSDWLLVYNYRVGSWLFTVGRYAFALLCVIFLIAVDDFVRVGSGKFTLQKLRVTHNELIRLGIVGKFFCAIALLIFFLLLRVRSLFLLRMYVHRKEPNRICATIAKGVFSKK

SEQ ID NO: 127317 - protein, 92 aa, Heterodera glycines
MRLIAAGTAPTAQQQQQPQQLQQQISFGEFLEFVRAVFALRGRSDQCERKRKADSLLVGGTGGARFFRRDNEIPLYGPVLITTDLPNIDGSI

SEQ ID NO: 127318 - protein, 80 aa, Heterodera glycines
MAKHQKATPPIGTEQNGENSFAAVASSNSTNSIAECADDYVDSHDKPWKLVAKINAGNCETLEQRKHLHKFCSEGNEIFF

SEQ ID NO: 127319 - protein, 127 aa, Heterodera glycines
MRASDQTKKDKNKLWTTDENRREKKQSDGLMVIDHTFSIGTFFHFQLNGFHRVDQNGAGGEAADQNCPLYSARHARRRHVRQSERSADVPNFTPYPAAVTTIIVGTVPKYGEFDTLARLSMCIDGSP

SEQ ID NO: 127320 - protein, 62 aa, Heterodera glycines; identical to SEQ ID NO: 125756

SEQ ID NO: 127321 - protein, 34 aa, Heterodera glycines
MAQPNTPTAEVALLTRIRNRPILYNWLPVRVHDA

SEQ ID NO: 127322 - protein, 57 aa, Heterodera glycines
MYIDEKAVATATTNLKKGRTMPPRAAETGTFVTDRVGAVVFAFFSTTLSQTMQKRRI

SEQ ID NO: 127323 - protein, 230 aa, Heterodera glycines
MKERWPHNNSHPSSGGCGLVAKTTDPRKGPRAAIIKRARHEVNAPPAVPQNIEQLIVPPAYRTYEPTDGNEEQFLLGDSGVFFEPGNENPQRILLFGRESFGRWADRMKECFGDGTFSLAPPMFYQIYTILAKCCFNLISRENCFKAWVVGYRRVPLLADVQVASVLREDVWTSPSSLVDILACLVQNGLRDRCAQRRCCHVSCMRNQILLLPFRAEFAKKNQGTKSLGG

SEQ ID NO: 127324 - protein, 199 aa, Heterodera glycines
DVVDAMPKPVNVTRPIVVSTRRHLKVGRARKENVEQLEDTDDDDDYQNPRSSRVSEEGQVLRAGGRPFITSSVDDIHTKRYLLVPKEIYQSLAAPPPSDGTPIGLVRTRIKQIKNDDAINEAERAVKYEQELKRLNKLTKDEDERPVGVKLENLSDVVDAMPESSTVGWSITNGLSFPDGLCPDGLATVGYPLADCPDP

SEQ ID NO: 127325 - protein, 159 aa, Heterodera glycines
MAFRRSFDGISLRIGTFLLLFTNSALLLQPPAATNATADRILSVADFVCRHFADSDSFVCHGITTQFREEFLYVLGRLVISPGQLCALLVTDCGTPLDPFGTNCRGSYMVPLLPGIRLISLNNGYCEKTNMFIYINQTDPDGSLSWLVDQLWAAEKADE

SEQ ID NO: 127326 - protein, 105 aa, Heterodera glycines
MPPKPSGKGAKKAVKSTKAVRTGDKKRRKARKESYSVRQRRFRAHCRGSLSSGPLQQAIDHLFARNPNGRPSDSAWRVGQARRVGGDQGGDEVHLVKVMMRRCWR

SEQ ID NO: 127327 - protein, 305 aa, Heterodera glycines
MDTLETEHRNILLQLGNRKVNAIFLRNLPNAEENAKMGISRHTNRESREQWIVAKYVEKKFASQPLYQMAYSRSVTALNKNEREGGGSDGGQTGATAQHSTETNPSSAAATTSTTVKLRHTVLLDDAAVTDALSVDDNFYAENRLSRASSFGSDSNLVQSARAAIAQRASACFARGVVGQQHRRLVNALRTGCLEEVLRAMIQDGLNLNEELQLHANTQQQQQQKQQHEDGGEERGSNSKGSGNDATATTNANIEQCHQQNRPKQQHGGAVIAAIRTTTMTTTITLPLHIAVENVRFVYNGNKFT

SEQ ID NO: 127328 - protein, 214 aa, Heterodera glycines
MHWMNFLDRKMISFIKRGLKCCPNDGGRSLIKMDRRFLIKHQKIDKLSPVPKLQFIFMCVRFVVHFVVFPMPSIPKLNFGARQLSVLIKDLGRKLQKLINDSNYVEEYDPKKRAELKWKLEEDLFLDDTDEDKLLRILDELDKMKNEEEKKKHELKHNSAETKTKQKTKMEKNRKERHAIQLKILEFLLTSDELFRINHRFDERVTKGNTLQHS

SEQ ID NO: 127329 - protein, 103 aa, Heterodera glycines
MLTKVFLLFPGNVSVPFLLENFFLIYSIWNWPLPLQLTDIKHKMADQFLSWSTTTISAELTKKYINLDQKNSVEMPIIAPIFPEQNVMNLINASDARKIKNEF

SEQ ID NO: 127330 - protein, 159 aa, Heterodera glycines
MGGIGCAVLASLGLVPTGFGAPLLNSSLLLPLDGGGSATSATITPRNANSDRRSNENMSDILPTFQMVSANNGQFPNAKTNDNLPSVGNASDSAFVPFGLDVNEAQVAQAGLSASSHRLVRPRLDAHWFCGVQCVLLERLSDHGFQPNIRQKKLMTTQN

SEQ ID NO: 127331 - protein, 129 aa, Heterodera glycines
MKLTEYALSDALNNNEVKKIYFGEEILEALASFDADKRRAYILMEKLRPMSVKNHIIWAEDGEESSGEDFLEDVTPELGIFGTLLGNIVNGEVLYNAQFGHQLKTKLASENARGITTGNCAFDTAYLVD

SEQ ID NO: 127332 - protein, 218 aa, Heterodera glycines
MATVALKIRHLSDEMGLQRYSNRVLIVEDIELDGGRWSFIENCSEANCVVLRAVRGVHVVITRFDFEQDTNRAQRSNEWFSRNKGEISNAIIKFALFPSPNLHFLFICETGFYQTFRAFELKKLIFCQILSNWHASNKDLPTVFSEVNWALHNQLSNFSLYRNFVLIRREKWLSSSCLIDTANSTVPIRGTHPTENMATALINPFLFDAYCYALFLFL

SEQ ID NO: 127333 - protein, 73 aa, Heterodera glycines
PWSRVEGSPTSPNPNIPFAKLDNKPLFNVDGRLNPSLTILGSDVNVPRETVILNTVVLPYKELSANYKNQIIL

SEQ ID NO: 127334 - protein, 75 aa, Heterodera glycines
MPGEHATGTLVFLNNVLIKKGAKFTLRESRQRTVGYGIVSELYKPVFIDTFKKKVFNFEKIMERAEVMTEGNVTP

SEQ ID NO: 127335 - protein, 46 aa, Heterodera glycines
TFTWFGKSTAQSSAGEHVGLLCKNLYYDPISRGFWLTKPGTVTPTN

SEQ ID NO: 127336 - protein, 120 aa, Heterodera glycines
MNRLIRMFYQLAPLQLCLCVRPAQTFGRQMCSIIQNIHPTIETVPIACAICCPTAATVWLSSPVPSERPTEGTARPTPRRTRPSQHSVPSDTRGHRLAKSFLFETTHKMVQIHSIRLLIK

SEQ ID NO: 127337 - protein, 120 aa, Heterodera glycines
MNRLIRMFYQLAPLQLCLCVRPAQTFGQQMCSIIQNIHPTIETVPIACAICCPTAATVWLSSPVPSERPTEGTTRPTPRRTRPSQHSVPSDTRGHRLAKSFLFETTHKIVQIHSIRLLIK

SEQ ID NO: 127338 - protein, 28 aa, Heterodera glycines
WLQYRCLFSLSEMYSRTRQDLVVQLRSA

SEQ ID NO: 127339 - protein, 196 aa, Heterodera glycines
MRLVQTVYKCVQAHTDSVATVIRDALNPLKTSILSQSFKNLTTFVDQTFEQDERRDTIVVEQLNATFRAELASVAWDMALQREMEGNVSKALQYVGVKLEQQMTFGDDALRFTGRISRAQTHNYQLLNIAHELAKYWPGLCGPLFSLIQTAVNTILERMRTTVSLVLDSMHDENLAVALAPSATSSEYVKELCGHL

SEQ ID NO: 127340 - protein, 676 aa, Heterodera glycines
VPSDRISELERLVFYLQKRHNPNESYALQNLIIAFLVDSDSLASMEIHAKMDDLESYMELLYEEGEPKQRGVSYMELLYEEGEPKQRGVAMLAELVRHVEASQLAQIVENEQLMGALTRIWREDSRKNFELAIHLAQLFIGLLSVQTVDFELGRWELWREQTHEKEEKERLKWEYAMRKQDQLIAVVLNILLNLADDLRTEHKMLRKGLLPTLFKCLDRSSPQLLTVAVKFLWKLSQFSENHAVSECCGGVGSPLPLSSSSPSDFLGPLFSLLFNCSFEPSSRRCMVAAGLVSLLAPHISENDVALALMYNDVALALMYQLSIVDDAKAMIAFTDCIPTVCFLDCSFPGSLLVKSLLVNIVLEKRNAQLLCGSEGQGLDSLMAFALENEGGDVLAMKVAVARNIASHEGPTREMFTKWVPQLLENAVEKAQGDDSNNNKSIFALECLAICASIFALECLAICALLPNANWAQLEDSHSVVAFLAQILKRSQQSERDVTTKPSSRMKQFKVVQLCGTVAGHSLEMAERVEKHLLPLIISTLNNRQDDDEIVLQCVFVFLSLRQDDDEIVLQCVFVFLSLLAHGGEMAKRICQPAVVPLLLLAVVPLLLLNLMHDKNTQIRALCEQTLERVAEVNAHWRERIREARFEVNAHWRERIREARFRWHNAQWLEMVETTTD

SEQ ID NO: 127341 - protein, 68 aa, Heterodera glycines
MAEDGVLKSVIGLRIERVAELDGHIFCARQPFVNWTRLLESTAANSLRRAEDTLEIEAQISVTEIVGY

SEQ ID NO: 127342 - protein, 19 aa, Heterodera glycines
MTNSNLASNEHSAFNFEGK

SEQ ID NO: 127343 - protein, 309 aa, Heterodera glycines
MSAHFRAQLKLAYNDSEEFLTDQESFPVPQQNGQPDILYAKSIRSQLQSLDDHNSDVKSVLTQLEDNSDRWMTLRTNMTGAERTQDNPLYDAFVLDTPFPKAISDLKKYLRTLRTERRALEAALPVANVQNASAPSLVHLPKTSLPTFSGDCTNYTSFWNTFKAGVHDLNIPNSLKFTYLKQCLSGPPLTLINSLPISDDSYDSAVSLLSQHYENPEEVARALHNSLRKLPRIRPGDYFCEDLRALLDQLECICIQMSQQNHSYDTVAVQMEVEERLPRFVLDEIFMSKENDDNWSSDKLKSRLWAILK

SEQ ID NO: 127344 - protein, 516 aa, Heterodera glycines
YKSLISHPKIRIPNQWPPDFFTLEGIGIRDDLQPISVDEIVLKQFDQSIEFVKNRYQVKLPFRSDPKTLPLPNFGLCFGRLRSVFNTLSAKPDLLQKYDSIIQEQKKMGIVEIVKNPFEFSPPLHYLAHHPVISPLKSKVRIVYDGSAHVGKELSLNECLFPGPIILPDLIGLLLRFRIPPIVITTDIEKAFLQVNVHPAHRDCTRFLWLKNTSLPPSKANTQILRFTRVSFGLTCSPFLLAATILHHLSAFPSNLSTEISQNIYVDNILISASNSTEGQKKSTSAISLFQKAGMPLREFASNCQEAISHLPRQLKLPGTEQKFLGLKWNTEKDFLIVELSVPPPDFPTKRSVLSFIASHFDPLGLISPLILPLKLFLQSLFELKLNWDERFPTEIITNWQKSIESWKRTDKVTIPRSPISSPLSAREYQLHCFTDASTLAMCAAVFLRVSHPKFSPETFLIFSKTKVKPIHNVPLTIPKLELIAVEMGTRALKFTQAQFPSLNTNLNLWTDSAIV

SEQ ID NO: 127345 - protein, 240 aa, Heterodera glycines
PPIVITTDIEKAFLVNVHPAHRDCTRFLWLKNTSLPPSKANTQILRFTRVSFGLTCSPFLLAATILHHLSAFPSNLSTEISQNIYVDNILISASNSTEGQKKSTSAISLFQKAGMPLREFASNYQEAISHLPRQLKLPGTEQKFLGLKWNTEKDFLIVELSVPPPDFPTKRSVLSFIASHFDPLRRFTVIMHLLLSLFQNFWRSNPTLWNFRVPHTVAWRALAFDLTGQTSSTKGIYLIS

SEQ ID NO: 127346 - protein, 213 aa, Heterodera glycines
MENFARTFVEQLAKHTDNETSRKVHGGQLQLNIKRRGGGQTVQFDLPVQIGRFASANHSQKHQISEVSVIPIAVAIGRSRLIAESVTNAGQSTSERPKGNGHKKCHGNNCVGRGECRSHTWSPAVPPRICSVRTHLSADDSDFAVGSVRQRRANQRGTPASVLNGTKEKMGTKEQMPRFFGRFAEVKHIARAEHINAMQSLGKSERISAKEML

SEQ ID NO: 127347 - protein, 55 aa, Heterodera glycines
MNLKPIVFDDTSRNEYNLSLEDEDHIQFAAFIDKIWKAKKFFCAKIVFDINSALF

SEQ ID NO: 127348 - protein, 18 aa, Heterodera glycines
MRTRPIWQVKQRLLTSQK

SEQ ID NO: 127349 - protein, 95 aa, Heterodera glycines; identical to SEQ ID NO: 125597

SEQ ID NO: 127350 - protein, 43 aa, Heterodera glycines
MARVVVPKCSQDKGWQAATDAKHSSGEPLSLNTVLVFVHILHF

SEQ ID NO: 127351 - protein, 17 aa, Heterodera glycines
HKHLFDLFYHIHNLIKI

SEQ ID NO: 127352 - protein, 271 aa, Heterodera glycines
MEEFTAVMSANCRATHSVAILAELKTKASAEKSCATTERMRLDGAGLPVHRPDIDTELAEWIAKKRKNKQPESRNIIRQRAAALFMDTDIKASIGWLQKFLSRHNFMLRKKTSVCQKPPSNYAEAVPKFISFVEQRRKVMNNFPGGIFAMDETAVWFDCPDNRCIDNKGAKDPYVLVNRKRPVPQIVNQFAGKLVINFAGSIWMNDDTTEDYLHKIIEAKLFVGERLLVWDAFGSHKSERTTKVVKGLRVETVFIPGGCTKFIQVPNHPSQ

SEQ ID NO: 127353 - protein, 423 aa, Heterodera glycines
MWLRSDRVRLTRNIPNLSVYPLVFSSETLECDVSSGQCLCRQNVEGRRCDQCSENRFNLRGGCPACDDCYALIQSRKNELNGTMSELRENLDEIINNPVIIKVDDREFDAHVQKVRVEVESLHERALKKMGKFYVPNERVITHRPAEGDDSHIRDQAISMRAQLAEADTLVLGLRDRLQQIDTNAAVIEQQLGQFSTDKETTHKELSVGVNYVQTQGEQHLAKAQEAFDRYGEKSQQLSEIAGESKQLSDTQEQRRREILSLAEQIRKESRQSLSDANEAIFGASSTSLQISALLTEVHELEQRLKAIQQMATEQSLETNQTHDGAAFILSGVDSIRLPNVFSDELMEKVKRAQEEDFHSKIEQSRAEATEEMTNLADIEKEIEEAQATTKEAEDAVGDASQNAKEAAEVAEEAKMKAQNLAM

SEQ ID NO: 127354 - protein, 93 aa, Heterodera glycines
MAETETRRTAERVGGGQQEEAGLALITALTLNILKTKKGHEKTEKKNKWNNLFANTRSGGGGTSRGVVEGAICITTTISEGSGEKLRKMSVKQ

SEQ ID NO: 127355 - protein, 38 aa, Heterodera glycines
MLVLSDCAMHSRVFGVADHESDIHLHQFRTPNPNSNKI

SEQ ID NO: 127356 - protein, 411 aa, Heterodera glycines
MDSEEVKKHNEEKEKVKKLLAEYKQKVNKQMEKNVEEMEKDEKLKEVLREIEEAQAKHPGEKRKAAKSITEINEKHWDELYQGDIELSVEQAQYLLDTVTKTENRALMRAKRGAARNARKFPNHKWPILVPFSFDGSICKFQLRAESTFKYLRVSSIIGPSIRTPTPTSIKALRGVEKRTFGTRIKENASEMKAHIYEAVKLWNDNTCLNIVEDDEVSPRIQFTNIKGMGCLSNVGMQSSDTYQEIKLEYPTIAHEIGHALGFFHEHERYDRDSFVTFYADNVDPKNYYAFEKETIETTDNYQVPYDLGSVMHYNAKTFSINGEYTLVPRVGASYINTIGQEYGPSLKACHVTMNCDNDGFQNPDTCTTCICPQGYIGAKCQDVDIGGYAPASIANTCEGNILFATSNWQN

SEQ ID NO: 127357 - protein, 453 aa, Heterodera glycines
MKLREFYGSNIEELKKLQPDDLAKDLEDNKVLGIRWKPKHNRLIFKLPIFEGKITKRTILSQIAKVYYPLGLMSPVLLPAKLILQEVQNLNPKWDDEMPANINKHIQAIDSVEFHCFCDASIYGMGIAVYQKAKTIIRKDECNLIYAKSLVKPIKVAVHDGTIPKLELQALTLGVKAVKFIQAQIKFADHQVIMWTDSQCSVERLRENKRQDRFVANRLQKIREANFQVRHVRTDSNPADMASRGADPQCLRTSLLWRFGPIWLSKADKWPESNVIYRPGDEFKEVEKPPIVDIPAQPIQEVHSFIASVMDDSVSLAGSDDESQQPRPKKKFKIPKRRSALLRPIGQQQSPLQGQHKRRKQLQDSGLRKLFQAISDQQGSSKATTKVIEESREMQKAPRHEQIEHEQRMVRKSQQEANRHLQPKKRQQKEIQEVPHSTTEEQQRETKRQQIER

SEQ ID NO: 127358 - protein, 188 aa, Heterodera glycines
  unsure (1)..(188): unsure at all Xaa locations
MKLREFYGSNIEELKKLQPDDLAKDLEDNKVLGIRWKPKHNRLIFKLPIFEGKITKRTILSQIAKVYYPLGLMSPVLLPAKLILQEVQNLNPKWDDEMPANINKYWLKLMAQWLDRGEAITIEFPGTSKPSXSVEFHCFCDASIYGMGIAVYQKAKTIIRKDECNLIYAKSLVKPIKVAVHDGTIPKL

SEQ ID NO: 127359 - protein, 140 aa, Heterodera glycines
MDQPDPTEKQPEETDQPTKSKQQSTKNKEDKELERHRIGRKKTIDMQEKRQRSRDEWPEENETLLSYVQRIYGPENWTSAWQRGRVLRELHELEDQGRWMIHHKSDRLQLSVSRMYGGKRPFAEFRFVEGRYYSHMVPED

SEQ ID NO: 127360 - protein, 47 aa, Heterodera glycines
LCFFFHLFQSASALRFCVLTLLFFPFIPIDHVNSFSIHLVSYFMKLY

SEQ ID NO: 127361 - protein, 21 aa, Heterodera glycines
MRTRPIWQVKQRLLTSQKKGF

SEQ ID NO: 127362 - protein, 68 aa, Heterodera glycines
AVLVRFITAPNLLASQQSLLNLPDRTGAHDSTVPSTPPKAKRYNQNIRKNFLKNFFSIFLFDTKASEC

SEQ ID NO: 127363 - protein, 76 aa, Heterodera glycines
DATNVEKPVGSIADYDPLAAEKQQQKAPAAGAAAPKANGGGFTVKALYDYTAADKDELGNATGKLRGTSQTARGTV

SEQ ID NO: 127364 - protein, 107 aa, Heterodera glycines
MIIIVLICYVISNDKEKDKDHTSIGNSKAHKSDLYSDKSNLQPEDAQINQQHRNANRDSNKFDHNHNNGTNTNCDANQHDQHHHANGVDGDSDDNQLDQLYANHQLV

SEQ ID NO: 127365 - protein, 88 aa, Heterodera glycines
MGGNETDGSTIGRRVCSVIIEGKEDNGKEKWQQKEKHTPYYTKASRANSEIQFEFSTFVRIRVRESKLAEMDAGFVFSDPKNPWKSCF

SEQ ID NO: 127366 - protein, 301 aa, Heterodera glycines
ADDVAPPAPSVAVDDFAQRTGQFFDFIRQGNIDRLRALIDSLSVDELNTLLQMRYNEQQFALLVAVMEGHPEIAALLLDKGADVHQTTVGRVNNVTMGEQFAVMPLWIAVNMRHLEMCRVLIAHGADVDLGSDSSFTPLLLACAKGSTAIVTLLVESGANVNLGDSEGVTPIMITSRFGRVEPVHFLLSHGANVEQMDYSGMRFALLDAAADGHLEVCRLLVDDWAADVNQQAIDGTTPLMGACSFGHFEITVFLIEHGADIDHADMDGYNALMWAVKYEKAGVAQHLLAIGANADQVGID

SEQ ID NO: 127367 - protein, 60 aa, Heterodera glycines
MGSDPLACLKIFSLLVRLIEHVKSFRVIPTMLYLDVKEKSYRGKRAGAETRVPKRKIFVF

SEQ ID NO: 127368 - protein, 73 aa, Heterodera glycines
MLIFPVHILKNGPANKGGPCGGLGSAIAFMSLALQKPVKKFVAVTGRISDCGAVGFVTGIPQKVIAAILGNMK

SEQ ID NO: 127369 - protein, 90 aa, Heterodera glycines
MGSDNALSCMMRRQKKKILGNVDCVNPMAFVIPDKLRMKNGEDIVLYDSRNVRIGEKDVVLVFGSERVIDQDEIVIKMLILDFGHFEPKQ

SEQ ID NO: 127370 - protein, 34 aa, Heterodera glycines
MAIKIEEYGNYNNKIDIAKHDKETAKKRDDEADI

SEQ ID NO: 127371 - protein, 189 aa, Heterodera glycines
MKNSILTYFFAFILFLLFLKHQFFVDGTKTGKSVEAKKRGETLGQLMTKEGKDKAENLQAEEKQKKKNLGDLISEEKHETLADLLAKERRKEKENPEKTKGKLGELLKMEEIKDDEFDQLLLDLKETEQISFAVFSKPKTAEGEFKGMLARVFSKRKSVKEKKNDDRMGLGEKYERFMSIKANDPALSQ

SEQ ID NO: 127372 - protein, 88 aa, Heterodera glycines; identical to SEQ ID NO: 124691

SEQ ID NO: 127373 - protein, 24 aa, Heterodera glycines
MEKACKIWRDYIDFSALELLELAS

SEQ ID NO: 127374 - protein, 24 aa, Heterodera glycines
ITGVSIIAVLFLVFLMLSQNLVRF

SEQ ID NO: 127375 - protein, 229 aa, Heterodera glycines
MKRTNASNITPPRAKRSMAPPLDLDPNTVALAEQERQRTLVFIGLPESNAVRPSERVQEDREATTKILDHLEVEAEPTAVFRLGRFDPQRTTPRPLKVVMPTATHQRVALGGWKRERARLRSQQNMARLFVRPALTKEQLKKEYEERLRKRQQTPTPMAPASSQTNAPTPVVEDGPNQKEASDDISKPPEVFDQTILVCYEALNSFPPTDKIVHQIQSLKKQYPHLFNK

SEQ ID NO: 127376 - protein, 253 aa, Heterodera glycines
FLLDNSYAQMVACMRALARRHPKLVQFITIGKTHEGRSIDGLEIGSRGFRKRAIGSRGFRKRAFWIDGGIHAREWAAPHTALYFIHLLTSRLTSRYGKDAEITRLLDELTWVVVPLLNPDGYEFTRSSTHPNYEFTRSSTHPNVRLVRLWRKNRSPTHCVRDQWGRNRCCKGVDLNRNFDFHFKESGSSDDPCSSGSSDDPCSEIYQGISAFSEPESRSVRDAVLSNRYRGRIDGFITLHTYSQIWIHPYGHK

SEQ ID NO: 127377 - protein, 1282 aa, Heterodera glycines
MAAVVKAGKGPGPYTSETSWTIWEERFEFFIKLRGITDAETKKLLFFSEIGPIYKELRQMALPDDVRDMSIDEIKALMEERFGETKTIAAKRFELFSAKQTLGLSIRDYSIQLRTLIAKAEWHKDSVDMCLSALFINGLKKDSIRAELIKKGVNEMKFKDAVETAVLLEQSDLDAEQIGGHKKAEVAKVFAPKGGRKSSAPTQQMQCHRCGRNGHRNNECPNKDSKCRKCGNVGHWAVMCKTKQGSNWPRRQGKPVHQVNTESQKAHDIGTLAKSEEVKSISVPPAMIKLQLSKKATDFELDCGADVTLITKNDWMSIGRPKLGQTSGLMAYGKKPIKVLGSFKTDVVYNGKEVNAEIYVVDGEGKNLCGRDLIGELQIDLNKAFGIRSINEVKCKAVDRELGAVLLKYGEVFNDGLGRCTRQISLKFKPEVQSKKCKPRPVPFALRPEVEKVIDNWVKDGVLEQVTTSEWATPLVIVPKAGNKIRLCCDYKVTVNQWLDIHQYPLPRPEELFSVLNGGEKFSKLDLKEAYLQLMLDDKAKECLTICTHKGLYQFTRMPYGVASAPAIFQQVMEDVLRGIDGVAVYLDDIVVTAPNDAEHLKRLEMTLQRIQKFGLRVKKEKCSFMQKQIAYLGHIIDKEGIRTSPDKVEAIQKMPAPKNLKELQSFLGMVGYYGKFIPSMATISEPLNELRRSETKWHWGQQQQKSFEQIKIMLSSNELLAHFDPKKPLYLATDASDYGVGAILFHKDGNTGKFGVIAYASRTLSPAERNYAQTEKEGRAVIFGVEKFNQYLYGRKFILQTDHEPLKRIFGPKGELPVVAARRLHRWSLKLMNYDFEIEYCSTKNFGYADGLSRLPSPEIDQVCKESLELNKIQQESQNALPITAKDIAKEIGNDPVFAKVKGFVLNGWPTRIEDEKIRPFFLVKDELELNNGCLMLGCRTVIPSKFRENLLKLIHETHPGIVRMKALARQKVWWPGIDKDIESMKKKCKICQTNAPEMRKVPLHPWEVPEKPWQRLHIDFCGPFFGKMWLITVDAKTKWPEVAMMKSTTTEATIEALRKLIWTHGLPEQIVSDNGPQFASKEFEEFCSKRGIERTLTAPYHPQSNGEAERFVQTFKKGMLLVKKDTNWDNELAKNQFLLKYRVTPHSATGRSPAEMMFGRKLRTLLDLVRPSESTKIEGGEEKAKENAEKHGQKYLARAKKNFDRRTWKRSFKTGQRVFARNYRDGSKWMAGQIMSQISPSLFLVRTARGVWKRHLDQLKSDETKPDLESNTDVDSTSSI

SEQ ID NO: 127378 - protein, 204 aa, Heterodera glycines
VLLKYGEVFNDGLGRCTRQISLKFKPEVQSKKCKPRPVPFALRPEVEKVIDNWVKDGVLEQVTTSEWATPLVIVPKAGNKIRLCCDYKVTVNQWLDIHQYPLPRPEELFSVLNGGEKFSKLDLKEAYLQLMLDDKAKECLTICTHKGLYQFTRMPYGVASAPAIFQQVMEDVLRGIDGVAVYLDDIVVTAPNDAEHLKRLEMTL

SEQ ID NO: 127379 - protein, 25 aa, Heterodera glycines
IWCLKSDMLHGGGLCAIVNGSGSAC

SEQ ID NO: 127380 - protein, 353 aa, Heterodera glycines
KQLEDGRTLPGYNIQKESTLHLVLRLRGGTLSSASLDAIIAKVNRSPPHRFTDEVEKFLSFSNINFPPPPFFPQQISDDEIRQLFKAAKAAFRDQDTLVRIHPPAVIVGDIHGQFADLKKIFSTHGLPPEQQYVFLGDYVDRGPQSMETIILLFCYKVKYPSNFMLLRGNHECANINRVYGFYDEIERRYPRPGARRLFDLFNQVFAWMPFVGLLKSGKQLEDGRTLPGYNIQKESTLHLVLRLRGGTLSSASLDAIIAKVNRSPPHRFTDEVKYPSNFMLLRGNHECANINRVYGFYDEIDRRYPRPGARRLFDLFNQVFAWMPFVGLVGEKILCMHGGISDQIRSLTSSAA

SEQ ID NO: 127381 - protein, 208 aa, Heterodera glycines
MTTTTRTNARDSPRRVLMRQFEMLLQNSNANIGFRACINDGNSHPFKQIFKWRIFIDGPPDTPYAGCTFTALLKFPASFPSYPPTMTFLTDILHPNSFVPQRPGTIQGGSASTCGDGDSEDGTNTTGSATAAGRAWDATAGRTEDATAGRTKGATAGRTEGSTAGRTGDATAGRTEDDATAGRTGDATASDTAAGRAAATNGRMVHLM

SEQ ID NO: 127382 - protein, 367 aa, Heterodera glycines
MSSDDADKAAAKDGPAPDTPSDAKVTDGGPPTATEDKPKEQTEAKVPDEPTATKEEPKVPDEPSTTKEPTAPVTDGPPSEAKGDKSDEPKVSDEPATKVPDEPPATEPPKDSATTEGSDEPSTDTPKDSATTEGSEDEAPAPEDQPKKADEKKSEEAASEPPKAPEDQPKKADKKKSEEAPAKEPKKKADKKKKSKSEESVASVSVRLQPRKVPVNSFKDVRPTVQKSLAGLKYPFIKKLEKQAGMDREKLFYSALAVLSVYLMVGPGNTFLSALIVKAWPVYQTILAVHTQNRKDDTQWLAFWCAFAAFSVLDHFFAPLELLFGLYLLFKTAALLYLGLPQTYGAHNLYVKHVHPLVDRLGKIKVK

SEQ ID NO: 127383 - protein, 68 aa, Heterodera glycines
TITKKTTAIAIFSIIFRQSHIFNFNWLIIMMYLYVQLSLEHKMNFVTCIHRILVKNKWKKMQKLTLYS

SEQ ID NO: 127384 - protein, 278 aa, Heterodera glycines
SVLRRVGVSAGAIVGDEQRGKGGRNQLRQIVLRPIAAPNVTEYIPTGNRSVITSNGTSIEREEFEAVRVEHPAFVFTERICIAFFTIEYCLRLFAAPRKLRFALKPLNLVDILAILPFYLELMLTLLGVDDKKLRDLRWAFLVVRILRVLRVIRIIKVRYLLIVFCPIISFSFAVGSLLQRSANLRHDFAAESEAIANDGHRFADRSALPITIIVDNFIKVAQEEQQTEQIKAELLAMEDQEKQQAQEQQKRREKIDKCNGGDNRGFGGGGTQMLLAS

SEQ ID NO: 127385 - protein, 226 aa, Heterodera glycines
QLLFRQLRVSGNMIAAAQQQHRKRRLAIRKTDSMNLAERHNGRILDLIWCGGRAVIQQGKTNGENDRGNCELLRLNIGGSTFLILVEAILRADPTTFLARFVQLNHQTRLKVADAYLQSECAYYFQRSPLARSPLAFEPVLQYYATGVVHKPPEECPSAFNAELEFWRISTSYIGNKAELEFWRISTSYIGNKCILMDLQKMTDSKEDPNFDPVSGRLRRRMTFLE

SEQ ID NO: 127386 - protein, 226 aa, Heterodera glycines
MKILLLYFLLFSIFQLNQSESENKKLQQQKSFDEIFGEKWEEKEEEKLEEKREIIGKYYKIKEKIKQKGRKYTAKEWNKINSKIAKKLGTNRNKTNQWIKELGLNQRIQKSYKSTTDEEKLEIVQKFIGIKNEYKQKRKYSAKEWHQNYAEICKKIGVSKGTIIKWKKQFGMSKFITQKEKLEKMKIYWKIKRENPKMSDKEIAKILKIDRTTISKWKKQFGEELF

SEQ ID NO: 127387 - protein, 30 aa, Heterodera glycines
MPQQENAANCVPCATENGRRTRNLTKITVM

SEQ ID NO: 127388 - protein, 45 aa, Heterodera glycines
KLCMSSKGFIDICIDIHSILFYFTLHFILLYFLTLFILIFFLCAT

SEQ ID NO: 127389 - protein, 45 aa, Heterodera glycines; identical to SEQ ID NO: 127388

SEQ ID NO: 127390 - protein, 188 aa, Heterodera glycines
MSADQIKQFLEAMRVQSDAIQQLMGQAPQNAASASLNQANLASSIDGRISKFNYDAETGNTFEQWFKRFGVLIEEDGKDLPESTKVRLLLGKLGDDEYGKYRDSISPTQPDKVTWVDSITKLKGLYAETRSLFVRRYECFKIRQQPSQDISSLVAHINASCENANLSPTKEQLKCISWSLHSTTSTTT

SEQ ID NO: 127391 - protein, 50 aa, Heterodera glycines
MPSKKALVVLNTKLNADSPKTRSEHQFSSAINGGATLDKSKADGNDEKAN

SEQ ID NO: 127392 - protein, 25 aa, Heterodera glycines
REKKIMFFSGTLYLLVHISFFRTVC

SEQ ID NO: 127393 - protein, 39 aa, Heterodera glycines
MDTFKISDRQYSYYQKCQISGNILHRWVDCDRSEKTFIA

SEQ ID NO: 127394 - protein, 149 aa, Heterodera glycines
AYDFGSVMHYPAGGNHEQRGLYDLITLPRFYQQTIGQRERIHEQRGLYDLITLPRFYQQTIGQRERISFKDAAIINRIYCEDSCKGHEDKCQNSCKGHEDKCQNGGYLKPNDCTKCNCPDGYGGQNCKELEESENYQKTGNNKKIGTIN

SEQ ID NO: 127395 - protein, 88 aa, Heterodera glycines; identical to SEQ ID NO: 124691

SEQ ID NO: 127396 - protein, 202 aa, Heterodera glycines
MLISALQRRLLRRFLAHKNPGPTNQEIKTKRNKEKLEHEGSLYVLHKLSDDGLRKYWRCEFFGANDKCKGRLHTDINGNVLKIIGSHTCDMSAAHVECQRRITQLKRRAVETCEAPATIRAQVLQNTATPVLAAFPTKAATKQVIKRVRHDENVPPAAPLSLEALELPPAYRMYKRTETDEENFLLADTGVFQIQGQAGPQR

SEQ ID NO: 127397 - protein, 44 aa, Heterodera glycines
MKCGVCNETFLFYIVTWQFSSENWGTKKSSSLFLQKKEKNLNPN

SEQ ID NO: 127398 - protein, 56 aa, Heterodera glycines
RQNAHLKLRKHKLIFAIRTDYLVNRKQINHKIRTKNDFILECKLKMHNKLIYSNLF

SEQ ID NO: 127399 - protein, 34 aa, Heterodera glycines
MGMRRLKRALPFRDRALTSKMGSIFFFKNATFVE

SEQ ID NO: 127400 - protein, 51 aa, Heterodera glycines
PKNSYLFFLIFLPQTWYQQLPSLVWPYQTILRYLKRKQKKFLTKKWLSLFS

SEQ ID NO: 127401 - protein, 118 aa, Heterodera glycines
PKNSYLFFLIFLPQTWYQQLPSLVWPYQTILRYLKRKQKKFLTKKWLSLFSHFFTANLVPTVAFSCLALSNNLTIFETQTKKILDQKMAISFFSFFYRKLGTNSCLLLSGPIKQSYDI

SEQ ID NO: 127402 - protein, 34 aa, Heterodera glycines
MRSRAKRVATDVSQVVTIRSRRFALRAFVTVHAT

SEQ ID NO: 127403 - protein, 16 aa, Heterodera glycines
EAIPEGFGLPINLGAS

SEQ ID NO: 127404 - protein, 18 aa, Heterodera glycines
MCFAIFGQRMANVRGAIQ

SEQ ID NO: 127405 - protein, 40 aa, Heterodera glycines
MCEGWGASRSAPANFLPFHCCARVWRSAAGQMGRGLGAGE

SEQ ID NO: 127406 - protein, 53 aa, Heterodera glycines
AKPKFLFSNLFCLFSFLFTTVSNFLVSIFPLVSNFLVSNFRCPIFWCPIYREP

SEQ ID NO: 127407 - protein, 190 aa, Heterodera glycines
VIPKISKQLFSRLFILVFFTLLVFRSHSFGPLDTIFSPGSDSFAYENPWPMLNKGRLDWLFNDGWRRPLAADQGAHMRRQWIYFKCIPRDRRQWIYFKCIPRDEHKDWKKWHGTMPIFGTGCFVMLTFVWQYCNSDWPSAKEWALREAHFELVRRERAGLPLISPDLIERSRVEAALPAEEELRDFEILI

SEQ ID NO: 127408 - protein, 134 aa, Heterodera glycines
MTISILGQIFEEIPAIDWHTLSRNVCWEQVIKEELFYNGSIPVDFIVYNHLFVYDGGILLQRREDGVQRGAHVVRLIGYGRVNCTDGRRVKYWLGVNSWNTSWGENGGFFRIKRGENVFGIESRDISFGRVELP

SEQ ID NO: 127409 - protein, 365 aa, Heterodera glycines
VSFIAEQVSHHPPVSAFYVEHPEAGVSCTTHIYTKSSFLGLAIGVQMVGKATVRIHKHHETYIATFPNGYGRAIMATPWFELAGKVELRCEKTGYRAEIDFLAKPFFRGKAHQIHGQIFHTSRKTALMQLKGEWNGEIYLKRDGATDYQLFTDVRQKPDVRKECVPVREQEDRESRKLWRHVTAALFSNNIEIASQCGLKANIYQSDALSNANGTKRWGVSGSVTSGNRASLSASATVHRPTRGGTVTRWSNGRRRTGRSYGAVQQPNRVGHAAVALYRSALKSEEGRNALDYWAQHGEMKIVLRADSASQLSELCKQAHQHGLIAQLIHDAGHTQIPAGSCTVLGIFGPREEIDEVTGHLKLHN

SEQ ID NO: 127410 - protein, 88 aa, Heterodera glycines
MRLVQSLNNRVKRKKENAKWEPWTELMSKKKLKQKSDVKKPVAFTCRCHCPPLEPIDQPSRTNETDQYTKICPKKAQLKWTTTLVGLG

SEQ ID NO: 127411 - protein, 28 aa, Heterodera glycines
ILHIDREKNSESIIRKFNTKIRPTLELF

SEQ ID NO: 127412 - protein, 176 aa, Heterodera glycines
MLKMVWKKTADILIGGKVPLAIYHSNRSKIRVFVAETPGPMVDSKIRVFVAETPGPMVDGHITFVTETHTNDGLPHTLEHLVFTGSQRYPYKGMLDIIANRCLASGTNAYTDQDNTAYELRTAGSSGFLKVLPVFLDHLLRPTLTQSQYDTKVHHINGEGGGLIAPPKNKKKNYNK

SEQ ID NO: 127413 - protein, 171 aa, Heterodera glycines
MKKGEDDTATAAAAVPRGKRPNSNSVSAAHFSTESEEMKSCKKEEPMATGCRKGAKRQYPYSLMSARAQDVWSLKLDQLEEKYSRMEEELSEDSDDAIDFYEDGIDDIVEKINRFEAKVKKWSVNHGNTPVVKKPRYNTNADENSNDADDDAPTSTVYLNLHNDKMIEKSN

SEQ ID NO: 127414 - protein, 64 aa, Heterodera glycines
MPSVCRVTRTCAHFSSECVTLYEFRPAGVRVEGNSAEFAEGFVRVPITCQCQLRRKKKHGIYSN

SEQ ID NO: 127415 - protein, 37 aa, Heterodera glycines
MEIGIARSLQLLLSSVLLISALYLYLPFPRLVHTAWQ

SEQ ID NO: 127416 - protein, 33 aa, Heterodera glycines
MNNIAFIAFAFSALFEFGLAQPKPTPENGLNNF

SEQ ID NO: 127417 - protein, 115 aa, Heterodera glycines
MLKIPNHQWIRHLRFIENWPKKNKENAQTSKDQPTSAGGQNEAIPSPKKPSPKGKLKSDFRPKLGQELFHGRFRKRKMKKMHRPQRSRHRWKGKMNQSLHQKSQAPRGSPKAISS

SEQ ID NO: 127418 - protein, 364 aa, Heterodera glycines
SLKRGVKKGAHLARDKAKDANSYMHEKGRHHSENNEIPRHHSSSSSMSKGRHYSSAKEGNQNKRSRKETKNLNNKGEKGENVRNFEENEQKTTEENLEEEKEENMEEEKEEKEKMEEKKEEEKEEKMEEAKEEENEEKEKMEEKKEEEKEEKMEEAKEEENEEKEEGGEKSLESEELRRRRPGRKFGFNNISKSEEEEEEESEEENPLEEKKEKGEEKEREENGGEMEKQNAKKEEEESAKTGEEMGKENAKKGEEKEKESANKGDKTGNKTNNENSGGEKQKETATNGKKNDKKEGQKKKNNEQNAKDMDKNGKKEKGQMAKENETKSANNGTVQSATGANANGGAAKWGGQRASANNSKTVQ

SEQ ID NO: 127419 - protein, 139 aa, Heterodera glycines
MGDDDWTRANIGVPGAKTVRDTRCTVKDLPEKEQFEFRVRAVNKAGEGEPSNLVFTTDQPGRPVFDMSNLKDTTDSSDQPLSSTARRSESRRPKSARKEAAALTPLDAMQCSHLTPPHPKNMCIWIDLGNKDVLWYKKF

SEQ ID NO: 127420 - protein, 163 aa, Heterodera glycines
MKRPSSVVAFGSHLFVGFILLSLFIGTLGTEKKEAKHPPPVAAHAAAGAGHASDPKHASPSPAGAAAAASHAHPPNGGAAHAAEPKHAAAPAIKITDEANNVYSVCVERDVLPAPENASKDKLKAIAAKCDECGAAKCKAKCGGKEVNDACRTCIMQNCPPAK

SEQ ID NO: 127421 - protein, 92 aa, Heterodera glycines
MIGRAVRNRPFIFEGIFKFILYPRKMSISFFEKFYTSQKRLRMRRRAVHNRHFISQRIFIFRGYPRKMAISFFDKFYTHTNALEHDREGGAQ

SEQ ID NO: 127422 - protein, 92 aa, Heterodera glycines; identical to SEQ ID NO: 127421

SEQ ID NO: 127423 - protein, 37 aa, Heterodera glycines
EAIPEGFGLPINLGASGPFGGLQKLWGGKIQRRIKGQ

SEQ ID NO: 127424 - protein, 36 aa, Heterodera glycines
MLSAPFGALLGAVVAVAVLLPSHCNDRKRVGPGSTP

SEQ ID NO: 127425 - protein, 19 aa, Heterodera glycines
IYFTRNEKVKVILIRLIGL

SEQ ID NO: 127426 - protein, 493 aa, Heterodera glycines
AEPLGNELQEALSSAAFLDDFMPFVLAFEFVAKFCGENGGTTKLCKEKCLSQSLVAPKTKAPFVGPTKFHGTTPRSVPKTTFGIVPTTEQTFAFKPFVRHVDHFGTNCTNIFFTSEVDKFLLNITATPYEIACNDYEKRAKIDEPIPSDYWSGGRFVNACMAVPSAKCEKHVELYACYESIGNKPSVNAIGELCQKHLNNAINAAGFAVQICAHRHQTEATNELIVESFINFSFTNEPFQKTRILPISMDKIWDTKKKTPYFLIEFGQDEQKSAIREKGDGENFGGAKWLNEAKSNNDGIGSILKDIAPQIVDGTLAKMIHFVPPSNDDKMLPFFQIERPKYSKFITNDTDLLPYKNDPNNTRRATPCDIYGADCVPIRNLLLKIEALENCGKNESENDAIFKMPPWAPPLPPPVTMKKPSETLLCGGDMFCDKRRLQQQYNRLREICGLKPEEMENQREKRQYDPYQKWTESPIKIAFNKTARNNLATSYSI

SEQ ID NO: 127427 - protein, 175 aa, Heterodera glycines
MGKDKQGGYDPDIHGNWQNEEKPCACHCSYLRAKKFYRVECDFMNRTTKRWANAGRVTLGLLSAPLLFVPVVNELVARPQLQSVGQDITHTALEVHFECGLCGQIAYRTYEIVCEDVTSDRWGRYMKTYGDEPIFGIGTTEFDGIQRVFDGMWKNYDLIYRNCKDWTSEMIERLS

SEQ ID NO: 127428 - protein, 64 aa, Heterodera glycines
MQSQSANAMDLQSVKLATSFRQSTSRHGVFRSTAAEICNLMSQCEWRTAEAEGSSNNNGGKTEH

SEQ ID NO: 127429 - protein, 72 aa, Heterodera glycines
MKIKVKLFGAGAICHFEDFSTRSAAKAEEVNLFKNVVIYFFFKFKQKMFFFVKARKKAPILFYLIRKSELVK

SEQ ID NO: 127430 - protein, 106 aa, Heterodera glycines
MNELMSKKQNKNCTKIVNKLTRKSIKNHSKIQLETNLEKGSENIYGQQILAFVQQMKQQMASLAATSTSANLTGFELCAQTNTTTKNGPQQLGSLNSVVKSKTEIS

SEQ ID NO: 127431 - protein, 74 aa, Heterodera glycines
SKLANHWGIVPLATDNGTADQQQLFTLPNNVHLYPGKSFASAGISVNGADRPEIVILDVQSVLCTEKHDDAATN

SEQ ID NO: 127432 - protein, 82 aa, Heterodera glycines
MSKEGPTDEDAIIAVALGIWQNTIQYKTEATACKCVNKHFKKNRFLWRENRRNKYKPSGSPNSDLPPNERNEAFTHRKLKFL

SEQ ID NO: 127433 - protein, 72 aa, Heterodera glycines
LHNNKSCNIVEKLNIRNTKQFNIDIRVEEGNGLFTVTFDTGGKATKCQYRSPDMPTWAVQYITVRTELAQLI

SEQ ID NO: 127434 - protein, 113 aa, Heterodera glycines
MPSKEQRRKEAMRLRSRAIRHTPDVGNALVGPSTIGQQPLDLDQGSGCFSYENLNLFVEPSTSTGIRAQIRQQRNDRQAIVGTPAMQLDTSVVSTPTTEGIRTLTIVGGLDLS

SEQ ID NO: 127435 - protein, 180 aa, Heterodera glycines
MWDQCLDNAVRLEQRLLPHVIYDDAEHEAHHNDLTPSFDQIKQMIEAIRTQGDCPAVDILAPADNLTVYDAFVCKVLADVLDILKRQRFYTNLELIERDARARGEAKWQNAAEAAGAVDASATGSSATTTDGKGTAAAKGEDDPLMLAGPSSLSVEQHNLVAHVTSTHEKAGVLRFWKKI

SEQ ID NO: 127436 - protein, 34 aa, Heterodera glycines
MKMKISDDNVTSMVCAKNFTENSDQINHINYTPD

SEQ ID NO: 127437 - protein, 27 aa, Heterodera glycines
MLIGKTNKADANMKYLGLNATCSMLPE

SEQ ID NO: 127438 - protein, 96 aa, Heterodera glycines
MPNLIVHLSNSREIKQNKEGAHDGAVPPSDNSSNDVAGRTTHRQHSEVPFPGAEAGRASGGHFCQHRRLRFVPPAQLENRQRKGRGGGTERIGATL

SEQ ID NO: 127439 - protein, 622 aa, Heterodera glycines
MTSDLLLTHYNPALPIIVAADASKNGIGATIGHVFPDKSEKVIEHASCVLSNSQQNYSQIEKEALALVFAVQKFHRMLFGRKFTLFTDHKPLLAIFGSKKGIPIYSASRLQRWALIMANYDFDIKYTNTASFGQADVLSRLIANYPKPEEDVLIANICVETDCYINTILQSQTDHLPVTAQEIAESTTKDETLQKIVNFVISGWPTKCREPEIAPFHPKRNEILEIGGCLLYKSRVIVPSQLRGRILKALHFAHPGIVRMKALARQYVYWPGIDSEIERVVRQCDECQGAQKCPIKAPLAPWTVTDKAFQRVHIDFAGPCQDGYVYFILVDAFSKWPEVYQMSSITAKSTVFTLRSIIHRLGIPEEIVSDNGTQFKSAEFAAFCKEFGIKHTFSPPFHPQSNGQVERFVDTFKRAMKKCSTDDKNWTGKVLLAYRTTPNNAIDGYSPDQLFFGRKLRTKLALVLPQEHKNNSENIDKIQLNKRRKDYSNNMAKQFDGRHGVKEKVFFPAEPVLLLNYRNQKTYWLHGTIVERVRNSPTYRVHVTVLGRIVHRHSNQLRRNCVFEENSKHNPGPDQQPIPPVNGQAQNLAHQIADPVDQRTDQQAANDPPTMALRRSQRKPKP

SEQ ID NO: 127440 - protein, 220 aa, Heterodera glycines
LALLENANFNKEIERTSEFLFTDYGESANFIDNRFEWHCRQLSFLILLEGPTLMDRIVNRVLEDRTESVMLNFVKFVKCTPGLLNCAPPVELLKRLREAIDREGQNLLLVRLKFGLTSQCDNIKRIEDIDSASATLKRQTVNTAQQGQIINATKPGQIANATQQRQIVSTAQPGRIANSAQQRQPVNSQFAQQRQIVGTGALRNRGKDARRNATRQRKAA

SEQ ID NO: 127441 - protein, 69 aa, Heterodera glycines
MESLIIIDTFFKKVIYEFFCIHKIGGKYRRKSIQSATTSMGAVALDMLEGMDRAYVMCICVYCSIGSFM

SEQ ID NO: 127442 - protein, 52 aa, Heterodera glycines
QLKIMEKSANNFSKILWTQNEHRFQQICALPFIREQKDGTLAEERYRHYIIQ

SEQ ID NO: 127443 - protein, 35 aa, Heterodera glycines
MMLSAEFGALLMLLLLSFGAPEMSLLVGTGFGVAQ

SEQ ID NO: 127444 - protein, 19 aa, Heterodera glycines
AGVGEARLSTRSRSRRRSP

SEQ ID NO: 127445 - protein, 62 aa, Heterodera glycines
MDLPFGYVPPCFDLEESCLNFVTHCNVPSVAQVCSQSCGLCHGPFPYGQGQLPYGQPPILTG

SEQ ID NO: 127446 - protein, 125 aa, Heterodera glycines
MCNLEWRVFDFSQMVSGRVRQLNSYAWKVFAMAHVFSEYDTVVWVDTSISFDNDNLSSILRQIQTGQIGPVQLLGWMYKYLPMVANFGPNKTYEWTGNDDPPQFEANLVIIHKTEQTRQLMKWHD

SEQ ID NO: 127447 - protein, 315 aa, Heterodera glycines
QIFNANSKQNATLIQNMDTSGQTIKTKRSSVSKLSVQRNAVFDLLKQLATDNFTYFRQNCSSSVLATDNFTYFRQNCSSSVYGKRMSECCDDLSASADLMREIIRKLQFASQKCDYDENTPGNGFRSLVCITDIVLLHLVSVLRICGNGFRSLVCITDIVLLHLVSVLRICSESRGILMFRLAYYCKEIEAYSAILRFLVLAYQVVLLFNRLDGGSLFPPLEGDYQQYNILFKGIESLDGSCFYGRPLGFQFFFFPSVTRIFRVIGLVLATYSLSWENGSAALSSLINSDGMLLNPEQRAKTLKKVTFLEFFSHF

SEQ ID NO: 127448 - protein, 242 aa, Heterodera glycines
MSDNPKEAEKEMEKAIFIAADCWLEVFDLLPPSQLGLGIAMISRRFDYFIDEHFKTRKWKLGKMKIRRKIGQNGANEMKIVNSNGKALQIPQNPLPKKVMAFKSIEIDFIDQNVITFLGHFHRFFAACSTTLSIDTENVRVSEFVVRTIWPMFKDTIYDTMLIPIAFRRMRQLVPSMLNDCQSLQFVSFDGAISLEFPPDDSANATDGQTVAKWLFTPRHDNFPKKLICYMNSTMEVEQSKR

SEQ ID NO: 127449 - protein, 49 aa, Heterodera glycines
QVARDPSGLVFRILIFKKAHFSIFGLGPKRPRGPKTGAQTRGPKNGGPN

SEQ ID NO: 127450 - protein, 480 aa, Heterodera glycines
SKPQKINIELNAALVWKALRKLPNRNSTSPDGLPYILIKQCADLLAPIISELFRMVLDYGEIPNLWRTSFIIPIYKKGDKSNPNNYRPISLTCTLCRVFERLLVWNIVKHLEKYKILTDEQFGFLKSRSTTTQLLVSLDYFYKSIEDGQIDIIFIDFEKAFDSVPINLLIVKLQNIGISGKILKFLQNFLTYRSYRVKIGEYYSSFRTYSGVPQGSVLGPLLFLIFINDLTNYIPPEVGIKLYADDVKIYISHDNDVSLALANLAKWSKDNGIAISHEKCAVLYLGKNNPKHEYKIGEKVILSVDCVRDLGVLVDQKLSFNNHISKILKAAYFKAYQILKILKTRNISTLILAYKSYIRPHLEYASEIWNISSKEQSKRIEKVQKYFTIVYKKCGLKAIPYEKRLEICKLEKLSTRRSLTDMNMTFKKIRGLTHLDPKKYFEFSSRSQRHPYLFLLIYPVICYLVSLRPLPNSSDFLQIL

SEQ ID NO: 127451 - protein, 217 aa, Heterodera glycines
SSPSVSVLAIVAIVCLMCQCCFSAPHPCCPGSQKVVSLMSNPCCPGSQKVVSLMSNYVGTFANSISKSSLCSDAQNVADALKGQLIGCSKGGDRTLLADIEASLATHSADECALSLGFVRAMFAIAASASSHASNNSEWQTLSGQFGQKVTEIDSKCAEFGISIGKVPINGPKGVHVQNVPNSESVISMPGLAVHVQNVPNSESVISMPGLAGSHTQ

SEQ ID NO: 127452 - protein, 247 aa, Heterodera glycines
MIWKIQNLGLNRIRAALTEERANERGEGTNEGEVANGVNNEDGEAVNEGTDNGIIINCNVATTKRRKTTKEQHNESNGRNTPLDKCCSNSPQNSMESQLIPIFPSLKDGKKGFDKIKEMAANLDPKMLQDMLGKIDTGKINEVIKNMMTPENMWNMLPANVKELLPHSWFLIGKKLGNVLAKEWDKIVELMDSVDKLGSAEELWAAVKQKTPMLADLLENDLWKGSKERWTKFEGNLGDEAKQYKEN

SEQ ID NO: 127453 - protein, 200 aa, Heterodera glycines
MYITYCRGWHVGKNVATVYHPFSQLYSEEQFKTYMHEAGDAIRDCALGCAGWRFNYDGVSPNMTMLSINNNNPSDELQSARQNRSSHGTLSAEGAGAAEAIQSLNELGKDDEERDELGNNNGNRQMMDGGGGGGLSQEEDLNEFNLYYSMAEDGVRLDYFQFAYEGVSESDEPDSVTCSRRNSQESEEEKGWNGRVMDTV

SEQ ID NO: 127454 - protein, 139 aa, Heterodera glycines
MLNALPLPSNREHVEKAAAAGPGRWSPVPKRARTVEENMALIESRWQYLEELRLEREETAKREGEKGEEDGDNLFRLDLSEVAATDENGNSEEQQRQMAEERMDDEENGVSGDNDKNANNTDNNNNNEDGFPMECVDGM

SEQ ID NO: 127455 - protein, 82 aa, Heterodera glycines
MIFNISVFNSRKRSRIDAGHPSSPQKIVDSNLINTVADNVKNVLKQLDSLSALSTIDNDALNGASLRCQSATPGLLYTAHTN

SEQ ID NO: 127456 - protein, 351 aa, Heterodera glycines
MAGGGGRAALSAYAIRQDQHGADAADLLTNAGVALNKHTYTLDDVRQLQQWLNNQHGVGQIRLVVFEKEQEYRIVFKGDGIAARFNLCLLLERAHYNYIGRIEQLFKVPGYCIDCERRADARYHASGCKVACRLCLRFGAGYPCKSEQLPNGESSARRCNECGFVFPCDDCFNYHLVNQAPDPLDGRGLRQRRTLCQWRRFCRDCGRVAYLGLHQCPPLGQADEGAHDCRLCAGPHTNDQPCFIQPLGPGPSRAARVNNNSINIDVASEDDDENDTDEDDDEQPLRFCFFDAETSQDRPLQLNNNNNQVAQKHVPLLIVAEVICDRCIKAGISVHDGHGQRALGCVCMCGS

SEQ ID NO: 127457 - protein, 216 aa, Heterodera glycines
MAGGRAGGGGIAPFHSPPHYQWQQQPQQHQQQQSSYMMVSSGGGGSRSGGGGGNANSVLGPSLMSMASPFMPQHQQQQQQQHQPLGKESWRGSQRQLMDMEVQQPKYGGGGYHQQRGMERDIGGGGGGYDMRRSSGGGGYDDFGASAGTSYGGGGGGGHGMMQQQQPPPLGSSLASAGHYNTSLYGGGGGRGGAGPTPPKRHRYASPQPPPVERFF

SEQ ID NO: 127458 - protein, 62 aa, Heterodera glycines
MEEKMKDDENEFGALRAVQIDAALLDNTLLALIQARIDQIVDIDPPNDCLVVDPFMCRNRQL

SEQ ID NO: 127459 - protein, 125 aa, Heterodera glycines
GKVRAIMLVNPQNPEAGYFSLDEIRPVVHWALSRNLFVLLDEIYDLSIYDEDNECPFRSAVELFEDERSRQKLIWLWGLSKAKAKNRKGKGNGGEKKMRKKGTKGQQNGQRANKTDKGPTKRTKG

SEQ ID NO: 127460 - protein, 198 aa, Heterodera glycines
KETLPTIEHVRDKAAQLQMALSDAEQVPDLEEQERARQREEERARRAKLPAQNAKDLDPCTLSRPQLMKLATLNDRAQFAQAITGCFIRLNAGAANHFEIDQIVKVEHPPAATEEAASKKAADKAVLELKVTGTISLTALTYIASNFKFTEDEFRKSWLAETTEANPLPTMEMVQQKQKELEEAFRAVSQAADAQQRV

SEQ ID NO: 127461 - protein, 24 aa, Heterodera glycines
MNICQLWTTITKLINFKEKLTIDN

SEQ ID NO: 127462 - protein, 39 aa, Heterodera glycines
MDGTYECATEESANGKVPLAIYSLRVDGERDGKMEQILN

SEQ ID NO: 127463 - protein, 186 aa, Heterodera glycines
MTSTVPQIVLRLLLFAVLILNCFDCCHGRVHSKSSTVPTTTKSSTVPTTTTKSPPAPKKGSILDKLPIWATIVIAVLIGMVIAIGIVCCAWWCCLRQRYVRRSATDGPSSSLSDTEKSKGGGYSSKPSGLMSKLPLWKSSSSTTKTKMPDSLKSDIQPSRASSSKTKDKSSSTIPDSKYTMLTQKH

SEQ ID NO: 127464 - protein, 527 aa, Heterodera glycines
KTFSCLDIRKALQAIVEVKEEVQRCAHVLRGDERPRSSAFNSPPQQRGAWNQRGDHRHSNNRQSQPPRPFNRGGTPQPEYRAFSAINKNPERAKTPARKWGRSCSFCSGTDHLPSECPAFPTPGARRKRLKEQQRCLNCLVQGHNTEECTSPYRCRNCGNKHHFLICFKREESHSRSNGNRSASSPKSGREPGGRKFPQRQVESQTHLITAGFQQNDQSNPPPREGEIVQSMGMSTVDTSKGRANKVPKCKKPHAYLMTRRLLAKSSRDSRNIIKVAVLFDPGSQTTYGADPLIDKLRPHKLTSEEMEVHGFGGKREPLLFHSPIYSVLLQRADGKWEEILLNRTEKISTHFSMVEWSADESVTNHHEACEAMCFTKEEPMILLSARHFWQFFQGKREVSPGLFVINTAFSPLVNGESTIGPPNSSQKALSMMAIHSTNVEQMPTINEVEHFFNLESLGIQDDPAQDDDQTAMELFNKSIRQETDGRYSVKWPWKESNPDLSSNFKMAHSRLSSVLTKLRHSPQILE

SEQ ID NO: 127465 - protein, 37 aa, Heterodera glycines
MLTKGLLVQHMNWIVERKLKSVKKEEETDWIEDNKEL

SEQ ID NO: 127466 - protein, 213 aa, Heterodera glycines
MGTARTSAGLPHPGTFDGTADFHNYLKSFNLVATAHGCTPVRCAQILPLYLRGSARAIYDGLLQDDKSNWKTLVDALATNLKKVSSSLVARQMLAKRKQHVGESLDEFAQEIRTLVSKAYPDTSLEMNFDALVLGDMEEDVKREHDERLKRFRSGIAKDFFRSNMTASIKEKILFMDEPQSFEEAITQAKRVQQMQGALAEDLWKQTQGTKAE

SEQ ID NO: 127467 - protein, 55 aa, Heterodera glycines
MFDFVDKEKSYSPKTGLAPKRAAPKRAAPKRVCPCCCAAAVCWMRWEREGVGKKR

SEQ ID NO: 127468 - protein, 95 aa, Heterodera glycines
APQLNPNAEMSPQDEAGPLTSAASAEEAMESPPPTPGPVRTPEMDDEILEFGFSLPSTSVTPIGDLVPFSTTPTASMDTGETTPPPLAIDELNLI

SEQ ID NO: 127469 - protein, 18 aa, Heterodera glycines
PYRDRGLSFSKPGTGNRD

SEQ ID NO: 127470 - protein, 285 aa, Heterodera glycines
YDNDGSSSSSKDSSSKDSSSSKGSSSHKDSSSGHSSESKESHSSKDSSLKPCSPNEDSSSVNEKPSNSKSSDTVSTSEASPSHIEESSTFDDLSSVTEESSTSEGLSSVTEESSTFDDLSSVTEESSTSEDLSSVTEESSTFDDLSSVTEESSTSEDLSSVTEQSSTFDDLSSVTEESSTFDDLSSVTEESSTFDDLSSVTEESSTFEDLSSVTEESSTISESCASVCSGFGWTNYNGNCYKVIEGLMNQTIGLRRVLVGNRYQSTWTNGSAAIFGNVVSEKLIN

SEQ ID NO: 127471 - protein, 110 aa, Heterodera glycines
MATKNVQMANVCRKNEPNLTGKCVPNWLNICNRQLQIDATSVPNVLVGTEKCDHGMVNVTDEICNALIPLKARDAIENFSKSGHRAQKIRFWGQKSEHFAKLLQIFYFYN

SEQ ID NO: 127472 - protein, 215 aa, Heterodera glycines
MVCQTSIEPFELVNKRTNEKLTLTNEDTCGKLIGGLCGDAQLLGRRRRSNRGQSQLRTTKDKRQICRNIRRLSLSPITIKKFVVCLPKFGVCRFAVLSKLIIVESLAVKITHRQLCRIWARVGNGQNNAIFVIIVLKAPPPPPLDKLIFQGLPDNPTVDNPTVDNPTVGQSDSEDNPTEVDNPTVNFYFKKYFQVIRTDYFLKISQSNQFGSGIR

SEQ ID NO: 127473 - protein, 51 aa, Heterodera glycines
MMCDYITSQGFYRDWTIRQWTIRQWTIRQLDNPTVRTIRQKWTIRQWTIRQ

SEQ ID NO: 127474 - protein, 179 aa, Heterodera glycines
MASVPTQKDEKTKRNEELATAILKKMPKPNRLIVDQSPKDDNSSVLMAQAYRPVYKGDTFTVNAAMRTVEFKILIETDPAPACIVVPTTIIHCEGEPIKREDEENNLNDVGYDDIGGMRKQLAQIKEMVELPLRHPMLFKSIGIKPPRGMLLFGPPGTGKTLVARAVANETGAFFFLLN

SEQ ID NO: 127475 - protein, 250 aa, Heterodera glycines
IQSLGLNSPTLQSTGLNSPAFQSLGLNPPTFQSKGLNPPTFQSTGLNPPAFQSLGLNSPAFNHWDSTLQHSITGTQPTNIPINGTQLSSISITGLNPPTFQSKGLNPPTFQSTGLNPPAFQSLGLNSPAFNHWDSTLQHSITGTQPTNIPINGTQLSSIQSLGLNSPAFNHWDSTLQHSITGTQPTNIPINGTQLSSIQSLGLNPPTFQSTGLNSPAFQSLGLNPPAFNHWDSTSANFFSIFNFLCALGC

SEQ ID NO: 127476 - protein, 200 aa, Heterodera glycines
MAHSQQQQMMAPNVAVIQNGGGIKGGEEVRKESTEEDESDDEEMDDEDVDDDDDDEEEEEEEEEESGSGEEANHRRHGTESGDTATTTPAGASTEVPLAAHMATDVAQTQAAPGNAAAAAPPTGTELLAIRANLQILNHQVVMARWDEYQGVAWHKKSVQMGKSGLIQLSIISYASKQSKWNSLRDSSMCSNLCHPWLAV

SEQ ID NO: 127477 - protein, 71 aa, Heterodera glycines
ICSKIPRKLPKFELDREWHRRAKAPPGEPHPFGHTFFSSGVQYLERRPRGADSAPLPLMSAPPAENRLCCC

SEQ ID NO: 127478 - protein, 137 aa, Heterodera glycines
MASSEYCRAFLSLSPVRCLLHHFPFHFEATALTTAINESAASNSAHFGAQQQSFKSAKTTAENGQIASEPLKERTNPKGTQGEGAARGMAAGNSPKSGDSAGGKMLVPMNKGKGGREYIWQHTTTMALIGEEHDDFL

SEQ ID NO: 127479 - protein, 186 aa, Heterodera glycines
MTRTNNNSRSIGKSACRLASRWGEKERLFCQKNHFCLFSKKTNRPIGSAVPMAMKIYAIFLANVVPIILMDYILAKRLLVNCVEVLIVVCSLLPAPILGSILFLALFATTAVADRYTDYVNIGNNAAAKGCEPNCGTETTAETTTTTTATPTATQTGILIGIVVGAVVVVILAISFVVWLCHRRKR

SEQ ID NO: 127480 - protein, 88 aa, Heterodera glycines
SPLPGKAFKRQLPPSKDDGIFEEGFIEERRKGLEQFLNKVAGHPLAQNEKSLHIFLQMNELDKCVLLVLLVSLFPFDRNYVPGRIRTA

SEQ ID NO: 127481 - protein, 222 aa, Heterodera glycines
MSSLFSAVFVLFSPLVQLISFIKENSDRILMSIFRNIWPMIAKNICGMHLFPNIFRRLRQLAPSFLNDCPSLRFFSLYGTDDFPDFPCDDSAAASDGQAVAKWFFTPLQNNVPKPFASASSPVNFIVVIWFHWSHAVVPFALTNELTGEQLAFKKTDNWRRFLLVRCPIARDADKWAKWEKEAIDWQIRDQWNQIGIKINDEDEIGDGLLDETPGSSDQQQK

SEQ ID NO: 127482 - protein, 163 aa, Heterodera glycines
MSKKVVNIDLYIKHPDQFFLGQLAILGGGREEKINEQNDEQNDDESNEWSNLSSSERLQSFRLSERNPKKDGTPRVFTACFAAFAHGRNDVSNSISRLVAMLSCGINGTVKEKEDTSPWLLLFGVFSICLGLWILGHRAGHSSRVWCYFCRTDVYFESVSFNK

SEQ ID NO: 127483 - protein, 71 aa, Heterodera glycines
QILKSFSIPFTRPFSSLPKCTFRPIHKTIRCPIGLCFVPGFSPFISNCADLSKISPAPRKHSIISFRLTKR

SEQ ID NO: 127484 - protein, 233 aa, Heterodera glycines
MVKNPLPEGCTARPLDQRTMTPWTVTIRGRAGTPYENGNFQLSMAFPRDYPFKAPQVTFTTRIFHPNIDTRGKVCLDILQTHWAPTLTIEKVVISIIVLLNDPNPDNSPINAQAASLYRTDRAEFNRRARNAYLNGYLVEHSPGAHLPYCHDDHVRWFAALFCHLRRSSAFVDHSSRICYYHPSAGAATHGFVQARRRKESKEQRNAVAGLEMLGREKKVRKETPKKDSDGKN

SEQ ID NO: 127485 - protein, 116 aa, Heterodera glycines
MELIKMSELYLALQGEQCYYTVPSIHKGFNVKNLPFECPSFSIALEQQLQQIVDFSGCVKAIETWKAEHLYNRTDCLDSVKKAILESIIDAYNIYQNEADRMRREVCVKAGNLSNN

SEQ ID NO: 127486 - protein, 361 aa, Heterodera glycines
MRKLRYPNNVGKRPEIAGETSKARDGAALDGGAFVGVEIDAEKMVGKLNFYAAGILYKEKDENVQPIEKVPDEKVPIGKWHKFEGQEIELMPREIDMTDENDNICIEFLAFADADEMKDDAHFKMDDTERIQAKLGKYICKNMKENEKNKQKNPKKLNYKFNWTTVDDVQFYAEEAMGAMREKFGINYKELADSFLSDDLTDLGIKGKSSNKIYRTEDEKFLLKQIPQPYQMETMERTLKDYLKHMMQMGDKSFINKIFFVFRVEIENTQTLFLLMENVFKNAKDLPLLNFDVKGVFSRQPKLVEVVPKQRLNDVVLKWYNYFGGEPPLVPEEVMPMFPEGILLDKETHRNIVERLKRDFE

SEQ ID NO: 127487 - protein, 116 aa, Heterodera glycines
MTCAYAKLLGPCFKTGRTDDRLLHRERTTESPSWTELVAGTCRTRPPPTPSSSQHGPETIAQFTQSKQHSPDPGTRPRKAGLKTELTQLLRASQRTPPANAPFATEQKDSKPQSGG

SEQ ID NO: 127488 - protein, 178 aa, Heterodera glycines
MPLLNMDSERGKLENELMLNEIQQLVVRHSADDNGTLALNAVQSRQIAQLTQDYMSNLLKLFSVSCQLNREGRATEIARRTTNSKLIQAMCNYASKARRPGLTKDGTERTVADTVAPNVNKMLVPKRKVTADELLDSLRAEDGAKKHKQNAKMCPPPPSVPSSLSSSSATLSSALWDR

SEQ ID NO: 127489 - protein, 74 aa, Heterodera glycines
MAFIGYGALTAALSGIILYANLPTRLTIGAIVPTVEFLAETQLKKLEPGQAVAGPQIKGFDQYLDKSQEIKNGY

SEQ ID NO: 127490 - protein, 19 aa, Heterodera glycines
FLNFVGLGRALRDRFLNLF

SEQ ID NO: 127491 - protein, 100 aa, Heterodera glycines
MTPRDETETRKTREISRVETLAHPYKFAQICAFPSPLWHTFEMCSKICCPPPPPKSALCTQSVANAAAQTNAEELLSPALGGIRLATTARIPLAYAQKKQ

SEQ ID NO: 127492 - protein, 455 aa, Heterodera glycines
RPSVVRLFRQRSVNCDPQWLIRCPGRVNRIGEHIVYSDYSVLQMAIEHSTWVGRLIYDTHSDQRIGTHSDQRVFTLIRGSLLLEDRHPKWHHYFLAGWRGILESFFCAAKGMRAVVASRIPPSAGLSSSSALVCAAALATLCVQSADFGGGELAEIATHAERFVGLEGGGMDQASKWLHSPGVRMFGASGRALRIDHSPGVRMFGASGRALRIDFRPLGWRAVQLPENALFAVLHSNTEMNKTASAYYNQRVVECRIAAQVIAKQSGSEKEKLFLAKFQLLHCSAKMAIEQMLTLVDEHLAKRIHTREEICAILDCSDAIHTREEICAILDCSDAQLAQWSLNANTQNMTEFWLAKRARHVYAEAARVLEFEWVCREGREDNGTVAKLGELMNASLMNASHLSCAQLFECSCPELDETVANCLSAGCIGARLTGDFHGVFCLPYVSSISLQNFKK

SEQ ID NO: 127493 - protein, 103 aa, Heterodera glycines
MLGFDDKEKSYSQNHAGAETRKLADDAFQILPLPDIDPTVTSTPAVVNNLIEAVESLDSRMPLAFQEQQQILKMQGEMLQLGVSCKEHYKKIHEQSVMRYNLE

SEQ ID NO: 127494 - protein, 157 aa, Heterodera glycines
MHHPLMVPPHTIMNLEASQPQWMTDSFLPTMASHSVICAPSSSAAAPPRLSQIQQMAARSDDGTTPQASKQSSSSDPILNHTPPPPPPPLRPFHPPPLPPQGNRNFLRSPPCLLPPSPSGTVAFLHTPPPPPPHPRAAIPPLMMQMSTATTPTAMRL

SEQ ID NO: 127495 - protein, 127 aa, Heterodera glycines
MTLPDTMMHFGPPHTSPMPLRMAPPDTMMHFGGRRGGGAGRKGGGRGGGAGRKGGGRGGGAGRKGGGRGGGAGRKGGGVAGRKSGGVDSKYYQQMTFSGVCARLRASSKDAPETVLIWAKESISLAT

SEQ ID NO: 127496 - protein, 166 aa, Heterodera glycines
MKKHVTFTPSIGDDVHSTNVSSVAESEFSVKGRAEVPEIFKKLADDAFQILPLPDIDPTVTSTPAVVNNLIEAVESLDSRMPLAFQEQQQILKMQGEMLQLGVSCKEHYKKIHEQSVMRYNLEKSVNKNIDDLKEGAVVAQKLVKAKSAYEEMVAKAEALLAKANK

SEQ ID NO: 127497 - protein, 183 aa, Heterodera glycines
MFARSIASPMHQRMAPSVTMMHFGTSRPSPMPFRMAARQMFPSAAAPPQRMTAPTSVLPTMASPPPVICAPFSSAAHPPPQPRQLPAVQEEKDERTLRIERMADQILDQRQLRAERRAQGIMYDEEIIEGRVVRFNYAGEFCEQRGIGEIHRQLRHFMIGCALVGAVTFAFVKIDLKKKRRRK

SEQ ID NO: 127498 - protein, 193 aa, Heterodera glycines
MFARSIASPMHQRMAPSVTMMHFGTSRPSPMPLRMATSFLPTMAFPPPVICASFSSAAHPPPQPRQLPAVQEEKDERTLRIERMADQILDQRQLRAERRAQGIMYDEEIIEGRVVRFNYAGEFCEQRGIGEIHRQLRHFMIGCALVGAVTFAFVKIDLKKKRRRKMWERQNQLYEARKEAMKKQKQQQLMMAT

SEQ ID NO: 127499 - protein, 102 aa, Heterodera glycines
MFHLNTVQPNTSKLHSRVVSLFIAFFESVIASGIGRLWTCHLTRLPSKPIQNYTGRAFRTSIALHTSFVCRPSLGTAEKSLHRTAAPNPGLTTLGRERGASL

SEQ ID NO: 127500 - protein, 88 aa, Heterodera glycines
MCRLTVCLAPFPVGLGRHCARRKRVACTRCVSTVSATWTASWPTTQTPDFDAGKTAFHYQTNESYYGTFGCRMMVNTEPRCAPLFVSI

SEQ ID NO: 127501 - protein, 164 aa, Heterodera glycines
MVKDRLMEFQTEDDHLVASQSQFMEDFFEQVEEIRASIDLIATSVEEVKKKHSAILSNPVNDPTIENNLDHDENGGQANVDLRIRKKPSVNFRIRIQKASADQRIRQTQHATLARKFVEVMTDYNKTQTDYRERCKGRIQRQLDIGQWEGTRLTTDSLLGAHCI

SEQ ID NO: 127502 - protein, 62 aa, Heterodera glycines
MHSLLCPRASSSQLSALFKRFSVGNGTASTDCATKKGPVDVLRARLLYQSRKRGIRENDILI

SEQ ID NO: 127503 - protein, 112 aa, Heterodera glycines
MALKKWAANVRGENVGPQKTDRNCRFWLVAANVVTRNQQQQKGNSEGGGEGRENGGKERKREEKKEQQLKKRKKKIAAEHQQKQQHQQKQEHWKEERRKRKRGKWRRKRSSN

SEQ ID NO: 127504 - protein, 98 aa, Heterodera glycines
MNRRWICNDVWMDIFPSFDRPQLGLKLALLSPRFNALVDKHFDGKSELAIWRPIEIHKGKGPEPKLSVWMDDESNNVVPFPLPDRPLPSKIRFKCLRI

SEQ ID NO: 127505 - protein, 20 aa, Heterodera glycines
ALPGPGPGPELFKTRDREPG

SEQ ID NO: 127506 - protein, 361 aa, Heterodera glycines
WICNDVWMDILPCFDRPQLGLKLALLSPRFNALVDKHFDGKSELTIWRPIEIHKGKGPEPKLSVRMDHKFVEFPLPDDRPLPCKIRFKRLQIDYIDHSVIAFLRSNHQIFEKRGIDLYLWIPYSHTTDGQRIWDVFVRELWPIFSTNIRCLGFFRGDHLDNLLRLISPTILTDLNKLNSINSYDLLPEAIGDDFDVPNATISAGQALSKWLHSPRKDGQPKRLRCEDYNAQANTDWINNFKEHFLCANAISSVNYEIRFTVRAPSIQMVPFELVNEWTMEKLTLTKENENEWDTIWIMKRSKIIGETAAVNWKDGNWDNNCNCVFFWLDSDTNCIGPLSPPPKEEDEAGQSSEKGASSADK

SEQ ID NO: 127507 - protein, 818 aa, Heterodera glycines
TTNTAITTTTTVYPQKIGVPRLASSTRMGKGNVSGKPLKIVTTTTANTNISRNTTTTTKNNNNNSSKITTPIPKTAKLVVDEQLPVATLLPTLIHQMCKDRPGEENFYQQAICWALFALYLMVFVSLVLHQLCSICWQSRETARVFRGCFPSDQLPAPDTLRYPAALVVNNDPHYKQGSHWCAIYAPSKTEEAVIYFDSLAKTIPPIVKTSFMDKFPKGFVTNKHPYQSPLTTTCAIHCIVFIYHMSLCHPFDAFLRMLDASESPDMYSLCILNKMINPYLSAKSEHMDSHTPHFRADSIMNRFLEVAQSKSREGSLWGSPFTVTITTLDVAQLPQRQQVRGSGKRTTNSVQHIIKESALLRINNNINRQNGRRLEDVFGLMSSANIRTDLREYDAVVYVPIVVDYWNRKYATSNQRFKVFIFGTTGTYRPKFQYGPDNYNIEIPLYHHNGHFDGIRCGVGKAVFGRDYYCFSCECPYDNANDHTLQCKAKECTACGKDFISQDCFSHHLSSNVCRQFKKCKQCGVVWNVKQNRRKGRSGHVCGEKFCYTCKCYHKPERGCFIQQLKARRPKKYRLIAFDCETTQNTRIEGDRRLHSVNFISCYVVCTKCINEILWRNSLQAPCGICGRQRTVTFSHRVYERTQTDAQFITPCPMAAFAQWLLSEFDPRYPTMLFAHFGGRFDNIMLFRQFFLNGFCPQMIRRGNKLYEMKIARGEKNPEIIVRDSWNLMPVPLGALPGAFGLNVQDKEFFPHLANVETNYGLILQSLPPKADYLYGGMTPDRQRRFDQWYAEHRHQQFDLCEQLAAYCTNDTRILIE

SEQ ID NO: 127508 - protein, 88 aa, Heterodera glycines
MPLDESEAASGANSVPIAVRVPSETVPDTNSLPTAVTVPTDNVAATGANSVPLGTRVQDDGTPNGEAKDPAIQNNSAPLPSEDANDEW

SEQ ID NO: 127509 - protein, 25 aa, Heterodera glycines
TCACGVVVKLSTFHNFSPGFNSPLG

SEQ ID NO: 127510 - protein, 69 aa, Heterodera glycines
MRPRGPAFTDARRAVRKANLAAVRTAKRLPEGRTKRAVHVSTRVGAAARTARQPRWARSTKAVTIVVMP

SEQ ID NO: 127511 - protein, 112 aa, Heterodera glycines
MWCRAIVNMPSGSVIWQIGLYKKSNNNDFEYECAECCKNIICKKGNTSNAINHLKSKHKNSEYEAKYEEFFVFFRRQICSHLESLREEQFSEEVLPLPNSPISKKPKGLLDF

SEQ ID NO: 127512 - protein, 109 aa, Heterodera glycines
HGKLANRANAKSADAELLNEKLAKLYSSPQAIKSFENLCFIAALLRKKDMDTKVDQEWKFVAMVFDRLFLIIFTFACLFGTCWILFQAPTFYDTRQPKQPMMLMIMIIF

SEQ ID NO: 127513 - protein, 601 aa, Heterodera glycines
MAQQQQDNKIKSAKGPGAYSPEMSWDSWAERFDFFIKLRGITDPEMKKLLLFTEIGPIYDELRMMAQPDDIRDMDFAEITALMCERYGEAKSIVARRHELFTARQHSGQSIRDFSIQLRSLIAKTEWGKDSIDMCLSALFVNGIVDDSIRAELIKKGDKDLKFKDAVELAVVLEQSNVDAQAIGSDSLKGNVAKISGRGGGYDRAKGTNNSKSADSKPCYRCGRSGHWANICPGKADKCTKCGRVGHWAIVCRTNGGNKNPARVESRLWKSSKHVKQIQLQCNEKPPVISSLERKSAKTETVPPSFIQLKVHKGNAEFELDSGADVTIIGSQDWNHIGKPELKESQGLLAYGGIPIKGVFGMANVNVEYNGMQINTDIYVVKGNKRNLCGRDVIRRLRIDLNKAFGINAIQIGSTNNDQKEVDKILEKFQEVFRDELGRCTRQISLKFKPGVQPKRCKARPVPFELKAEVEKILDKWVQQGVLEPTNNSDWATPLVIVPKPNGKIRLCCDYKVTVNQWLDVHQYPLPRPDDLFSVLNGGQKFSKVDLNDAYLQLMLDDEAKKCLAVCTHKGLFQFTRLPFGVASAPAIFQQVMDEILQGIE

SEQ ID NO: 127514 - protein, 455 aa, Heterodera glycines
MKGLSTHRQQTEQSQTWDGPTRPSPPFHLKQLPARHHLFGSAPPPSFSPPAPSVDRLSEQCCAGWDSGLSSAAATDSQSGRGQQQHNAATCQSTDAARTSLEERCCVCRNEQRSCPTTASTSPEWSTLTEKEDKEDWVRILDALETVGEEEMLRKLEECILSGQASNYTTNRGAKKWSETLAQCQNSIFVPLSSNDFANFTQNGFLSCRFPSNFPIKGMNSLKTPLASTNYRAGESVRNIASVTLPRPQTPVSREKQKGEQMCHNGNTFVVELPPPMPSPRAASNALALLTQLNSNSKVGEVSSTVPPIIPSHNASTFAPSADEEEHQRVRCSSVVPFITSPTEDDGNCEQEEENEANEEEEDQFDSEVFTIQLCRCPYTKSFGFSVCDGTADETARGEREQQRQGGIYVKSVVKDGPADKSGRLQPGDRILNINRRSIQFLTCDLALPLLATDR

SEQ ID NO: 127515 - protein, 37 aa, Heterodera glycines
KRGDPFVLQNFFKIKNHDNFLSGVLKVANHESDMYFD

SEQ ID NO: 127516 - protein, 101 aa, Heterodera glycines
MVIRRGTTVIRRGTKVIRRGTTVIKKGTTVIKRGTKVIRRGTKVIRRGTTVIRRGTKVIRRGTTVIKKGTTVIKRGTKVIRRGTTVIRRGTTVIRRGTIMV

SEQ ID NO: 127517 - protein, 52 aa, Heterodera glycines
MAKVEEDRTDLAAFYEKITECIRSIESLREYILVDMKDVPDLRKMAARASYR

SEQ ID NO: 127518 - protein, 148 aa, Heterodera glycines
MRCCCAHSVVPGTYNLFVYASVAIEDNKEIVIFFHRDVFLRSNPSNIYISNLYRVRMSIRQIVLLLNKREWLISPVTIVVNSFLNYADGELLNKWKYLPCRAPILKEICCDKIARILFGFAFGQENSNCCCLSNEEKQQFWRFIELND

SEQ ID NO: 127519 - protein, 27 aa, Heterodera glycines
KFSILMSLSVTRNHYFGDFVTKIVKNH

SEQ ID NO: 127520 - protein, 96 aa, Heterodera glycines
MATFMQEFDLLPAKLLQTPSARHVGSWYKQSFSELLHFEGLEPSDMVLDKFNNQLRTILHRHNTVVETMAEALLELKESHGVDIACERNIQVEWMN

SEQ ID NO: 127521 - protein, 27 aa, Heterodera glycines
MAGRVHHDCLARLICWFCNIRMEIRFK

SEQ ID NO: 127522 - protein, 231 aa, Heterodera glycines
RCAVNACTEMAGMEGTGGCDLINTIISILFLKSPLTCNFWYLSSPNCSLLVCKILKNSVNFEQSYSRKYTNKQVFKLFNSMRATIEHHHRVKGFDADSSDDLAEVRACIVLGAENLSIKISDRGGGVPSAKLANLFHYLYSTAPKPSDDSNTPFAGYGYGLPISRLYSAGYGYGLPISRLYSRYFLGDLSLTSMDGYGTDAVISLKVDNDQLELFNWEIRSSLPLENGTGN

SEQ ID NO: 127523 - protein, 115 aa, Heterodera glycines
MPMALDYRSRVAVVEAEAEFIDQIDEIKRMPKNGRQKQFAKELGISKETLRKWKKEFGIEMSKSPIRFTEEQKMSKMNDYYEMKKANPSLSDKEIADILKIGTATLKRWKKENNS

SEQ ID NO: 127524 - protein, 65 aa, Heterodera glycines
MPNPFLFVLFTCPLSVIWATRKSATRNTLEKKYKIISKKQGRSEDRKLTRSRSADSNCCVALHPW

SEQ ID NO: 127525 - protein, 67 aa, Heterodera glycines
MSNLKLLFAGGAAGMCSWLSNYPTDVVKTRFQSDDAYENYREVVKKAYSEHGWRTFFAGLGSTLIRC

SEQ ID NO: 127526 - protein, 54 aa, Heterodera glycines
LSHKNADDDEQQQKVTLGVERFALPELLIRPGDVEVQQMGIPEALCAVIERLPK

SEQ ID NO: 127527 - protein, 130 aa, Heterodera glycines
NLFQKWGRFKAANAAIASTWDASRANAFAEMHFSTIRSATFPTSGLLSLEMFDDYDKMLRAMSEAIKWLILHLPKDEFMSRNKRFNLFAIAEDSGEILTVLKQLSQFEYKFRKAITPLRNNRQDCINALH

SEQ ID NO: 127528 - protein, 271 aa, Heterodera glycines
AVPRAVFHEMAKLNDCFPTDTSSVSIEKARIREFSDFKRRSILADLTFKISKLALGISNTCIKQLGDVEIQPRALLADGLRRELDIRLIQIFASDVQPNILRTLQNQSLKLQQFRKSFLFICDHVGIRDGIRIWTEQLKSILEESLNDKIFKTAENWLLYGLNSMVATLLAKDVFELQRIVARLPFEQHRSLSASPTALIAQLTTNAAEFTQSGPNRELLFALAKLGQQLLLLRNLQMFVKAEKHSQLGTLQTAERTLRRSSTHLESRDQG

SEQ ID NO: 127529 - protein, 84 aa, Heterodera glycines
MTLPTRFHANQMTPRHTDDDDHGNEALNIFNDAFGLPLAPPDGPNEAALPADQQAAPAQQTDEANAERGHLDLWRRVDGHSAIF

SEQ ID NO: 127530 - protein, 16 aa, Heterodera glycines
MQRPFGNLAVFQPLID

SEQ ID NO: 127531 - protein, 32 aa, Heterodera glycines
THFVFINFEKFWTFRGFLLFWTFRGLDTLWGC

SEQ ID NO: 127532 - protein, 422 aa, Heterodera glycines
MTNRAEYLFRFFESMPEKELREELRKAPLYQGGTRKQMLKRLRDHHRKELIEHRKKNHRNFLTENLYDYLIVIDFECTCEAGKYEYDNEIIEFPAVLVSVKGRKIIDTFHAVIRPKMNPKLTEYCTKLTGFVNFFHFLTGITQQMVDEACTFPEVLDMFRDWMAKHGLDGLHRALGHWQVFAVGLPALGHAVAARLPQLCEPAPCVRQLLLPRAARPAEAGTSAQRGVERNAQAINIARIVIQMLNDHAELRVNEKLVNGALLLPWHQKQLIFTDQMWEKRQKNGTTTNNNQSKAAPSPPLAALEASHAATMSFLDSFGSSTSASSSAEDIICAGMARMGFRDVDDDGYEEEEAAAVNGGGGTSPMNGGGNNKLATATTTAKLFQNGITTNTNGKKGGDDDDDGQEEEANDGDTTITAHGNG

SEQ ID NO: 127533 - protein, 65 aa, Heterodera glycines
MAPKQRMSVANQHFSKNVVARGQVAKSLKPKENQYPAAPWLIGIFVFVVCGSAVFEIIRYVKLGF

SEQ ID NO: 127534 - protein, 287 aa, Heterodera glycines
MKVVNLSLKLKFSIKIPKKLMKILNTSSFVPCQERFLFPVYPHICVLAALGFDLLRRLCQASFSNRDDGIAAAAVPSSSSSSSVRRPAGGATIRRGQQQQQQFGIGTALCALVAALFVLFSVSRIAAVRRNYAGLMDTYRAFNEQILQRQQLLDYAEMRDPIRLCVGKEWHRFPSSFFLPESAAIIIDDNGTNNSGTSGGKPRQRPAVEMEFVRSEFRGILPAHFAGSADDGTSSTLRHSTAHAPLGRMNDANREEMDRYVPVESCDFLVHLEDGQETELEPNYAKM

SEQ ID NO: 127535 - protein, 67 aa, Heterodera glycines
MPNLYNVWFNEYSNVADGGGTLSDQPSTSQQPDFDQFEECSDEEFLDDPEVPSTSHQTNPHQRHPPA

SEQ ID NO: 127536 - protein, 109 aa, Heterodera glycines
MMFRQRRFGVHRRGRRPQGVARTTYLPTNQTKNEKGTNVPSRVPSFRCWTVQIAQTWQSFAFQIGTRSLPMCHYNHHPFDLLRLVVGVVHQKEQVQWSRQIGTMPSRKK

SEQ ID NO: 127537 - protein, 254 aa, Heterodera glycines
MEYCNCSIPTGRPLPSDASGHFVDQSDEQIPLDQFGQPLGPDGLPLMTNSRGEYVVHSSPAIPTASIGPTTVPIALPFPALSGPGLKAEAEKEEEETEEGMPPTDSTGRLVLPVISADTGQLMPRNEEGQFVNAHGEVIPTDDFGRPFDWHGKVLPRNELGQFVFHDAVQWPDDHQTAPPEVGDAASTALLAQREQQQMLQRRRNQTAHCFVGGFVELLNVFDTSANVKILDYRMMKEAVKVSGGNGEAADQHV

SEQ ID NO: 127538 - protein, 348 aa, Heterodera glycines
TQTKLNEKSACNCNLHSRKCRFNAELYRLSGYQSGGVCLNCRHNTAGRNCHYCRFGYFRDQSKPITYCRFGYFRDQSKPITHRKACKPCLCHPIGSLSRNCNQTSGCLCHPIGSLSRNCNQTSGQCICKPGVDGPTCNRCAKGFQQPTCNRCAKGFQQSLSPDTPCVRKSPLLPFASPFQRVSADADECEKCRASPSRLTLKKFCRRDYALKLQLISRELVEGWAKFRLKLQLISRELVEGWAKFRAQLLDEPIKDELGTLLGAEMGRGTEISLWLPNRNLICKCPRLKVGRKYLLMGEKSLAKPSSAIVFDRHVVMMEWADEVAERATRFAQKRHFGEMPTDESKGR

SEQ ID NO: 127539 - protein, 292 aa, Heterodera glycines
MINLQNVDDSSVTDDKSSNVDDCSVTDDKPSDVDDSSVTDDKPSDVDNSSVTDDKSSNVDDCSVTDDKSSNVDDCSVTDDKSSNVDDSSVTDDKSSNVDDSSVTDDKSSNVDDCSVTDDKSSNVDDCSVTDDKPSDVDDSSVTDDKPSDVDNSSVTDDKSSNVDDSSVTDDKSSDVDDSSVTDDKSSNVDDSSVTDDKSSDVDDSSVTDDKSSDVDDSSVTDDKSSNVDDCSVTDDKSSNVDDCSVTDDKSSNVDDCSVTDDKSSNVDDCSVTDDKSSNVDDSSVTDDKSSN

SEQ ID NO: 127540 - protein, 113 aa, Heterodera glycines
MPRDEAENVRHCCCCCFTPLNILRTHQLFMLNTSNIEPYYNTLAKQHLVCSHFFFTTQFRAQALSDFGTLHDKWRTNSWPFPCAVMACHGDGQVLMCQPENRPNDPGRGHKTM

SEQ ID NO: 127541 - protein, 126 aa, Heterodera glycines
LIDDYKNAIDSMHTRLWRHSMPNALHFVGELLAVDVKFSPKMDHLVCFLAGTLALGHHHGMPSLHMEMAKNLSATCHAMYQNPTGLGPEIARKAAATTVPDLYIKPLDAHSLLRPEAFEGGWHSME

SEQ ID NO: 127542 - protein, 136 aa, Heterodera glycines
QWRKEFLDGRYGSKQPTPPSTPRAPSPSFPIPVIVGRQMFPNDDGYESEDDEILLPPPPIPPQLGHPPPNVPAVRVQPMHVGQQRLPLRVLPQIFHPPPHVPGRSCPINAATRTNESRATIPHLPQNARYLEPRFS

SEQ ID NO: 127543 - protein, 222 aa, Heterodera glycines
MKFCILLFLFLIALIIPIESEKKKLQQKSFDEIFGEKWEEKEDKREIIEKYYKIKEKIKQKGRKYSTNEWRKIEGKIAKKLGTNRQYIYKWIKEFGLQKCKSYKSKTDEGKIEIVLKFIEMTKEYKQKSKYSQKEWNQNYAEICKKIGVSKTTIIKWKKQFGISKKIITKEEKIEKMKIYWEIKKENPKMSDNEIAKIVNTSNANICNWKKQFGEENFERLN

SEQ ID NO: 127544 - protein, 71 aa, Heterodera glycines
MGREGATAGARCEGHNFGDYFASVRIRLDFAITFAHKNMKNGVRYLQIQVNLCIYDTVKNYKMKKCHIGKI

SEQ ID NO: 127545 - protein, 220 aa, Heterodera glycines
MKLFPLLLLIILFLIVKIGSEKKKLQQKSFGEIFGEKWHEKEEEKRNELKKREIIAKFNKIKEKIKQKGRKYSTKEWDKINSKIAKKLGTNRNKIYEWIKEFGLQKCKSYKSKTDEEKFKIVQEFIEMTEEYKQKSKYSLKEWHENYAEICKKIGVSHGTIYKWKKHFGIRSKITEKEKMGKIKKYWEIKKENPKMSDKEIAKMMKINRTNISKWKKLFG

SEQ ID NO: 127546 - protein, 104 aa, Heterodera glycines
MASTKPNTLFNKMRNLVGEQSSNMLGNIAGGGGGAGTQLSSQHRPSTAQFHHFNAGQASAGGGTAAGANNSAQLGQQYVNFLRASSEQLQQVIADEVWVNRLLE

SEQ ID NO: 127547 - protein, 134 aa, Heterodera glycines
AFAWFSDLLADHSEIFWSLYSVDLDAALELQPPDSWDSFPLFQLLNDYLCIDQNLRMGIFHSKLISQFSPMVVRYIDLMEHSISQSIEKNFCREKWEVSELYLSLCTLKPKRNDQRTPEKDLRDHLAIRGLTRL

SEQ ID NO: 127548 - protein, 232 aa, Heterodera glycines
MQIFSCAEFSMQNVDYQAVNNCYRYIPVQIRIEKKTLNAFLDPELHILTASSPFADCGNFRYHYLQLSQNNWIKIDTRTATIQKIDSSSISEIREASGDKSLLEITPLVFHRCTIDNETGEGLFAHLDEWLRLDQWKSKEKEHKTARALTLGALPNGVIGLTEEWFMDKLRLLVSYWTTACCIYVTFMCPPIVPFFPLHFPSHFVPIVTISPLCISHTFLMYGFNYPSLSLR

SEQ ID NO: 127549 - protein, 183 aa, Heterodera glycines
MSPTLSTASHCPVVSVSAFSFLSVLFILDLFIALAERSGKRVSEKRREVLRKANLSCQYIFGDNNCEGNDGENDGQQLADGSESLRETQLLASILGHLQNALEGRMANCVDAEGENVAKWQIGEKEEEEKGHEEEAKMVASLWEEQVEIVRGMARHLTPILDGWSKSGGTDQNTSDGSATGQF

SEQ ID NO: 127550 - protein, 86 aa, Heterodera glycines
MHNPFGLDTLNIDYNDDPLAHFQVHQINISGSAAKVHIIAPGDKLPFANNSVDFVINSHVFEHFYDPIRTIEEWLRVVKPVIIFFM

SEQ ID NO: 127551 - protein, 103 aa, Heterodera glycines
MPGAAHLARLIQGHSLKSQNASLRSDHFDLCLSEWLCSSQHHMQAETWKMPVVPRTERSGAFGRSTPAVLQKMVSARLMIKCPQVPHGCWCAKPDKRRTTRNM

SEQ ID NO: 127552 - protein, 17 aa, Heterodera glycines
LGSPIIWKSIFFSWTVG

SEQ ID NO: 127553 - protein, 77 aa, Heterodera glycines
MPLRSSAEARRSDRGQPGAGSQMAEAAETDFMTDIKLRALKKSIKMERGPLRDIYDIQEAEVEEYSASEATSVQNGS

SEQ ID NO: 127554 - protein, 71 aa, Heterodera glycines
MILGVTEAFKRDDNPKKVNLGVGAYRDDQGMPFVLPSVKQAEKELLEANLDKVSVSVRTPSSVRTRKKQPE

SEQ ID NO: 127555 - protein, 126 aa, Heterodera glycines
MPGDVERCLAETGIDAVMSAEGVLNNPHLFDGKNPFSFEVLSTPHFFCKPYVRQMLKCAAEASENGDDVPNLPVSVSAYREKRRAEIERLAKEAGVSKRQIRKREKRKRGQTKEQNRKQTYPKCER

SEQ ID NO: 127556 - protein, 24 aa, Heterodera glycines
IPAPKAAAAIKKYSSAIEVVRWLQ

SEQ ID NO: 127557 - protein, 223 aa, Heterodera glycines
TSVLTEGTIILSKWSDPTYFIRTQMYTFTVRNPDEITHGAIPSVKRQGPYSFDQIQKRKIHQIVNGTVQFETLQSYHFNEEASCAECFLYNRIWIPNLVYQKFVEAASKPAMRVEVAELLYDGYKDPFLDQICSLPVVNFVCEQILHLPDRIGLFYKKNGTANGVFVVEDGHTENAESLGRILSWKGSKSLPDYWWEGDQALLINGGNEKQSLQSLGHSPPFE

SEQ ID NO: 127558 - protein, 324 aa, Heterodera glycines
MSAKIIRVPKIACDLSLEKNGVSKNRNYAQKASQTILALPIPSTIAFIHPIMSAKIIRVPKIACDLSLAKNGVSKNRNYAQKASQTILALPIPSTIAFIHPIMSAKIIRVPKIACDLSLAKNGVSKNRNYAQKASQTILAHPIPSTIAFIHPIMNAKIIRVPKIACDLSLAKNGVSKNRNYAQKASQTILALPIPSTIAFIHPIMSAKIIRVPKIACDLSLAKNGVSKNRNYAQKASQTILALPIPSTIAFIHPIMSAKIIRVPKIACDLRLEKNGVSKNRFSNNFTLPKASQTILAHPIPSTIAFIHPIMSARIIRVPKSHVI

SEQ ID NO: 127559 - protein, 42 aa, Heterodera glycines
MSSLIWQIGLFNKLLEGKAECTETAEIFELLSFHMSLCFAFI

SEQ ID NO: 127560 - protein, 341 aa, Heterodera glycines
MTKVSYLLSFRSFRSGNSLQWPIWEQDIAHFFLPNANNAISLQLDFLTNCHGLIQQLLAFQFNVGIMETVAWDLSLSIFRALPTIKKFGISQSATPTIAQWHILGYEKIVGAMPGKDLARIGDHKFATENAIKVNPNYFRERNVNSYIKLHEQAIKTVEEKFLEAIRQEKLSRKIFEDILIQENFSEWEFKHRMDFFITNTQPFLDFPIVEQEIAKERSIKQKNRIIFIGGITMPKNGALPSLSEDNKQIFESARNKNGGVVLLSFGSVVPMHDDDAHAVAFKNIVVNLFSKQYPQMNMIIKWGERPPIGMGDQYKKMSENIYAKAWLEQSAILGIAKMAS

SEQ ID NO: 127561 - protein, 105 aa, Heterodera glycines
MPKLFITHGGQNSINEAVKFGVPLLLFPFFADQFNNAEAMAARGVAKVLDIRSKTLENELAEALNEIFANYSMYKQKIEELSNKLSSIDIAKEFLGAFRQLRKTL

SEQ ID NO: 127562 - protein, 176 aa, Heterodera glycines
MIFVHTYIIYIGHILFVERTMATFMANKYESVKNNWFSASWFIILLTENIRTGHQLWPTFLLHFSIIGWTSIFNFLYYIIIYSLFLFFVQFNYLFLSFYHLLIEYTIISRHPILRQNAVQILKKIFNKFSMKIPCNNRVNDNVKHPTIGRIDGRNLPEKHLMNETDQHFKILKELW

SEQ ID NO: 127563 - protein, 98 aa, Heterodera glycines
MSNSSADDQGEASQFIKIGIPIVLGLNVCVFVVQIPLSLLNIGILCRTSLLHRNLKFILFIQSVLFCTFALTLCVQFLIIAFYGIQQWASFTPLLVNY

SEQ ID NO: 127564 - protein, 78 aa, Heterodera glycines
MTDQCQREKGDIRLIRARGNGEGTGRGSDEKEKGNGRAKEPNEAKVPQTNRPQIQTLMGQSDAGDRFCSPIRPRMTAH

SEQ ID NO: 127565 - protein, 361 aa, Heterodera glycines
SYQANISLFSLALISHFGCIPLQVPGPDQLTFGVPLLRPFPFSPPRPAPFRRPRPTTAPLSPRLGRKPFRPLRIHLHFDPVIIELSIEISALIISTLLPQAISFWQKSLLVRPANKSLLVRPANVPIRLSRKCESNQYYSDQSSAFLRKCESNQYYSDQSSAFLRCVTRCKAITNCGEVQVPDAHLFFCLQSNPLSCIPSGPSDGPGVSDTDFLLYVSAVDTQRCRNEETIAYAAHCQQESELDRPIAGHVNICPGALSTHAHDKEVLLSTVKHEILHALGFSAGLYAFFRDAEGKPRSKRNVNNRPLSFNVNNRPLSFNRERGYYDADPSTVRTVVREDWWTAEGQIPHPIHLIPHPIHL

SEQ ID NO: 127566 - protein, 22 aa, Heterodera glycines
MSLLRTVKDCHVELRKKIGKKL

SEQ ID NO: 127567 - protein, 69 aa, Heterodera glycines
MGPENLPKIEEFSYKWGKAVLISQLLLCPGWLYKMKVSNLKELDELMSEQSYKNFLAEESNKDDETQHF

SEQ ID NO: 127568 - protein, 111 aa, Heterodera glycines
PGSGNERSIELQYSEAKVIGNGSFGVVYLAKLVYNNEDVAIKKVLQDKRFKVPPNVVWIGLAGVNRELQIMRKLDHRNVVKLKYFFYSSGDKKDEVYLNLILEFVPDTVYR

SEQ ID NO: 127569 - protein, 251 aa, Heterodera glycines
MAIPLKVEVLKSDFQKYIIEFKPFLLTSLDNHEDPQVCIAAIGVISDLCRAFEQHIAYVMDEIMEKLLGILQDPKVKRTVKSQVLNAFGDVALALNAQYSRYLASNMKWLSDAIAAAQITNPDDYDQVEYVENLRESCCYAFSGIVQAMNGTDEGKQQIQHSIQPMLQLIVLIANSQPSAPESLCASACALAGDLLHAFGVQFLPVVDAADFGISALITKCKKSRQNKAKTIANWVTRELSRVKRQAAGQS

SEQ ID NO: 127570 - protein, 158 aa, Heterodera glycines
SPIKSILCLSVPRLVPIRFVQNLEVNDPRCRGVDGLLEAYAIALSHVELRWTNPPASVAFRFRFSLPIAFSGPTDFTPTIRLAARRAAALPENGSRYCVLLIVTDGAITDFEETKEEIVKVFTGCLPARFLLSIIFTVSLISCPPPIFRLLLFPCPLL

SEQ ID NO: 127571 - protein, 284 aa, Heterodera glycines
MKDQSSLHRFDHSNRPNQYEIAIGAIAEICQHYSKNKLFNAYGFGARIPSLDDKVHYNFPLNLEVNDPRCRGVDGLLEAYAIALSHVELRWTNPPASVAFRFRFSLPIAFSGPTDFTPTIRLAARRAAALPENGSRYCVLLIVTDGAITDFEETKEEIVKVLPNFDDHFWHFPQFVQMRKFLPPHRSLTEQELATAKAKLAKEVLFEVPAQLIGYMKSKGICPRPPDDPFTAVNQCETLAQRFMKWESGESGGTEGTAQQQRRSSSLKSSKEMLRAMQQKRASA

SEQ ID NO: 127572 - protein, 140 aa, Heterodera glycines
NLNECLLLAIKHNAKSDQCVFLLIIPKSNQTSSAASSPSPSSPSFHLPLPSVRLCLVRFLFTHTIFPGPKPIGTVGKLHPLGIWRAVECPPSPDILDIFENFSSNLAPLSPAHRPKSGPIAADNRRGDGWKLTNLRCGTP

SEQ ID NO: 127573 - protein, 59 aa, Heterodera glycines
MEDSLSKGLAQYRQGVGPQNSKIRQSKSAQCSDHQLQPAVPQLDNFQRLGQATTKTGGN

SEQ ID NO: 127574 - protein, 99 aa, Heterodera glycines
MCSAPTRAIPSPNFLPPLCPSECRRSRSVSIDRIGLTPPIGPIDTIEISTLTSRYQYDSPYYYRRYHDNYNIFYNTELMSYGNRSKLMENLYQGTPITQ

SEQ ID NO: 127575 - protein, 159 aa, Heterodera glycines
MERDRPCEPLVKYLQEKNAAGVISVPGAVVYVLTDTPITQKLVKFFTPRLCPLLTPTPNHLVLVLKLTAQPTVMGGANSGGGGNAMTAAPTSYGLLSATMAPPNLTTAEMKKELVDTTTMAMMTTNSVVKTETWKVVGGEEIAPPPPPPQPPSGTADYT

SEQ ID NO: 127576 - protein, 164 aa, Heterodera glycines
RLEHCGSDFYACVEQLSSNFPSFPQIREEIVEKTLSILSKGGGQCRNIAFAKILLPIFASIGPIQRAELISRIISFDYFDQNSESISICGALGQTKLHLHQLFLFKELVSTTKFDLVESREEIFQFIMRIIQIAMKRGQMERWRLFSMAGNAFGVFFFFVYIQD

SEQ ID NO: 127577 - protein, 34 aa, Heterodera glycines
PSAPFAVDTQRINSDTTIWTHLSAEGPQKATIVI

SEQ ID NO: 127578 - protein, 29 aa, Heterodera glycines
MKEWRFEVKKLLNNIPRKLIDVIVPGSYI

SEQ ID NO: 127579 - protein, 87 aa, Heterodera glycines
MLEHLGIFNKTVIGFSALGYEIMRKNDGVLDLNKFTKLNISMICSILYGERRSVLYDRQSLTTSFLRHNTFVIFNMPYQKSLKERVR

SEQ ID NO: 127580 - protein, 245 aa, Heterodera glycines
MRNVPRNTRGEICEMRFLPLEDTQRPDLLMEVLIQHLLDRVLDGHPPPSLVGLQLHPPGFDRPYVIRLRPPEQNNAAALAAAIERLNEQSAAGIDLFAGTTVAKVLAVWPLEPIRADPQRGGGCDLEAEHHASHTVQSLVRVVNPNDRLCLARAVLLGLRDRETRMAGGGGRATFTEYARHQEQHGRDAEELLTRAGIPLDKGMYTLVDVARLQRMLNNTNGIGQIRLAVFEKEREYLIVYKGQG

SEQ ID NO: 127581 - protein, 119 aa, Heterodera glycines
KEFLITKTHLSVCEVPIVLGFGTRPPAYKSFNLKNHLTWINDTQESLVGIKIGCDIGLAYRNNYVIGSAIFHPQQQQSGGQSILYPYFAIYVNISIFVHILAFFQKTFIITAPIRKRHF

SEQ ID NO: 127582 - protein, 48 aa, Heterodera glycines
MEEDIGGEESDNDTIDFFADSVDEIMENNSEKDEDEPTSTVYLDRKKS

SEQ ID NO: 127583 - protein, 359 aa, Heterodera glycines
MELINTILDKMYNDPSSPAAFAGVTALWKEARKKIKHVRKDQVQSYLDGHRTYTLMRPRRVHFPRAKTVAAGFMTDVQVDLADFQALSRHNGGHRYLLVAIDVLSKRLFVIPLKNKRAEEMLEAFKKLIDQMPMVPHRIFSDKGTEFKNRLLKEFFEEQEIGKHEPVHSSVKASVAERAIRNVKQRLYRYFAQKQTLNWVDTVQQIVDGINNAPSRVHGIRPIGVNFQNAQKVWKRMYGPQSFVKKSPRFRKDDFVQMSREKGQFEKGYLPNYGDEILEVDQVLKTVRPIRYKLRDDNGEKFRGTFYEQELARVRKDEETSYRIEKVLKKRRKPDGSTEMLVKFIGYPEREWISESQLV

SEQ ID NO: 127584 - protein, 17 aa, Heterodera glycines
MGRTTVRVQHYMRTKKS

SEQ ID NO: 127585 - protein, 81 aa, Heterodera glycines
MALDANKNTLMVFLIPTGAPCRVRPNCCTTMPNSTCCAALPPKQCFIGTTTRHAEKSGILVVFLPKNDNLAIFVSMFKKYD

SEQ ID NO: 127586 - protein, 277 aa, Heterodera glycines
MSGQLRAKIPLLNRVLIKEIQKIKSKIEEGNFEYDKNNFDDCSRIFNKTKEIIQRIEPNFEKLKILHQKWQNLMRQMNKTEWNKSDQENESIDEEQLNDDEEAGEEEDEDEKEYDSDQEDESQEMHSSDQIHRNRIPFAHQRSRIKLPAQTLTHFSGKFSQWPSFWDDFKSSVHNDPNMENIQKLKYLRGLLHDEPYRIVSPYPLINKNYPIIIKLLKSRYGNPELIRENLHSELRNLKRPIESTIELRKFILLIDRMILQLKSQGEDIIEGKLSSL

SEQ ID NO: 127587 - protein, 175 aa, Heterodera glycines
TSITGTLFSCVSITRTQFLCIPITVTHSPAFQSLGLNPPAFQSLGLNSLAFQSLGPNLTWSFGIAIIETQFCDIPITGTQFCDIPITGTQFSIIPIPGTQSHQHSSHWDSVLLHSNHWDSILHFSRILRHRNNRGLSSPPFQSPRTQSFTIPNNELNFTDSSACQSRDLIQTCSA

SEQ ID NO: 127588 - protein, 86 aa, Heterodera glycines
MLMQDKHLEIFYNNKHHEHPLFSRFSQHALRKDGLLLFWFIESHAGLIVARELMGELFETFKMDMSTGSLYDETNNGIVQRSGNGI

SEQ ID NO: 127589 - protein, 154 aa, Heterodera glycines
MHFFCPLLITVVPLLITAVPLLITAVPLLITAVPLLITAVPLLITVEPLLITAVPLLITAVPLLITAVPLLITVEPLLITAVPLLITAVPLLITVEPLLITAVPLLITAVPLLITAVPLLITVEPLLITAVPLLITAVPLLITVEPLLITLLIA

SEQ ID NO: 127590 - protein, 99 aa, Heterodera glycines
MGHYERLRKSYSRCRRVIGNLELTHVDEHDVRRDVQRQNNQSASDKDGAASFAQRLTDRAPFHFLEHLEEITGYLLIYNVKIREISLPKLRLIWGAKIA

SEQ ID NO: 127591 - protein, 58 aa, Heterodera glycines
MRVRHFLQLVLYRHFVHSLIIFLIITDWSSNAARRRGGGSTTQRKKQGNQKLTTKKKI

SEQ ID NO: 127592 - protein, 141 aa, Heterodera glycines
FHEDVKVISPPPLLADCHADENGNYSYEYAVADDSPPGVEFIGQKFDENEAKLDEKNEEEKEKHWMREKGWDGTRAEESEEDEAEAFGQSRMIGCGQTMFHRVEYGQQSPTADWPWAASVRIACETKGSNKSEVQQLAGPV

SEQ ID NO: 127593 - protein, 68 aa, Heterodera glycines
MDNATKLRRDSRDRVRTGSVYGFLRIRSPVTIGVIPLGLWCIFWPAREASLCQNSDPTHLKYLIDILD

SEQ ID NO: 127594 - protein, 83 aa, Heterodera glycines
MLNSQSSATVAHANNGNLVPLRPTNTRQWCKAKSIVELNLRPNLMAFWCQLWSRKVQFLSLKPSYIGRPYLSLLWPGLLDILM

SEQ ID NO: 127595 - protein, 251 aa, Heterodera glycines
MDFDDEVFDPNLNIDEQNNTEAEGQIVERERKLEITEPPSSLRHYFVYVKGQNDAKCRICSKKLGRKDGTTGGMLRHLKSAHNSLFKKYEKAKSTKTETKKQTRTSSSFAGPPPKQLRMDELHGKKAEKTEKSPEIIDDLLLRFICLSCQPLSFTEQNGFSDFLKAVCPSYELKKRDFFTRKMEEKYGQVFSGIKELMKNVNYFSFSTDIWSNKRKRNSFLRQLLNQFEIPNDKVHLVATCRFNICHFNTQ

SEQ ID NO: 127596 - protein, 69 aa, Heterodera glycines
MSAYGAIMSLKPLLDWGIIVDWGINGDWGIIRANTAIRDGIDHPKKGVKSICEMLQKARNDCRCKTIRI

SEQ ID NO: 127597 - protein, 107 aa, Heterodera glycines
SLHKAAQLLCEHKIHRLPVLEHSTGNILYILTHKRLIKFLYLYINDLPRINDLPRPPFMDKTPKELGIGSWGHICTISKDTPLIEAMKIFLAKRVSALPLLDSDGRV

SEQ ID NO: 127598 - protein, 160 aa, Heterodera glycines
YKAMENEEEPQLHIDVLLNVAEKLIFSPDNDFRLDLRDPNADIVNFMFFQGPFVVTDQFFYTLFCRGILRPTVVDTFFIFGNDVVTFDSVPSSSASIMMNDWREQLEDGEETEEGEIVEPMHGDSQWHEEKCESNFGPCEISFTDGESPAESLVRLFLVR

SEQ ID NO: 127599 - protein, 110 aa, Heterodera glycines
VIADRTSKLVFAYTIDVINPERDCAFHFPTNEFVALLCYIAACCPNLDTFSLSFLLQGEFSDEDFKQLSSWLYRTIQSVLSLRCSILCIDCNLTIEFRAFFPEATLMAHF

SEQ ID NO: 127600 - protein, 331 aa, Heterodera glycines
EDILEYRNNINLPTPLLRDNIRERQIETLRALLIKHHELARDQEKDHFHALQQLKQRNLEEQHLELNSQKDFNRRALEQKTKEHAMQSKQQPRELKVEETIIRKQFRQETIIRKQFRQAVKIQTRQFKAYQSQMLQMAPREEHRELLNRLKDEQSRKIASLADQYEATIETMVTEQTIKLDAQQEEDLRQLTEKLNRELSMLTEYQEKQRVELSAQIERERVQLQDRVNLRLAVLKQKMNEEKVHFERNRERQLAQLHDRQAQALSAFSVDERRKKSSMGSDGGRNDASSTNLIGPSGHSAFSLLLSPSIFNCFDNFYLSFSFSNEFLYVF

SEQ ID NO: 127601 - protein, 32 aa, Heterodera glycines
MSLRFFGFHDSVSEGKFLWEILTQLRGLGVGP

SEQ ID NO: 127602 - protein, 67 aa, Heterodera glycines
SPLLAATRVLDVAFSDDLCEGAYYEDSRVTALKCADDPEFVWSVGTSVRDMIVDSNANSFNKSESTE

SEQ ID NO: 127603 - protein, 52 aa, Heterodera glycines
MRADFAICAFFAYFLCETLAGIAYSKSNKNNSSTASESDLGTTNSSNTEKQD

SEQ ID NO: 127604 - protein, 344 aa, Heterodera glycines
MQHTKRYLLVPEEIYQSLATPSPSDGSPIELVRARIKQIKNNDAINEAERAVKYEQEIKRLNKLKKDEDERPVGVKLENLSDVVDAMPKPFNIKRPIFVATRRHLKVGRARKENVEQLEDDDDDDEDDYETPRASSTNKRQPTQMEILNLIYKNAQSLGVSEEGQVLRAGGRPFITSSVDDIVSHLLNKDKRGQKEPTAFKEFIERAKQNRQLTTQRTYTLHRQAKRRYRRLPTLAPGLHTEWQADLAIFDRIAKQNRGYKYLLVCIDTLSRQVFVEPVKTKTSANMINAFEHIFKRSKYIPWKVLTDQGKEFTARAVQQFFRTKDVEHFCMLTSPQFHARVAE

SEQ ID NO: 127605 - protein, 224 aa, Heterodera glycines
MDLILATDWINNAYPEMDQQDHNKETPKKDQQDHNNETPKKDQEDEEETKEPSWISLIDEEQKQDPFTPIYDEPPRAKYNPRRFHAIIMRIRYGAKTVAALIFQSARVVLTGVPHPDQAQKFAARVLRRIEYTQCRTMTIYELRVVNIVGVLTFDQRIRVEKLQQSLGGIYDPTIFPALRCKLDNGATCLIYISGKVILTGVKNVENLKNSFDYLSKIVPNYFR

SEQ ID NO: 127606 - protein, 112 aa, Heterodera glycines
LGTPKTCACAERPRPIPLVEHLCKRFNCSAHELHVLFRNLEKRRDIVEHLRSAQLRTAHLRPFVRNFPVRCNDLSILDAHSVPAYRGFLGITVLFGNLVDIIKDFRYECITT

SEQ ID NO: 127607 - protein, 1493 aa, Heterodera glycines
MRHISKCRPLCLTVVAVDHRPHQQTPAGPLPVTNVVLRNGDGQRVEASGWQHQASVLASLDIGSAYWFTNCTARARYQHLDCWYRIGVDGKTAIVVPHTAAPQATTVQTGGGRTVNQTLAPPAAGPIEEEDENNNATRPIEDCFVIERTTPMRNTLRNTRGELCEIRFLPLEDAERPDLVLETLIQHLLDRVLEGHPPPMLVGLQLHPPGFDRPYVIRLRPPEQNNAATLAAAIERLNEQSAAGIELLAGTTVTKVLAVWPLESVRADAQRGEAVVLLTRAGIAVDKDLYTLEDVGHLQRLIINEHGVGQIRLVVFEKEQEYRIVFKGEGVAANFNLCLLLEHGHFNYVGRIEQLFKVPNYVLTLPNGGSSSRRCNECGFVFPNDGCYDYHFANMAPAPIDGRGQRQRQPICHWRRFCRICGRVAYANNHQCAPLHRPVGPIDCRRCHGRHTLDEPCFIQPLLDRTAHQNNNDDDDDDDDDADILDDDEADDELPLRLCFFDAETSQERPLQLNNQIAQKHVPLLIVAEVICEPCLRAGINVNDGFGRRAPDCVCLCRMVRGQQMRRWSSPPFVNGAGDNTPHPEGAPAFNQRRFYFHSFDDEANDPIEQFLLFLMKHGSKKAHTVCIAHNGGKYDFHLVLEALHRRSIPPKRLCTTGLKIYSMKLRGLNQRRITFKDSINYFFCELDALVKSFDLPQHLATVKPFFPYLYIQRQHLLQRLNGLPAIEYYSPDTMKVEKRTKFLRWHGDNDADSNFQLREQLIMYCVNDVAILRESVLRFRQLIGEHTQGLDPFLCASTAAGLALATLRRCFLPANRLVHSPEGGYLRGRRASAESRRYIRFFELENDGAQVQCADWSVGEAHIEDSGYRVDGLWRREPPLRPLAIEWMGCFYHGCPECFPDRQQKLAAGRTAEDLYERTMRRLFELEHQHGCELHVIWGCQWKERLRRDHELKQRYEAVFTPCPLDPRTDALRGGRTEPFKLHHVCADDEEVLCIDIVSLYPYVMKVNPFPVGNPMVLTREVLLHPPTAPLPWTCPENNTFRGLLLVRVLAPRNIRVPLLGYRTKDERFTFPLCGLCADRRQQRPCLHGDDKRSWVCAYTHVELNKALQLGYVVTDLFEVWDYAEWDDTLFSSYVNSFVGLKVQASGWPEGCDAEEQRQAFVAEFLRTEGIHLDPTKMAFNPGLRLIAKTLANSLWGKLAQRVGHTEIQYTRTPAEFHKLLDDPTYDKLDFVHVSDHMDRVVVRKRPEFAKAPLTNCLPVAIFVTSYARLHLYGYMEQVLALNNAELLYCDTDSIYYVNKIGAPCVPEGEALGQMKRELVDRRIVEFVAGGPKNYGIRHTARDGADERANLKIRSFRLSYATQQLINFDAMKELTLSTYNIDGPIDDVIDNDDLFVYGGGAHRAIRVSFPQIDRNVQADLFTREAHKDYRPFYAKGRVRPGMQTRPFGYVEDAPQPMDVEQHAQPPPLPPTERRKRTLIEADPTQPGHSRWF

SEQ ID NO: 127608 - protein, 147 aa, Heterodera glycines
LKITKYSPLSFENNPILLLLLEHDKPNLSNTVLIDDQTLQMTNVLQRVQVLVHRNSSTCQQNHSFWPMLVLSCGIRIESVASTTVRLSRLTVTEPQEDGTRQTMRSFGLTTRTRDCTVLETLCSVSKSQAPKFIRKINIKCRVQPPR

SEQ ID NO: 127609 - protein, 74 aa, Heterodera glycines
ICVDGRTHFWSIEYREYVDAYARIYRITLIYHSHVDNVRIKNKYVLMDVRISGALNIVSMWIRTHASTVYINLP

SEQ ID NO: 127610 - protein, 71 aa, Heterodera glycines
ICVDGRTHFWSIEYREYVDAYARIYRKTLIYHSHVDNVGIKNKYVLMDVRISGALNIVSMWMRTHASTVKH

SEQ ID NO: 127611 - protein, 92 aa, Heterodera glycines
MSTGFMAVSTVSWVLYLEFIKKWSLVASERATMAWRKHDGSGKRQKPDANRLAELAARKREQRARQKKEGHVPQKKIKEKDTIINLDDIDFD

SEQ ID NO: 127612 - protein, 872 aa, Heterodera glycines
PVRCLMDTGASLTVAPRSVADELNRTFSSDLEAMSASGHVIRLKEYAQVNLNIAGYTVRSLIYFVDDSEFTVARDYSVIVGWDVFEKLPPVKFDHLNGKFFVGDNIQIVLSFDSFTEDLRVSAEKNTLIPADSQILVDASIESTPNPKNSFCIDRPDINFSKAMVEGKNLEKLKALIEEFSDVFSKRYDLGLFTAAEHHITTTTEEPIASAPRRMPYKYKEELKKHINQLLEAGVMVESDTPWVTPIVIVQKKDGGIRPCLDFRKLNEVTVPDKYPLPRLDSIMERVGNCQFYSSLDLASGYFQIKLSEETSRKCGIITEDNFKPSLSRIEILKEMPVPLNVKEVKRVLGQAGFYRRHIENFAMVVEPLLKLTRQGNRFEWGREQQKSFDKIKELLTQAPSLIFPDYDKAFHIFTDASSTGQGGVLMQKDDVTGTFSAISYCSRTLSAAERKWPAVQIEMSAIIYALREFRPFIFMSDIELHTDHKPLAFLLKKSETNQQLARWLIELQNYQVKIVHVAGKANTLADALSRAAEDKPLSDVDELEDIIAFPVCLALAAHSRVLTNCYLKYGGCVELITDNASAFTSEFFREFCSMLYIDKKYACPHWSQGNASTDATFRTFHNILAKYISKTQPDFDEFLDAANFCYNTSVHASTGETPFFLIFGRDPIFCVDQIIDPKVRDPIAISDRNEFKQKLVVAIRHAWHAAADEYAKAQRKMKEQYDRKARPQQITIGDRVLIRNYDGRVGTSKKFQLPWRGIFRVIKIEGIYVTVISCTSPNSNPKRLHLNQIKKCFEILGPPCTTPMQPIEEQKCLEHTQSVEDVSSERSEIRNEMDPESRKDENLDQIQPEGRKKDQKLKPRRRKSMKKRIWN

SEQ ID NO: 127613 - protein, 536 aa, Heterodera glycines
MFLSGKDDESSISAIDRKLWQGKTTIKISDLEKAQNDMGKLEDGVNRAFRYLNRSLNQKVNWVKDVVANTNANFETLKVQFETLTERVDMLEQDSDGTNSGGTVSITNLNRASRAPFVTPMGNAQPNQVVPNQEPIHQLSSEDEDDGPTLFGLNMLSSGPTVGSGLEMFCEESVFAFDDWAERFKDYLSVSGKAYTEQEKVTRLKLALRDTPRALFKELLPAQMDTLDSALSELRQKLDSPQRREIAKRTLSLCKQREDKTVAQFLRRLTPLVDATNSSLTGEIRKEKICEEFLDRLKPNISFLIRLVGLSRAKDLDLVRAQAEELEALLLMNKGDEASRLSQAVHALSNQSPQSNWSTGANPNNDRAGQWSSGNNVRGFRPFSGSNATRQQQRGRGGRGRSRNWGGGRQEQFSQRNWSSNPRCHYCDRAGHFAYNCHQRRANFRGNSNQSFRQGRWSNQQPRQSQGQWQNRQNPVNVMDATSSYNASPGFFENLAQSLLDLKIQDNRNYKNEEPRSGAMNALTRIKPETTARDCQ

SEQ ID NO: 127614 - protein, 73 aa, Heterodera glycines
MPKESFDPFTWRQLFFSLKKYYGLKEVYADLIHICCHCKALFWKDHGHPCVSKETAPSVRVTPQQFVDMQLFL

SEQ ID NO: 127615 - protein, 41 aa, Heterodera glycines
MPPRATSATEKATASAWGVLLTTPLPTQQYAEGLRSSASGI

SEQ ID NO: 127616 - protein, 32 aa, Heterodera glycines
YTFETIGQDKKRMKLMPHETRNWLCLVENMLT

SEQ ID NO: 127617 - protein, 46 aa, Heterodera glycines
MLNATHFAFAFQVLFLCVVGTQIAMASDRQKLSKNNFYSLIAVANE

SEQ ID NO: 127618 - protein, 18 aa, Heterodera glycines
EAIPEGFGLPINLGASGP

SEQ ID NO: 127619 - protein, 78 aa, Heterodera glycines
MASSTTTMNSNNNSGGGGGSAKTTMLVNAVSMESLDSSASATNGGGSGGSVAGGGDAQAQVRTLFVSGLPVDVKEREL

SEQ ID NO: 127620 - protein, 290 aa, Heterodera glycines
MSPPINGNNNSPANSISRSFSSDRFYRLVDDEDQRAPLNALNSSSNSEEESSASNQQQQQQHTGGNFSLANSRQTSITMPVEGNGTTAAKLTVGVRDFNTRLCAVLERLYALALSEDRRVLCWIVRLLLDTSEDRMHLAKLLTNSSASLANLSQTVSYLPMDMDLNMSYGVAPPSSPSLRTSTENGDEGNDNGRGLDGVVGGDIDIDGTKAMAKEQRGEEEKEEYKNVSNNNDNEDGRNGRRRREEIADRANNGNNNKDNGTNEMPGKLMLMPTDAIEAEMPNGQLTMNT

SEQ ID NO: 127621 - protein, 346 aa, Heterodera glycines
LAAVTVWSMVWIKPERLLFGHSFWKKKQIAKIVNFSFIRHSERANPYFVLQRRKGHREDGLSALFVSTIDSIFDTRPPPYRIIYQRELDEGQIAWVIAIAVDWRDVLDNWQCLETSLLPILEVFSKENELENELEKFVLTKIDGFLALRDEMERPVFPVLEHVSNAAILRKFLKLFDLPPCEKLVNYYSCTYWRGNKPFQGKLYLYSCTYWRGNKPFQGKLYLSVNFLCFYAFIVGSQTRIKIRWTDILKMEHNSSLFLSNGLTVSTRDGQTHIFSMFMNFSDAFKHCTQLANFAMKQLIEEKGFSEDAALRTKFLLEDPQKRAKRSMSFVKRDLEARQRTEAYRC

SEQ ID NO: 127622 - protein, 194 aa, Heterodera glycines
MAQVFLHRNRPAPSHSIRHLSTGLDFFFIIILFLQVTDVISYNERIIYFNGYRMQKQGRPNGNIQVIKYLKNNLSMKHLFKKQFEQKKLNKTRHARCAAIKRWNRNREFSEAMDFEKNQHTNGTSRDSVHESGHIICYWFLEYASEFTSIADITEGNEDAVLAEAEDEVRRLVTPKKCLIKKVENAKFKVIIIA

SEQ ID NO: 127623 - protein, 74 aa, Heterodera glycines
MAELAARMESAERMDEEFDVSTNRTDRKSNFAPEQYLTNPTYPIVRIALELEEQSEEEKKEEKEKEKEEEKEKR

SEQ ID NO: 127624 - protein, 218 aa, Heterodera glycines
MDEKEEKATKEEEEKSKRGQRIVERVVAIWRGKRDRERPKTAMDGESGKSRNEEVTSSSKEKMKKQTQQKRKQTIQQIGENEQENTDQETKTKEETETDQQVKSEIDQEMNTKQETDQQVKRGTDQKTKTTKKETETDQLMKKGTDQERKTNEETETDQQMKRGTDQEMKSMEETETDQQMKRGTDPQIKTKKEIKTDQQMKRETDQEMKTKQETDHQ

SEQ ID NO: 127625 - protein, 85 aa, Heterodera glycines
MAKLVAIFLPTLVVVSAATVPILPQQLLSANDQNSNSLPNLTNVLADEISLSAIDCAALPPALWCTKFVRYKCGTSNLCRKHDDA

SEQ ID NO: 127626 - protein, 84 aa, Heterodera glycines
MLHSEWTLSMVVNRPEILKWPGLDPALGKWTEGTPFFRHYRFRCCAVKASEKEVEKAVDECYMEHNVVNVQHKRCECIGNNVPW

SEQ ID NO: 127627 - protein, 71 aa, Heterodera glycines
MMMIRLNDNLHFVLPRIVVQEGSGDCIYRQCSCDEQNQCFGVLIDETAKCFEVAYDEVKADLIKAVLIAKY

SEQ ID NO: 127628 - protein, 169 aa, Heterodera glycines
YIDHSVLTFIRSNKPIWDRMGTKFEFFAKSIRQLGFTSGDAFDNLRRLISPTILTGLDQLNSIDSNELFPDGIADDGPNATAGQALVKWLHTPSKNGQPKRLYRNNYFGPQNLEWVNNFKETFISATTSVSYNIQLYFHVNTIPTEPFELVNKRTNEKLTLKQEIDEFD

SEQ ID NO: 127629 - protein, 52 aa, Heterodera glycines
  unsure (1)..(52): unsure at all Xaa locations
NSLISLRSVKAFCVATVVPGKSRKTSISVSTLCLLXSFFDQVHVRQHIXRQQ

SEQ ID NO: 127630 - protein, 57 aa, Heterodera glycines
MKELIVSYFYGYPKNCCLCIDAKKINRCHAFTSRTHKQQQNSDKKAETVTNSKGGDR

SEQ ID NO: 127631 - protein, 54 aa, Heterodera glycines
MDLNNRFKHLINVLQRVAVESSAKATAKAPPPETPPSVVNLNNFRRYPKIRTFL

SEQ ID NO: 127632 - protein, 39 aa, Heterodera glycines
IYYAGQFIFLENVLKKDKNNYFILPSLDMHMYFKFFIVM

SEQ ID NO: 127633 - protein, 78 aa, Heterodera glycines
MTVLGKIGTVDKVRFTSMSCVPTRSACARGYYEDAFVTCTNLYCCRADLCNGVPDRVVQPWVERLGSVDLGLVFSVPS

SEQ ID NO: 127634 - protein, 104 aa, Heterodera glycines
MKIEFILLILLKIYSKILAFRLLKFSKNVCGSCRIPHKNQIWDPVAGLEFKIFCRTGSGRINPANPANPAFSKKCRIADWDPAKSCAGSGPAPGSTKDRPPATP

SEQ ID NO: 127635 - protein, 759 aa, Heterodera glycines
MQKPTPSNRPNSSVSKTLACGLEKIVNLSGNEPLSVPVLADRSDPLGLKSVQPDPVPMESAEAGTKELEVMEVDEMSGEKGKKGEMGKEKVKSGGIEEEEESECSEGELLGDGGFGNLQLNPSLRAGNKAVEKEDKGKPYLVAQVRSDGVIAARMKLFWDFPELVFVPFSLFDNAQPIEIGDLFRLHKCEWTKSETGWEERGDWLYEATGRLNYQATATDVSQLRQRIPTQAVGILVDVQRARDRHVKVAMVSAPELSCVMRAYRRHFPADFTDTDIRYRSVVRLQLRQINSPPWVLYSQQFAAELSWAKVQLGEKVMAAAVAAQSFDVKADLRKHTLFVEPVVINEISTRSVIIQFVMPVPSIEELTELCKIWEVDLAVGCKVNPAAKAKPCAHGYVLSIEKRAFCVGYEIDVKVILSYQAAKEQDAQEEFDQLRTGELDGCVELIPQTSVRALQERMFTLRSNDCSKVAKDEAKVGRIMSILLGRPVKPESPKANNPLMTFGALSKLKEGQIDTALCMLDEVPRLVFQQAGPGTGKTFSAASIVATVLATDPTARVLALAPPNVAVVKLVLEMQDALAAGNHVEPMLALFSGTGKLRYAKEELLQKDQERVKVERYLDACERNPRLAQEMAVAKIVQEHKNRRLCFATLSFCEQLPALFGETTHLIIDEAGQAPYVQILNLVSQLPCLTKVLITGDRRQLRVHLPSLPIAIREDFGMDTVIQNLDVARGDGRHTIGSVCFRSHSALVAARRAGFTTA

SEQ ID NO: 127636 - protein, 264 aa, Heterodera glycines
SPSPFLLAATISHHLSVNPSPLNEIQENIYVDNLLLSSNNPIEAQTKCLDSIELFAKASMPLREFCSNSNEALSLLPRIIKLNGPDQKFLGIKWNTDSDCLILSHQPPSTFNPTKRAVLSFIAACYDPLGLISPVLVPLKLFFQSICKENYNWDQPLPFNLTDQWQNLFKNWSSDSISVPRYQCFLPDLKKYQLHCFVDASCLAMCTALYLRITHPSSQNSVIVLIFAKTKVKPNKGQNLTIPRLELIGSVIPQTLIQFIFREE

SEQ ID NO: 127637 - protein, 73 aa, Heterodera glycines
MNVFCLVGEMNVFCLVGEMNVFGLVGEMNVFGTNYKFTKLVFNTNIQSQQMQKQDEEQLVRSVKEASEIIRKF

SEQ ID NO: 127638 - protein, 131 aa, Heterodera glycines
MNSEKSEKANSILLEAAKKETERAWQDVAALTDEKRLLTNGIRELYLKMSDSIWEIFTILDKINLESEKAESTWRDFERCKTFDQATKLEEQSQNSLMEARRLHFESRRVQSQMLNYENRLKTIVWEHVGI

SEQ ID NO: 127639 - protein, 165 aa, Heterodera glycines
EEKEQFTSARRTVEGVFRDIIRLDNEAKEFSFSAHNTMVEAQNIKNKNPDKPGVNFWHSKLLDGVLKIHALFDKIKKEEKNMKNIKKGMEKCLDRKDLTMCQELAEEAKQSIEIAKNYRQEIGHIYRTAYSQPDLGIGDLANKLKETMRENQIRFERQRPQEEFR

SEQ ID NO: 127640 - protein, 143 aa, Heterodera glycines
PPPPKKGTFQQAVLCNTCGEKLDTCVGHFGFIDLEYPVFHVGFFRLVIQTLQCICKACSRTLLQGEPKEALLRQALTPNLDYLRKKALHKRMLALSKKCSLCTHCGFLNGVVKKAVGAILKIAHVEPIDAESVTDFETAFSVN

SEQ ID NO: 127641 - protein, 42 aa, Heterodera glycines
PFYFVSCHCLSVNVCGRSPLQNGTVFPKFGPLVGWHFLFSPT

SEQ ID NO: 127642 - protein, 71 aa, Heterodera glycines
MSAAASVAPNAAPSFQQQLGSHAFNVGGFSSSSDSVGGPPRPQPSQISSLREKRKNNEYESPLARIGSSSG

SEQ ID NO: 127643 - protein, 210 aa, Heterodera glycines
ISLIVYSSHSLIKGFTKVFHTRTRFLLIVLCLLCLASVWANILCFNFAIICIDHNEKTFNFAIICIDHNEKTNGSAVPAKTSKSFTPRQKLYLTSAVAAAALVANFAVVTLVNNYGIRTVFVLLGFLSAVATCLLPTAIELGFFYVLACRMLQGVTFSCTFPVIGAFVTFSCTFPVIGAFTSKWTYYKQNGLFVSVLVAYVQFAPAVTLP

SEQ ID NO: 127644 - protein, 104 aa, Heterodera glycines
AGVFVQRRRASTIVTNSLLLALDKPLDLSIKSTVILRDEWLLLGAQEGLSLRPFQHFRCGVLFGRGFGHWLFARLANHGFKIGPMQHASAVEQGHGTLRTGTAE

SEQ ID NO: 127645 - protein, 365 aa, Heterodera glycines
MRGPSHLKCLSDGNWNGTVPICVPATCQGIKNNTAIGLFVRPDSISIPYRHNLSFVCSQANRPSKHSPLGETRQCIYDPRTDGTEYWLSGSEVICPLIDCGSPPALSGAYFESENNGPGTFKVGSAFLFQCRLPYSVVGKSSYDDRMIRCNVDGTWDLGDLRCEGPVCVDPGHPDDGQTHLDSIEEGAVARFTCNRPGYLPFPSDTLSCALGTACVLSEDVGISTGFIPDGAFSDNSDKTIWGYEASSGTFTLTWLALIKRNPCHPNPIPCHYIPGLPLDKKKIRNRTGTAKVFRVWVWDYKKISELGFKLNPLLPSFPIPCHAFPFDPIACHSLASLATQSSHVLNGLVRFQRCVHLPGGGPAK

SEQ ID NO: 127646 - protein, 550 aa, Heterodera glycines
MANVCLIAFVATASTTAATSVMSLIAPLNFDSFETEQHQDLVSVVDGGPAENASISVRAEGGNTRGQSVPSFYFVPVQLVTLSGQPRPPQSLTFESASNRMVVRFRSDHAIQARGFQASWRAVSASCGGLLSVQSQPQQLISPDWPRPYPNGMECVWHMNAPEGQLISLAVRCDNVIRRSHGILTSPGNAHFPYAPAQICRWTIELPMAQTEEKMWERTAAEEAISLTLAVNSWDVSDSGDSLRIFEYSADGQAEEGRPLHPIEKGFGAESPPPKTASEPAKKQTIFARQSRVELVWRADELRQGVGWNISFSTSQPPQPRHLSIDRPLWPIPAGCPRLSLPSRRVLLSTRNTAYGTRVTVSCERGAEFVSGRGRHFETVCELGGRWSESEPIPDCQPIYCSPIPQIANGFAVMASNVSFAGIARFRCYDGFGFPSGKEMEEIFCTDEGRWTQTPKCKSWHFRMPICCLFSSFKSQSAPICPMLPVFNFGERSLQFGDGIGYGSVYSFQCSAGYRRDGAQNIVCQSNGQWSAAQPQCKSTVQCAGSILLP

SEQ ID NO: 127647 - protein, 47 aa, Heterodera glycines
MTIFYLKEICLFCGLFIALCFSIQLNIFELSVQFWLFSNQLIISIEL

SEQ ID NO: 127648 - protein, 182 aa, Heterodera glycines
MAFSGTRKQKYIGGLKNYINVETKDAKDWMAYVKTGRIWETFGPIPPPMYADRMRAFSMACAFRWKASTENVLPSEAIRQALISAFCDSYGKSKQFKETEEQLEEAKTKKWTDLVQNEYSIAQYTVTIFGVELFKHLMEQSGKYTWNFLFNQIYQLRSLFYALHFSICRFFYPIAINLSVVS

SEQ ID NO: 127649 - protein, 54 aa, Heterodera glycines
MSPLRFLAVLLLICAMFSFNNLGLANGEESKDSQVALRPDVAAVQPDLVVVRAR

SEQ ID NO: 127650 - protein, 66 aa, Heterodera glycines
MKRMKMPMPMHLLRNQMETKNSLKQQLIMMKKSHQILSLANRRLMEKTVPTQRQQQSFKMVRQMQI

SEQ ID NO: 127651 - protein, 174 aa, Heterodera glycines
MKGVPAEEEEAVTAPPPAAAENLPEAEEEEAPFVVVEDEEVRMAAAAAAEEAVVVENEELGVAPLPPPAEEEEEAVVVVEDEGMEVASAEEAAAVIDEEAVPPPAAAAAATEHILDGDEGADAMDTVLVLDDGSPGQPGQPGQPSHKRHKRGKNVAGSERRRRRIAREAAAQNQ

SEQ ID NO: 127652 - protein, 29 aa, Heterodera glycines
MTSKLIKLAEEIRKQRKWLYKFLLESPSY

SEQ ID NO: 127653 - protein, 396 aa, Heterodera glycines
MESRKYRIVAYDLETTLYNGVHAPNLVCAALTCSECVGEKRKCEICEEQRMLTWSAANVEDPIGGFIDWIMGFKQFETVAFSHYAGRFDSHFVLRVLTERGLNTELMMADLKIYQIKAKGVYFRDFWLLSQKKLADLPKTLGLSNPAKLYFPHKYNQNENFGKRLSHLPPFDDYNPNAMKEEDYEKFEGWYNENFETEFELGEQLKVYCQNDVEILMEAILKFRQLFLDITDGMDVLKDSVTIAGVVMRIFRTKFLKDRHIPIMPEGGYERAENQSKIAVKYFEWLAHWEGLRVRHAENGGEIKFGDLKVDCVIGGQKRIIEFQECEVKAELKRNREMKRFFESVPDKGPINPRDAYAGGRTMPFCLYAKATEEVEISMFDIISLYPFVNYGKKSA

SEQ ID NO: 127654 - protein, 245 aa, Heterodera glycines
ILKAVQMLWVNLILDTLASLALATELPNEDLLKRKPYGRTSPLISRPLISRTMMKNIIGHAVYQLTVLFTLIFAGASLFDITSGLYAPLHAPPSQHFTIVFNTFVMMTLFNEINARKIHGERNVFQGMFNNPIYCTIWVFTLILQYVIVQFGGRWFATAPLKWEQWLWCLAFGVGSLLWAQVVISVVISIPTKGLPKSLTIGGGEVEGDRQQIACASDESDERREKMTAAYSRISLIVKIIVKHF

SEQ ID NO: 127655 - protein, 71 aa, Heterodera glycines
MAFVVLATVTAMVVVVVVEKAGMNLRKCLGSKIDERRMDRKGQRVILRQMLDQQKIINVNSLVAMINVPAV

SEQ ID NO: 127656 - protein, 16 aa, Heterodera glycines
EAIPEGFGLPINLGAS

SEQ ID NO: 127657 - protein, 44 aa, Heterodera glycines
MVSSIRFTLSAAYVVLSCKDFVEFGEKVGQCREIDDDQMPGQID

SEQ ID NO: 127658 - protein, 16 aa, Heterodera glycines
MSFVLGKAESSKDYDN

SEQ ID NO: 127659 - protein, 149 aa, Heterodera glycines
MPSKSTDGQPIVVTGPDKASVEATEKALRALCPVTELIEMNAEHRSSLMGRGGAILQELIRKHSVQIVVPRGEASSSCNVSVSGAPEDVRACLMEIREHILPITRTILVTPEIRGSLIGSGGHKVKELCDKFLVKIHFSNKSAYCCEIT

SEQ ID NO: 127660 - protein, 187 aa, Heterodera glycines
MEKQFHCQVIGKGGEFLRRLKRKHGVKEINVPSEFSNSDPGPSLFSLRSCKDDLLKLLDDWRNDCYEEVPVQRRFVPMIRGKNSNKIVNLLDGLPRVEVDLPPHTNNDATEDSLIKIRGHKSEFAKFVCAKKKQIEHRLPKLKLDFQSDDDTAQNANRTVRLIGPLDQVEAAKETVLELIGSLRVCI

SEQ ID NO: 127661 - protein, 210 aa, Heterodera glycines
MGTCPPAKRRNEHSDPRPHQPHAPWAPARQRNVEMSTQTSWIPHIVKSGVLLSLIDRLQITHTLCNALHPSTPVWQMPTTTAAGANNAKVEQKPPELNAVPKIMASTMALRNGGQLQMNNGGNSTKSTATNGAVVNHSKQYQEQLLEQQRRAREAQSNDDSNESAATTTMAYDEELQQHNHQSLKQDRGEEEREEDNSRRRQLLREQCFK

SEQ ID NO: 127662 - protein, 324 aa, Heterodera glycines
MHSGSGRPKKLLISPSEIATTSKANMEVINHPQANDLLNLFASESIQFPISQPMIDIDRVTVAGVNKEVISSMWKDNKEMFTEDLIFAFQRYLTRVITNKKVVVVNPLYTDLNMHFGMHIFDYNALDNCYNYSNDYDILLMTIIFPGHFALIIFDRSDRENIQCLFIDSLPDYDRLTDTQYPLYDFRKTEIIKKGICELTPGLSQTDINIRTLNHNEFTRQNDGINCGVFVILYSELYLLSGSLFLPNLNINVERHRILWHLMKLLYSNDVAHVGRNNLITHQLVQNPSLPLYNVESVVDETCPRDGNAAFICVEPEFDTAPEV

SEQ ID NO: 127663 - protein, 42 aa, Heterodera glycines
MKGTQMNAEASLRDECPKEDSGRSSVCVFLASRLLRSFEGIF

SEQ ID NO: 127664 - protein, 96 aa, Heterodera glycines
MKKVDIEASNQVRNAFFMLIITPQYGISAGIPNGVPICFQKNFKSKSSNSTAEYDTIMRSFFLQRKRRKLKFSTDIFTISQFLRVRDNVRMSNCCL

SEQ ID NO: 127665 - protein, 79 aa, Heterodera glycines
MRKKPSGNSMPKSPFWPTERRTGLFHGFLKRAFRNKFLYQDWEIDQQNSEDEKGSSTSTKRVNPFLKPDGSSYNKDKDE

SEQ ID NO: 127666 - protein, 185 aa, Heterodera glycines
MFFLKFYNLNNVLDPVPDPVPDPVPDPVPDPVPNPVPDPVPDPVLDPVPDPVPDPVPDLFLGNKYLQIDLLPRDREFWANPGPGPFWVENPGIFGWENREKTGTSPGPGQNRDLGTQLYSVVRYQVPVPWHSILNHIRILRRKFILFYFYFCNLIIRFNLFTKKQKTFFGITPKSFLTALSERGF

SEQ ID NO: 127667 - protein, 133 aa, Heterodera glycines
MIKNFDENIMNFSQLIKLDLNLDKDKQLFILPELISELEQMQKNGNWNYANLKHIKMAEWNLLELALHKEGESKKWLEIKKLWNKWKKAFNGKFKNSNKMPNFKKLMDELNKKLKDLREKKQKETEKKEEIKG

SEQ ID NO: 127668 - protein, 238 aa, Heterodera glycines
MQFCDALQNAVHSALKAREVKRETIQKITELDEFKFLEAILSSLEYKGESTEKLKKFSMVFSKKSFADKCKSLSALLAILDQIKTEYNRSSEIISSKSAKIGIELNEWELENVKFGEILYETLKSHSNKVKYDEKHQLMEFPLQMCEQFIERLYAFVERNLAKNMPIYEEIDFIKTIESVVSEEEKELVMEKRQKSIWPSVNLKLFKLLFTMAIRLCCLQMEQKEFALSTLSFALKTE

SEQ ID NO: 127669 - protein, 336 aa, Heterodera glycines
MMHGPCSEKSLCWNKTKKKCNKKFPKQFREVTVINEDGYPLYKRPDNGRYIYRKGQKLSNQFVVPYNPFLSKTFRAHINVERVTDISVVKYLYEYIYKGYDAATIECVQIGEDGTKKILNYDEVAKYLEARYLSPCEACWRIFKFPMQGKSHSVDQLDVHLENTQRVFYRKNATDQEIEEALLKNSTLTAYFKFCLENPDKEIKYTDMPKYCTWVKKDKKWKYPRQGYQNKIGRMVPIHPSETEKYYLRFLLLNVYGKSFKDLKTVNGVEYDSFGKACLARGLVRDDEEWHKCLEEATYFSRKHAKGLRTLFANILVHCAPKYPARLSGFIQRVYG

SEQ ID NO: 127670 - protein, 103 aa, Heterodera glycines
MNLFILFLLNIILFLITKIDQIKTVNKKLEQKTFDEIFGEKWQEKEEEKLEEKREIIGKYYKIKEKIKQKGRKYTAKEWNKIEEKIALIFIKSLYIVNLFYFY

SEQ ID NO: 127671 - protein, 221 aa, Heterodera glycines
MNGTGAMPSSAPPMSSGTTTVSPANGCHAGAQIMPSADGGIIGTVGQSIGAGATVTTTAGVSVVDHQQQQYLMAAAAMNGFAPPHPHLGQFMLNGGGAPPTAMPPMPADFYGFPGSAAAVNHGPMMASAFAGGAIVGAGGAAGGGGPPFSPSFHHQNQHHHNLLNQHQMQAVVAEQQQQQQQLEQYMPHHQHHLHHHHQQQQQQLQQQYQQNNHAAATILQ

SEQ ID NO: 127672 - protein, 209 aa, Heterodera glycines
MIAAAPGGAGSTSGYRHYQAARPVDGWAAHAAALNGGGGADNAPPRVMVDSTSTRHTHVGTPLHGGGGGMAASTTAPLMMNSSGGRGGTPVKGSGMFVAAMPSPEHDGGYHQHHYDTPNRQYPHHNPQQQQHHYSASATRDDASSEPGNNNHLQQQSPPTPISPATSSGAVANGQLKVVVVDADTLINDDNSDNMLINCWEQNKNSDHY

SEQ ID NO: 127673 - protein, 51 aa, Heterodera glycines
MKANGQNGKMKRLDGKLMINGTKLAFTFITRTNSGKGFSTKLLAQVISLQK

SEQ ID NO: 127674 - protein, 71 aa, Heterodera glycines
MLIVPWLLLLVVVLALVIITIIFMQLVLAISRRRSIISGGEDGVHVDFLCPKIFGGKRKAPNPLTHIWQNL

SEQ ID NO: 127675 - protein, 81 aa, Heterodera glycines
MMRIIGGFFTNFAKYGNPNTHWTQKINMNTVFTTTNDTAPSADGQHQLHENDGDNDQCQHHHQQQQPWHNEHCGSDSEQSI

SEQ ID NO: 127676 - protein, 134 aa, Heterodera glycines
MAKWCVRCAAPTLSRWTVAFITAMGAGHRETEIEYQDAPLVNIKRSQKKADRSKGEGKGPRERPRKLRVDPHLCERALAQDGDFPAYMDTVGTRICTSTKIVAKVASVLTDEPFRLPKQCVVSTFSMKFYPFFF

SEQ ID NO: 127677 - protein, 39 aa, Heterodera glycines
SFPISPSICLFHAFVHVLNTDDAFHSLRIKFLINQILDL

SEQ ID NO: 127678 - protein, 26 aa, Heterodera glycines
MNGYSILCVMLLVELVVVPIVNGSPV

SEQ ID NO: 127679 - protein, 151 aa, Heterodera glycines
MTSSSESNVPKSENLGSSEMETAEEAAQTYLNNLRVDLNKIPSMKIPFLEPIIEKYVDEYKKSRQLFAECMQKILRKSKNPNQTVKIIEFKKTIEKEMNDLLKHTDLPPDQLIDLLNTREWLLSMKKTLARAKIAQHRPLMPKGRPWESLF

SEQ ID NO: 127680 - protein, 326 aa, Heterodera glycines
MPFLNIYFLLLFLLVNRTFCDEIAHWIESCKKIAQNIHSLATELDQIPDSLETEKIIEKINKLKNFAVQLSEFRNDEPILLESLVIEHGQKIGQFCHNLLICDAKDGEVIRERLRHGIDQQMARAVQIRQLIDTMLIDWEIWPILHNFELAEDPSNAVAYLIDELGQKIGKMHKLLANCGSYYNTDPFDEALRRLLMVAMDEEQSPIKKLDQCRAIVPKLMAKSVQEMLENLLMDLLEPTSPFFGMTFLAEIANELNVAENICAGILRSSKLSPMAQFTVNEKLQKLRAMAKAMFLEQYRTTIEEQIKNIGTQLKDGMGRLIHIGM

SEQ ID NO: 127681 - protein, 107 aa, Heterodera glycines
MFGREIGHFFFMPFSMGSTFRQLRIRSVIATWSSSSFEPTVPKNTCQILGLFGFYETCQILDLFGFYETCQILDLFGFYETCQILDLFGFYQKSECRNALACLSVIR

SEQ ID NO: 127682 - protein, 100 aa, Heterodera glycines
MKRVQLIETLKNVQNLFVITHNELAMIEMLETKKVMEQKLDELGQIMAQLQDNEKNGNGTPNDEDDQVAITERILSCLNVEPIEKGIEKEMTNFATKHLF

SEQ ID NO: 127683 - protein, 184 aa, Heterodera glycines
MSQRNFFARSPVYDGWSYGYEKDGHNCVDFVYEFVCNLFDGNCPPEKFFPKNFVEIDKKLNGSHAFKNKTIQLYGQFNECSLKVHELRIEYALAKHGKYGTPVVTYETGVVEDPFEKIMSLDDVRLIQEIRNEQKCHVESIESDGAVLCKAVLHVCSNKYVMCMAIKDYTASFTIKITSSAKTN

SEQ ID NO: 127684 - protein, 207 aa, Heterodera glycines
MENIFHFLSLSLFAAFALQNGVFSSQFDCYVFLPPIGLNPKSTSECPKGFQWFPSVQFCCISADQNFRPTPATDGLFYQQRYFSVPEFAANDSVPEGCIRAVHFQNESLAYCGPRPLSPSVERQIAKISHQFTDMLTIPVKDSLAQNIYCCSSDGKLSAKDQIKWQSVYHGTIAANYMLIAESGTKQISIRAACNKQSHQNLLGEEY

SEQ ID NO: 127685 - protein, 164 aa, Heterodera glycines
MGTLLSSTILKLKKAFNIGIMNCSEEPFRFSYRREMSTRMEDNSLFLEELARQTDEIRQNGLDAMPRHGSLTDKILELEEEVERLHAENRELNEQCTDLQAQLLHNSVECGRNLLADAGQPSLAAELSGTGILVRVIELHPEILEIKDDMNSSQSVASNGSAQS

SEQ ID NO: 127686 - protein, 46 aa, Heterodera glycines
INKKHCQRQCLPKKRQKIFRKKAKKIENLNKFTSEKRKKAYNTFDS

SEQ ID NO: 127687 - protein, 34 aa, Heterodera glycines
IYLNFQFFSFFSKNFLSFFRQELPLTMFFIYLEK

SEQ ID NO: 127688 - protein, 87 aa, Heterodera glycines
MDNPSVKDNPSLMDNPSLDNSRQIGYYQWVSFVLAISALMFHLPRHIDDALRYQRDLIARSRGVFLFALINVGRIYGKRTKQMQKLA

SEQ ID NO: 127689 - protein, 164 aa, Heterodera glycines
ADDIPPPPAVAADGGDVVVDLEQHVRQLIMSIGQGSEDAVHELSILIESFNQEQLVDFLQIMARMYVESGFSVDMPGGQEGITMLMVAASSGRVDFARYLLAHGATVGHLDATGSVFPLMLAAESGELEVCRLLVEEWAAEVNQQAIDGTTPLMSASSEGRLDV

SEQ ID NO: 127690 - protein, 42 aa, Heterodera glycines
MFCHVESPYYAELPMEELWKMVAFVRDPIERFIAGFVDKCFQ

SEQ ID NO: 127691 - protein, 68 aa, Heterodera glycines
MLVMSSALNFVMSLAGAVLFSVYLVFDIDDIMNHYNEEDYIIACLSIYLDIINLFLRILQILNEINRN

SEQ ID NO: 127692 - protein, 65 aa, Heterodera glycines
RHCKPNGSCGASDQCKANDTNHNDQSHIKIIPPIVGIVFPNFLRWQHLKWKYFVERIRNSRQITL

SEQ ID NO: 127693 - protein, 95 aa, Heterodera glycines
THFGQQLLSDSEVRQVLGFMVISGKNYSGKCNSTAKLMYKWHDKEYLGAAHGVSGIYQMMLRWAANRVGGIKLTLLCQLDALASGTCLMPLRSRT

SEQ ID NO: 127694 - protein, 40 aa, Heterodera glycines
VNSSFLHQTLNVAFGCNEQIYSLHLNYIIPTPDVERCIWM

SEQ ID NO: 127695 - protein, 40 aa, Heterodera glycines; identical to SEQ ID NO: 127694

SEQ ID NO: 127696 - protein, 81 aa, Heterodera glycines
MVELKVETMQMEQRDNASARVAPADAALAELAPFCYDYAAIYDGPKVKGWPTPAEGMARPIASSHGFSTVCSLLSRPLRPF

SEQ ID NO: 127697 - protein, 67 aa, Heterodera glycines
TTSFLHQTLNVAFGCNEQIYSPHYILPTPDTTSFLHQTLNVAFGCNEQIYSPHYILPTPDVERGIWM

SEQ ID NO: 127698 - protein, 53 aa, Heterodera glycines
MRSQKEMKKGGRRRRWPFDVHKNMMTIAQIQKAIKISSQGGNYGRNCCFCVGG

SEQ ID NO: 127699 - protein, 44 aa, Heterodera glycines
MAKYGPKYGEKLPNLKANKLQKVDYFKSQEKGPIIDYKAKNDQN

SEQ ID NO: 127700 - protein, 234 aa, Heterodera glycines
MQLINFNFNFNLVPVLPLSNSQGFYDKKYNYNKTYNYNKKPAYSVKKPAYSNSYRKLSNNDGNAGKKPSYGGDTVKNYDYSKQAAGNGQYKSGAGQQQYGDQSAAAYGGYNNDYDKDKSRPAYNYGDANKNGDILDCFLFKLILKNKDMMATMKEDMTTKSQSTIMMTTMTTTKMRRKVLAAAAAEKAAAAKAAAAKAAAAKAAVRRSTVMKSTEKTLTIRKDQCHHTFIHLTK

SEQ ID NO: 127701 - protein, 34 aa, Heterodera glycines
MPMIQFVFYSSSEENAHRKDYVNKAEILRAIYHN

SEQ ID NO: 127702 - protein, 82 aa, Heterodera glycines
MDGPIAATENYPNNEQTVIEPNDKLKFHCPECNYEMCRKCNAKWVEEHNNLTCEQFAKQQNEQIQRNLKSFKQSIEHISHLT

SEQ ID NO: 127703 - protein, 61 aa, Heterodera glycines
MCSSEHRTLLAFHFLLSSYTVSTHRCFTKSELGLKWLSAKGTHVMDAGGGEVWAPEIWASN

SEQ ID NO: 127704 - protein, 127 aa, Heterodera glycines
MRLCLALFIAASALSLGRWIEAGVVEDVKDYVDAFSEISAPAATIGEQLRKISARVSKLVQLGGPVGSLAALAMQKALEYYNNKHNVIFIFTSLIAPSLLAGERGNGRVEIVALHHGQEIRCIGPSS

SEQ ID NO: 127705 - protein, 53 aa, Heterodera glycines
IHTPLRKSLKMHKSSFSQLSWPSSPGMPMFFLYFSRTYIGLTQRQMLDGVDAF

SEQ ID NO: 127706 - protein, 286 aa, Heterodera glycines
LLRLPQNVPNNGTLGLLDPLILNMDLHRPPFFPFDPDSHPLGECAADQSNPRQFTQCEEGPTVLYESLAAADFYEFSGGDSSSQCPFFDKSIGKKCQNQTKNTSNGTVLKSIAASRNNNGPFTYLQNLTENYVRLFGRVVSLTGTIIDEDFDGIGDQRQKQRNKNKSVGNSSKMPTHFFRILFRCEDDLWHLNGINCKWTNATRVLAFVLPNVQRDLNCLVSCGGFSLSICSFKLPKRADEYLLVNTARVRDIELLTDVQFFAERMWYPTEDQLQWRTNISTELWH

SEQ ID NO: 127707 - protein, 269 aa, Heterodera glycines
MCPSGPPGYPGPPGDRGEDGLPGQDGEPGNPGLSGSTGFLGPQGMPGESGKPGTIGEPGMPGLPGVIGQKGDNGAPGQKGPIGPAGPPGRPGIDGKPGLIGVPGNGGNTGDGGLRGPPGGNGGGQKSDGGGTRKAAPIARGVEKRFLDDLRDGIWGQHFGQLFEAMGRIGKGKTNGGTADKAGRRTTAGQPGNWIFVRGENKWKLIDLQSAIPNFEQYKPLQMGKEERFPEDFMEFACNSLNNEICLTKFIAPANERPSTYASPEHSTA

SEQ ID NO: 127708 - protein, 173 aa, Heterodera glycines
MSIQDPSSADVKSQSAHLNAKIMHKSANVLVQKTFSNKNLETEQTESRVNKKSKNEQKQRKTDERQKEKAEGKSEETEKEKAIENEKKEKPKRTDQTTLLEAMPSSSNAPQKVPVPLIDRQRTHTVMTVEENVRAGIVAYLDTIGPSNETGSSRSKKPQSIVKPMPQQQREDG

SEQ ID NO: 127709 - protein, 177 aa, Heterodera glycines
MTEMDRTRSLERKALHGHATVTSRPSLSTQMEEEIAGTTNMIINGQDGRDEEKKETNWKEEDGGERRSGMNQRDEDDGRINEKEEDDGGRRRGMNSREEEEEDGRRKRGGMNSMEEEEEDGRGRKGGMNSREEDDGGGRSGINEREKEGEDGRGGRRGMNSREEEDGGRKRKKGRDE

SEQ ID NO: 127710 - protein, 45 aa, Heterodera glycines
MGTKMEGCDRNWCRFDNGGHLCSVYVCGQYGGRTEWHHDWSYFWR

SEQ ID NO: 127711 - protein, 223 aa, Heterodera glycines
LNRLILAPHIDTCDEINDIMMANVPGQAREYLSSDKPLDERPLDIDEIELEVAALNRRTDSGMPPHRLRLKVGSVVVLLINKSDKEGLINGTRIVLEELGDDRLVGRVINSNSVGGQVKLKEHAMSTRTKRLALKYERLQFPIKPAFAMTILKGQGQTISTVGIDLERDVFSHGQLYTAFSRATDGNNVRVYVFRSEGQLSANGAETAFSKFFLKLLGFKIFL

SEQ ID NO: 127712 - protein, 134 aa, Heterodera glycines
MGGNIRITFIDECQICSQSELTMSKLITMSPQQISQMRLDSDESDIAWFLGSVIHLLAFQTYPLEEWHSRNKTLANQCQLDGTFKMPQTSESFCMFLLQNSVNKMLFSAEKLQIPTDFPHGFEKEYAILGQIMM

SEQ ID NO: 127713 - protein, 58 aa, Heterodera glycines
MEKVGRPSDDSPTVISCRNQFYCISQFVSLAFFNVNFRDINCGRGLSSTNVAKSRKKS

SEQ ID NO: 127714 - protein, 545 aa, Heterodera glycines
MGAAAAVQRSFEMEKLAKQTVNVQLVWQRPEVRPDEVQTNLKKAQRVSFEWLINNKSAVADFLEAWEEDTPVEAKVARDSRAQCCSVGRVIGLAKKGYDRGWEDWESILDERESNVIPIPNYGGLPFREQAFELSVPSDIAEGQYPVSKILKILMGMGKDGAEQRPTVRLSSNEIAVGKLNEDQRITHGLFLDDESRVIFMQAPAGTGKSVSVAACIASVLKKDRDAAILAVSPLNVAVCELVKDTMESLSEKVPMLALFSGQGKGRYMDRIRPLGDNLLVEAVQRDGNVPSAEGTEPKKWSDNKTFKQYVDDFNTAPRRARERTTTAALLKQTKYRVYFMTLALAEELALDLGNVTYVLVDECGQATLSAVLSILTQFRSVKKILLTGDKQQLRVHLPSQMTVIRGKFGFESILEVLETAKGIDRTVLSKCYRLHSAIVRCLDAGVYSPAGDRLVPGRPDVEMSSFLNYMGPRIVAENCPIILIHQKSSTQMESISFSSHNPEQRETALGFLGIIQGTFFDSKSGSRACPCHHDSLRGWTIIGS

SEQ ID NO: 127715 - protein, 37 aa, Heterodera glycines
WHQLPPFFHVNEFHFLSEKELPGVKCNFHPSTILMDL

SEQ ID NO: 127716 - protein, 123 aa, Heterodera glycines
MDYLLARCNGFDSATNWDWNDALSPGELQRLSIGRVLYHKPRVAFLDEATSCLGFDMESSLYKVLRDEGITVVSTGQRCSLKQFHELELNLRGRHWTLVELDSVRSMVTEPSLGGAAEEGSRA

SEQ ID NO: 127717 - protein, 151 aa, Heterodera glycines
MQLAMFCVHVTATIIFLQLYLGFTEAGIECQLDGHCKDNAAQLLRVRCAQNATVAPSKSCCSQVYANPYAKCPIKGWRRKGYKGNVPVEIGVPSKKRDAGCSKGNPCKEGYKCVAYKKGDDHGFCWRGPQGDGGPSNFALAVAIAGLVILL

SEQ ID NO: 127718 - protein, 29 aa, Heterodera glycines
TVQMPFRSVLVTNGMCGDQWSLIFLMTIK

SEQ ID NO: 127719 - protein, 1263 aa, Heterodera glycines
MCSLAQGSSGTLSHNGKGVAMHRCPSDDCAGKDPPQRGSQKGNLRSVRWTPSEEKAVFEYWSRLEQHAMLNGSEARGTCAITRSQFLIHWDGERESRSLSDGVPEYPMRTERAYYERVRLLRQRGWQWDCANECLVIGQCAEPCRKPNVVAIKADKGMKRSLVKGKLLSLPHVMGEINQVSVQVEVPLPSVPASVPQVEGVESKGFTETEPSNKPSLEGNPAEEGLRKPERVNVPVHGIISDSERKDLKDRFWSAYKTAKRSVGFRPALKIEPNRVNRAQWEVLDSCVVEVLKKRETSNGYRGCVLRHLNVAVYAAGYVLAEGNKERRQVIRRQSAEWLLRQKSEINNIRRHIGWITDELTRRRTGKNPTSRQLSNFAWLQRRYQVLGKPVRETRDLEVQRERLVSRLRLAQDRINSSMDREERVRKRMLPLRRKLEEPLGDSKLDTKQARTFWASLIGERKEFGKIPELENWAEEVRSKVTDGQGFASDHVDQTVWKKILGKARPLKAPGPDGIPNLLWKRLPSANQALFKWLMGIKRKQLSVPSWLTKGRVVLLPKGGDPVDPANYRPIACLNTQYKLVTGMVTAWVSEHLTTYSILPIEQRAMVSGTWGCTHAMVIDRAITSYAEATGLPLYVGFVDFAKAFDSVSQPWIRYALKVAGVHKRIRCLIGILMKCWSVRYEVFKSGRVLRSAPLAVKNGVLQGDTLSPLLFCLSVAVVSSAVGSLFDFEVTIPGRGVMQQQNHLFYMDDFKGFAPSEASLTRMLVTLERTASALGLKINKRKCALVHPRERENEETGSDIPVLGLRDTYKYLGIEERFGIVFEDAWDRVRTKMFERMRTLLCTEHTFGELRAAFASTIAPVARYLFLNVIVGGPSWSETLTKAKDMDLRIRRLLWERRDNEPGWRFKHCSADRLYLRVQYGGLGFVSVEDTLSESIIYCWAYVQCRPELELARELFGTLNRSARSGIKQSIAKGARKVFRSYALLSKNSAQRVSDLDGDASPGFRVGEMIFMEPTRGARAIVKILRKENDSRRLAAWKGRPMGGRVVSLPELDQVHSYHWLIRARIGRRSFRDCIAAQEGQLKARELMCPHINAKAKWCRRCGDGRVETEQHILSGCAWSRTGTMLDRHNGVVRQVHTALCRKYGLPVSSHVVPLHAVIENEHAKILYDVALHTSPAGVLPREDGSTSYTGLRSTRPDMVIFDKKARTILIVEISVPWRENLVKQELIKWRKYAINSMIEPLELAEAEIPGPNLKHALGLAY

SEQ ID NO: 127720 - protein, 258 aa, Heterodera glycines
VSPASFPCCLPPARIPPHKLQRSNAGGRNRGTHWRFPSFAPQQRRNPVLPTGHGPYSVRFLEPVNPQGTTPTTPYLTSKALARPAPLAQAGTSRNCSSGTTASSELSANHHPHPNRKGLGLAQPVQHLGTFATRPTPTRLPARLTRPLEPILFPKLRIFADFPYLHYSRLEAVHLGDLLRISVRSGRRFKLPSHFQGPCGAHETPQEPRCFTGATSLSQAEPLPGTHTLNEKRTLARTPHDVCEFICVTAQNSSCEPS

SEQ ID NO: 127721 - protein, 104 aa, Heterodera glycines
MFAGGKFGGAIAKGRKFAVKEENKTRKSRLSFALPGQVSVLVEDSVDTFERGAGAFVVPFGVSGANESQGKTRDANTSLCADGDMSLLSEKKTQFTFGQFKKIF

SEQ ID NO: 127722 - protein, 73 aa, Heterodera glycines
FGPPFLGPGVVWAPVFGPRGRLGPNPKIEKCAFLKIKILKTTPEGTLATWYKLGLINIRSFFTILLIPNPIIF

SEQ ID NO: 127723 - protein, 44 aa, Heterodera glycines
MDSVSTIAKDGHGVVKYFCVASLDLPDDGGDNEIVAGAAQNNQQ

SEQ ID NO: 127724 - protein, 128 aa, Heterodera glycines
NRGKAVELEDVKFHQCVRLSRFESERTISFIPPDGEFELMSYRLSATIKPLIWVEVQLEKYAHSRVEYIVKAKSQFKRQSIANHVEIIVPVQNDADSPKFKSTVGSARYAPEISAFVWTIRSFPGTNE

SEQ ID NO: 127725 - protein, 201 aa, Heterodera glycines
MANAHLRRFSSPTTADFAAHLLCPIHWQGAVLERVINLVHHEPSSQNDNQQIAPSASSSSSGTENAPQNDQLLLITGGEMPSHGSDSGSATAGQVPSHGSESAIAEEGPSHAVGNDSASNDSAADSSFLMDTFSPFVNFLIALALFLFSVGAAGKVVPNSLFFFVISLLVSALCFIGATDGGARECYAYALMALVANFVSW

SEQ ID NO: 127726 - protein, 19 aa, Heterodera glycines
PINTNERTVKDPNDYLEKI

SEQ ID NO: 127727 - protein, 78 aa, Heterodera glycines
MAYENSMKKTQIGWNTLRLPSTRSPNTPAGSVKQLQTRKFLDNIFSKKHLPKKTKKLQVSWLIIYVVIHAVLMEKESR

SEQ ID NO: 127728 - protein, 61 aa, Heterodera glycines
GREAALIAQQIYKRARSARLRSRSCLNSPTNLETGAKRPYKPNKIKKTGAKRPFEAAKWPK

SEQ ID NO: 127729 - protein, 36 aa, Heterodera glycines
DVSVPSTKKAQRCLTCQIGRDGVLSTWYGRKRKDSN

SEQ ID NO: 127730 - protein, 29 aa, Heterodera glycines
DVSVPSTKKAQRCLTCQIGRDGVLSTWYG

SEQ ID NO: 127731 - protein, 185 aa, Heterodera glycines
MDTDDGMRRSSTDRGGRKRGGDAEDEEEEGEGRLVVAEEDDDEEEKKHRRRMERWDRVDDWDDDDDDDEEEADDDEEDEDGSPNGEVPPPPPGTLSYRRFGQENVLVERETHTPPTLWTLCPEQREWGGNGYPSGSDAGKVPTDSDEKAQREDEDGSTDWERAGNKKRSGMAIMQLRGWPEPDEA

SEQ ID NO: 127732 - protein, 137 aa, Heterodera glycines
MLKKLPKPFLIVYDDLMGDIDAKKLADLYTKKSHHNNFSVIFLTQNLFDKAMRVPRSNAQYIFLMRAPSDMLSIRNLASQMFPREQGFLMDAYKQACADPYGYLLVTLHANTDNLLRLRTNIFPDDEEKIVFVPKNG

SEQ ID NO: 127733 - protein, 399 aa, Heterodera glycines
MKYFVFGIFARLFYSFSFPSISNANASSSMSIDDNAFLAFLKGWKSFDKFYTEEVLLLGQKKEVLAQKFEVLLAALHSLRWDWKCHRIKNEKEKCKKYRNFAHSLYDYLFRVYAVFPAVKPIFMLKKQKFVKIGTLAELVNSLDRIRKFFFDTEFARSFEFKLKKLFMVYFKPKLKKELLENGKNSPISPIPAGLKVPKFINFDRKLKAMHIDQQFAAFVKEQPNSASNSGPLFTLVVNDPYGFIQQKLAQNYETAFGAVYYLRMNWHCAKIGKKFDEFGQLKCQEYRKYLDILCEYLFRLFSGIPAMKPIFKLKKQENEEIYASLIDVIENLGEIMKFFFNSQFGRGGKFKFETFLAKHYEPILLNMDEVGDYVSIGQLGDNSHAKFGKKFEFQMKNI

SEQ ID NO: 127734 - protein, 75 aa, Heterodera glycines
ANRASKELSNDTTMLDLVGKEKSYSPKTCASTYKTLLITVVTLLISTSTYNRKGCRNWQLFSTNFVQFSPRRITH

SEQ ID NO: 127735 - protein, 164 aa, Heterodera glycines
MPMGHAKGERMCQRKKANGKMPMGHAKGERMCQRKKANGKMPMGHAKGERMCQRKKANGKMPMGHAKGERMCQRKKDNGKMPMGHAKGERMCQRKKANGKMPMGHAKGERMCQRKKANGKMPMGHAKGERMCQRKKATGKMPRSKIINGKMAKGNKSKKTKERK

SEQ ID NO: 127736 - protein, 92 aa, Heterodera glycines
MDRRDSRRRRMREKREEGKQRERAETRDCYFVEEDGQESERMRFLKIPFLIIGPQNPDLKTHSFIVNVNSTVLFRYGVALSNFKKLTIGANF

SEQ ID NO: 127737 - protein, 614 aa, Heterodera glycines
MQQALDNIDESNDTAGFGTSHLRCAIVQVQSSMAVAMLKRFTKNCPWFFGISNGTPTGSDRRLRLGDEVVIVNFAWKSGYEVLWHLDQDGTSPPWLNAGNINIQATAIKANIANPTNIVPKIGIVLNVKRRGMRKTNVIQSLTVVAPGMKVAQSLPGWALGEKDWFRTGQAVLVETVELMRPNLWKVNQIYALPLNCPFGQVNDRKAYHPFVAVGIDQSPILHKFPFRRGDWDATIAQGEQAIAAAVTACLDKLEEDILRFTITAEPQVEYGAEADTAIITIRHRLDNKQEMVDMSKMWTEDQPIHVRVAAKGAKPCATGFIMNVERQESETGLSIVAKLFLAYQEAKNYDCEEAWDRIMDGELTEIEPLHSRKILMQRAEKFSVNLFTEMAKNTTTGLGTIMSILMARQGERTPPQNSWDELFVAKQPALNDLIGGQRETARLMLDSVPRVVFMQAPPGTGKTKVSVDIIAAHLRTNPDAHVLFVAPLNVAVVKAVEEMAKTMERMGWREDMLALFSGSGKKKYMLELNKIGPHLLAAALRAPQLFEELKDDQKRTVLRYIKACETSPRTANEGKAAQILLSKEKRRIIFCTLSLAEQIGTIFDETDMIIVDE

SEQ ID NO: 127738 - protein, 53 aa, Heterodera glycines
MHFCCGRHFTIGPIKNDEKNEMALIVFKMAQNGAPSEVQLDGNAKNAAENFTF

SEQ ID NO: 127739 - protein, 305 aa, Heterodera glycines
PSANGISSNSSRLLTIPDAKYLLTTVNKSVPGCPSLPHRLVPGCPSLPHRLMAICDIMAICDISADPGGSIEFMTECTTIDKPFVIYDADTNKCHENFDASSGCLICSFDASSGCLICSVDNMPAQLPVEATEQFGSLLLPYMMDLLNCNTDQPFASLQCRDEILNCNTDQPFASLQCRDEIKRAIITSDGQLTPGYKYIDELRLEQRFRRSAHKSRVVAVSSKRVLLLGAGMVSDPLAKYYASRSNVQLTVASDSSKDGQRLASLGSNIESVVVDVNKEPEVINSLISDHELCIDHELCISLLP

SEQ ID NO: 127740 - protein, 154 aa, Heterodera glycines
MAELFRPLDEWMVSTLPSRPGLYILFGLFSEEQQLRWLGRSLFEYPEPPNITNLSSNGTYSGSSVFKTCGAEKLRWTTLGLDYDWTSKDYSMEEKALPMEIKQISKLVIDGAFWLSFLHIERLLSSVLGSFPLVPDAAIVNYYPKNASISPHAD

SEQ ID NO: 127741 - protein, 96 aa, Heterodera glycines
MDLLEIIAQKRKQIEDIAIEHGSGAKMIRHSDLFKKEKDAYLERQKQLGKEQHLSVKGLNTEELLDAKFSLTGSDSMPRPEVVRLEGPRAAHSAFW

SEQ ID NO: 127742 - protein, 244 aa, Heterodera glycines
MNLALNPEEGDDPAYGQIFIVDTEHAMRAMRHANVGIEPQLLRTAYEVIRNVNPFAEAYMMMKEEEDEEVERARTENREPAEIKLLFETGRQLDRRLGYNVPRANEVAAVYVPGADGEVPNAKIVVRERGKELKILKSTDSMVTPMTYPLFYPRGTLGWDPEMKHRNSNRRVTRLQYVCYTVAIREREFNPILYGGKLFQQYCVDEYVKIEGDRMNWIKSNQKKILADAYKNVDNMLIRRAQER

SEQ ID NO: 127743 - protein, 66 aa, Heterodera glycines
IILTCTRISGIILTRARISGIILRISGIILTCTRISGIILMYQNKRNYSDVYQNERNYSDVYQNKR

SEQ ID NO: 127744 - protein, 16 aa, Heterodera glycines
EATPEGFGLPINLGAS

SEQ ID NO: 127745 - protein, 89 aa, Heterodera glycines
MALNRLPDSGHSDSGQSDNPTEVDNRTVGNPTVKCTKRLRKCHRRSEPIGQRGNLRRRARIRPYFGSVSNPEPGLEQKFENSIFRTSQF

SEQ ID NO: 127746 - protein, 367 aa, Heterodera glycines
MNCLFLILFFAFCPLFRIAFFSQLSSSAEIDNDALVAFVKGPSNFVQFCAAKGVANNESKGLLARVYGTHLGMLYHMRLNWHCARTNNSIHRMLYKRKCEYFRKSVDILYEYLSRVHNGGNAEVTRPIFKAESTSIQLTFVDVVECLATISNFYFCDQKMTNNYEIMKEMAKFSQFKLENEEQQLDFKSGKSAKQKNKRLKTDGKANGIEFEQKMEKMFRKIIIENAKLANGSSSSAFSSSTFPSSAFPLPISMCTVPIYDAALRVPIYDMSDAIEEELFLKFVNGSADFSAHFAAVPLDEIKKYETHLGLLYAMKTNWRCANAKNKIDNSCTKDRRYIDILYEYLFMIRYGIKSVKPMFETLVGQR

SEQ ID NO: 127747 - protein, 25 aa, Heterodera glycines
MVISFLYQNPSSYDAAEEITNMTWA

SEQ ID NO: 127748 - protein, 80 aa, Heterodera glycines
MKVSYVKSLDIFLGVCFFIVFASLLEYATVGFLMKRRRQKSSSTSSSVMPRSSTVCFRELEDGTLKMLAPMHHNHHQVNN

SEQ ID NO: 127749 - protein, 146 aa, Heterodera glycines
RMLESFMYARKFLRPGGRMFPTRADLHLALFTDDALYAEQQQRAAFWAQQTFHGVALGVLQEPALDELFRQPVVDAWSGAILASPSVKWTVNFERDPVERLHRIQIPFTVSFTNSPAKERRKFLKNLAFFSTKFARNFHFFFWRRL

SEQ ID NO: 127750 - protein, 57 aa, Heterodera glycines
MNDSRIIRGRKFNCSLTWLLDHYKLSDKYAIKKKIKLNNNFPNQPGFEQKVENFQFQ

SEQ ID NO: 127751 - protein, 43 aa, Heterodera glycines
MSSVRSISSTARAGNVLVLLDLYASGFASSNTSPTIPMLTSRT

SEQ ID NO: 127752 - protein, 104 aa, Heterodera glycines
SSYQGHPFHSFFEFSSGYPCTPSIVKFINDIYHPNVGESGDICLDLKQMWAPALTISKVLLSISSLLCDPNPDCALRQDIAIMYRDNREEYNRNAREWTKKYAM

SEQ ID NO: 127753 - protein, 129 aa, Heterodera glycines
MSLLRFSQLFWSALVSLALLFYGIMEMLRSIEEYKIGIYSYAFASIFCWDCSVVYSSKLLLHWTDFWTCVNFQADHTNVPLITLVLSIVLLCSSVFEIILHKFVLNDVDTECANMIFHQHQKKNGSAIE

SEQ ID NO: 127754 - protein, 137 aa, Heterodera glycines
MHLHAFQPANTFFAENSVELRRNPSDTIVAGPSCALAGFVALISLAIGRSPERFGLTGCFEPNGIISQVGGMEKKLMRLVHSGINNVLVPNDNYKKQMPSEMPTMPAMTWVPSLTLTFVVHINELWHSLFPLFLDAQ

SEQ ID NO: 127755 - protein, 18 aa, Heterodera glycines
MASNQKILFFVRMAKTFV

SEQ ID NO: 127756 - protein, 49 aa, Heterodera glycines
SGTGNLGQNRDRDLPRPEKPGPGPRFFFGTGNQDQPGNLEIQKNFKKFK

SEQ ID NO: 127757 - protein, 103 aa, Heterodera glycines
MMNILMIPDFKGPEHVHCGKCGFDFYFYNVKWQDCLVDAGMGPGQCWLGEDNIPPGALGKYNEKLLSEMDKVEKILDDPERLLDQIVGIVEDEDTIPLGAEVS

SEQ ID NO: 127758 - protein, 35 aa, Heterodera glycines
MSYTSDLFISSFSSIADHLFPCFTLNSIGTTIWFF

SEQ ID NO: 127759 - protein, 130 aa, Heterodera glycines
MSISTNSINCGDDFTPAENREVNGDAISLENDGQFDGNSETITDQQQQLKEFHEKFAKLETELKMAKLETELKMAKLELENKALKLKHQELVGEQKALKEKVIKIEQKNGSNFSKSEHIGGNECSDCPNF

SEQ ID NO: 127760 - protein, 226 aa, Heterodera glycines
MGIFTSPFVAQLRHKSGSPIAECYEVRILLSSLMARINLLERSLYEYNDNLPAPTRKACLEKIVRAKNEFYAKIAEGNLSHLRKTFCVMYQFAKFLEKSVAVGRLGEAIERWEATECQNENVVKETILAHRAQKKRTIFDIIISAVKKEEVMRQLREIRGCYTRISRYLEDQRMFKKLLKEADFYEQRVFLAHKNPSSSHYLNSQNLEILGRFYFSTFVFCVGALD

SEQ ID NO: 127761 - protein, 403 aa, Heterodera glycines
MPMALSETQEKSWHCFENWIQNLHFDVLKQMLNKQTIFFDNIKRFFESKPKEHTDKLMLFLHNKQNVENILRLLGIDFEANGSSDGDPTERTPGAEDDDWPSTDSPMGSTASPVVSPSTERKKAKRKKAKRSKNQRKTSIVEHEIDEEMFLSSETPKNGTESQKKQSEEEEKPSEQEEDEAVIEAAEIEELIGEESSKDEAANGGKAQEKDEAKIEEEPTAERAPDKEEDEEEEAVNEENGPKEDEEEETVETGELIREEPSKEEAVKGAKAPAKHEAKNGEEPTGSAPDEEEEEEEAVHEEKAIKEEKESEEEEAAVIEEKGAKEEEAVKEALEGEKLTGDKKAPKDKVDIGKKAFEGKAVIVKEPMEKEPLKNEAEKAENEKMPEHSLAIPSVQKAEREMD

SEQ ID NO: 127762 - protein, 508 aa, Heterodera glycines
MAKESVTVPGEDASVRAIVHLLDLGIYANEIWHRLNAIRLVEQIWPELGILQSEVAKIEGQWAKIKGIKLSLKSQWTELEKYLHQMLKQLLVLMDKKKFPGINYDGVANDNEGELLREIRLLKDEMHLRNLAFSLAESKSAQTIWHSLCPAQSASFLSLLFSHLFRKHLHQRVNFAMKENNQQKIDVKLYYEFRNNKNLKRFVPFKMSANFATKKLNQISELWQHMAFGEDRFNELDIYNLKNEIAKGNNYLIFDVNQKAMVENIIREMDELLKNWKENLLALQRIQKDYFNSVPQIHFTYKTLPVTIMAILVPNLGQEVPNGSLDVQKIKTIAQKFGDEIEKLIRADHLFDEGQFRISQRVNDQTMEQLANSIVHADFTTHAKIHWFLLDKLDTTQKEAASTVLNRNINNHNNLFINFAFLLAYLEQWAKSNHINGEHIGFLNFNILVVMALATAGSIDRNLCPQKGRISELDAGQRMVHKKATFAQKDAQGDPCRIGNGHHYADIP

SEQ ID NO: 127763 - protein, 56 aa, Heterodera glycines
MLDFDDKEKSYSQKHAGPKCAGPTEHFCNYGLLKLSHQRQSWQDPVDPYRPSPGTF

SEQ ID NO: 127764 - protein, 28 aa, Heterodera glycines
MRDREPRKNPAIFGRQAFSQDIYDQSRR

SEQ ID NO: 127765 - protein, 142 aa, Heterodera glycines
MAEKSMRAAEKTIFESPCLQPEGMRRNVINELESQEERERRKRFATRTPPSGQAFANTVWAEKDWKKDDEGEKDEKEEPVFTKIIKIQRKLKEANEELKMLAKDVERLVSAEKSIAEKEKKWDGFPTNVNEFGEAGTSNRWR

SEQ ID NO: 127766 - protein, 59 aa, Heterodera glycines
MFFLMSFGINGIGLYYCAWLNNVITPVNSSILAPIINMAKTEKAKRKWRFLKNENNLED

SEQ ID NO: 127767 - protein, 145 aa, Heterodera glycines
MGEVRFLRPKYYAAALKQREEAEAAAKKAKEEAEAEAKKAEAEAKEAEKKEAEAEAVEKKEEEGEVDKEEVEAKKEAEEDKKEAEEVKKEEAAEVKKEAEEDKKEAEEVKKEEAAEVKKEAEEDKKEVEQDKKEAEKDEAVKSEL

SEQ ID NO: 127768 - protein, 95 aa, Heterodera glycines; identical to SEQ ID NO: 124528

SEQ ID NO: 127769 - protein, 89 aa, Heterodera glycines
MHVDFDPLQVDWSTFSSEYVQFGGYNIYRGLPYQRGAGVGAVFRSLMRYLLPIGKQIGSAIGRQGMESGNQVLTNVLEGKDLKESLVSE

SEQ ID NO: 127770 - protein, 286 aa, Heterodera glycines
MLLINKARRWAREEYIKRKTKEKRGVRDEELLLQAMLTDTGTLVDLNNVAQGLLAREKSAATSNVPLRMSADDTNSYQEKLDEYFSKLSDKNLNILDELGMTKLNAEIKNLTEEERVILEATKEMGTEAWIQAYREIRLVCQFNYDVNRNRFVLNTDPRYVKKVQVSPQLAYILGFNNTEFIQSENEAKFMPDMSGGVSSFHVYTPDLIEPMMIGDVTAPVLRIVTIRGNPDQVVEEQFFAIQYHKLLLKEFSEILIEIRTNSGILMPFQYGTCTLTLHFRKMSYF

SEQ ID NO: 127771 - protein, 78 aa, Heterodera glycines
MLLTTPISLSSSDDDCLLMFVRCPIARDKSKWTKWEKEAIGWHICDQRNIIDSAIYGEDEIGDGLLDATPGPSDQQQK

SEQ ID NO: 127772 - protein, 61 aa, Heterodera glycines
MIKLIGQNEAKSWRRKVMTLRYRFQCPFASLEVFVDVKVKSVADQRNSEAKLRSDNIIRQS

SEQ ID NO: 127773 - protein, 137 aa, Heterodera glycines
MAETNPKWKEAKEREAAAETMRRIYASQQRDHSPYITDRAKFEVFDKLEFRGPWDADILRELHKLAYKGSEFENDVWVGKFRGEYGALEPEGMNFSGVKRDKVKDGVEELVKWMNLCDATNMPTQGFAAQAFLTFFS

SEQ ID NO: 127774 - protein, 132 aa, Heterodera glycines
MANGSDKFSKLPQLASPSLYQICLSVDVDTCKFKGNEIIHLEITKPTNFLTLHAGALEVEKASLKLEDGTVLSDLKRELDTKWTLLTLQWPKEVKPQKAELEFAYSGQLATNMQGFYKWATGKNNLKKQRGK

SEQ ID NO: 127775 - protein, 39 aa, Heterodera glycines
MLPLFWQEINTNGKVFRELEYVFLMADLKKNKRDTEPEK

SEQ ID NO: 127776 - protein, 127 aa, Heterodera glycines
GTAETRGLISVVDRPDPPEGPITYPATTKHSITLSWRPPKDDGGAELSAYHIEFKGLDERDWERVPDHVTLPNYTVRNLEKGAQYQFRFRVFAENMVGISEPLNGEPVTAKDPFGPPGPPSTPEVTA

SEQ ID NO: 127777 - protein, 45 aa, Heterodera glycines
MIVRAKSSIPQRNTNFKFYKLIENKHSKDILYFLYKLRNVQEVRL

SEQ ID NO: 127778 - protein, 88 aa, Heterodera glycines
ITPFDWFFDWVRLYRNSLNNDTLFLFSKLFFNALVSLGCLCIVIMEMLRSVEEYEVLSIVMVCLYVFELFYRIRDIATYAIEEDDDDI

SEQ ID NO: 127779 - protein, 109 aa, Heterodera glycines
PSTGLLADAFQDDIYQFFIGGVYSISFGCICCYVTIFLIVRLKKSVTQQTNTRLLRSLVIILSINIGGYLGTLIMSQLIGTIGQVYFTEYRQLFKKELRAVKDHFFKRN

SEQ ID NO: 127780 - protein, 152 aa, Heterodera glycines
VYRAKYHRGRMLNRPYEWVFGMIQRGSNKVRFFPVPDRSADTLLPIIAENIEVGSTIVSDGWAAYGGINNMQQQYNHEWINHQIYFVDPANPQIHTQGIEATWRALKQSLKHLHGTTPELLPTYLFQYAFRRYHENKKIFQHILEEMRHNYP

SEQ ID NO: 127781 - protein, 237 aa, Heterodera glycines
FICGDCWLLVFDFLAPSQLGLGIALINRRFDRIVDEHFKTRKWKLGKMRICHKIGKNGTKQMQIVNSDGNPLPILQNPLPNKVVGFRGITIAYIDQNVIAFLRHFHRFFAVCSTDLYVITENVRISEFILFDIWPTLRDAIHVINVTSIVFRRLRQLVPSLLNDCPSLRGVSFCGGSLPEFPPDDSANASDGQAVTKWLFSPRPDGLPKFLRYSLNPPVIQWSSTMKQIRAVIMLHI

SEQ ID NO: 127782 - protein, 283 aa, Heterodera glycines
EDSSSGNIISNRVGGPPPMTAHCGGNCRMLTGEPNLFRQGAHQQQHGYGTYGYGGGGGTVPSIHSACHPICHKSCIHSCPSSRSPSTGSIDQQNNNNNFGSGGFSPSEFHHQQHNQPMPSMDSLKGNNNFNCFPSKCRANCLGACSRIFDAQQRQQQQQIRENFVPSNGIENDIDVEPHYQVEMGGGQTKLSSPDHGNNNNENIMSTGRNVCQCSPSAANVCECQEPCYPICVDTCESNCLQQQMQQSPANQRAQCAQFCHLECQHDCAMEQQQQQRVPARKA

SEQ ID NO: 127783 - protein, 92 aa, Heterodera glycines
MFGRNYGKENKHKAYGNEREAYGNGRNKDKDRICVQRVGEVNSETEFVEKSMGPIRVDKCTGQEENEPTKGGKKPRRDKPRTERQPRRFWKS

SEQ ID NO: 127784 - protein, 79 aa, Heterodera glycines
MVPSPVVVPDVEADAFRTMLGFIYTDDLSGMDGDNLFDVLYAAKKYNIVGLVNACLDFPIPSLPNVFFAFAQARFLEEK

SEQ ID NO: 127785 - protein, 48 aa, Heterodera glycines
MAPSPKFFDRFHGIGNKSNIWYVNYEEIGSTFSDYCFILGMIIISDSA

SEQ ID NO: 127786 - protein, 91 aa, Heterodera glycines
MKMIVKKQKQQSADEIAVFAPSLSVPPICISPLHIHRFISAPPLLGLPPSHLPSHPPPLSLHRTSFTPPPPGPTAWTMPLKNDGRKTFHIV

SEQ ID NO: 127787 - protein, 145 aa, Heterodera glycines
NKEEESKDERKGISQIPVEERRPWDGVGEKRVIINAPIAFVGDDEVEPIGRTFQDNGLRALVLVHSLRDVVWWHRLPEVVTINDVCQMVVVRTTEWAEHIRPFLSLLGRWAKPAVWIGSTIHVEGVAWLEPAQTVELDINRLVFM

SEQ ID NO: 127788 - protein, 409 aa, Heterodera glycines
MSDIYVERIETAKYAIELYLDKPLPILPQGVLTSQQRHNLICDQREWKEVADEIQTQVDEIKAARALYNQEASTLHGDEKTEFQRQYRASVNANDLQNLLRRANHKLADTRTLKGNIDRLLQDGPGGTARRNIALPKLSLKEFDGSDWDDFWPLFESTIHADADLDYVQKMSYLDSLLRGEAKKVIQGLLPFSRDNYDLSVSLLKDKYGKNENLIRDLHNQLARLSNSKSLGDDMKLQLELERVCRQLEHYNQDLSSPQIYMSLEQKLSKKVLTRYVDLKNVKLSAMPHGSDWSTDLFRDTFKAAIEQLKQINDIVQRANPEQTQHTYKREKHKSEVKESTLNLAVIYKDQEKTDDRQPSVAVKPKPWRGTSTSSEGSSSRSSSKSSRYGRAPGRKAGSPWPNESRRRE

SEQ ID NO: 127789 - protein, 1426 aa, Heterodera glycines
MCYICLFNNHMARNCPRKLRKCFLCQRTGHHPALCEKRKLMARGQVATTTSKKQENTSTNVFAIQSCMKNPIQPLRPIDLILPNIGKEKLEINTRSVENLDSDHIFENSNTANLVQTYQKAMNMAEKFWQNWKDSYSLGLRERHQGNKHTPGKAPKLGDEVIISEPQTPRNCWKLGKIEEILSQRTARVRISEKSIIERAIKHLYPLELAEKANNSDSGIKQQEHSFVKQIHYNWAKGPPQNKALVKANSPNHYRWAKQPPKIINGITNVTCISEMNKDFDAVSLDCEEMERDLEDENKEEESKDERKGISQIPVEERRPWDGVGEKRVIINAPIAFVGDDEVEPIGRTFQDNGLRALVLVHSLRDVVWWHRLPEVVTINDVCQMVVVRTTEWAEHIRPFLSLLGRWAKPAVWIGSTIHVEGVAWLEPAQTVELDINRLVFMGAPRITQRGGSALYKKRCQQPFSDDRSSGATKSKRFRPVEDQPSHSEWTQEIRPIRPVEDPPSHSRWASNPRLHRQQQFPVKAVYDFWKLESIPPIPPFINDRAPFCRRVRVEERGELLGFFNQQFYFSNFNEAYEFVIHGRTYRCVEQYYCAQKALYLKRFDAADAIMLGTNRYGKRISAFEMKKFANMNGEDEVTVQEWTELKIGIIEEALKAKFSVPDLKDVLLSTGSAIICELSLDQFWGVGCRPGLIYDKWPTADIQQWNGSNTLGRLLMQLRDDLKEATPKGTTRAVQPNYGWPKNREENFQNIPVEEDVFDLKSFKNLEITSTDEAKRGDKPKDSTNANSISELLMSHADEVAETEEKTNEKFALSERMNQQKYPRTEMELRARGNTPVLKIKLEFHVDLTIGRSEKLNGVYNSVWLATLVRINDLFSSVCLLIKEWGTDINQPEFGSFNSLSLVIMVQSYFAEQKLLPSLFRLYPDIYKEDKIVKFYDAEFHQKLAEDAKAKCPQSTSSLIEVLTNFFLWLDDIDFARVKLSAKSGKIDRTEGNGLQSVIIEEPFDAKSNCSRSLTDKEFQNFKGLLRRTNTHLRAKDWYTVKRLFRLNPVNDVAWSMTDESEDDSFDKIAVEQINESMKRFAGIKPDNVRTTHNVRRSQTEDRDFERNFGFPKELTLYRPDQKEYTFWGHQCLLLKHSVQFWTNLLNDPFDIKSQEMMPISAEECQEISKTKKCRFGILVGDSDGTMITENKLIYEHSWWSWGKKSVETVNCIVNNITIIGYPGSQRIDSIVGDLQHCQYDDGRCSLHDSIVVWDVDRYHTSAPWAARHGHCVFKSFSKKNGTIYRIGWISDPPDLALTFGENPTFITSCLRRLVVSQQGFAIEEREFVNFNRQLDRTRRNVNFDEPLDGEVRTSQLDAQLTALKVTLVRKDKPILAYLGPKALIISAEARKVDRQTDRYKHIVLEGRLYEIDQVLGIKTPVKEI

SEQ ID NO: 127790 - protein, 21 aa, Heterodera glycines
MRTRPIWQVKQRLLTSQKKGF

SEQ ID NO: 127791 - protein, 42 aa, Heterodera glycines
MAAPKWAVPVFWFSFLTFILNTKHNEYKHIELIIRRQLFRPM

SEQ ID NO: 127792 - protein, 484 aa, Heterodera glycines
NIRRYNSMFACASISCFRFKFQSPGPPCYKIQGQIYHKFNQNAMPKDNEIPTNGQLYFIDSEEAIDIRSENYKCRSEIIEFLETFLRKINPFAQSFLMMKEVYKKEENNCKENGKNSKNYDKRRYSIPRCNEVGAIVVCDANDEIPPARIVVYPKGEKQLKNIYPLDKCVDQMCYPLLYPIRSEGFNVNIKNLTGKKISLCDYQILLFFRENVNFFPHFYAKNFQQWLVDQAAKIEWDRLEYIRTHQMELCSSNCLNVEDLLKNRASKTGAIKKVILPSTFTGGPRSVHNFMDALAIVNETGKPDLFITFTCNSNDYDILKCLLPNQTPSDRPDLVSRVFHLKKNHFLDLIFNKQIFGEVIGDCWVIEYQKRGLPHLLLITLHPKNKWHTINDIDNFISAEIPDEKKDPEHYKIITNCMMHGPCNEKSPCWNEKKRKCNKKFPKPFTENTKITEDGYPLYKRPDNGRCVYKKGKMLTNQFVVPY

SEQ ID NO: 127793 - protein, 128 aa, Heterodera glycines
QLGQSFNYTSFALCFRSPEHIVLVSHRDVIVHVNELLGGTWAVVDTATVNKYVQYENGNVQQKEDDDILSKLVIEHTGVHVRYKYQVNPHQPGKANNYIGEAKRLLATVEPFLSPIHRRQMVISKLIM

SEQ ID NO: 127794 - protein, 57 aa, Heterodera glycines
MSIFKNGFVSKIWRGQSCYHSHLVAVPLMGDGQTDRHGDCRLIEHPKGSRMISRKLD

SEQ ID NO: 127795 - protein, 34 aa, Heterodera glycines
KVVEKLVKHVTLLNALHDRGVDNNQENTSDYPNF

SEQ ID NO: 127796 - protein, 367 aa, Heterodera glycines
MSSSSSVLQDLLRDHSSEIGNWSEIVNNHQDESSKPEPFTNIDHNGPFYIFVPNLTLDYAVDSVNMEVYKMFGGHKNVCNLDSENAFRCLRLSVGEESVAIIHADGTGLRKLCSSVEDGGEEKPKKSPFGDAKPINTTKKLLSVEEKLREESIAAAAAAAAAVAAAAASAAAASASGTSSATTMSFVATATPAAAASGTSVPVAASDSGTSSTTNASLVPAATPAAAAPAASGTSVAAQPARGGGAISASRSSTASAPAVAAAARSAMSSVSRSSSSATASVAAAATSATSFSSGTPSVGAATVAAPAVAPVYTAHSNNHNNNINSSTNTIGHGHGAVASAAAAKKPKGNNKKKKKSFSKNVIIKII

SEQ ID NO: 127797 - protein, 37 aa, Heterodera glycines
MTTETHTPRKKKPTALPTALFQSPSLTRNQDRALVEV

SEQ ID NO: 127798 - protein, 146 aa, Heterodera glycines
MATGVATNQQGMLPFPSRNLRSVSIPVRTARDRIERASGTLAARIAEAREVIDQDLTEGEAGYQAARLLAMERGLKEATQIFQGHFEIGMAAAGAEPAGHQDFFYDILTTPLPAATKQLQLRTHPTPAELLQIADEHIGDLTGTRG

SEQ ID NO: 127799 - protein, 45 aa, Heterodera glycines
MNRAALIFLRLVKQLRENVLKSIDFEEMAGDVNKRRLIQKSVFIE

SEQ ID NO: 127800 - protein, 21 aa, Heterodera glycines
MNSQTSCGVRALVRRSGTQSA

SEQ ID NO: 127801 - protein, 126 aa, Heterodera glycines
MSIEGDDVRGWEGQTMFYMDGTYTLPQFKTKLATLLGGRAAEIMFTGTSVGHVQDEQEWLRLADHVNTIKTHSNLSPGSELGKPMVRCGPGTSRFYGILGPPTVVSLDGHQQRGRASVSLRSQVLN

SEQ ID NO: 127802 - protein, 24 aa, Heterodera glycines
IRLALMPVLSMPRFSNTFLSSLTF

SEQ ID NO: 127803 - protein, 434 aa, Heterodera glycines
MDKQNATDGDQQQQNVAPVDGQQANDETTTTVADVGQQQKQPMETITNHGDGGDGIDHRNAHDETTVQPVTDPITTGQTGDGGSDKNNGHGNGGDHQMDHDEPDIIIETPKKAIKTECVEDVVLIGHTASASAVGSAGRGAGNGHKAAERSDESDCNCRNNTVFGKLCCAINSSFQHRSATESAFSATATKVLSVATTNANTAVTNAPPLLTSSSAGSTGDDVILLNSDQQQQRQGKIGKEKDAVAAQPSDDSAGGKKQSAATPTGTTSGTSTAQLVDGNNLSSSLWIRNITTTTKAADLKALFSKHGKVITAKIFTTKNKQSPTCFGYVTLADAETANADRSNLSQIGTQQQQQQQPAAASDGSGAKTGTAKSGGSSKAAGGSSDGGKGSGAEPSASSSSSKKVRPRITAATASPTQRQHRNNNTNSAKTARR

SEQ ID NO: 127804 - protein, 144 aa, Heterodera glycines
MLSPFSYDPFYRRSLWPMATHVGNVLSPFRQLERELDHFFEGMQPMLRDHVAQLNVSDKGDLTYKVDVSGFRPEEINVEVDVSGFRPEEINVEVIGNEIIVNGEHREQNDTKTNFILNAQRNGGSGGHCRGGRRLDTLHVVEAL

SEQ ID NO: 127805 - protein, 52 aa, Heterodera glycines
SVKHRGIYFGLHSFKGIYFGLQSFNNMQSVQSSATAAVTAASTVPLSIQNEV

SEQ ID NO: 127806 - protein, 36 aa, Heterodera glycines
MHQFPTLSVLSVFPFASQCHSVLLSDLRNLLQLFSA

SEQ ID NO: 127807 - protein, 64 aa, Heterodera glycines
MTFQKLIRGTKIVGRCVGRGTTVIRRGATVIRRGATVIRRGATVIRRGTTVIRRGTTVIEEVQQ

SEQ ID NO: 127808 - protein, 28 aa, Heterodera glycines
MNFIDENTTIIEKPMSKNGKSVSPARTT

SEQ ID NO: 127809 - protein, 78 aa, Heterodera glycines
KQAQPLAECFGSAFVSVILILSFFLKFSQLKGSLLCVTPFLVLALGVDDAYLMLNAWQRLRIRRALAFLAQFTQILVH

SEQ ID NO: 127810 - protein, 153 aa, Heterodera glycines
SEKSDVVNALVLSETFLTDEVVRAGLTLLPFLLIGFSIMVVFSSCTMSISAFYVRQMGAQKILLAVVACSCPFMACGTALGGMFWLGFRFGSLLCVTPFLVLALGVDDSLLCVTPFLVLALGVDDAYLMLNAWQRLRIRRKIFGILPAVHIRH

SEQ ID NO: 127811 - protein, 166 aa, Heterodera glycines
MPKQHQQQQQQDQQHQTDVIEHDHCYARPTNQLWKLKRQKYMLTFKLCKMCAQELYNRKDDITECNDGGVDLNFHLCKHCTMLNMRLSDMNSVQFMAYHPRNNNYNNTNNRNKNRNNKNNDNDENDSQNNFWYDNYGPTYCRGGPRNNYMQGKRKCLERIDMDDMN

SEQ ID NO: 127812 - protein, 156 aa, Heterodera glycines
MSAMIKLKKFHEFTQKIICIGRNYRDHALELSNPVPKEPLIFAKTSNALLLSGGEIKMPSGCSELHYEVELGVVIGSPGSRIKKESAFDYIGGYCIALDMTDRGMQDRLKKAGHPWFLAKSFDTSCPIGEFINKSVIQNPHDIEIYCLGIMNPIIF

SEQ ID NO: 127813 - protein, 176 aa, Heterodera glycines
MKIRILFIPIIFLIIKIHQIKTENKKLPQKSFDEIFGEKWEEKEEKQRNEENKREIISKYYKIKEKIKEKGIKYSKKEWDKINTKIAKSLGTNDNYIKKWIKEFGLQRNKCHKSKSDEQKLEIVQKFIEMSNEYKQNRKYSRREWQQNYEEIGKKIGVDRETIQNGRNNLALAVNE

SEQ ID NO: 127814 - protein, 39 aa, Heterodera glycines
SMSNYGKNYSDSLQKLTITIFFEFLNKFRIRQKYPQKKI

SEQ ID NO: 127815 - protein, 55 aa, Heterodera glycines
RDVPRFRISPFALFAFFGVSHFAFRFLARNATFTPLRIGLNSHKIFQNFTYKLAN

SEQ ID NO: 127816 - protein, 36 aa, Heterodera glycines
VLPSDPENPPSSDKIPGLSVGAHEFTCHVIPYFDIQ

SEQ ID NO: 127817 - protein, 50 aa, Heterodera glycines
MALEAMDLDLSTDGNDSEPSLADCGGPQQMKNAVPHLMIAYRALTRLILT

SEQ ID NO: 127818 - protein, 69 aa, Heterodera glycines
ILFERLVALRPHPWGLLITFIELIRNQRYGFWKHEFVYCATEIERSFVPQCCKFLQCKRTGKPSLERNL

SEQ ID NO: 127819 - protein, 150 aa, Heterodera glycines
TSAVSAAASPCARLCLPLAGHHWPSQFHRPSALGEPGFGAYKCHVHPTAALSSQVFGPLFAQCSTAKAHCLHLQGHSACAVGAFARLSRFYPVSPPFIIRLSIFKEILCEYYYILCDVIPANCVQLRNLVLSAYPCDMRLPDPFTETMAR

SEQ ID NO: 127820 - protein, 79 aa, Heterodera glycines
MITSFYRFSVHGKGINVTNPNSQLGEFSYNPEMDSTFQNWLDRYGPFIQVDGKDLPDQMQVRLLLGKLGSEEYNRYAQK

SEQ ID NO: 127821 - protein, 192 aa, Heterodera glycines
KRLKHRSDNFLGSILFKRGIDQFSSSPLSDKSDRFSYSSPSNLSDHRSEEAKSNASENDSSILSEQTENEITPAADFDYGQPSNSSEHFSYSDEEMSYGRATTGAHDKRTQPNTVELSRTPSDKVVRKFGKVSKLSNLGEKLHLWHLEKTLDMRLWKLKMKDASIVRHFSGKKHDQAFPSDSSTGSSISDQK

SEQ ID NO: 127822 - protein, 180 aa, Heterodera glycines
MVLVSEFCAQFLSCPTKSLRDRLNHPEDRVRVLQQLIGKKVQTTYKDRNGMRKSFLVGGMTERGAAFEPAYGRLRKPFNINVAAHFYARHRVKLHYPYVPCIIEGFTRGEDRYYPMELLEIVDDKKGGRLFGRLFTEIEEQEEEDTKSEASHSSNSSYLQFNGKGCKWYESIDEITNTGR

SEQ ID NO: 127823 - protein, 109 aa, Heterodera glycines
MTKHSAIVSSCETPPSSGAQTPTAATDPQNQAVPETVAAEEQTQQQQQPKRKSSLNSMVASALADAPATLASLFNVPSSSSIELAAQNSEQQQRQQQQNNERKSGEQAP

SEQ ID NO: 127824 - protein, 23 aa, Heterodera glycines
MSAMFKQNKSMERDNKIHLNPPE

SEQ ID NO: 127825 - protein, 221 aa, Heterodera glycines
GNGEMEAMFRVLAKLYPRTYFIGIGFSMGANVLTNCLASGLDPSISSRILLGISVCQGYCASDASSLLFDWQGGRRLYNYIITESVKRLLRRNYAMVVLPHVKSGLVDERKIWSSTSLLWLDEFYSRRVHNFASVSDYYSHISCLPRIKDIKIPMIFINTLDDPLVPEALWEPVRQLCETHPLHAFVLLKHGGHLGFLEGNSLRPRSITWLDRFILQVAAA

SEQ ID NO: 127826 - protein, 57 aa, Heterodera glycines
QRGIFLVSLAPRTANPNNSLRICGSFGPISAHGGYGSFCLDCQALCDKFYSMLLNET

SEQ ID NO: 127827 - protein, 399 aa, Heterodera glycines
MPNTPEKVGQKQSETQSKKEPKNAKPTEKSTQLQMLISNEKLLTVMMKYVEMKLKDMSKQYKEFHERVKQWKDDVQFIKAAFGEDKQMYKKYMEMAVTWPEKKSKGTPEKVPKSLKQTHLDNLAQMANKFEEFRQVVKQWPDSGCFMTFPLEKNVFNKVFLFDHALTLKEDDLQKELATGLYTHAEFRKESPADFFNNPDWSQKKLEDAEKDDDEDEDDDKEEEEEEEDDDDEEGDVRMATNALLEALLKGRDGFGKEATLNLRNLPKWDGKPNQSKSMWQMAKKIVRNLIKFVKWPLRIFWEYSNKLTRKVRNAMKSKEEKEKMRKKLEEVKKDGMLYKIYQMLDNSKNKAENFDEKAKKNMEKEGMKPDEPTIDHSAHEQLTDKDKQQHPFTFLQGE

SEQ ID NO: 127828 - protein, 136 aa, Heterodera glycines
DGAWDVSKYCDDISLRMVSQSEDALDLEFDLVNVEAPIANALRRVLISEVPSMAIEKVFLYQNTSCIQEVPSMAIEKVFLYQNTSCIQDEVLCHRLGLDEVLCHRLGLIPIYADARQFTFPPPPNSSATQQINTDI

SEQ ID NO: 127829 - protein, 74 aa, Heterodera glycines
QILKSIKSFSIPFTRPFSSLPKCTFRPIHKTIRCPIGLCFVPGFSPFISNCADLSKISPAPRKHSIISFRLTKR

SEQ ID NO: 127830 - protein, 277 aa, Heterodera glycines
FHEHFDTDAYLKDFYARVDDAAMQMDFYARVDDAAMQMVLFHLPNIVARLGSLPSLLDFGSGPTIHVAVCFRHTAEEIYLADYLPQNRDELCQWLSGQSKFDWSTVMRIIAAREAVPLSIIAAREAVPLSEIRQMEQKAREKVREKSFCKTVQRVSINCPNLFFCPSSAITTFFTLKYCCLSSYEYAWQSFECPFAPDGVLIMGGVLEETWCAFGGRQFKCLFVSRKLMMECLRGAGLILEDQLDNELFYELDDQLDNELFYELDGMYILVARKMAE

SEQ ID NO: 127831 - protein, 136 aa, Heterodera glycines
MPEGGYERAENQSKIAVKYFEWLAQRKGVKVRHACNGGEVEFGGLKVDCAIGAEKKIIEFQECDVKEELKKNKEMKKFFESVPDKGPINPRDAYAGGRTMPFCLYAKATEEMEISMFDIISLYPFVNYGKNLHNFC

SEQ ID NO: 127832 - protein, 79 aa, Heterodera glycines
MSHSFSSTERDQMAQQTTGEEMNKMKQQMKESYEELKRWDEAERVTDNIIPEDRVMTNGTRRAHERRKSLREDKDGRRK

SEQ ID NO: 127833 - protein, 122 aa, Heterodera glycines
MKEFMEACQVLGQYANIDLNERSIQNIAESIDFNKDGFIDLNELLEAFRLVDIGKFPLPSAFISFFHPYLLTGSLRLQIRSSDYDPKGKIDSGIGPMSHYRISGLDLYACEYLWPALCECCK

SEQ ID NO: 127834 - protein, 177 aa, Heterodera glycines
LNPTAFQSLALNPPAFQSLGLNPTAFQSLGLNSPAFQSLALNPPAFQSLGLNPPTFQSLALNSPAFQSLALNSPAFQSLALNSPAFQSLALNPPAFQSLALNSPAFQSLGLNPPAFQSLALNSPAFQSLGLNPPAFQSLALNSPAFQSLALNPPALKPTAARPLSGLALFFWHFLMA

SEQ ID NO: 127835 - protein, 251 aa, Heterodera glycines
LSLRFPIKSSVPRICETIRNIKNKKISEFQFGFVRNRSTTSQLNSCGRLEAIINGKNVDCIYIDFQKAFDSVPHELLLYKLEKIGIRGKLLMWIKDFLSNRTFRVKIGDDLSSSKVTSGVPQGSVLGPLLFLIYINDLPDALPSGVRIKLYADDVKLYICYKARVDTEIMHKALHNLSEWANKWQIRISIKKTFVLYLGNKNPKEIYKIDGNIINVVDTIRDLGINIDNKLQFSNHVALIRKNAYLRMRSL

SEQ ID NO: 127836 - protein, 57 aa, Heterodera glycines
MASPTENLEDESWVEYHYSESEVEELDEFSLLHSQMVPNRVVPCCVNCAEIMVRSDH

SEQ ID NO: 127837 - protein, 335 aa, Heterodera glycines
MNVVEFSPMETHANSAHIIYRVTLLPQSSTLVELSMTNGQEDKEVTVIGRNDLDEQLRIEPTLTSSKNGQIAVPITNFSSIPITLEANESVALVEHVDEWHELEHSFFPPFFVSSVTHENENIRTEQIKEILRTRIGMSQQHEADKLERLIIGFEQIFALDDSELTQTEITQHFINTGDASPIRGRMRPLPFAHREKVSMMLQDYLSRGLIRPSKSPWASPIVLVPKRDGSLRFCVDYRGINSVTVKDAYPLPNIDYILLALGGKKYFSTLDFLSGYWQIKMDEKSIEKTAFVTEFGLHEFTVLPFGLCNAVATYQRIMSRLFEDLINDFCLRLS

SEQ ID NO: 127838 - protein, 43 aa, Heterodera glycines
MFGFFLAYQNFIEPGSFYSLSNRPKFFLQLNKALLSLFPENLA

SEQ ID NO: 127839 - protein, 155 aa, Heterodera glycines
MKKRGNILNFEEEEFDEIISNGTSKRDNSPYTDHDYAGTRQLATAKGATGKHQRQKGGGGTAKEPKKKTALVSGTDSGVRSSARPHRPTKRFVEETNESFIRGTSKVRRTSPRKHGKKSTAEGGSEGEESEDDGKEYSVEKVLKKRVKGGKMEYF

SEQ ID NO: 127840 - protein, 165 aa, Heterodera glycines
GGMGRIVEIDESKFFRAKYNRGRMLQRQYDWVFGMLERGTNKVRFFPVAERDAATLLPLIAQNIEPGTLIVSDGWAAYGGIQNMQQQYDHHWVNHRVFFVDPQDRQVHTQGIEATWGALKTSLRHLRGSNEEMLPTYLYQYMFRRYHANDKIFTHLTAELSAMPE

SEQ ID NO: 127841 - protein, 306 aa, Heterodera glycines
MARNRSFEVGSEGEEPEDDPLEDSAEKEAKKRAKGGKREHPASGATRKGAKNRTPQKPNKNRHHDRPQGPPKAKGAGHDDGRNTREPRESPKHPEGPKQHEKAQQKAAEKNKPEAEETEEDEEEEDEDNEHKAEKAPDRREKGGRGEHRASRTQGNGGKAPPANQNKGKGYDDSWNSWEPSKSGKHFEVVKQYEKEWKQQHQQEKQQPVSAKRSLRLSVGHKLQSDENCTKAVWCIKRTEQTPTSKGTTPSSSVSVSTKRIRVVVRKEQDDGPAHVEQTEMDAVSVETKELAPKTPSKKKKKRSRY

SEQ ID NO: 127842 - protein, 118 aa, Heterodera glycines
MTFDFEKRGDNADDEDSSADECSSSTGSGTPNSEYSEAVATHPMSNNNNQSDYVQKLRPHRSLCLPPTSAAVPSAGRKGPKKKGSAKRTTAAKTPVSIPLLEAKAMLHTSRVRVFILV

SEQ ID NO: 127843 - protein, 157 aa, Heterodera glycines
QKLWQGTRFVLSRLGPDFIPSDTLGKNGQSNLADRWLLSRLSHCVSECDVGFRTYNFRQLTSAIHHFWIHEFCDIYLESVKSIFVVNNANAVTTARHVLHLAVDSALRLLAPIMPFIAEELWQRLPARPSERAESVCVAHYPQPAEYCLRGGTNSIN

SEQ ID NO: 127844 - protein, 173 aa, Heterodera glycines
MQETQIIVGVASLCSILAILATVVVVPSLYSEINEIATKVHDGVQAFRVDTDSAWTDLMDLQITVTPPSKPRQNPFSSIFRQKRQLPGHCQCAGPPCPVYTPPCQHCPAGPPGQPGSQGPQGRPGAPGQPGQPGRNSGQGPPGPPGPQGGAGQPGRPGGPGQPGQPGAPGVIT

SEQ ID NO: 127845 - protein, 267 aa, Heterodera glycines
DQKAKISIPMTSRKREHAEGEQEIEEGKSVLSGESVSDGEEGRNGEETNEKEADERERERDRKEKRPRKEWVVAGVPKNCSDLYVVGIPYDLEDEALKEYFEQFGSVELSEVSEWMSKGREGARKEIHGREPPGEKRKGKDGRKSVVIRQVCSVWKIKRDKSGLSRGFAFVRMAQYDDQVKVLSKPVHVIGGRECHTRISSTDKANPRVFVGNLESDIGKDRLREFFLEHIRRLDKTADIVDLYYPKPFRNFAFLTLTSSFAAKELV

SEQ ID NO: 127846 - protein, 43 aa, Heterodera glycines
MFLQCIIRCSFIKEKIILLNYAIIYFKILLMQIYWESIAIKYV

SEQ ID NO: 127847 - protein, 30 aa, Heterodera glycines
LQRAAPSHRHGLVRETPATNPQPFGTIYYS

SEQ ID NO: 127848 - protein, 175 aa, Heterodera glycines
ECPFFTVNYAKFWNHRQKHKRANRFTCKHCSFSSGSVQCYAEHMELHGDTGTTATITSIINQNIGNNSNVATEFGMMPEALVAMPKHATSTVTATTATSSSGIRSSPEAASSGSSSLDGAETLSEKKLSIMPTKIVHEKSDDEEMEMTTTASISQAVAASLVDEAVHFLVFVSDS

SEQ ID NO: 127849 - protein, 198 aa, Heterodera glycines
MEMHRNSECRPFTCALCSFGCFSADSLHAHLALHASATTLEGGGSGTYNNESIQQRMDPPPDTQTSAAGGPITDAPFSAVLNNAAAAAAPSVPTTVSTLIQQRLMTIIKRAAVMENCCFGNGATTIKMDKMPKANGAGNGRTVDKQHYCTRCSFRYPFITAHFYWTVRSQVTVFKHSHVTGNTIALTTVGLAFSSAAH

SEQ ID NO: 127850 - protein, 48 aa, Heterodera glycines
MDERLTNSITVPVAHFVDIPLTSLCKNIELVKEQQKRQSVADDDVEKQ

SEQ ID NO: 127851 - protein, 224 aa, Heterodera glycines
FTDFPCCPGSQQVVSVMSKYIGTFSAAGEESTVCSMAKSTVDGLKSYLSSRGGCPSGGEAQIVDEIDRQLRTFMKMKITYEDECPYNLGFARAMFDLAAAAAGHAGTGTEWHSLKSQFEQESQAIKAISQALNIEVTDVHFGHPSKGNSAHQNVPSPSHVNSAHQNVPSPSHVIANPGQQSSVPWKGRRTVVIRFRLLRKKKGINKENSYRKHFVDYMKNIYLF

SEQ ID NO: 127852 - protein, 153 aa, Heterodera glycines
MNTAISKLFELRPDPYDNSQRKYLRLCLFLNVENASDLADLVKVMDIALIRAELVLEPFILLVAANRALFQAAHNQLSTRSLSAELIYCLSPNRNIRESLATFGIAGTTRALLVAIFDDAKGKKMREAAKHIKGTPVTLEKLRENADEALIRQ

SEQ ID NO: 127853 - protein, 56 aa, Heterodera glycines
MQLSWTDLNHRPKDVFNHYSPPLYQLSYSWHTYPLIIILFIPLILSPQVKNNTRRK

SEQ ID NO: 127854 - protein, 76 aa, Heterodera glycines
MWKKEADNVRRGGEKGVGGGGGGGGGGGGGGGGGGGGGGGGGGGGGGGGGREGGGGGRAGGGGRAGGGEGGAAKGG

SEQ ID NO: 127855 - protein, 172 aa, Heterodera glycines
MMNEPEWTTAVARFGIDGTGAGGMMPTAMGAPNLRNGCGPQPLPRRLFSPSRKASATYHHQHHHNQLMALAPPASAQLPAAAAATAAICPIGGESSAADTSHYTTSNSSSSGAQSAVDCKRTRGGCGGTAATATTVGCPTVIDRLAPANGASSAGAAAAQQPPAVPPPSVNT

SEQ ID NO: 127856 - protein, 79 aa, Heterodera glycines
MVYTTHYTFVAFNNCVPKPLMNAAITIQIGVQHSYIAIASVVIFVSLMNGPNFLTYKISEQTLDMTCGDLVVDQYRFAK

SEQ ID NO: 127857 - protein, 57 aa, Heterodera glycines
MYCLQWLMPVLLIPKQIVHPTFLFDQAMFLWFYIIGFVLERSPIGDFFDFINGKPNA

SEQ ID NO: 127858 - protein, 226 aa, Heterodera glycines
MEDPTTPISCQNATKFNSEVSTTYRNTNQPFSIVYGFGFSAGTIGQDVVKLGLASDSSAFTLANIYFGQTVQKDTQQTGFSGIFGLSYSASGNNVPPEIKLDSNVIINGGQSAAIVDTGTSLLLGPREEVTKIYNHYDANLSDHSIPCDQNVGPISFLINGHKYEVTKETLILKRGKDNNKCIFALSDFGTATNLWVLGDPFCRKFCQIHDIEKLRVAFPEAKKKH

SEQ ID NO: 127859 - protein, 25 aa, Heterodera glycines
MQRCLTSKILNMLYKYQLSLAFLHL

SEQ ID NO: 127860 - protein, 217 aa, Heterodera glycines
MSSSIASPDTFLRSETDQTPAASAAEEVGKYEVFSWHGNLSDQLSAELFVTDQQLLKECREKLAKSELKETKLLWNNGELNAENRALKAELEKQKLMTEHIELKAKVFNMEQEKQQFEKKYVSVDVFNSLAERIKQLENQQQEKREEDRNVSVGQLLEKFLAGEKQQKQQKKDNAQQRLDGKCSVVDKNNVAEIKKQGLDPFELLYAVKRYYSKKNL

SEQ ID NO: 127861 - protein, 38 aa, Heterodera glycines
FGHFSEMANPIATKKQKVKLSYEGHLYTFAKMSSDGMT

SEQ ID NO: 127862 - protein, 86 aa, Heterodera glycines
MATSLFVKRMMANSCCFGLLLLYVMFAMAFSMAKTEVTNQQQMRRLSSQQRNVSLSIVCSESSTRRRAGGAKHGTSEMPSSTALAF

SEQ ID NO: 127863 - protein, 110 aa, Heterodera glycines
MGWYPNMAWRLWLRSWRKIGTPCHHNRNNKWQWRAFAQPFLPPMGMPPPMGFPPPVPFVPLFANPPLPMPYPPPPILQPIPIPPARPLYGAFNAPQMRPPPLINMPFAPI

SEQ ID NO: 127864 - protein, 148 aa, Heterodera glycines
MMMKREKVKLNKTNRGKLRKRKRPLEGEAFTEREQRKWDQFHERLSLDRKIAREERKRRRNERRQGGIKEMSEGEIEWGREDIDWEGMDRESINMEMAKDENRRRNSEKERNYHNGREKERWNEKRKSHSREKQSNDEKKRRRGRKRH

SEQ ID NO: 127865 - protein, 31 aa, Heterodera glycines
DYLSKHLVDWGIIGDCGINRDRAIIRAYTVI

SEQ ID NO: 127866 - protein, 330 aa, Heterodera glycines
MAFLSPRFNALVDKHFDGQSDLTIWNEIAIKKIGTQAKFYIDHSVVTFLRSNQQIFDKGTNLDLDLDVEAKDVQPIWDVFSREIWPIFATNIRHMSFSDTDHLDNFRRRTSPTILTELNQLISIYSDALLPDAIADDGPNATAGQALSKWLHTPTKDGQPKQLICCDNLEPPNIKWITNFKDAFLRAKTSSASYIIRFEDFEPTENGSFELVNERTNEMLTLEKEKNDDENMEKDDEDEEYATEDWLLKRCQIGKTIQWEDENFENLNSVSFTLCGTSCVGPLSAPKASQMDAKSQLKMNPGPSGQRKKKNFPILDENKALPQIRTFLRN

SEQ ID NO: 127867 - protein, 170 aa, Heterodera glycines
MKEKGRKGKSHQNGQSQRKNECETFRKNVPIFYEFLFRIYVEAVDPTVTQKRPAEMPKFQLGTQNGTTLIEVLDNLCDIGTLCFGKTNVVEKDQNKLDELSNKSKKPKKWDKLKNGKTIGQKKAEKVKQKEIQKKFDEMMREKAAEAMETINSAGEGIGQKKTLLRWLWP

SEQ ID NO: 127868 - protein, 71 aa, Heterodera glycines
YSHKHKTEQKFIPKAYVLLTKNQLGTPFKAIAIAKVFSSGQCLPPPNLSFPSLPLPFPSSFRQISFEFPFV

SEQ ID NO: 127869 - protein, 62 aa, Heterodera glycines
MSEHEILSKWDFQVPNWAQSKVAAHTLCAKCAVVCRCDVSKPFTKQQQLQRWQQQKTEQQQH

SEQ ID NO: 127870 - protein, 78 aa, Heterodera glycines
MLVFFSIFLCFFSSYHFGQVPSLSKICLSRSTRRTNPSLLADTGKFIVIMETVFVNDGGITLFSKKVFLCVFEVAKQK

SEQ ID NO: 127871 - protein, 278 aa, Heterodera glycines
MCSIGDPAHQPETNSMSNILALLTYCAEFTCYALIWLIKHFRNGQHHGQSFAAVFVLMANKAEATYSRVLETGKLSHYYTTNNEYKILVRSLAALSFLEEIRVVPAFYLLRQRANELGIQVVPNAGQPVAIFDYFGRHYVAGHDGRPPLFPVHTWNHHDSVLQDLGRTNNAQEGFHLALRMQFNSVHPPLSKVITVLKKEERIAADKLRQYELDPTQGIRIRERKKTYRENDLAIRNLVEGFDAIENPNEDEILAHLRSLQYRLMRNDFENWDDPNGD

SEQ ID NO: 127872 - protein, 133 aa, Heterodera glycines
MSDLYLKLASFSSPSPPKSAHPHNHQCSESVVRLLGICNLGTRHLGTRLLGIPTFGDPTFPTFGDPTFGDPDIWGPDIWGPDFWGSRHLGTRHLGTERHLSKRHLRKPRTFGNPTFRDPTFGDFNKTKKNLKI

SEQ ID NO: 127873 - protein, 80 aa, Heterodera glycines
MAIASDYKKLHAKSTKCQKIKLSKMEQKLFGQKPVEIIGKTQHNGIVWYIVQLEKKNAILLNHDFVIKKYPQLLLKSYGL

SEQ ID NO: 127874 - protein, 154 aa, Heterodera glycines
MVGQPRKERKQIIEQLKNNSDFDEQLGKVKVRRKKSEGQNEDKEEEVKPKKEEEEDEVGRRKTKDGGRGGRGQTSSSSDEEDGEETDDNELKEEESSEGDGGEGDSPPTAKRRKRELLHVRNVECSSSDENDTEEDSDTDIEIKEEEEDSEDGE

SEQ ID NO: 127875 - protein, 72 aa, Heterodera glycines
SVAIKSLSLLFWHKSSANLLLRALATVSGFAWALYASTLFLAGSEPPNRRFLFYYPLVLFYFVFSWLVISFA

SEQ ID NO: 127876 - protein, 62 aa, Heterodera glycines
LEKEIQAKEAASKRDNVTDTKVQPDLKGNIGSGTSAQTKRKSNVVGLEEDFDTLDEPIWETI

SEQ ID NO: 127877 - protein, 68 aa, Heterodera glycines
DQSESQFHDMALIKLSRPMARVQPICIHCAKVDRFRNGTAYVMGWGQETNDCVGLTRPAKMLNGRPVK

SEQ ID NO: 127878 - protein, 16 aa, Heterodera glycines
MIQGFLGLNDVKKILE

SEQ ID NO: 127879 - protein, 43 aa, Heterodera glycines
MVIRRGTKVIRTGAKVIRRGATVIRRGTTEIRRGTTEIRRDKK

SEQ ID NO: 127880 - protein, 82 aa, Heterodera glycines
MWGPPAFALNGRTIGERKGRTDRVLVIGIFKRKRNSISKKTNEEKDGKAIATEAKQSIELDVLTAIYSQKRSDRNKEIKSKA

SEQ ID NO: 127881 - protein, 67 aa, Heterodera glycines
  unsure (1)..(67): unsure at all Xaa locations
VLTAIYSQKRSDRNKEIKSKAVSAVPHLFASPITNIRWTRWTSRPSLFLLQXAMIQWCFSTCSKLNR

SEQ ID NO: 127882 - protein, 47 aa, Heterodera glycines
MKRAKGLDIIPDDFVNIDGLPVDMRYVHPPGRPHGAQMRIWSPHQSP

SEQ ID NO: 127883 - protein, 94 aa, Heterodera glycines
MKEEQKVEEEDEHKVDEKVEEEQKVEEEQKGEQEEEQKEEVEEEQKVEEKQNVEEKVEEEQKVEEEQKVEEEQKAEEKVEEKQKVEEEQKVKRK

SEQ ID NO: 127884 - protein, 38 aa, Heterodera glycines
MPKEKKLEVQNWRQFRTQNGKKKLKGGDGPNFRIFSKI

SEQ ID NO: 127885 - protein, 56 aa, Heterodera glycines
MEDYCFDATAAAAAEQSRRQSGAASDLVQGDGLSSGFLDAIITKVNRSPPHRFTDE

SEQ ID NO: 127886 - protein, 196 aa, Heterodera glycines
MRKIVYFKLLQIVLSLAFVWQLLSLHQFCGTFVSPKAFLHDISGAFLHDISGGHCKRFTFIGKDSKTGEFGAVFDERKWHNQLMSSTNGQPIEEQQLKFMDELAEKLPPAGRHCIPITLSPFFWTELSPFFWTEKDRNVLDYVMDLFSGQLLIAMCSLLTLGVGLFRMARSAAEYEVSSTDGWTQHIFCFCATITF

SEQ ID NO: 127887 - protein, 750 aa, Heterodera glycines
MVANRGEIATRVFRALTELNKTSVAIFSEQDKRSIHVYKADEAYLVGTGLPPVAAYLNIEQIVDTAVRNDVEAIHPGYGFLSERADFAQACKDNGIVFIGPTPEVMRRMGDKVAARQAAIEAGVNVVPGTPGPVTTVAEVKQFVQQYGCPVIVKAAYGGGGRGMRKIEKEEEIEDAFNRAFSEALAAFGDGSLFVEKFVERPRHIEVQIIGDHYGNLVHLYERDCSVQRRHQKVVELAPAPVLDPAIRQRMLDDALKLTRHVGYQNVGTVEFLLDTKGNHYFMEVNARLQVEHTVTEEITGVDLVQSQIRIAEGKSLEDINLRQDSIHVNGAAIQCRVTTEDPARGFQPDSGREFRIRGVKTNIPFLVNVLEQPAFRTGVVDTYFIDEHPELFSFKPSQNRAQKLLFYLGQLKVNGSLTPLVTEMKPKNVQPTVPVVPAGLHDQPPVGIRDILVKKGPEAFAKALRANKGCMITDTTFRDAHQRSVPKFDFFDASGLLATRVRTYDMAKIAPFVSHKFANLFSMEMWGGATFDVAMQFLHECPWERLELLRKLIPNIPFQMLFRGANAVGYSSYPDNVLDKFCELSVKSGMDVFRVFDSLNYVPNMVVGMEAVGKAGGVVEAAISYTGDVSDPNAQRYNLEYYLNLAKQLVNANAHILSIKDMAGVLKPEAAKLLITALRDQHPDVPIHVHTHDTSGAGVASMIECARAGADAIDAAIDSMSGMTSQPSMGAIVASLQRTPHSTGSQMLI

SEQ ID NO: 127888 - protein, 102 aa, Heterodera glycines
MDSDTEEDLDTLQRFDFYYEVGQVRPVLLSTNIAPIQQTLRSNRAFVSDLSSEEDDELANFVVHSVESEEDANDHESFFSEITSGLYSPSPMHSPDSQSDDN

SEQ ID NO: 127889 - protein, 35 aa, Heterodera glycines
MNTEIKPLIVKMCEDPEFDVRYFAEETKIELGMAA

SEQ ID NO: 127890 - protein, 78 aa, Heterodera glycines
MQINEQIKPSDDNVIAAASEDQNVYLFDLRGNEGDGLCTKLRQEGTAFCAVWNPQNHNIVAVCNKKTGLLVYDLRMSN

SEQ ID NO: 127891 - protein, 28 aa, Heterodera glycines
HNSALVLIWQKIKPFFLRTHMCSIHPTK

SEQ ID NO: 127892 - protein, 109 aa, Heterodera glycines
MIALRTDIDQKARILFGLAIDQAFRSVLVGSFIHSRRQILCYITCNAIKNYPKFAYNGLRHIPFINLFMVVKISQMADWILEIWIWGFGWDKSNLCSRREIVQHRDWFC

SEQ ID NO: 127893 - protein, 191 aa, Heterodera glycines
PFFCLFCFLSLPLPNCPPFLFSLVGCRLLQLYYVLRLHVEDATGSAALEMGSAALEMDFPLTIATVPFRPGHSQLYSVGYDFCVDHVETGKYISPEFRLGQVVGYDFCVDHVETGKYISPEFRLGQVWDGRTEGEKDFVDDVVLYRPVYVKVLDRTPNSPFVTSNWAQAFVGRVAILPICATSNGSKRLKH

SEQ ID NO: 127894 - protein, 144 aa, Heterodera glycines
MPFFSPSSAVFLLPFQFLLVVLGAVFVVLSQCCGCSKKEKASFQPPSPQRNTGAPPPQPPTFLSPAPQITAAGPGTGPQFVPMNDPKYETLNSLDPNIFLKSASAKPPQKPPQATNGPKPVPVPANDPKYETLNALDPNIFVKK

SEQ ID NO: 127895 - protein, 45 aa, Heterodera glycines
EHFFQLQNELGLENVSICLVVFADNSNNTWRVQAIPVSDVSSFDN

SEQ ID NO: 127896 - protein, 154 aa, Heterodera glycines
MTSSCKACPFRSKGLICRRKLSDDNMCEACGQKAIAPIHTVFVRLLLQDVEQADIAQRVTMFSSVAEEFLGMKAAELLAKEKEPESLAKHLDDLIAVKIIAKVNIKANSQTYTGFDWIVNLFKKCPGKNDSDVPKEKDDDDDVDEIATKKTKKN

SEQ ID NO: 127897 - protein, 616 aa, Heterodera glycines
MDNILANKKVLTFLRIANELCGVGKEAAFVVSMACAGGHILRDLALIPENLLKLLREPGDDLEFAYRLYQLTFNKKGKKLLNKLCHNSPVKIGNIMQIAEMASELATNYSSNCSYIEHRRIDEDCRAFRPVDLRNVNKFGFLVISALSYAFCQAFDENICNFYDIYGDGKGFFYNPLLGCTVTLCDNSFARQTDKWPKINQSRIVSYRFSKTTEDKNGMLEAFFVCRLPISLIHQYPITELNQFKINIGPMVAEKLLSSDFVNNLCEGDLASFQGYNPATGLLSIACSARSALKLRQLTDGTVNSLFELLNTMDKLRWFDEESGALISFGPGFQISQLNANPSEREKDTIVVSYIDSFEHFEPMVHQLTEFSLQFCESRNCKPLLFTDCKSRRCFVTLLAPSIINDLKSSIDSLLQFFPGVSVETRPGNISEYFAGYNAIRSSGSVFDNSSYPTDCCAICFGTIDGQFIRLSLCGHVYCDDCFIGLLKNAIQFPVSCQSGCLYQILFEDIALIFSRNFRGVDEIQQFLTPVFRLSLHSFLLAHRDQFVRCQSEGCHCLMPLSKGTANGAVGSPMICFGCKMKRCTLCGEAVHQEITCQERQEQKFSIEHPDLSAWK

SEQ ID NO: 127898 - protein, 159 aa, Heterodera glycines
MASNNGSPPTDSARIGHGAREGKSAKKDGTPASKIAEFRQRRESSAKKSTERLCLQLIMDKLRKQLNGIRIKYCQAWSKKSQKPTNDTNSAKHTSTETPGKNCKKLQRKLSQLVNHRLKVFEGVDVRNDDCVLLPLRWICIQLRNLKARTKGNLKIVSD

SEQ ID NO: 127899 - protein, 87 aa, Heterodera glycines
MNVEVAPDGHMVTDPFYAQAMMVIDAFSVYGLREDDEETGDDAEREDDNPLHKYRDNWTAMFNRFKKVLIIPVHGGGGEISLFFPYV

SEQ ID NO: 127900 - protein, 256 aa, Heterodera glycines
MADKEESAGGEQDDVSFLRTGDIVCLTCLVSNSQRDGAGAESERVCLSSEGFGNRMCALENVSDRDFPPDIASCMLYIDNALSMRALQEMMNAESGEIKGTGGTGGHKTLLYGHAVQLKHVQSEMFLACLSSCSSNDKLAFDVGVQETNAGESSWWTIHPASKQIHPASKQRSEGEKVRAGDDVILVSVATERYLTAVYHSHFMVIASFHQTLWNVTSVSSGSVRIRNMGSLFGNDVVRLFHGNDECLTIPEWSEY

SEQ ID NO: 127901 - protein, 496 aa, Heterodera glycines
KPDEKEEEGMGIATIRYGETNAFIRHADKELWLTYQTLEVTKKGLGKVEEKKAIAHSEGHMDDCYTFFMALEEESMSARVIRKCSSVLNRFLKGIEGLQTEGEESGIEGLQTEGEESVDWMRVDLQEVLKLMQDLITYFAQPNDELDFESRQNRFRALRSRQDLFQAEGVLNMILDTIDKFSVMEAMPNFVGLIGEENQLMWEEISTYLYLLVAAMIKGLMWEEISTYLYLLVAAMIKGNHSNCAQFAALLRLDWLFGRLSNPQSAEGILDVLYCVLTESPEALNMINEGHIRSVISSVISLLEKVGRDPKVLDVLSSLCEGNGMAVRSSQNTITDYLLPGKDLLLQTQMRDYVASMMPNILVGVVDGSSLFKRWYFEAEVEHVESYANQQPYLRVGWANTVGFKPFPGPGDGWGCGGVGDDFYSYGFDGMNMFCAGKARQVGHRLGKARQVGHRLLRKGDVVGCALDLISTEIRFSLNGEVSKLAPKKNNDSPST

SEQ ID NO: 127902 - protein, 234 aa, Heterodera glycines
RKNEEQPEDDQQGNTEEGGGENGRSADGRTNGAQTEEQRQPENQGEHENEIYPENPFSINENDDKENNDEQRSKEKGIEEALREEKREKQNNGMEFYPEEVVIGEQNKEQNANESDNDNDNDNDASQKESVERDNGDPRDQADTWGDEGEQVGKEAETVKDNGKGEEEKKREKRETNSMLEREKERSEREKKRAEEEKEKTEKENIIEGKKAEDEKKSAAGNEGLFRMFPEQQI

SEQ ID NO: 127903 - protein, 55 aa, Heterodera glycines
MPGEGISKNGGQQIRRQFAQGIGGEASGERKKKKKKPFIIHCATSAAENGKKLQD

SEQ ID NO: 127904 - protein, 228 aa, Heterodera glycines
MEENYRNTLNRIEKLRRICKKFCILEVWECEVREQLKKNKEMKNFFENIPDRGPINPRDAYVGGRTMPFALYAEATEKQVISMFDIVSLYPYVNFVTPYPVGIPKVIKKLNPNVIWKDPGDIPYDGLLKVKVIPPKKLRYPLLPFHADGFLLFPTCGECARKSKQDFVRVECFKKYRHSAEGRELVGVFTSIVLRKALELGYKITKFYRAYHYENFDTNLFKNYVRMF

SEQ ID NO: 127905 - protein, 104 aa, Heterodera glycines
MLFVLLRFLLLCSLSMPILAIRNFTFSKVNDRSQLPHRMRRMVRVEWDGSTLAFAWNRRFADRILPEEVVYLTWNLWQSGNSSADNDGRSVYFSATDFNGFGNG

SEQ ID NO: 127906 - protein, 101 aa, Heterodera glycines
MPIEPFELENKVTNEKLTLKQSKEYNLVNWLLQRYPIGETATAPVKWKKRENSGANLNYIRFDPRYGNNACANLNIVRFDLGGNHWIGPLSPPAVVEEELD

SEQ ID NO: 127907 - protein, 80 aa, Heterodera glycines
MTNFNIIGIRVAAGYPKPDIFLDPKPDPMILVGFRVEISTVFVLMVVWFIGYTFCLSLFFASVQFPTGIEYFIFSSNSFN

SEQ ID NO: 127908 - protein, 554 aa, Heterodera glycines
MLYGRKFTLLTDHKPLLAIFGSKKGIPIYAASRLQRWALILSNYEFDIKYVNTNSFGNADVLSRLIANYPRPNEDILIANICEKTECYVNFVFQAKVEQLPITAKEIADQTKTDEVLQQISKFTNKGWPQKCEDTDLMPFYPKRDQITEIDGCLTYGDRVIIPTTLRRQILKSLHFAHPGIVRMKAIAKNHVYWPGINSEIERTVRQCDDCQMAAKNPTKAQIQPWKAADEVFERIHLDFAGPCEDGQTYLVVVDAYSNWPEVWEMSCATSEKTVAMLKSFVHRMGIPREIVSDNGTQFRSAEFANFCKEFDIRHTFTPPYHPMSNGAAERFVDIFKRAMKKCRKEGKDWIQKALLAYRTTPSAVLDGHSPDELFLGRRMRTKISLVHPANQKIPKVDLKNFGNFQQDYRQNMKRQFNKKNGTKTITFRNGEPMFIWNLKGNKANWLPATIIERVGNSPTYRTDVPTLHRAVYRHANQIRRRFPVDLETPEIGQRNGHILAGDQTNRAPVKEIQKAKSPVGQCQNAQRKSARAKRAPQRLDMDPSKPKYDLVRP

SEQ ID NO: 127909 - protein, 120 aa, Heterodera glycines
MNDPPRMIIAHGPNRWCTLFFCFFFADQVKHCARKVQLLVAVQIGQINGGPQKCQNMHSNGNGGQHQNQNFDHAEARATADVGQLGDEVAGQPKQQQPLHRVRHHRSGLTTGRRKLNGNS

SEQ ID NO: 127910 - protein, 172 aa, Heterodera glycines
MLYLKNQLLAFALLFAFVEFLDFLTVHHLFGPWAIIIRARLPTGGRGQCRTDAFGIAQPNLGNAVFLAVWPRRAGQHAPAPFGARFCKNCAQVLVRHLHDGHIDLPGLGSAKLNSKYRHVQFQGHNVRFCTQKAQQDLRYEENIDAFTMDGQQGRQSPTFKGGGATGDEKEP

SEQ ID NO: 127911 - protein, 88 aa, Heterodera glycines
RYSKELESEMELELKQRDQKISELESVKHRLSTALEQLKTKSEKDRHEHRTTEEQLRTRLLNSDGQCTELRHKLRAVEQQNDNLERRE

SEQ ID NO: 127912 - protein, 150 aa, Heterodera glycines
LFESPKRTLEKIDFFVFGAVPLNRCAQIYGETESFRNSFPIACTLILRWIFAPHNCLSTPNGHLKKSIFFVFGAVPPNRCAQIYGETESFGNSFPIACTLILRWIFAPHNCLSTPNGHLKKSIFLFSGQSPRTDAPRFMGRPNPSGIASL

SEQ ID NO: 127913 - protein, 42 aa, Heterodera glycines
MLKKIQKLRDKKDEKLKKESPITPSALKAQFLGYEIQRQSLK

SEQ ID NO: 127914 - protein, 43 aa, Heterodera glycines
MTSFAKFDISGPDVVPLLQKLCSANIDRAVGTTIYTGMHNEQG

SEQ ID NO: 127915 - protein, 100 aa, Heterodera glycines
MQWFPAAVRKSARNFAICLQFPSDVHLLKHSLQLSTNQAVSNKSVPSKSKAERKKRTKERELKKGEKVTLESEKVNVNSRNKKQKMADVDDLEVKFEALK

SEQ ID NO: 127916 - protein, 301 aa, Heterodera glycines
MATASNWHATDCVRMFPLFLEGEAKEIFLNIPPNKKKTWRDLTNAMADQTKKIDGPMWPKKLLARAKMGHESITEYANKIRELVEQASPDPNYTSEARECESVHYFLNGLPIFLKRKLFFMKKPKTLVEAISMAKEVNQAREELANDEKGDEIKQQINEIREQINVISSQNNGKNENQREFVNNSWRNNFGNGNSWNRGRENNYRGGQRARNFNKFYTRNTNIGPRNSNFVPLNQNNWNRNWNENGGNNDRNWNGRFQRNLEIAEEIREEEEMTDKSTVSIWWEMKKKPPQHRSDVHLPRY

SEQ ID NO: 127917 - protein, 171 aa, Heterodera glycines
MAAVTKTVPTPKVETPPFSKSWIKLKQTEQKYIIKRVNVGKIGTTIIPVTKTTKTVKNAPTTTVKTPLMIFTTTKPKQEKTPKNISNSVFENEKSKQGNKTKTETKAKKEEKHPKTVKIGKELNEKTMPKEEKVPKIVTKNITTTETPKMTTIKTISTTTPKPKVNEMEMK

SEQ ID NO: 127918 - protein, 54 aa, Heterodera glycines
MKWNREGRENDQLDCGKAKPNDVLTMRAVPKCNYSSLGIHYFGAYEILSDNSTN

SEQ ID NO: 127919 - protein, 317 aa, Heterodera glycines
MVKAAPDDDEYGQMIRNDFAAAEFCSNFVDHSSPKFDISEHSNEKQMANFMPSVDTDSGALKESLGLSHAMLSMFMNTLRDDNVSAINDMTNDDKFNNNNIAIPSIPPWSAKKRQCSSSRVTTAPSKSDAITASSNLIPTGSSSNNNNNDILPTSSLSVLMQQSSVAASAQQRQQQQPIVKMCRVETFSAAHRLHNDNLPDYLNREVFGKCNNGNGHGHNYTWKVVLKGPVDQHTGMVYNLADLKREMNEVLEQVDHKHLDKDLPYFRDNGIVSTTENLSVFLYNELSATMSSPELLHKVVVCETDKNCFSFAGYSS

SEQ ID NO: 127920 - protein, 511 aa, Heterodera glycines
KNIHVYWGTATTALPHVGYLVPIQKIADFLRADIRVTILFADLHAVTILFADLHAFLDNMKSSIELLQNRVLYYECVIKALLNALNVPIGKLHFVRGRSYQLTETYTKDLLRFTYTKDLLRFCGLVSLRDATRAGAEVVKQVDDPLLSGILYPLLQALDEQHLKVVGQFGGVDQRKIFILCEEQLLKMKFAKRFHLMNPMVPGLTGSKMSSSEENTKIDLLDSPESVSAKIDSAACPKMPDENGVLAFFKHVVVPDENGVLAFFKHVVVPIQSEAQIVINGTFFDSFDAIRNAFVRGDLSESALKEYLKNFLNTILSSGRGHFDGRFVFGQFGTGRSQMRVDTLWPIPGGVFDFLPFRVNFFPLFSPKFVASSVRVSSPEFLFSSNKSSTDFRPLRVLWRLSPKGRLTLGHLSALFTLKWLSTFGHHITILLSDLDAFLDHAKCPWTEMKARALQFEKRALQFEKWLREILRSLNMENVEIKHSSEYEFDSDFSMEMYQMADFSMEMYQMA

SEQ ID NO: 127921 - protein, 20 aa, Heterodera glycines
MELNDAQQKRKELIVRNLQE

SEQ ID NO: 127922 - protein, 95 aa, Heterodera glycines
DAWFVEVLSAHLLKHKDICPFALSDWMEDILDTEFSLISDDGTLEPTAKLLVELADLTVGRGAHKGAEAEAKLEEHLQRLRTLSAKSVRFHRILI

SEQ ID NO: 127923 - protein, 242 aa, Heterodera glycines
MQQFPSNLALNQEIESPNALNNDRDAEYQDLQRVDKNARTVLHRAALDQNYSLVTQLCERAEKIGLGHYVDTIDKFGNTPLLSACVVHNYQTSRYKLQCIQALIQNKADPNKKNDTTLWTPLTWCSFYGETEAIKKLLENKGFPYLVDNEGRFPLDHCGLQDKHGNRKKAATVLIESLVQLIQKFDENPEKLAYEGYTDYRRHLGSPLLRTSVLYWAIYFKLDVDGYVKKLLAMNGVYPELP

SEQ ID NO: 127924 - protein, 295 aa, Heterodera glycines
AEPANPDKENATNSKNNHQQNITTTATATLSSETPAEQILADQDNSIAEKDEAGTPPPSSGLGQSGDAAATSVTQVEDGRNLPQAAALTSNNPKIVAKQSTVATDRRKEKIIEKLIDEQVDRMVDGTHAQQKMLQEEGKDNESQHRISTYKLIEEVLHGEHGQLMSQQRESKMAAEFAYNEITQRFGIRMGPGVMHVDLSKQLSYVLGFDHKTRIYNNQSAKYPPDLSGGVRQLYVYAPKLVEDSIIGDRMAPLLRVVNVSGTPGLDMPETAFGRYVKFGWGTTVITLHFRQKLF

SEQ ID NO: 127925 - protein, 27 aa, Heterodera glycines
MSGSEPMSNEILNKFLSTIMIAFIFIN

SEQ ID NO: 127926 - protein, 352 aa, Heterodera glycines
NKNGTSPDNISYKILKICHSSLSTVITDLFRISLDIGSLPDIWKESIVFPLKKGDKNNPENYRPISLTCSLCRVMERILSKNIYNFLLKNKKISEFQFFVRNRSTTSQLITVVEDWYEAIINEKNVDCIYIDFQKAFDSVPHELLLYKLEKIGIRGKLLMWIKDFLSNRTFRVKIGDDLSSSKKVGSGVPQGSVLGPLLFLIYINDLPDALPSGVKIKLYADDVKLYICYKARTETEIMHKALHNLSEWANKWQIRISIKKTFVLHLGNKNPKEIYKIDGNIINVVDTIRDLGINIDNKLQFSNHVTQIIKNAYLRMRSLFRVIKSKSSRIWIILYKTGGGPLLEYAPEVGI

SEQ ID NO: 127927 - protein, 102 aa, Heterodera glycines
MSGGIYGGDDVGALVFDPGSHSFRVGYGGEEFPRFDIPARVGVCPRPSAGTDASQTADATIEEVASGRGANASNKFDHYIGTTKLNVPRAGMEVKPYMREGM

SEQ ID NO: 127928 - protein, 54 aa, Heterodera glycines
IFIIFQIPHYEMEEPKPAQTSFFLWMNENRHRFYQPGMTQADVAKAAGRTNGGN

SEQ ID NO: 127929 - protein, 233 aa, Heterodera glycines
METVENGHDDTRQQSYHTERTLLASQGEEDERNGDDTLQQSRPMTCCFGMVVPFLMKLHPFIAFPKVPTPQVTMGACFVSLLHNIPIHVNCCAQYFHPANRKQFMIIGAEQGIFAMDLTHLTTEEEALFQGKTPYLYRHEMLQLFQQELITQKLAKSLDKLPQKLKPKALMSTLRMPETRSVEYGDWPTKICLVIGPGSGKLGDYHKAIAISVTWKGASMTKTFTFVVPFLTL

SEQ ID NO: 127930 - protein, 71 aa, Heterodera glycines
MKITQNRKNKSFKPKESDAEGKCPGDLLRTLANRGHLGLSKDTNNVGFDELGVVRLNTTRALRYQDFFAKP

SEQ ID NO: 127931 - protein, 171 aa, Heterodera glycines
MPGGTAAVENDAEVTQARKEAAARDDTVRDGSAPTAIGTDFRCLDCRAVNVPMGNGRSIIVYESMGNGKTGRWTVQRIAQATGLVFFGVYTLPAPALGELGGRVQVHFVGDTVYGSFCSAHTDGTERCLSCAIRRPKGTVIELVFTNCSIKSGNQRDISDSAPVIRTFANF

SEQ ID NO: 127932 - protein, 233 aa, Heterodera glycines
GLLTRIWFEKKAIKALKMEKASNLEANDKDQKATKLSQSGGTKVTLGSNNKKLETDTYAHFLYNREIVFGVKYLVKVRIDAKQLGQLRKLRFIDHDNLNKFYGICTDAPILYAIWKHCQRGSLKNLIAKNLIAKEQYVGDVFVMVSLMRDITNGLSALHQTFVGAHGSLSSENCLIDDRWRVKISDFGLNLIGESRPMPRASEWTRMFLVFDFEFQNLNFKNFNYTIRNFERT

SEQ ID NO: 127933 - protein, 85 aa, Heterodera glycines
MPKPFDFSGEGKFSRFGHYVDYMEEIRRKDVSLSYASVDDIFKNMPVKAYCAFDDVFDEFDSRPCGAVRFTFIFLIVHFYTINKD

SEQ ID NO: 127934 - protein, 196 aa, Heterodera glycines
GSVNTLIQSIGIGGLRPNTLLLSWPTTEVGKDEVADSEYRTFTDKLLAGAVNKLLAGAVNGMALLVAKGIPEFPSNVKLSGYLDVYWIVRDGGLCVLITFLLEQNEVWSSCKTRIVAVARPQENSAKLKKQIQNYLYQLRIDAEILVTKLNDPELSITAYVTKLNDPELSITAYERTLLMEERTKMLKQIQRRGMP

SEQ ID NO: 127935 - protein, 66 aa, Heterodera glycines
MPSLILYSLPTLMLANLAIFFGQALFSFVPHILLVFAIIFFEGMLFGSGYTFFGKIHRKVQPGLDP

SEQ ID NO: 127936 - protein, 96 aa, Heterodera glycines
MSGIGVGDRGARAPPKYVFIWSGNNEKKNLEVDPRVIRLSIELSELFHAKEDQPDNAQQQGEEVQAKNDQSVNAKHGKQVQTRKKLQESFFANLIF

SEQ ID NO: 127937 - protein, 93 aa, Heterodera glycines
MAIPQNSVIVLDGNYCADEQMESVSAIYWGEDALKIQRGSWFYADSFQPIRADFADEIEAHHLKSFRDNVIPETPVFSDAESSKKPGTCKTMG

SEQ ID NO: 127938 - protein, 40 aa, Heterodera glycines
MLKIPGKLKKYPFFYSKELTVLVKSASSEILRFNATTIHH

SEQ ID NO: 127939 - protein, 369 aa, Heterodera glycines
MCSKCAHWPTSGALLASRTVLRLRQQLADTLLEDRELEDGIQDLCHRVERWKSRANAALERSFAAAAAQQTVNELYALVTEAREEFNVKLEAEGLDRLKSELARCQWLVNAQTIWRQIERCHNTAGNGIATNGEDGKEEQKQSVDEQKHHKVTEEVERDSKKDTKTEDDKNAEGIVEEQSSTIDEGMAPEEEGEEAEGEDEQKRVELHELAKTVADGLKWCTSCTAVQQLNAKLEHFLNHGNALDQRAADFLAFARNQQQKHQQALPTTTTAQSSSSSAGGGCVANTAPTGAVVAVVGVELARQKWAEIAAAMTAQQNNCDGNDAAGNGGPPSSSSSAFGIDWIQSPAIDRFRAELQAMAMEGPRDGTN

SEQ ID NO: 127940 - protein, 488 aa, Heterodera glycines
LFIWNNILSIFTVFSFCFSYKQQYFNLPIQEVPPDRPIQEVPPDRVEREFWRNVIDIDKGVQVKYGADLISSKVGSGFPRRDGVAADARERQQYANHPWNLHNLPKVRESVLCHMTTDISGMIIPWVYIGMLFSTFCWHVEDHWSYSINYNHWGERKIWYGVPGEEAELFDKVVKESAPELFMENKDLLHQMITHIESAPELFMENKDLLHQMITHINPQFLIDRGLHVYTVHQNAGEFVITFPRSYHAGFNEGLNCAEAVNFAPPDWVPMGRLCLENYANVGRTCVFSHMGRLCLENYANVGRTCVFSHEELVMKMVTVAHKLSIAMCMATLDELSWIVARETDFRHRLSIAGVCATAFCRFEDIPDDERSCAVCRTTLFCSGLCCRHDGRMVCAKHVQQLCTECSMEQYCLKFRYTLDDLVPLVHRLTERTTAFFEWRTTVTQLLNDTTKTPSTEADDNNSSSSNNIDGTTDGKLMKHIRFTIANF

SEQ ID NO: 127941 - protein, 70 aa, Heterodera glycines
MNISKKEENSSAKEWHQNYTEIGKKIGVSYGTIRKWKKQFGMNGGERLTEKEKMEKMKTYWQIKQKRIED

SEQ ID NO: 127942 - protein, 70 aa, Heterodera glycines
MRAFVSHCGLNSVSEAIQFGVPILAIPLLGDQLYNAIMARVKGIAVQLDIGQLNGEGAEQLLVDGIDKAN

SEQ ID NO: 127943 - protein, 334 aa, Heterodera glycines
TNASQKRKEIYRYKASYKASFNVYAMGWSTKLDNHLKFRLAIGSFHLKFRLAIGSFIEEYNNKVSIVQLHEDQGEFGHLGTFDHPFFLFSVLWIPDPKSAFPDLLATTGDYLRIWRIGGHNGASLEVRLDNNRSSEYCAPLTSNRSSEYCAPLTSADWNEVDVSLIGTSSIDTTCTIWQIETGQAVANTEHAIGGNVKTGQAVANTEHAIGGNVKTQLIAHDKEVYDIEKRNNPLKCKLTGADGSIRMFDLRHMEYSTIVFLRHMEYSTIVFEEPSKKPLLRLAWNKQDHNYLATFAQWNKQDHNYLATFAQNSNEIYILDIRIPIYILDIRIP

SEQ ID NO: 127944 - protein, 134 aa, Heterodera glycines
MLSFRMISKMLDLDDIEKSYTKLSWKNMLAPKRARPNAVDPLFKDFFATSPTSHGRIELKTKAAETCGFLHYVTNCPLSVRNKDTWEPCLNVIIETHILAKILSLGVDKTKGRNLLVAIFFKYLMRRYLQSGPF

SEQ ID NO: 127945 - protein, 22 aa, Heterodera glycines
MQTVKAYNLANNRPNKTILCSF

SEQ ID NO: 127946 - protein, 43 aa, Heterodera glycines
MIVINDAAQCSFSASNLPSISESKNLKARAKNGAKQTISSFTE

SEQ ID NO: 127947 - protein, 223 aa, Heterodera glycines
MPKGKRTIPNLELHATMLCGKYINFVKIEFEKEIKIQNCTIWSDSTDVLDFINSAIKEKDFCEFEKHFKRFSKWDRLKNSIAYALRAFKKENQKKVSQNMEKISDIKNKKNGNEITKGIIKLIRPLEAKEIPKAEKLIFKLIQTNSSPTKSILRNLDLFKDEDDLWRTKGRILKSGLNYNTINPIFIPNNSYIATLLIRDAHMKTMHGGRELVNSKLRENLDS

SEQ ID NO: 127948 - protein, 282 aa, Heterodera glycines
MLGSNIYMFNSFRRFIKRRRVPKLIISDNGTNFVLANKALKQIVLEENIQNKLWSEIYRDPTVQNFSSNLGIDWQFNSPYANWRGGAYERMIGLVKTHLIRSLGKQLLSFEELMTYLIEVERIVNERPLSYITQDEVIEPLRPIDILNPTDGEPFSLKLDPTFDRKDVNEYFEKKTKREELFEIYKKAIFKSEIFWKEWSEKYLLSLREKHINKNKEGNKYPKIGQVVIVRDQDNYPRSMWKLGKIFEILSDRTVKLKIGNRMAERPTKLLYPLEIEDEGEE

SEQ ID NO: 127949 - protein, 99 aa, Heterodera glycines
MFTKPVLFSGVYLSWFYNPYVGYTDDFGEIYSNTIASAHNYIVIIGLSSIYLLFPIFIQVIIISLFNSIASVIYISMQFVRISKIYIIVGTYAWVFSSG

SEQ ID NO: 127950 - protein, 76 aa, Heterodera glycines
MNALETGILGIIGAVYCDYPLLIYTTGALGAALWYAETSVEMLLAINRCMELLRPELAFAIFSGQIFINIFIRRLE

SEQ ID NO: 127951 - protein, 208 aa, Heterodera glycines
FQSLGLNSPAFQSLGLNSPAFQSLGLNPTAFQSLGLNPTAFQSLGLNSPAFQSLGLNSPAFQSLGLNPPTFQSLGLNSPAFQSLGLNSPAFQSLGLNSPAFQSLGLNSPAFQSLGLNPTAFQSLGLNPTAFQSLGLNSPAFQSLGLNSPAFQSLGLNPPTFQSLGLNSPAFQSLGLNSPAFQSLGLNPPTFQSLGLNSPAFQSLGLNP

SEQ ID NO: 127952 - protein, 443 aa, Heterodera glycines
TSEEQKSIKSIIHLHLPPTQRVAAGITVMNEAGLDPGIDHMLAMECIDKIHSYGGKVRSFVSFAGGLAMECIDKIHSYGGKVRSFVSFAGGLPAPEASDNALRYKFSWSPRGVLLAIMNPARYLFDSRVVDIGGGGEVLDDLYKIDFMPGFSLVGYANRDSTKYADIYGVSGECQTLLRGTLRYEGFVEAVKALGFVEAVKALKAIGYLSMERKDFLNPMQGPDMAWKQITASLLNQQPDIFPDSLMNFVAELLGKEKKRELKALDELGLFSEGIPFSEGIPERQITPLDTLVPHLAKALAYVPHLAKALAYEHGERDLVVLNHDIEAQLPAGTFERHRISLVAYGDPEGFERHRISLVAYGDPEGFSAMARTVGYTTAVVSHMILDGEIQQRGMLRPVSKAVYRGEIQQRGMLRPVSKAVYRPALQRLKEFGIKATTKVSVK

SEQ ID NO: 127953 - protein, 86 aa, Heterodera glycines
MVIKAQDDFLDCFGDPAITGKSNLTDLAERKCTWITCALVDKLSKTAPEKLAIFRENFGGKSEQQLKLARQIVLEEQIAQQFEHYQ

SEQ ID NO: 127954 - protein, 130 aa, Heterodera glycines
FGTMVCVSKTPRSLPKKRRQSTEQNTDTPPNDHPEVKKAKIEDLLKKFSNGGFDQFWNEGFQPEEEPSPDFAIGISAKSQENAFFALRKKRKKKRKRTKNEWKRENEKTGGAAKQKAKLPENVQCVKYVY

SEQ ID NO: 127955 - protein, 36 aa, Heterodera glycines
MLALLNASFILISIACARFKGRFSGAYFYEIFWVDS

SEQ ID NO: 127956 - protein, 112 aa, Heterodera glycines
MSKSLVERMKNLLSTDFVNWSFFDCVFYFNPFKLMPAHKLILRSASEVFEAMFRFDSKNEKTEFASANCPVEVPDVEAAAFKVMLSFIYTEELSELDGDNAMAVLYAGEFYL

SEQ ID NO: 127957 - protein, 301 aa, Heterodera glycines
SKFHSLQFPFIVFKMMWMFFHTQIKDTVLFKWWKVETVGSLLITCLVMYFGAICFEAIKWLTVGSLLITCLVMYFGAICFEAIKWLRLMLEQKSLPPISRRYAESLLSRVHLLQSVLFTVQLLLSYLLMLCFMTFSVWIGMAICAGAATGFWLFGRRVGLPFPLSLQFPSLPFVSLSLFFACCARPFGGLWNFQENLPFPSLSASSQLVSHFHLFQSLLHFIQFFLGFSLMLVAMTYNVPIFVALLLGHSIGYFLTAPLMTYNVPIFVALLLGHSIGYFLTAPLYRHGLAEENRTGGDCCC

SEQ ID NO: 127958 - protein, 1023 aa, Heterodera glycines
MTIHHHNLSSSAVASLPFNPPMLPAGGVHTQKRQQQSMDLEQDFKVQEARLEQLKKDKRALAARQRLLQKKTHPMAPEEANRHAEEVRAVQNNFEVAKKALQVQQRLVDKQRQRLKEQQQKQSQAISAQSTSVLADPNGSNTTTSNMTGTQHPSMIGQQQHSQQRQQKPMMVVGQQQQQLPTQIQQQKVVAERTRPPSTTTSNAQQHQQQPTTSGFLSSMHLVEQQQKVASQTSDHGQQRQQQTVTTPTLGEQKPIIGVGQQQQVKGTRGRKRKKPLPENVRSSVLGGVPFTALGTQLERDVYETVDILVGFVAAKMDSSSSSGAPADDNLLVQKILSQQNNTNNGINAIAQQWKVKKRRQTQTKTRSQPDTTNELDLIQERIKKTVELIPPINNYMEQYQANDKQMMKYPDQSALPDHEGSEPPLHGNATGEYTLPFMPDYYDELETVREYVDEETLLPPTMGEICWNVDLDALAKDTEDPSPSAVNGENSDDVKDFPPVACLSVTSAGGNNDEDEKLLNFLSIDQIGNRSKIVKSVTLLGAPGPSQETPLEPHWSRFDEEPRDLDRMVDVVLTVDPSVMPRDEFVDSLCQILGIPHIDHITELDTPPYTPDSPRNDGGGGGGYYQSLAEHNSTNQQQHKLYYHHQQQTIKSEIGETTVRTELTATNRNNGQGNGGGTICKHCNSVIPPGKTPIDDTHGRLGLLSESKDEKIHFCSMQCYYKFLALFRIPLSVESLEMAERYVDNVTLETLRQISADNFAKRINAGFTPQAKFLGEQQQHSSGAAASASIVQTATTSGANSTMTLTAATVTIDGGAAIAQREFLIKSSELPALLMIQQSMEKKRVAQALHDGGFKWRGFGWNICDTTLVQSFRRQYDGTKQVKSVAFCLDFLPFGCSLQQFAAVHLQTNEKRMNWSEDSRQCSFCEQIGDGDQRLTGRLLNVDANKWVHVNCALWSAEVHVAEDGGLINVEAALRRAKVTECRLCGLKGASIRCYKLDCANNELAFHLICAKHSHGHFVKDK

SEQ ID NO: 127959 - protein, 19 aa, Heterodera glycines
MGVKLCCESGQKDAKNALT

SEQ ID NO: 127960 - protein, 156 aa, Heterodera glycines
MIRKEKFQIILFLIISLCLAITLIKSACPTIVHPTAAEERKVGILSSSSPLAPNTSPETSIGNGIFEPHQHRRRWRRGKSAKKQFVRSLSSKSMKSSSYRTKSGRRVMEELLPKEVLKKKSFLEKLFGILSKNACHKNPSNFQGETKISAHKQTYI

SEQ ID NO: 127961 - protein, 16 aa, Heterodera glycines
EAIPEGFGLPINLGAS

SEQ ID NO: 127962 - protein, 95 aa, Heterodera glycines; identical to SEQ ID NO: 124528

SEQ ID NO: 127963 - protein, 38 aa, Heterodera glycines
MVSPPLGFDGSLRWEWHCCSGWAGHCQQQPPKATERQQ

SEQ ID NO: 127964 - protein, 31 aa, Heterodera glycines
MYIYQNLFYNLGHKIPLKKINKSRLDQIFND

SEQ ID NO: 127965 - protein, 327 aa, Heterodera glycines
ILFQLIAFCAQIAPIFTMPISGELCTSSLGCPSVYYLHGIVTIILFTIFMLYHRNSPNKHPYHRNSPNKHPMMGKTEIMKVPKDKIKKKSRKVPYWAMYSDKSIWAILVASFGNFMGTQLSLVASFGNFMGTQLSLQFMPTYINKVLHMPIEQTGMASAISPAIMFFIKLFAGQSSDRIQFISFISDGRKLRIYNTLSLGMMGLLFIVLALLNPNKTPALCLVILIVSVILIVSTCILGFNSGGFFKSSQMVSRVSRQHSHFTLANISFLNCVSMLLVPLLNEIIAPENEPENNWAIVLWIHGIILLLTNAFFCAFASAKSAEWTKD

SEQ ID NO: 127966 - protein, 215 aa, Heterodera glycines
MTNPGIWAKLGPDISGSSKAGSGSKFLNRVREEQKVEEEQKVERNRKWKRKWKRNKSGRGKESGRGTERGRETECGRESVRGTESGRETESGRETESGRGTESGRESGRGTESGRESGRGIERGRETERGRESVRGTESVRGTESGRESGRGTESGREEEEQKVEEKQKVEEKQKVEEKVEEEQKVEEKVEERQKVEEEQKAEEKVEEEQRVEEK

SEQ ID NO: 127967 - protein, 125 aa, Heterodera glycines
MARQKLAQRRQFAGETLDEFAQEIRSLVAKAYPDNTLEMDLATLALGDRENEVKEENAKRIQQFRSEIARDFFRANMLPEIKERVMYMEEPQNLMEALTQAKRVEQIQGSLANDQWRMVQSSKSV

SEQ ID NO: 127968 - protein, 535 aa, Heterodera glycines
MSRHEAFIPEKARKSRDQSSPTPPPILVSISSDESAEEASEAGNQLKQQQRPVRPQDGRLHEFSMKEVRVLSTTDEKAKESIREKEIQELKQKLLLLEAEKASDARKAAKAKKEAEKRAKKEAEARVKREMEAKARKEAEEKAKKEAEAKAQREAEERAKKEAEAKAKREAEERAKKEAEAKAQREAEERAKREAEERAKRESEEKAQKEAEAKAKNNLRAPSEISLCEDELEWEEAEKKVLNILKKSSEIAKKKEEKKGEEKVARGIIRRKLTVKEKEEKAKKDSSEAAKRAENNAIEEGREEIRKIVREAEEEAKTKNEKIGERGPLIGENSKKLILDTMEQEYVPGKVVGYIEDPREEKEEEWDMARALKNRSKEDEVRIKKREQREEGWKELISGERKAKGRERPKLVEKFVKNLLGPAENDVSRNPGIPPPEGSRRGPTPIPCWNRYKKRPRFVSPIRNISPVRTRQSTVGTQTTNAWPSCTGDVVEQMQLMKTKLDELIAALKKREEEKNNGNNEQIGEKEEQQKENGK

SEQ ID NO: 127969 - protein, 158 aa, Heterodera glycines
MNCSSNFFDFAATFVPVFFACKHAGTVLFAFQAKKVRRKLTINAPMYADVVENCETLRMIGCCCQFIPLSLPPMLCPMVALSVSGIVILSPVLKHWLIIRNANFSLTFEFCTSFVGDLTFGVILRLVFTAFSLEQINGDNVKEISSYEVDNVMGIAGG

SEQ ID NO: 127970 - protein, 92 aa, Heterodera glycines
MPIEPFELVNERTKEKLTLKQETEESSNEIIYNWLLKRCPIGETATAPVKWKNRENSGANFNYVRFALRHANYSDANLNNIRFDLWGANDPI

SEQ ID NO: 127971 - protein, 194 aa, Heterodera glycines
MNRRWLCNDVWMDILPSFNYAKLGLKMALLSDRFDVLVDKHFDRKSELTIWRSVVIRKDKGPKANNIGPKPKVSILIGGYGKFVGFPLPDHPLPNKISFKNLQIQSSLTFVYAKAFFSCFRYIDYSVIKFLRSKKRFFDRNGTKLKVFVHSIDTDVQPIWDVFIREIWPIFATNIRHLGFDDGDALDKTSKRCV

SEQ ID NO: 127972 - protein, 43 aa, Heterodera glycines
MQKNFNKNNKRELEQVNTYWNNNCFEFCNFYIHKTHGSTLETE

SEQ ID NO: 127973 - protein, 206 aa, Heterodera glycines
MKFCILLFLFLIALIIPIESEKKKLQQKSFDEIFGEKWQEKEEERRNELKKREIIGKYYKIKEKIKQKGRKYSAKEWDKINSKIAKKLGTNRKYIYKWIKEFGLQKQIQKSYKSKTDEQKLEFVQKFIEMKKEYKQKRKYSAKEWYQNYDEICKKIGVSQRIIEKWKKHFGIRSKITEEQKIEKMKIYWKIKSENPKMNDNKIAKT

SEQ ID NO: 127974 - protein, 96 aa, Heterodera glycines
MKLHQLFILIVFLIIELHQIKMENKKLQQKSFDAIFGEKWEEKEDKREIIEKYYKIKEKIKQKRRKYTAKEWNKINSKIALIFLKSLYIVNLFYFY

SEQ ID NO: 127975 - protein, 198 aa, Heterodera glycines
MPEKIGHQNLLTLTPAGLGNWIFDPFQKELHPNIEQLNNLENALIAQIENAENNDSSTDASPPSAGGNASESLALSMKRRRRQSNQQNAKMIDDTDRVPKMKQQRQPKLAKSVPEIFAEEGEVASDEEELEEMEEEQLSALNRSLSVSAAQQWAGFDGRPIQIDTTDETNPLLLFASHAAARALNLRIPPRYFQRYQK

SEQ ID NO: 127976 - protein, 147 aa, Heterodera glycines
MKRKEALYSLNNAWHNFLKAGEKMDGGDENEEEEESDEEESEEEEREEDESEEEREEEDEREEEESEEEREEEEEREEERSEEEREEEEREANDDEVVEESEVEDVDVDGVINGGDGAENGDGRGNGGGGNARGGSGGGGGGSGGGT

SEQ ID NO: 127977 - protein, 19 aa, Heterodera glycines
LIFGPLEVLQSDLKSIVNS

SEQ ID NO: 127978 - protein, 46 aa, Heterodera glycines
ILINIEIKTHKKIYSLLFRQLVKSFRMIPNLSRFDRFKKVRSVKSL

SEQ ID NO: 127979 - protein, 47 aa, Heterodera glycines
INKSHLIAPNSNYLPILRSKKNYLFVTLHIFSFISNLPIDSFFCAKI

SEQ ID NO: 127980 - protein, 195 aa, Heterodera glycines
MSPTACPLLKIHGSLQQKLSAKRTAAHLTTSPLSTIPTKRQQFLDGAAQLDITALLTSTEVSEPVRAVIRQLDALLKLAVDMVHKTSTQDTRAVLEEDRQEHSVVLMGVPESDSCLSSTRRAIADQQQVLDILDVCEIEAMPTKVYRMGQRKEGRPRLLKVEMPTRKMTQTFLRNKNRLKNSKFQAVSVRPVSLP

SEQ ID NO: 127981 - protein, 20 aa, Heterodera glycines
DYEEVAIDTVEGDGAGDDDY

SEQ ID NO: 127982 - protein, 217 aa, Heterodera glycines
YAFGDPKGIILFITHRRNRNRFAQRHIEYELWRLTKHKAETVRIGYPECTEMMKNGRLTLDDNFKLRFDDRTVAIVYFVTDFFKPSEDDWEMRLMIERSTAIKSPTSGLQLASMKKTQQVLAQPGMVERFLPENPKKAAAIRETFAGLWSLTDQDDAAIEATKDAIVNPSNYVLKPSKEGGGNNIWDDEITNKLLNFTSEERSAHILMQKLQPMFFK

SEQ ID NO: 127983 - protein, 62 aa, Heterodera glycines
MAKKHTIVLTVVGVCIVVAVVAWGIIRSQLGGSNTSGIVTVPVQLYSSSILHIWLKTRSATQ

SEQ ID NO: 127984 - protein, 42 aa, Heterodera glycines
FSKSPNPTSHNSEQSTRTDLTSPEKQIGKARATKNNAAGNKR

SEQ ID NO: 127985 - protein, 80 aa, Heterodera glycines
LISSQKSCQLKTAKKAEFSKFFISIFFYSSKFSVIFSRLIEPVKSFRMISRLFDSVNNFKSYIYSKLAQTELARRSWPVP

SEQ ID NO: 127986 - protein, 31 aa, Heterodera glycines
MCNIHKRGIDIGTMGFLAHKNPVSNNQYPAY

SEQ ID NO: 127987 - protein, 148 aa, Heterodera glycines
MMEQLRHDETVSDLCSDVATKMDDQKQCVNTTTNNGLVHHRRLSSKLEWLVFLVEQCHSVASSNLSSLELSLAPSEAILKMEKSPETDNRSSVNKLPNSMREQLLCRILPMRKRRPKQLRFCQTTTAQSETELAMGQRKRRKPNGEKR

SEQ ID NO: 127988 - protein, 84 aa, Heterodera glycines
IANCPFLFGRFFYFRRFSSPPKMGEVRFHSDYVSSTAESQIIQIVLGFVVCSVLCSNWYGGYSCFGEGRLGYVSGLNFVCLMIN

SEQ ID NO: 127989 - protein, 107 aa, Heterodera glycines
MMWINTNRKLRRELGLENGNKNGEKKFLERQNTSKLIELQEFLIFYSMSIEQVFTFWSKTKENLINKKYDNNKCNFFLYAKVKKNLAEITRERMSEFVATRIELENM

SEQ ID NO: 127990 - protein, 193 aa, Heterodera glycines
MDMVKEYMDLVQWVVEITIVPLVEQPILGIDPSAFLALLSQIQSQNIACFLISKQHKMDLDKLISMAGDYLQRALGATNKIRNIFIDAITEAMMHAENNGGQQNGPNLLIQNAKIYLKIYQTIAVCMLDEWVPMISAVPSIAYPWIAMKTFLRQSADQLSELIAEWKMAKEHQFSDRELEEKAIRKFFMKNCN

SEQ ID NO: 127991 - protein, 364 aa, Heterodera glycines
QTGLNFGSSTDQNQVPNLGLNIGNVSNQQNFLATNQQFAHNNMAPKNSNIQSQMNTLGVQKKPKKQRNRRKLSQPTYLLESDAKNFANNVQYWTGGKFSNLLSNQTAGPSVPNTLNANQLNSMPGPSLGQEFQNYQLNSMPGPSFGQRNFQPNSMPGASLQQLQNYQLNSMPGPSLYQTWQNHETNPTPRRQFEQQNNTLHEIHLQSNMVNSLLCAQNEQQIGIGTSKQFTTVFGMQTPNIEHGNAGFYAELLTFINRLIESAAISSHNNVINVRRIVDLSLVCLDIMPHSVDTQLEFIKSNELTPNVVLYETRIGHNIDAAKVVNCLNERLIAAINAHECLEVFKPKVADIQREIELMFGQNQ

SEQ ID NO: 127992 - protein, 116 aa, Heterodera glycines
MFVGCCAILWFYWNHFKKPPKKKIFISADCWLCVFDLLTPSQLGHGIAMISHRFGIYVDEHFKTRKWALKFIQIHSKIGENGTKEVEIVNDGGEALPIPQIEMPRKVIGFERISIL

SEQ ID NO: 127993 - protein, 59 aa, Heterodera glycines
GMCLGFAFRISHYSHFLAFRISLFAFRFLARNATFTPLRIGLNSHKIFQNFTYKLDNFQ

SEQ ID NO: 127994 - protein, 33 aa, Heterodera glycines
MENAVAKTHSAIVRKWAALLALFSPALTLLLSS

SEQ ID NO: 127995 - protein, 37 aa, Heterodera glycines
MPEEHQNEDGNKWNRNGPRHPTTRHLPWHFVLSLFWP

SEQ ID NO: 127996 - protein, 93 aa, Heterodera glycines
MLFPIALWNLTHRLEIGLSRSNNSLEAWHNIWGALLEPNPLFSKFVKRMLKEFERWQHIVADFHNAPANGIRGKGLKRKSIYLQQEQFAATLR

SEQ ID NO: 127997 - protein, 129 aa, Heterodera glycines
MFFMYSQGTAGAQSAGDGKPAEPIAEATPPSADIAPSKNALGANSLKKSEYCCANVFQNEYLSCEFFLHVAAWPNGRSAAEESHWADGDGAGSGRNGAKGGRGTHSRAHGIVVHDEKAMGEVESADRNC

SEQ ID NO: 127998 - protein, 89 aa, Heterodera glycines
MTFAFFEAPTLFLTVTLFQNNPTDGITVVDDGDTWSKVGKKGGWQKLSLGQRNFKGHGHPQPFLHAYNWAEGKAIIQRHCVNQPHVLAW

SEQ ID NO: 127999 - protein, 765 aa, Heterodera glycines
MGQENKNLNTRVNYALYRLNAERRQQYEQIYVQACENTKFQLQLAKAILQINPNEGVRKIFDRDDLIARWVGENLEIGFCVPIIPEKIFWDHKVDGECFEWLPINAENVTFFVKPGTRELSVLGKRIDCEKVESNRIMDNETQLIIVGELSKNLEKIKPKYRNMQNPLILKAGTLFESENTRLEKAMLEYRSKINTLPSANLRAIQRPNISEVIRLIKEEANETLGAVFGKTGDWIDMVKNIPEKAREAVNHLKGISYLLILIPLLLLIALVTYFGIKYRVIICAGFRAGTLLVRIIRRILGMKRQKTRVAAVPTAPELDSMDQEAYVLDYLPPRRVAVITNDPRRLPSIHIQINGLSTTALVDSCASVSYCREKTALRAGLKISELNDEKVNLLTANDTKIQILGKTCAKIRIKDEMSGKIREWDAILLVSPDKHCPGPVLIGLPLLMELKGIISWAEKKVRLGEVWTNIISVVGAETSKPLRITMEKTEIFEPWTENIVMARVNEVFPSEQNFLVKGVQHQYPGIIVGRTLVAPGESKNVILQLMNAGKAPVKIYGNSHLADLETIKINALPGDEISPKDYIPPEARWSTKLPTLPKPGLNRPPSKRICLEGTKLSNSGQISLKNIVDKYSEAFVGDDGKIGLYNGPMQNVMAMLLSIRNKALDVHDEAQNAWNELMKMKGKGEKKEEEGMDSGLPGFSTADWQSDHDRWRGQNRWRGGRGARRWGQPWRGREWNQPNQGAGPSTSAASQEGQWNFSKMAGYG

SEQ ID NO: 128000 - protein, 39 aa, Heterodera glycines
MAKEYSKYLCGFRQKENINCFDEHGQMVSFGFMQLTFVV

SEQ ID NO: 128001 - protein, 114 aa, Heterodera glycines
MCACDQRIVMKPELDDVALQLSQNQFGQQLNQTVDGNGANGISGDCVSADQVPTTAQIIAMINQYSYTYNLINGKSSGVTVSDSSSNAEITSAIGTIMRQTSQLQQQLQSNSKK

SEQ ID NO: 128002 - protein, 79 aa, Heterodera glycines
MFLSAQSVAELFSIRNWLRFLVVRQRIPHLILGIQFAWVVEEKKKKQKSSANAISPKKRCRTICNKMLTVFGIKKLGKK

SEQ ID NO: 128003 - protein, 49 aa, Heterodera glycines
SDECPLGRLRTFGVALGDEVQDQNLMLDRIQKKTERNDGVIRSQEDQMR

SEQ ID NO: 128004 - protein, 29 aa, Heterodera glycines
MARAHLAALKWLALSWPCTPPIGIDFIAR

SEQ ID NO: 128005 - protein, 47 aa, Heterodera glycines
KWREIARQREWRGRVAARDKGNGEFGWREGKGGQINKSINGISQFLT

SEQ ID NO: 128006 - protein, 59 aa, Heterodera glycines
MHSDKEPEKTAQLFTMESDFKINCFANSIKQAITFSIFLMSTLSRRHIQFHNGIIKSIE

SEQ ID NO: 128007 - protein, 139 aa, Heterodera glycines
MGAGPDKEAMQKALLTSHAVPMPSDMVQLFIQLWHSSKFGAVPQQLRAIKCPSRSRRRRKRQNGGDLSLFDLVMFIVSVYVASYVVELLKNLLEKGNDFLEFNIVSISITIFIFAFIRQQPMPKLGAKFIAERIIERLG

SEQ ID NO: 128008 - protein, 50 aa, Heterodera glycines
LHRIAEKIRDQFPNVDRLIAKTKAVFVKAPYRVKKFGNISHMQFQLINLK

SEQ ID NO: 128009 - protein, 26 aa, Heterodera glycines
MSAIVPHFPSTKLTQVVLLVHHRIFH

SEQ ID NO: 128010 - protein, 40 aa, Heterodera glycines
MPRIIIFFKIKVLVRNCVTAQTFYFRLTEKTLGFQMVPRM

SEQ ID NO: 128011 - protein, 184 aa, Heterodera glycines
MPSSDGKSPPSSEQSNVLSLAFRLCWSLSVEKKFFFNLFPVVLCLDCVSLAVFCPVPVSTTPTRTAAGVRCVAARNAGVAAVPTLTARRAEPAMVGTVARPSIARCAVAGVHGGKFGLARAAASARATAVHHRHRFILITSVGIVPSCDNCLCNEQPLQCAVINATAKPTATTVCVQERYSESR

SEQ ID NO: 128012 - protein, 55 aa, Heterodera glycines
MYPWDYIEKVFVWFRKFFCSGESKKFTQEQRLLQNKGSADNFPILRRGLRPCKLM

SEQ ID NO: 128013 - protein, 51 aa, Heterodera glycines
MTALMVDAKMHFDHRVGWSLVSMRSMGAVRTKCDPFFVELLGTGTGTGTDR

SEQ ID NO: 128014 - protein, 39 aa, Heterodera glycines
MKNPCCKALRIYEEQFMVFCVMCPYVKSDDADKEIYVDN

SEQ ID NO: 128015 - protein, 75 aa, Heterodera glycines
MSLPTKATTPITTNVPSKAEAKGGQNGTIWIVAIVAIVAIVAIAIFVAVAVTAVAVPTITTIVAALTQSVALFCG

SEQ ID NO: 128016 - protein, 39 aa, Heterodera glycines
MLKSANELVDNASKLPLEKQNATKMFELVKPNLFGIVCD

SEQ ID NO: 128017 - protein, 31 aa, Heterodera glycines
QSHFLPQFVQQQHLSASQFPQWQFAGPKLSV

SEQ ID NO: 128018 - protein, 131 aa, Heterodera glycines
MHFFPAIANLYFVGVYSRNVVPHILIVERILATVFVRSYEHWRGYLFTIIWAPIALTVCIYIAFTTSPHSVRPLANLITTAVEVLTGSVELAIFMKLCAYNLKIYQKMMQNEGQHSLSLRYQAILNFSNLI

SEQ ID NO: 128019 - protein, 192 aa, Heterodera glycines
MCAKSDKLPPSSAASSFSSPAYGRPPSAFTAASLNRAGSPYSMGGGSEYGGRRKGVSWSDVVEEPKPTTRTRSDSPPPASFIRHSMPQNPFDRADGWVSSNPWTGSLDHRGGRSRDKERQGPGSFFKPDLPTYSALGRSPDNFNPFQTHLHREEAKGLRKSQEREELIKFHSYGDHKVSGIEMKPKGWTGGE

SEQ ID NO: 128020 - protein, 44 aa, Heterodera glycines
MFVKCWIVNCNIKCLAQMFCSNCKMFVKCWIVNLIVKCLSNVGL

SEQ ID NO: 128021 - protein, 258 aa, Heterodera glycines
MTMLRLLRIVKGACFLRQNLNQMIIGEFYRKWVHNCANGCVLPENIGCCENATVTPDKHWRHRNDELCSPCAELGLIRLPTVEDFSACSTLERSPKSARGAYGGTFPPDTVPSPDSAAGGAPLAPHEEPLSASVTPLPPTESERSNNDGTSAKKMVNTVVPIGTVALLEYWEIRHYPDSFWHRNAKDFRFPSNSRPSMAMALFHWKCPRVLPQLLRWHRTLPRPHVHCICSPICPRLVRPHRMNVAQLMESNENKLEI

SEQ ID NO: 128022 - protein, 456 aa, Heterodera glycines
MILPAVRNQPSNSDQTKQLSVNDDSNMLMRVNPANNLPEVIASVTNSQQLTDQNNQPLTENPTDQSVRSNQNNQHEIQEILHLPMKNQQNNKRAAAPNSRQEFGFDLEKVPKAKKGKGLAEWLGHSIDQKQKIAVENASEQPTITDHINLSSQTTQLNNLNNPTTNQSVVDLSDKTLSTRQTNEVGQNQTNNDNHSEQSQPVTQQIKDAQTQILPKPDGLLGWLYRNMDNSENHDNSFDQSNCPSQKNQTNYSADTSTDLLMLPNTVNHYIHSNPMMTLSQQNYYNQENPSTSTNQSTYPDHANTMALNNQSIYADQANTYALNNHSTFSDQTNSLALNNQSNYPDQANSLAMNNQSNYPDQANSLALNNQSNYPDQANTLALNYSDQANPLALGNQSTYPDRSLFMANQNNEVNGLIPTIDSDQTDQTILQSNKGSTDNNCSKMCKFSREMFRQC

SEQ ID NO: 128023 - protein, 159 aa, Heterodera glycines
MADNDEEHERLAEQGREWKAARRAESIANLFGGAPPPAQDEEDEDEEVEDEGVEDEQRPRRARSAGRRGGDEDEEEDEGGRGRPRRRGSYFFSCFLKLMLAEQGREWKAARRAQSIGNLFAGAPPPPPAQEEEEGVEEEVEEEEVEEEEDNRPRRVEII

SEQ ID NO: 128024 - protein, 48 aa, Heterodera glycines
MATNYIKYRSYLFFKDSYKVLPLSVFDLTINEARKKRKEPMIMNQLKN

SEQ ID NO: 128025 - protein, 173 aa, Heterodera glycines
MPCCEKILKNKLENFKRIVFDVGGQRSERRKWIHFFDDVNAIIFVAAINEYDQKLREDNKTNRLIEAMELFDGIANSKFFTKSSMILFMNKKDLFEEKIKRVSLNILFPSYKGDLTYEDGVAYLRVKFRKLYRNKRSLYIHETFATDTNQINTVFRSVLDTILQENMQDTGML

SEQ ID NO: 128026 - protein, 1899 aa, Heterodera glycines
MVNISINIGSIFLFAFATSLCGGKPNDDKNAASSSSVPSETENPKNEESKKNLVIITDMGADDQFTLEMISATELAGKVLAIGTTEKGRKAALSQSLGFEKVPVYVRSSGEEYEKMLFMNPNQKDTKREENEFQHFLKNLLDERLKTNAMKVHFLVLAPPIDLSAVLLENRQLAKAVGQIHITDGCKNCQELQPPTPLSLNNFLRQLPREHTKPTTYNVSMDALATVYLLEMAANGEVNVLLVSSSLLAEKFGDGVEFGKKFPNLKLTRKKKTLGFKIIVEREKKCQQKPHIDEQFSAAGPIAVLAIMDMTNVRVDGVPESDNFVLFTTQSKKVSLITPKSGEQKPEHGEYQVEIGIKKATKIRLLVNFNVDTFGNAMTLILEKINKQRQEAKRNLVIITDMGVDDQVALAMISATELAGNVLAIGTTEQGKEAALAQSLGFEKVPVYVRSSNEELEKMVFMNPNQKDTKREENEFQHFLKNLLDERLKFMGVKVNFLVLAPPTDLTAVLLRNKKLAEAVGEILITGECKNCQDLQPPAPLSLNKFLWELPREHTKPTTYNVSMDALASLYLFEMASNGEVNVLLVSSRLLAEKFGAEDNFDKRFPKLKLISKKTMGAKIIVNREEEFEQKPHIDQQFSAAGPIAVLAIMDMTNVRVDRVPESDNFVLFTTRSKKVSLITPKSGEQKPEHGEYQVEIGIKQATKIRLLVNFNVDTFGNAMTLILDKSNKQWNYKISSEKQKGKEKNQDPNDEKNTASSSSVPSEKENPKNEEAKKNLVIITDMGVDDQVALAMISATELAGNVLAIGTTEQGKEAALAQSLGFEKVPVYVRSSNEELEKMFFMNPNQKNQKREENEFQNFLQNLLDERLKFMGVKVNFLVLAPPTDLTAVLLENKKLAEAVGEILITGECKNCQDLQPPAPLSVNKFLWELPREHTKPTTYNVSMDALATLYLFEMASNGEVNVLLVSSRLLAEKFGAEDNFDKRFPKLKLISKKTMGAKIIVNREEEFEQKPHIDQQFSAAGPIAVLAIMDMTNVRVDRVPESDNFVLFTTRSKKVSLITPKSGEEKPKHGGYQVEIGIKQATKIRLLVNFNVDTFGNAMTLILDKSNKQWNYKISSEKQKGKEKKQDPNDEKNTASSSSVPSEKENPKNEEAKKNLVIITDMGVDDQVALAMISATELAGNVLAIGTSEQGKEAALAQSLGFEKVPVYVRSSNEELEKMFFMNPNQKNQKREENEFQNFLQNLLDERLKFMGVKVNFLVLAPPTDLTAVLLKNKKLAEAVGEILITGECKNCQDLQPPAPLSLNKFLWELPREHTKPTTYNVSMDALATLYLFEMASNGEVNVLLVSSRLLAEKFGAEDNFDKRFPKLKLISKKTMGAKIIVNREEEFEQKPHIDEQFSAAGPIAVLAIMDMTNVRVDGVTESDNFVLFTTRSKKVSLITPKSGEEKPNHGGYQVEIGIKQATKIRLLVNFNVDTFGNAMTFILDKSNKQWNYKISSEKQKGKEKNQDPNDEKNTASSSSVPSEKENPKNEEAKKNLVIITDMGVDDQVALAMISATELAGNVLAIGTTEQGKEAALAQSLGFEKVPVYVRRSNEELEKMFFMNPNHKNQKREENEFQNFLQNLLDERLKFMGVKVNFLVLAPPTDLTAVLLENKKLAEAVGEILITGECKNCQDLQPPAPLSLNKFLWELPREHTKPTTYNVSMDALATLYLFEMASNGEVNVLLVSSRLLAEKFGAEDNFDKRFPKLKLISKKTMGAKIIVNREEEFEQKPHIDEQFSAAGPIAVLAIMDMTNVRVDGVTESDNFVLFTTRSKKVSLITPKSGEEKPKHGGYQVEIGIKQATKIRLLVNFNVDTFGNAMTLILDKSNKQWNYKISSEKQKVEHEAERYPAREFTI

SEQ ID NO: 128027 - protein, 47 aa, Heterodera glycines
MNFYNSNITVFLVIFALTGICKFGTIASPVHNEEAELKNTQPIFEIG

SEQ ID NO: 128028 - protein, 692 aa, Heterodera glycines
MVNISINIGSIFLFAFATSLCGGKPNYDKNAASSSSVPSETENPKNEEAKKNLVIITDMGADDQFTLEMISATELAGKVLAIGTTEKGRKAALSQSLGFEKVPVYVRSSGEEFEKMLFMNPNQKDTKREENEFQHFLKNLLNERFKTNAMKVHFLVLAPPIDLSAVLLENRQLAKAVGQIHITDGCKNCQELQPPTPLSLNNFLRELPREHTKPATYNVSMDALATVYLLEMAANGEVNVLLVSSSLLAEKFGDGVEFGKKFPNLKLTRKKKTLGFKIIVEREKKCQQKPHIDEQFSAAGPIAVLAIMDMTNVRVDGVPESDNFVLFTTQSKKVSLITPKSGEQKPEHGEYQVEIGIKKATKIRLLVNFNVDTFGNAMTLILEKINKQRQEAKRNLVIITDMGVDDQVALAMISATELAGNVLAIGTTEQGKEAALAQSLGFEKVPVYVRSSNEELEKMVFMNPNQKDTKREKNEFQHFLKNLLDERLKFMGVKVNFLVLAPPTDLTAVLLRNKKLAEAVGEILITGECKNCQDLQPPAPLSVNKFLWELSREHTKPTTYNVSMDALATLYLFEMASNGEVNVLLVSSRLLAEKFGAGDNFDKRFPKLKLISKKTMGAKIIVNREEEFEQKPHIDEQFSAASPIAVLAIMDMTNVRVDGVTESDNFVLFTTRSKKVSLITPKSGEEKPKHGG

SEQ ID NO: 128029 - protein, 37 aa, Heterodera glycines
MTLILDKSNKQWNYKISSEKQKVEHEAERYPAREFTI

SEQ ID NO: 128030 - protein, 47 aa, Heterodera glycines; identical to SEQ ID NO: 128027

SEQ ID NO: 128031 - protein, 130 aa, Heterodera glycines
MLELLNQLDGFQPNDDIKVIAATNRVDVLDPALLRSGRFDRKIEFPAPNEKGREQILRIHSRRMNVDKNVNFVELSRCIEDFNGAQCRAVCVEAGMVALRRDSTKILHEDFMDGILEVQCLKKNNLVYYG

SEQ ID NO: 128032 - protein, 28 aa, Heterodera glycines
FRPYFANFLPLFRSLNWNFSPLKIRTLI

SEQ ID NO: 128033 - protein, 197 aa, Heterodera glycines
VVHDIYECKHNTKGLNCEQCQDLYNDLPWRPGDLYNDLPWRPGSGEQSKERGECECNGHVPRCHCHFDWSVYNSTAFASGGVYDNCQQNTRDRNCEKCKLYFYKQSQSSLQDPNVCRPCQCDKRSLQDPNVCRPCQCDKRGTQNDGTCVAEDDTAHQLVAGQCLCKENVQGKNCDRCKDGFCDLSEDNSKGCKKCHC

SEQ ID NO: 128034 - protein, 89 aa, Heterodera glycines
MPRIADRGRAPPLGRSGPGLFGLKNRDFLAGKTGKKPGNFPVPFKTGQNRDFGTQLYSVVRGLVPVPTHSIFCSNKMSDNRKEAEAKAM

SEQ ID NO: 128035 - protein, 377 aa, Heterodera glycines
MASAVKKRKKFSSDNRRLISSTGIGENEQQKSLGKRRILFRHAKKMNNRILRKIWICTDVLMDILPFFDHAQLGLKLALISPRFDVLVDTHFDGKSEWPIWKLVEIHKDRGSEPKLRVFTSYVDFTNIMNFPLPDRPLPEKTRFKRLVIMYIDHSVIAFLRSNKQIFNGTRFALSLSVQASKNAAQPIWDVLAREIWPIIAPNIRRLYVPDADHLDNLRSRTSPTILTDFNINSILSGHLLPDVLDDFDGPNATASAGQSLSKWLHTPTTDGKPKRLRCDDFNGQGNAEWVHNFKEPFLRATSSVCYIIQFFAFSSTPIVPFELLNERTNEKLTLTMSTEYIWLLMRCQIGQTFQWDAKNLNFFVGIHLYGYKKCIG

SEQ ID NO: 128036 - protein, 67 aa, Heterodera glycines
MNAGIWPFMKSLFVIFVLVFGDAFGFYSIPQIKNKILGLKICKRLYNQNLHILEKTNVNKKFSYVLL

SEQ ID NO: 128037 - protein, 273 aa, Heterodera glycines
ENCSSSNHSSSSDHCCTSSNNCTSSNDCCTSSNHSCTSSNHFCTSSNHSCTSSNHFCTSSNHCCTSSNDCCTSSNHSCTSSNHCCTSSHHFCTSSNHCSSSFNHYCTSFNHCSSSFNHCCTSSNHSCTSSNHFCTSFNNCTSSNDCCTSSNHSCTSSNHFCTSSNHSCTSSNHFCTSSNNCTSSNDCCTSSNHSCTSSNHFCTSSNHSCTSSNHFCTSSNNFTSSNDCYTSSNHSCTSSNHFCTSSNHSCTSSNHFCTSSQKSTSSNDCCTSS

SEQ ID NO: 128038 - protein, 75 aa, Heterodera glycines
MPKVEGEPEKKRLKSRGNQRKRDSKAEGTREKETQKQREPEKKRLKSRGNQRKRDSKAEGTREKETEDNANRNMI

SEQ ID NO: 128039 - protein, 46 aa, Heterodera glycines
MLKKKRQCIKGGKERKKIVREKSEMKREIVFMLYLFGYLSNCQAIA

SEQ ID NO: 128040 - protein, 85 aa, Heterodera glycines
MIGRAVRNRPFIFEGIFKFILYPRKMAISFFEKFYTSQKRLRMRRRAVHNRHFISQRIFIFRGYPKNAISFLIILYTYNALEHDR

SEQ ID NO: 128041 - protein, 92 aa, Heterodera glycines; identical to SEQ ID NO: 125147

SEQ ID NO: 128042 - protein, 18 aa, Heterodera glycines
MWIPDNRTVDNPTLDNPT

SEQ ID NO: 128043 - protein, 400 aa, Heterodera glycines
KKILAILTTALNNDHEQQKFAFNGLPFHWIVVIVMKELPSTDAVLYLHCSCTLLFVPFRQVLFLLQPRRVPGFAYHWLDIIGHRNFIGRLLSESRDLARTSAIYTQLLLCHLKFLAPFLRNVQLPKPIAYIYKGTLRVLLVLLHDFPEILCEYYYILILCEYYYILCDVIPANCVQLRNLVLSAYPCDMRLPDPFTETMARIECLPEMSNHPKMHREMTNVVPSELRKRIDAYLETRSVVYLSDLPSMLSSFTTTTTKYSISVVNAVVMYVGVRAIDSIHGKGQRVSMETIAHSPFMDIFQNLAVSLCNEGRYLLFNAIANQLRYPNSHTHYFSCTLLYLFLGANSKHIQEQITRILFERLVALRPHPWGLLITFIELIRNQRYGFWKHEFVYCATEIER

SEQ ID NO: 128044 - protein, 327 aa, Heterodera glycines
TLILRKNRQIDKCKAKWIDRLAESVAIRSVSPSAEHRQEVFRMIDWTEKALLRIARNKQKNPLGTETLSDGTTLPLPPILFGTLGTDKNKRTLLVYGHLDVQPAAFEDGWNTEPFQLIEKDGKLFGRGSNTEPFQLIEKDGKLFGRGSTDDKGPVLGWLNVIETMQGLGIDMPINIKFVFEGMEECGSFVFEGMEECGSDGLDECLEQRKDFLSGVDFVCISDNYWLGKQKPCITYGLRGLSPFAIEISGPNQDLHSGVYGRGLSPFAIEISGPNQDLHSGVYGGTIHEPMNDLCWLLSQLTDTKHEPMNDLCWLLSQLTDTKANIL

SEQ ID NO: 128045 - protein, 125 aa, Heterodera glycines
MLCFIIGIITDKHAQIPRVAQPAMMGLMLTAINMAFGLNAGNAANPARDFGPRLFTLLAGYGWEVFSYNSFGWFWVPIVCPFFGAIVGTLAYQLLVSAQFGPTKEGKLLENSTNSSAEPSLAKAQ

SEQ ID NO: 128046 - protein, 230 aa, Heterodera glycines
MLIHPFFCSAYTDLANSRLSQRESVFYDGSFPLLLHNLRLLSSDAIVSNSDEASTSDKQQKESKNGGTPTYVVKMFRDEITINFYSVQHIVIVEWMSNPVNDLFADATLSAILHAQTNPILDKNVPKDFGAKAQQIEQNLESILVGTLCELCGDKSLVEVKEEENQGEKDAAAEESDKKEGKRRRVIQLELDGKKACICPVSLQITECEDQLLHHLLSSLTQKVAHGILP

SEQ ID NO: 128047 - protein, 287 aa, Heterodera glycines
MGWSTPADAECQFEHMNTWDGQFHPSENVWTHKEIALSFDGKAQKIKDCDRTLVATDQGFAVDAGMFLNMINNANGPSGVPKKGQSPGGAQKRSLLPVDQFSADTNMRLEMMKQNANQTKAIIPKSVAAAPKTEVPKPAAPRPTVGPAKPEQPSRKAQLQPVKLPTPKQAAPIQKAIKPKTTTTAQKYQPPRPTTSPKAEPPKPIVAVPKVPSPVTTQTIQPTSPSEGQPKSRNRGRFRTRYVVRRNQSEPEKLRIYDSPRQKRATVHTEQLASQLTASQVNTMVQL

SEQ ID NO: 128048 - protein, 154 aa, Heterodera glycines
MRRAYALASRAVRPDLEVFLGDLFDEGVLLGGDEQQFVDTRKRFMNIFPLNRYSTNRIYLPGDNDIGGEMEPVYAELYERFKQHFPPHFTNGSDNFKRFVSVYESDVINFGAVNRICCDQSDGTNTVRLLLSHFPVLPHATVKTEQVNKDVQTD

SEQ ID NO: 128049 - protein, 249 aa, Heterodera glycines
MDQLQKRLAKLQAFRPPYLDEYERYEAQLRVRYAVYVILFRNLHALQSRLVQSEHAEREQALEAERSMREMVEKMRMESEQAAPLIAGIPLHIDELNQAADDELEEYGQNGRQRRPGAWMGRRSRRDFPGIPIPALLGHGFPLMRKDNVPMAVVLFSVKSQFPQTEVRVFGNMTGLGLSDDDEEDEEEDEDGLGGGRIIEMEDEEELDDDDDDNDDYMNNFIRGGGNGSTAAAEGNTTKRQRALIESKK

SEQ ID NO: 128050 - protein, 340 aa, Heterodera glycines
VFKKTSPNGKITTYLGKRDFLDRGETVDLIDGMVLIDDDYIKSSKKVTVQLLAAFRYGREDLDVLGLTFRKDLISQLYQPAQGDTGKPCGVDYEIKTMVGGDSTQEKPKKHNSVRLAIRKLTYCPQLERIQPMVDVTKNFIISPGGLHLEASLDKEMYYHGESIAVNVHIQNNSNKTIKVTVQQMADICIFTTARYTCDVDKIDSCEGFPVGPGSTLSKIYSLCPLLLKNKDKRGLALDGQLKHEDTNLASSTTFAALRQSVHENLGIIVQYKVKIRLLIAGALGGELSAELPFTLTHPKPTDSPHPTEKKANVANCHEQQTPPTNGAQQREQKGNFVAD

SEQ ID NO: 128051 - protein, 41 aa, Heterodera glycines
MARKDFRFPTFLGSEFRLPKFLMKSRKFLNFFFKNVSFVQF

SEQ ID NO: 128052 - protein, 133 aa, Heterodera glycines
MSIFISLFAVFCLGLHSTALQCKVGHYSNYGAIIEILECPPLKTEFCIAYGCQKEPNDVYMGWQCSESDKCPDLSGANAFAGLNLTGCKCKIGEKGANLGNENFTFPIDDPASSEQNDAYHSSMESPDKSSGN

SEQ ID NO: 128053 - protein, 16 aa, Heterodera glycines
MGKNMDVQKRLKMLGF

SEQ ID NO: 128054 - protein, 95 aa, Heterodera glycines
MDPGFWLGSSTAHQTDEGRGGQRREAKRGRRRRRFGQMGRSDGKAKWENKKWILNGALFKVKRAKAEADRRAKLDTEKEGTARDAIKELEKVGVE

SEQ ID NO: 128055 - protein, 178 aa, Heterodera glycines
MHKINKNCENIESEKILISSVVIYRIACGEGLYQHLLAYEVPLVKHLLAHRWQSQADTDCRQQIAEHPIHTIQHQSANAIKPRVMEKLYGNHGFKNYIQISMKKNVGPAFSDRNTRLAHSSTRAWSAPNVLSPFWPRSGTARVPRHAILMDDNGYPTDKTQQSHPYVQADEYKLFKNV

SEQ ID NO: 128056 - protein, 243 aa, Heterodera glycines
ESQQGGIPRKQDIQVEHSVIQSTPFAQTDIRMNRGRFQLVRKRGRSEVWNLFGQVVDMLTGQRLPYVACYACKVLYTDTGGGTGNMTRHRCSMGSSYRSVRRCGAAIGCGSFQMLICCRSSSDTTVGNESIASSVTQSSSSFESVGGVAGTGNGILMTSASSFALSSSTADKQLFVQAMVQFCAQDMHNCEVVEGEGFKNLVEGEGFKNLVETVLFIGRRSHENPSANIFATIRNLIPTARQL

SEQ ID NO: 128057 - protein, 82 aa, Heterodera glycines
MASQPHFFFLLLVLPTTSFPSFCCCTSCCITAVVARRFSDGIRAKSADDELAEQDEAEADDADAAALADDGAEERDVSEAGA

SEQ ID NO: 128058 - protein, 126 aa, Heterodera glycines
  unsure (1)..(126): unsure at all Xaa locations
MAPFSLSPVDRMRQSVFRVRSRLAVNLLSEGLATFLLLLVGNGIGAQHILGGGKLDNYMQVCFGWGMLIALLVFATYHTSGGHXNPAVSLAFVSLGKLPFAHFLLYPLAKLSAPFFAPALCSHIYR

SEQ ID NO: 128059 - protein, 143 aa, Heterodera glycines
MKDCVAFGFIAQRQMALDEYICTRDGTYAWLSNSLLWKNGSHTIDKRCKYGAGDTVGCGIDLANRKIFFTKNGIRLGSSDKCLIFEYFCTTHFVRHEMDMDQMEAKCQHRGGQHALGQPENFEAGRNAATAAFPFLVVRIEVH

SEQ ID NO: 128060 - protein, 109 aa, Heterodera glycines
MQNNQFALLERISELEKQQLKQQKQQQDEHYDNEYASEQFTQLQNDQQQKIETNGLEKRQQKVISNYWDANFCHSDLEIIGADCLTVRHNGDIMVMHESRTDFKNATYC

SEQ ID NO: 128061 - protein, 89 aa, Heterodera glycines
MPKRCVTTIRHVSANSSEFILTVPDGWLHLLEKSRVIRQAPGERCYHIFYQIFSDHKPELRKKLKLTKNLKDYYFVAQAELTIDGINDK

SEQ ID NO: 128062 - protein, 64 aa, Heterodera glycines
VLKFIDCPCQNDDAQFFGQFHKSKKKFITLIHMVNKTIEADEKLESPSVCCVRLTLIGICDDVP

SEQ ID NO: 128063 - protein, 282 aa, Heterodera glycines
RISKDKLLFELLNPSNFLPTRRGILSDIASLFDPLGLCSPCLVKSKIFFQSLLDSGTGWDGPIGKENEQKWTEISSEWSGTSLTFSRTPGSQWKLQLHIFSDAGPNSYAAAVYLRAERNGQTETSLLFSKSRLRPNKNDGLTIPRLELLGLLIAVRAKNFITANFNRSFEKIIFWVDSQIVLSWVATPAPQPVFIANRQSEIRQEKEAFFRYVRSSDNPADLGTRGASCGELNGLRLWHTGPEWIKDSEREWTNEFRIVLPAEGNDLEKGELLSPQAGKFKN

SEQ ID NO: 128064 - protein, 101 aa, Heterodera glycines
MFVQEISAFLHTVNNFPKKLEEHKKLEEDLEWTWTSESALEFEWMNLNTEKMHLERQLEVAKYWLEEQRQRAEETQRNLKSAEKEKDSLIERIEALKDNLK

SEQ ID NO: 128065 - protein, 147 aa, Heterodera glycines
MNSLNGTASSSNRMQREQTGQTNGDAAAVPRGHPAAQRNAANSSSLDAAANGRQAQQHANSAAQRPDRTNRPQRGDQTRQTSAARPTRPIVQTVQGQPAERDQQRLQRNNEGTTEDEENALQANRAQLTLSDIAAGRQGKMHKFMHK

SEQ ID NO: 128066 - protein, 95 aa, Heterodera glycines
MSAKIEESKILKIIRSNLFFFFIFQGRCHYVLRSHGLYAGQRADVGDEPANFFAVQANVMELEMYIDEKAVATATTNAASSGNGNICHRPGRRRW

SEQ ID NO: 128067 - protein, 34 aa, Heterodera glycines
MAQPNTPTVEVALLTRIRNRPILYNWLPVRVHDA

SEQ ID NO: 128068 - protein, 79 aa, Heterodera glycines
MNSLLCAKLNAAAATMADIYGALLLHAIFDGSKDYTMVSVSFRREHQPFLSEFGALCTNLRHFLLDIKQYLDERFPADF

SEQ ID NO: 128069 - protein, 173 aa, Heterodera glycines
MVDGTHAQQKMLQEEGKDSENQHRISTYKLIEEVLHGEHGQLMAQQRQSKMAAEFVYNEITQRFGIRMGPGVMHVDLSKQLSYVLGFDHKTRIYKNQSAKYPPDLSGGVRQLYVYAPKLVEDSIIGDRMAPLLRVVNVSGTPGLDMPETAFGRYVKFGWGTTVITLHFRQKLF

SEQ ID NO: 128070 - protein, 63 aa, Heterodera glycines
MQPTLAHWDVIPKLFVPMSVTIGFGDFCPPSNIAEGGDSANHYGGWILFILVGLTLCTLTVKP

SEQ ID NO: 128071 - protein, 33 aa, Heterodera glycines
RRMEVPFGLVLVVIRRPMAKWRRPIDRRKCQIL

SEQ ID NO: 128072 - protein, 155 aa, Heterodera glycines
MASDRCAVALTFWLGNGVNVQPSYYNSGKVSLGLSQLKTLAPKVKTVRIEVEPFIPISLAKQWISEAAKNGFSIIVTYHKATVLGSNDANELQQAANWWKTNYKSLAQSGKFVLNLMNEWGDHTITSSAYAIAVNNALKIVRQVYSGTVIIDAPG

SEQ ID NO: 128073 - protein, 182 aa, Heterodera glycines
MNSPTNFNNFHSTTKCVPLENGSDREKDSTSNNNHKRRKDNVKSELIDNAIGSPKSNKRAFFSADCALNPTALAEMMPSSRLSMGMAGRLRDIVAIFPQNDLASPGKLLFREQMTNSDQRVFSAKGQADVPGMNAKEISFVGREEAAGEGFEYILAIVDRRTGRASEIKRTALINFQLSKER

SEQ ID NO: 128074 - protein, 400 aa, Heterodera glycines
MEAFVGWLVFQLPLKYDTYAYSHYGGRFDMVITFRELFRRGFNPEMLRKGNKMYEMKIGAQKKRNPNIIFRDSFNLMPCALGQLVPAYGLDVEEKPFFPHMANRPDNYGRQIFPTPEDYLAQGMMPEKRRQFDNWYEQHRSEPFLLDEALASYCTNDVEILMAALVAFRSEFFSITRRECYVVGVDDRENHGGIDVLKQCMTIASACMKHFRTNHLPENHLAIVPERGYDNAQNQSLLALRFFKWYEEKHNLKLQTAHSAGGEKRVANYSLDAWVEAEKRAIEVNGCVWHGCSKCFPEDNMLLPNGKSAGEVRERDGKRLEFLRKQLGRVDVYWECEIERMLAEDEEMRRAFASYVDDGPLDIRSAFMGGRTGPLKLFHKAQEGERISYFDFTSLYPFIK

SEQ ID NO: 128075 - protein, 91 aa, Heterodera glycines
FRASCGGGVAATVTRARRAHLRARLVRVAPWRAVAGQRTALGGARVARPFAVQLVVDNDGTDGGQRGQRRRWSTHGTERACVRRHNSCWQT

SEQ ID NO: 128076 - protein, 49 aa, Heterodera glycines
MQEELSEDSDDAINFFEDSIEDIVEKINCSETKIKKWAAQRVNVADAKT

SEQ ID NO: 128077 - protein, 168 aa, Heterodera glycines
MRSKGIPCRKKLDSEDFCVSCVHRAKKPSRNLYLRVVLQDCDDEECEQETTAFSYAAINFLSIASVEAFYNLSENAPNKLESILQSKIDQPLLVKVNIKENNDTAMLDWIISSISVEKPVAVKVLDDKNNDDGVEEEASSSEPPKKRTKNNQVERAIGEDADDIHTIE

SEQ ID NO: 128078 - protein, 140 aa, Heterodera glycines
MNQAVYNRIVSLPWRQLQMLAKSRGIAANQKKQILIKKLTANFSGTNQQHNTNTNGQNDDGDGTDNEQSFGDGTNGQSDDGDGTDNEQNFGGGGGTNGQSDDGDGTDDEQSFGGGGGDNNVEEEQEGGSNNNSQLSLPDG

SEQ ID NO: 128079 - protein, 183 aa, Heterodera glycines
MCQPTHFFLPLFIFSANKLLAENLAEALKCKQGFEMRPMVEQQMDPDECVDVAFPRYCEASICTTADEMPTFASIHWKCVEEKNATECGERMKQIYEKNGDLKNVTCQCHYGEEGEDFGNKNFTLPPPADPADKVPMCKIGMIHSASKRGLIDIGVCKKDHHYCFAASCSIKGKHILSSTCTW

SEQ ID NO: 128080 - protein, 19 aa, Heterodera glycines
VEHKRQLARWDSNPRPQQS

SEQ ID NO: 128081 - protein, 81 aa, Heterodera glycines
MYTTTTTTTTPTPAPVVATFFPTWAETFGHGLSIKAEGITFHACLRGRKSTKQFVLTGNQCLFNAIGCYFVFCYDGNECFI

SEQ ID NO: 128082 - protein, 113 aa, Heterodera glycines
MVNVKKGTVIRCDPAMRQFLKHLDETRALGRPFIVKAILASFSPTADGNEQSQQQKEQFLRWVRQRLRRENAMPAKDTLQHSDKRHPTDLSVRKQLGRIAKRLRELVHMSLCL

SEQ ID NO: 128083 - protein, 180 aa, Heterodera glycines
SFFALRTNERHSIDDEFAKNFAEKMDRIYHKMEEQQKQLAINTAEKIVNSDEIQSFVSAATHEKLAFFVCGIAVCLLLLLIKGNADKILTGKFGRRNGKSDDEKEVEEEKRTDEEGMEENCRGGGEIGAREEEPILVANDGEEEEEEEKEEEEDEREKVVGKGMRRRERGGWNGGTFEGN

SEQ ID NO: 128084 - protein, 24 aa, Heterodera glycines
LLIHGLLIHGLLIHGLLIHGLLIH

SEQ ID NO: 128085 - protein, 58 aa, Heterodera glycines
MLQIFLTISFLLIIGSAISNGTDEVKRVEISLRDLVDDAINWAHHIGMAWRADKKFPR

SEQ ID NO: 128086 - protein, 88 aa, Heterodera glycines
MLLLLMFVAGAIPSNKCVDIVGAPAVEAETAPNVVVVIDDEDDDDNEDDDEVPMPQSMTATGGAPERDGGERRPPPPLLAIPLALRNW

SEQ ID NO: 128087 - protein, 161 aa, Heterodera glycines
MAQQQQQQHQQQQLAPPPSTSGSISPNSGGPLQLGAADPSSVESNQSNNVFHHTNMAIGSNANGIANSGGGGLLSPPSRSGAPPVAVIDCGIGTSSSSSLSSSSSSSMTTTTFGAVSASTAGAPTMSTHLLLGMAPATNINNNNIINNNNNNNVAPTVAHN

SEQ ID NO: 128088 - protein, 194 aa, Heterodera glycines
MTKKNLSIKEKRIMLKQFDQIYGKLKTKLNEKLEGKRTKCQKIIATHLGIDISTIYKWKKQLKDGKLIKNQNKDEQKREIVEKYFKIKIKFMQNGKHSRKEWKEFRAKIKQTFCVDYTTIEKWAEKIGINQNISKERKMLTIAEKMEVIKQYYQIKKQNPKLKEDEIAKILNIPKNSLRKYKAEFGIKPKNKLL

SEQ ID NO: 128089 - protein, 248 aa, Heterodera glycines
MNISNGVHYGSASIVDTPSWLLSISLELAILELVVHLMSMLITVFNCIMVFNSGLLHTNLKWVLLAQSVSSFMSELCRFSVMVVQVPSGDIFTRPPYANILGSLYVFSNTYRIFLAYVLLAERTLATVLFRDYEQYDKVWANISWLAITLSLSFVVLITQDSSAHDYNRFTLPSIIGLFVLQIAAIVLSENIRTLKQLRPTFVFYTINVLLIYGIKFLFIFGIGCERRANKNCFYVPNAVARHCKHWH

SEQ ID NO: 128090 - protein, 300 aa, Heterodera glycines
MYGDRIVIPKVCQKKIMDPLHKGHPGIKRMKQLARQYVYWPKLDSEIEEFVQNCQPCQAAAKAPVKTDLHSWPKAEHPWQRINVDYDGPFYGKEFLIVVDAFSKYPESLKCQQNQLPPLSINCVIFLLDTEFQKFWSPYNPMSNGQVERFVDTFKRAFRKLKGEGVPGKDVIETFLVTYRTTPNDSLPNIKSPAEMLLGRKPRTTLDLLKPPLSQPSERDAKMERNFNRRFGTKQRTFQIKDRVYARHRLSHNWRAGLICDCKGVIYGVKFPDGSINLYHANQLRERRNVENLEVSEHFE

SEQ ID NO: 128091 - protein, 138 aa, Heterodera glycines
HSQPLEGSVPNPKRMGFVKIEKCSFFREQIKYLGQIVDKNGRRPDPCKIHAITEMPPPKDISALRSFIGMINHYQRVRQKMRFLRTPLDDMLKKEWDWNEKCQRAFTKLKEILASDLLLTHYDPKLEIVVAADASDYG

SEQ ID NO: 128092 - protein, 47 aa, Heterodera glycines
MRELGSAETWENTVTSYTTELQYPEASSNYANNCIFKLIFVKIITSN

SEQ ID NO: 128093 - protein, 80 aa, Heterodera glycines
MKNHQQHTIKRNHRHQGYCILNKEGYYLLYENDCISMGMICYCVRIWKDTTVFNIHERLYCMRMGKRGKERQKENSKGKR

SEQ ID NO: 128094 - protein, 104 aa, Heterodera glycines
CCCKPIIIKLPPPPVKASHAVAAAANRAVVAAASLAVAADAMMSGMNGGGCGGGASQGVSLSPLHALCSQIPPSQRGPACQQITQHAAAQQFPLSKDIFNRQQQ

SEQ ID NO: 128095 - protein, 116 aa, Heterodera glycines
MFRHFQTFIMNIKLLDVCSKYKSISAFSHFVTESQTIHIAISARKHLHIFKYLLGELCEINDCAPITLPENAQAVVWCGVNNLILAFKCEFQFWDMDHFLHRDDLIDEKVTTNLFL

SEQ ID NO: 128096 - protein, 211 aa, Heterodera glycines
EMNFIKEIRKYLAPYVTELFRISFDTGKLPTFWKKSIIIPLFKKDKSCPTNYRPIALTCSLCKILEKFVVRAITSFLLKHDLISVHQFGFVKGRSTVTQLILTLENWFDGIYNGKNIDCVYIDFRKAFDVIPHSLLLYKVHKIGIRGKILNWISDFLANRSFLVRVENSFSSEYKMCSGVPQGSVLGPILFLIYINDLPENSERNFQTLCR

SEQ ID NO: 128097 - protein, 90 aa, Heterodera glycines
MGLREIPRPGETGKYVAIDLSGKNLRILMLTLQGKDKEPIIATNNFVVPYPIMKGSGEQLFNFIVNCLQKSPENTIYVTRLPDWDTNLSR

SEQ ID NO: 128098 - protein, 154 aa, Heterodera glycines
MDADEQQQQQQPQHKLPFSVKHSSCSFSTAAELNYEFAASGTSSSKGKQHQQRAGTKKRKLDWNRRDEDEDYVSRAKLSRHTVPVPSSSSSSKRKQKRSGGGGGRKATAPLAAAETAGMVDEADDDDEEGMAAAMVAAEAEQMLLVEKRRSTRK

SEQ ID NO: 128099 - protein, 196 aa, Heterodera glycines
MNSNLLLLSIQPNLSTRDKQLKAWGRLVLDYCQANRIYTTDLDEISKSDLFNNRRLNKHVEWKDKDKTRCNIYWRRPEEWGQLLYEWANSIGLLNTVVTLYELTQGEDVAKECSNFLRNSDIVEEGDTVVVYVNAAAQYSVVLWHRRVRLGRLCVRVEDQPEHVDTDFAEEHTDFVHAGHWHHSAAVGREAGRTDL

SEQ ID NO: 128100 - protein, 219 aa, Heterodera glycines
CLLSRVLRFVRAKFLSHHLLLAFACVLYIFLGALMFQLLEERHFLESKARHLRRVGADSEKYSKARHLRRVGADSEKYAEAVWTEIQKNLQEIPWDEINENKMVAEIRAATEEKFHNYVDTVYVAHRAVRHGFEENPPTNPPTWDFKNSLFFTATMLTSIGYGFVCPSTFEGRLFGVLYCLIGIPLIPLTLVTVANVFLFLFFLNSFASFFLFALPNFS

SEQ ID NO: 128101 - protein, 159 aa, Heterodera glycines
MDNVKMDVHLKRDLAIGKRLCFMGIFTFLAETINNKISNILLSAFTGHVASKCVNWLSNAVRRNLRLGEANEPNPTPFLRTLSASELVSLHFQMSEFGISIEQILRFWANTMNVFIDDNNLTAVDRMESQNVKQQLTELTREAILGLLSTKIELVQCEN

SEQ ID NO: 128102 - protein, 247 aa, Heterodera glycines
ALTDLRLIGTETEEEEVEQSPTEIGYHQRVPIDQREDEAEQSAMEFAPDHRRMSTDQCEDEAEQSSMEIASDHRPIPTDQQKNEASEQELLVDSNPVDIEEEASPMHSPRSRSPFRSAELFPDGEVTTVKQFESVTDPSGDEHMHFFVESSDDKMAPFSQMHGEERPFAPEEVSTVSSPEIDGHVTTEILETEDVRHEVEAVPAQISSERQEYDDIVESEVLHEIEGVPASIPLERPEKDDIVESEE

SEQ ID NO: 128103 - protein, 87 aa, Heterodera glycines
MELINATLDKLYNNPSSPAAFSGVTALWKEARKKIKQLSKKEVQNYLESHRTYTLMRPRRVHFRRAKTVAAGFMTDVQVDLADKIIF

SEQ ID NO: 128104 - protein, 116 aa, Heterodera glycines
MRTAREELDAEWPDVLRLCELLVREKTAGPAELRGIFGASLWEQNHPGDAEYLLGEEEEEDDDEEEEDEDEEEDADGGDAAPDREEGEAVEENGDEEEGEEDENQQIEFVFKKKTF

SEQ ID NO: 128105 - protein, 135 aa, Heterodera glycines
MDAKSIDEKMLKKIIDTEKGKIHVLRLEAGELAKSKVFKDRSVCHLLLTIYNTNISKLESLLNSMEKEQGYKLYSIKELKNEEADNEQVEKEEEENEEEEGEKEVNDGLREEEEAGRHYALSLIGQQCQKSYGIK

SEQ ID NO: 128106 - protein, 128 aa, Heterodera glycines
YHPDVTGSNESCAKKYLEIKEAYDVLRDEKQREEHDRWLAAEEVQRQRPINGRQPYVRRQKVYDDLWPNNGTFSDEEIRRVGRIQKKGAALPLDFSETHFCRHITEKKTSEKGLKKECEECRRIDMII

SEQ ID NO: 128107 - protein, 531 aa, Heterodera glycines
MEKVQFGKELMEECPEIAAKVQERDKLKYQLNILKRANAVPTEGHQTEKKLATDGNKVANNRTVPNGPSGSAHLQIEDFGDSIIERLSDVFAKAVQNVRKSNKIAFIPIFEAYPTLGMDPSIIRVKEANNPKFGDYQFEMVMQISRRLLSEQSVKEPPPVVAKKIVAALEQIELVEKYQLVNAYINVYISRKHLGKRIAEISRKGFSLPKIAKKHVIVDYSSPNIAKQMHVGHLRSTIIGEAIARLLECFGFTVLRLNHIGDWGTQFGMLIAHLKKCFPNYLNETPPIQDLQEFYKQSKVKFDNDPQFKSEAYQCVVALQNFEPDTVKAWKMICDVSRKGKLFFPHECNIPLTVVKSDGGFTYDTSDLATLKQRLSEERADWILYVVDRGQSEHLEVLILKMHIFNYKQWYLFVLKNVFATGKQLKWFDAAQKRVEHVQFGLVLGEDRKKFKTRSGENVKLTELLDEGVRRAEEKLRTKGKEGEFTPQEFREVAESVAYGCIRYADMAQSRTGDYVFSFDRVRFEGDQWGS

SEQ ID NO: 128108 - protein, 94 aa, Heterodera glycines
VVMEVRPVRCGLFQQTLWAHVKSADIAELLVAGGRVGAVVRAVGDDAVGVMLLGLHVGKLFFRVGGLLLGHMGPNVMHKHHIVPQFLVATLECA

SEQ ID NO: 128109 - protein, 32 aa, Heterodera glycines
SSMSSVMAENNGNSYNEYSVVDGQQQTEEHQQ

SEQ ID NO: 128110 - protein, 39 aa, Heterodera glycines
MSTERYSFSLTTFSPSGKLMQIEYALNAVKGSAPSVGTE

SEQ ID NO: 128111 - protein, 202 aa, Heterodera glycines
EKKKLKQKSFDEIFGEKGGEKEEERRNELKKREIIAKFYKIKEKIKQKRRKYPRKEWDKIERKIAKKLGTNRTKIYKWIKEFGLQKQIKKSYKSKTDEEKIEIIQKFIGMANEYKQKRKYSPKEWQKIHSEICKKIGVSLSVIKKWKKQFGMSKFITEKEKMEKMKIYWEIKKENPKMSDKEIAKMMKIDRTNISKWKKLFG

SEQ ID NO: 128112 - protein, 102 aa, Heterodera glycines
RSHILPSVNQSSSSSSASSVNKFNNKTFKMSAESPTTSQRRARSRKTKKRAASAGETKPLRRSARIAAQKAAKEKAAKQKARDGSTASTKSAGRGRPSRSPK

SEQ ID NO: 128113 - protein, 56 aa, Heterodera glycines
LWGTFGRFAASGRALRARFLIFWGTFGRFAASGRALRARLFIFLGIFGRFAASGRA

SEQ ID NO: 128114 - protein, 36 aa, Heterodera glycines
MLSTLVFASTVLIFVLFLLQANEPPDDGPVYDVPAG

SEQ ID NO: 128115 - protein, 192 aa, Heterodera glycines
MDDFYIVLPSNTPGPGNSTSKFTVRLPETLELGTNWSVALSSIIYPYSFTALGINGQEFIKVWENDSSVPTQVYLPDMNFKTAGGLGNKINEAFTHHYKIKKQRGKREAKAEDTKDSKIDVAKRAAERAGRDVERHFNQINNISNSIQTQLNTLRETNPQILEEPDIKIWFDKMVEMGTEIQTSRNELKSFQ

SEQ ID NO: 128116 - protein, 87 aa, Heterodera glycines
MVASVFVDDGSERSFIRANVAKQLGLPVIETEECHLTGFGEKEAKRYVSNVVRVGFLGVNGDPYICALNEMEFIVKAMPIITLNSKD

SEQ ID NO: 128117 - protein, 110 aa, Heterodera glycines
MKSKAKGAGAHREVKGQGAECPAEVRGQGRLRAHVGQAENNSSIDQAAHMNEHRNRPSPPKHGPMGTKSAREWRQHQPMHVNVLPQMKEVTAKKEEKEEKKTAHLISPFL

SEQ ID NO: 128118 - protein, 430 aa, Heterodera glycines
PAAPLRVGAELVAILCTCWFVFIQQIDELRCHQGIRAYLWNLVSEVTKTTKLIGPFVQMIYTMIAGDLFRFVLISTIFMVPFTETMFFLGKDISTKQYLNESDAEFCPLSYSTSNYDSFFSTFLTLFRVCMNAIFYEELACANYEQMMKTLFVLFTFLMQGQIVMVLERAINAEKLAACQLEYSVQMNVPGREARGLMVIKQTTKTRAHQRKQALSNWKLVGRKVITMAKELGTQSALYLLHSHDRLVANDTVGGGGTSVPRTPYSSTRPYSVFGGSTATLVNHHRLMTSIGKRRAEEEVEERDAKQRRQQQQHEQQHKDQLEQTQSDGDESSVIEHVLQTPSPRKQPRLSIPTMDRHQHQQQHLMMFADQSKLRDVVTHATVNNMKLRRAELEEAQQRHKKPVSAQFLKFLNQFLIPLTDIARRGWTPA

SEQ ID NO: 128119 - protein, 71 aa, Heterodera glycines
MPSSTQQILDDVEFKEQNKKSVDQINQNAPDLLNSTNDTTGGRKRARRRVRPDLFRAKNSPPTNSSNSDRK

SEQ ID NO: 128120 - protein, 293 aa, Heterodera glycines
MCQQQRPSYPPQYGPSPQPPPYSYPSAGPVEPGQMAVAIVATVVVIQFRVALKEVGSDKDTAVEEENDNFVHVQCAEVLYHPNEIGEEEMLKRSQLFYELMKTRRSVRCFSTKEIPLKILQNIIKTAGTSPSGANLQPWTFCLVRNARIKRAIREVVEEQEQMNYSRRMGAQWVLDVAPLNVNWNKPYLTEAPFLLVVMKHAYQLDHMGDRKPTYYSEQSTSIAVGILLAAIQNAGLVTVVTTPLNAGAAIREILQRPINEKVSLLLPLGYSAEECYVPDIQRKPIEDIMRIY

SEQ ID NO: 128121 - protein, 429 aa, Heterodera glycines
MTSPPPQQRELAFRRPWDIMVGKTPRNSLAGVSPNRVTFSPFTSFNLTKTKQMTDPTSLLIETIDDLREFSVFIFKKQTHIGQQNKRETLVDAIFKRSMREFHMELCAYTTLVYPTVKKKRRRSDITLHNGHHFNLEYVHIPTYCEICNMNSSKFFGADLSNLLLDDAQTVPVLLNRLLATIEVKALFTEGIYRKSGQLALIKQTRRQIELAEGTRVAHQESVNKMSASNLAVIFAPCIVRRNTSTIHAQEQLMDVQKQAICVQTLIEDKLRHCQETLSQIIELESASEKKHRLSASAAVSTECIAVDDQTRAGTPSATGAGLLLNTSATGDNTTTTTNAHMEQQQQNMETARQLFEEQLDFLDREKARLLQELPPLAPVASSEDLTDEAEREGGGTGTDVTAATNNGGGICGSVQCRRAKSSGRQRSV

SEQ ID NO: 128122 - protein, 127 aa, Heterodera glycines
MEVEGDEKALGSSVLSVEAQMDPNPMSNSDQVEIENEEVDKGENGQFSKKNSRDSDEEENFGGGKKMVVCQIWEDGVIVIPFGQDERPGFVFVANDLLSEIWETLAVIGFQIQNGSTPKPKRLQLPK

SEQ ID NO: 128123 - protein, 177 aa, Heterodera glycines
FSAATDIHLAEKGIAAALSSCFLKNRIKMEEFAIETTLHILDNNGRTVVATFEHFLDNKRKFVDLVEFWEEDAAIQARLKGVRKNCANGRILEVNKYVQGGVFQARILLAYQTAKNHDSDGDFEFICEGHEVVLSACESATAMVNRMILFYSNSFSSISSEQSGTGQIWRALLSSSD

SEQ ID NO: 128124 - protein, 125 aa, Heterodera glycines
MPKKYKKAKKDKVGPDLPPAPPPSIEPPAAAIQYEDLTSDEELDSRAAGGTATAHLVDQQMESLLALSPKNNGAMLALSPDSIDRLLEDTNAGESVPITAESIEKALGSTVLKEGGEFAQSFGRK

SEQ ID NO: 128125 - protein, 244 aa, Heterodera glycines
MLEILEDVHSGGVKQHITLLTQRAIEVNNIAVSMGGLAQRASVLHRRMLQKTSKTRVIEKIDSVLPENRPIDTLTEGIHNAWLKLDPKEYTLHLDALKVAVVYFRAGYAPEDYPTQTEWEARRTIERSTAIVLDTPGAVERFFKGPADEQKVAAIRHVFAKMWGLDRDDAETNKCLLSVSFRLTKDAITSPQRYVLKPQLEGGGGNHFGEEIVSKLRTLTPAERAAFILMEKIQPLVVKVGVFD

SEQ ID NO: 128126 - protein, 168 aa, Heterodera glycines
FTGEITSRLTADTTTMSDTIALNVNISDTIALNVNIFLRNTVQMGFLRNTVQMGGSMLFMMTLCWRLSLVPFIVVPIILVASKIFGIYYDFLSEKAQDAVFLSEKAQDAVAYSNDVAEEVLSTMRTVRSFACEEYECIRFYDKLTDTLLVTKRKAVAYVAYLWVSELF

SEQ ID NO: 128127 - protein, 94 aa, Heterodera glycines
MCSFLCLQLTNAFNARSFIPITWPSKPPTRRSVGAHTRSNTFIARSGRPPRDTTAPMGVEVSKNVRIRIRGPEFTKKGWDLYSMPPNTPRKVLL

SEQ ID NO: 128128 - protein, 47 aa, Heterodera glycines
MNVLDRVCAPTLLLVGGLDGQVIGMNERALNALVNCKHKKLHIVPGA

SEQ ID NO: 128129 - protein, 61 aa, Heterodera glycines
MHMMIFTTIGESSNRINVYVHKNDTKPIGGHAMKLIGWGEESTDKGELVKYWLGVNSWGTK

SEQ ID NO: 128130 - protein, 127 aa, Heterodera glycines
MDAQQLQQLLNALQQMVTNAAPQNAAPANLSNANLASSIDARLSAFNYNPEVGTTFESWFKRYGKLIEDDGSTLPEASKVRLLLGKLGEEEYNKYRDTISPTQPDQVNWNDTISHLKSLFAETRSLF

SEQ ID NO: 128131 - protein, 507 aa, Heterodera glycines
SLESIIKDGGSHAPIRRKRSAIEPTSPPNARIVPKSRPNVTKKVIVPTSPPRVGQEHEENAEEISNSLTNVTKPPEKQQKIEKQPEVVKPQNEKQPEVVNPKNEQINQTQNISHQNAPSPKPPPPASIPTTKKHEELKSTIDPTPSVSKPPPPLSVSNPVDQNRNVSVNQSVSKKKNIPPPSVSSSSINVPKKQEELKNSNGPTVSKPPPPFPVTSQTTVSPVQQITSAQRNDTKPSSSSLINEEKLKEIGPPPKQRTEKSIVETVSPTPPPAVPTHSNATAKKATSPPRVIATDIIGPPPKQRTEKSLNTKHVQAQLVNEIIPETTKKTTITTTTTTTITEPPKDTIDDFIGQIEKPTKRNNAEQLLAVLFGNDEWKKVNLRILRQIIEGVELQYHPNFERFKAVFTHPRIEYISFSPQLGYVLGFENSQYVRNNEIAKYGSDLRGGFASFAVYAKGLTENMIVGNSLSSLLRVVSVSGAVPGEYTEKIYDSPLYGTCSTKRSIRN

SEQ ID NO: 128132 - protein, 585 aa, Heterodera glycines
MDSNQITRILTSSEITSRKFLGCFPCDQLPEPMAIRFPASLIVNLDPHQFPGSHWVAIFVNGLNKKVDYFDSLSLPINELCQSPMTAEGTAFFHLNMLREWYMPKGQQGENYKRKFIEELLREPYNELSPPQKSAKDYVKKLDSEIEHVPKFQWVKNKSRFAIEDVPSDPEGLLIGIFQHCMDESISDSRSRGVEPTHLGCIVSSALLTSDIWIPIRQMTSDTINTILNRFNDVAQSKKQDGVTLWGDPFTVTMTTVNRNGLPAKRQLKGGAARKLTHVHHRVHEQCLIKIENFDGDNYCLFYALQATMIRSVAGLTRQRFYDYMNGNRGFHGRLKSEAVDMMNVVKAPPKQPSYDAERYVPRVIDWWNNVKFAGVWKFKAFIFGATGHYKPLFKYGPEDYVVPIILYFEDGHFNGRGCFIRPLEPNKKKEAVGWRLVTFDVETTQHQAVDPDFPERRKHQVNFVTANVACPSCISSGMWKESMRGKFCNICGFHRTITFSQKPFCETTVDRQTIDRHPLVAFVKWILYKLPKKYDTVVYSHFGGRFDMVLVFRELFMEGLNPSMIKKGNRLFEMKANIDWFTIC

SEQ ID NO: 128133 - protein, 204 aa, Heterodera glycines
MANHPLQKLKDVSIYRKKFFQWSTEWSNQRSKTSDIWSDTSNAFIKLCFQFLSIFFVKQFSLTAHGISKIFVRKSFVLSAAHTENIVDTPTRWNAAYLMMRRIEEQQEALAHYAIQNRKFDFTFDGTESNLMNKLLKVLDPMEQLSRLFCLGTSSISVKYPFTKLTIQNLEQMEFENHDVSEIRDQIVDGLKTKIFGCKDERSK

SEQ ID NO: 128134 - protein, 126 aa, Heterodera glycines
MTIQDHFEWCDIAEFVLENGDNALRIVTRQNIAILISGQQMAIVKKLIENFVIGGAKRRRFVVAVSSYGTRQPNILSFEAGDYIQLIDQPHSEMPSIGGQWLFGKVGQKEMMKSGSINQSNGSKLC

SEQ ID NO: 128135 - protein, 76 aa, Heterodera glycines
MKQMEQILDANISDFLIYCERNDYFPIQIAFGISFVENLISYTLIIICGYKMALLIKIWTKTELEGNKLTGKLQPT

SEQ ID NO: 128136 - protein, 62 aa, Heterodera glycines
MGQLNSYFFSPEDHSSSVCAQPVLMEKEEEGEKSMNDLVTASSPTEVRPASPPASSSVSVPP

SEQ ID NO: 128137 - protein, 46 aa, Heterodera glycines
MSNSPEQLGTWFLERCQSHSHLHYVGCENGEYKKCSSDPMSLFPRV

SEQ ID NO: 128138 - protein, 119 aa, Heterodera glycines
MANKLILLPFEHYRGLVAAREGVGVAKGDDDVAEQTNLGFVKRQLETVKRKRTANVSERNVLYNQQLRRYLKLRKEVKDRPLKVQLSNGAQLLNKTVETGVQLPLTVSFVFSKSLMSIP

SEQ ID NO: 128139 - protein, 241 aa, Heterodera glycines
MLKKLPKPFLIVYDDLMGDIDAKKLADLYTKKSHHNNFSVIFLTQNLFDKAMRVPRSNAQYIFLMRAPSDMLSIRNLASQMFPREQGFLMDAYKQACADPYGYLLTTKKRLSLYPKMVKKQMVGQRVLDNYEYLKSLGRTTSHKKRRHLLSSAGCEELLTLVEICLNLLNGSFCLTRKQKQKLLPFANTIRRLARVRSEQSARKLILQQQQPQQEGGSLFAPLLAPILLEAARYLLHKDGQ

SEQ ID NO: 128140 - protein, 165 aa, Heterodera glycines
MPPLTTALSKLLNCKAENLAEYLNNPEAVNKASAYLRGKKLKTTYSNKGGTTKEVEFGNFSKKSASETYAFEGFLGKCLFCKHSLTLESSEVKVHQYFYIKHRIRLLYPQLKCIVEYHSKGHCKYYPLELLAIEDSAEITGEKPTDTNYLDYLGFRSVWQPTPVY

SEQ ID NO: 128141 - protein, 172 aa, Heterodera glycines
MAPRKQNEQFLDEIQNSDDDVKLVDSQSSHAEERPVLKKRGRKSRWEKLLEDVNNAKKANPAEVEVADVDERKAANVFDYPTIFWKLARPKYGVFTFMCNECRNENFKRGDKRFILNTGSGQEKLEFTQTFCQDCAKLNFDCTDLIMKHQKKDDGPSAQKNGGRNTYFKMEK

SEQ ID NO: 128142 - protein, 515 aa, Heterodera glycines
MHHGMIAEMERHLTRKRSIQYPDEGEIVDMEVVEEEEPEEAPLNPLKNRTKLAQLSLKHERDKKEREEEDKRRQQREEQQQRKQQEEQRKQREEQQQRKQQEEQRKQREEQRKQREEQQRKQREEQQRKQREEQQQKQREKEQEKAKKSEADRVAKEKKSEKERLAKEEEERLAKEKAEEERLANVKKEEERLAREKKEKEDVQLAMEAEEGRLAKLKQRELELLKELKPWRGGYMRLVHGKDPTPDVHYLHEKDDYHFVNAVHKYIVRHPELPWDSPEFNPSANIQQNIAEFRKIFEREVFDENYELKTREEKNELIELVKGFRFYFADELGRFTLRIFSDKISHITLTDQLAYVLGYEQQQEIHNEDQAKYAVDLAGGVSHLCIYLNSGIIESMIFGNSFANLLQVIAVEVFVQIHPITSYIDLSKVFVCTEFKLKKIAEDGVVVDVPANAAVGLIQMPGATFIRNLKVHINQREVYDSNQLYSYKVYLDTELSYPAAGKGCLLWRGGLFSRQ

SEQ ID NO: 128143 - protein, 121 aa, Heterodera glycines
MISNVEIDIELALQSDDFMIHQDTANKDKYTVEIVDCRLIVKTVDLMDGLSLDIARKLDTEPARYGIRKSFMKSLFITGGRYDFSANLFTERCHEGLSLAWCPTRIILAIIRRIPSILITT

SEQ ID NO: 128144 - protein, 26 aa, Heterodera glycines
MRCASFANNNLSSTESKVVKASTDCA

SEQ ID NO: 128145 - protein, 77 aa, Heterodera glycines
MRDFDFLKDMHCNITEEFRRTVNFIENCYKDGFKQPLILFCQRADYMTHESEENNEKKLELKQVTIEFYFQKLGKLD

SEQ ID NO: 128146 - protein, 453 aa, Heterodera glycines
MADLQKFEDWYNNNYEQCFDLKEKLPEYCCNDVQILIHALVELRREFKQLTQRHGKHGGIDIICQAITIASACVKNYALNHLKPNSLAIVPEKGYTPQQNQIALAIKYLDWYSHINNVNIQTAHSLYGEYVFKREGQIYQVDGYIKGTNGKRDKIIEVNGCLWHGCEECFEEMDDEKMSNGKTLREIREREEKKHEILSRYVDLEVIWEHEINEKLKKDTAMREFFDNWKDRSPIKIRDAFHGGRTGPMKLLHTAKPGQKISYKDFTSLYPWTNFSTDYPLGHPKIISIPPNEQTVNWRSPSDNPYKGLLKVLLLPPNNNINVTVMPIKFDQRLLFPLCEKCAKYITAKYPNGLKDNDYSCPHFNPNDRAFVSTCTHLELNAALEAGYTVRKVFHVLQYDQWSDNVFKSYVSEMMALKIHATGFPSWCSSEEEKSEYIEECWMKFGIHLEKRR

SEQ ID NO: 128147 - protein, 213 aa, Heterodera glycines
MSFQSLGLNPLAFQALRLNSQAFQSLGLNPPTFQSLGLKSPEFQTLGLNPPTFIGIPISGTQPTSISISGTQPTSISISTLGLKSPAFQTLGLNPPTFNDIPITENQATSIPILGLNPPAFQSLGLNSPAFQTMKSPAFQTLGLNPPTFNDIPITKNQPTSISISETQFAGFPIAGTQPTSISISGTQISGIPNNGTQISGILNTGTQPTNFQ

SEQ ID NO: 128148 - protein, 81 aa, Heterodera glycines
MENGVTKCCYSAIPNNDRTVAENEQGNGREMSSDGDQTGAAKGISMGKGTAAPFRAAERRPIRFANFGMGASLQYSCQFAQ

SEQ ID NO: 128149 - protein, 59 aa, Heterodera glycines
FLKSAETSTDKWTQRIELGISCTIKILKIRSYNSLFSIHSIFKNIIIFRENCYLFMRFW

SEQ ID NO: 128150 - protein, 71 aa, Heterodera glycines
MDAAEPIKQKRIYKKQPKTPKKCLICGRGAAFKYYNVQSCNGCKQFFRRIVNSQRTFTCTETNSCILSDGK

SEQ ID NO: 128151 - protein, 82 aa, Heterodera glycines
MPLAPLLLLLLLFMFLLPLFLLVMALWLCCWYCSRSYDCALLFTDEAGRERLLLGNLLLLLLSQVRDHRLHSQPLQAQPLLQ

SEQ ID NO: 128152 - protein, 66 aa, Heterodera glycines
QLEQQLLLLAVQDRLAQQFAIGGHAGGIDLQLWQQLTALGLLGGGAGAVGVPPQHQQLHHALLGGE

SEQ ID NO: 128153 - protein, 460 aa, Heterodera glycines
MHSTDNNGNGNGNNPSNNTNTIDEGSDDGGHRNGDGTIGAGGEAGTSGRNNAAAGTSYDTAGAVVVGDPQSQQQGTIAPNSVPPHHILAHAVPPPPAAAGGGGQPRDVPPPLLSNSALWQQLTALGLLGGGAGAVGVPPQHQQLHHALLGGEGGAVAAAAAAAATAIAATTAGGGVGNSLEMLQQQFQRAAATMTASSTTTAAATAPSSQLLMLRQHQQQQSAASLIADDPNHHHDQQHYPLYQNGRCAWFNCDQPCDSLPAFLAHLSQCHSAVDDATSSATAQQCHAQIDLVDSLEQRLCLERLRMQAMVAHLRQQQQQQVAKQQAFSPGLVGEEEGTVVAPGAVPATQPQSHHKQEEREEEHEQQQKQQQRRQRHSPPSPSSQNQHHFCTAGGATTATPTLTALDAAQQQRQAIGMPLENIYIKEVGCAACSRISVSAFLGLGPKGGGMKCTLLESRF

SEQ ID NO: 128154 - protein, 325 aa, Heterodera glycines
MCPLSDHSLGMVNHYQQFLKNLRCIRQPLDDLLKQDTDWNWSSECQKAFDQVIGTLQSDQLLTHYDPSQEIIVSADASEHGIGAVISHRYADGSIKAIAHASHSLAPAERNYAQIEKEGLALIYAVQKFHKYLYGRHFILQTDHKPLLSIFGNKKGINPAPPIDCNYQNTSEFGQADALSRLISKTTIEDDEVIVANLMNVETELLNAVVKQFPLNSDQLIVEIGKDEVLKKVMKYLRTQWPTSKNMSLEIIPFQRRREALSIENGSIAPGHPGMKRMKNLARQYVYWPGMDQQIEDTKNPSWMKLIEPPKCPLNRRPPDRYTPS

SEQ ID NO: 128155 - protein, 39 aa, Heterodera glycines
MRRKPGPGSRDCFEGQEFPEPLEMGPFLETLSDQNSRIS

SEQ ID NO: 128156 - protein, 60 aa, Heterodera glycines
MQQHTYTEQPQRQNYQYYPNPPPPVVYERRYVERDSGPRCVPCCCCIPCIPIPLCFDCGC

SEQ ID NO: 128157 - protein, 37 aa, Heterodera glycines; identical to SEQ ID NO: 127515

SEQ ID NO: 128158 - protein, 56 aa, Heterodera glycines
KINLISLYKYAPLTSCDVERSFSIYKSILTDNRSCLSPEHLEMQLICNANFNNDLD

SEQ ID NO: 128159 - protein, 151 aa, Heterodera glycines
MTICYGGNAVAMSSAVSGSASANAAKVGDGRVECAAESGSKYNGTGTFQWMLLAQRGQIEQFMRDEEDKQMVETIRRTFVEQWPLEEGDDPTRQLIQLAIADPGLYVLKAQNEEGTPNYVDEGLREKLQQFTHEERAAHELMHRIQPVTAK

SEQ ID NO: 128160 - protein, 81 aa, Heterodera glycines
MPLHQNLIIKFSLKIYGYENQNFHINQKHLFIKMDTLPNLDYAEEYGDDGTGRSIELQPTILPTECNLSAANIAEQNTWTM

SEQ ID NO: 128161 - protein, 45 aa, Heterodera glycines
MSLFWPNDYAKWFGSKCQRLPLPLAHCAVGSALSFGLSKIYLIGF

SEQ ID NO: 128162 - protein, 143 aa, Heterodera glycines; identical to SEQ ID NO: 126933

SEQ ID NO: 128163 - protein, 197 aa, Heterodera glycines
MNDAMSLGIHRLWKEYFVQQLNLSKDSTVLDMAGGTGDVAFRIVQEMRKQPIGKGSITVADINDNMLETGKTRATRALSPSDQARLSWVCADAENLQFEDNTYDFYTISFGIRNCTHLDKVLSEAYRVLKPNGVFACLEFGQIENTMLRRIYDIYSFQFIPVLGQLLVGDFNSYKYLVESIRMFPSHEKFAQMINEA

SEQ ID NO: 128164 - protein, 283 aa, Heterodera glycines
MIGSKFIGNKAGMSSIDKEQVARIIAENTSANFEGYEKKRASRIDEQIKRNRQRLDSLTEQQIKQTREELDRIVEDMEKWRRLDRIKVHIDMDAFYAAVECRDNIHLRDVPMAVGSLSMLIKFANFDVVTRCKSVNFVVTAVGQLIPIIEAMLRKEFKERRNMAIRLLGVRLSQLVSADANLGEEAKKGVQLSLAGFMSRRPLANKKRRDEPPEVVELSSSDEMETKEEEGDETMEVKPMPFSEEKEPENGQRKSESPNDGCDKAETSERSRSNGQRMQSSDE

SEQ ID NO: 128165 - protein, 46 aa, Heterodera glycines
KNKTTEAKITRYFENLKTRCISSQSRTHIQCQFRAVSPFSFAIPPQ

SEQ ID NO: 128166 - protein, 107 aa, Heterodera glycines
GLKCKQGFEIRPLVEQQLEPDECVDVELPRFCEASICTTDEAPNFASIHWKCAEEQNAKECAERMKEIYEKKGELKNVSCQCHYGEEGEDFGNKRFTLPPPADPTDK

SEQ ID NO: 128167 - protein, 459 aa, Heterodera glycines
MFPEIVADGLGHCKKVKAHLSLKPNATPIYCRPRPVPFNTKSVVEAELERLQSMNVIRPVEHTNWAAPIVVVKKANGSILVCADFSTGLNSALLLHQHPLPLPEDIFATLNGGRIFSQIDFRDAYLQVELDENSKELCTIATHRGNFQYQRLPFGVKSAPGIFQSIMDSMLAGCAFAVAYLDDVIVVSRSSEEHKKHLQEVFKRIAKFGFRIKPEKCSFFKREIKYLGFIINKNGRRPDPAKIQAIAKMPVPTNLSTLRSFLGMINHYQQFVKNMRFIRQPLDNLLKQDVVWSWSTDCQKAFDQVIQILQSDQLLAHYDPSQQIIVSADASEHGIGAVISHRYSDGTMKAVSHASHSLSPAEKNYSQIEKEGLALVYAVQKFHKYLFGRHFLLQTDHKPLLSIFGNKKGIKACTANRLQRWAIILLGYDFEIEYQQTLSSAKPMCFPDLLRKLRCQKTT

SEQ ID NO: 128168 - protein, 54 aa, Heterodera glycines
MRFLKQQQAQLPNPPKPQQILALSVILANYWLLNAQFNGCVFGIISMIDEDENE

SEQ ID NO: 128169 - protein, 116 aa, Heterodera glycines
MPKEPSSRAFLFKKWVSNYMNDVYTTDSKIIYCQACQIEVFDTICDIGKILSGQKINFGMPPNLISLYKYAPLTSCDVERSFSIYKSILTDNRSRLSPENLEMLLICNVNLNNDLA

SEQ ID NO: 128170 - protein, 280 aa, Heterodera glycines
LPRGASLPSFFSPFTPPTFTIFLCPFFVSDPSILITVKTTRANHRSRVEDALATWASMAGRKGAENTVKISPIDQMPSGTHKVNPQLLISSNAFSAALCCKMAAELRIALQRSPDFWCHFDDDSFVLLVNLRAFLRQFRPHLDDLYLGRPSTSAPVVLPQLGPSPTLRPLSARKSPFWFGTGGAGICLSALTLRRLRPHQQRGNFQWVCAQLGVPDDVALGFILENFLAIPLTRTDRFHSHLNRMGAIPRSQLSDQVEISTESGPNKEATKEKEDKYLMK

SEQ ID NO: 128171 - protein, 182 aa, Heterodera glycines
MSTSMLKTAYRGMAMFEGEMAEERAQGNKDCIILTLLCGKILDYFEQQLKEAKMDGKNEKGEKMAKIGKFWKLFTRIFDLFKKKSEMHDKKGILIKLSQLLRYLRGQFGEQKVSNKWQLIGELFEQGFTKLYKENEEFRTHFKRNIIQMIGLFREICEIAEENGEEFFSKQFWTLFGGPFVN

SEQ ID NO: 128172 - protein, 17 aa, Heterodera glycines
MTMLFHWDILFWAFDKK

SEQ ID NO: 128173 - protein, 132 aa, Heterodera glycines
MTSLYKELLMKSVGKDESRGYNSSQIHILAMLLSYKIQIDFMIGIGKQFEERTEKFEDQLENYMNEFVVERPESGSEEEELCEMHKLAHSIAKNGILREESAKWGKFIEQFVGNATKTPTERVKNAIIIILI

SEQ ID NO: 128174 - protein, 285 aa, Heterodera glycines
RSLAPSMLSSYSTISVPVAPQQPQGQTAQNGTKSGTGKGICSPNSKASCYQVSSLTEASARKLCRKHPQKCISYTRNHIMRTYPGGMYTRNHIMRTYPGGMRIDSSNFNPQQLLEFWQCGLQMVALNYQTADVAMAVNTAMFEQFGVNTAMFEQFGSCGYMLKPRALWDASHPLFGKFNPFSKELSLCPALILQLTIISGELSLCPALILQLTIISGQYVQNPAGPSPASPFLEIEIIGVPADCAKEKSKMVDSISLSPFSLISLSPFSLSLLPLSLSFLSLSSL

SEQ ID NO: 128175 - protein, 33 aa, Heterodera glycines
QRIETWRKKCQFEAELRTVKTGENVHPNVVANP

SEQ ID NO: 128176 - protein, 108 aa, Heterodera glycines
LLEFLAVAFGLVSIRSVTNRHFLCMDSSGQLYAAPASRYSADCVFMEEMMHNYYNLYSSCVYGSARSPWFVALRRNGQQRRGRHSRRRQKSSHFVIVETDTDSTPPPP

SEQ ID NO: 128177 - protein, 194 aa, Heterodera glycines
MKLLPLFFLIVILIIKIDQFGAEKKKLKQKSFDVIFGEKWEEKEEERRNELKKREIIAKFYKIKEKIKQKGRKYSRKEWSKIEIKITKKLGTNRQYIYKWIKEFGLYKFKSKTDEEKIEIIQKFIGMANEYKQKRKYSPKEWQKIHAEICKKIGVSLSVIKKWKKQFGMSKFITEKEKLEKMKIYWKIQREHPK

SEQ ID NO: 128178 - protein, 322 aa, Heterodera glycines
MVQHEKACEKVFDHPFASSSSAPACAVAAASSAMMPSSCSSAVIGTTHSPSSSFHAAGTNAGAADGGGGTLRRHQSPPLLAHPPPALPPPLLDHQRAQQNCASASAASSSSSSLNPHHHHHVGGVHPSFSSIITTNISGPQIQTQQKQCQNVSPPQALLEAELPFSDSQFDGTVELYYIFSLKDGMCSVFAKHPILLFNNSSDIFYYEISIGNKKNVLLFGFAVKQQKKPLYGDEKGTYAYDNYGNIFINGKQKESNAKYAYGDTVGIGINSATRQIIFTKNGQRLGFSDFFVAPSFVGQLFPFVSLRNSDDKIEANFGSNV

SEQ ID NO: 128179 - protein, 275 aa, Heterodera glycines
MSSNFLENDIDEEIIDSSFDFSRPYGPMHFPDSDLTAPISNEALAEFSAWLSENREGRGGLTPLSDLVRFETSNAETETYPDQPMPIPIHMGNREWNVQGPRMNQGYRGDYWRGQRRMPFPVGGRRGGRHWRGQSGNNRYAAQNGGFEEIVVCKIRFVEGAECIFGVQVGIQGVQNAFVVCKLPDGMRQLFNPAPPPPVFYVFRGPAHLLNDPRLFERVNGGSVIFMPPQNTTLKNMILASPQMPMGLQYDRNGVAIFNPAVPPPGYENLRPPGT

SEQ ID NO: 128180 - protein, 85 aa, Heterodera glycines
DYVVVELEFAATFSPLNWYCFVVDAASPALFKRRVRALAKCFPNVIMGDERPMKSDGEGMMEAVLDCFERLDAPQRKWEYVTLLQ

SEQ ID NO: 128181 - protein, 42 aa, Heterodera glycines
MPFRLTTAGAVAGQIADVLLALIQASSHQIGFLNSFGSMTVS

SEQ ID NO: 128182 - protein, 105 aa, Heterodera glycines
MSRLEKIPLSLKSRGFNWVESVELENSLGLFALFRVSSPTTLLVFNDQIGTPLYSCYFVSILYHFMCLTTYALFGNHKNILRKCIIFALAFFAEKESHSEVPFTK

SEQ ID NO: 128183 - protein, 58 aa, Heterodera glycines
MLHFILTFSQVKQFYRTEGFEFLNRIFQCPAELEQITGLAELQRQADAFQSEVIEMDD

SEQ ID NO: 128184 - protein, 248 aa, Heterodera glycines
MQAVTRPPIVLERGVSGRVKWFDFSKGYGFITRDDGGQDVFLHASSIVRKVNMYFVLIEGQRVSRTDFESTEGLGHGESGEYNDPRIQVEFDVIDGEKGREAAAVSGPGGIRVGTAIQYNNTARSQPLPANANNSAGRMFIAGRFRRPVGKVLFGVKMRFFGPLTFTPNKSFFGLSKWTSNGLVCPYKCVLPSADSPPNLFSPSAEQQSQVGRRFGPRGGQWRRRRCKGSAALSVRRHSQRPSHVQSE

SEQ ID NO: 128185 - protein, 81 aa, Heterodera glycines
FADHSSGTDLDVQFPPHIAKGSEFIFRLTVVELLNVPKEYTDMFCQFNFLHRHDEAFSTEPVKGTAKGEHRTLPYNYVQVA

SEQ ID NO: 128186 - protein, 341 aa, Heterodera glycines
MQLFGLVNSLILREAETSRRNLTIQRYSITTLSQSSGLIGWVPHCDTLHQLIKDYREKRKIPISEEHNKMQKVSVDVEKSTLLQKVEAFEEALRTTSGDDLRRMLWMKSPNSEIWFDRRTNYTRSMACMSMVGYILGLGDRHPSNLMLDRLSGKIVHIDFGDCFEVAMKREKYPEKIPFRLTRMLVQAMEVTGIDGNYRITCERVLRLLRNHNDSVLAVLEAFVYDPVLNWRLTQEAGTARRAAGGTHHMPTGALAAPTEDNSDATHLNPQDRHVFQHPHRGLGTSRGDSEAISRVRAKLCGRDFNPCVEISVQEQADRLIEQATLNDNLCQCYVGWCPFW

SEQ ID NO: 128187 - protein, 144 aa, Heterodera glycines
LTMGTVDESLLQSIEFERIILAPFHVFQGIGNALIKELEASTENAEIANEFFRSIRAWREAFRKKDMTGNSIRKVLIHADQLERCYSAEWPQIICQTLGKFAKIQTFTKVHFYLGFLKIKNKFKAQPLSPRDLDELETSIDQFR

SEQ ID NO: 128188 - protein, 190 aa, Heterodera glycines
DPFISDLPTSSNSFTVQNVNISSPKVLNRFRVPSPTTVGLDEDVSAPVIAAATPSPGENVLPRPSLPIPSPPLRPLSPSPPASPPQQLKRKDADVHSPEGGTPNESPSDLSGDCFSHVMNTTATAFERLMVECEIYGPCWLSIVMVSLIEHNCNLEKSTNFDAKMMLNKRFCVVAKLKKGLTLPFDWTAN

SEQ ID NO: 128189 - protein, 174 aa, Heterodera glycines
MLKRIGEDKNLAIEVNGCYWHIPEREGESGQTMKVKDFNSLYPSRNMFTNSPVGHPKVILMDKNVHWTAPEHIVDEGVKMERIIKCFVVPPRHCLYDIPVIPMRWNNRTLFSLCLKCAETYPKGLVDADYNCPHFEDAERGNCRVCLPIILYFPSQDSRPQSRTSSWRQRCGYY

SEQ ID NO: 128190 - protein, 62 aa, Heterodera glycines
MAGDPSAQQQQQQPNFPASRISISYSKPFEQQQQTIMSQQHEQRQAIMERIRRRLLSELSLM

SEQ ID NO: 128191 - protein, 20 aa, Heterodera glycines
RFVPLAICPICLILSIKEPF

SEQ ID NO: 128192 - protein, 235 aa, Heterodera glycines
MRVPRSNAQYIFLMRAPSDMLSIRNLASQMFPREQGFLMDAYKQACADPYGYLLTTKKRLSLYPKMVKKQMVGQRVLDNYEYLKSLGRTTSHKKRRHLLSSAGCEELLTLVEICLNLLNGSFCLTRKQKQKLLPFANTIRRLARVRSEQSARKLILQQQQPQQEGAREGVGVAKGDEDVAGQTNLGFVKRQLETAKRKRTANVSERNVLYNQQLRRYLKLRKEVKDRPLKVQLSN

SEQ ID NO: 128193 - protein, 154 aa, Heterodera glycines
MPYCSGKLTVMAPVPVEFETALCDATCREGDTLKLKAVLLGEPMPDVTWFINGKKLEESQNIKIHADAGTYTVTIKVLRGRRIVTECQQTIYCAKDITIDYSGLVVCEALNEFGKASSQATLKVLPRGEPPDFLEWLSNVRARPGSQSFYQNLT

SEQ ID NO: 128194 - protein, 237 aa, Heterodera glycines
QYSQLFGTDDTSVPTVVSSNGILTQSAPIPSAPYKMGYFGATSYVIGNIIGSYVIGNIIGSGIFITPSTVVRCTDSVALSLLVWVVGALIAFLGSLCYIELGTSIREAGCDFAYICYVKWHSIAFSFMWVSVLMTYPATIAVIAETFGQYLMEGLRHFYAVPAEWAPVAQKCFGIALLWLITWMNFFLITWMNFFAIGKFAARFQIAATVAKLLSCALIIVMGFYHLFFKGADGMLA

SEQ ID NO: 128195 - protein, 62 aa, Heterodera glycines
MTQFLFLNNLIIIFKHLSSPTTHPWANAGNWNETVRHHCLNINAYRICHVIHRFDIRKWHLY

SEQ ID NO: 128196 - protein, 87 aa, Heterodera glycines
MTIETLSIVYVKSFQKFIVTSIPRNPAGLAKWSGGIPIRDPDEIPIPSNPDEFKKSLGTDPEVGIPNLIPRDPEEIPQDPYPVRSLI

SEQ ID NO: 128197 - protein, 120 aa, Heterodera glycines
MEQEAFYTVGEFDRSKIDLNKPAMTVEEYMQQSNEFSQSRSEFECVKVPDDDPLKDVQLPPMNDWMRWCQVCFESRLEGFAIAPENEKRFAHHKGTPPTVSLITSLKDHQVNELIIHQIK

SEQ ID NO: 128198 - protein, 189 aa, Heterodera glycines
MTVGGGTDQEKETKLAAGSGIDPEKETKLAAGSATDAEKAKKMTAGGGTEAGKGEMTVGGGTDQEKETKLAAGSGIDPEKAKMTVGGGTDQEKETKLAAGGGIDPEETKLAAGSGIDPEKAKKMTVGGGTEAGKGEMTAGSGIDPEKETKLASGSGTDAEKAKKQWPRSQPLEKVKRRIILRNIEGADL

SEQ ID NO: 128199 - protein, 125 aa, Heterodera glycines
MIALRYTYDKELGRCFMKSAISDSYKHSGMTSGLKANTHAGQGALLRNIRIAGGTASAVVHLPNTEDCMQYCTAYGIFSWSPLPPSSTTTTASSNVGRSASSIVPTSSQQQQQGKWPNANWAIRA

SEQ ID NO: 128200 - protein, 52 aa, Heterodera glycines
MKSGSASANSAIPHNPCHFHFPLVKVQPLQNPPSFIVMNKISFINFLCMQNF

SEQ ID NO: 128201 - protein, 66 aa, Heterodera glycines
MTLVFFVIIWQFFQFSFNQWTKCAKICFMAIFKQFVHVFSSDHLPLLLLPGGQAAQMAHLLAFPNL

SEQ ID NO: 128202 - protein, 129 aa, Heterodera glycines
MGELLRRKVQQNGENELWAKIGKKMDAGEMIPMRICRELIYASVHERCPNSWGFVVEGFPRTLAQAEDIEAQLGHIDLALLIDCTEQFCKDALRKRYTRDKEEGAERAEIFYDWHTAVPESAVGRFLGF

SEQ ID NO: 128203 - protein, 58 aa, Heterodera glycines
MAAIHQTQQTINGISLLNAFNEIPSTIVGTEFDCAICLDPIPSGTSVKPLPACNVKPI

SEQ ID NO: 128204 - protein, 185 aa, Heterodera glycines
MNKLHLILKKISANEPIKNSSHSIEYFANNHEYNLIKYRILSIYHNDPPLSQLLNKLIISVMSVINGIEKDKIDGFGIKILKQRLKFVINFVAKRLQIQFDERSNFDFWSENGQIYLLREMSHFLEKVKICSQNDNKCWHNCTKYHENDKKFNEKKRTKQFLQFVAKTIEICEDGTAKRRKRAIN

SEQ ID NO: 128205 - protein, 107 aa, Heterodera glycines
MHVSGDAKVLNSLCSLETNAFSMQLAVILCFVMMVVKLGTQHFAEWGCDPAPINKTYEGCRPMYPDHYEDENVWKCHCELCDIKSREMCNEHHGFEEFYKKFNSTKK

SEQ ID NO: 128206 - protein, 52 aa, Heterodera glycines
MRDFNGQKMDENSPIMDEREFSLPLGRTKWTSKLRTTEENGQNAVITAIKRN

SEQ ID NO: 128207 - protein, 22 aa, Heterodera glycines
KLRKFLLVLKVKNIKKSINCHQ

SEQ ID NO: 128208 - protein, 54 aa, Heterodera glycines
MAKHSPQHHHPNQRQNTLEELGEFDERDFVPRSEMLRQNRNFIFNTLYYCRIFL

SEQ ID NO: 128209 - protein, 180 aa, Heterodera glycines
QLLYVSRNFEINVHSRSAGTPVIEWLAAHGAQNVLLHAFSGNVKNAQKGIEKGFFFSIPPSFTLSKEKEALIQKIPLSQLCLESDSPVLEKEALIQKIPLSQLCLESDSPVLGPVAEERNEPKNIKLSAEFIARIKNVSTDEVIRVTTENAKKLVSTDEVIRVTTENAKKLFSKLKLMEY

SEQ ID NO: 128210 - protein, 95 aa, Heterodera glycines
LFEYPKRTLEKIDFFVFGAVPPNRCAQIYGETESFGNSFPIACTLILRWIFAPHNCLSTPNGHLKKSIFLFSGQSPRADAPRFMGRPNPSGIASL

SEQ ID NO: 128211 - protein, 499 aa, Heterodera glycines
MHREIRETIHMQLHRCSDSWCGPSDPIYGRCKKGFPAPYSKCTILRPDRPAMYFRPSPTDGGAQLEVNGLIYDNSHVVPYNPYILLRYRVHHNVLFAYGNKANIKYALKYPFKGPGHCYVECKQESGNKIGIDEPAQYAKMNFRGATEAYAIVHSLPFAKLSHQVVKLSIHMPNQQPIVYRAFQLVSKAQQIQQGKLPETQCSAYWKQWQNEWKHDPKLKDMLFEKVPEHFIWAKDKWNKRKYNLTKRPPIGRIVPVPPSDPERFALYSLMRHFPGDPDHLKMVNGLLCTSFTEAAIMHGLLEDDKIWDKTLAEAALSRWPDQMRWLFMSILVYGQPSNAVELWNKYKDQMYFPQGITTPAQRQAAELEALADIDWRLHSCFNLSCVHFSLPDPPNSIAKNTNAAINEFFFGDDDLNLPPGQPNPRPKQITPPPLNSDQQTVFDAVVKAIQSDPRDSTVPRRFFIYGDGGTGKTFLFGQIIRRLRKAPYTYKVLATAST

SEQ ID NO: 128212 - protein, 156 aa, Heterodera glycines
MINKNIKNNIFFILPLEVWSILYIYFQLLNPLTGITNADSLENSFDEFAQLVVQNEKKPKLKELMQKQTDTSEQQEMDKAQLLAKIDEVGEIWGHRTKGRQKKSRLRSFLFINEQRKTDKHLEEASFIQYCQAIRLLLMFFSVNFLLKWFKYQPLI

SEQ ID NO: 128213 - protein, 25 aa, Heterodera glycines
TCTCGVVVKLSTFHNFSPGFNSPLG

SEQ ID NO: 128214 - protein, 76 aa, Heterodera glycines
MPGSGPGWIFKNDRVPGPASQNPVNPDNPVNPDFPKNRRAGLPGPGKPGTRPGPVRTLENTLNTKVVFSLLFKTNK

SEQ ID NO: 128215 - protein, 43 aa, Heterodera glycines
MPSARTFVRNCASHPCRKCRTECALVLSAAAQTFAATCLKMER

SEQ ID NO: 128216 - protein, 125 aa, Heterodera glycines
MNEIFPLDMRGFGKGVANLAIYGTACALDQMFPVISFFLPIFHFYFIFADFSQPNWPTADFCHFCADRFLFTVFHVAMFARNAWQIIGGIGETIQIRRLECAEKAPANSQNLRRSDQNSPKWINQ

SEQ ID NO: 128217 - protein, 65 aa, Heterodera glycines
LIEHLKSFGMIPIMFDLDDKEKSYSPKTWWGPTRVDTEFPSTSPSRFSHPRKQGPPQPGMDIKTL

SEQ ID NO: 128218 - protein, 72 aa, Heterodera glycines
MGPELPSNSSKALQESPTLGLNFDVVIDKDQQQMRTVHLSMAHGDDGKVYDAPMVGVTVGLSRSGSSGGLLL

SEQ ID NO: 128219 - protein, 41 aa, Heterodera glycines
MGATLFATACCCAKRRMEAQVKNGQANNKSEETSILISADQ

SEQ ID NO: 128220 - protein, 186 aa, Heterodera glycines
MELRGFNPGEKQEVGVFFYNQAIGYHDLICKKSINESKLLFKILVGKNVLKIILNNQNISLSSTYPKQWGIDVQEDNRTMHGALRANTVLNFTITVKAISDFELILSRKGKKDAEEKALLKHLFKQIMVSEQKQPLPAWATQYVTITYKGMATPKAQVFCVPENRCTMKNGEMAYEYVFNKANSTN

SEQ ID NO: 128221 - protein, 398 aa, Heterodera glycines
SVSVRLKIFHSLIIGKVLLIFKNISNFRFYRITYSSIVFLQYLTAILFSWSLCWLMTVFELIPKDSVARTDKNATQMAIQNAPWARVPLPGQFGTPNFNIGLFVGFLVSAQTRVPLPGQFGTPNFNIGLFVGFLVSAQTTLFEAVGNFHAVASVSEERPPPSERPPPSHAINRGIMAEGLGCFVSGLVGAGVGITTHAENVGVVGITRVVGITRVASRVTMLFGGITMIAFGVVTKLGAVLSAIPDPLVGVVLSTSMAMVGGVAIANVQSVDLNSTRNVAILGFSIMMGMVVPEFYTRNVVPEFYTRNPVSTGHSTVDQVLKVLLNLPMFVGAFTACVLDNSVGGATRAQRGLRERGVVWERPADGRVYAFPEPLQRFLSALPIVRSLPFRSREKPKK

SEQ ID NO: 128222 - protein, 49 aa, Heterodera glycines
MTFYSKHVAISIKTFMNLKVYISRNDFFVGVRYLKNIRFAHQKISLKSI

SEQ ID NO: 128223 - protein, 61 aa, Heterodera glycines
SGCPGASYTGLNFKRGKSMTALIFWTDKVVITGTKNNSEIEEMYHHILPYLKIAQKNLMRR

SEQ ID NO: 128224 - protein, 314 aa, Heterodera glycines
VNGDAISLENDGQFDGNSETITDQQQQLKEFHEKFAKLETELKMAKLELENKALKLKHQEMIGEQKALKEKVAKIEQKNAIFPNLSTSEEMSVLIARIAELNRAKTTEPSVASCEVFGQDGYGMNDDQFSLEEEEEGKEQQEDRKTPTKDVSEDHLKAILERIGEMEKQQQQQTKGEGNLTKMKFLGFSLGFLKFQENCWNAFACHEDIEISGDKSLIVQNMGNYNVMKKENWGFIFGFAVKQQTKLDETILLEKGTYAFHSDGEAFDSDGELWINGEGKGRNGKYSYGVGDTVGIGVNSATRQIIFTKNGLRL

SEQ ID NO: 128225 - protein, 162 aa, Heterodera glycines
MPWPLSAVALHRFSALALGGRARSANDHQQQQQHNGLREKVGQGRAQFGDRERHAELGKKFSLLKKSTSNDGAAHGMVNFCVIYRPFLVFGSQSVDILLFIRGLLEGHFNAKTMDEYLENGKQTETNSYLLTTHLSLRKLTIQLLTVGEHFGYKFQCEELRK

SEQ ID NO: 128226 - protein, 42 aa, Heterodera glycines
MFLSFPTDHRQQLFPFVSLLSPGTQRNSALRYKNCKFILAIN

SEQ ID NO: 128227 - protein, 215 aa, Heterodera glycines
ALLWADEKCRQNGIDCSGDNRRAVLGPALFQIRFPLIPKEDFSEQIVPSGVLTNDEMFAVLLYHSSREIATECQAPCELKFATIRRNYICKRTFLVKIEQFSALPRASDKNYEPIDSAVVDIKGIRWQLAYSFFLFQVNKKSGYFRLSLTCNQNEKGNTQLRNLKVINCAITNTIKLPIGSAIVGQSREQWHNKKRAKNALSGREMTFFVAAGQT

SEQ ID NO: 128228 - protein, 165 aa, Heterodera glycines
MPILLFECVFRFFEKVHFLQANVVKTEQQHQQQHNEEDGQVEYVGQLTRFQNDQNTILGRIVQLETQQQQMVNLGVTGQSDRKIHKNKKMPSPKSADCAIIHKTLFACEWSPCPPPHCTNRWPGPSIAKSFFTILWCQIINKVLASMFFFYFFLKLTFYKRNNLK

SEQ ID NO: 128229 - protein, 36 aa, Heterodera glycines
MADPIDSKYFGFVPATEEQQEPGILKILGLGMGLDN

SEQ ID NO: 128230 - protein, 163 aa, Heterodera glycines
MPPLTVQSVIIFSLADKIKSSQERGRQLVLGRRPWHSKFRPQRHDPPGLSPPLCPICFRAYLSQRQFSVVVPPRPRRQPQPAFWKQMMASFFCFQNLLTIAENFKNLTRGHLTAPPNQQFLWFYKNLSQKAHKFVIFMKIQKLHLYIISLVSGFNNSSKNVKH

SEQ ID NO: 128231 - protein, 185 aa, Heterodera glycines
MTPARDLDSITPALAEQERQRTLVLLGLPESNGFRPSERVQEDRKVAIKILDQLDVEAEPTAVFCLGRYDPQRTTPRPLSGHANTHTTNMWHLGDGSASVLDSVLNRTWPVSPMAPASSQTNGPTPVVEDGPNQEEASDDISKPPEVFDQTILVCYEALNSLPPTDKIVHEMQSLKKQFPHLFNK

SEQ ID NO: 128232 - protein, 44 aa, Heterodera glycines
MPDQMRFGTRKLEEKGGKKERRMNERHLTNGTKKRFLWAFENCI

SEQ ID NO: 128233 - protein, 115 aa, Heterodera glycines
MGVWKSLPLFGLSRSDVFVSAKINIIRPESAKQLFMTSVSDIDEQQFHSVSEYAQFCVEHYIDLCMVHYVKDFCKNISNTCTNNRRDREEVYGVLEHYFLEEMDSKPQEHIPITV

SEQ ID NO: 128234 - protein, 76 aa, Heterodera glycines
MYEQFTIPLEINNCSISQYQMSKDQKLLSDSNIAPKIFNHCSNKNLLTNCPLTDYPLTDCPSLTDCPSLTDCLLTD

SEQ ID NO: 128235 - protein, 152 aa, Heterodera glycines
ATKPDTVGVALNDSPLGLLAYILEKFVCWTNPSFLKLADGGLGKKFTRDDLLTIVSIYWFNGNILSSQRYYKEHFASDSNTEKLYRKYVAVPTAYAAFPYDLGGVLPREMVSRQYNLTQMTLFEDGGHFAAFECPKELGEDIIRFAQGLSLD

SEQ ID NO: 128236 - protein, 103 aa, Heterodera glycines
VDFPLNGFFGRGNPFVDNLSIVPFSVNVSNKELAGLKDRLTKCRIGHEQLEDVHDFEYGFPIGELMEWRDRWLNEYDWREAEKKLNAMGDHFRTQIEGLQVGI

SEQ ID NO: 128237 - protein, 108 aa, Heterodera glycines
MSDNRKEAEEKMAKAIFISGDCWLCVFDLLPPSQLGLGIALISHRFDFYVDEHFKTRKWALKSFRIGSKIEKNGTKKMEIANLRGKALPIPQMQLPRKVSVFKRIEIL

SEQ ID NO: 128238 - protein, 41 aa, Heterodera glycines
MFSDFSWKIGLTGKKIRNRNSRTLLIQKSETRLEAVTLEHR

SEQ ID NO: 128239 - protein, 58 aa, Heterodera glycines
MNCSDAAAAAEDDVCLKFLRFRNLNPTEYPEIRKNLGTRRTRIFEIDADRMCQTKSPD

SEQ ID NO: 128240 - protein, 61 aa, Heterodera glycines
MITGSRCDEERDCYRGEYCGDLKLCCLPRRAAQPDEPSQPVRPQPSPGQRTREPSAAGLKK

SEQ ID NO: 128241 - protein, 33 aa, Heterodera glycines
MPVQISVPVHCELAGGDGLDIVNLVAGFPLIFT

SEQ ID NO: 128242 - protein, 19 aa, Heterodera glycines
MQVPIMWDFFRKIFNSVKT

SEQ ID NO: 128243 - protein, 232 aa, Heterodera glycines
FLIHLIPSFLKIYNCSPNKLFAPQSLANFKWKSNGPKTLLCHDHRGGYLDYESSKSKGSEQSAEIPFYAFFHWWHIDIFVYFSHRFVTIPPFAWTNQAHKHGVLILGTFIIEKAEICQQTFSNRETIDRLIASLVDCCVVFKFDGWLINIESEVNSDSVGWLINIESEVNSDSVDNLEYFLFSLRNALHDNVLNCSVLNCSVVWYDSVTTDGKLSWQNALNANNFSKRFELF

SEQ ID NO: 128244 - protein, 65 aa, Heterodera glycines
MGENHFCLQNADLQPFYGCSAAFGKDDGSGTSREGHWRFINFLFATIPIEEKDEKIELRYVHSLH

SEQ ID NO: 128245 - protein, 80 aa, Heterodera glycines
DGGWNCVQPMEILRRYALSVAIFAPGWICEKFSGQSHRILFDNSFRFWNSLSTFLYPHALRQRNFRTRFCGCHSHRNAPN

SEQ ID NO: 128246 - protein, 175 aa, Heterodera glycines
LTKAMSSDFGNPLKKFKLVFLGEQSVGKTSLITRFMYDSFDNTYQATIGIDFLSKTMYLEDRTVRLQLWDTAGQERFRSLIPSYIRDSTVAVVVYDITNANSFHQTSKWIDDVRTERGSDVIIMLVGNKTDLADKRQVSTEEGEQKAKELNVMFIETSAKAGYNVKQVDQPNEQQ

SEQ ID NO: 128247 - protein, 36 aa, Heterodera glycines
FSIIRFLFFAFSRTIIDQINTLLVLTKAMSSDFETL

SEQ ID NO: 128248 - protein, 202 aa, Heterodera glycines
MPNGKTLREIREMEEKKHEILSRYVELEVVWEHEINQKLKKNKQMREFFDNWKDRSPIKIRDAFHGGRTGPMKLLHTAKPGQKISYKDFTSLYAFTNFTTDYPLGHPKIISIPPNEQTVNWRSPSDNPYKGLLKVLILPPNNNIKVTVMPIKFDQRFLFPLCEKCAKHITAKYPNGLKDNDYSCPHFNPNEAPSCPLAPILS

SEQ ID NO: 128249 - protein, 74 aa, Heterodera glycines
MLTYKPKEEFVDANKYSNVVISLFTTSMARLYLYEMLKRVADTPGCEILYFDTDSIIYLHPEDNGPLPTEKGHL

SEQ ID NO: 128250 - protein, 194 aa, Heterodera glycines
MRSATQFHGILNNDNDSAIPDYAKLLIKQLHSLLATASSLVQSQVTANDAIEEDRRQRTVVITNVPEFQSGKASERGEADRALVNLILDTVDLDQTPVVFRVGMRTPNRARPLKMEFPTRHAARHVLRMKGKALALNALHGARIRESMTKEQLAERRKLIEQCAQKRKEDAGDWIIYANQVILRSDIDTIRKNF

SEQ ID NO: 128251 - protein, 66 aa, Heterodera glycines
MLAVGEKSHCQKMGETKIKINQNDEENVANKLASHRGVRQLDDSSTHSKNYFKKHFPLLFMAMNNF

SEQ ID NO: 128252 - protein, 107 aa, Heterodera glycines
MLHQLVQRQWVRAELSHRLGHLCEKKLQPDCVPSAQGFRVGAMRSAKAKRGKRRMIRESRGEMNSQFEPLVISANCLPIDRYNLFDWSAFMRVMESIIHISKFAFPD

SEQ ID NO: 128253 - protein, 67 aa, Heterodera glycines
PGLKCPAQAKNFFYFREKIEIFPKKIPVDRARKTMFWKWSSFFWENSLKILKMQKPKKRFLGLARKF

SEQ ID NO: 128254 - protein, 67 aa, Heterodera glycines
MMNKFVILTMAFAILALNFIGIAPAGTAEGQQTSKTGSGISSAHRSDVGTAYAMIANDTTPNDVATF

SEQ ID NO: 128255 - protein, 134 aa, Heterodera glycines
MAESDEEFYFARHINRMKERDNQSPFLHNTIVNWEKQKPYEWDRQQMRIWVKRHSTNEAANELHPLYPLAKRNATNERLVRNVSHLLMLDAAFDREARELCRQFAARVPLRNWAAIAKNMDDEAIKKFVVRPLK

SEQ ID NO: 128256 - protein, 198 aa, Heterodera glycines
MLNAVNKLELDRAKECVKGALFIQLFIEQVFSEEQSQKLQEAKDNVDKLKDELAQLERKFQAFKAQQQKAERGAKEVKEAYERRRRTRRGIGKKSGEKVPKSAAKNRGKAKMEEAHDQDDDDDFDDDDGSNNDSESDTTESGGNEEEAESSSAKNKGRSATSKWVDRAVVGRTLAKKPLNGNFLKENIHNFAQNEPNF

SEQ ID NO: 128257 - protein, 169 aa, Heterodera glycines
MSGITPKRKTKAGKSSKSSKEDEEKHDEMMMASEDEEKMMKKQKQKQWKMPTIQPPPSARRRSSRPRNASSTSSRNTNRQHEPLRQIDEDSREGVHSSDGSGTSAAGAGRRRLTENDNSNSNYYVNEWIDQQPEGYDTYNDRISKLRAKLREAEDEYKKQEKGLKGMLK

SEQ ID NO: 128258 - protein, 25 aa, Heterodera glycines
MSETGSKFGAMTCYISISAKVRRIF

SEQ ID NO: 128259 - protein, 52 aa, Heterodera glycines
MNAELPGTESSSNDSAFSEIELENKIESEIVQKNIRTSKTPLKISTRPTRLN

SEQ ID NO: 128260 - protein, 450 aa, Heterodera glycines
RAYNGLPQHLSNEYAIKFLVRAMGNPELALYLELVRTPGMTLDHFVSLAARAESTQKATQRFSRPDNRERTWRTNTPQHFSQTNNGPSRSNFEERGQQMQKFGTQSNRSWSCFNCNSPGHLARDCPQGKIFRAIERTNSSTTINQQGKQQMGYNRQQMPEPNENPPNRHYQQKNYLKQNCLVLQEEQVHQNNFIVGELKQDLEDFFDEIRKCATEDKNSNFSKVGKVMAVLVEVFGTKTKTMLDGGAQISVIEAKFLYNLIRDKKLDVRNLSVLKAENRISDANGNPLECLGVICLPIKRHENSSEVKVAMHIAKPSIGFDLLFGTNALNELGFKMYDAISDTVIDFEKVNQNKIDSLTVIYKTVLEPRATKVIECGLPDQYEGREVLLTSDQENDQIRLEPTFAIGRCNRFAPNHAISRTIWFSAVAVATTSIDRTPSGPTFEPSAKTE

SEQ ID NO: 128261 - protein, 389 aa, Heterodera glycines
MSFVNYSLDRMEDQVTIAIVERNLFQNISAPPNSNAPISLIDKVHQGVIRLEDATNRSLRVINRRATQNTDAINQTTADMNANMDTITTRLDQLVDKVDTLEWSDTNDNRTSLQGNCTMVRRTVFEPEEDEEILNVLTTIDPFASQLPACRDENLTAFDNWAQKFRDLIEYAGTTWTEKEKLGRLKFSLEGSIRKIFDKLPNNKKDTVDKALDAIREKLDSPERKEMSKRALVTCKQRDSETVREFLSRLSPLVSSVCAGQDETQIQSRLKDEFLERVKPNLTFLIRLTGVTKNQDFEAVFSQAQELELLLTNTNESNISDPLKFAVHALNQAPANASWTNNGDRSSNINSWVPSYPNNVNNRQVRYKERSSSQQQQGFSRGRERSGSN

SEQ ID NO: 128262 - protein, 95 aa, Heterodera glycines
LFEYPKRTLEKIDFFVFGAVPPNRCAQIYGETESFGSSFPIACTLILRWIFAPHNCLSTPNGHLKKSIFLFSGQSPRTDAPRFMGRPNPSGIASL

SEQ ID NO: 128263 - protein, 49 aa, Heterodera glycines
STGYREAIPEGFGLPINLGASVRGDCPEKKKSIFSRVRLGYSNNYGEQK

SEQ ID NO: 128264 - protein, 122 aa, Heterodera glycines
MRAIGGVLPRRAVDEFRRLGPTICGRHTEPAIVSAVKDHVCAVKLHHDIVVDFGAEFVAKLHKMADEHQFLIVEDRKFADTGKTMEMQLAGGRLPAVADWADLVTAHALPGMASILALKPVH

SEQ ID NO: 128265 - protein, 57 aa, Heterodera glycines
PTQHRRGADGRRLRGQMCADWARMWGLNWWPDSSVSSGAAERATTQQNSNNFCIGHP

SEQ ID NO: 128266 - protein, 45 aa, Heterodera glycines
MSKQFLLLALLLLLLPIGTLQECSWDVDLCTGSCSTGCEQLSEPK

SEQ ID NO: 128267 - protein, 125 aa, Heterodera glycines
MPQHSIIKSLPVPSLPTPKKMPQTIKHRLRRALLGPCFAVVLPPPPPPPPNAVGAKFVPPPVPLMCTCDTVVAIALAPSRLSSRMLAGKDTPALPRRALSTLVRATVYDYELGKRRKLSASMRTE

SEQ ID NO: 128268 - protein, 24 aa, Heterodera glycines
MTYFEYLVADSTIQGNILEVDEYN

SEQ ID NO: 128269 - protein, 371 aa, Heterodera glycines
ATNTDRHSKVNGRPHSAPFDTKVPQGIYRTCNSGERGTLYWTGNWVTFLDSLLQTALLAERADTLRLPTRVRYLRIDPTRHLECVEERDGIQVVELRNDIATNGCIAGGVECCDLTAHTVQRRPQTAGQLFLEKLYFVKHVDNNSLADSPREREILAEYRNLLYSIILNGLRQWSKSGVLAQITNGEQFEHALKLLEGKEDIPTVADEERKRKFLDDSKSVNTRIDFPKNESSLNRCSLVNALDELFNLPTNNPLGEGQDNAKKFEQVAVNKLSAFYKTFDNDRYWSQALLHDRFSKSAQDICMENSATHRNRACGVELSSTDVLKHCVNGSKSHPLLEIEWTCVGPHMEHQLFLEKLYFVKHVDNKSRTV

SEQ ID NO: 128270 - protein, 224 aa, Heterodera glycines
MDIFDQILENLNKLYMPKKIPKKNRTGGGANANANVAGGGANANVAGGGGGANANVAGGGAGGGANANVAGDGGGGGANGGNVVGGGANANGANANLAGDGGGANANVPGGGGGANANVAGGGGGANANVAGGGANANVAGDGGGGGANGGNVVGGGGGANANGANANLAGDGGGANANVEGGEGGNNANGANANLAGDGRGANGNVAEGGGANANGTKLLLIS

SEQ ID NO: 128271 - protein, 74 aa, Heterodera glycines
MAQHRLLDQIPELLADVPVPDYCVFGDQPVGEEIGDGARFEPDHELTINAFIGPAGTALEPSISISIWFGHEFT

SEQ ID NO: 128272 - protein, 64 aa, Heterodera glycines
STFNSQCFAQPSINVHFQLILSIVCFSVRHYPTVTWKKIRNIQEKFQRKNTFYLVIIAIGDNFY

SEQ ID NO: 128273 - protein, 434 aa, Heterodera glycines
MELQSITLGVKLLKYVLQHLKLKPTQTTIWTDSLCSVERIKEHKKCDRFFSNRLAKIRGQFEVKHLVSADNPADVASRGTTPRELSRNLLWKHDPKWLSEEKALWPKPAKVYHPDEEKLRGSAEDEEVKTAAVMNEVPFQPTIDVNRYSSWKKAKTVGAYVLRWIHSVAKNGYNGNLLPILSKMGPKKHGNQDKGVLSVPELCASEHLLIWEAQQQFPTEEKTKENLRVFKDKEIWRCRGRIGEATVKEETKFPIFLPPEARATKLIVLEAHWKMKHPSHSTLLGYIREKHWIPKGRRFIRNTILSERHGCLNCRKERLKPYAYPQMPNLPSERVAMIRPFEKTGVDYFGPLTIKGGVKVYIALYTCLVIRAVHLEVADDCTATEFLRTFRRFSSRRGLPSLMWSDNGTNFIAGAECIKEEWRREILVETSHSG

SEQ ID NO: 128274 - protein, 164 aa, Heterodera glycines
PRREAGQFQKFCTTFYCGKSKYFIGQLRVNEHSRLWPVVKRKMEISDGLLIMQYNAFKPRREAGQFQNFVPHFTVESPSTLLDNYVSMSTVAFGQLWNGKMGISDGLLIMQYNAFKPRREAGQFQNFVPHFTVESPSTLLDNYVSMSTVAFGQLWNGKMGISDG

SEQ ID NO: 128275 - protein, 76 aa, Heterodera glycines
GGTVPKFCTTFYCGKSKYLIGQLRVNEHSRLWPVVERKNGNIRWGALFSKNSSFRLTIPPFCALFRFKIESFFLAF

SEQ ID NO: 128276 - protein, 70 aa, Heterodera glycines
MKRKFLLILKETDENGREKDEGGEEEEDEESDDGNGEEKHPPPPKKARLSTEAEEEVPLPALLLCNYSWH

SEQ ID NO: 128277 - protein, 165 aa, Heterodera glycines
MAVTLHTTVGDIKLELFCERCPKSCENFLAHCASGYYDNCIFHRNIKTFIVQTGDPTNRGTGGQSIWDAPFEDELHEDLKYDARGMIGMASNGPNTNRSQFFITYEKQPTLDLKHTLFGKVIDGFDELEELENTKVDARYRPVVEQRIRSVTIHANPIADGAAEQ

SEQ ID NO: 128278 - protein, 15 aa, Heterodera glycines
MNFVSRAICQVMEEK

SEQ ID NO: 128279 - protein, 27 aa, Heterodera glycines
MLVRNMIFIIGLFDLHVPYIIDELLHF

SEQ ID NO: 128280 - protein, 322 aa, Heterodera glycines
MTDLPKERCTSFHSRSPTRANPTRPPGDGLPAACQQPSGATSEELNNLPQNIQNGECFGILIEPEDEEAEIEHYSLHFEIHVKPMGNECQPSQADENDQNPPADQNDQNPPADQNDQNPPADQNDQNPPADENDQNPPADQNDQNPPADQNDQNPPADQNDQNPPADQNDQNPPADAEDNRTIFRKISLKLYRPNMAQVYTVNLGKIDPPELYFNRTIFVAKENDLTNYHALLYALMHKNQEDSDQYYDLLGYVQLIKIKDEEEQEAHASSQSEKKNENHNEKMENEEETEPKECPICYESFDDDDKLAMKLHEDYQANNLN

SEQ ID NO: 128281 - protein, 85 aa, Heterodera glycines
MPKLLTNFCALILICQITFLASTNPLEETPQKSLAKKRLKILVYSPTIGWSHMQFMGSIADTLVGAGHDVKLNEQFGKILCEICR

SEQ ID NO: 128282 - protein, 22 aa, Heterodera glycines
MGVWVRKEKGIVFVHIHKWSSG

SEQ ID NO: 128283 - protein, 311 aa, Heterodera glycines
MLPAPLVGFILLLGHFVFVSVGSNFHVLKKRGYDESESYSSEEEPTYKRHGYGGRFGGKRHRYPPAHGKGHRPSTYDGFPYGDSPLLPQVIAAPPMPFSPLQLPSISKAQSDLGALQVASPVLEGSPPKESPPLDASQPLNGATAIQSPAAAPETNIMNSLAASPPLATPQQLASLWVGGRKKRSFKEPKTKKAKERKAIRENEPQGTETTLAADTEETTEKPTKKAAKEKPKQRMMEEKGEKEAEKKKGGEAGKEGEQVGKTKKKQQQKAEKQEKKRHRKEEEEEEEESLLGKKEQHNAEFKQGGPQFRS

SEQ ID NO: 128284 - protein, 19 aa, Heterodera glycines
MHMPILAALRFTFHFERIS

SEQ ID NO: 128285 - protein, 279 aa, Heterodera glycines
PGDCGSPAGPAPPGDCGSPAGPAPPGDCGAGQGPAPPGDCGSPAGPAPPGDCGTGQGPAPPGDCGSPAGPAPPGDCGTGQGPAPPGDCGSPAGPAPPGDCGTGQGPAPPGDCGSPAGPAPPGDCGTGQGPAPPGDCGSPAGPAPPGDCGTGQGPAPPGDCGSPAGPAPPGDCGSPAKPAPPGDCGSPQGPAPPGDCGSPAKPAPPGDCGSPAGPAPPGDCGSPAGPAPPGDCGTGQGPAPPGDCGSPGGPAPPGDCGSSDKDLPLRGNCGPAKGPAPPG

SEQ ID NO: 128286 - protein, 30 aa, Heterodera glycines
MEWSKRRDRSVEEAAVLIGTEQSSANLGSD

SEQ ID NO: 128287 - protein, 63 aa, Heterodera glycines
MGEVRFHSDYVSSNRGITKIIQIVLGFVVCSVLCSNWYGGYSCFGEGRLGYVSGLNFVCLMIN

SEQ ID NO: 128288 - protein, 43 aa, Heterodera glycines
MERHFHVQKAFQKEKHLALFENAWTNVEQIEQEKDAQKINKRQ

SEQ ID NO: 128289 - protein, 79 aa, Heterodera glycines
ILFLLNLFNIRPLKLEQLYNVAAALLLLVGIVLLLWYMIQYSYWNIWMIIAAVCVLIIFLLFQWDFKGNRTMSEGHLPI

SEQ ID NO: 128290 - protein, 107 aa, Heterodera glycines
MLLAMPKAVQLPVKVQNRTEEDKTKGQKDGERRRMGRDKWQKNLTEGKLGKKQGNGTIEETDGTERVVDREKDDRNEQSGTQRQSEHLKGTKKQTVNGKCGTQKPAK

SEQ ID NO: 128291 - protein, 293 aa, Heterodera glycines
MKGYAELSAAPHNFLRQRYSLGRFAASYWCLRPPTIFCANPPSFNHWDSTHQHSNQRDSPTNIPINGTQLSSIQSLGLNSPAFNHWDSTHQHSNQRDSTLQHFNHWDSTHQHSNQRDSTHQHSNQRDSTLQHFNHWDSTLQHSITGTQLSSIQSLGLNPPTFQSTGLNSPAFQSLGLNPPTFQSKGLNPPTFQSTGLNSPAFNHWDSALQHSITGTQPTNIPIKGTQPTSISISGTQPTNIPINRTQPSSIQSLGLNPPAFQSLGLNPPAFQSLALNSPAFQSLGLNPLAFNH

SEQ ID NO: 128292 - protein, 87 aa, Heterodera glycines
IDELIDVIQGNRVYIPCLHIYNKIDQISLEEMERLARLPHSIVISCELSLNLDYMLEKRWQDVERRNNYIFDIYRKQQNVMKEPESG

SEQ ID NO: 128293 - protein, 52 aa, Heterodera glycines
KFVFNVIKLAKMYCANAKKCCRPLVNHSRAFSIHQWRAFKACRESNWTMAIS

SEQ ID NO: 128294 - protein, 101 aa, Heterodera glycines
MNNNHNDDDDDEAFGGGQAEQAGTARGVQFLRNFATTPTARLHSGEQTCQGYMQKAGGHAEADVQETGGPVCPCVCCADAVEATPARCHGHAVLAAAKAMN

SEQ ID NO: 128295 - protein, 61 aa, Heterodera glycines
MVAHYLESNETFLRNFYYLTVPSMLKINRNRKEGYDYGGYGYCTSHHTQMAVGIIMEFEMK

SEQ ID NO: 128296 - protein, 90 aa, Heterodera glycines
MRKCTPFDRRFSSDCPSLATGSVSQNWPGQNSFYVLMVFIKEYQDIRRSYDHRLPTTKFAIMDLRMRSNCFTLTPSQWDFTRVFMFPIGL

SEQ ID NO: 128297 - protein, 245 aa, Heterodera glycines
MTIKAFFIFVREIWPIFSENIRHLGFNDGDHLDNLRRQISPTILTDLNQLNSIYSFDRLPSAFGDGFDGPISAGQALSKWLHSPRKDGQPKRLRCYNYNEQANTDWINNFKEHFLRANAISSVSYQIHFSVPAPSMPMVPFELVNEWTKEKLTLAKTNEWDIDWIMKRCKIIGETAAVYWEDGNWDNNCNNVSIRLFICSNCIGPLSPPPKEEDEAGQSSEKGASSADKMSDGQKNKNSDQPQKK

SEQ ID NO: 128298 - protein, 201 aa, Heterodera glycines
MGGGGGFLAPKNPVSTNERPIFCLVFSDNKVLLSHYDRILFGANLKRDEDDPIVHLLLADVIIFVRWVEEKLGLTRRRSIATKRIEKSWETRIELFEGFYDKIWEEDERKVRQLGEVVTGLLDKLKQCLEKDTTKVLEDELWAQIMEKGNAKTIDMEKRRAYEKWKRSLHWDIIGTLIREEPAFADRMKNGANFTHLLGQC

SEQ ID NO: 128299 - protein, 139 aa, Heterodera glycines
MTRFGPVNQRASISPPRLVAPEFVVLQIGQAAVSSQQSQQIPENVHLINKEEGELSDSGGESSDEIQFVANVPARGQNPSAASEQRRAQSSVPRMAWNRRPPLSPVRITPGGPPQPLFPPIVQPVQPSVPLNVPSPLSV

SEQ ID NO: 128300 - protein, 68 aa, Heterodera glycines
MKTRFGGIADEIGGGGTEKADWGKVEEEFWGKERAEEGKKRRAGGVRPRFEWLECPKNEINSITNKRS

SEQ ID NO: 128301 - protein, 271 aa, Heterodera glycines
MYRPSQTPRLTLSSARVGVARLNTKMDTLSGALPFYRLSKESMKVVVFHWRLAAPTYATPLMILHKVRLESSSTGSSFPAKFAKPVPLAVVSLDSRRDSGNLVDPFVRVGKPTRHLATLRESCYSPVYPRLIKFPWLNIQSTGQKSDTVNVHKDHPSPLFLDSRIPRVRASSKLVVQRQPKCIPRAYTQLKRSTSSSHHSTHHPRKNSTQPRAKAACFTQQPGPDLSQFFSRSYESNLPTSLTYIILSTRGCSPWRPAADIATLASYPFRV

SEQ ID NO: 128302 - protein, 74 aa, Heterodera glycines
MAVFDDGIAAGHQQGQPRHQSTATGAEDVLMYDHPFNDGRPLNRKKYSKSGFRGLIFFIAPKTVSNAFCKIKLL

SEQ ID NO: 128303 - protein, 77 aa, Heterodera glycines
DEALHSVWMRLEQLWKTMPDEEQMRKLLEHNFVSNWLLDTGKIDEMKRDREEQQGEIGDQRETDEDSNGEEEQFDFE

SEQ ID NO: 128304 - protein, 39 aa, Heterodera glycines
MSEPMLLFFLKVAAKSNLARIELLNGVVLEKVGVMRSIF

SEQ ID NO: 128305 - protein, 23 aa, Heterodera glycines
MQIVWITRVSAFLCQTFDSKIFR

SEQ ID NO: 128306 - protein, 30 aa, Heterodera glycines
MSGPIWASISDTAKDLLRQLLDINYTVPYV

SEQ ID NO: 128307 - protein, 177 aa, Heterodera glycines
ELLDPGKGFYDKDEDKVTLAIDVIVDEPKTEKIISDPNKSNGTLSMEIEKLSEFAREIVWSERKSETVYIKGMPWKILAEIEKKNESTEKWLGFYLLCDASKKDGNWSRKCSGTLRIVSQKNGVEDFKKELDETVFNNESKSWGNNFISFVELMDPSKGLYNKDEDNVTLAIDFTCE

SEQ ID NO: 128308 - protein, 334 aa, Heterodera glycines
MANKFLLVPQEIYRGLTSVSDTGDLNLDAVRHDLNRARGERTNPSTKNVNYNQQLRRYLKMRRDLADRPAKVELTKGISVLMRRGGEDEDGEVVDTTPRPPAPPPPPPSPGRRTPRGPPPPPTGRRSPSGPTPPRPSPPGSPPPRPERPQRPSRASRRGGRLEKWRKSRYNIQQRQPVVRDLLAEAAAAPLPESDDEDDYMLESGFALPAPSQYYGDLPVLPDNANEIEEMDTAQHRIATRRKLQKDEANDNDDDDLRRKRFLVYHRSPPRLTSPPRLKTKIEPRPPPPRPTAKREKQQAKLDWKKNQHPTPAPRAKREPELKLDPRPSTSRQA

SEQ ID NO: 128309 - protein, 477 aa, Heterodera glycines
MSMLFMQMIKPSSADDYKLSVMTMNEQLLKKHIVFITIELEKGSISILVADLKYKIEQKIGIPPERQTLRCKKPYGIPCSGEISHNEPVFLSLDEFEISVWNPHKKHTVWVNSADAVRVLKKKIQVVISIDPARQTLYQFDLAELESAIGEKINERVLVDATDEKQEPRKIERAMRNVNGALIDEVASHKTMSEYGIEEKANIYVSVDGFEILVQYEEEKIGKNGVVKLKSNPYYIYRVNSTDTVASLKRTITNQVNNFHPSRAISAYELTVRLGSHYDIALEDNKTMKDCGIGRLGTVYASTFEFEICVWYGGKPYTIVVNKGNTVQTLKQKIKGIIGIPPERQTLRRNLPTAKVLEDNKKTMEFYVIEKGTIVFLALDEFVIHVNYLLEQTHKKGLKLKELKKENTRNVWVNSEDTVAILKHKIDAMMSWIDVFHYEFISGHECLTASGGDENVKTVKQCGIEEGHTFKVKEMKL

SEQ ID NO: 128310 - protein, 123 aa, Heterodera glycines
MAQNDDGTNGTILSNKSAPNSMDFASLTSENESLLNVLVGCAMMALSSLCLAANSLVVKTIVMDKNLRRQNSYKFMLALCLVDCSQSVVHFITGFFTIDQSNFDQFLSEVIIVYIIIVFSTIP

SEQ ID NO: 128311 - protein, 187 aa, Heterodera glycines
MLKDTIREMSLDDFNRRQIRQLAPSMLNDCQSLISVTFYGPIYPEFPPDDSANASDGQAITKWLFLPRPDNLMKELTICIEDSAVEQQWLAAVEQIKAAFSNASSPVYFDITVYFPPPSSLSAVVPFKLTNEMTGEKLEMYKEDVEEDLSCFSLIRCPIAPDDKREQMIKELDKRWNRINIFLIGDG

SEQ ID NO: 128312 - protein, 303 aa, Heterodera glycines
MASINDLDYVRDYDYVYDLDFDEVEECVEILDQENERNIRNYDVFEEHNYAKRQRFVDGGPSQGSMNLDAEVAGSSRMTDSQFEDRRLENLRKKRERDRIRWHNKSQESRNVRLEQMRNRNCNAIADESVAQRRMRLEQMRNRNCVAIADESVVQRQIRLEQMRNRNCVAIASASVFERQLRLEQDRIRHRVIRQGVVNVYAAGSHENANEHRLSQMNMRCEFCDALHFVEEKVIGRGNSFKDCCHYGKVFVPEIPEQDFPEELRDLFMKFDARHINVFENIRHLNSSVSNGSMNPLRYRYPE

SEQ ID NO: 128313 - protein, 119 aa, Heterodera glycines
MVTGMPNDGGEFSQSKSPSTPLLSHRQQQYRQEASRDRLNKYASAESSPYQQQQQQRVDDYMTGMATSTTTAFAMNNNGTTTGGGGKASSRRASRDSGELIAGGNLINHFKNLVQVIVK

SEQ ID NO: 128314 - protein, 238 aa, Heterodera glycines
MGRHDDLWSLFYMLVEFLNGSLPWRRIKDKDEVGRMKEEADIRELLSGNPPELHHFADHLKGLGYSDEPDYELLENCLQVAMKRLGIGINDPFDWENNYVNIHDNNRQTVGLQQAIGDGKMTSKMGGRSHTTAVREHGPAGEKANRGLDTQAPVTDEQMTREDCDEQTGNFYAQNVAAAPHNDSSHGRDEAKPKYKRQEFMRAKIDHPNVQSSAAAISAVNERSKRCPASPPDQWGGR

SEQ ID NO: 128315 - protein, 137 aa, Heterodera glycines
MAKEQKRQTLAELIAMESEAQSLAKGTSMAQLIEMERIDRGEFEQFVGEMNENEYLIGEVFEQQQQNKMAKQHSMNEKKGMFKKMVKMFSKNKDKMKVQEENQLGREVPKFEQFKRDRPGKWHNYGEIAMHIKEGQS

SEQ ID NO: 128316 - protein, 60 aa, Heterodera glycines
MALEICAFDNQPTFTLFLAVVTCSIKIGPDLPIICGWIIVQKRTDDLLPSAFTAAHRSLF

SEQ ID NO: 128317 - protein, 250 aa, Heterodera glycines
MILFISADCWLCVFGLITPSQLGHGIAMISHRFDIYVDEHFKTRRWTLALIQIHSKIGKNGTKEMEIVTDGGEALPIPQIEMPRKVIGFERINIFFIDRNAITFLRRFCQLFTNCPINLTIDPYYNDRILESILRNIWPMLGKNIYGLELSADVFRRLRQFVPSILNDFPSLRVFSISVADHFIEFPAGDNAMASNGQAVAKWLFTPLQSNVPKVFQCALEMDLGNLASNIEDFKAASRAIPGPSDQQQK

SEQ ID NO: 128318 - protein, 179 aa, Heterodera glycines
MTSNSTDGWGCNNSGWGQSQAKMTSNSAADGWGCNNSALRPNQAKMTSNSAADGWGCNNSALRPNQAKMTSNSAADGWGCNNSALRPNQAKMTSNSTDGWGCNNNGWAPSQAKMTNSTDGSGCNNSPLMNKLPPIPPSTILFVDGIENKNKKLPLLSVEEYLFADCDPNDSNKVFNPSV

SEQ ID NO: 128319 - protein, 54 aa, Heterodera glycines
MDIMHKAMILACFVFSLLLPFVSTATKVNSWYSNQWWSPAEESGSIEDEKVRKW

SEQ ID NO: 128320 - protein, 289 aa, Heterodera glycines
MRFFECLISISTFHLSGILTQPVLKLHLMNVMDDYCTGYQTYCSKLKPYLKQNLDFVQQRLANSAADDPYWQGVKRAYLQMTGVWHGFSDAQFNVSIDFSLNPILMLNAHGDFYELETKFNRSKDPRDEATGGRCSGLVKIAPNNADILFSQVTMCGFESLLRVLKLYKFGYDRALYPGHTTTISSYPGLLYSADDFALMSSGLAILETTMKIFNNTLLNEIKPDGVLHCWVRAIVANQMARTAREWCHIFKRFNSGTYNNQWLIVDYNKFKPYTELPDHGLFYVLEQM

SEQ ID NO: 128321 - protein, 148 aa, Heterodera glycines
KSLKNKFFKLKFLKPSGATNWFSWKSCPRAKNFARDHTKVDVDSLTKLMRYNDYTRDPYSRCNCTPPYTAEAAISARGDLNPANGISARGDLNPANGTFEIPGMGHVNHAALDYKGTGYKMFKKLQFRAWSGPTYDDVPVFDWLEFDF

SEQ ID NO: 128322 - protein, 197 aa, Heterodera glycines
MLILIPFKWIGSHFLKNCTFNMVVITSGADFLIKEGQLGHHWYHSMNSTIGMRPVDVTFANAEELRKKLYNEAAKNPRGNPKFHVGDRVRIEKHKHVFQKGYLPRFTNEIFTITEVHSERSPIVYKISDDNNEIIKGWFYANDLCRIFENDNKLYDIERILSKKKRKGVEHALVKWKGYSPQFNSWVPLSSITVKNI

SEQ ID NO: 128323 - protein, 195 aa, Heterodera glycines
HKYACSAYELCSDDFNVLKWTAAADVLDKALAINPEDCFTCAAGSSSRWLLCRGLNGRRPPSFSARRPKFHSTRRSEWVQQHCQISGRKCFWASQTLPPPHAVPKTRLMVSHPLEGLHGGVGVGAGLAGEHSLPGQGVFGQQRQGKCGAPFETADRFLPAERKRQGPARGTEGGQGAAQEAREKMTSMKITHRSS

SEQ ID NO: 128324 - protein, 31 aa, Heterodera glycines
MHFIPVEIDLKNWPQLCLKSDKCYIWHRLIA

SEQ ID NO: 128325 - protein, 42 aa, Heterodera glycines
MNLAQILWKIFFRIFNFIIFLPHFLLLVNRLIIIFGESVLKY

SEQ ID NO: 128326 - protein, 62 aa, Heterodera glycines
MEIIFICNKNLKIKSTNCATNGQGTQTVKTADATHDEAGKISRDSSSSSDEDDSTTAASKCY

SEQ ID NO: 128327 - protein, 291 aa, Heterodera glycines
MEIVRVLESAKDRLIIERAQLCATEMERVLAICKRRKAELQHILEQCRIWEQLRSSIELWLADASDRLCFGLLVVELSDGELTEQLELCEQLVDELNSWKSKLQELNRISNQQLDTHRRDNGHNLSHQSSKLNAQWTKFNDQLRIRRAVLEAAKRSRHDFQTALGHFQQWLNKMNMEMRKLNEETDNLQRLKDTARRREWLAQEKEARVEIDAHREIMESVRRMGRKLMEEQQRELSSSAGEETPPPSGNRTTEQMKSQVEMVENEWQSLLEQAKSVRDRLENAQEECERL

SEQ ID NO: 128328 - protein, 176 aa, Heterodera glycines
MRKSVGQRNQPNVGSNKRLNQLANDRNKQQQMKPVNIEQQQLVNVMQNNVQQQQKKRLDGHRNYHQNVKRWQATAGENQHVNGKRAKTVNNNGNKRMPKFTEDKKRRLKTVHHVKFDDEKLQHVGNLKHNEDMATKKAENAKKHRHTMPAAKSGDTFTAHEEQPLSLLDNNPPVNE

SEQ ID NO: 128329 - protein, 99 aa, Heterodera glycines
DVVGIGSGAFANVFRARELITAAPAERYRHVALKRINLSAIEKENQLMYESVLNEVDIFKSLSHTNIVKCFYSFTEVSPHSGVKYLVLVLEYVNGGDLE

SEQ ID NO: 128330 - protein, 107 aa, Heterodera glycines
MSVGLSFPSQRQQQQQQTISNDDNCATLQHSTSIARAHVDSDHFCCCCCSPINTMGFLFYMFVAAVAFGGGAYCGMIYTTKRARASAGGGSKKDKKQKASKSSSGEQ

SEQ ID NO: 128331 - protein, 134 aa, Heterodera glycines
MGMVNSFKEAFLRATTPVGYTFRLELYDSTEIVTPFEVMNERTNEMLTFEKEGNDEIVDEDSQFTDAVWLLKRCPIGGTATIQWEDRKSDKLNKVDIRLYGNCIGPLSPLKAGQMNAKNHPKMNPEPSGQQKKK

SEQ ID NO: 128332 - protein, 40 aa, Heterodera glycines
CCASLAANEGGKRLNAVKAKALSRRKSGDIGKSEGIFKFE

SEQ ID NO: 128333 - protein, 89 aa, Heterodera glycines
MAKKPQERRSQKFFDKIILVGYLIPNFWADEPPQQHPVQSANLQLVRQPTPYPPAGSRLAPVILRRFAPNSKCCQRCTTPDPSIGNAAA

SEQ ID NO: 128334 - protein, 118 aa, Heterodera glycines
MSNEAEKEFTLAGNPKAPALHVVLDWIHRSWQEISKEVIIKSFEGSVEKENGKIPEFLVCGLTTPLDGTGDEKIACFKPKGAIGSIGTKLLREFRATETMKDGRNDHEEAGLSDDDVM

SEQ ID NO: 128335 - protein, 68 aa, Heterodera glycines
MQFRRLITVLQLLLALFVVVLALCANFCYGMEGKNKDLQKTAISNSKQKNSKMMEFSELEQMKTTICL

SEQ ID NO: 128336 - protein, 15 aa, Heterodera glycines
MFFNFLIYLFILCLL

SEQ ID NO: 128337 - protein, 37 aa, Heterodera glycines
VSTILLLIPFHKLINSVPPSNSESSSPFKLLGIKKSD

SEQ ID NO: 128338 - protein, 130 aa, Heterodera glycines
LIDIIELTEMRRTHAVLHLVMKKKLLFSGNDQLRIWSYSNAYPINRGKIFEKEIKMDILALKQCLLICPNEWPIHLDGKDQIFFYAKRNGNIKLLGTATVQLLRETYEYNTVIDFSDLAQGARFYKRHEN

SEQ ID NO: 128339 - protein, 133 aa, Heterodera glycines
NFTLRIKLLKYFHCEGGVTMACVLGQCECKLGFHWNWNNDHRYPSCERRCTLEEVPVIDRCLKKVELGERCMSSKQCGDAAAECRFGICQCLCTFKQTVSAKLRIRCTNPDDPLGFSNILTRVEQIFQNRQRS

SEQ ID NO: 128340 - protein, 52 aa, Heterodera glycines
MSARKCPLPLIAFSSLTKAGTPLPILEDLLNACQNIAEADVNFSRNNLELVP

SEQ ID NO: 128341 - protein, 46 aa, Heterodera glycines
MLKGCLYVILVLIAVSLIRIATYSQKFSSIGSWEVVKLPKNRVSLF

SEQ ID NO: 128342 - protein, 19 aa, Heterodera glycines
MIALRLVSAKARLVENGCL

SEQ ID NO: 128343 - protein, 159 aa, Heterodera glycines
MNPIDAIILNAHYGLKHPQTKLNITLNEAIALGLYDPVTRQFLNNNEQMDYWDSLAFHSPNTVHLYVKFGAIKVTPMDLDHALKYFLDRYVGVFRLLEYQISLPEALKYGYIEIRKPQPTFALTLTDCIEQNWINRETGLFIARPEEPHGFGEANAFQW

SEQ ID NO: 128344 - protein, 79 aa, Heterodera glycines
GYDASADIWSVACMTGRLLHIPNLKPWSLLEVLTQKYQWPFDQARSFAAFLVPMLNYEPSERATAGQCLEHNWLKNIDE

SEQ ID NO: 128345 - protein, 35 aa, Heterodera glycines
GTDKCHRTGWCQSTASTTSHCPPPPVPTRRRRRAV

SEQ ID NO: 128346 - protein, 30 aa, Heterodera glycines
MIASAFFRVKRKANKLLNGSKKLYRNPRRE

SEQ ID NO: 128347 - protein, 175 aa, Heterodera glycines
MLSAGGRAAMLGLEKSPPPVLVTLQVQPGREFSIGAVTLVKEEQWHNDLLGQKPFCVRKNGVCVAQRFPQPSNSIRTEAEKSGKNINSSIAGDKLPFPVAGEPSQMRVMALAGSGAQSTLDIEGVVATPNDYVFVVHYFSPDNPPIVVDVLIQNEHFGDALFHYCPSMSGCRTIV

SEQ ID NO: 128348 - protein, 61 aa, Heterodera glycines
MTLTHKMSSPRNVQVSNLSFFIIQMGLSITNGFRGKFANSLILNTCRTPLSSQENKTYAKK

SEQ ID NO: 128349 - protein, 32 aa, Heterodera glycines
ADPQNVQPTKCPSFEFEFFYYSDGPKVRQGVI

SEQ ID NO: 128350 - protein, 64 aa, Heterodera glycines
KFGIPLERQKLAHLYKPDDVSDRTEFSFGDCQTMYFYNIVKGDTIFVSEVFEISVNYQFSIPNN

SEQ ID NO: 128351 - protein, 826 aa, Heterodera glycines
MSHQCGEKFCRLCKQFHVKEEDDENPCSSCFIQPLKQQKIKPYRIIAYDFEATQDKKVGNSFEHEVNFAAATVICTNCINNGEWKNSLEGKQCAICGPNRTITFSPFDYKETTVDQKIVTQQTLREFVQWLLFEQNKKYPTVAFAHFGGRYDMTMIIKEVIAQGVHDPQIIKQGNRLYELKIKDNEHAPLTIFHDSYNLMPIKLSGLIKSFGLKIQDKQHFPHMFNKSSNYENVLTNLPPREEYCPNQKKKTDLQKFNEWYNTNYDQHFDLKEKLPEYCCNDVKILTHALVELRREFKQLTQREGNHRGIDILWQAMTIASACVKNFALNHLRSNSLAIVPEKGYTPQQNQSALANKFLDWYSHINNVHVQTASSRYGEYMFKREGQIYQVDGYIKGTNGQRDKIIEVNGCLWHGCEECFDDMDEETRMPNGKTLGEIRLREQRKHEILRRYVDLEVVWEHEINKQMKRDKEMREYFENWKDCSPIKIREAFHGGRTGPMKLIHTAKPGQKISYKDFTSLYPFTNFSTKYPLGHPKIISFTTNEQTVNWRSPTDNPYKGLLKILLQPPDNNVKVTVMPIKFDERLLFPLCEKCAKVISNKYPKGLKDDNYSCPHVNTNDRAFVSTCTHLELNASLEAGYTVRKLFHVLQYDQWSDNVFKSYVSEMMALKIHATGYPSWCNNEEEKRKFIDECWRKFRIKIEDNKMKADPGKRYIAKLCLNSLWGRFSMRNLLSKAIIDNDECLIRQYSDDKKIELIDVELMDEDNDVYMLTYKPKEEFVDENKYSNVVISLFTTSMARLYLYEALKKVADAPGCEILYYDAASVVC

SEQ ID NO: 128352 - protein, 24 aa, Heterodera glycines
MPTKFAMTYFALVTVIKIIIAALY

SEQ ID NO: 128353 - protein, 179 aa, Heterodera glycines
ISIHIPTIDKFEKNMMINDHVMQDEGRDKFDISNFPNFLGLRRIKNTQMNEEGSRERGSVARMIAMMEKLIFKLTIFWHYAFVPFMHKIELEYGIFSFFYAARDRESHLSPVETCLPKQHFILSSINLLNFNLRRLSPGSSSSPPPSPERKFHDSYYEFKGIKVGQKSQNAYFEKNFSN

SEQ ID NO: 128354 - protein, 30 aa, Heterodera glycines
SQRRSLKPSGKCFFMLNISKLVRKKRHMPQ

SEQ ID NO: 128355 - protein, 121 aa, Heterodera glycines
MTHVFFDPESVDWSSFFTSQHGRGQKQYFVGSKYQRGFGFLGNVARFLTPIARNIASSAGHEGLAAGQRVLSDIAQGRDLRDAVREHSRQGLTNLTDKLQQCGKGKKALITNKIENGYLIS

SEQ ID NO: 128356 - protein, 267 aa, Heterodera glycines
MQSFTWKQKHSIFSYIDHSVIAFLRSNHQIFDKGTNLRLWMSSSQTTDDQPIWEVFVREIWPIFSTNIRHLGFIGDEQLDNLSRLISPAILTDLHQLNSINSGDLLPDVIGDFDGPNATAGQILAKWLHTPRKDGQPKQLRCRDQTSGTVAWVNNFKEGLLRATTSADYKIQFIVAPPSMSMVPFELTNGRTNEKLTMTKSSENAWASQWIIKRCQIGETAAVQWEDENWNDLSTVQFMIFGNNCIGPLSPPEEAGQSSEKGTSSDK

SEQ ID NO: 128357 - protein, 88 aa, Heterodera glycines
MDELGMDVGSMDELGLDELGLDELGMDELGMDELGMDELGLWMSWERNPRREDMSTTQDWPSVWPTAQSFRSSVVPLPVRMGFRRRPE

SEQ ID NO: 128358 - protein, 324 aa, Heterodera glycines
FLRVSVSSKEGQKQWEKPSKSAMKKAISRLEEERRKREKASVAEQQQEMAREKRLEEAKKMQVKLDESLPEAKRTKIRECPALCGQRVKVFAFVHRMRQQRKNLMFLVLRDGSGFLQKNLMFLVLRDGSGFLQCVLNGTLCQTFEALTLTTESSVCVFGQINKLPIGKVAPGGIELTADINKLPIGKVAPGGIELTADFWELIHGSPPGGVDNVLNVEANVDVKLDNRHLVVRGENCSAILRIRAAVTRAMREHFHEAKYMEVCPPTLVQTQVEFSKLFYFYGLIPHGIPSCVFNKKTGTKASIGAGPLVCIFKQGRGYPPPPP

SEQ ID NO: 128359 - protein, 45 aa, Heterodera glycines; identical to SEQ ID NO: 124527

SEQ ID NO: 128360 - protein, 120 aa, Heterodera glycines
MDQLSRLYMLGIALCALFLIGCLFNLLMCCLGRRRTAAETGGGSAALQMPFRTKRGRRHHPAQQKVMSAVGGHSSHTTLTSSLYGGVANEAKNGNGSKAQQQQQQNTPRWCPAFTKDCQT

SEQ ID NO: 128361 - protein, 255 aa, Heterodera glycines
TLTLRFFDLINDGNIQQLRVLIDSLDADELNILLRWTVDPVERDNTRSRSALWSAFLRQHTEIVDLLVLEKGADPDEPVADQNGDGATALMYACYTGNVDIVRLLLTHGANVEQMDFEGYFPLIDAAIGGSLEVCRLLVEEWAADVNQQTVQERYTPVICAASKGHLAIVNFLVEHGADLQHVDVEGHNALMWAVIKGKTEVARHLVAIGADINQRNIEGKRAQDFAEESGNAEMVAIFRTTATDNGRHAAEGTE

SEQ ID NO: 128362 - protein, 33 aa, Heterodera glycines
MPPLTVQSVIIFSLADKIKSSQELIRVGSFVAK

SEQ ID NO: 128363 - protein, 216 aa, Heterodera glycines
GGKETTRQMRWLLAGASAGLAVDLSLYPLDTIKTRMQSKAGFRASGGFRNIYRGAPAVAVGSAPGSALVAVGSAPGSALFFITYCNGKEMLAQRIGTSMPLVDALSATFGELVACLVRVPTEIVKQRSQTSRASGLLQIVTELYRTRGGIRGFYKGYVSTVAREIPFSFIEFPLWEWLKRRVAHRMGHCSPLASAACGSLAGLTAAALTTSICVAQ

SEQ ID NO: 128364 - protein, 170 aa, Heterodera glycines
MSPPPFYIFKSPMVVMRSFDLMRRLINPFNRLWYSWYDSAYDMNKFMDGAVQAALLAALNLRERRFDKFREIATEQLTVYMRQRIPKMPADLLDQRLQFKRHHVVNGFIHTSAYAHRAVHESAFIANIDSLRSYRMTKIVGSIGTTVNRVIPQKSDWGPVDSQSAVIMSQ

SEQ ID NO: 128365 - protein, 123 aa, Heterodera glycines
MSKLGTAQCFVADPRWEINSDIVWTDDNSGHKPRIEIPPCLYGQQKPWRTEDGTEEAVNECVALSYRPFRKRIEIKLADEGLTDEILDNFTPPIVVSELVANRKDCASMYRIRTNIHKVILKF

SEQ ID NO: 128366 - protein, 41 aa, Heterodera glycines
MPNCPFLYLVWNRSTRSIRPRTEATIDRPTPIKTGQEPEAF

SEQ ID NO: 128367 - protein, 205 aa, Heterodera glycines
MHRRSRSRSRSRAPEDHSLIEAFEPAPPMHSRQSLQRHNGPANVMRNSLGQSAPAHRSVQRPTDPRTQAWAPRPNLSANRASDQAMANQRCPDDSVNARTQQIQVGARLATNSTSRIGGQSSQLGPFQQMKMRMNWSMRPPSGLAVSTPVQPRPIGQANNSSTSMLRQFPIRGGRGQPQQQQMRRAPPPGNCDVPSPPQVDIVEQ

SEQ ID NO: 128368 - protein, 158 aa, Heterodera glycines
MPLADEEDNVLPHSLLPDYENSSENNNPENNNSGGGGGATTTPNAPQRRHVIHSDDSDDDDEDDEDEADDYRGGNSGTHAQPTAKRGRIETTYNFNTTTIVNNSNNDMHLFDMPSTSAAAAAAVAADNEQQQMLAMMPSSSSSSSNWVDTQNALANDM

SEQ ID NO: 128369 - protein, 64 aa, Heterodera glycines
MKPALRVRPMSLHWSGCTMGPPKAFSAGKAAPKNEVDELKKAEDLEGQKIEEKSPQKAKWEKYL

SEQ ID NO: 128370 - protein, 83 aa, Heterodera glycines
MRTFSFSKIWPLQIRTNLRNKDTWQPCFRAESLQWLRQYDSGRNRKTLQSSGFDKGTFRAVSGKMHISYIPLDRAGSTCIVNF

SEQ ID NO: 128371 - protein, 195 aa, Heterodera glycines
ADAEHPTDAAVVDNFETRARRFFDLINDGNIQQLRVLIDALDADELNILLRWMVDPVERDYTRSRSALWSAFFRQHIDIVDLLVLEKGADPNEPVVGRENDINTNLTPLFVAALHAHFPLCRVLVDRGANVDLGSDFATTPLMMACKRSQMEIGFRFALKNAANEGHLEVCRLLVEEWAADVNQSIIQDRTTALI

SEQ ID NO: 128372 - protein, 71 aa, Heterodera glycines
MVKFIKNFWALIIGVRSSVSLAWSRNCCALEARQQCPLSVPMLSMLIPIVGSNAFVLNIRQRLSVLHTNDA

SEQ ID NO: 128373 - protein, 63 aa, Heterodera glycines
MSHPAIWKGNAERNFDWISSNGGNNRPYLLKEGIIGSVILTFLSFFFVILMIYSVNFQKCFYY

SEQ ID NO: 128374 - protein, 20 aa, Heterodera glycines
TDQKRTKLCRDTERKRNNLF

SEQ ID NO: 128375 - protein, 114 aa, Heterodera glycines
VYKIALYGCDRAVESQDWQHLTIDSILRLTIAAYAFVSLIYIIQRKNGFSCSKTSLHKEQHIWYRLHYGLLKSAIVTCASELIPVLLVAHWIACGQAKKIAQQSLTDRMMNKKK

SEQ ID NO: 128376 - protein, 31 aa, Heterodera glycines
MQTTLFKNSLYFCSTVNTEFIDKSIRFSSNA

SEQ ID NO: 128377 - protein, 127 aa, Heterodera glycines
MVAATSQRRENSTTVIRSGTKVIKKRTKVIKRGTKVIQRGTSVIKRGTKVKRGIKVIKRGTTVIRRGTKVIKKRTKVIKRGTKVIQRGTKVIKKRTKVIKRGTKVIQRGTSVMRRGTTNGRRGTKMH

SEQ ID NO: 128378 - protein, 96 aa, Heterodera glycines
MRALRLQLPHGAGIVQKSEELGHFSFICRKQCRSTGSKKIGSQNIQLELNHHPSLSDFIAAFTKDIDKQLDIGRAEQLQKSRKRNGTSSIRPQMWW

SEQ ID NO: 128379 - protein, 124 aa, Heterodera glycines
MEGCSLIESFRHEDLKFGFTKYKTKFYFKNPFIINAEENFKDILTSLIEEKYKNEQGKFRSILKLSFGFESFYCPLRYPSENTAEALFQHVLLKEEQYSLFYPLDGVITLEVTIIPDVYSNSRN

SEQ ID NO: 128380 - protein, 209 aa, Heterodera glycines
MNTIRDIKNIELVCGSRIFVVRAKIASVGSTEYNACISCRKGKCNCGMEKEKVKNLVGTICTLKVNVSVKEYGAAKRETERAWRDVVVLSDDVSDFAKSSRETLNRAIKSREKAPYANGVRELYLKMSDSIWEIFKFLEQINLESEKAESAWREFERCKTFDQATKLEEQSQNSLTEARRLHFESRRVQSQMLNYENRLQTIVWEHMGI

SEQ ID NO: 128381 - protein, 120 aa, Heterodera glycines
MRILILSIVHTDLSADNDLSADTDNIGKLGRKLYYATVQKQKVCVREHQSDRCDGILCGINQNYGDTAIIKNVKIGGGSTNVCSLFKGNDQQKQPSVIHNYKVGEAGDGKNCVVSGSSSG

SEQ ID NO: 128382 - protein, 56 aa, Heterodera glycines
MLFLSFPSLVLRQIRPSFCRCFSFLLMLAMLFDLISSGRSLPLGPTNERVFFSNAL

SEQ ID NO: 128383 - protein, 149 aa, Heterodera glycines
MTFQSLKINPSAFQSLRLNSQAFQSLELNPPAFQSLELNPPAFQTMDLNLRNSKHWDSIHQHSITGTQPTNIPINGTQSTSIQSLGLNPPTFKSLGLNPPTFQSTGLNPPTFQSLGLNPPTFQSTGLNPPAFNHWDSTHQHSNRLDSTH

SEQ ID NO: 128384 - protein, 23 aa, Heterodera glycines
MIEIISFLVYFVLIFFSPTPDDE

SEQ ID NO: 128385 - protein, 22 aa, Heterodera glycines
YTFETIGQDKKRMKLMPHETRN

SEQ ID NO: 128386 - protein, 28 aa, Heterodera glycines
MDLKNEVEINIKYKVNILLGVLTNKMKN

SEQ ID NO: 128387 - protein, 69 aa, Heterodera glycines
MAAIETKNGNIQPNNRQNDSAEFLRFNPPAIFIISSDDEETNGKKGATEGMAPAEGETARKREKGTAEN

SEQ ID NO: 128388 - protein, 37 aa, Heterodera glycines
MAAGCWHNGIRPTDSMNQAIPYSNVLAGRELFRLQMQ

SEQ ID NO: 128389 - protein, 187 aa, Heterodera glycines
MAKPFLPNRDQSWRVWLYTAFACIQPPNEGFTPPGGGSSLNHWYHDPITGECRELKYQGYGGNANNFATKDHCESYCKQTCSRGLPLYRDRTMGVKQEPVYCQGADNGCTSPNYVCTAMGTLQQCCPTFSYLISAGEPLKDSSGERNMECSPTGSGTNSCPSTHSCESTTGSTTFGGICCPRTQYVC

SEQ ID NO: 128390 - protein, 450 aa, Heterodera glycines
CRKSMKNYFTYGFAKCILYYHSLLSTCQTFSFNGCDGNSNNFATQQDCKDYCRVESCPDGGEVWKEPNGAVRPCTVWKEPNGAVRPCTTNRQCPSTHYCTPVTVFSGTVYQTKSLCCPSKNFVCSQPKDQGVRCSSTRITRHFFNADTKTCQDQGVRCSSTRITRHFFNADTKTCQPFEYNGCEGNRNNRNNFATQKSCQNYCLSEACSPGTVVARDSDSIRLIQCTNPGGTGRVSGGCPDGYSCFSVLLQIQLSDSSATFFKTLCPAGSSPFISALSLQPMQCTPNVDGSCPGNFFCWFSTTTSSVNAFYCCRSPDSIDTGYCPPQLVPVPGEGATPYRYCSPSAPINDGIQGCGINGCGINRHCQYSTTLERYICCGLESDVRLPNCPPQPANLVPVELAGNYRTCNPYARSGTPQACPACPENSACLYTGQDNGFICCRVQLQSSPF

SEQ ID NO: 128391 - protein, 133 aa, Heterodera glycines
MDNYALAVQLDKEDKWPYFALVHQNLKLNQYPRLGSIISVPKVEKLEYFSSSNYELYSQNPKEESGTIYNIIKSVRNEIKAIDVDFNVYDDESNDSINQRFFPHQIGPDLQNLDLVDEAWAQITGFKIQNPLE

SEQ ID NO: 128392 - protein, 112 aa, Heterodera glycines
MNFYIFFQDFPDLIKYTKLSVSKFEVIILNAEFVRIFMKKCTNSFSSTYFSIFFVVLNLYKGTHPSQNSSTLTQKKQSTSENQSLMIIQNAFNALNFGFDFLDGVAWKKITE

SEQ ID NO: 128393 - protein, 72 aa, Heterodera glycines
MPQVMKKVIFGDNMLKIRDRDFRICSAGLTFSGATGFLAMPLKNRSNRIFKFLDPGPVYGFFEHPAAPIDIL

SEQ ID NO: 128394 - protein, 127 aa, Heterodera glycines
MALEQRKMYEKRRAERNAEKERMRWELPRGMAPRKVHYATHRGINKRRKWHRGRHLNESQTGRKYRHPRAHDISPLRQPNGATTELLAPSSEMEGQIGNDKQTREESQIKEPVQSQRRTKAKDPLDE

SEQ ID NO: 128395 - protein, 235 aa, Heterodera glycines
MRKVENLLKGRDGLARPARVHPKAKTLVRAINLLYPLEINPSAEDEVSQIQVTAIMDSPSAVMQGMYLQSVTMESSLPPGTVMQDSQIVTTESSLSPVRGRNERQPRKERIRKRQSTEDVRGKRKPKTNGPYDPLRPGNYRIPRRNPFFPSQVAYNEQTRTYRRRRGRTIDLSGLRKLFAGLGGTEFVRRELQEKANPALREERLRKDKVKFMEDDARRVAESERKAAQEKVEKS

SEQ ID NO: 128396 - protein, 207 aa, Heterodera glycines
MAEHSEDKLDETERIFEIARVMWKAIKKHDKNAVGIVPRLRFIGLVLWHLAVRQSPLIDQQQQQHNGAPLLEFTAKMRPNIDPHDPTEWQTMLWHFDQNLANAAMDAEEGQKEANEGGIEDGKWEGEEEQNDGEEIKLLRELGEKVGQGRAQFGDRERHAELGKKFSLLKKSTSNDGAAHGMVNFCVIYRAFLVFGSQSVDILLFIR

SEQ ID NO: 128397 - protein, 123 aa, Heterodera glycines
VIAGQVYEWSSNIIPFQIWGGDTKFQNLIRRGIKMWEESWEESTCLRFRENVQATDAIRYVLERGDSCFTEYIGRNGGFQDIIIGSECAEEYEYVVAHETGHALGYWHTHGDQCRKTKIDNCL

SEQ ID NO: 128398 - protein, 196 aa, Heterodera glycines
DDIVLLKEGTRVCGSGGILGNVPLLQNKSYFQVHINVPLLQNKSYFQVHIHQSGIWGIGLGTRKTDLSKAPIWGIGLGTRKTDLSKAPIADTAWMLLNDGTILMDNEIVGKVEQPIGEGETIGVAGVAFDHVELHFYRGWRADLDWSDKASDVGLVFYPCLCIDENCVLDICFSAAKFSPKAPLGYQEIMSEQTLL

SEQ ID NO: 128399 - protein, 86 aa, Heterodera glycines
MATNRLDVLALDAFPPAVISACVNKFLMQIRDPLIPYSYGKEICALLDRCLAIDGPILEGFAGIVEDLPVHLAKFFLLTMSHACVI

SEQ ID NO: 128400 - protein, 75 aa, Heterodera glycines
MLVFEKNEWLPSASANDTKKQFVLTPVFERTHEKKRTQPSTTVTVQQQLRNTKNKIGQSHGTTTAKSTQQVKLGR

SEQ ID NO: 128401 - protein, 493 aa, Heterodera glycines
VYQTNSSKVTHVVNLVKRIIAFFFSHVGLCALVIGYAMLGAVVFRAVVIGYAMLGAVVFRAVEGPHERYIQSEITGARYIQSEITGARRHAVDVAWNATFRVNKLDKTEWRRHAVDVAWNATFRVNKLDKTEWERIVYEQTKFFKRRCLWAIHRGYTKFFKRRCLWAIHRGYDGKEFGRAAQWTFTGSFLYSLSIITTIGYGNTSAKTYFGKTLTILFAIIGIPLMLLFLTNIGDVMAKIFRFLYARSIRLKYTIIFLYARSIRLKYTIILWHKRRQAAKIRRANSWVALTRSNRANTLPVNGGFVTGAAADVNELLAARAHLVQLEVKELLAARAHLVQLEVKESVEAQLQRISVPLSLVLLTMLAYLVTGAILFCLWEEWTFLDSFYFCYISLTTIGFGDKFPGEFGDKFPGEAVGSDKEAQEKLVITSIYLLAGMALLAMCFNLAQEEVVNKVAWLANKFRTREEEYEEEVVNKVAWLANKFRTREEEYE

SEQ ID NO: 128402 - protein, 487 aa, Heterodera glycines
YCGRMDAVKQLLGAAGSEVLGMENLFENLFSETPLMAACTAGRELVCFLMRQPEVDPNYQAQDGHTAVDPNYQAQDGHTALHLHSACFHGHIRVVQYLLDNGADQSLTARAVDSPLINQFGKNYLKLFLKNNFVLNLRIHLPNQNAIKFIYNINQPQTPILWAYEKGHDQIVNMIVNMLKYYANRRPDSDACSEYSSGSSSYSGSSSYTPLPSPLGRLRSMTKEKAEILQLRGELRSAHHLSLLDVELKEPIGNGSFGKVYNGSFGKVYRGVYRGKTVAVKRYKVLIFKYFSKVDMFCREVSIVSHLKHTNIVAFIGACMDDPSQFAIITEFASQFAIITEFASAGSLFSLLHVQKRVFEMTLRLCIGVDIARGMKYLHELVERPVIHRDLSHNILLHNNGRAVVADFGESRFAGSHDKRDDNMTKQPGNLRWMAPEVFTQSCRYDHKVDVFSYALVVDVFSYALVLWEIHAAETFSQLKPAAAAAE

SEQ ID NO: 128403 - protein, 78 aa, Heterodera glycines
MAHLELKHSTPGFRVKQPWLHTHLEFENSYPGGNFGGNQLLDGSISLSPLYPSQTIDLHVRIASDFHQSFLWLHPAQE

SEQ ID NO: 128404 - protein, 145 aa, Heterodera glycines
MPEDSKTIENKFNELFKNGEQRTFEFQTVFKKELLYVIINNVTVNTQQKRQLPVWAANYIRLEGNVTAFGDPDYLYIDQIFLVKTKMLSKNIKVLNDFTIKLPTLFNYGDSVELYAKREKVAKHEDNNRNNFTFIFMHESLDEIQ

SEQ ID NO: 128405 - protein, 82 aa, Heterodera glycines
MYFLGNLYFEKSNVPGFHAGPGQKPKKIQQIVYFGARLFGFNKNQPSKSRFWMPLKFSRIEPGRVGFLEWSPDFSESQTEYI

SEQ ID NO: 128406 - protein, 82 aa, Heterodera glycines
MNKEEWNNEWKVQKIFREKHDYLKTIKEIDEILDTLKDVNLETQTRKMNQMIMNMKMKTKLKNKKKKRNMKVTMKTNRQNFP

SEQ ID NO: 128407 - protein, 100 aa, Heterodera glycines
MSTSESKNGKNLNSSLNINNLSPTAPDEGDCEMPDERVLHLECFESGDYDMMELYGPDRAKEMLIDLRDYAEAHGMPCKHVKMLLYKLDKGLIKWKGTKP

SEQ ID NO: 128408 - protein, 204 aa, Heterodera glycines
PPPHPPPPPKRGHRRPPSPPGRAPSPPGSPPPRPQRPPRPTRASRRDGRLEQWEKRRNDIQRRQPVVRDLLAEAAAAPLPESDTDDDYMLESGLALPAPTQYYGDLPMLPYNAQREIEHMDTAQQRIAIRRKLKKDEAYDDDSEHKKYRVHYPPSPPRLPLPPRAKAKIEPPPSRPTAKREPQKPTKLELKPSKFDSDLRPKVA

SEQ ID NO: 128409 - protein, 312 aa, Heterodera glycines
MADAMQDGARWKKAKTAINVLGNLLLAESLDNTSANDTSLKNDTVDIKKEEANVEEEKVQEEPKEKEENKEDLGDIDKTLDEPSLCVKMLNTQAFNDKDIGFKLPFGLIISGPSSSGKTQFLLKFIAESDHLITPRPVSMLYCFGEMNAAVPVLQKAGVDVYAGVPSEELIKRIPKPLLLILDDLMLSIDERYLSDLFTKKAHHHQFAVVFVTQNLFERKIKVARLSAQYLVLMRAPNSLLSIRNIGVQLFPRQLDFFLDAYRKATARPYGYLLIDMHASSDPSLRLRTNIFKDEQEEDEGTVVFIPKNGAA

SEQ ID NO: 128410 - protein, 576 aa, Heterodera glycines
MANKFLLVPQEIYRGLTSMSDTGDINLDAVRRDLDRARVERTHPSRKNVNYNQQLRRYLKMRQELTDKPAKVELTKGISVLLRRGAEDEEGEVVDTPPRPPAPPPPPPPPGRRPWRGPIPPPHPPPPPKRGHRRPPSPPGRAPSPPGSPPPRPQRPPRPTRASRRDGRLEQWEKRRNDIQRRQPVVRDLLAEAAAAPLPESDTDDDYMLESGLALPAPTQYYGDLPMLPYNAQREIEHMDTAQQRIAIRRKLKKDEAYDDDSEHKKYRVHYPPSPPRLPLPPRAKAKIEPPPSRPTAKREPQKPTKLELKPSKFDSDLRPKVAPPPRPKKEPEFPLDPRPSTSRQAVHLPPAPKIIPKPEPTKRPVPYRIPKREPKIVEQQPQPLQQPLPASAVEEEMPTVPPPRRGTKRHYPVNGENDGEVRIRKRVRQPRRVRVQYSPEPGPSTSAQSDEQQQQQQRELFAIPSNQLTMTQRVERLYIKCNHYADRMGVRGNTINTANGKPLAHSNLRMALKYIIDRRAGRPTIKPPGANLLEERLRKDPILYSWTAPPKRPSQSKTTRTERTIKKEFRPKKWS

SEQ ID NO: 128411 - protein, 387 aa, Heterodera glycines
MDGSSKENSTEHNHQDGTENQEGISPEKVELINSTLDKLYNDPSSPAAFAGVTALWKEARKKLKNLRKKDVQHYLEGHRTYTLMRPRRVRFPRAKTVAAGFMTDVQVDLADFQALLRHNRGHRYLLVAVDVLSKRLFVVPLKNKRADEMLEAFRQLIDQMPMVPHRIFSDKGTEFKNRLLKEFFDEQEIEKHEPVHSSVKASVAERAIRNVKQRLYRYFAEKETLNWVDAVQKIVDGINNAPSRVHGMRPNDVNFSNAQKVWKRLYGHPTLQKRTPRFRNDQFVRMSREKGQFEKGYLPNYGDEILEIDEVLKAVRPIRYKLRDEHGEKFKGSFYEQELARVRKDAETSYRIEKVYRKRKLSDGSTEMLVKFIGYPNREWINESQLV

SEQ ID NO: 128412 - protein, 140 aa, Heterodera glycines
MSKSAVTTVTEWSPFFGNCDKSLACAGTRCRAKAIRSVAVTRIRGDVVVADDANCEEKKYLEERLTFKRRRVEVSGIGDEAEGMALIGDEAEGMAPIGDEAEGMAPIGDEAEKMAPIGDEAEGMAPIGDEAEKMAPIGER

SEQ ID NO: 128413 - protein, 93 aa, Heterodera glycines
  unsure (1)..(93): unsure at all Xaa locations
VKTKMCRQWKWTTKXRWDKVHKVVKTLLSKHWLMPTTAQENANDSRTNNTSELASVNRQFAIPSTPSSYLSPIGAIFSASSPIGAIPSASSPI

SEQ ID NO: 128414 - protein, 325 aa, Heterodera glycines
TTTSPRIRVTATDRMALARQRVPAHAKLLSQFPKKGDHSVTVVTALLDIGRDRWRQYGRTLRQYHQFMRNLLQLRVPMIVIVDEKSIVIVDEKSAEFVHRERARINWGQWTKVVQLSLDQLPLAIFQKRISLLMDSELANWPSDWDLSMRSHPEATQAEYVVVVNSKPYFLENVQTDNPFGTEFFVWNVQTDNPFGTEFFVWLDAGYGHGDRAIFPPSWEWRPTFPRGKMSVIKLTPPRDLLSRYSLKLTPPRDLLSRYSLKQLYRQDVAVLSGGFLAGDRRAQDVAVLSGGFLAGDRRAVTQLHREHHRMFLELLEKGRVDDDQ

SEQ ID NO: 128415 - protein, 70 aa, Heterodera glycines
LMEKRMFDYFCQRAAAEWLTNLPSRNLTAKSSKTPTASQHGKTRLRQETREVGGTSLNGNGMQRARNCPI

SEQ ID NO: 128416 - protein, 56 aa, Heterodera glycines
VLCLAVAIGHVEMSQDELVSNISLGVNFLVSLLKKNWQNVRSLNIKSTMGPAVRLF

SEQ ID NO: 128417 - protein, 32 aa, Heterodera glycines
MFNFFFLLIFASSAQNSFQQNDDLGSFQIVVK

SEQ ID NO: 128418 - protein, 173 aa, Heterodera glycines
MPLKVPHSPPLQSLVINNSSGAEEARKGMPIAVVNASLSKKVELHKNEQQRPAKKLNHTQAMGHHDKPTNISVANNSSKNNGTSPTNVLVTSKNTTDGDYLRVLFPPSPMPLKVPHSPPLQSLVINNSSGAEEAKKVMPIALVPKTVRVAKKSSMNNGTTLMANALLISKNST

SEQ ID NO: 128419 - protein, 131 aa, Heterodera glycines
MLFAESDLFPRFGIVYYETKIIRRQLTFGNGTIGVGLFTSDHFYFYSSGGVVFGHNIGGFGGFPPFGEGDTIGCGVNLTSKEIMYTTNGKRLNTSNMFVVIKDMLLPAVFMHSVGDTIEANFEPNLQLPNP

SEQ ID NO: 128420 - protein, 122 aa, Heterodera glycines
MKFWRLTFIFIFSFIQKSTSNATTEIQAKYSNFGSVISQFMENREKIDQIFADLKKEKEKRKEQMLSEEEPLQIIRDTITIDYQWNTSDCQSDRMILIPTIIKVKHYGKKKGKSGWKYRKYF

SEQ ID NO: 128421 - protein, 324 aa, Heterodera glycines
MVFRYKKSFHEACRSDFASLGLPLDDCVHSSLLIFNELLRIADYEYEQIRIHHSVDGPIVQLGSRADSIIGQNPIGWLIEAADHFIAINNKFPQALLTLGLLSLNRPLEMRTRIPRIFQILIQHMQTAVNKKKQMPMLDFHCLSLLIQSQKSHLCERVRESLPLMFSTGISEGLIQALHVTIEHIPELPADVFDGLMDHLYQLLMDRPRPSKLAPPTPPPIPIGPIQPKNIPQTQLALKTLGEFNFSRHSLQMFLRYVALGYLTSDSTKIRLTSVFSCGEMLKPFVDIYEHVQTEQKAELYSLIRNVLECLVKTAIVDTGPVIG

SEQ ID NO: 128422 - protein, 16 aa, Heterodera glycines
EAIPEGFGLPINLGAS

SEQ ID NO: 128423 - protein, 30 aa, Heterodera glycines
MDPTRRGAPGEELSSEDLAALPALPGLLAF

SEQ ID NO: 128424 - protein, 33 aa, Heterodera glycines
QSNANGRPNVIKIPEGENLIKSIPSGDRAGCRG

SEQ ID NO: 128425 - protein, 153 aa, Heterodera glycines
MRDQKERKYGGDGGGAGQMLTLLTSASADAAHVKSLAAGGDSVFAPPGGFGTEGKGKEKSWVCNDVLMDLFPFFGRLQLGLKLALLSPRFNALVDKHFDGKNEFTIWRWIGFRKNNGTAASELSVLIDYANSVQFPWLDLPLPHKIRFKHLQI

SEQ ID NO: 128426 - protein, 68 aa, Heterodera glycines
MALLGGSPPHCRDHWTKESPSPSVKGQGEPEGPVFRGRRNVMPEGTECGRKWDKGPERTSKRGARSSV

SEQ ID NO: 128427 - protein, 41 aa, Heterodera glycines
MARVEGNFLQNNVTQYISNDLEIASVNTYKINLNNCCFCKK

SEQ ID NO: 128428 - protein, 78 aa, Heterodera glycines
MACAAIAAHNLGFDNTRVKLIVDPMLHNWHIIECEIGGENGFRTRTRREFAAQHGGRLCTSRPVSTFVSPIFTTDVLR

SEQ ID NO: 128429 - protein, 148 aa, Heterodera glycines
MMMMSSAAMLFVMITLALISFGCSIGAVKSEGDDESGAVRHSHELISRIKRYGYGYNSYGYGGGCACAPVPVTSSCYSCGSGGGGYGYSSYQPVPPPPPPMQPSYSSCATCGGGSWNNYGSSSSMSVGNGGGYGYGGGMCSVCGRKRK

SEQ ID NO: 128430 - protein, 65 aa, Heterodera glycines
MVDIGEPPSLNTRLVDESPNTKQQIKFLFVPITLANLENGDDHRHHLFAKFVLMIMMMTAFWNIV

SEQ ID NO: 128431 - protein, 52 aa, Heterodera glycines
MLLLVLLLLFTLKLPLIVSDQLIFLLISFFSIIKWMGQNFIIQMDPKISRPV

SEQ ID NO: 128432 - protein, 172 aa, Heterodera glycines
MVTQANRDLLVRQGSQASLVHLVIRARMGHVDRPDQPDQMASQENLANQDKTESLAYSAMDRSRLALRDRKDRPAIQEGTENQDSLAHKAILGSRDSPELEVRQDRLELRENRAAKESPERTAKRDTAIIVLLLALLLAIEQKRKRRREADQSGKPKRNAIKNCFALGLFME

SEQ ID NO: 128433 - protein, 202 aa, Heterodera glycines
MAIAPNSSSTSLLNDSLIHWVVFLNSIELCVLFASFLISAFNLILLSNTALLHPNLKCILLVQSAVIGLYECFRFIFVLSKFVFADAFYHGAVPVQIVQMALIPIRNKMGHVLVAERVFATINFRKYTENRSTTKHHHPMIKRKAVVWLKNFFSFVKPSSVADSSVPIALQNGQSLVDIRGQKLLTESEMQIYFKKLEEAWK

SEQ ID NO: 128434 - protein, 32 aa, Heterodera glycines
MVKSQSEENATGDKSGQIDEVKITSLNIHIPN

SEQ ID NO: 128435 - protein, 108 aa, Heterodera glycines
MANEITESYAELIDTPPAKVLYCYSEMNQSVIELMKRGIETHNGVPDQALIQNQPKPLLVLDDLMLNVGNDFLDLLFTRGSHNWNVSVIFVTQSLHGRNIKTARANSH

SEQ ID NO: 128436 - protein, 155 aa, Heterodera glycines
MNERIEEISTEIAKSNAFVMEAKEKVKKAQQKLETYNNEVRSQEKQIRVKTAEIEDLKKRVRHLEAKIESKTRDREEALKNAKDFEKRAQQLEKAHNWIAEERKHFAVEGTAYDFRNYSFEMGKREYDERKTRSKDLLRTVNPKAMESLATAEKE

SEQ ID NO: 128437 - protein, 293 aa, Heterodera glycines
FSKSYAPLTLIRTWTTSLSRSVFNWPEKEGNVRKNWTGLRPGIHSMTVLTLQFQIFLKKFKLRFDYTMPYNGFDRNKVKGVVAKLFKMNEQRYATALEVVAGGRLFHVVIDLFHVVIDKVKTGEDLLKAGLPRRVTMLPLDKISANVLDQRLIGQAKRMVGEENVFFPGELIEYEREIELAILSVFGNCLICGDMDQAKICGDMDQAKQLTFDRAINCRTVTLSGEDFKPTGVLTGGFRKPDASILTALNEISGQYERIRELDHRIGAIESDCSDVVSILEGIFRGTRKTEAP

SEQ ID NO: 128438 - protein, 294 aa, Heterodera glycines
MRLIRRDIKKRAKFDMFKLKPIARVNKCAISAFFVAGLNDELVGPHHVRALAKAHNGPNQLYQFQGGHNSPRPANFFVQALQFVRVMIGMLPLQLDSPMSSPEKPQRTPVVLHNPLEPGVSIETVHKMTIKELKACIDRAGFSDVTCIEKAELVELVLKLYARWARLNPHEAASHGPATTSSPPVSSHSTNSPTMADLPRSGSTRELDSPSSVDKGRRHSEGSLETVEEFPDVQRAFFPAMTSSCSSIMSDAELTQALGHRTSGEDDEDDDDDDEEDVDGYDEQREESEVEEHV

SEQ ID NO: 128439 - protein, 113 aa, Heterodera glycines
MWSMIKEGYEGLVMTVIRPLRATYTPADLGPKRAMLRDVVMQRTDMKLKNPGGYTLECSWWRPKTDRSEKTPCIVILHGNSSCRLGGLEIVSYAIPAGFSAFALDFSGSGLSE

SEQ ID NO: 128440 - protein, 141 aa, Heterodera glycines
MSIRTIELCVSILEDHFGFYVSAVGAVLLRQQLPFVLLAKELHGRVRPGEMKRSIAILDQHNLLSFESPARAGAVVLYTVLAPRVLNLVRAPRAILTVKTLYSSGAMEAIFEDVLAQGRTSCSQCIRRVAKCMVDNLPMDK

SEQ ID NO: 128441 - protein, 499 aa, Heterodera glycines
MHREIRETMHMQLHRCSDSWCGPSDPIYGRCKKGFPAPYSKCTILRPDRPAMYFRPSPTDGGAQLEVNGLIYDNSHVVPYNPYILLRYRVHHNVLFAYGNKANIKYALKYPFKGPGHCYVECKQESGNKIGIDEPAQYAKMNFRGATEAYAIVHSLPFAKLSHQVVKLSIHMPNQQPIVYRAFQLVSKAQQIQQGKLPETQCSAYWKQWQNEWKHDPKLKDMLFEKVPEHFIWAKDKWNKRKYNLTKRPPIGRIVPVPPKDPERFALYSLMRHFPGDPDHLKMVNGQPCTSFTDAAIRHGLLEDDKIWDKTLAEAALSRWPDQMRWLFMSILVYGQPSNAVELWNKYKDQMYFPQGITTSAQRQAAELEALADIDWRLHSCFNLSSVHFGLPDPPNSIAKNTNAAINEFFFGDDDLNLPPGQPNPRPQPNTPPPLNSDQQKVFDAVLLAIQSNPRDSTVPRRFFIYGDGGTGKTFLFGQIIRRLRKAPYTYKVLATAST

SEQ ID NO: 128442 - protein, 105 aa, Heterodera glycines
MNRRWICADVWMDILPSFDRAQLGLKMALLSDRFDFLVDKHFDGKSELIIWNDITIRKGMEDEEKIGAKAKLFMQIKDNKDKFVEFPMPDHPLPNKIRFMDLMIM

SEQ ID NO: 128443 - protein, 100 aa, Heterodera glycines
MIFGAILLSGLALWWLICFLFLCFFPYCFRPIRRLTTKRRCGTHSGTSNPLADSSILRRPSNTKSGVARPPPSFALPFSRPFAHSSLLTPPCVNRSELFL

SEQ ID NO: 128444 - protein, 76 aa, Heterodera glycines
MRRVDSISLFSEDANYLEFLDTIKYNEEMTVDKLMNLHKLILQKHSPNDEAAGRIRTTEVEVSGEPMLHSDHVPGE

SEQ ID NO: 128445 - protein, 97 aa, Heterodera glycines
MEAKGKEQKAYKMSTKRGTKNGENGQKWHKNWDEEEEEDEEEEEEEEDEDEEEEEEDEEDEEEEEEEEYEEEEEDESSTEEIGTRRKNRTNRKNSNW

SEQ ID NO: 128446 - protein, 95 aa, Heterodera glycines
MDLCIMDALKDQNDGYRYLLVCIDVLSRRIFTAESESKKNEHMIEAFERVFKKANVLPNKLYSDAGLEFQAKRMLDYWKKKDIIKHVMYSPHLHA

SEQ ID NO: 128447 - protein, 63 aa, Heterodera glycines
NLCHFANQQVKGNLRLSDSHPIQRSLTELGLITYVLESVVYYIAGMIDEELFLMQDIENAIVQ

SEQ ID NO: 128448 - protein, 114 aa, Heterodera glycines
TRFAFDPAHFHPNPGDLCEQIWGHGPISECVCHPKDVQAEDDRHPGAGLLGAGHHSLHCGACPSEFRTSRYWSREFHVKTGVCEVMENLLAMTATIARSSRSYAIGLRGADNEV

SEQ ID NO: 128449 - protein, 83 aa, Heterodera glycines
MPVPPPDSAAVGEPDRMTISTFFKGVKNMSKKRRPHPAQLKKSVLLSIANGTENDGGTKSPRHGSMLRRFSRAASFKKARALT

SEQ ID NO: 128450 - protein, 75 aa, Heterodera glycines
LISSQKSCQFKTAKKAEFSKFFISIFFYSSKFFVIFSRLIEPVKSFRMISRLFDSVKNFKSYIDSKLAQTELARS

SEQ ID NO: 128451 - protein, 68 aa, Heterodera glycines
MILQCRKGYIFVIFRKPIELVKSFRMIPILLDLVNKEKSYDALNLAQTQLARFVYQANVPNFRGGRIN

SEQ ID NO: 128452 - protein, 49 aa, Heterodera glycines
MRPSVKSKAYSIIWPTVAFAAMSFRMADALYGFRLHMVTDGKGAFSNLS

SEQ ID NO: 128453 - protein, 163 aa, Heterodera glycines
MDALENVLQETGRSEGVAAAISTDNGPEEGTPRIEKASAEQTRKEGGGGEAAKETEQQFTNSSEHRLAHCPMRFLDYRTTNGEGNNGGGYRKSRQSAASSSHRTYAIEMLDENMDICVCHREYNHCVANNLDGEIPEIMPGDDLNLLNISHLTEVGWHIPLLA

SEQ ID NO: 128454 - protein, 49 aa, Heterodera glycines
MSNKGMSFLGAAVFSLLFVLMVNENWAASTDDDEEPNYWPQGGVGLTVL

SEQ ID NO: 128455 - protein, 185 aa, Heterodera glycines
QPTHRPPSSALSAEPFMNATSGVYIEQMYESWQLDRGSVHRSWDAFFTNVNAGAAPGQAFQAPPSVPSLSTVPHATVVPRDMREVQPQTAGQVIPADELTRAINDHLKIQVLIRSFQTRGHNIADLDPLGINSADLDDTIPRELELDFYGFTEQDMDREFLLPPTTFIGGERATLSLREIYKRLK

SEQ ID NO: 128456 - protein, 237 aa, Heterodera glycines
YLDVQVINFLRRNRRLFSTNISLQFNLLITEFRAWQAMARHIWPLLRNGLRTLVSLKRKQLALMRKHVSPTVLFDYPNLVEILTPILPERPTVDNTNYAADTSARDLYMWLHMSRPDGRPKVFKLTKWNNGWDQFVNDLCSSFTAASVPVNYMVLTSFEFNYTRSEEMVNIRTEERLTLMSNVHPNPAVGGVVSLVKILRCPVEFSNAAMVSWLRMARVSNERPPNWVTIGFSDDEI

SEQ ID NO: 128457 - protein, 107 aa, Heterodera glycines
MAPLQDPPTSPDPDTWLLQNLAPLSGTGFLKIQYPVRNPKWKTNAFLAKTEMEERHELEAQLRKIQTQKAAQIECCCLPKSTSAPALLSHKFLNFGIQLQNIGVQFI

SEQ ID NO: 128458 - protein, 46 aa, Heterodera glycines
MRKMKWIKMRKKAFHMKWKLIQGTYRTKNPNNSSSVERVRTHANGH

SEQ ID NO: 128459 - protein, 141 aa, Heterodera glycines
MPGQHNNINEMNCFVTRNIELIIQQQQLKEEVEGLKTEKNRLLMETQRILTDQTKHIEKNDKLMDKCIKLQDKNIELQLQNNNALREHIEIKQNTESLRNYVCIPCGHFALCNRCAEVVAIEGTCPFCREQLDGVFKIFSS

SEQ ID NO: 128460 - protein, 126 aa, Heterodera glycines
MFVIGQNTPMSCSYLSSSLPFQLSKMELEQFFELPIFHADDSLQSALSPANFVPTDTVPFGPNVDEVPELGPNLHDQVVEVAEDVVSLRILLTPAAKSASTATNNISLSGLGLPRTPMIEHVLMIW

SEQ ID NO: 128461 - protein, 193 aa, Heterodera glycines
RFTNATSGQKGISGGEARRLLFASELLNNPQIIFADEPTTGLDSSMAESVISVMRALTLSGRTTTGLDSSMAESVISVMRALTLSGRTIICTIHQPSSEIYQKFDRVMVMFLAQGRLAYFGEPTKATELISRAGNPCPSNYNPADHIIQCLSIEMGRESECQQRVRNICAEWERCAEGAFFHAEVEKRRQCVR

SEQ ID NO: 128462 - protein, 85 aa, Heterodera glycines
MESVETACGQRPFGCASAVHRHPGNDHSAVSSAHHHRLLRRVRHTLAVRRLRLSIAKAFGADNSSNTDKIVNDSKLSNFVNRKNS

SEQ ID NO: 128463 - protein, 275 aa, Heterodera glycines
SLLKRSLIDNWRNPGLTRAKLFQKLIMGVFIGLLYMNTQLNGVGVGNLNGAMFYIIAELTYSTLFGVLTFFPADFPLLAREYHDGLYCSGAYFVARSASYLPLFTIDGILMVTIAYWLIGLVPTVGRFLITLGISFLVEQSAVAFGVMLSAVCPSYPVAVSVAGPILTILSLTGGLYANVGSLPYFISWVQYLSWFRYGFEVQYLSWFRYGFEAFAISQWSGAFGDDEAHVRSVLAAFSFRPEAFYTDLGAMALFIGMFYLIGFFGLLFRVRRAR

SEQ ID NO: 128464 - protein, 449 aa, Heterodera glycines
STPSKRCAIVGAGACGLACARTIQRPYFRPVVIERRQNLGGLWRFLPFPRKVATVMRFLPFPRKVATVMRCTVTNSSKELTAFSDFPPDSQLPNYMRHDKMLAYLAAYARHHNLEQYIQFGKKVTKICRSPNYFGKKVTKICRSPNYAETGQWTVQWENEGNGEHEDTFQCVLVAIGHHAKPNWPNWEGMAQFGGKIFHSHDFRRVRLTIFHSHDFRRVRLTWNKKVNVVVGASDSAADMAVELSRVSKEVLLSTRRGFWVLRKCAEKGLPVDSVLTTRFSALLSRYAPRRFDEWRRVRFLQKGLDHAMYGIMPDISPLVSHFTVNDELPGRMLAGMVTVKPDIGHFTENGIVWADGTRTIVWADGTRTDQVDNVLLGTGYRFDFTLIERGQLLISSIDQSSLYKHMFPLGSSDWNTLAILYKHMFPLGSSDWNTLAIVGIVQAVQNAK

SEQ ID NO: 128465 - protein, 105 aa, Heterodera glycines
KIYWNQFDDARKKQLNEFYAVLAQNRSVDQFFNYFFDQFGLACDQFFHFCQLGDTIMNCCEEIMAFIAEYKPQLAPFPRYYLYPGIWTKMRLNAKHISLFPAKEV

SEQ ID NO: 128466 - protein, 58 aa, Heterodera glycines
MQIVNSDGNPLPIPQNPLPNKVIGLEGITIDVMPMFRDSIDCDVFEYHRFSPLTPSQM

SEQ ID NO: 128467 - protein, 77 aa, Heterodera glycines
MPRPRASLGTAAAMPLHQQQKMPQQERAVPAGGDWEGTGAQQQTTTAFCFVPLKRNSGGGTSQSEGEMAAAERKMPI

SEQ ID NO: 128468 - protein, 374 aa, Heterodera glycines
ANVAQHPPMVQPPQHRPPASHPMLSHKLEFPSPTHASPASVVHVVTHHQPQFFGPSHNNSLNANPMNNGTTPPAIFDFQTQQFREFDFMNSPEDPMPSSESGGYGGDGTAYGRVPMGGYHHHHQLHAHLHGGEHIAYAEGDGCAVNEVTAVQHHQRHYAYQQQCPCKECFAACRPPPPPVTHPPYPPPPLPSSAAAVDQANAQHYAMCTYDNSRKGMASGCCQRAEAVQQNQQQQQQQQRQQQHLYEAPMAVQQTQQQHFREEQHGQHQHVLVQHHPQQHQQPPHFHPQLQQQMQAVHHGEMEIGHGNGGAMHQVVHHGHPNENEAQRVGPPSGGHLSAGMLEDIELDEVSSTFSDLKMSGGREGDGAGGGTSR

SEQ ID NO: 128469 - protein, 50 aa, Heterodera glycines
MRCEGGEQLRKRSAFVRIASAAPTASVASKRHRRMGRRVVIRRAKNSYLI

SEQ ID NO: 128470 - protein, 165 aa, Heterodera glycines
LLPDFSFSVEQVGVLCEILQRHNLFDRLAQFLAQFLWTIPPVDEYRFSEGVLKAQAVISFHRHNFKELYAILQSHNFSPENHAELQVLWMHAHYSELWMHAHYSEAEKIRGRELGAVGKYRIRRKFPLPRTIWDGEETSYCFRVRSWSSNKNWRDQIALPSRRGP

SEQ ID NO: 128471 - protein, 653 aa, Heterodera glycines
EKENKEDDREKDLLKGRERSEEEKKEPKEEKVKNEKREGEKDVEAKDREKKKEQEEKRDISVKEKKRGPKAEKGEKERENEREEKKEAKKEKEETKEATETDGESEQKKLKEEKREPKEAKRENERQRESEMKLKEKGEKETGKGKEAEMEEVKKAEKETKKGVVKKCKEEEKKEKEEKEANEERVVLTETGTAEDEQSEKKAKNEAKKEAKRQGTTESERDMRISETSSEEEEAVPSSGGRSEKEEIRTKKDEQNEAKKSAEKEEKKRKTEEERVGTEHKEETEVGGRKKQRDEKKEEKGNREEKKDEEKEEGRKRHHDEKKAEEEKMKKHREEKKDHFEMDELKKWKNEHGFVSDEEEKGGRAALKEKLTRKELEEMKMNAGNEEENKVRRKLKEEEKEKKAEGKEEAVNSSNLASEKVKEEKEEEETKKETLKKEEKKEEEKKKRKEEQKEERGENEEERKKDKGKDNKDKRDEKKTEEEKKDKEEAIKKEEGKRDVKEEINREGDEEKSNNERKGKKEREGEGEGKSKLEEDKQKKNNEETRKRENEEEKKADEEAREREGKKTDSEETGKKGKEEEKRDKEETLKKEEEKRDSEETGKKGKEEEKRDKEETLKKEEEKRDSEETQKKGKEEEKRDKEETLKKEEEKGD

SEQ ID NO: 128472 - protein, 75 aa, Heterodera glycines
MRVTVCLTARNKGQNSSLCGLTTPLDGTEDEKIACFKPEGAIGPIGIKFLREFRGNQTMRDGRNDQEEAAYLMMM

SEQ ID NO: 128473 - protein, 25 aa, Heterodera glycines
MRELLFKTANQEQHTFTLEVEENET

SEQ ID NO: 128474 - protein, 95 aa, Heterodera glycines
NDLAGADDGEMLVQPMHMNDHPAAAQAGYVNDHAAHHHHHHHHQHHQQQNGMLIDHNVWQQILAPVQQQIQLTAQDYPAIRRLMALGFPRNLCIE

SEQ ID NO: 128475 - protein, 65 aa, Heterodera glycines
MGKTCIFRLKERENEILRLRKSPNRRHSPQHRKRNIYPSLNGNTPITSLSFLGCGAMSTPNDEVS

SEQ ID NO: 128476 - protein, 195 aa, Heterodera glycines
MKKPAVVEAFQFIKIEFVADEKERLFQVVSQLNSERRSIIHRAIASYFGVDEKFGANLVKDGATDHEQFCGKLNAMVDQLIDYTDAAKVAVAGDFLHQQGQCAYRSLADMNQISNLKAHISELSAQNLTQQAQIGAQQVQIDGFHAQVGNQQNRLQAQVIAQQNLIGDQHNQIGGLHVQVAAQQQLDRWPSGPNW

SEQ ID NO: 128477 - protein, 67 aa, Heterodera glycines
LMEKLKNFTLDDLFKVLALPDKEFEEWLRELKLLHTTRFCDCGNEMSYKWIKDRNQPLWNWPAYEYN

SEQ ID NO: 128478 - protein, 47 aa, Heterodera glycines
MDYAADKLTETREYGKYSTDKQTKIMARRIEKKKKNAFLTTLSPNLG

SEQ ID NO: 128479 - protein, 222 aa, Heterodera glycines
MIPVITPGFTESNSTYLLNWHTAKIIKNALDDAFKLFHSSKSGNEKLSMLFEQQIKFHEKYSQYFAITCVASDSNMFNEFCGFVVTRIRIQLTRLTDCRRDYVDFCHVLLLNGCPPYTAQKYTKMYAGVPKLILYFAFFPFSSSKIFYKTWLVSVKMKNNTQIQSQKSNVGGQLQFEFDGTKNSKTFRQKQYKQGTDETDNQRDFVNLESEYIGKQIVDDLI

SEQ ID NO: 128480 - protein, 51 aa, Heterodera glycines
MILIVCVTFVIESTHTTERDTKTECGHKARKAAMEAECEQIMRGKSNKKLN

SEQ ID NO: 128481 - protein, 50 aa, Heterodera glycines
LHRIAEKIRDQFPNVDRLIAKTKAVFVKAPYRVKKFGNVSHMQFQPINLK

SEQ ID NO: 128482 - protein, 58 aa, Heterodera glycines
FGPRGRLGPNPKIEKCAFLKIKILKTKPEGSLATWHKLGLINIRSFFTILLIPNPIIF

SEQ ID NO: 128483 - protein, 329 aa, Heterodera glycines
MAINLQDKRGLLNQILGEADITVTTSGLTISGPRLSSPRFVPFDESGRCKSCKGTEVEVDIMVTKEGITIWCTRIARVQFVPFDIIYDLPGHCFFRVKNKARVFNIPYGDLPAVTYPNQEALMEQQQLLQQQQQNDLRQKANTALDLVESGLLADSLREDEVQKAELKRKAKVALDLIDAGLTGDALHEEGQRWKKAKTALSVLGNMLLADSLPEKKTAELPLPPAEKIESLPLPPLEKMKTPPLPPTLPPSSKMESDEQQFYDSISAATTMMDTSMQQAPLKRKQPTPKGKTNGMKKSAEEVQNLGDIDKTLDEFFESVNAATNNLSI

SEQ ID NO: 128484 - protein, 306 aa, Heterodera glycines
NNHYQTSGEIVFTISKFKAFSEGRGPHYFYSDKVFINGMPWKIAIKHAKKGSLGFSLCIYEDCVQNVLQLAKDFDLSAVEINRCRGQILFKVTEFRSLEINKEVKSEEVSIGGMPWQISIHRNAIDYLFYQVSSRGIYDWNFEAAIEFGTVSATKSDEWLMRRGNLESFNPANGVVYDEKEDAITLKAEIIVKAELKKPIIEFQAEDKLMVNGQVVNVNKYEKLMNDMVHGIPVEEYFPVLIISLKNSKSMKKHRRKIILRKFMSIKVNMHLKFDAELMDELKSTSEKKKVIRKKVTRKGVIEKKK

SEQ ID NO: 128485 - protein, 103 aa, Heterodera glycines
MGTIIFFFENYKGIKCTIRNFLNNSSNIGTTKVKLYRTVRQKRSGTERTNERVDRVAAERVQCQQGGHNFLCFSTVALALAHWLRSGRKGSGASAFFGHLPPL

SEQ ID NO: 128486 - protein, 44 aa, Heterodera glycines
MAAVPSPAAAVSGGEVVAEPTGDARTPAANSTIQGMAKAKFTKK

SEQ ID NO: 128487 - protein, 191 aa, Heterodera glycines
MSDNRGASVASTGTTNSQESQVASPVKAGKATTKTTASGKGGKAKADGKVKAGGKGAKKAGGKGGKVKIAASGSKNTRSARAGVAFPVGRIHRLLRHGRHAQRIGAGAPVYMASVLEYLAAEVLELAGNAARENKKLRITPRHLQLAVRNDEELNKLLAEVTISRGGVLPNIHTELLSKMQQKKQQNDDSQ

SEQ ID NO: 128488 - protein, 124 aa, Heterodera glycines
MQYNAFKPRREAGQFQNFVPHFTVESPSTLLDNYVSMSTVAFGQLWNGKMGISDGLLIMQYNAFKPRREAGQFQNFVPHFTVESPSTLLDNYVSMSTVAFGQLWNGKMGISDGVRSFLKIPLFV

SEQ ID NO: 128489 - protein, 76 aa, Heterodera glycines; identical to SEQ ID NO: 128275

SEQ ID NO: 128490 - protein, 61 aa, Heterodera glycines
MQEHLPPADASFELRASYNEAKSVADGHVTEKQLLDVPAQMTKEVLAMLEEKQSLRFLSKE

SEQ ID NO: 128491 - protein, 65 aa, Heterodera glycines
MSTQFLIGDVIWVKRGSGVQWPALIKNVSALEVTYVEFPIVSGDLQQKAEIKTVTKFGVSSEIKH

SEQ ID NO: 128492 - protein, 74 aa, Heterodera glycines
MKYAFYYSIIFSAFSNLHVKAFPPKDKEGTSNGKIVNSLADQMKEVLDKGEYSDVHFLVGKDDKKEASQKKQKP

SEQ ID NO: 128493 - protein, 101 aa, Heterodera glycines
MGLFSFALADCLATFHTFAILFDCETPVPFDEQHKRYVFEHRDKPRLIYVSEDGSAIQVDGVVKQGKFVMSIETMYLDKRNGVDHFCTFLRTFGICFLMCH

SEQ ID NO: 128494 - protein, 60 aa, Heterodera glycines
LLSVFVQIHPITSYIDLSKVFVCTEFKLKKIAEDGVVVDVSANVAVGLIQMPGATFIRNL

SEQ ID NO: 128495 - protein, 174 aa, Heterodera glycines
MAPRKQNEQFLDEIQNSDDDVKLVDSQSSHAEERPVLKKRGRKSRWEKLLEDVNNAKKSNPAEVEVADVDERKAAKVFDYPTIFWKLARPKYGVFTFMCNECRNENFKRGDKRFILNTGSGQEKLEFTQTFCQDCAKLNFDCTYLIMKHQKKDDGPSGQKNGGRNTYFRWKSDL

SEQ ID NO: 128496 - protein, 165 aa, Heterodera glycines
MHPLTTALSKLLNCKAENLAEYLNNPEAVNKASAYLRGKKLKTTYSNKGGTTKEVEFGNFSLKSASETYAVEGFLGKCPFCKHSLTLESSEVKVHQYFYIKHRILLLYPQLKCIVEYHSKGHCKYYPLELLAIEDSAEITGEKPTDTNYLDYLGFRSVWQPTPVY

SEQ ID NO: 128497 - protein, 137 aa, Heterodera glycines
MLKKLPKPFLIVYDDLMGDIDAKKLADLYTKKSHHNNFSVIFLTQNLFDKAMRVPRSNAQYIFLMRAPSDMLSIRNLASQMFPREQGFLMDAYKQACADPYGYLLVTLHANTDNLLRLRTNIFPDDKEKIVFVPKNG

SEQ ID NO: 128498 - protein, 285 aa, Heterodera glycines
MKYPGSEPGTPISTTRRTVLSSVASLFDPLGLVCPATLKAKLFFQKLWDDNHEWDTPLSREEAREWEHILASWEGESNVIPRGVTAGRGHPLQLHVFTDASEIAYAAAAYIRTGGESGCSSRLIMAKSRLKPKKAATTFTIPRMELMGILLGVRLAAFIEKQLHHPIAGQHIWSDSMIALHWVRTASAQPQFVANRLFEIRKATATTFHYIRTNENPADLATRGEVPTLLQHNDQWWNGPQWLRGPRTEWPSELEFQPDQEGLPSPAGQEEGQSAFIVRKKHPQA

SEQ ID NO: 128499 - protein, 127 aa, Heterodera glycines
MPTKILLSNNKVLINYALHKAFAILTNWLCLLRSPCVTEKTVLVFGVFGLVTVVVVGIVLFIFQICCILSPKFEYISNGNGRRFGTPFALGDQFVEQLLPIVVAQRHNHFVNVANKNKMMGGGIPAV

SEQ ID NO: 128500 - protein, 107 aa, Heterodera glycines
MNVNHWEGLDAGMITFKDGNEVLGAATVEVLRRQPPLDPLYTFFNRDFYYCSDDDDGKWVIREICLNNDDDKCVNYEANYRSEDGQSFIRKDRLGKLEICTFIDFSE

SEQ ID NO: 128501 - protein, 331 aa, Heterodera glycines
LEAGYTARKVFHILQYDQWSNNVFKSYVSEMMALKIHATGFPSWCESEEQKSEYIEECWGKFAIKLDKEKMKSEPGKRYIAKLCLNSLWGRFSMRNLLSKAIIDNDESLIHQYTEDKKIELIDLEMMDEDNDVFMLTYKPKEEFVDENKYSNVVISLFTTSMARLYLYEALKKVADTPGCEILYFDTDSIIYVHPEDNDPLPTGKGHLGELTDEKPDHDILEFISAGCKNYGLKLQRKDNGEICFDLKIRGFTLDEQTVQKIHYDTVKEQILRYGSDDPADPIIVTYPHFIRPNLIQGKVFTHSLTKHYQPIFTKGIINDSFQVLEFGYRK

SEQ ID NO: 128502 - protein, 91 aa, Heterodera glycines
MYFTLKIIKSEKGEGEKGDEELIPIGSPVCKKPRDAGHRCHGRAGGPIAAKNLKWYFDTETFECLAFSYNGCGGNGNHFDSPADCCDKCKL

SEQ ID NO: 128503 - protein, 396 aa, Heterodera glycines
LLLFSRLKINTWKISSANKRFEICSSYPQYLIVPASVSDDEICSSYPQYLIVPASVSDDELKQMRLGRIYYRFPTLVWRCPKNGAVLLRSSQPSIGFFGMSNEYIYPFLYTFNLKQRHASLREDSSGHFKWSLFHFTVSFSIFSDVNMKFLIVDARSYTAAWANRAKGGGFEGADSYANAEVSYANAEVVFMGLANIHNIRYSFYQLRSLMNACGGDPNNYFQSLQSTLWLQYICQLFSATERCLHSLLQEGVSVLVHCSDGWDRTTQIVSVLVHCSDGWDRTTQIVSLCMIIADPFYRTFEGFEMLVQRQWVEFGHKFSDRGGVLNGDDNEKSPVFLQFLDCVYQLWTKNPDQFQFNRRYLMKLVQHTFSGLFMKLVQHTFSGLFGTFIFNSLKE

SEQ ID NO: 128504 - protein, 164 aa, Heterodera glycines
YLHQVVVSPAWNEPQYFMAGCLMDNCTTIYQKKGVNVVITRFSWNDHDYLGFRLPHLHEAIKRNRDQIFAEMSKKFKLNGGTADLRSIMALNLRSTFTETVYSKDMWQNFVLVHNRKFFNLACTIPLGIAGVELQGLHAYDNQTELFNSQFFTVANRYKLILML

SEQ ID NO: 128505 - protein, 84 aa, Heterodera glycines
MDSGQRRRVNGPALNGSLELEAIAAVHELASQKVILLMLDHPYTLELTMKGWRVCSTHTDCMNGDYHNVALHTRYFQNAKELLK

SEQ ID NO: 128506 - protein, 89 aa, Heterodera glycines
MFVARSQCCAPVTNSLKISRSFAVPWRQFFDKLKADRINAQVKHKPLDDDHKRYADDEWHWMPTGESDIQNQATVTFLSRTLKKEKLVR

SEQ ID NO: 128507 - protein, 126 aa, Heterodera glycines
LFEYPKRTLEKIDFFVFGAVPPNRCAQIYGETESFGSSFPIACTLILRWIFAPHNCLSTPNGHLKKSIFFVFGAFPPNRCAQIYGETESFGNSFPIACTLILRWIFAPHNCLSTPNGHLKKSIFLF

SEQ ID NO: 128508 - protein, 119 aa, Heterodera glycines
MAKSEDPAHLERASRMMEVGQSHWKALLKGEELSVRKCRQRPTAKSFSQLSSDSLNTSQFYQLIAKHFCEGFPQQICLEVNYSDEDYLMEGANDYVDTYFDDGDGYDDETNALEEEGTY

SEQ ID NO: 128509 - protein, 268 aa, Heterodera glycines
RVVEIDETLVVKRKYGVGRVLEKQEVWLFGGVERDSNWERVFMVPVESRGAARLLPLIQQYILPGTTIVSDEWRPYRGIPNLPQNYVHWTVNHSQNFVNPANRLAHTQNVESMWKKLKRNFKQQFGNKTETYDTYFPEFGVSVSAFLDEQPMVRTLLSKKTKAHLLLHHFVPFARQHGFLGLLDEQGDEALHSVWRRLEQLWKTMPDSEQMRQQLEHHFVSNWLLDTGRLDELNTNTNNPRGVGSPFSVLTSCCSADAAAARIHSQLP

SEQ ID NO: 128510 - protein, 441 aa, Heterodera glycines
MSADQIKQLLEAMRVQSDAIQLLMGQAPQNATSLNHANLASSIDGRISKFNYDAETGNTFEQWFKRFGVLIEEDGKDLPESTKVRLLLGKLGDEEYGKYRDSISPTQPDKVNWVDSITKLKGLYAETRSLFVRRYECFKIRQQPSQDISSLVAHINASCENANLSPTKEQLKCIILVIALNDEHHDLRQKCLKMLEDAEKTGTDITLQKVEEELKAIQIVKESALSLLTQPVSTSAIQLRPQQWRETSKGKHKAKPGPKWPHHEPAPKSPHHAPSPKQKSDDKANRGHPSHPCASCGSNDHWRSDCKFANAFCNKCNRQGHIAIVCRQRSSNTAHKFQNRSFHTVVAKSQCMVIGTTQGRWWKIPVTINGTNLKMNGDSGAQATVISFKTWIKLGQPKLSPTHRNPQLQWHRIFNRRKISLHRQLLRSAIQNTDRLRQPVT

SEQ ID NO: 128511 - protein, 24 aa, Heterodera glycines
MKYNQEIALIVITCAVTFTIVGAP

SEQ ID NO: 128512 - protein, 125 aa, Heterodera glycines
MHRDGVKARHAGNGGEISIFGDKKLKIDCIIGAQKRIIEFQGCAFHGCNTCYKGYMIQANGFTAEQNYDRTQRKMEKLRIAGKKMRYTVEEVWECDVRKMFYKKSAFYDTQMVKFFNTLLVNRTY

SEQ ID NO: 128513 - protein, 115 aa, Heterodera glycines
MSKEYADSEILEVVCAGPKQYALKLKNKNGELWYKTKIRGMTQNKNNKIDYEEFKDMVLNYQEEKKILFKHPNKFGPTREGYVISRNVTKDYRPIQKKGIILNDENLSVLPFGCW

SEQ ID NO: 128514 - protein, 152 aa, Heterodera glycines
MSSNLLGRFKLMLSTGDGADVHFLVGKEKELLKAHKCVMMFASDVFGSMFRFDDKNAKTKTSADCPHVIEVTDVEAEAFKVMLSFIYAEDLSELNGQNAMAVLYAANKYNVSLLVKALLAFPINELSNVFLAFDEARLLNENVQIEIYTKYF

SEQ ID NO: 128515 - protein, 97 aa, Heterodera glycines
MAIKIAEYGNYNNKREVDLDFNDVKCELKGLNDLITLLLLNTTNHGSSHHNDGKQDWASSWRARASGTPGAAVAEFAAAIGAVPYNRPAPGVSARWC

SEQ ID NO: 128516 - protein, 295 aa, Heterodera glycines
MLTHHRNDHQNSGQQHSVDESEEERETDALPQQQWHIERDAKIAFVALAQLHRRTTASCAGTTTAGGASAVSIITRSEQSAFSNFVKQQQTPQQHNHQHRHVQQQSSLVQQQHQAASVRQQQRQPGMVLLATHQQVPSSSTAVISSSVPSASSSSVAAATVVVHQQQMPHSNVPAIGGGGGGGILMNNNTSYCWSNNKFSNDNNNLTNNTNSRTFAQLQHHHQQHLSSSSSVGGATTPLFLHHQHQRALTPGAGLLYGTAPMAAANSATAAPGVPEARARQLLAQSCLPSLWCEE

SEQ ID NO: 128517 - protein, 20 aa, Heterodera glycines
MASFELMHHESLDSCSAKII

SEQ ID NO: 128518 - protein, 122 aa, Heterodera glycines
IAELDSYMYQSVGSEGIKFYADALGLPLFQRKISGRPKCVESNTYVQDEEDEVEDLYHLLKTVKEWDPEIRGVSAGAINSTYQKLRVEHVCERLGLVPLCFLWELDQLQLLDAMVSEWCCTK

SEQ ID NO: 128519 - protein, 100 aa, Heterodera glycines
MLDVNKKVPEFDALRDNMAKQYPFELDPFQQQAIVRMEQGASVFVAAHTSAGKTVVAEYAVALCKLHRTRVIYTSPIKALSNQKFRDFRLHFGDVGLVTG

SEQ ID NO: 128520 - protein, 19 aa, Heterodera glycines
SPGTAASDASAHVAVHLTV

SEQ ID NO: 128521 - protein, 229 aa, Heterodera glycines
GFLIGPRRVKFSKKGLFCGGFKCYFCIFRVWICCCSLSVSIGAVTLLPFSVLGSEVLERYPDNFYLKWLNASLINSLWNYVFMLSNVSLFALLPFSYFFIESQGFSTAALRRPLIARFYETVVRRPLIARFYETVVVCALVIIVLVGIADMFYSHLFLPLSLLSLSLSLLSLLSLSLSLSTPLLYSFASLFGVSLLLLSVPLGFAKLFDLFSEMLITQKTTTIAATNDH

SEQ ID NO: 128522 - protein, 43 aa, Heterodera glycines
LTDYELIGVTFFTMENRHLGIDTHTQSFFLAIFCHNIVCVGKI

SEQ ID NO: 128523 - protein, 121 aa, Heterodera glycines
QKQLRSAQACAWAAKETEQVVMTQRWPGIRASRTWEEPSRRWTQLRGQCTGTHTSTPDFPVRTLPQAKGLRALMSRVFSNASTLVPRQGVPIHELIGLVNHGNTPLTRIPTPPPTLGSASP

SEQ ID NO: 128524 - protein, 17 aa, Heterodera glycines
HKHLFDLFYHIQNLIKI

SEQ ID NO: 128525 - protein, 32 aa, Heterodera glycines
MKSWFLVLVLLLAFCLVVRLVICLVKCINCCC

SEQ ID NO: 128526 - protein, 62 aa, Heterodera glycines
MPSSPMPFSLFVVLFLFVPFLPGCGEPSVAHYFECCGDNGAGRHTKLAHDKCFVALFGFFVP

SEQ ID NO: 128527 - protein, 52 aa, Heterodera glycines
MHSVVHIHQLCPNRNLGLEGTWSPINKKHYEGTKLMVRQFLLFVFRVLISAL

SEQ ID NO: 128528 - protein, 121 aa, Heterodera glycines
MTRTKTLKKILRKNAVINEYLFLCQIFVPIFGTLALFDGCITGASKNCTANVKIDYDEIFQLSKCFWGERRRTAFKGTIQIKASVDGYEPKFGLGKCTHFLKSDQDGSAESLLILLCGYMD

SEQ ID NO: 128529 - protein, 22 aa, Heterodera glycines
MPSCGNKYYDHVKHCAMVCPFL

SEQ ID NO: 128530 - protein, 30 aa, Heterodera glycines
MLDQRMIRVIANDQRRRVIDHRERVIANVI

SEQ ID NO: 128531 - protein, 70 aa, Heterodera glycines
MRAFVSHCGFNSVNEAVQFGVPILAIPLLADQLYNAIMARVKGIAVQLDVGQLNGDGAEQLLVDGLDKAN

SEQ ID NO: 128532 - protein, 143 aa, Heterodera glycines
MADNEVKLSGHSLTGPVTSFQESTFPAPIVAQLSSVFSAPTAIQAISWPVALAGKDLISIAKTGSGKTLGFTLPAIVHVLNNQRPQQQRRPGEGPAVVVLLPTRELAQQVETVAREYGQLMRLNVVACYGGASKWPQMGALKR

SEQ ID NO: 128533 - protein, 75 aa, Heterodera glycines
MAMVGGTVCPRGRHLWRWWQQILLYGINHWAAACADRGTLLHVFQRRTARKYARRAKNFEKLVPGVFFGHNFVQT

SEQ ID NO: 128534 - protein, 139 aa, Heterodera glycines
MPDLLVSIEQFWLSDYWKALKPTELLLFYLFPVTSKEQVAKQKSGIWLCRASLLIDMSESAEEYPTEEETSPEVLFEHDVFVGAEKVQLYYEITVQRENQLKMSTGPREMPKREKGGDNPQNVILANPIPKMAFRQSEI

SEQ ID NO: 128535 - protein, 38 aa, Heterodera glycines
MVIKSATTVIRRSTTVIRRGTPVIRRGTSVTKRELGLF

SEQ ID NO: 128536 - protein, 74 aa, Heterodera glycines
MLFTGIDRLIVLIFGEIQNKRKIRLYLTTIIFICSIFCIDLCYTFYQNIELYGDQMITGNYIDFFMVFQNNLLS

SEQ ID NO: 128537 - protein, 54 aa, Heterodera glycines
MAKLDNYDNDTFYLAFKDAHPSWSLIGCAAIFGITASFGILFHLSVIFVTIKTK

SEQ ID NO: 128538 - protein, 33 aa, Heterodera glycines
KRSSDLMYYFIKCKFFFFIHSFVSFFSHNHYMI

SEQ ID NO: 128539 - protein, 167 aa, Heterodera glycines
MRQTLAFFLHLFVFVAYLANGGFVFTQCFSFKKLIYKSNSTGLKCKQGQESQPISRNFIMANSSCPDKEAKYCVAATCTIGLRGQNDTVFCNCHLKRMATVSLQLGHRFGAIMWFCHQIKNVEQCEERSKKYGLSCKCHFGEEGQDHGNEQFTLPPPIPIDQNEKGI

SEQ ID NO: 128540 - protein, 42 aa, Heterodera glycines
MLRNQMLRLIFEEENYSQCFIVAINLHFSAFSLMGYHKWRKV

SEQ ID NO: 128541 - protein, 85 aa, Heterodera glycines
MSEEMRQRFKNVLCKCQIGEPYKDMTNDMPKMTLPPPKPTSPPTPTTTEPPIDGLFTDRLSTDGLSGEPAGPGMSVLCRYIKTIK

SEQ ID NO: 128542 - protein, 37 aa, Heterodera glycines
MRGGASYEIHTNERVAFGTIGRLTAVPISFCFTMLIG

SEQ ID NO: 128543 - protein, 34 aa, Heterodera glycines
MTELFEEACPSYPLKPREFMTELLKEEYRKNSIL

SEQ ID NO: 128544 - protein, 117 aa, Heterodera glycines
MQNKRKINGNIQVVKYLKNNLNMKHLFKKQFEQRKLEKTGRTRCAVNRRWNNNKQFSEAMDLEKNQHSNGTCRDSVHESGHIICYWFLQYAGEFTSNLKIVIIIFLQEIFFAKSTLY

SEQ ID NO: 128545 - protein, 18 aa, Heterodera glycines
YREAIPEGFGLPINLGAF

SEQ ID NO: 128546 - protein, 150 aa, Heterodera glycines
LFEYPKRTLEKIDFFVFGAVPPNRCAQIYGETESFRNSFPIACTLILRWIFAPHNCLSTPNGHLKKSIFFVFGAVPPNRCAQIYGETESFGNSFPIACTLILRWIFAPHNCLSTPNGHLKKSIFLFSGQSPRTDAPRFMGRPNPSGVASL

SEQ ID NO: 128547 - protein, 43 aa, Heterodera glycines
MNMRKDVKRTITLIAFFGVDGAGPDGLLQTPSAAHVSPPTRPN

SEQ ID NO: 128548 - protein, 103 aa, Heterodera glycines
MQNEKHSRKEWKESNAKIKQMFGIYYRTIEKWDKKIGLNQILSKGQKHYTFAEKTEKIKQYYQLKNQNPKLNDRQIAEILNITKRSLERYKSEFKRKSEGVTD

SEQ ID NO: 128549 - protein, 187 aa, Heterodera glycines
MKILLIFLLLCALIFKKAINQIEAGKIIQEKSFAEIFGQRWDDGAEENICQNDQIIHGEIADQNNQFGQNVRQFDQIFDKNVEVKEEESEEMSTDYDELGDQLPMPTNNGQIYDQIRILNDKQKREIVEKFHKIKEKVKQMGKKYSTKEWKKIERKITKKLGVSQKKIYKWKREFGLIKNRYSDEER

SEQ ID NO: 128550 - protein, 67 aa, Heterodera glycines
MALEPIKLTHLSVLNAHLILLREFTRMNVYKIIVDLVHGPGADKAYTFITVKCTFNSFEGIYAYECL

SEQ ID NO: 128551 - protein, 30 aa, Heterodera glycines
LGDHLKAILERIGEMEKQQQQQTKGEEKLK

SEQ ID NO: 128552 - protein, 123 aa, Heterodera glycines
MKEIGWGIFGFAVKQQTKLDGSIRCEKGIYAYESDGDIRINGKGKGTNAEYSYGVGDTVGMGVHLASRQLFFIKNGLRLDNSDFFVDPSFADGSFHPFVSLRAFGDKIEANFGPNFKFDLATL

SEQ ID NO: 128553 - protein, 174 aa, Heterodera glycines
MAIGNGYHNISLEQDTRIRYNYAHGMVDELDWQRIKTDQCSGNIDGGPDEEGRQLDQLIAKQRAAKWPQAPPPKFEFLSEESDVQLSELKCENVYDMRSYLNKAEVREALHVSPNAHQWAECGGIHNYKTQYEGVEFHVKKVLKAVRGAGHMVPQKKGFELLHVIEAFMEGKII

SEQ ID NO: 128554 - protein, 160 aa, Heterodera glycines
MAKNVHKNSTMIWRGLKLRTVPMQKDQNIGSIIIFESSIASQKQLNVFNYFKQKYNLSAGQRNFSVLFASNQIAEPFTRFSLEENDFDGRAIQNDFLRSNGPSFLSDYADLWLLGLDMLPMAHQTEQREQLKMELFISRSSKCFMEAWVEKQLDQKGPVF

SEQ ID NO: 128555 - protein, 58 aa, Heterodera glycines
SSKIFALFRPVIPKFFQFCECLNLIYEQQNSSLIHSVYGPSVLEMGSSERLMLVCEFG

SEQ ID NO: 128556 - protein, 116 aa, Heterodera glycines; identical to SEQ ID NO: 127487

SEQ ID NO: 128557 - protein, 87 aa, Heterodera glycines
MPMDEGALPSVTVMRAKGSLTVLEMDHPIVSMLPLHASPYASAAQHPHAMAVLLRNDLLVVDMQAQGYPCFEVPHPMDLHESPVTMI

SEQ ID NO: 128558 - protein, 42 aa, Heterodera glycines
MVNCCIGRVREGSQRVRTASNISFILGVILPHCTSFFGLITQ

SEQ ID NO: 128559 - protein, 80 aa, Heterodera glycines
MCRAVDGLCANSGDCPNKFLCATFADSKLSANSSKTGYCIPGIIIGKIVKNNGNFQPDCSPAPQGAQKCSGLNGIYYVDN

SEQ ID NO: 128560 - protein, 235 aa, Heterodera glycines
MSASPAPPNVPDLSEFPPLEKLTLEDVRKKNKIASASPSGNSNISKETCSSAISVDLVASASQITWGGEKGNSGQEKGEKNQKLNKNVASASPRDYEKFANQGFDKNPDEMAEEMMEEFSSFNVRENEEKIVEYLVCQVEENIVIGGKLRTMANNGWPHFVAISNEVAEKAREFKKKLQMGDIVGVKKFEWKNDYRYLAKRETDKSHFNKMCCLSQIDPPFFSRGPLGFKPNEFV

SEQ ID NO: 128561 - protein, 225 aa, Heterodera glycines
MHEKAEQTAKSHQSNSAASSQCLSKFGIGYLAKKEGFPILAIICTAKAKELVVDHVGDVRLVINVSGRRFETWKYTLERFPETLLGSSEKEFFYDESAGEYFFDRDPELFRHILAFYRTGKLHYPKQKLWTAFEFFVLDTACVIIFTVEYMLRLFAAPDRCKFVRSIMSLIDVIAILPYYIGLGLQVTETKFTSIPAAFWYTIVTLTTLGYGDFVPHTVHAEFVH

SEQ ID NO: 128562 - protein, 238 aa, Heterodera glycines
MNMYQQHHHHHVNQLKYTDINKQSNQLYSCTTATTSVTTPHCNGDDDDDDNGDVEEGIGIPMRQSKGNFRNANSSPSPPVRIVVSEENDEYEPTQQQKGNGQDEAGEGHQHYHQQQWHGHDENDGDELLGDEAADNERRKSSTEEDEGEEMEDKTEEERTRRRKGRRDSSNDNGTTEMPGTESVGKSSRSRSSTSARDNRCSPTAAAGRRRRKRRGWAQKRGKAQAEEEEEEECMSTL

SEQ ID NO: 128563 - protein, 152 aa, Heterodera glycines
MDQFLATKCKFEKEKIMSKMNEKIREEKYGQIIGQLKQLRLSELQFGRQKENREIRPSELNKELAKLNEPKDNLIVMEKLFDLAWFLCAKLKHDEKRYELARSKTIWRMIDWNYYEELEWKLCKTRELIRKILVKEFQVPKSIHSAINRLID

SEQ ID NO: 128564 - protein, 144 aa, Heterodera glycines
MLFRSARSVGQHCAAGGGAIGAEGGRQAVRQGHAAIARRGQLRGGRAVPSFGHRLFLLQRALLRNGKACLFLEPSACQWPMLSAVGRWRTVRQRFAVPRTAGRSGTDLPERRVQPNRPKLGADGGAAGIPSALLIENNKCIFNL

SEQ ID NO: 128565 - protein, 33 aa, Heterodera glycines
MRRNNALLFLLYGVGLSALLVELVDAYLYGGNI

SEQ ID NO: 128566 - protein, 102 aa, Heterodera glycines
MHTLMVPFQEKFSRLCSLEHAHHEHMERIRALNADGEWKLNMEMREPGQKLARRIQEFDTVLLTAMKKMDPNPVAIYLVGDDGLESNLCQCFSNKNTRRATL

SEQ ID NO: 128567 - protein, 75 aa, Heterodera glycines
MYKKQAPFTGKFDKHFVAGGKYTCVCCGAALFVSEQKFNSGCGAKCDAHLGHVFGEFYYYEIVNYPLNICKFIKT

SEQ ID NO: 128568 - protein, 62 aa, Heterodera glycines
FSGNKYRKIVTRNLCQSKLCTQKTKEEMGQAELVIIIINQYGQSLVANSVGQPRSLRVADVP

SEQ ID NO: 128569 - protein, 254 aa, Heterodera glycines
MIDIKLTIVIADAVRNVNGKSVWTLVGSDGYDFINITMWGSNYEKMAREFGQEFKQKTYVFNTWGVQKVIPNFNYGNVDYELIAKEGSTITLITAEQYQILSIKTTNYFTFLREKFALDNDGFFPTPIKKMRAGEQFVEIECELFELKPVRTVMAKGNEARVIDAMINEGNNKTQLTAWNILADFLEYILQDKKGYVLKLQGLLTKKGFPVQNISFVFTNTSRIGFAEKQRPEKIPLKLAELTEGLCECNFKKF

SEQ ID NO: 128570 - protein, 126 aa, Heterodera glycines
MVKSTANANGTTEFGGPKEQVVKHNYRVWCDGCYDMVHFGHANQLRQAKQMGAYLVVGVHNDEEIGKHKGPPVFNEKERYRMVRGIKWVDEIVEAAPYVTTLKTLDENNCDFCVHGGIYLFFVKIP

SEQ ID NO: 128571 - protein, 39 aa, Heterodera glycines
MRTRPIWQVKQRLMTTQKVRCRDETNQHCLPRGTRIFIK

SEQ ID NO: 128572 - protein, 287 aa, Heterodera glycines
MPIFRAIRSASRSRSVDTNSRTGSPASPRRARSGSANSRRSSSAGRSRSAGSRRRSRSSSSQSVATNSSLGGGAGAGDDRSSLEREKSLDYSDIVTTVAQRRKEQKQRELSHSPTPPPLKKSKKAVLKRLKKGKKDKDRHRDHQQHRCSSKKKVKQYGKQQQQLKPKQHQPQQQNMTSPHSSSGSSPEARHRHRTEESDVEMASDEEEQQQQTEHEQQQEMNTKSSSKTKQKHQQIAVGGKKSSFVNRFLPAGAGAGTVTGGTPSIDGSSVKTTVTSAELRRRHNCA

SEQ ID NO: 128573 - protein, 20 aa, Heterodera glycines
GLLGSWVRAPPGELPFMFYK

SEQ ID NO: 128574 - protein, 134 aa, Heterodera glycines
MSNQEWTASHVVQFKVQKLAFVSPCENYALFEMIKKGQLERRIGANESLKSIVLGRWMTDGVEEQQKDNFLLLKKDPHPFQPQSGRAFAEDLKLAEPGSRTFKTASLRIEDGVHVCHYSRGMKRQCQWKVDEVL

SEQ ID NO: 128575 - protein, 20 aa, Heterodera glycines
AEVQSKGEQNEEGDRRLLCQ

SEQ ID NO: 128576 - protein, 170 aa, Heterodera glycines
MPMPNSNDGPYESERKGIKNIGIAIICTKLSQPKADNEADLHRQMFITDVILRNSELLCTSIAKFDSFLLRLRKFGPKLAALSDLISSTSSNDTSTSPDDPHQLLQFRAKELLDLFPIVLEMYEQELSFKRDSVVDLAVFDDKDLFTAIISAWKHGIYIEPAIVSLLYPF

SEQ ID NO: 128577 - protein, 93 aa, Heterodera glycines
MKDRRTTEKRNGANGKEGTACFGFAIKNTRNLAGSFFSEATAYAYGSKGKFYVDGTKTFANPTNAFATGHTVGCGVLANRELFFTRNGLCLGW

SEQ ID NO: 128578 - protein, 19 aa, Heterodera glycines
TIENFLESNMENLKMLVHI

SEQ ID NO: 128579 - protein, 84 aa, Heterodera glycines
MTWTQEKSRPGSSLCSVSATHKQIPLNIFRCSSRSKRYFIRVAKSNTNSGPKFASISSPDSSKVTNGKRNAQSADREIENAVES

SEQ ID NO: 128580 - protein, 348 aa, Heterodera glycines
SFNTGLYFLHTSLIKYHGFLCLQNCLVDSNWNVKLTNFVTEQIIGDKLRHNELDSNWNVKLTNFVTEQIIGDKLRHNELKYMTESRLKSHKKAKKVVKDDEKKKYIQQAPEIIREFISTKHLPPGSPASDMYSLGMVLYQILFKLEPFYERNMQPKKIMERIIMERIALANEDDQIIRPTFPKQQVSAIEEAYNFQLLSALEACWLEALEACWLEIPEMRPNIKRMKTMVNSNLKSTGSGSLVDQMMKMMEDYTTNLEQLVKERTQLLEEAQQQADRLLKNMLPQSISIAEDLKAGRPVLPQYYSNSTVLFSDIRGFTRIASTSTPIQVRHFERSKRFGKMSIKFDPL

SEQ ID NO: 128581 - protein, 190 aa, Heterodera glycines
MPRASADRRPDAPRGGRAGAPDACQGGASGPTAAASAPDEQRAKIVDELGAQNAAELDQVQTEANNAQMRLTEMLKKAAETHRKLEDERNQLFEKHKLLEDNLEAYKRRFVAQLQRAMDTRCSQMGKGLRNAFADIVGQMDTDTAASTTARPLPLSDQFANDDDCSVLIGFDSSSPRRGNGSADLFNSSA

SEQ ID NO: 128582 - protein, 68 aa, Heterodera glycines
MLSSATDQILRRHLLPVKPESEMSPEERAEKKKAEIEAEFARYKLARKLRVKQQQESGGAGDEAAAAQ

SEQ ID NO: 128583 - protein, 116 aa, Heterodera glycines
MSSFSWICNDIWMDILPFFCRPQLGLELALISPHFDVLVDTHFDCQSELKIWRSFKIYKRQQFVYEGIHTSTRKRKMIDVEGAPHLLVTILVGRHNKQFPCHEMPNKIRFCFLQIK

SEQ ID NO: 128584 - protein, 39 aa, Heterodera glycines
MGKNATQIRSGVPFVVSAFASDALAKSAQCHQCPRPNRC

SEQ ID NO: 128585 - protein, 51 aa, Heterodera glycines
MPRSTEQHPKHCSVHRRFGDRCAVGSASFKKPNGAFFQFPWRFASFYYERL

SEQ ID NO: 128586 - protein, 48 aa, Heterodera glycines
MSILCYSLIVSRELAGEYVFFSPEIAHPSFPPSGAAHPVKNARDIFSQ

SEQ ID NO: 128587 - protein, 41 aa, Heterodera glycines
MLLLRGRALCAVAVATLAKVNEGKKKSRLSKGTKNVKFYYF

SEQ ID NO: 128588 - protein, 165 aa, Heterodera glycines
MNKKGRLNEPKEKNGKIYESHSFLKMELLSKEEEESLKRLKRKLEHQLLRVQQSLTESEKWKSGTSDIQWDHRSGKKMKEETTKKGEEMKEKEEEKKGREGKEKETEKKKEEMKQKDETETKRSLSVGTTKDDEISIVDSEERERDAFENPPKPTNERLHFGSRL

SEQ ID NO: 128589 - protein, 205 aa, Heterodera glycines
AFSEVISDLYHYVHPKNKRQMPMVSKKTYDIVMANAQALNSAIIYDRDFSYTYFGFKTLERSYLLKIDGKVVERPQHMLMRVAIGIHYEDITAAINTYNLMSERWFTHATPTLFNAGTCRPQLSSCFLLTMVDDSIEGICTTLDRCALISKSAGGIGLNVHCIRAQGSYIAGTNGTSNGLVPMLRVFNAMAKYVDQGGNKVNLAT

SEQ ID NO: 128590 - protein, 294 aa, Heterodera glycines
MTKEKTEIYLEYDRNRKKPRAIMSEEEKVIERIITANAVQSHRERMKCSEGPIYLKAGEYMVSNVEVFRLSDFKLKCNHCPAIHFYEEQNNTKGVNEFLGCCNYGKSSNLEDMLLDYPMELRLLFQPEFDQIDSTNMRNFHKDFIKNIRILNSSFSCASLGCMRFKFPDKNIPIFKIQGNIYHSYNTFAQPNNYDELPTNGQLYFVDTEQAIDIRTNAISNKISSDKNNNIIAIISYIELYLRENYIYSQSYKMMKDVSEEAAEQSEDIPDIMMLFGIREGVDLRRYNIPKRNE

SEQ ID NO: 128591 - protein, 164 aa, Heterodera glycines
TARWLTTVQSLEKELATVELAMLLTLPSSLKNKVKCLKDLHRKNNLYSDTVKNEFLSQFKSPWTNPWRQPDFMHSIRAKTGRNVLSNVVINLKNIFTEEMINLKIENNDQLGPDENRIVHRKVFFSLYLAMNKREFDEIRNQKLDEARNKATSYLIECLSALHS

SEQ ID NO: 128592 - protein, 78 aa, Heterodera glycines
MAQRSAEEVPLLEHQENFIAAFLLGTQQNDWDEPAFKLSLALCAGDLWAGGLETLVATLNWAVLYMLNYPDVQQRQIR

SEQ ID NO: 128593 - protein, 104 aa, Heterodera glycines
MSNLNPGNWWYYFERQGKATAKCKADGCSYSKALNASLSTTVLTFHLKNHHPELYKQREDFVQAEKQKTEKKGQSGIIFLIKSAARNGIPRGILRDPSENPEKA

SEQ ID NO: 128594 - protein, 232 aa, Heterodera glycines
MSDCNCSAVVCLTNSHCSSPSAPPVVRTSYGDVIGILRRLDSGVQVEVFLGIPFAKPPIGQLRFEKPVPPSPWLSSPLRAFAFGPAAIPLNPENSESIPFSEDCLQLNIFRPALSASAPLPVMFYIHGGGFAEGSARQYGYDGWAENFAPQGILVVTVQYRLGPFGFLSFGRGSVLPGNLGLWDICQALRFVHNEIRAFGGDPGRVTAVGLSAGGAAAAFMALSPHSRGGKH

SEQ ID NO: 128595 - protein, 78 aa, Heterodera glycines
MAFPYLVNVPLIEEKAAIREHFTEGVLNELEMRFNVGLTFHPLPLHIQWDVCMVTFFATLDAWDGFMSEVSDLLNEVS

SEQ ID NO: 128596 - protein, 284 aa, Heterodera glycines
NPIMPNPMFPNPMVPNPMSPNPSNPMVPNPMFPNPSNPMVPNPFFPNPSNPMVPNPMFPNPSNPIMPNPMFPNPMVPNPMSPNPSNPMVPNPMFPNPSNPMVPNPMFPNSSNPMMPNPMFPNPMVPNPMSPNPMVPNPMSPNPSNPMVPNPMIPNPSNPMVPNPIFPNPMVPINPMVPNPMIQNPLNPMVPNPILPNPSNPMVPNPVFTNPMVPNPMIPSPSNPVVPNPMFPNQMVPNPMIPNSMSNAMPPNQWMVPTMPAPAIWATMKNAATKKFMPCRFRIS

SEQ ID NO: 128597 - protein, 35 aa, Heterodera glycines
MAGAGIVALPTAIIKSGIGPGLLMNVALTCKNISF

SEQ ID NO: 128598 - protein, 276 aa, Heterodera glycines
IENLFKKLLDFSSVSSYSGRCLGRGAFGQVFVCLNVDTGEQLVVKKVPLGHTNSRHRRVLATLENELNALGSLRHAHIVNYLGVVQRKDCVHIFMELMAGGSLKDQISEYGALGEPVTIRFTAQILDGLAYLHARDIVHRDIKPANILRHTHAHVKIADFGAAKFLQAICSDQGSFQGTPHYTAPEILRADNCRQFEPRSDIWSVGITVVVVEMMTTMTPWAGIDPAAVHLRIVFARPDLSSLPDGLSTALRASIEAMLNSEPDQRPQAVKLLKMP

SEQ ID NO: 128599 - protein, 83 aa, Heterodera glycines
MTKIAELLDPSKGFYNKDEDKVKLVIYVIVDEAKTENSDPNPTAHFRWKLKNYRNLHKKSTVYIKRMPWKIWAEIKMKALRNG

SEQ ID NO: 128600 - protein, 107 aa, Heterodera glycines
MGKRTGGAPRGPKIVPNACTSPERKKRQTKHYNKLNRPKITVSSSAPNVPPIIRSLEGERSYRVKAVLATYTHSNNRIGYYVDWLRHSVQKSILEAPAPEESDSEDE

SEQ ID NO: 128601 - protein, 94 aa, Heterodera glycines
MPKVMSLLLTPNYPKDESATKKRKVEDRELWKLAKGKFLLTTYLCHDDWNRLYNNQQKVKRLEGDRFAFGFEMCEECVWANCRATDLLAPLKKK

SEQ ID NO: 128602 - protein, 580 aa, Heterodera glycines
MVRKKQIFSVDVQTPSSTPPTFSDVRPVLNIGFNEPIRKNHLPGSKLPKKTVERMPTNLLCLDEVDDDFFRQSTSQSAMRKNKERNERTVEKTELERHLNRQRMATKRNQMTVEEIELERSLNKERMTTKRNQMTVEEIEFERILNKEKMTAKRNQMTVEEMKLEREMSKVRMASKRSEMFLEEIENEKISNSVSHVFSRKRERNFDGLYYLAAADPKKANLYLLGDFNFKCTKCDSLQFPEEKSVVKDCIFFSCCKGGRLLNLLECVSKYPEEMKALFFEENPFYSNFITNIRRYNSMFACASISCFRFKFQSPGPPCYKIQGQIYHKFNQNAMPKDNEIPTNGQLYFIDSEEAIDIRSENNKECRSDIIEFLENLLRKLNPFAQSFLMMKEVYEREENNCKENGLKMPNINLVFSLKENCDKRRYNIPRCNEVGAIVVCDANDEIPPARIVVYPKGEKQLKNIYPLDKCVDQMCYPLLYPMSSEGFNVNIKDLNGKKISLCDYTKFLLFFRENGIFFPHFYAKKLFQQWLVDQAAKIEWDRLEYIRTHQMELCSSNYLNVEDFLKNRASKTGAEIKKK

SEQ ID NO: 128603 - protein, 26 aa, Heterodera glycines
MTTCHLEMVPPKKLWGSDCDQTYEKV

SEQ ID NO: 128604 - protein, 51 aa, Heterodera glycines
NFLNFLNFFEFLKIPGWSRFPVPKKNRGPGPGFSGPGKSRSRFCPKFPVPL

SEQ ID NO: 128605 - protein, 136 aa, Heterodera glycines
SGTAFTAPRCSNRFSWLYRVRPSVLHRPFRRLEGNGRSFTNDFSQFAPNPNQMRWKPHPMGNGRSFTNDFSQFAPNPNQMRWKPHPMPNSHKSSTLQGLYTVCGAGHPHKSSTLQGLYTVCGAGHPNGFEGYGVHS

SEQ ID NO: 128606 - protein, 70 aa, Heterodera glycines
MQSRKQGNLKLGGVLINSVNQPKRLIECPIKMNGNSVEFALDSGAEVVVINEETHEGIGKPKLSPCNVEA

SEQ ID NO: 128607 - protein, 103 aa, Heterodera glycines
MGGMLASCQSEEVRDQISKSKAIEKQLSSDRRMASNIIKLLLLGAGECGKSTVLKQMQILHSNGFTEEEINERSDFNGSHSQGHGLGAAHSVGRRQQRGDPID

SEQ ID NO: 128608 - protein, 29 aa, Heterodera glycines
MNIIQRFSLQFVWLFANIEHLRLFIDTKD

SEQ ID NO: 128609 - protein, 52 aa, Heterodera glycines
LNDEEKTIVTSTQPPFNKITVNLQCAWNSYGQRVWSKTGVDGYPNRVIQVEK

SEQ ID NO: 128610 - protein, 94 aa, Heterodera glycines
MDQYYNAELMAFGHIGLAVDRENDQQTVQNELISALSEALGRRQRKKTISNDSATHFDLAKFKAVSAAFRQKNVAKTIADAMKEIEKEIGKQKK

SEQ ID NO: 128611 - protein, 21 aa, Heterodera glycines
MIFCRSNADFLKLSWEPWLYL

SEQ ID NO: 128612 - protein, 97 aa, Heterodera glycines
MHNFRELIFTKKFYNSEKLVLRPPQIDAFWVHFTRHYKGRDKPVQLSTDYLTILHLSKDIEANSTKGYNDKLLTQFDGQLGNGSAFLNDSKIIKVQK

SEQ ID NO: 128613 - protein, 71 aa, Heterodera glycines
MSEANLQQQTHGPIAGTDYDSADEYVVIEQEEETDLEKNSTLPETVATNTNSTPSDVQSVAASVGTFGRGR

SEQ ID NO: 128614 - protein, 84 aa, Heterodera glycines
LNRRKKPTWKRTQLCRRRWLRTLIRLPVTCKVWQHQSALLDAVADIGNGLDGAKLSGFVCFPTECNERLELFAKWLQSSIFGSF

SEQ ID NO: 128615 - protein, 51 aa, Heterodera glycines
MDDGDGVEQHQSTDGQGLMNTSSDEKQPQITITVMSDGGVKVTDVCGTEYM

SEQ ID NO: 128616 - protein, 96 aa, Heterodera glycines
MDLLRELLKDHEIEPEPETIGANAQNAIKLVPISEEMLRRRAHDEEASNGEPQAVRCATQEYYKPLFVCSFCIPIALFDLLLGFFMYLIRPGTAAV

SEQ ID NO: 128617 - protein, 54 aa, Heterodera glycines
LLSIVKRNVDRLHQLCNEWINTGHFSSIPDHYRLLYAFCCAVRAKLSYLLKDYF

SEQ ID NO: 128618 - protein, 42 aa, Heterodera glycines
MWRLNRMIIERKQHYPDLDTVFRKYSHEIFFEVAKTKQLREH

SEQ ID NO: 128619 - protein, 365 aa, Heterodera glycines
MQRLEFEDGSESNMDPANEGHRNGAQHDENVQDGDGPVASTNEEQQKIARVNEATRGSNMATGVATNQQGMLPFPSRNLRSVSIPVRTARDRIERASGTLAARIAEAREVIDQDLTEGEAGYQAARLLAMERGLKEATQIFQGHFEIGMAAAGAEPAGHQDFFYDLLTAPLPAATKELQLRNHPTPAELLQIADEHIGDLRTMRRALEDEEEAIARSRLSGSFGTNNSHPVGDDPPPLENRNIEECERSFQVAAKRWQNGGQGVQQHNRRPMGRVATPVMSNLDGIFQRRAKVPSVASMRVTNTAREWINRNRDEMGAFPPATAHRPALMQPKIEKQQAHVNDDYRERQTYPIRRHARDEGEHDR

SEQ ID NO: 128620 - protein, 51 aa, Heterodera glycines
MPKGKELGSGGLGENDEGCQERKGVKRFAATAAILVLVPTNAGSAKNLAMR

SEQ ID NO: 128621 - protein, 127 aa, Heterodera glycines
  unsure (1)..(127): unsure at all Xaa locations
FRAESSKRKRLEGGGRKVPNRNFEEAVFQWVSELREKKVRVTRSMIAAQAIKMSAAYEDMENFAVKFRKIFEHFSLXASKGWLEKFMHRHKFSLRRPTTVAQKEPDTYKNIIINFILYIQQLIHKNK

SEQ ID NO: 128622 - protein, 395 aa, Heterodera glycines
MDDFYIVLPSNTPGQENTTSKFTVRLPETLELGTNWAVALSSIIYPYSFTALGINGQEFIKVWENDISVPTQVYLPDMNFKTAGGLGNKINEAFTHHYKIKKQRGKREAKAEDTKDSKIDVAKRAAERAGRDVERHFNQINNISNSIQTQLNTLRETNPQILEEPDIKIWFDKMVEMGTEIQTSRNELKSFQEEVDKAKNITLEHVEKNDLKKAKKSADVAKGIARQAKTKYTSTLEEYNDKSEKGFSGMVVRLNEALEAEKGPQKRERLANEDVQFNYDSIDQKFIVYLSSAVTHIDLSKHLAYVLGFKNTRLFHAEEATYMPDLTGGVRQLYIYAPNLIENTIIGNQMAPLLRIVNVVDDPGSISEVIYSTEYFHRLQSKRISEITIEIHTPF

SEQ ID NO: 128623 - protein, 451 aa, Heterodera glycines
MENYKLIDERSTICEKFGFTKNIMEFRINPDVRRPDETMRDAIDTMIKAAFKTTEERMKRKVRMFGVAITGAGLASPVWVPYRAYPQNNADVIMQEINKLGQSGEGDENKKTLLLSEPIMMKITCVTMPSGEGPRNVHKFDFGFKEHQRIKISNVDKFCLFYALVASKLYLEVHRNIFNRFMNNIVRQREAAYGLLRNCGIDINEYSYGVEHLSGVQNYWDEIYPGKYRVVAFEKSADPRKSIRVLWKGPMGREKVVPIFLENGHWDGLKKYVCFFNRGRKFCVECECFYDQDVYHTMDCRARCYYCNRAGGMPCQKESGVKIECPKCRRYFYNWECYTYHQGHQTCKLWRRCVICDKTYRFNPKKDHECGETYCQLCSVSHDPKRGCYIMPIEEKEDKDVYRIVVWDSETSQDSIYKGDQKEHVINYISAFWLLLPLPYPGKPRSRLLMD

SEQ ID NO: 128624 - protein, 273 aa, Heterodera glycines
MTHVFFNPDSIEWSTFLASQQEGRGEQQYFVGTRYQRGGGLLQNVARFLMPVASNLLSSASKEGIAAGTRVLGDLSQGKALKESLETHAKQGFENLAGKLQQCGKGGNYGADGRRGQRVSKELLPLSALNQTGPYLFRLFSDSQYCDLSKTYMYLLTSIERKNAAGEWVPTDDAIEEDKHVGVIQNFGSSFVRSLKVNISGVEVFDSSIYYHYRAYIMQELGYSHEIRKAFHEAGCYYPDENSQDNYSNKGFTSRAQRFSNGKQCETMVKTQL

SEQ ID NO: 128625 - protein, 18 aa, Heterodera glycines
MEHDFIFKIFPNRYALFT

SEQ ID NO: 128626 - protein, 175 aa, Heterodera glycines
VIRRGTTVIRRGTTVIRRGTTEIREVSTVIRRGTQEIRRVIRRGSTVIRRGTTEIRRVIRRGSTVIRRGTTEIRRGTTEIRRVIRRGSTVIRRGTTVIRRGTTEIRRGSTVIRRGTTEIRRVIRRGSTVIRRGTTEIRRVIRRGSTVIRRGTTEIRRGTTEIRRGTRVIRRDFLE

SEQ ID NO: 128627 - protein, 194 aa, Heterodera glycines
MMNTNNFLIVFCCLFLLVQFPQFVYTVGINTVCFRYGSQFRVQVFYNGNCEFWQYTNPLPNGQQQCLSVQSTIWNRMDTNAFVEFRNDSGQVIGTATVHELRFSTSNPPTLNFEWEKKVCFWRPMNVSVYSDQQQITTIQTMTDYFDHTNCMEIDPNQLVIGLVNPNPQISFFEQNHQNRVTFLMKIKKNCLLE

SEQ ID NO: 128628 - protein, 64 aa, Heterodera glycines
MRLTGAQEGIIVRCIQRLDEVCKDVRKAARIVGDPALFEKMGETSAAIRRDIVFAASLYTTEEE

SEQ ID NO: 128629 - protein, 47 aa, Heterodera glycines
MLFHWERFAENLKEMGIFANLGDHFLRHNSTFCSLLPFLILTFLETK

SEQ ID NO: 128630 - protein, 108 aa, Heterodera glycines
MLSSDTEQITHGSLGFHEKSLILAVCPPWMNNSSLKRSILVRFASTHPVFVIPCLLPCHVPHNRSVCCENGFCVQKVGIRSRRLNVPQAHGHVVGGTQQMTRQIVVPG

SEQ ID NO: 128631 - protein, 217 aa, Heterodera glycines
IIRVPKIACDLSLAKNGVSKNRNYAQKAPQTILALPIPSTIAFIHPIMSAKIQQNLDEESKHLCGINTHRGLFQCQRLPFGVKSAPSIFQHLMDQIVSGIPGAFAYLDDGIIASKTLDEHISSLYKLFKRIQEFGLKIQWEKCKFLQPELLFLGHVISAKGIRPDPGRSEAIRQMPPPHDLSTLRSFLGALNYYGRFIKSMREIREPLDQLLRKDVK

SEQ ID NO: 128632 - protein, 90 aa, Heterodera glycines
MPRGAADGDERAIVRTVQRCAGEALVECGRGWTLSNPQQFRDIDAPAQVAKATKFVKLAGIGSYFEVENNEKISYVIYFGLSGTGTGTDR

SEQ ID NO: 128633 - protein, 145 aa, Heterodera glycines
MTDGFFADPSSCQHFYRCVGPMAYRAINPADLPSDKQPNGMYARVNGLKAFDPVLKTLLSFGGWSFGTRLFREMTSKKASRKSFIDSAIAFVRKHGFDGIDIKVFKKKHKLISLGTERRRSERSVFKRKAASADHCCGCGGDGKH

SEQ ID NO: 128634 - protein, 231 aa, Heterodera glycines
MKRTNASNITPPRAKRSMAPPLDLDPNTVALAEQERQRTLVFIGLPESNAIRPSERVQEDREAATKILDHLEVEAQPTAVFRLGHYDPQRTTPRPLKVVMPTTTHQHMALGGWKRERARLRSLQNLNRLFVRPALTKEQLKEEYEARVQKRQQNPAPVAPAMQPRQTNVPTPVKENGPSQKEASDDISKPPEVFEQTILVCYEALKSLPPNDKIVHQIQSLEKQYPRLFNK

SEQ ID NO: 128635 - protein, 304 aa, Heterodera glycines
MGKRNLPRKLNCKKALKERENKREERKAQTAKAMKARWAKKTAPPPNPNAETPQQDEAGPSTSAAPTEEAMEPPPPTPGLVPTPDMDEEILEYGVLLSSTPATPIGDLVPFPSTPTAPMDTGEMTPPPLAIDERSPRIEQLEKQLKDRDDTIQFLREQVRNREALISDLRRQLEQCAAPPTATPTTSKTTPNRGRPRKAIDELQRSSRKRLTEQILDAIDRDRSRSASRCSLERIHREVRHKYGHYTPKKTPAKKGKDEMEANDGLLLMTQLGTQKAYQRMKATLRLIHKKFDILPPLKKVHLG

SEQ ID NO: 128636 - protein, 211 aa, Heterodera glycines
MQAHDSDDSGIEEPDNVQGVVQEGQEGQGVVQEGQGEELVEVGQIDFDIGELAAQVDNVQDDHALLQNQVVNLNNQVVNLNNQVVNLNNHVGALLNLATQQQGQISQLQAIGQAAAGSQQQEEKSGKEKPKEGEDEEEAGGITVAEDKEEAEGEKNVPEGEDEEEAEGEKTVAEGEGEDEEEAGGEKTVAEGEDEGTSDGEPKTKHPRLQF

SEQ ID NO: 128637 - protein, 16 aa, Heterodera glycines
EAIPEGFGLPINLGAS

SEQ ID NO: 128638 - protein, 30 aa, Heterodera glycines; identical to SEQ ID NO: 128423

SEQ ID NO: 128639 - protein, 111 aa, Heterodera glycines
MMLFGLIYSTIIVTSILGNLLVIISVFRYRSLQSVRNMFIVSLSVSDIVVSIVSGTITGVSLCFSTLTLSAISIDRFRLIVTPLRQSIQKRCACRIVALNTAISLIISYDN

SEQ ID NO: 128640 - protein, 92 aa, Heterodera glycines
MKTNDEMVQIFKWMNGVSDIQYTRIGSTHIRFEEGDEWSLSTLKLFKNETKNKANKKLKKNKGQFEMSLSREFVEWLLNDLEVSIMLDKLNL

SEQ ID NO: 128641 - protein, 117 aa, Heterodera glycines
MGLKIDLNRAFGIPTIRAVENKKELEACLAQYPEVFQDGVGRCKKIASLKFKEGCQPKRCKPRLVPFSLRNEVEKVLDQWQAEKIIEPVATSEWATSLVMVPKANGKLRLCFDYKVT

SEQ ID NO: 128642 - protein, 139 aa, Heterodera glycines
MTFGGKNGERDNAKVFLHRFLFVIFFPSCQTILSLLLDIMSHFKVKIKDRMEKQFFGIITGQLLRRLPEQKEHMLKNAFTSFYKTTLDYVAKWFRTERYPDHIQWLLLTDRQLVHENLIELASTFCPDLSDTLFDEISQ

SEQ ID NO: 128643 - protein, 15 aa, Heterodera glycines
MSRSPNNACWAMRND

SEQ ID NO: 128644 - protein, 258 aa, Heterodera glycines
AISNGTNGITATPRGSRDESATTKRRRIAARDDSAARKEEQLQQQSQQHTVATSAAIVTAGGDAGGTATTVAALQQQTTIVYGSAMEAKTSLNATQQQQQHTQQKPQQQQQMVVDDLPTLRRELERPPAIVNAAAAAMAVAGTASVPSSSSSSSSSPCVGQAATVPSTATTAQQQHNHHQQSLPLSSLHSQQQQQQRVSSSSTSSLSSLRELLARPPILHVVVQQQHHHQQTHVASTGAADVAAFVEEQPLNLCVRDQ

SEQ ID NO: 128645 - protein, 102 aa, Heterodera glycines
MYLIKFILPISLCTTLKVFYLTAFFGIQSYLCEEVLFRYAVALFVDGVPRVVFGLQNWHKELVGQIAAGGRGRGSAEEDGTAGTLPEGNAAPLSVANDDDED

SEQ ID NO: 128646 - protein, 130 aa, Heterodera glycines
MLTKAFISCRKRHVPVVHLRATHIHSDSGRVGAVVVQRTACQLPHSGASRLLACRVAHLPAAASFRTTRRCGQPTDGRPSDAAVANANSAAKSAASRPAQVAETVQITTQIFLGNIKYYLLSFDTLTFLF

SEQ ID NO: 128647 - protein, 133 aa, Heterodera glycines
MAKEPGTGLLGKCVLCLLLNAVFVLALFLAFLIGHFAADAHFPHSNKSLERRRQRVPSLSEVYPPLLDGGDPMADEADDPMPLSAATAAHQFGNGPVMHRSAGIASQNVPLIPLPKTVMPRHYNVEVIRKQNI

SEQ ID NO: 128648 - protein, 142 aa, Heterodera glycines
MCRPKKRQLLQLFLLLFCYLIDGHQLGPVQVIENNLEQTEEVKAKNIEMAQQIVEIREKNVNGNIENELLEVCNLLKCPSENVDKFLKNQLKKLHPDKVGAENAKLGAEATIVINKLRQFVIENTRKGLYHYRHRIVEILAF

SEQ ID NO: 128649 - protein, 80 aa, Heterodera glycines
GTSVIRKGTSVIRKGTTVIRRGTTVIRRGTKVIKRGTTVIKRGTKVIRRGTTVIRRGTKVIKRGTTVIKRGTKVIRKVQQ

SEQ ID NO: 128650 - protein, 178 aa, Heterodera glycines
MSEANVLDKIEKKLNYEARMCKELKEIGLQPHHQHRLEEARQKFAKGECLTQCELTLLFMEQQERLRQKRFRQQQQLQQQPPQQQQPQQQQQPQQQQQPQQQQQPQQQQPPQQQQPPQQQQPPQQQQPPQQQPPQQQKPPQQQPPQQLSEILHESCRSLEQQHQQQQNVQRLEQLRQL

SEQ ID NO: 128651 - protein, 86 aa, Heterodera glycines
FLFIKNTLLIDSDRIEQWKEEMNLVFFAVEMTFAPLIGGNVLDRSELLKQTAQQQNIVCLIKEKAERLDLKQIVWLTNATIASRQV

SEQ ID NO: 128652 - protein, 82 aa, Heterodera glycines
HYDALVSKRKMEKKFFKKIFPYILVISFCFWWGAWNSGIMRTRPIWQVKQRLLTSQKVRCRDETNQHCLPRGTRHGPPKEWI

SEQ ID NO: 128653 - protein, 69 aa, Heterodera glycines
MEGGGGEETRHRGGGGTNADNEEEKEVDTGKHCCRAEVGPDDGWKGCGVRRGDAERKDWAQRPGGKEDE

SEQ ID NO: 128654 - protein, 79 aa, Heterodera glycines
MSARVGIHHTLCLNVLKPFLIFTNQLSQRDESLSSVISVYKCLQNYLRVNGEENESILSLKNVIKDGLESRMREHQSKM

SEQ ID NO: 128655 - protein, 19 aa, Heterodera glycines
MLNYLFRGYQHLHVTVKIA

SEQ ID NO: 128656 - protein, 93 aa, Heterodera glycines
VFLVYTGLVLFVYLATDSFQNNAPFVFTIPVVVLGWFTLWTRMPRRTRILTAVSFFTLALALYSWSMFPKNQFAYLLSFYKSLRKWWIALAIS

SEQ ID NO: 128657 - protein, 145 aa, Heterodera glycines
MSLGIEAETESPKTRESCTSLTCHFEHWPISANWQAENDHRNQRENAFPQLKKNNAILSSWQALYFVMFQWDCNCGQSVEKDESGGQIVCLESVTGEEKRQSADHPIGEQRINGKKDAAEQRGQAVAVERVEQVQQILRGNSQRN

SEQ ID NO: 128658 - protein, 132 aa, Heterodera glycines
MNKLKFNQQQNTPTNFERKLFIYALATFCGHALIACLLICIYIASNALNVQMVLALYTHYPWVLDTGSVILSSWLLLWAGDSFRDQLLRDYRIPRIRFEIRANNRVVSVKRPIEQTNGIKGHEKLRKMPTVA

SEQ ID NO: 128659 - protein, 194 aa, Heterodera glycines
EYSNQIVLTENQLQPISQSAEEGEEEEEEVVVEEEGHQNSEEHQQEEDEQQNRVIVNRRPSVQIGTMPNQQMADGQREEKPTAEKKQTQKKAMKPKNTKYPFRAKLFSKILNNQNFHINSTLRQHIRTVLNLQCVKEHDFCGPPLIDHTGFTYNPELLMREKLYYFNFAVPDFGTVSAKSILDICKVIWFSLKH

SEQ ID NO: 128660 - protein, 447 aa, Heterodera glycines
MPSKTKKRKSNKAEEDNERKRIKIGSRKRDLLAVAAAAPLPVDDDFELSQQSGTSAQVHPPGPPLPSKTKKRKSNKVEEDNERKRTRIGTRKRLSSPNVTKNQPKRQKNPVGEVLSEEQRHQFAEDQHLFTIPNSQLTNEQKRRRLQFVFNRNPVKYGVHGDTVLNNAGNPITDSSVAQALDYIIERRAGRIPQFRQPPGTKLIRDRINSDLILRTWTAPPRNEAGERQGTRRNDTSVSNEGRQAEVDGTVSNRNGNPHQKPTSQTTKMEKSIENVLERLYNDPKSPAAFAGVDRLWLEAKKELGNKIPKRDVKHYLEGHRTYTLMRPRRINFPRAKTTAAGFMTDCQVDLADFQALSRHNSGNRYLMVVIDVLSKRIFVTPLRTKKSDDMVEGFKRVFSTMPMKPHRIFSDKGTEFRNQQMKKLFDEEEVEKYERTHSEKKAAWPN

SEQ ID NO: 128661 - protein, 39 aa, Heterodera glycines
MGQLLPLLVFVTGGQPPSYCIWCLALGIILLFAWLICKF

SEQ ID NO: 128662 - protein, 163 aa, Heterodera glycines
MPAEQSTELKDILQAIHSLLQKSTQPNVPSQNSEMDLFCKLSAQIAEFVYTPDDNHTFEQWFERFGTFIADEGKNLPEASRVRLIINKLGAEEYRRYTESIQPTAPEKIGFGETIHKLKAIFPESKSLFVRRFECFQLKCADNDALSFAATVNPMADRAKIGF

SEQ ID NO: 128663 - protein, 78 aa, Heterodera glycines
MDCGGETAQWQLHLARIIHGFKMETINIWWRMKCLGRWSFFSNYAGLKGAHWPKRGEERGKSMSEKADDSCPAAAEWP

SEQ ID NO: 128664 - protein, 31 aa, Heterodera glycines
MLAAAAPFKLLTPLPLLTPLLLSTLPVGLYE

SEQ ID NO: 128665 - protein, 191 aa, Heterodera glycines
SIPTALFNYGHSNHHYQHQHKQLNQQRHHRIATPSASSCSDNANATAVVGVPSQNHPPHQRSNSALTPSPVNSSYSPTGSVESSSGVSSGSGVSSLNGAAAANMMTSLPMHHHHQSQQHVTVKTEPGMAPASTADISANIVATPSTSESSDGSGSGTTPRTTTAPPAPLIGGEVARAGAESAKAQWTATLR

SEQ ID NO: 128666 - protein, 188 aa, Heterodera glycines
MSQMVASSPLLLALQQQHHHHQQQQQQQQQSPFLSAALNAMSSFAASPAAMVAASSPLAHAAVWHHLASNMFNNAFSPSLNSLSNNNNNNNNSTNNISQLLSSAGGGGDNSPSSVANSVSNTTTNGNNDTTAATQQLQANKTNNNNSLYSQLQNALTTPTIVHNHHQQQQQQQAVRTPQLSNSAMLSA

SEQ ID NO: 128667 - protein, 82 aa, Heterodera glycines
RDSNVPLRPKNFSISGKKSKFFRKKYQSIELEKLRFGSGLRFSRENSLKNHKIKKPENRFLGLTRKILKIFEILKSGKIELI

SEQ ID NO: 128668 - protein, 389 aa, Heterodera glycines
MKDKAKELAQNWVSANFKLFNSKNCGTKVWEKITANEGLPGRGGEYNAQINVGTTLGVLLDILVTYGGKLNLGIDGSNCEQKDFEIEPRKFPNEASEYRSKQLAAAQKKVDTINKSQKYWKAVIYEPFALLTDAELKKLDGVFPPIYGPQNQQLKTLETLNIETQYSNDNDLPRQFDAREKWPDCADIISTITDQGLCGCCWAVASASTLTDRICIARLKKGQKTSHYGGSYISAQFTCEFTPGSDGCKGGWPSMAWKFFHKETVSGSNYEMYDGCRPWTIDPIFAGTFFERLPILTMEYLFVGPEASWKTKRPNCKKECRIGWHQTVENEMADTPTVIGHECWIGWHFGNEQKMMREIMVNGSITASYAVYDDFQITMAADINQIYVV

SEQ ID NO: 128669 - protein, 428 aa, Heterodera glycines
MIEKKLTPGFLRTILTKKGEDPARWNTTKFRDVLNEAVRKETQIQEVMGEYGHSQQHPQQRPQAQRPNFSASKFRDRAPIPQQRERTFITSAVDDNHKRLINRQPQHRPQQQRPRAPQPQQRNLRTFNNQRQFPTQRTNATNNQRQFPTQRTNAINNQGQFPTQHANATFNQRKPPSPCIFCDNDHWNEECRKYSTIQQRREVLRTKALCFKCLKSNHQASNCPQPKRCFKCKQPHPTALCYADEKPPNQITAAMLGQTQQNVSITTQDGSNEPTASTSQMCNAVNGSDTRALLMTATSTVFNPAQPHLSMTAAIFIDPGSHTSFISAKAAQLLDLPVVHTEECHLTSFGEREPKRYISDLVKLGFLCTSGEKLIFNLNAMKFLVNDMPMIQLSELDKSELRQQKLNPPHEQRQPDIMLRIDVWHELP

SEQ ID NO: 128670 - protein, 99 aa, Heterodera glycines
MVRMTKKTTKKNRHPDWDNRTLLEWFSEKRWTDEDNFPPFSEKHLQIIDQAVAEMKLLIRYAQLFGSDPSRIVFQPSLARGLDYYTGIIFEVVMKGHII

SEQ ID NO: 128671 - protein, 34 aa, Heterodera glycines
YCKDYSTHFPHLIISHWPLSIQSHLSIFTRFSFS

SEQ ID NO: 128672 - protein, 330 aa, Heterodera glycines
MKKLHIHKKKIFISSDCWLLVFDLLEPSQLGLGIALVSHRFDFYVDEHFKTRRWALKAMEIKAKFEADGTNGWEIVNCDGKELPTPQKALPKKVVGFEAISINYIDQNAITFLQRFRQLFASSPINLFIYTDDDRTLEFILRKFWPMIAKNICAIQLPRYALSRLRRFVPSLLNDCPSLRVVNSNYADGFFAKFPCDDSAMASDGQALAKWLFTPRPDNVPKVFKCWLHPWWYGNLSSRIGAFKAAFANASSPVSFIVVIWRPPASVDPNLAFDLTNEVTQEQLTLKWMNDVGRFLLIRCPIVRDMDKWAKWEKEAIDWQFNGQWNRIDI

SEQ ID NO: 128673 - protein, 153 aa, Heterodera glycines
MIARNICAIQLPGCFVPSILNGCTSLRVVNAYSDGFFAEFPADDSAMASDGQALAKWLFIPRPDNVPKAFANASSPVSFIVVIWRPPASVDPNLAFDLTNEVTQEQLTLKWMNDVGRFLLIRCPIVRDMDKWAKWEKEAIDWQFNGQWNRIDI

SEQ ID NO: 128674 - protein, 446 aa, Heterodera glycines
MSDNRKEAEEKMAKAIFISADCWLSVFDLLPPLQLGLGIALVSHRFDFYIDEHFKTRRWALKPMEIKAKFEADGTNGWEIVNFNRKPLPIPQKALPKKVVGFKRISIKHIDQNAITFLRRFRQLFASCPINLVIYTDDDRTLEFILRKFWPMIAKNICAIQLPRYAFHRLRRFVPSLLNDCPSLRVVNSNYADGFFAEFPADDSAMASDGQALAKWLFIPRPDNVPKVFKRWLPPWWYGNLSSRIGAFKAAFANASSPVSFIVVVWISAPLAFPAQFDLTNEVTQEQLTLKWMNDAALIGAVGPITVTPISKAFVARAVAKANKESNNTYQFVDLDVINVMVEPREEVYLYEVTILAGQTNCAKNALIARAIDKMNRESIKPFLYMPVNKILTVNTMHGNNYVMKMVVGESKCVKKEPLQPPPKIDYTNCEAKADPAAPKQALINS

SEQ ID NO: 128675 - protein, 80 aa, Heterodera glycines
MAQQPTNIGTPYRLKNEKEKGKCRQEIKWTKRTEAFLKALSGTKIQWRMENNEKWLNMCTSQNSTNDISFDASRSVRHGS

SEQ ID NO: 128676 - protein, 41 aa, Heterodera glycines
MQSKKKRRKLWFCHGKNAKKESKTNDEWKIMKSGGGATTFI

SEQ ID NO: 128677 - protein, 22 aa, Heterodera glycines
MYGLFIAIQKKLFQWRNKMGKL

SEQ ID NO: 128678 - protein, 82 aa, Heterodera glycines
PFLSLLSCSSSSFLSCSSSSSFPDFLPLPSFCSSSDCFPQPLLPLFVIRQNSRVMQITVNSQMVKRVQPNHLIWSSLEWEIE

SEQ ID NO: 128679 - protein, 99 aa, Heterodera glycines
MNASIALVPALASAIVPAPHPNSSPVIGLKMLQRNPFVDYEYLDDEKAAILGDGGKKTEGRGEESSVEETQLPEQYLDEEEEGTAIVCCPFSVKPKQQI

SEQ ID NO: 128680 - protein, 127 aa, Heterodera glycines
MKKCFYESALRTIDYLEAEFDQMKKEDDKMKGEREEEGKGKKKENEREKEKEETKKEEEEEEEEEEDGGSTFAIAKPPIIFVNDLTKKHPNINDEFTPTDGERKRWKKNGGGEKGVQRGKRREGKKE

SEQ ID NO: 128681 - protein, 403 aa, Heterodera glycines
IADLTKFVDVFAAWQNHTFGFRLYGMCQVQNSIFSHSNFLDVHWTFRRKSFVDDKLATFREFLDKTQYTEDNVASYEWIFGKDFISPGGIEENRRVLRRGIEENRRVLRRFRRLRPGQKMLDIGVGIGGGARQAAREFGLQVLGCDLSSNMIQHEFGLQVLGCDLSSNMIQHAFERNQRDKDHRVEYQIADAMVYRYEDHRVEYQIADAMVYRYEPNSYDIVFSRDCIQHIQVTERCFVRFTWLKPGGQLLLTMYGKGHGVLQPKFHEYVRKRQYMLKTLDEYRETAHGAGFTNIFTENMTPRLREILEMERSRAIANGFTENMTPRLREILEMERSRAIANGDEFVKRFGKTLYDKLLEGWMDRFGKTLYDKLLEGWMDKLQFIDDDNQNWLLLRAEKPVHP

SEQ ID NO: 128682 - protein, 52 aa, Heterodera glycines
MSKHGNYNTENVENRNSDSKKQTRKVNNRAVHQSLMKKEKMEQQQKLMKSVK

SEQ ID NO: 128683 - protein, 45 aa, Heterodera glycines; identical to SEQ ID NO: 124527

SEQ ID NO: 128684 - protein, 80 aa, Heterodera glycines
LCGAFEHVPKHYFFPSVHDAVLCAQQMGGFIAPSIHMSVSLNGCRDLITLSNAASNHDITLNTETSGQSSANIPMLISPN

SEQ ID NO: 128685 - protein, 46 aa, Heterodera glycines
MVQYKLYYFDLRGLGEPIRLLLHYVGQQFEDIRFKDFEEWEKMYKP

SEQ ID NO: 128686 - protein, 47 aa, Heterodera glycines
MPIEKDQNSVLNDRTYFKTVNDLTITKGHLFTYKELDRDPGQDFPGF

SEQ ID NO: 128687 - protein, 180 aa, Heterodera glycines
NNNNNSYAKHHRFMPKWCKVDDLGRPTPPPRHGHRAVTIKGLMLVFGGGNEGIVNELHVYDTSTNTWCVPDLRGHRPPGFAAYGMVTNQSKVFIFGGMIEYMVTNQSKVFIFGGMIEYGRYSNDLYELQINRWEWRKLNIQILEGQPKHPCPRLGHTFTPVNKQIFTTCDKKKISEAPNN

SEQ ID NO: 128688 - protein, 122 aa, Heterodera glycines
MADLSFVLEQRPNAEFMSPTGEVPFLRLQNTLVAEFFPIVDLVGKKGIRPSNTLSAAEQADIQAFCSLIEETLRNAEVRQRLLVAFELAAADAQTARNAQLFGGHRLDGPSNGQSGGAMRQM

SEQ ID NO: 128689 - protein, 209 aa, Heterodera glycines
MTSFFLLFMLLMLGVKSSRDGRAPIQNGFWFFKYLLLGLLIFGFFYLRDGGWATPMMWIGMLGAFIFILIQLVIIVDFAHGLAENWVSTYEENESRWCFAGMIFFSLLTYALSIASTVFMFLYYTSGASCALPKFVISFNFVLCFVISVVSLLPKVQERMPNSGLIQASMMSLYVCYLTWSALTNNPDKECNPSLIPRHNSTGDAGGNS

SEQ ID NO: 128690 - protein, 45 aa, Heterodera glycines
ISSVLFSEKVLPSDLKNPPSSDKVPALTVGAHEFTCHVMPYLHIQ

SEQ ID NO: 128691 - protein, 172 aa, Heterodera glycines
MTDEEISDHYLKFLNLKNNLNDKTMNRSNQFKQKLTTASFYRQIVEFFKQHRTPNGKNEILNAKFKQFDGLISEFSQFSLFNNCKLWVFWRELVQLLKPDSSTNNDLENKVKNCEKIVNCFGQGWYTVKSDEYCNLYLQHFQQSHFEMLSHLLPNESERLPAYKIKLHILSS

SEQ ID NO: 128692 - protein, 352 aa, Heterodera glycines
MGVESPGAIIEEVRLEFIFSFKLSWLLNGPLSLLLVLSGIVLNALCVIVFVVIVFVRFRRSTTPIIHYYLSLAGWHSALLFNAFLLYCLPTMLWGSVVSSGPYVHLYPPTYALANATHTGTVWIILALTLDRYLALCMPFKHRIFSKRSRVKRLVVGLSIGALFFCLRVKRLVVGLSIGALFFCLPRFFEVQTAVECYALDGGAAALLSSAHAFNQLYRTIYHILLGSAFVTILPGVLTFVLTLRISIALGEARHRRKRLSHCCAHLHSKLNFYLNLKNHFFRKEHRANVMLVVIIVKFLISDILPTVLDVFETVNLNIKYVYVKILKHFITKNKLFFCYLKNQFSLFLTTK

SEQ ID NO: 128693 - protein, 81 aa, Heterodera glycines
MDAVDRCAISRTKDICTDLRECVTPIAEMMAAPIVVDLLRGPPLLVFKELKAKGRDAFFDCLGVLDFLTFILFFIFVWHYV

SEQ ID NO: 128694 - protein, 34 aa, Heterodera glycines
MYAPFLVIVGGVVVGLLLLILIISYLVYRLKKRD

SEQ ID NO: 128695 - protein, 87 aa, Heterodera glycines
IIFIPKIFFWVFGAVPPNRCAQIYGETESFGNSFPIACTLILRWIFAPHNCLSTPNGHLKKSIYFCFRGSPPEPMRPDLWGDRILRE

SEQ ID NO: 128696 - protein, 39 aa, Heterodera glycines
WKKIPEGENLIKSIPSGDRAGCRGVSSAGSLHHGTEPFG

SEQ ID NO: 128697 - protein, 29 aa, Heterodera glycines
MVKEFDGRLNTLLAQANHYSVPTLHGIMS

SEQ ID NO: 128698 - protein, 91 aa, Heterodera glycines
MCRVGQLRQLMKGLKCQKPIGPGNNTDCAIHLIYFSYVCYYMRIWVEALDDKLGTLLAKVAHERRNTLYCAIIRFEPVGGDGFFAWAGLEP

SEQ ID NO: 128699 - protein, 45 aa, Heterodera glycines
MAAGPFCTNAAHRRPAENVAGYGEQMHCPHCCYCDHWYCEVVPAY

SEQ ID NO: 128700 - protein, 349 aa, Heterodera glycines
MSNSFFVFLPSNVTDYPDNQPNKFRVRLPKPLHFNGSWVCGLHSISYPYSWSTIGTLDDQWIDIHFTDRRASDEDRQRVIRVPVPRASHSKVEQLRDFLTVTLRNHSGAKLLPLPREEEENRNRTKPLGSPPPLKREKRAAPVINESGKQLDSPLLYDGNDQGGIDESPPHHEEEEEGTIQESPPHHEEEEEEGAIQESPPHYEETPKETVKTPVTPKVPTPPPVISPTKPSIVKTPAPPSDTTTSPPTTVKPPVTVPPPITKHNNAVRSSSHKAKDRASTNRATNNYPSSKHKTNNRPTADRKAKDRPSTSRTGNNHPSSKYTTNNHPFPDRKANNTDPSTASNKKSS

SEQ ID NO: 128701 - protein, 26 aa, Heterodera glycines
MASKIETKKQQVKLPHEGHLYTFDKM

SEQ ID NO: 128702 - protein, 44 aa, Heterodera glycines
YGTERLPVSDIFGVGIPTSEIFDEKSEIFLIFFFQKTSKFCTIS

SEQ ID NO: 128703 - protein, 28 aa, Heterodera glycines
MFNYFIPFFIIISNPFLFLFPFTNANPS

SEQ ID NO: 128704 - protein, 209 aa, Heterodera glycines
MLISFVKSDQKMQISEYSKQKYEAHLGIVHFMRKNWQCDKIEEKFEEYERTECQKYRKYFNILYECMYREYAGIPTVKPKFIFKKEIEIEGPLIYAANCLATISQFYFKKWVGQNYGYKLNEFFDDNFELKLLDVERLNYEVKLVNEPKLPINEMILQLAIDTANEWQTNESLDGILRENFGKKLEEMLKKAEKGKNKRKMAMMRMMMK

SEQ ID NO: 128705 - protein, 233 aa, Heterodera glycines
MGRIVELQRSHGEIRNAKIRLATGKVLSRPLNRLYPLEVTSSAEQDESHQQLTNPPLEEHHNRTQTADSSPICQLRDRRNSPGPTHSMVTRSKTKALASVLSILMCLFFGASQTNASSTTKPKRGNGLPIRCRGCELTCTKTGVDILIPNGIAKFLLCCADGTQCITQSGVRKSFHRLPKEHLLFDYDCEAMYWTKRGNKKLEASNVQAEMLASSSIVGYALNDWQIPIVDLT

SEQ ID NO: 128706 - protein, 140 aa, Heterodera glycines
MVLTILAIFCLAFVHIGISGKYDKSDEHNGKYGAGPPNLHQFLCYNKQIGQKSCDNQFCECMERATAGKKRCSIWEGPGFCRHYRLYGESAYRAAAPPFWSSCGTVLNSEKYLGCPCGTYKTWERCGFLYLGYRYLCYSC

SEQ ID NO: 128707 - protein, 54 aa, Heterodera glycines
MVAIPLVNLKMLSILLANGMGMVAIPLANGMGMVSIIGFITIRRDSEAFPKRTE

SEQ ID NO: 128708 - protein, 112 aa, Heterodera glycines
GRLAKCGESNEAPLEAKGRPRPAMLQIHTVQPFQSAEKVKSPAPNAAADEAFLGQMREKKKVAGLIARFNAFAPTTATAVNNENAAGGGGSNSKKIGGAEPGKVGELRQKFN

SEQ ID NO: 128709 - protein, 60 aa, Heterodera glycines
LREFVDGADFMERIQQIIREEVKALQVKAKRVDKREIEEERASPAFSFRLHMNFTKLFGF

SEQ ID NO: 128710 - protein, 65 aa, Heterodera glycines
MGCAAAKTQFAALEDCLKGPAQYFNDISQRSSSRSANDDDEQDEEMAKMRALNEVCRQRAEEQNS

SEQ ID NO: 128711 - protein, 187 aa, Heterodera glycines
MTTNDTDKRTTDETEENKMMTNDTDKRTKNDLDKGTTDVSDKKTTDDMEEDKMTKTKNGRDGTSTIFVNTMENDEKSPSSSSSNSSSSSNYQNMDAHPAMDEKQDEEEDEDELPSPASSNERRDDNGIFCSSTTMKNNNETSPPTSSSSLVTDRKNISIPSSASSSSALALVNDDGRKMGAQLVVPA

SEQ ID NO: 128712 - protein, 172 aa, Heterodera glycines
MPRFSTCSGTARVTVNVRLADLTEQEAEREREEAVRERQLDQQHHNQQFEVQQDEPSAQLEADEEEEQDSAVDDRHQSRMSPQHTAQRQRHNNFDRDSDNNRRAHAVPTLALDGTGAKQPLQIEFAVEEGIAGFVGVDANTGRLFVGPWLLRDRFEEIRFSVAAQHPSGQVL

SEQ ID NO: 128713 - protein, 361 aa, Heterodera glycines
MALFLHWEFAESHLDVGTIIYQLRTRFARFKVQFKKNSVFNSVQKEVSKELRCKAQTKIEGMLLKCKVHFCLALRFNDSPKDVAWLSNYFLAKIGEKLGEQPEKVLDLYYHCALALEEEGIQYLTKINRVKQVIMDDSPVRFGLRHFGYFDTVICQETYFEPLEIHYKVHAYALRYLKALNSSSFPPRTSAQCATDLANIHAYLTLFRYHGVQRRCLEDSHWSVSEFYDKQSILDKSALDKNNRQISEQPKSIDGRQLTAEMDNGEIEDVVHSLCCASELQHEIVRMCRTAFDIILLRFPHYKAYFRVARAFFDEKNFARSTDILFDKLFLTGRKQRCNNFLEVQWKMWMNPMYFCSFLSK

SEQ ID NO: 128714 - protein, 509 aa, Heterodera glycines
MRQSLMSDEPNAMTLLEQIATTETEISENQNAMERGDTDEQQPQNNESHNEQATIWDRQGVSMSQESEAAAGTTAMPETQDEISLRRSTRLFDDLDYFGNSNKQRQTQANDSRMDALTLMGFDEQELEEHQASVSNHRQSMQFMPDAINSPQQLSSVDELFVKLIDETSFETTKFPDVLYTFLAWVAFEQQPFVVLTLEQVEAYRDVYARWSSLFCLSNCSFTESDLAIHQLAAELGSHRALSILQAFYGRLLLQQKQKATAHASNGKTIPIRENAEENGNVTEYQFHRQTSVDDDGHAQQKLLLTSDNDALFRWVFHRIQAEQRQTRQTVAGNNNNNSRSPTVIGRNESINKNDDNHLGQPKDCSELSTIRRQLEVRYKWLIANLLPDELSLPNSEAFHFIHTYTQLTSALALMEPEWALLSHAEFDLSCLTVRNLKELLRKRVRQFQLQQIDYLIEAKRYEELKNVLLHQYDWTSDSEDAHIKQKLLMIQCIRETDNSLLDIGEWIS

SEQ ID NO: 128715 - protein, 272 aa, Heterodera glycines
MFPPILTNRTLNSTNSTPLNDDDGLQQHSHSLSPISQSVAVNVHTDSSLAASTVKEASNTQFKLFYTCPDCPRDQSPVRSECSDYVDDDWSSIEDGDNPRTSREAQEAEIEDKYRSALNFLQEGNIERAVSIFSALLVHPVMSKYHIADWSTFDWQKSMTAGDGTSSQRIVPNMAKLYFNINLAMSGLAKDPFQFYVQALSIRPDFKDLWFNCGQCAIRRRDWRSAAFCMTQCEDEFRALEALLLVHYFNNDYLSNLQFCEKKNWVKFIYIF

SEQ ID NO: 128716 - protein, 189 aa, Heterodera glycines
RLIEPVKSFRMISRLFYSVHNFKSYIDSKLAQTELARRSWPDGVGQTELARRSWPDGVGQTELARRSWPDGVGPFGVGSDGVGPKTELAQTELARRSWFRRSWPDGVGQTELAQTELAQTELAQTELARRSWPDGVGSDGVGPKTELARRSWLRRSWPKTELAQTELARRSWLRRSWPDGVGQTELAQT

SEQ ID NO: 128717 - protein, 81 aa, Heterodera glycines
FFAYQIFAINAHLFKKYSILLKCSVFCYILRIAVHLKASVIEQISQISRKVQAVAVKIVYIKTMAIRISALGPFSKLMCFY

SEQ ID NO: 128718 - protein, 51 aa, Heterodera glycines
MANWQMRERTKAGTMYKCRKLLLVKGKAHANANGNGNEQFDEPLKSKFDMI

SEQ ID NO: 128719 - protein, 295 aa, Heterodera glycines
VEKYILSLKFKFRLAICPSPLSQYEMYTLARFLFLSLSSVLALFGAAANAMLFVLFSSRAASNTPATLYPRVLALLDASICAGYILLFGADAAVIYLRIRPLFLLYHLYIVPAFVLSRICQLAIPYMLIFATLERLVWISSGKILIFATLERLVWISSGKISLLRRMYSVSLLRRMYSVKGRHITVVISSFLCAILRLPTYWCAILRLPTYWATTVHEYPQCDDFFRTKTAGPACDDFFRTKTAGPADWVMNSRFFYVYDFHLLSIAQTVFPFFVLVAFNLVCSRLFLFLSPLPF

SEQ ID NO: 128720 - protein, 348 aa, Heterodera glycines
MQNQPPKHPSLFSIDQILSAPSKKPRRGFLINELLGEVLQEGGSSSSSSSSKSAKDYVKKLDSTIEHVPRFQYSKVKSRFSIEDVPAANPEGLLAGIFQYCLDAAMEESRGRGIEPTHLGCMISSSLLTGGDIPIPVRQITDNTVNTILNQFTKVAQSKQQQNVTLWGEPFTVVVTTVDRTGLPGRRVLKGGARRSLAPVHHKVTETCLIKVQTSQRKNNLSENFVKICNPDGHCLFYALQATMVDKTCGWPRWRFYDYLHSRRGQQGCLRRDALQLMQQIGVQTGRNTYDAEICVPRVVDHWNNTQQQQRFAVFIFGSSGQYKPLYKYINDHYDTPIVPYLNNQHFD

SEQ ID NO: 128721 - protein, 297 aa, Heterodera glycines
MELDEESKHLCGINTHRGLFQCQRLPFGVKSAPSIFQHLMDQIVSGIPGAFAYLDDGIIASKTLDEHISSLYKLFKRIQEFGLKIQWEKCKFLQPELLFLGHVISAKGIRPDPGRSEAIRQMPPPHDLSTLRSFLGALNYYGRFIKSMREIREPLDQLLRKDVKWEWTDEQQTAFKKAKEIMLSDLLLTHFDPSLPIVVAADASKDGIGTTISHIFPDKSEKVIEHASCTLNDAQKNYSQIEKEALALVFAVQKFHRMLFGRKFTLLTDHKPLLAIFGSKKGIPIYAASRLQRWALI

SEQ ID NO: 128722 - protein, 21 aa, Heterodera glycines
MAISFFSWGFDRKLGTNICLL

SEQ ID NO: 128723 - protein, 19 aa, Heterodera glycines
TFAFSSLALPNTHTIFEML

SEQ ID NO: 128724 - protein, 19 aa, Heterodera glycines
TFAFSSLALPNTHTIFEML

SEQ ID NO: 128725 - protein, 19 aa, Heterodera glycines
TFAFSSLALPNTHTIFEML

SEQ ID NO: 128726 - protein, 19 aa, Heterodera glycines
TFSFSSLALPNTHTIFEML

SEQ ID NO: 128727 - protein, 19 aa, Heterodera glycines
TFAFSSLALPNTHTIFEML

SEQ ID NO: 128728 - protein, 74 aa, Heterodera glycines
MAKGMTMEMATEMAMEMATEMEKARGMATEMAKGMEMEMATEMEAYKAKESQANSDERITLTPVDFVDGEESYY

SEQ ID NO: 128729 - protein, 54 aa, Heterodera glycines
MGVEPRQKSQRMNQIRLMVLCLVKHWRQVAYLMKDGLLLIVVENIIDLTAARLQ

SEQ ID NO: 128730 - protein, 94 aa, Heterodera glycines
MDVYREMRAKEKCKGKTICLCEAKNFPQSYLKGVCCVVWGQECDCCKTDPEVLQQSTVLSRRMFLISFSILILSLGSASKVREFRNLVTFLLHD

SEQ ID NO: 128731 - protein, 232 aa, Heterodera glycines
NPMNKWRLDLCGSAGSRTCAAADQSLNPPGYNPGLSTTQQNESANRAEQQQQHLLSKRAWDLTTQQNESANRAEQQQQHLLSKRAWDLALQPVKSLPMNMFMMYMAGNTISFMMYMAGNTISIFPIMMVVMMAWRMVVMMAWRPMKTLMSVNAAFKPLEQEHVGSLWIHQEHVGSLWIHKIVFALGNLCAIALAVYKCHTMHTMGLLPNHASDWLDFVPPLERAQYALFNDI

SEQ ID NO: 128732 - protein, 758 aa, Heterodera glycines
ISIDPVPKVCHYFHFHSVWLIFVDFVLLLLVAFFILFLSKAKNDSKKNGKKGPQMDQMLVDETLNNSSLPDIGKNEAKFRANEAMVRDEQGQLSFSQRFVDGLTRQISPLFLLFAYFGCVLSFYPLAEMDESDLLSAQINCSLSALSNDRWKGNEHLENCRAIPRIPFWHYANSLAVVFHLALTLCVVSYYLTKLHKSKNDEKAKSGEEAEDDDNKNEFEMDTLENGEREERRRTNGPRTNPSSSDSNCRASVADSMYSNGYAAIDCMGWPMGTELMIHSLASTTNSILHNVGRNRRRKLSSLEGARGRHRSRVERGQLSSLRQNGPNDGPLGMHAATPSLYSESLSAEYELRNQQLLPVAAPTPPAPVIIVHHWHQYCPTDGVHSPQNCGSHQPNEGGGRTEFAMGKENEINGPEGNSGTNGMEEGTEKVKEEEEETTSEAHGLQVHRDNERNNPNTPFQFTEANLAKITVLLNNFPEGHKGAALIPVLDLAQRQHGWLPISAMHEVARVLGRPTFTLQLVNCFLEMPRMRVYEVATFYTMFNRDPVGKYFLQVCGTTPCMLRGAEAIIEAIEKKLGGQATFARAEERPFSRRAPRQTNDADGDTAGARLWASAGIVKIDVERLKRRNRLPSLFGTQTIKRISLKFLLKILMEAEADFDSGLLSTEVSHRRRSASVSEDYSVQKTNDDATECELITVFLKLGYYSDRFIPAFIHACNSEKPHHRDPEITRGYWARTNAITSMVVQFVQALSVPIVSD

SEQ ID NO: 128733 - protein, 62 aa, Heterodera glycines
MGFIIDDMNKCLYRKDLLMCLELSDEAKKTFQIVEKYREDVGTAYRNAYTQSDLGIGELVDK

SEQ ID NO: 128734 - protein, 25 aa, Heterodera glycines
MASKAFGVAFVWRQPNGGQMVLLRF

SEQ ID NO: 128735 - protein, 491 aa, Heterodera glycines
MPPLPSMRVKPANPFEFVGLDFAGPTPSRLSDGSLTKAYLVIITCFVTRAVYLEATTDLSAPSFINVLRRFFSRRGRPRRILSDNAPTFVQTSKALDILTGPSAETDPVTFAARRGIQWDFIPAYCPWMGACYERLIGLVKSCIKRTIGRRILDYDDLSAFLAEIEASVNSRPITWVSDQPDSAKPLTPKDLIQPGLLNDLDIVDSDLDYDDCLSGPERLAALWKAYREAADHFWLKWSHEYLLAIRERAAWTHKGPRLRTPATPHIGQVVIVETPEPAPDATVPIPSDQSPSDSKNVEMSVHEMPPVPSLSGEPTISKHSGMLTRRKSRLFAIPPTTTMTIATLVTLLWVQASPAQGIWPFDPDRPESPLTSNCVGNHVNCTRKGVKISSNPAVQKVTICCSNACFDRLAASEISYELSSDLLVNEYVCSATFGLSSTRSCTAEIACPAVNECELIDCSICIDRPANWRCNPRLSLVLLLVIGSLISCLI

SEQ ID NO: 128736 - protein, 388 aa, Heterodera glycines
ICSDLQHEDYSPLYAWFNYIVIIIMLPSLSAFGVITNVVNVFVYSRSRMRNSSNTYLLYLACSDFFVVITGLFIFWVDSARSYIPQLVQSPYTTVRSYIPQLVQSPYTTVYTLPFGYMAQSCSIYFTVAAAFDCYMAQSCSIYFTVAAAFDCYVCVCWRSNAKRHCTVKRAQRIVGCYVCVCWRSNAKRHCTVKRAQRIVGCIVLASVLYNSLRFPQFNLRHCIHEGSKEMIVEICPTEMIVEICPTTLFFNINTVYNVYLYMIVMTLLYLYMIVMTLLPFSWLLILNVLIIWCKSTLAQFPPLPKATPGSDETITMIMVVVLFLCCNTLALIVNLIETFFEPDALLLNLLSDASNFLVIFNSSVNCVIYLIFNSLIFNSDYREVFLF

SEQ ID NO: 128737 - protein, 46 aa, Heterodera glycines
RSSILPFPLQVYYSLFTSLLSVCLGKTSINGLMHRSRMFIFSPLPS

SEQ ID NO: 128738 - protein, 96 aa, Heterodera glycines
MKIAVGKEERRKRKRGKGKIRRKKEGEKEEEKDDNSIGEGGESEEKERKRKNSKKEGEKEEEKDENSSGEGGETEEKERKRKNSTEEGGGERGGKG

SEQ ID NO: 128739 - protein, 32 aa, Heterodera glycines; identical to SEQ ID NO: 126386

SEQ ID NO: 128740 - protein, 191 aa, Heterodera glycines
MSDHPDAALADLYVDLEVITFLQCLQRVLNLGTALQFTIHSKDVRCWALMSQRIWPLIAHAVTTLHDMKDVDFALLRRHVSPNVLFDCVKLRVITNTHMFPVQPPSSAVHINELLQPPATFNEKPKHQLLRWLHTPLPDGSPKILTIRKWRRAHWSTLTSSLRTYFEAPSAIAVNYVVACHRASRRNIEGR

SEQ ID NO: 128741 - protein, 178 aa, Heterodera glycines
MADSWQTETKDSDEGGDRTNSAHENESGNENWRLSAYQTQSTEEVPLPDDLSAIPVPTEQEMNPAWLKAQEALRSIGGRPDQHQQQHEQPQQFEGGSYEAAAALYGWPPTMGSSFNSYYHHQQQHMAYQDQQYQQPQQQQYRPQRPQYRQQFRPKLTGGGGAYNSNGRPVPLAQVSVP

SEQ ID NO: 128742 - protein, 474 aa, Heterodera glycines
MRVIRTPPLTRTRALNHGIVVDRDGNAHRTGNFEAFGNRPNSPLASNENESIANGNDVNDLERTANRRLIGVGMELSANDEQLEYEEMDADNEQNANGVVLQQNLRENVGNQVWGEQIGGVVEVGTVNANANDGPIFSTPHDSRDFGLLQRDLRLHFSENLSLIPDRNQRRDMNVMQNQQTGHSRNNFTAIERPQPNSYRMNQQLYENAPGNAERYRPLQGVRPVVAENQHHLVRQNPPPHAYAHNDDYYAQRFKAQNPQQAPQFQITTRISQSTPDWVFDGMMAQAIRSLDSFSYTMTLNSIPNLDGTSGSDAVNAFFKQFDVATEEWPEHKRLRALRSKCFGKAERAYNSAIAENPHEYQLIRRIIIRQLDDTDAKQLTSFDQLMRGIRRRPNESVDELGNRISGLVRRAYPGLTEQQYDDYSIMHFIRAISNPELAITLEMTRRPGATFDEFIAQAARAEATQSAARNSFR

SEQ ID NO: 128743 - protein, 397 aa, Heterodera glycines
MDVKKFGNPLYTIDEETYLQFFKENLLLILDSARKNAEISRAETKNRYDLRPNVSMNKFAVRDRCMVIYPGSKSKTQHKKLHWNHFGPYEIVKTLESSASVVPVDKKSAEPITVPIERLVRVPIGVPDISTLPHGKNPYRNILATILLASLKLSKLDTKGIFGQFEPLLQTQFGENSLKSSEKIVVNQLGTTDNLGERKMQQRQQKENDGLSWTMKCEGETHEFCGKILCGELDPVLDAKTEPGNVEIGTPLQALLSLFILRSGATVSSSAAKNLVQLILGTEPGMELVVYEGVRKDNVRAGIFPNHEDVERVWILWCEKCAVAKKLLQSSGFDQIRVEKRCKNSTENSELLQVVVPEAVSKLPDTERDGWGSLLEETGWTLEKVRAQVIHRCRIFV

SEQ ID NO: 128744 - protein, 411 aa, Heterodera glycines
MSELPNLCTHPKTPFGVPKRLHSDQGKEFVNETLNGISAILGIEKTTTAGYDPQANGAVERANQTLINMLKKSTSSHWSWDERLPFVMFSYNTTPSEVTGYSPFHLMFGKIADFPGEMDVKKFGNPLYTIDEETYLQFFKENLLLILDSARKNAEISRAETKNRYDLRPNVSMNKFAVGDRCMVIYPGSKSKTQHKKLHWNHFGPYEIVKTLESSASVVPVDKKSAEPITVPIERLVRVPIGVPDISTLPHGKNPYRNILAAILLASLKLSKLDTKGIFGQFEPLLQTQFGENSLKSSEKIVVNQLGTTDNLGERKMQQRQQKENVGRSSPAMKCEGETHEFCGKILCGEVGPVLDAKTEPGNVEIGTPLQALLSLFILRSGATVSSSAAKNLVQLILGTEPGMNWVVYEG

SEQ ID NO: 128745 - protein, 79 aa, Heterodera glycines
MSVRKCRSANVALRLFGILNTFKNNLQMLQMLFKRLRRDQNIIKINEDKIIDQIFKKTRHESLILLYHPARAGLTTRQA

SEQ ID NO: 128746 - protein, 288 aa, Heterodera glycines
SMMLQDYLSRGLIRPSKSPWASPIVLVPKRDGSLRFCVDYRGINSVTVKDAYPLPNIDYILLALGGKKYFSTLDFLSGYWQIKMDEKSIEKTAFVTEFGLHEFTVLPFGLCNAVATYQRFMSRLFEDLINDFVFVYLDDILVASETFEQHLKHLKIVFERIQDAELKLKIEKCRFSAEELPFLGHVLTRQGLKMNADKIRPVIELPIPTTKKQLHSFLGFMTYYRKFIYGFGEIAAPLFHLLKKNTPFVMGEKEKLVVDKLKEKLLQDVVRAMTKWTESGGAGQKEDE

SEQ ID NO: 128747 - protein, 88 aa, Heterodera glycines
MPNCLAVVLLPPSNVNGIYKGTRALTYEVDTVGPYHISSLMITKNTRLNLYLARNIRAIMLMILIGLVIIAFVTFCLLLSFISFRGIF

SEQ ID NO: 128748 - protein, 157 aa, Heterodera glycines
MFKSSGKMVFWQRYTSNFLRDIALDSPVERLYGAHRGRQNGQFGRSKPSMAGPLNGHLLAFSDARVPIEDGIELGKCYWGEEAQEPGTIWPHLAKVPSVVAVDSLSGPARLSFVDVEKVLIEMRKRYPKHLVFLGTCVLEYAEVSQWDFLCGEMEMF

SEQ ID NO: 128749 - protein, 31 aa, Heterodera glycines
MESLINIQLIDPSVANLTQLKPEANMKKCGI

SEQ ID NO: 128750 - protein, 129 aa, Heterodera glycines
MPKKTPGEHFARLEMLTELLRPQEPNAQRMVEELDGGADELGGDNDSIDCFAQQSLPEDGPTTSSSAATALFGYGFGWQRHGVLGRLLADIGQGELPIDLEDPDGTPIDDRLECLHAFDADHFRPEHYL

SEQ ID NO: 128751 - protein, 158 aa, Heterodera glycines
DQMSFFMIRCGAWPFLVRGAICLVYSDNERDSSLLNSWLIASGHNFLEGFSVFSRTKLSNNRSVMPLDVRGCTRATLAKSACLPSPKGVGKPVKICRDWDRTLQLLSVNEEFLVGASHQLALNTSLPFVHTARRCPGLSHFEKFGDGCSGRSVCRLEP

SEQ ID NO: 128752 - protein, 53 aa, Heterodera glycines
MIQQQVHLQLPCYDFCPVQATAIKSVPVCIPTEAGTLTVPEFLEMAQSRAATG

SEQ ID NO: 128753 - protein, 51 aa, Heterodera glycines
AGPGILGKTGTGTCRDLRSRDRDLDFCSGPGTGTNREFLKIQKNSKNKKNS

SEQ ID NO: 128754 - protein, 228 aa, Heterodera glycines
LIFSLRLVIFNSISQQLRGVSSNASAFQQVSSTSLLSVTKKTPEQLRAESEECYKRLDLTFQNAEEAFKSKTNSELVRAQLVFAFCQNNWIVQNNMSLMRLARKMLGKRAFNALMRSTFYGHFVAGEDIGEVSKTATRLQRFGVKCILDYSVESDISEEEAKEKAVEGLDEEETQPLPPVAVNAELVDQTHKQFTVHKEFGDRREHVVSARTYFYENENVNFCDFFTF

SEQ ID NO: 128755 - protein, 152 aa, Heterodera glycines
RKIILMKPDQKSAKNTATAEDQQQINRFARLHKAYSAAKEKLISLDNDVNNLNDASDEILLMDDEAAADSIPFLVGSVFVHFDQDTVNGRLELLKVSTQAEMDALRSQVGTMERELGELRAVLYAKFGDNIHLETEEDEESGDATRRNGRYV

SEQ ID NO: 128756 - protein, 15 aa, Heterodera glycines
MPPCPPCMPTFCPPP

SEQ ID NO: 128757 - protein, 385 aa, Heterodera glycines
MNAALEQLFQAAGMDSSALMMGLGSMATAPPPKPAAPSSSLQQHHQQHHSQQKSIVTSAAANMRHHHSSAAGATATASSSVVSAGGSSTTGAVSAVGTTPTKTVLTKVETAKTISLPLVTSMTDGITTQLKQQQHRATESPARKLGMSSIGGAGKGLKLNAVLEKLNASSSSSSTAPPATTNSSVATTPTIPTVTVPLPPTTPTIATVPPLPSSSTTVADVVVDTVPSSSTTTTEKQAEAAAADIVESAAPAVVQQQQTDQKDDDNDRTTTEPEEPKQQQQQVETVVAANVEADQQQQEQKAAIAVPPETVTAPKSGTECDGDDHEHDNDDGGGKHGQEEEEEDKQSSSSKLVMADDNDDDDEEEEEKEKKNNSADDGEKKNDGK

SEQ ID NO: 128758 - protein, 84 aa, Heterodera glycines
STGYREAIPEGFGLPINLGASVRGDCPENKKIDFFKCPFGVLKQLWGAKIQRRITVQAIGKLFRKDSVSHKSRRIGSGGLPRNK

SEQ ID NO: 128759 - protein, 193 aa, Heterodera glycines
FHEAGHAIVAHFSDHSNPLHKVTIIPRGTSLGHTSQLPDKDRHQETKAQLLAQLDVTMGGRVAEELVAERMVKLFGMSDRAGLRDFTVEPIESEQGFCVERGPSTSETIDREIENLLQQSHERVKELLTKRKKEHHLLAEALLEHETLSKNDIEKLLKGEKVMKPPPTPPKGQKHKGRTLAIGKKAKDEGGRA

SEQ ID NO: 128760 - protein, 52 aa, Heterodera glycines
NAQKNNVTPSGSEPAPSPLKMMPQNPQSHRDSEVLTMSKVKSDHVFVISVIK

SEQ ID NO: 128761 - protein, 45 aa, Heterodera glycines
RLGYSEAIPEGFGLPINLGASVQGDCPENPKKNFLDKNYLNELTR

SEQ ID NO: 128762 - protein, 43 aa, Heterodera glycines
MEKACNIWRDFIDFSALGKLCSDWPPFNGSMSVKMQWEKSKSK

SEQ ID NO: 128763 - protein, 195 aa, Heterodera glycines
MWCHWMANGKGLLIQRWAVFANYQREPYIPFMEKACRLCGSAVTMLFFIFLIIATLFDLIVYRMFVIRVFYASTFSMPFSRLLIQCFPIGFDDGALKIPATKKQKCERICKEQRQTIKCINPNIKLRLYEQLDFFVISRNTIGSPADAQLRRCYSLRLQPVQQQSLPTIRCRKVQQQTVLKCFRKMSDDKFLLWF

SEQ ID NO: 128764 - protein, 275 aa, Heterodera glycines
MSIFYYYHLIIFMAIIHGQMAAPIVAESYSSAKQQRTEFNYQQKLQSTHPPTMNNHFNNTAFVRSPIIRRPSFANDPPIISSIDARPMTIASKEWKQALFGRGGLLTEIFNFVNDKRKEDLAKKQAAPNLNGKPESLGEMFGSNKAQKGGTSRVEIGENVRKNFREGTCWFLRKMNGFLPRRLMTQKRQPSHSPGKSWDFHTIPNPNNKCGGADFYLKFQQFVLTPVFERTHEKKRTQPSTTVTVQQQLRNTKNKIGQSHGTTTAKSTQQVKLGR

SEQ ID NO: 128765 - protein, 141 aa, Heterodera glycines
MARQFDQHHGSKSVEFLPKDPVLLLNFNRGKRFWLNGTIIERLEKSPTYRVHVPALGRNVHRHANQLRRRYPLEEDGNDTIRIPPQAQEEQDRDPSPIREPPPQPPPIRRTQAKRRSPSPPLAPRRSQRQRKAPIRFSPNP

SEQ ID NO: 128766 - protein, 189 aa, Heterodera glycines
MDNEKSREKAAVVIPHNSRNSFTKKVSAPEGSADSGIGGFSSGENSGGSGPNEGNYHRLWIKEDFEEQLGKETHRQIETTASDHWPKERGETDQTQRVDRIETSQKGRGPTVETFQGERAETDQTQRGKKVESDQARRGHGIDTDHRGMGQRVETDQDERAEIDQGERPEIDQGKRAETDQDERAGTDQ

SEQ ID NO: 128767 - protein, 121 aa, Heterodera glycines
MVFLIIFGQGFQIQASPIKNVGMPKNCETFFFALVNDRDLVYAILASNSDYLRFLCDYLSLIQCEGGVVQLVSEEEMANNVSAGVEMGSIFEFATSPKMEKLKLIIYQNRFFYEENDEKAL

SEQ ID NO: 128768 - protein, 183 aa, Heterodera glycines
MKATSAMLKLMFSFLFIIMMDFTTEQKILMGECQKDFFATVHRLQEMAPAFFAGTQTQMKNGKFLEKAFDTLCCITIKAKKDAMKRDELAEIIGEFEANQRNFCQQLKKGQNIWEALESSAGNAIVTAARNVKVNPQTYEEGFRKLTKLKIVSPENQTAIGTFVKHCIAALKIFREFITGIVN

SEQ ID NO: 128769 - protein, 107 aa, Heterodera glycines
MNCTATAKTIGMRAGVEVQLGKPHNHDPSPTRCEAAKINRSVRNTALSSRGNMPRTVVNECLAGASNEVIASLPLILSMEKAVSRVRHAAGGQFQIPKTLADIEIPA

SEQ ID NO: 128770 - protein, 47 aa, Heterodera glycines
MYLQNLTISGKLGDSQRINLFWPQFTALNTYTNDINSDSALGLSSLD

SEQ ID NO: 128771 - protein, 768 aa, Heterodera glycines
MSFKRVNSFQPTVPLAKKWDFRSIGNNFAEEMENYKLMDYQSTTCEKFGFTKNITEFRVNPDVERPDEAMKDAIDNMIKVALKTTEEKMKRKVRMFGVAITGAGLAFPVWVPYRAYPQNNADVIMEEINKLGQSGDGDENKKMLLLSEPVTMKITCVTMPSGEGPRNVHKFDFGFKEHQRIGITNADKFCLFYALVASKLYLEVHRNIFNRFMKNIVRQRDSAIELLHNCGIDINEYSYGVEQLPNVQKYWDEIYPRKYRVVAFEKSADPRKSICVLWKAPMGREKVVPIFLENGHWDGLKNYVSFFNRGRKFCIDCECFFDKDVKHTFECRARCYYCNKVGGVPCQKESGVKIECPKCHRYFYNWECYNYHHGHQTCKLWRRCVICDKTYLFNPKKEHECGETYCQLCSVSHDPKRGCYIMPIEEKEEKDVYRIVVWDSETSQDTIYKGDQKEHVINYISVRVTCTECCDDKNRTNCKICGEERIKDWSEAEGHEPTKDFVEWILTAFTNYDTYIFAHNAGRFDGHFVFNYLCRTGKNPLPLINGLKIYEFKVQNSKKHSKLIWRDSCLLMPVKLESLKATFNLDCEDKPFFPYYYNKKENYGIRLEHLPPMEDYSPGSMNKDKFIKFEKWYNENKETPFYLDEELKNYCRNDTEILLLSIIEFRRILINDITKGFDPLPRSCTNAGVAMNIFKAMFLLTEQLSIVPEKGYERCDRASVMAIKYLEWRSKQDGIEIRHAGNGREVKVGKYKLDGFIANNGARDKYIE

SEQ ID NO: 128772 - protein, 43 aa, Heterodera glycines
PPIGLGLCGKMSPGGNIKGLRPSHRHGFVRETPVRNRALSGSY

SEQ ID NO: 128773 - protein, 451 aa, Heterodera glycines
MLAKSVEISVKKARTDQRHEPRRQETIGRNTEAIGSDRRKNGNGKQPEIILLDDDDEMEDKQKIVINLDDDDDDEEMVDQQAKTNDQTPRATEDGNAMAIVPFNFGDDLLEVLNTDPTFWDEELFPPIQQNEKTQKETDGPSNANIKNDNNDKEVIDIEDDDETANQTDKNDNSYNQLMIMGNSEAPIPINSMPSKQSEKTDSKSKQKKDAKTVPKKDAKTVPKSGENQIGKMDALKLIRQQNANAAQAKRTSKTNSNGRENVNVLMPKADEIKGMPSNSKSTPKSAAQVEKANHNQQQSAKRPQTERESSVMPSSSTGQNANAVSKASEVHALKMCVGHSSNAVQQQMLIEDVVGTVCTESIRAFGQNAIDFGFMANEVFKLTFKAKNGEKLANEINASKGKFSVTKLIKDMGEKLKYCRLLGRILDEIFEENAKFSAKILEELPRKGGK

SEQ ID NO: 128774 - protein, 28 aa, Heterodera glycines
MHKMHRISTPVIQPNPSFSGCELADEPN

SEQ ID NO: 128775 - protein, 75 aa, Heterodera glycines
MSWIAGQAGLSRDFFLNFKLRKQKIQTINISRSLGPEFGGSIGLILYIANTVNATMNCVEPPEAIVRNAAYIPYG

SEQ ID NO: 128776 - protein, 114 aa, Heterodera glycines
MSNAEKPSQRVYPHPAVSQPPQDNDKEQQQSEQQQKEEQKQQQPNEREKSADQRETKAANDRKMMHQPGLKLDQYRKQLAAMKTKGAAPTRDWSPQETLLLLEGLEMFKDDWNQ

SEQ ID NO: 128777 - protein, 22 aa, Heterodera glycines
MSGSEFNGVSMQLLNPAALYFY

SEQ ID NO: 128778 - protein, 143 aa, Heterodera glycines
MWGTLILVKLNRFQKQITDALAPFTVTMHYQPTNNSMNHYQRTNPIERVCRQQAADGHLVVKTRLQSSHGHEMRRQVQLERLQRWTSSTSSISSATTTTAASNSTATVTPMDVVKIRLQSQDAFVKIVRIEGLRSLWSGLSPT

SEQ ID NO: 128779 - protein, 698 aa, Heterodera glycines
GAGRGGLAATGDGSDGAGKGAGRGGLAAAGEGSDGSLVLSAGSGGEGKGAQRGGLAAAGEGKGAERGGLAAAGSGKGAPACTSMSRDPHAEVKGVSWCVACTTHDTNFSSRRGAGRGGLATAGEGSDGSLWLSAGSGGSGKGAERGGLAAAGEGSDGSLGLSAGSGGSRKGAGRGGLAAAGDGSDGAGKGAERGGLAAAGSGKGAERGGLAAAGEGSDGSLGLSAGSGGSRKGVHRGGLAAAGSGKGAGRGGLAAAGEGSDGSLWLSAGSGGSGKGAGRIGLAAAGDGSDGAGKGAERGGLAAAGEGSDGSLGLSAGSGRSRKGAGRGGLAAAGEGKGAERGGLAAAGSGKGAPACTQRASVKGAGRGGLAAAGEGSDGSLWLSAGSGSGKGAERGGLAAAGEGSDGSLGLSAGSGGSRKGAGRGGLAAAGDGSDGAGKGAERGGLAAAGSGKGAGRGGLAAAGEGSDGSLVLSAGSGGEGKGVHRGGLAAAGEGKGAERGGLAAAGEGSDGSLGLSAGSGGSRKGAGRGGLAAAGEGKGAERGGLAAAGSGKGAPACTQYGAGRGGLAAAGSGKGAGRGGLAAAGEGSDGSLGLSAGSGGSGKGAGRIGLAAAGDGSDGAGKGAERGGLAAAGDGSGGAGKGAERGGGGGRGCCAFGRDGRSGRSGGRSSGQRRSSGQRPMGESSTGRPVLNTGTRR

SEQ ID NO: 128780 - protein, 1087 aa, Heterodera glycines
MQQLTFPPPNDPGRFRPAKFVPAPATATGFVGPARRLARPRSPTPTGVRVAASPVRSYRPKDILAPPNLPKDIDLGIFKKPIAGRDWSEDCATCAAFMGAMSEHIDTCALARLRHLIKEMKKFAAGAKDNLAHSRGVGIALQVPKPWPVAEEDGWTGVTIPGCEEKSPVAEPAIAELRKPKKQKLPKVVPDKRQPWLCNNDGRPIPGLAPVAKQLPVAPLRKLPTDMPRPKNVYHTIVKGKAVASIKLLELSKIDKPRVPIGYAPIARAEKPALQNRPVLNAVPKPVLREPSEEMFVVVGQLTKPLPSKPRAVVASAPGIPNKLRFEAPRLSEEPNWRLFVGTGSRRNNITTTPNAPKLPILQKTYAEAARTPKEATKKPLSATARSFTLGDFFISKGVRGASKADRCALTTAEAAPKRQRGGGRESSRSATPTGNEEQHAFLLDCFQRSPTQKEEAFKALKKQFKKTVSPRTYGRWWQNFCDGKLTLSQRGRTSERSQSVRESVSPAQSVQLEEQHQVPQELEAAGNPTYDSELIRTQTSSATNEEQHAFLLDYFQRSPAQKQEAFQALKQRFKNVVSPQTYGRWWSNFLKGQLTLRQRGNTPSSKQSRSSRGQFGKSRKCVFCTIPLNDADGYAMLNCGHSCHFDQPFAECQICGVQNAAPLPAVPKPRGIVGGRPLKNAKAASPTESIPSTVDTTTAAASDVSANESQALTDSHLMPPPSLAPRRSTRISRQASIASNRPSAVAPKPIAPVTHCCGTIQSAHFGYGCGSKKANHLPSYYNSLRDQAQHNCPHCNALLLASEAVGPTAYSKCCAKGRVNLADRYKALRARPAELDNILQNPAGQYKGWRDSLFRHVLRYNNNLAFGNINITRSEERIDLHRIVKCNNMINYMLWDFNPPDGGKPHLHGQLFTIPPADARTRLGEISREHSLDEQLMAALYGVLLANHKLAVVYETAAETYRQLPEEDRMQFRMLLVDTNKRGTERRLDAKDAPAPDNLHVDDRANLRHIHPGRLETETDAGSRLVAQIFLDCGANVMPPSVYDVVLTGRATTKIVHMKWWNRNIDPANFPLIFSFGQFGYGRVFL

SEQ ID NO: 128781 - protein, 234 aa, Heterodera glycines
EFVKENGINHLFSAPYNPMSNGQAERFVDTFKRACRKLKKEGAKNVVNTFLTSYRTTPNDSLPNGKSPAELFILRKPCTTLDLLRAKPSPPLIRDEAMEKQFNRRYGAKPRKSCLGDKVFARHRQSQSWRAGIVSQCQGVIYEVKFPNGTSNRFYANQMTARHMDHQGNDELNIFNDAFGLPLAQLDGPNEAALPAVQQAAPAQETDEAITERSPVCVGRPHRNRRPPLRYTPS

SEQ ID NO: 128782 - protein, 288 aa, Heterodera glycines
MRFLRQPLDELLKQDVAWVWSSECQNAFDKIIEVLKSDQLLTHYDPEKDIIVSADASDYGIGAVISHRFQDGSLKAIAHASCSLSPAEMNYSQIEKEGLALVFAVQKFHKYLFGRHFVLPTDHKPLLTIFGNKGIKAYTANRLQRWALILLAYDFEIEYQNTSDFGQADALSRLIAKAPVPEDEFIVVTITESANLATVNAFTAQFPIVHEDIVNATKSHNLLQEINGFILNQWPNKANICQRTFYNSIEGEKRCHSKTDASCTPTGLSSQHRLRRKCLKCYIVDTRA

SEQ ID NO: 128783 - protein, 520 aa, Heterodera glycines
MNALQLGGISVNALNQPSRLVEAPVDVNGKPIDFVFDPGAEITVIDEEAHLQIERPRLIQCSESAKYHDVTECTLLGKGFATFTFGGRTHQGQFYVTKKGSLNLLGIDILDAFGLLDTFRAKAKMAMKVNVVQAERKDRMKKGLGHCTKAKAHLELKADAVAVYCRPRPVPFNTRLIVEAELDRLLAQKVINPIDHTRWAAPIVVVKKANEAACVCADFSMGLNNALLLNQHPLPLPEDIFTKLNGGKIFSQIDLKDAYLQVELDEKSKELCTIATHRGFPIFSLTIWGKISARNFPIDHGFNFGRLSIRRIGNFGFLIKPDKCSFNQKQIKYLGFVIDKNGRRPDPSKIKAISEMLVPTNVSELRSFLGMINHYQQFVKNMQFLRQPLDELLKQDVAWVWSTDCQNAFNKVIEVLKSDQLLTHYDPEKDIIVSADASDYGIGAVISHRFPDGSLKAIAHASCSLSPAEMNYSKIEKEGLAIVFAVQKFHKYLFGRQFVLQTDNKPLMTIFVTKRASKRG

SEQ ID NO: 128784 - protein, 214 aa, Heterodera glycines
MAANPTIDELTKLLAKQQKLVEQLLNAQQTNVAPTQTAQLPALSNMECFDLDDHSGKNIESWIDRFVLALDCSSPNIQDQLKVKLVLTKLSEGAYNEYSKFCLPKKPTDLDFLETSAQLKCLFAKPQSVWIDRYECDDEDFRAFVNRHKRLLRDFEFKKLNEEQFNCLMLLIALKSPRDAELRKRIFGKLTTDGDKANVRQCRQRFADVPVDNC

SEQ ID NO: 128785 - protein, 98 aa, Heterodera glycines
MSYSYSATPKSLKQIRFPAFYELFRLLDNSWVFTLLDNSWLGQFVAWTKRGLDNSWLGQFVAWTLYSGLEFMKTHSDPKTALFYFNLYGLLDSDYQDI

SEQ ID NO: 128786 - protein, 75 aa, Heterodera glycines; identical to SEQ ID NO: 124542

SEQ ID NO: 128787 - protein, 194 aa, Heterodera glycines
MKRYKCDLKRYKSDLKRYKSDKRGTKVIRRGTKVIRRGTTEIRRGTNLMKRYKCDLKRYNSDKRSIKVIRRGKKVIRRGTMVIRRGTKVIRRGTMVIRRGTKVIIRGTPVIRRGTMVIRRGTKVIIRGTTVIRRGTMVIRRGTKVIIRGTTVIRRGTMVIRRGTKVIIRGTAVIRRGATVIRSGTTVIRREFLE

SEQ ID NO: 128788 - protein, 228 aa, Heterodera glycines
CTSSHHCSTSSDHCLPLLITVVPLLITVAPLLITAVPLIITFVPLLITIVPLLITVVPLIITFVPLLITIVPLLITVVPLIITFVPLLITIVPLLITGVPLIITFVPLLITIVPLLITFVPLLITIVPLLITFLPLLITFILLLSLLYLFKSHLYLFIKFVPLLISVVPLLITFVPLLITFVPLLSLLYLFKSLLYLFKSHLYLFIKCVPLLITFAIPNCFGSKLHNP

SEQ ID NO: 128789 - protein, 164 aa, Heterodera glycines
IHILFNFMTTQNSDEEIGAEALQNGQNNGGGGEEAGATAVNDGETIAGEVEGNKVKELKAKEGEEEKAVDNGDESVEDDRAFGTKTPPASQLRQTPPLSASIRAPTVRKRCSAVFGARTSHTSTSGGGGGGLSALTSAMLGKKPRKQSVLDNAQSGWRSFVQEE

SEQ ID NO: 128790 - protein, 485 aa, Heterodera glycines
MLQTHHNWEYAYGQSTNLKYALKYPFKGASFSYLRCANENKTNVDEPAYYARMLYRSPVEAFSRIMSFRYAIMSHNVIPLSIHLPGQQKIYTRPGLEAQQIAEMLQNGQLQLPDTALTAYWKHWRADPTLKNILFENMPEKFSFNKKNKIWKPRIISKDPKRMANRRPCIGRIYPILPRAQELFALYLLTRHFPGDPDHLKKVGEHQCETFLESARLRGLIKDSDVWIRTLQEGANSLTPAQMRQLLASILIFGNTENCVLDGSMLWNRFLTHMYDSRCSETEKARRIDQALSLLERLLVRLGKQCSDFGLPTPLNSIVNDPDRGVNDFFFPENIADDEQDESVDTSAFEHAKLNDEQQHFFNRIRDVAATMPSNSSKRLFFLSGDGGTGKTFLLNYVLYHMRRLRKKVIATASTGMASTRFYSGGTTVHSAFRFGINVEVGQLPTIPFDSYFGRRITEADIIIIDEITMLEKVVLENIDKLCRT

SEQ ID NO: 128791 - protein, 120 aa, Heterodera glycines
MPTLQAEQHPPPLSPQTNNVQQQQPTVPSPLNERQQSVQPTQGEHPQIRANAILQPNVVQAQQQQQQSHQFLALDHDNDDQLLNQIFLDLTTTAEMEPIALDNSNNNNMVVNDFWFCLFV

SEQ ID NO: 128792 - protein, 2013 aa, Heterodera glycines
MGIAVYQKATTNYAKAECNLIFAKSLVKPLKLVNHDATIPKLELQALTLGVKAVKFIQTQLQFDDDQVIFWTDSIDYFGPLKVKRGTEIVKIYVALFTCLVIRAVHLEIAEDYSAEAFVRTFRRFVSRRGLPMLIMTDQGTNFVAGSKVIQQHWTDTLLPEHVQQQMAQQGVTWRFNTAHAPWKGGTWERLVGITKNALRRTIGKNLLPLDEMHTLICEIETIVNHRPLTFESDQEPYVSLRPINFLIPYNQTETNFPVINEDHQDPDYEPTSNSRNHLVTMLRKTSNMLDRFWTTWRNDYLLSLRESDRTKSATGPLYPKEGDIVIVGDDDLPRSLWCLARVLKILRGQDGKIRTAIIEINGQQKARAINPLYSLEIPEITESDSELIAPLMASEDVLSLVGSDEEPQMPDNFKIPKKKNVIKRSQRFITGRNHGLREVTQSAKDNDPVEGLLYAKRPDNKLKLFKDGTLKVLLESITLFKREDGKKMADGLLELYGKIPMPEWDKRLRECEEKLRKMDETREKKDKERQKQRTEKRRIEEEKQMETKKRKAAKEELIDRSDPAVERKKHDEHRIRWAAQRKAAVDELRQRIKLRKKQWSVVDIEKEMKETEKDDEEHLRELAKSGSKEAARAMEAKPSLRQQNNVQLIKKQQRMSDFYPTDGEKVLAYCERRYGTNLMASWRRNRVQTELKELLENERITLQHVNGQPALLHRITEHKKGLCGEFVIGKICSWQYLDEIEFKVAADPEEEQLAMKEKSPTPEVVVIDEDDPEREASIEPQFITERAGHTPPLLFRHPSPEPQQFMKHRAAHTPPPPPVQLQPAQLPTEAPIEADIVEEYHAAKSKEEKYVDFNIFTECDDTHISCARNATYGRIAEAANREKIEEFANCRARTLFDTIMLNWLNCNLNRPGNEIWTIHEQHTQSFDSSEESAKFFYEQQIVKSQRDIGRDKHLKEAIEIWRSSCDNFREITDQSAWTQLKFKPIKSADQQTTEFDKWIERINQRSCEITARDRAKKQFPDHIYFNVRTILIGDNTAEAFQHHFPNSRWYTHFPDQRLRLTTGPQVKNVIFTYEATEEDMIKQLAPLLHRFKDDDIEVTLILSKEDNAEWLWHKRELIRLTKHLDTGFFVFNKRIGEAKELANRIKMTMDEPMQLNDEPTTSPAIETRGRKPTRKRITVGQRMINALMFISLFILLASSTAFANPIRQKRFGGVGVWHGSNLAKHLWPRNTDIEQRTSKLAPSVQRYIQRVLALNATATPPAKQFATTTAPPTTRKPNTTTTRATPTTKATPRTTITGRTWHTTVQPTTQIVPKTTTQRPITTRSKFLPSSNLLDNEIPQAPDYYLALRKKGKKTNNVQSAPQLARSAQRKGDPINKNGMDVFWCGDRGSTLWELKGSENSPFCRPPPVLTAHWTPLTIDLYTKIHRPDQVHSAWHCAVKRTTEQYYTNLLGDRFITINKTMMAVSRTLCKQMALHQICPLAKTEMTISGNNTWSTNDELEVNFPGPIEGLFKGLQRSTSTNCFAQPATLFIRRHNLQLTSPIHHVDHCAYTTEFCQLSDNSSLIWNANCSDNNCHACDFNHAEEISGEFTKIPGQTSAIWISDDRQKALTFTDTQPLEACDGKLIVLSEQNFGIRKEQYERIMNGYYKRAKRYVEPEQLASQLSAAQISTNMALSQLYLKECQRNFRVANPTLQARKLLNRENLQARWIGETTIEVFPCINVSLTNISYRATKDCYKFIPVRIHLPNADRDAFLDAEMRILSFTSHIASCSHLRYHYLQLQKNPNAWLKIDTNTGIAKQLPPTAVQELYETVINRSDSDFDLNPLIFHQWQLDNDTDNAMFPHIDEFADLEVFKDKLEQHKSGRAQALGALQDGIEGWTLKLVKDWLNELVNWWIRIACAYATFLMIRDLIIPCALAYLLNPIRITFMSLIGFRPKRQPIRQRRDQFEEIVPLHRLSTPPKRPSLRQRADRPFTPIHLDLDAKSATFRSRASSVTLDTPFGRSRPMKLADD

SEQ ID NO: 128793 - protein, 68 aa, Heterodera glycines
MFLLQNSVNKMLFSAEKLQIRTDFPRGFEKQYAILGQIMRNALHVDSEKRTFDGNGQLLKLAANLISH

SEQ ID NO: 128794 - protein, 143 aa, Heterodera glycines
MGVDQGGYLTTESTQYKLVTTVIEAAISLGMYVIVDWHVSATYTTQAVAFFTKIAKAYGSYPHILYETYNEPLALSWTSDLVPYHKKVIAAIRKYDTKNVIILGTPNWSQVKINNNCIQFIVKRTFERTWTLPLPIQLVATRI

SEQ ID NO: 128795 - protein, 76 aa, Heterodera glycines
  unsure (1)..(76): unsure at all Xaa locations
EQLRXQCQMYVEVTSAQTMLSFSGTTMNNWKTILLGTLGESTRTIISSHFDGAEERRLRQFATNTNKEQKINWIII

SEQ ID NO: 128796 - protein, 212 aa, Heterodera glycines
MADDDLEDKYVALKAKVQDLEDRLANRVPNYLPPGVKIPKYDASGDFFKFLKEFNVLATASNWHPPDCVRFLPLFLEGEAKEIYQNISADKKTNWRTLTSEIAELTKKLDGPMWARKMLNKTKMGINGSVTEFANKIRELVEQASPDPNYTVEARESESVHYFLNGLPTKLKRKLFFMEKPDSLIEAIAQAKKVIQVNEEIEKDEKGDEMKQ

SEQ ID NO: 128797 - protein, 190 aa, Heterodera glycines
MTFLTISMFLCSFFGTISGQYQLCSDRVPTTPIWLPNVTECSVPEYQKADERKVTLFLPVQIPKQFPVYNCYQKMMKICTGNFLFFWKDIKSQDSYVKGVSHRACQGFKDNMGHTMKRLTENLWTTERPSKVEYAWIGERCETTVNDFIEKGQGGILDFYLVTSFGHNFNPYNGWEEGQKWTFIWEIPEP

SEQ ID NO: 128798 - protein, 152 aa, Heterodera glycines
MVIIETDHAAFTEKAKRRRREEMANDLIEMAKDSEEKALAEEMAHSLRNYEPDESIFGAPRAQYGKWASAVRLLVPKTGQTLCQYELPEGEAAFCIELVQFRSQSDSTFVLVGCAVGLELRPKRSHGGCVYTFLLTANGTRFEFIHRTATSA

SEQ ID NO: 128799 - protein, 124 aa, Heterodera glycines
MGPIPSGRVERPIDEANEWKTDGTLRNAKSVPILRLFVPKNGSPNHHNHLTLLLIQTEHLVIDGIISVKSGTEEGQWMRRHFGGRKEGKAEGGGGTEAEEKHGKGKGIEKEQPSFIIYKEKATD

SEQ ID NO: 128800 - protein, 149 aa, Heterodera glycines
FAFSMLFLRFRPSPSLRFSLFPPSKMPPHPLSLLRATFYTYYPIDDQMFGLDEEQRQLRQLVFRLAQRELAPFASEIDRQDQFTMLREFWRLLGQNGLLGVTVPAEFGGSERNYFDHCIVMEELSRASGAIGLSYGVHSNVCIDQIRRH

SEQ ID NO: 128801 - protein, 132 aa, Heterodera glycines
KMNARKTADGSHFVLNGTKFWITNAQDADVLVVFAKTNSAKAKHGITAFIVEKEEFTGFWPAQKLDKLGMRGSNTGELVFENCQVPAENVLGENVLGKEDCGVYILMSGLDSERLIFAAAPLGRKICASFVV

SEQ ID NO: 128802 - protein, 192 aa, Heterodera glycines
PSTSNKRPKIAHPQQNAELLEQIYFLLRRKEKFVKIYMRHWIVIDNDAKAFFSVVKEFLDEMPTEIKNLYKNEIENLKIKIDEELAKHKYLNKKEKNKKKLNKIQQKTAAACGGKVEKIELEKTEMDKMEEALNQDDKTFFKYHCQLISRSSDHLKFVLEKLSNSDDFEPISSIKMNIGMQIDQTYSEAFIK

SEQ ID NO: 128803 - protein, 47 aa, Heterodera glycines
MAFLEAFAHFPNYEFIWKVELSDEDAKVFAKYKNVNPVKWMDQKSLL

SEQ ID NO: 128804 - protein, 226 aa, Heterodera glycines
MNKRLPNELIWEIVAAIPIMYIFGGVAKKPGATRPPSGITVVNRAFEIFRSKRHFYFLKIIDLARNFERLCALRKLPCGELFIQFGFIQFGFENELEDAKCFADFLVYLYYGRSGPTVTTRVVTYSAPIKIGELFGAILTHVLGSANPLTMKKRTAGGYLLRQHFPRLLQLSATEMASGGIGQLVRSDGMEMYRLMNPHHKGDVGQLIIIETSQHPGSYYFNFSIE

SEQ ID NO: 128805 - protein, 337 aa, Heterodera glycines
VEPLLREAKKVNNQMSRKDVVEYLATQRTYTIHRQAKRRYKQLPTLASGLHTEWQADLSVFDKLSRENHGYKYLLICIDTLSRQLFVEPEKSKKSSDMVAAFERFFKRSKYKNVKNFFMYTSPRIHAGMAERANRTIKERLYRYFTERGTQKWVDVIQQIVHGINHSYNSSIKMRPVDVNFENAEKLRKKLKQNAIGGTAEAAAAKRKQPQPRFKVGDRVRIEKYKHVFQKGYTGRFTNEVFTVAEVHTDRFPVTYRIRDDDGSLIKGRFYANDLCRVLVRKNDDDDDDDDDTLYDIEKVVRKRKKQGVEYVLVKWKGYSQRHNSWIPASSMTWKNI

SEQ ID NO: 128806 - protein, 102 aa, Heterodera glycines
MLALFVIYVYLTASFTHISLAKIRTESQIKESEFDAFFVADEIKLINSHRNSAIAAQLKTAKAGFQRTINLIDTMLGEWYVLHCMSAYFSYWPEFRVGSIVL

SEQ ID NO: 128807 - protein, 39 aa, Heterodera glycines
FLRLFPSSSSSTLSATNEQSQIAPSQQLLFSAYRNLGLL

SEQ ID NO: 128808 - protein, 45 aa, Heterodera glycines
MTFRKWKREMLATKYYKKHNTNEDKLQKMKQYLKLKKEIQKLMIK

SEQ ID NO: 128809 - protein, 105 aa, Heterodera glycines
MWRKIAGYCVVVVVAFGAGIGVWYLRKMMRKREEEEEQEDEAPPGDEAPPGDEAPPPPEDEEDAENDGGQVEEEEDDGGPDQQQQQPKKKALAEFITQQTTGGAN

SEQ ID NO: 128810 - protein, 67 aa, Heterodera glycines
QMVRQSSFYYMIVGNLIVIAVFADRALTRRYFGKKMEPMALPSWNAFVKTELKEGRELTMPISDDGN

SEQ ID NO: 128811 - protein, 159 aa, Heterodera glycines
MLISKDVLVIQGHFLFPRKRVKFQGRPWHPRTNGSPAIRYFQIFKFSHFMSYSSRKVVTLFILSQGAFFIDVFIGYKLLQKHESARHWLYSNCPNILLAYYNTRDHYSDKGQLPGTEQRKEDVKRWKLAAAIENEGQQKEQHQKTRKGKSADSTKGEAQ

SEQ ID NO: 128812 - protein, 173 aa, Heterodera glycines
MPTNWPPHGIDDSEQLQHLRTDANNVYFAKILEFDDEEEEEDSTGRAVGRTTPQGARVTAYIEHIPRGEQAKPMQPQNGAVDHPHFGEEEEAKKDKQLLDDSSAAEDDDYFEDDDENDDLYTDESTEGQHDIRHRISNKSPGSARPIATNEASRGLADLSSKTRERQKNKYKQ

SEQ ID NO: 128813 - protein, 119 aa, Heterodera glycines
MNSVLEGIYNGVPMVCVPFFGDQFYNAESLARQNIGLVVDREQDKKAVQQQLTVALAKALGQNELLDDKLNKEFNHPEDKIDLVKLEKVTYEFRHKDIAKTLSDVMKVIDEELKEERAA

SEQ ID NO: 128814 - protein, 44 aa, Heterodera glycines
MTNLGESARIFSDWLNDAKAHLEVRLLVELLFAHAQATRIRTTY

SEQ ID NO: 128815 - protein, 63 aa, Heterodera glycines
MGNANYCQDEQNDFFVALFGWSLKFAELAIFAKFGILRQMALTNKGPGLIFVANRYLIKLGNH

SEQ ID NO: 128816 - protein, 49 aa, Heterodera glycines
MAVAKLYAILARQKSSSDYDGEDGQLMDDIDYEKVATNPMIDAAAKQFM

SEQ ID NO: 128817 - protein, 39 aa, Heterodera glycines
MTKPNADLLGVTQNTRRGLLDDGLYSADIQSLIPWKRGL

SEQ ID NO: 128818 - protein, 148 aa, Heterodera glycines
MAEKQAIGLMKKMEANRNVQLSENAKNITKLKEIIEKNKNSSNFKKLTKDQLKNIVYLKFGEMAKQMKGHGIPYNKQRSKRAVDSSPADQLMLDVDLVTTCILLIAYTMVMFYLIHFHRTDQLFFHIIFLVFCDNFIANCLLFQAKPW

SEQ ID NO: 128819 - protein, 96 aa, Heterodera glycines
FWSCHSPFYCLIKIARNPSNYLHPFPNLFLISPTLRGPQMAPFGQSVPCLFLIKCAHSLLISAISPFFSSSNCPNLFWSIVFWLFLLISVTPPHLY

SEQ ID NO: 128820 - protein, 106 aa, Heterodera glycines
MALEEDEDLQRMIDQGPGEQRQQPKQRDGQQQQEGERQGKGVTRRKTADEVVKSKHNFKTKLPQVLRKKRNKKIEKAVGLERELEELKRRRRYDQKPEGREKILET

SEQ ID NO: 128821 - protein, 52 aa, Heterodera glycines
EKVHFACGEQDQRLENEGEAISRGEEEEDEEEVEGGQSSDSSYVKVIAFADG

SEQ ID NO: 128822 - protein, 30 aa, Heterodera glycines
SCALYESNQLKILGFYTITLFMFEQTLSFW

SEQ ID NO: 128823 - protein, 19 aa, Heterodera glycines
SGLGEARLCTRSRSRRRSP

SEQ ID NO: 128824 - protein, 136 aa, Heterodera glycines
MAPAFFAVTQTQMKNGKFLEKAFDTLCCITIKAEKDVMKRDELAEIIGEFEANQRNFCQELKKGQNIWEALESSAGNAIVTAARNVKVNPQTYEGFRKLTKLKIVSPENQTAIGTFVKHCIAALKIFREFITGIVN

SEQ ID NO: 128825 - protein, 686 aa, Heterodera glycines
MPSPKDISSLRSFLGMVNHYQQFVKNMRFTRKPLDDMLKDDIEWKWTEERQKAFQKLKEVLTSELLLTHYDPKFDIIMAADASELGIGAVISHKFPNGQSKAIAHASRSLTPAEKNYSQIEKEGLALIFAVQKFHKMIYGRHFTLQTDHKPLINIFGSKKGIRQCSANRLLRWSLTLLAYDFDIEYVNTNEFGQADALSRLIAKEFECDDERVIAACNIDEDLGTVLDMAKQILPIKFENLVSESKKDKTMQIVMKFVRDGWPDERKLTPQSEEIELFGRRKADLTILKDCLMYGERIVIPEKFRTKILTLLHKGHPGIKRMKQLARQYVFWPKLDQRIEEFVKNCAPCQLAAKAPTKTDLHSWPKSTRPWQRIHADYAGPFFGKEFLIVVDSYSKYPEVFEMATKSAAATIERLRYLFTRHGIPETLVTDNGTQFAASEFAKFTEANGIAHLFSAPYNPMSNGQAERFVDTFNRAFRKIKGEGVPNKEIINTFLVTYRTTPNDSLPDEKTPAEMLLGRKPRTTIDLLMPPLPQPTERDTKMEHHFNRRFGARPQKFVSNKPVWARHRLSQNWRAGTICDCSGVIYTVKFPDGSTNRFHANQLRNRENTENGHEPLAILNEAFHLPITAPNVGIVGQDLEPRPDPINDGHQDEIEPEQAPRSPTPPQQAPRRSGRNRRAPDRYSPG

SEQ ID NO: 128826 - protein, 103 aa, Heterodera glycines
MATVLSKDLLNKWSCSVCTFDNWPTAPKCTICGRLRSGGSANESEVRQIQQQKQQKAQQLNIGRTGRQRSFALSANGRKQQQHKDDADDEQHHHHKHSDQDDE

SEQ ID NO: 128827 - protein, 46 aa, Heterodera glycines; identical to SEQ ID NO: 127617

SEQ ID NO: 128828 - protein, 58 aa, Heterodera glycines
MTTKFRTPKQLDMHGGNANLADITHGISADSNFNFMVGHNHWRQMVILHNRKWFAQVE

SEQ ID NO: 128829 - protein, 265 aa, Heterodera glycines
MSNDAFIAFCKTEIREKRETPKIEPKRKERPVKQKVQLKSEINKKENVLKTKEQNATVSVLPKSTVKLVKDSQQKMSNPIKILPQSTQSTVITTSKPQVKLSTTVMPVTTSTTPKPITVQRVITSTSYPNVNYDGHFETISVKRPQNERIYQAKGREFKNFGSRSESTTTKKPITVTKVGTNIPKNLTVSKPVKIHKIERPVGVNCDTNKNLTITQKPKNGVKKSHPRAGVQKNCYHNHNHFNGKAHGNKYFCHYDFYKSHAKCE

SEQ ID NO: 128830 - protein, 136 aa, Heterodera glycines
MPAFLRSVLFLCPSFFPLFLPSNGQKPNKIQQIGTPCTNYYDGKTDYGCDEKSEKLRIFVVADAGGKEDENKKHSPTKGQQSVAKLMAELAEKEGLNLMLNLGDNFYENGVTKDTVNELFKTVGLASAECREKGVP

SEQ ID NO: 128831 - protein, 282 aa, Heterodera glycines
SSSNQYCTSSNHYCIFYHFCTSLNHICTSSNHCSSSFNHCCASFNHYCTSFNHSCTSFNHSCTSFNHCCTSSHCCTSSHHCCTSSHHCCASSNHCSSSFNHCCTSPNHCCMFLHCCTSSIYFCTSFNHRCTSSHHCCASSNQASCTSSNHSCTSSNHCSSSSVVCSYHCCTSSIYFCTSFNHRCTSSNHRCTSSDQCCTSSNHFCTSSNRCCTSSNHCCTTSNRCCTSSNTSSNRCCTSSNHCCTSSSCCNHSSNRCCTSSNRCCTSSNHCCTTSNHCCTSS

SEQ ID NO: 128832 - protein, 244 aa, Heterodera glycines
MARILKLQRGRDGETRSTLILLNGKGKWRATNQLFPMEVQSEIPETQLIAFIMDIDMDSVSLPGSEDEASERSAPKFKIPKKRRAFLRPIGQQHSPLQGPRRKKMELGDSGLRKLFAAISEEQGGSKATTNAITESRQMEKAPEHVRKEHDKEMARRQREKVQRIPTEEIRQKLAALPHITVSSENAETQRKERKENEVRRKNNQQSTSEGWKQLAKQLDYDLMDEPDEPALERRKATEEQSVK

SEQ ID NO: 128833 - protein, 60 aa, Heterodera glycines
MSNFLNHTLSSSSTILSAAAAGANETTERFRLALFSLTTDDEEDDEEEGKNGRRSAAGIA

SEQ ID NO: 128834 - protein, 86 aa, Heterodera glycines
MSTTEFEIILTPNLSVFMPKLTLYLPKFNDLGWQWLRFRMEATPQLDERGQRTTEEEKAFCTHTLASSRDLLLNNVIDKSGTKDRK

SEQ ID NO: 128835 - protein, 58 aa, Heterodera glycines
MIDKTVDAAAKTVDAAAKSAAKTVDAAAKSAVKSVDAAAKTVDAAAKTVDAAAEDKVN

SEQ ID NO: 128836 - protein, 256 aa, Heterodera glycines
MRSAAAKRAAAGAKGGADESDEQRRLEKIMEEDDDEEDEDEEEENMESLSEDDDEEEEEDEESDEDEEEDEDVSEVGMITAEDDDDEAQHIRVRTQQQQVQPEDEDFMRDFDRLMVESLQSAPATLHGPMSDLAVPPLVRQKFERKLKFADPTEPTTATPIDRPASPAGVLTPSHGVSSVVRQQQHHQETPRMALMLRASAAKGGGSGGAMAKAGGVQLKVTLAMNERISADEEAERRRQIQQKLFTYQQQSPTGG

SEQ ID NO: 128837 - protein, 84 aa, Heterodera glycines
FCFKVVTKILRLHYCLMRKKNILFYPEIRSMFSDEDEEEDEDVSEVGMITAEDDDDEAQHIRVRTQQQQVQPEDEDFMRDFDRL

SEQ ID NO: 128838 - protein, 85 aa, Heterodera glycines
MSVIMQVMHDKSSNIEDARQKVDYETREAWSEHIEVLDEFPEDVENLVDDVLNTWRKGEHFPKGLAEAHERVAEVEQFYKAKVRC

SEQ ID NO: 128839 - protein, 43 aa, Heterodera glycines
MSTLMTHPDNCRMGIWGGLAQWKEILSGMRGKDNTKVEMEIRE

SEQ ID NO: 128840 - protein, 92 aa, Heterodera glycines
MHSNFNVQCLANCFDCLAFLLKLTFQTVPFCAGARMASSSSGQVEHGTGKAQIVRTLVLISDLHFRNILMGFWFTWHCIATDQKDNREDGEQ

SEQ ID NO: 128841 - protein, 250 aa, Heterodera glycines
MSSLLLSIFSIVFLVCCNAMPNFPCFPCCPGSQQVVSVMSKYIGTFSAAGEESTVCSMTKSTVDGLKSDLSSRGGCPSGGEAQIVDEIDRQLRNIAKMEITYEDECPYNLGFARAMFDLAAAAAGHAGTGTEWHSLKSQFEQESQTIKAISQALNIEVTVHFGHPSKGNSAHQNVPSPSHVITNPGNSAHQNVPSPSHVITNPGQQSSVPWKGRRTVVIRFRLLRKKKGINKENSYRKHFVDYMKNIYLF

SEQ ID NO: 128842 - protein, 48 aa, Heterodera glycines
MINRGNDTDEWAVQKGDERGIVAEVFVSNFRNEVKVNNDSIKDHLNYF

SEQ ID NO: 128843 - protein, 241 aa, Heterodera glycines
MRTEDQQLFFAGGEGAAAAEESGGTKNDGGGRETDEDEESDSSDHNHHDQQGQRRGKKKRQRKQQRREAAAARRLEEEEREQQRQDGEEQAQREEETGDGDERARCVAAEEKENNNSGNNSCGGREGECYEIAVATEEAESGNITVKKEAETAKKRKKGKRTDEQQRKTAAAAGGHEEQQSKGPVHCECTRCGAEFESKTKLHAHLRDSGHATLKTVADKIGAAAADSATDSGGRRRRKKK

SEQ ID NO: 128844 - protein, 139 aa, Heterodera glycines
MQMSSTSACEQKSFPVDQKNKTTGTKRTRTIETITVAEETDKNEEKVDNSFDKKKRKSAKQRVPTNPTKLAPSTAENGTEEKGKQKRNQKQGQVEFDYEMRRVLPPQNLEVTVKNASRLPEGSHFCEQSANFQCEPSHS

SEQ ID NO: 128845 - protein, 190 aa, Heterodera glycines
MRRWSAAPSSPVGPPQSGSISNSLATRSFVIGCTMTRDGVRRKGKAANLRWRTTLAQGIQKTIGSLNGTKSTSSAFDRLEKTKRDWLMALHCHRYSGDGWAYEAPLPDWATTEIEADSDPQQGEEEENAMNGDGTDNQQKQRRSSSTTTTPATTKTTAGEETVPKSVAPPTAMTEEEDEELVPKNAQNAL

SEQ ID NO: 128846 - protein, 141 aa, Heterodera glycines
MIQRTEKGTAILLEASKKEAERAWKEVSVLVEEADDYSKSARGALNRAIKSREKAPYAPGVREWFVKMSDCIWEIYTVLDKINAESERVETMWLALPLRLPQENTIDVLLEQPIFSNFFPLDDTVIFEIIIVSLNVKNDDN

SEQ ID NO: 128847 - protein, 102 aa, Heterodera glycines
MAPFLWSIPLLAIVCFLSVGITAPNSDNEQPNDGATTAVEQKHIENEEKEVQIGNHLDKKEVEKGKEEEEEDDDCKKKKYKKKKGEEDKKKKDKKREKRRRR

SEQ ID NO: 128848 - protein, 78 aa, Heterodera glycines
MSSNSATTTTSTDNGISLVEADERGAEGGEGDDQLTINSLSSSLSSSTATTDTEGEMIQDIQFEGFFGPKMIIFSFPI

SEQ ID NO: 128849 - protein, 276 aa, Heterodera glycines
MAVWRCVIVGSAVSIKTLNEVIETSFLINGNDDQLFDEQTNAELIRCHEYFLKTSILDTLDMILSNFVELILLIGFTNVHNFLKKNFKKKPNVFWNSLKESIDNISFETRIVPEIMCQTVTGTQDNRSSCASSSKSSRPMFDDSDGGGAHGLKLFQSCLFHHDQYDRWERLYNEEQRREFLEIEEEQIWREMPKRKKIMAQAERVGAALLYTMIHMEMSKLFESKQVKSESSSWSAKSARAMSQLREKLKRVEKPAVSRRANSVFSSRKQPELDGP

SEQ ID NO: 128850 - protein, 79 aa, Heterodera glycines
MNKGTVEKCIGRVGGVHQDGATTDGVERWTAKMITQLKAACQGVVDACCESNSASAEAFAFLTNHVMTLNSMVLGGMPE

SEQ ID NO: 128851 - protein, 21 aa, Heterodera glycines
MEESNGQIMMISSQVIDIGLF

SEQ ID NO: 128852 - protein, 182 aa, Heterodera glycines
MTALHFAVSRRNLQITRLLLCLGADPNVANAHGDTPRHLAAKLNEVDLLKSLIICDARRCPLTKVGCVSGCVNEKQLHELKRTSTSSMQSSATGNTTSTSSTASSSSSSSSTTSAVASATAAAAAATAPPAQPATSSQPAAGASTTAPKPASYTSVTVEDFENRAFDKEHFRFNKLLDIQHN

SEQ ID NO: 128853 - protein, 90 aa, Heterodera glycines
MFEYPKRTLEKIDFFVFGAVPPNRCAQIYGETESFGNSFPIVCTLILRWIFAPHKCLSTPNGHLKKSIFLFSGQSPRTDAPRFMGRSNPS

SEQ ID NO: 128854 - protein, 53 aa, Heterodera glycines
MPQTATMRAIVIIGLVSRHVVGTAAALCQWWSYALSTEDKHVVAEKTQISVSN

SEQ ID NO: 128855 - protein, 40 aa, Heterodera glycines
MQWMAFNLQEIRLAICGSKTPLGRFAAETCSETHQMLIKS

SEQ ID NO: 128856 - protein, 43 aa, Heterodera glycines
CFAVPRPGRQWIALNLQEIRLAISGCKKLLGNELFFEVSQTPY

SEQ ID NO: 128857 - protein, 45 aa, Heterodera glycines; identical to SEQ ID NO: 124814

SEQ ID NO: 128858 - protein, 88 aa, Heterodera glycines; identical to SEQ ID NO: 124691

SEQ ID NO: 128859 - protein, 193 aa, Heterodera glycines
MKEKRIQQEKNRFMRKDVKAVARAEAKRAKEKTKTAQTEEQDKCETRKDWEERRMKTHAERMEWLKKAPTAQRERNSTQSDPRRHSISPIRTEEGEVEIVAEIRGERPMPNQFGKRKRPNYSISPDRRWKQGRERSRSPVSQFPRNRRRLPYSISPIRRPHQEEVQLVEPAPSVEIIRTVAVKPRMKSPTDAA

SEQ ID NO: 128860 - protein, 109 aa, Heterodera glycines
MHHALNERLAALPDETLVYCGHEYTVANLRFARTMEPSNEAIHQKLDWAQGQREADRWTVPSTIGEEKRHNVFMRVHCSAEVQQRCGTGTDPVAAMGRLRELKNAFKEK

SEQ ID NO: 128861 - protein, 116 aa, Heterodera glycines
MKVFKLKSFVTIGFATKEVPLDGSIGQILNSYGYRSDGSFGCNGINRPCKMPMSLFGSSFSPVAMQSADVEMAYKSSEFSTGDVVGCGIFLDTRLIFLTKNGQRMGGPIKMKKQIN

SEQ ID NO: 128862 - protein, 60 aa, Heterodera glycines
ALVTSSGDHSPPAVVSAKVAKEVPNSQQQNGWDAKVCHKDIEIIGEKQLTINCKGNRFGI

SEQ ID NO: 128863 - protein, 288 aa, Heterodera glycines
TKKSLTFIIVPFPFLSQANPKFGNYSTKNICVVLFQIHSKLINCLQYNPTVPMCYYPPNKGYTIQSNVPGNLKLKSSNTLNNPYSRPNLDIEVQYQKMGDGIYVRIGTEDRYELRNPSNFEQVISSNSLSFELGNANEPFSFKIQRNDSNKRIWDTSIGGLVFGDGLVFGDQFIQIATFLSSDRLYGLGENMHHELKHDFSIYKTWSAFSRDQGNEYYVPGSYNGYGVHPFYVGVHPFYVGLEPSGKAHGVLILNSNAQEYVTGPGPHFVYRTIGGHLELFFPGPNGG

SEQ ID NO: 128864 - protein, 40 aa, Heterodera glycines
FALILTYYIEKTAILINFTSTFETFFPLFSPLFREFFAPI

SEQ ID NO: 128865 - protein, 36 aa, Heterodera glycines
MFCANLWCRCFCFCCAAFLAISDHMPSLQLNMRDHY

SEQ ID NO: 128866 - protein, 88 aa, Heterodera glycines
MFGIMCRPVLFMVCACFVLFFVHITQPELFMPNHAPTDENEIPNIGKAEPDAIGRFGHEHPRNSDTETEKPAHGFDIGPEFSPVLAFE

SEQ ID NO: 128867 - protein, 146 aa, Heterodera glycines
KSTLADRFLQLTNVISTESDAQYLDKLEVERERGITIKAQTCSMFHKDFMLNLVFEVKRSLITCDGAILLVAANEGIQAQTLFNFHSAFENNLSIIPVINKIDMKANIAKVEEELQQSFGFHAVEIFKVSAKTGRNVPKLLEAIIQ

SEQ ID NO: 128868 - protein, 301 aa, Heterodera glycines
ASGVVGENVVHMLRDAFKRRGDVDIDVVALLNDTTGTMLACSFIEQHCYVGVIVGTGCNAAYMERLENVPKLKGIVNSAEDGLPAEMCVNTEWGGFGDDGALDQFLTIYDQQLDQQSLNPGRQRFEKTISGMYMGEIVRLALEDLARRGLLFSGDFTRISERGCISTKMVSDIEGFMHSTDGNPFAKVGEMLRAIGISNSSAADCANVAYVSSLIGTRAAHLCACGLAAILNRMQRPRVTIGVDGSVFRFHPTFKFNLDQKIKALLAVKCEFFMVLSEDGSGRGAAVAAAVALRMNRLVGA

SEQ ID NO: 128869 - protein, 18 aa, Heterodera glycines
NLVLQYPNEAHIDELKGI

SEQ ID NO: 128870 - protein, 46 aa, Heterodera glycines
LNDIGLYHDSAPHRSMWELKPEYRNYSKQLAKNVEQKMQQQQQKDG

SEQ ID NO: 128871 - protein, 146 aa, Heterodera glycines
MFSLFRGAYGEMTRKEEYFVALFGLDGAGKTAYVERLKAHFDRHYRCRNLAKLSSTVGLNHVRVPLAGAVLNVWDLGGVRVPLAGAVLNVWDLGGQAELRPLWHSYLAECHALIFVVDSSDVQRLPEVCSALGGGTEKAKKWGGGG

SEQ ID NO: 128872 - protein, 30 aa, Heterodera glycines
MTVVIGNAMCYWLVGIITVFLAVNDVTMVY

SEQ ID NO: 128873 - protein, 256 aa, Heterodera glycines
MPSKEKVGTKRDGRIDLLILLKAIEYLRHILDNSFRIRRLDLNIQVSTELVVNDILDVLNGHAKVQLEELFVRRRYVGSKFSGLVPLIRSNAKTLKQIGKIGLGEAIKALSDEIHLERLSLINFDLVEQDQRLDSEELAQNSRFYIRRLAGIGTTFDHLSYTCFTGFEITKMPALNMLRQCKVCHSKSTFAVTAILLMPFAGQKSSSDDAKRRGHQRPGTPSPAVADDAANSIGRRNGRVVGETVVAVSRPGGARN

SEQ ID NO: 128874 - protein, 203 aa, Heterodera glycines
YICEQLDGTVSQPDRQKAIQNFQRPDSDVFAFLLTTKAGGLGLNLTAADTAIFLDWDFNPQNDKQAAARCHRIGQDKPVKIIRLVAKHTVEELIKQRAAKKLKLSENVLGTDEKEGPSLMFDLSKLLLEGLTDLEKEQKKHTQFHILTDKQLEERLGRTDQNGHWQIKDEQIEDEAEGRTLYMFEGYDYSEQRAAAEKAGIAL

SEQ ID NO: 128875 - protein, 215 aa, Heterodera glycines
MQKPFTRHKTTGENPALNIYIYWRGNQNSFRGRQFGGYVQRNPNFIPLGQNRTWNGNFGNNTGRFENFRPQRGNFGNFRGNSRGRGSERQKYKINAISDEAAQPSVSNSRRSLTPTMTFLTISMILCSFFGTISGQYQLCSDRVPTTPIWLPNVTECSVPEYQKADERKVTLFLAVRMPKQFPVYNCYQKMMKICTGNFLFFWKDIKSQDSYVKG

SEQ ID NO: 128876 - protein, 1237 aa, Heterodera glycines
LMPKNQKSKRFSKKSSSASAALSSPPALLDISALPNPVYEDISSPEGSVITGAVVANTIVSTIEPNLDNAVLTTLSPEDVDRIFADDPGMAEEVGRTDRVSEIGPQIKSMLDNSAFGPSVMNETRALGTNESTFEEIAVSSGALETMGAMISVLSVQGEEERLIERAIEVIEETQKMKGSFGQMIMKEMENEGEKGEEEANRDLGPSVMDVVEIERSQGVNYVLEVDQDGIEVFKEKNPLGKRRRNLSEDENGKDMENEGDDGGSGRKMVICQITDKMAIAIRFGGKMKGPDIIGIPESFELGVQLRLGDIVFVTSYAPIERFPDWLSNAFKINAEAEAMTVSSVLQNSLEKCIGIVMSMVRENKDVPRAVDVAFPESQVLQRLYQHQLDSTIDLAKIKPGVLINVTFVRIHRPSDIAIGPKGIYITPADFEGVSERELVVHQPCIGTGISGFVNGYEFPFSTSTDLKLCEHGIAAAVSGALLKAKAEMEEFTIHTALFVLESGKDNIVVTFEHFVQEKRKFVNLTKIWEIDAAVTAKLKGAKKPCAVGRILDVHKCVVQEMFVLQAKVLLMFQLARKYDAEGDFERLAEGHEASITPSESFQALELRVERFYGHMFSCMSSGSDGTSRIWKILLAQNNVENEDTSSEVLARIERHPALRKLEGGQIRTAELMLDNVPRVVAQQAPPGSGKTYTLAAIVAALMSNPKNKILCLAPLNVAVVKMCEELVGALQTEGCDEVPLALFSGNGKGKYRDYLDKIAGNLLESVVTSEDFWKKLEQKEKREVHRYLRDVRKRPRIAKEALIAEYVLNLDRRRVLCCTLGFAEQIGRLICERNIVVLDEAGQGPFVQVCSTLSALCEIKKVLVTGDRYQLAVNMQSVPEPVRVGFGFDTVLINLDKAKAVDRTTLLTNYRSHWQIVACVEHMAYKPHGERLQPGPGSFRMLIDFWKMPVAESPLLLIHQESLMEPELTSFSATNSGQTRTVLDLLALLDGFPGSIRIISFYAGQAAQIGTELKEQGFSRSIVSATADAMQGHEADITIVTTTVTKQQQFSNWQRANFSKDRKSEFWGDAQRVNVALSRGKHGLIVIGDFLELGGSPIWSRFLNKAIEFTVVTSPSVVKSIKSPSSSYVRGLLVDDSGESVQNYRFHADWLAPGRSSSTAAVLSRNGRPLNNLNRPNNLNFQNSPINQSRDISNPPLPSRHVQREFSRTRAEIRCWRCNQPGHVSTRCTNPPARQN

SEQ ID NO: 128877 - protein, 355 aa, Heterodera glycines
MTAFLAKLRIDASIVPLKNEKSEVDPSFNIDFSKSVAEGKDLDSLKKLVEEFSDIFSKSQYDLGSFTGGEHHFVTTTGTPISSAPRRMPYKYSDELKKHISKLLAAGVMIESDTPWVTPFVVVQKKDGGIRPCLDFRKLNDVMVPDRYPLPRLDAIMEKIGNCNFYSSLDLSSGYFQIKLSDESSWKCGVITEDCVYQMLYMPFGLKNATAAFSRAMTTVLLGLEDCALSYVDDVVVELNGVHATIISCISPNQPPKKVHVNQIKKCFELMGPPCTSPKTPNDEQIVPEKLAVDDEEEVQSNEPSEADNSNQESSESTVTNRQNVTNQTVADISGDKRYSLRNRLAITKPKRFTE

SEQ ID NO: 128878 - protein, 596 aa, Heterodera glycines
MDDGMNISVIDKNFWAGKTSVRVPDMERAQVELKNFEEAVNRCLRNINRRACANTKALNDMANQVNSNLSVLQTQLNSLTDINPTARNSLAFTTPRERSTSRNPQHGTSNNSSNSSEDGDEPELGALNTLTGVSGQLEVFGDESVVAFDQWSERFSDYVGALGRNWTEDEKVARLKMSLVGTPRQLFKQLSQNETAKLDTAITALRRKMDSPQRRELTKRTLAQCKQRENETISEFIKRLTPLVEIVNSSLNDSQRKEKICEEFLDRIRSDIGFLIRLVGLNSAKDLDQVKAQAEELEALLAAEKGTISDTLRGTVMALNNQRQVHTDQRPDQSPPHRFSRANTTPLGNRHSSRGYSNGRGRGGYRNRTPSRNRWSSYHQQMQSQRRWSNRPVCHYCGRTGHIASFCRTRQEEMAHRFSRPNHNFRNNGARFDDQRRTNSSQEQLRNVTVLDSDALIRAIANLSVNESRPSGVTVKNEGAGTLKTLAVVETPKKTEEPKSDPNPVPGTSSDSLVPIRIRSWEGIAPKISKFSKFTMIMVMLLTMVIPNMCQINLAIPMPKGPMMCQTQLVGHLWALPSFLPVQPSGLTLLRHQSEV

SEQ ID NO: 128879 - protein, 16 aa, Heterodera glycines
MGKRGKKNRKMRGGMV

SEQ ID NO: 128880 - protein, 905 aa, Heterodera glycines
MHREVRELMHMQLHRCSDSWCGPRDPNFGRCKKGFPAPYSKCTILHPDRPALYYRPSPTDGGAQIEVNGLIYDNSQVVPYNPYILLRYRVHHNVLFAYGNKANIKYALKYPFKGPGHCYVECKEESGSKIGIDEPAQYAKMNFRGATEAFAVVHSMPFAKLSHQVVHLSIHLPNQQPVVYRAFQQVSKAEEIQRGELPETPCSAYWKQWQNEWQHVPSLKDMLFEKVPEQFRWAKDRWLPYKRKPAKRPPIGRVVPVPPTDRERFALYALMRHFPGDPDHLKLVNGQQYNTFTEAALQHGLLEDDQIWHKTLGEAALHRWPDQMRWLFVSILVFGQPSNAIELWDKYKDQMYNPQGITSAAIRQARELQALADIDWRLHYFNLSCVHCGLPDPPNSKAKNTNLAVEEFFFGDDGLNMPPGQPNQRPQQNTPPPLNNDQQKVFDAVVRAIQSDPKDQTVPRRFFIFGDGGTGKTFLFGQIIKRLRKPPYTYKVLATASTGCAAILLPYGKTAHSTFRLGREVSLDKLPSIPLESFFARRIREAQLIIIDEITMLHNTVIEVIDRVCKEMAIPQHKDLLFGGKTVIFSGDFKQSLPVVPHEGLTAQITACFQTSPLFCQFTTMKLTINQRLGQGQQAYLQMCRQIGLGETGEHFWIPPQFLVKSREELIDFVYPDFQRLLGNDKELLNRLILAPHIDTCDEINEIMMANVPGQVREYLSSDKPLDERPLDIDEIELEVAALNRRTDSGMPPHRLRLKVGSVVVLLINKSDKEGLINGTRIVLEELGDDRLVGRVINSNAVGGQVKFFIERTRNVYEDKTPGGLKYERLQFPIKPAFAMTILKGQGQTISTVGIDLERDVFSHGQLYTAFSRATDWNNVRVYAPRRETDAQDRVKVLNIVATKMLNLQ

SEQ ID NO: 128881 - protein, 483 aa, Heterodera glycines
MPSKQKNQRKKKQERYRGQMELSVSPDRSPVPDGSADENGVASHPGNTTPNIGALQLSTPVSSIGSKRRSIHPKTGAEPFMASQHSASSADIQSTSATQNDESSPRNKKGKIDNFDRPMSALEAIALTPVSTQMNRGGRPSKKRGGHAGSGRSKANDSMSESSSMDLSSEATTSVALLPNVPEKINFSTVAINFATSRNMACKIRRWADVGLYERDGETSQGPRSGPRFIETCWNDLTQFLNDAFVVEYLAYLASISQRKVVVVDPVVWQMGIDRVMQYKKMTFGYDPNVPAEVILLPVHFPGHWTLIIHDVQFGTHFADSLPTPYGRLDPQLTDKIRKIISDILPSTVLTGIFNAVNLTVQHDGNSCGYFVCLYAESWLMNNRTFVLPDLSINYEKRRILWHINELYGTDNVPYHPREGVPTPCPIVYRHADEVQSTSKAAEPMKIDEHDDIMIIEPQTSGQAVNTVLTQAQVAGENQVDTL

SEQ ID NO: 128882 - protein, 325 aa, Heterodera glycines
RTSAGEMPAHLLDEAVARQISASAVFPLINAHLSNDSVLDVSQNDSVLDVSQHMPFFQILLELCAALASVPALLPKIVLPQDAHGKSIAKQLIPQFRNNLNNYPTLMSGISEADLSFMDFIRKVNDYSEVIIRLAVIIRLARQFERQIPAEKRVKTSHSHRYFTRIGADRVRRLRNASATYREVLRELQMSTYRLLNDAGKLVHGFSFKRELRSVLLNDAGKLVHGFSFKRELRSVNPFSSSNKDRTKRIAKELASMHNSLPLNASNAIFVCMDETRCDILKVLVTGPDDTPYVLVTGPDDTPYENGLFEFDVFFPSNYPQQPPK

SEQ ID NO: 128883 - protein, 58 aa, Heterodera glycines
MRWRPDTEYMVGLANYQGMSMVKMNFFLDWVVGDKNFIGQGPAPPPIPFSSPSFNVAC

SEQ ID NO: 128884 - protein, 55 aa, Heterodera glycines
MDLILATDWMNNAYPEMEQDKANMSPKEDPSWISLIDEEEKREPINVKCRNNNFN

SEQ ID NO: 128885 - protein, 104 aa, Heterodera glycines
MEETFDHTDVQFRHPFTMIVSGSTRSGKSEWIMRLLRNLNKIISVPIERVLYCYGELNPNILNLQRNGRIDNITVTVHNGVPTEYYIKGNAKKEKLLLVLDDLL

SEQ ID NO: 128886 - protein, 111 aa, Heterodera glycines
MVKHVLLEYDTVVWLDTSVVFHKNDFKRFFEPMQNGKIGTVQIPSFALHTMNMSTHPGMYEYLPMYTNFEPNRTYELIGTYKPIIKTDPPQFETNFVIMHKSEQTRQVMKW

SEQ ID NO: 128887 - protein, 41 aa, Heterodera glycines
FKVANPSFHHLTEIENSPFEIAHRIQFIHLHSLFFVTVSKS

SEQ ID NO: 128888 - protein, 17 aa, Heterodera glycines
MALLCAAEPDCMVPIGQ

SEQ ID NO: 128889 - protein, 116 aa, Heterodera glycines
MAGLAVSLVRTFAPYACGSGIPEIKCILSGFVIRGYLGKWTFVIKSVGLILASASGLSLGKEGPMVHLACCIGNIFSYLFPKYGLNEAKKREILSASAAAGVSVAFGAPIGGVMFR

SEQ ID NO: 128890 - protein, 108 aa, Heterodera glycines
KYGLNEAKKREILSASAAAGVSVAFGAPIGGVMFSLEEASYYFPLKTMWRSFFCALVAGVILRFVNPFGSDQTSLFHVDYSMRWTFMELIPFAMLGIFGGVLGSLFIW

SEQ ID NO: 128891 - protein, 174 aa, Heterodera glycines
MYGIVVSGKRLPRRDAYGTVGVGQTNANGADEGGGVVLHDFPETNALTDNERNGKMEIVKLRIQSLSAVDISDDFDQCECNTTPVVDAALSQPVFQQRQNNFQNSLAHFLDKFGQTSDGHLTKNVNEKHLEYQNWTHALADDRRLHLTDSEASAQTLASSCREECAVYWQQLPV

SEQ ID NO: 128892 - protein, 129 aa, Heterodera glycines
LPGVIRITESPTTQPHIRDGYIQLYIYLPMAFGDRFIPFLSKIIPSILKALADETEYVRESALIAGKRLITASSTHARKLLIPQLQSALIHENWRIRQASVKLLGDFLFFVSGVSGKMTSETTGEDDTM

SEQ ID NO: 128893 - protein, 167 aa, Heterodera glycines
TIFNCLSVICQALADETEYVRESALIAGKRLITASSTHARKLLIPQLQSALIHENWRIRQASVKLLGDFLFFVSGVSGKMTSETTGEDDTMGSEAVNKAIVRSIGQRSRDELMAGIYLARYDVVLAVRQAASHVWKVRANIVFTLSFLLYKNGKIVRKTYSIILSFC

SEQ ID NO: 128894 - protein, 424 aa, Heterodera glycines
MSRGFLCFHVYWSPQLGLASLADCVCSSAEVVRLVRLIVSEGLADRSEKCRDIMRTAATIAIEKAIPSSLPSIFFQFKHGSHCVDELFPILENELSQMGVAEKKKGPSEEIERNDNLRQGLVVLIGKLAQFLQGDDSKVRKIVARLIETLSTPSQPVQEAVAACLPALMPSLRADAKALMENLFLLLTNAEQYGERRGAAYGIAAIVKGLGVVTIKEMNVSERLKELLAQKQNALHREGALLCIEMFCSTLGKLFEPYLIHLLPNLLNMFNDTNEAVRRAADDAARAMMRFLSAYGVKLLLPSLLKGLDDDSWRTKCASAELLGAMSNCAPRQLSTSLPAIVPKLCETLTDTHNKVQKASERALKQIAKVIQNPECLAISSHLIQALVDPPGKTTSCLQTIVNNKFVHYVDSPSLALMVPFQSI

SEQ ID NO: 128895 - protein, 154 aa, Heterodera glycines
MSSRNQANSVPASLWDKCVQNLAKINVNDYLNISEHEIKIFETPDGKLYNEEVIERNMEFYDTKNVRRDPSYRTFKEQIEALEALNERAKKNREKGILSEKQKKAVEQELKIEREIRSRLKKLHDSFEETIKSLFIACKKEPKVSLIAVISVNL

SEQ ID NO: 128896 - protein, 78 aa, Heterodera glycines
VNCLINNCTTSMPPLFPEKVESIRHLSTKSWEATFTKDYLSNEGQLRFLSRMCYLAMAHYLLYRGVLPKGVFKRRKLE

SEQ ID NO: 128897 - protein, 66 aa, Heterodera glycines
LVQFAPPPFRNFFCVFKSHKNTLWGFRVADHESGAHLDHFLIPDPNSNKKSKIQIFDFHIFGSNFV

SEQ ID NO: 128898 - protein, 204 aa, Heterodera glycines
MVCCFTFLWHHWDRFKKRRIHKKKIFISADCWLSVFELLPPRQLGHGIALISNRFDCYVDEHFKTRRWSFGYVQIWRCKKETNGTKEMQIFNGRGEAMEIPQKSVPKKVIGFQHLLISYIDRNAIEFLRRFSSVFANYGINLSVQTKNDRLFERFLLNVWPLLKDEIRVILLWPMDLNRLRRFGHSAILTDCPSLRVVFDAICL

SEQ ID NO: 128899 - protein, 174 aa, Heterodera glycines
LEAGLGSFRIDAKFGHAQSSLVNKIPPIVPICLPADEHCVPYGVCEAAVCLVGLLRANNAVIRTCGNEALGCQRNLDRWAHICSCEEHFCNTFLFLRLDKKKMPGGILPLFPWHSLFAVELNSSNFACHSHFPQMATNGPSRTNMLTLLLVIVPLSVGAAAVVVVAINYYCHLC

SEQ ID NO: 128900 - protein, 380 aa, Heterodera glycines
MQELMQELQINEKQKAADVLIPILRDKIEALEEKLDITHNTDGDTTSGIGPLSRSVPMRKNLPKTELKRFDGSPSQWIPFWDYFRTIIHEDSHVPKIDKFSYLDSCIEGKASAIIQGIPISESGYDDAIDLLLKTYGETKRLIRTLNRELMSLPISESFEDDESLYLKSEKIFRQLISMNQNVEDGMYYSNLEGKMSPEVLDKYCVIKDAEDNDDWDTSKFRNAFSRALDQIKHRQELRKNVIEPKRDKHELTMSFTAFSKNDKYQGRNKFPQRNSDQSPPRGRKFEPRKFRDQRHDNSDSSVSHSPMRDRRNSPYPKRDWSSSPEREKWKKDEQRKCQLCQENPRQRKRILVFMDDGSQKTYISTKLAQILGLKPIGNQ

SEQ ID NO: 128901 - protein, 274 aa, Heterodera glycines
SRMLFAICFLNSTFLNCGSGAEEFSPDAQCAQQWKPNESLFVVQQLARQGLGPRQILATLYPRYCSTISDDIPDEWIMQLLRELCEHRTRQKLSNYNTFEDAVELFRKSKRILVITGAGVSVSCGIPDFRSENGVYARLKKDFPELPTPTAMFDIDFFRQNPRPFYNFAREIFPGQFRPSLSHMFIKFLDDEKKLLRNYTQNIDTLERIAGISNLVECHGSFARATCLDCKHQVDAEEIRGDVFAQVSQFASDNYMDLGFSRALEDKNHLSESP

SEQ ID NO: 128902 - protein, 225 aa, Heterodera glycines
ARNDDNLRWSTNAIDAGLCSLKPRRCRAKTEVPTESAIVQHLWSTNAIVAGFCSLKPRRCRAKTEVPTESAIVQHLPPSLIPMPTNTKNKMDKSPKQNGTTADDENGHRNRRLLPNELIFELVLCVPSTKWPGRQLLLTSSLVYRIIADSKKTQNWRKPLPIMMFPLIPRWHSYSGLFLSELSGHYNRYMHLSTDEETHVESKTFAVVITIDPAHLPEGRTVQMA

SEQ ID NO: 128903 - protein, 220 aa, Heterodera glycines
KLKWCLRIDPKGLDEESKDYLSLYVLLVQCNKTEVRAKFKFSILNAKREETKAMESQRAYRFVQGKDWGFKKFIRRDFLLDEQNGLLPDDRLSIFCEVSVVADTVNVTGQSNMMQFRVPPCRLSDDMGILFEKGFFADCVLSSGNKEFPVNFSSLSALVPAQSLLFDNENEIKKIKKIQSDQSERLLKTRSNTAYTGLATRSNRIFPTGTGFTDYSDLKM

SEQ ID NO: 128904 - protein, 38 aa, Heterodera glycines
MRINSQINKRKSFKIMFFVILLVCQTSLGIGKMMAGFL

SEQ ID NO: 128905 - protein, 64 aa, Heterodera glycines
MAFLLKFVLLLSIMAIFCDYVVKQKVDETKVERKEEEGKGASEMNKGKSIVMADSKKEGENIVN

SEQ ID NO: 128906 - protein, 102 aa, Heterodera glycines
MPVQKPLKLAVQKTVQRALKLAVQDPLAVLNQHKLEAQKAFKLAVHERKRPNYLQLLALLISMLSTNQKKRKNQANSNRVRPEAKINANSSDSMLLLEKREE

SEQ ID NO: 128907 - protein, 30 aa, Heterodera glycines
MLQSIQPQYAPLRIMTRFAQHQQTRRDSDG

SEQ ID NO: 128908 - protein, 121 aa, Heterodera glycines
MVRLVFRPYTQVRRSICTSESLRTSTRVSSGFILLRNSSPSFGSQRIRSVSAPSHAIETGLWITHQLRKKPSLSLITHQLRKKPSLSLRLWVLHPMTCAYAKLLGPCFKTGRTDDRLLHRE

SEQ ID NO: 128909 - protein, 23 aa, Heterodera glycines
MKPEETLVEVRSDSDVQIDRLTW

SEQ ID NO: 128910 - protein, 150 aa, Heterodera glycines
KSGLQFAQVAEFSLIQQTLTDNRSAHIVTGSHFSQVFRLGFKLRLICKARGDPRPKIKWFLICKARGDPRPKIKWFKEGMEMQPKRNAHYYEKPLGKDEIWSKLEIDPATMGDQSKLEIDPATMGDQGIYACVANNQHGVMAKNFKAEYR

SEQ ID NO: 128911 - protein, 174 aa, Heterodera glycines
ERALFFELEAVLQFAQRSADCLAIYGAGASAEVRAALQNCDDADIQNASFAIVRQFVRRIRKYFETAQRIEKVVPELLWELCSGPLPPVEQLDSAQALCKQLARLIDFVFHFDTMKMNTPAMQNDFSFFRRVISRSEAAAREAETDCSLELANTISLFLASPTPMLNALTNATA

SEQ ID NO: 128912 - protein, 119 aa, Heterodera glycines
ALNKILSHPTMPVSIAAGEDRKIRFFDNNTGKLISAPMAHVEGVSTLAIDPNGLYMLSGSHDGSMRLWNAEKRVCLQEIAAHRKKFGAGVMAVAFHPSRQLIGSSGADSLAKVGIVIGY

SEQ ID NO: 128913 - protein, 18 aa, Heterodera glycines
MEEISDQIAVVDQKISEK

SEQ ID NO: 128914 - protein, 175 aa, Heterodera glycines
ALDLLETTDQQQQPCHDDRGSATPRDNASPPPSPSAFSHPRPSQLQSSNWASGGVAGTAPPTPATIIGPCPLLDSKRKSVSNSVLSVWDLLAVKVTVRFKLPSCVGLGSSGAYCVCIAAALLQTAGLIPPPSVSAESDELTWDESVLDIIRKWSSAAESLIHGRASGLDAAICTY

SEQ ID NO: 128915 - protein, 132 aa, Heterodera glycines
MYVEAVVGLLLVASVVVVGREQQQPFNATVSPPQVPSERVGTVEVEVFLDLEVVSIEAEVALVDFDVGTVEVLVVELVVEVGAVEVVPVVDVGAVEVVLIVEVGALEVVPVVDVGAVEVVLIVEVGALEVVP

SEQ ID NO: 128916 - protein, 130 aa, Heterodera glycines
TSTTGTTSKAPTSTISTTSTAPTSTTGTTSKAPTSTISTTSTAPTSTTGTTSTAPTSTTSSTTKTSTVPTSKSTRATSASMDTTSRSRKTSTSTVPTSTKTIQNPNLVQRTHSSTTTTLATSRSPTTAST

SEQ ID NO: 128917 - protein, 24 aa, Heterodera glycines
MEQWTCESAASIGLCKLNYIRLYI

SEQ ID NO: 128918 - protein, 89 aa, Heterodera glycines
MKKDVVSALVRPIIRHSFSTAKPIEFVMPTVFYAATEGLSSTMTLTNALESNDPLTKVLLSNAMPFFVRCFSFRTRPLPSSSDCCAAFL

SEQ ID NO: 128919 - protein, 253 aa, Heterodera glycines
KNATTTTRMLPRATTTNRMTKNAFTTNRMTKNATTTTRMTKNATTTNRMTKNATTTNRMTKNATTTNRMTKNATTTNRMTKNATTTTRMTKKSTTTNRMTTTTTNRMTKNATTTTRMTKKATTTNRMTKNATTTTRMTKKSTTTNRMTTTTTTLLKNATTTNRMTKNATTTNRMTKNATTTTRMTKKCTTTNRMTKEATTTNRMTKNATTTNRMTKNAMTTTRKKNATTTNRMTKKSTTTNRMTKESTTTNRM

SEQ ID NO: 128920 - protein, 176 aa, Heterodera glycines
MFGKRAKSQKVKSHVDGQTENVHFRDSRHFMYGQKNQIISFFGIKKTKCSFVSASASDSNCGRYHCDSFRRPQNVGTGNTQMESDTQWGDDRRRKCHEHKWGRSQKLTNTARERRKLGGRKRRRRRRKERRRRRKRRNEKEEEEEKMRRRRRGGRGGEEKEEEEENEEEKEEEEEK

SEQ ID NO: 128921 - protein, 68 aa, Heterodera glycines
AECHRRKNQSPLFCVQRVAHRRAAAATFCAGQVSTASSATTIFGTVLLSPIFVPVIIVIINRLRWPTL

SEQ ID NO: 128922 - protein, 210 aa, Heterodera glycines
MISQVVSVVPALRRHKLVEQALRRHKLVEQRKVAKPKTVEGRRLERDGKLADARAKFGQLLALCPDHQGALDGIARLDKNDDNIGGTDIELVELSDDEHTDHDDDNGNNDGHNSGPLNNSDRRKRRQSENGTNRRHSAAGENGRKSQNGCQTEGGAGRVKRRETMSEEEAQRNRQKLAEMEAFIAKLKGAGGGGGSGTAKVTGAGGSEKR

SEQ ID NO: 128923 - protein, 24 aa, Heterodera glycines
NNNNNNNNFLIFFLITHDIIPWLN

SEQ ID NO: 128924 - protein, 93 aa, Heterodera glycines
GCRARFGCARCVQMWSDRSPAIRRDALLVLVNFQLQLFAGGRNGHDGGSNGWGKRNFGAQPHRRTERREERDHQTLTAYVVADVVKALGPVKW

SEQ ID NO: 128925 - protein, 175 aa, Heterodera glycines
NPSVCGCDPTEHFGIEQLGRLSFLECCVKEILRLYPSVPFVARRLGSDTIIGGNKIPANTQVLLNIYLIHREPEHWPNPELFDPDRFSRENMKFSRENMKGRHPYAFVPFSAGSRNCIGQRFALLEEKTMLVWLLRNFRIESLLRRDQMGLKPELILRPSVKISLKLTPRLLFES

SEQ ID NO: 128926 - protein, 152 aa, Heterodera glycines
LDDFADAEKIGEGTYGIVFKVRMRANGETKALKQIRLNSGNDGVPSTCIREISLLKELSHPNIDFLRVAFSEGRRLFLVFEYIDQDLKMLLERLSPRSVPINYVKSFVWQLSFVWQLLQALTYCHTHRVVHRDLKPQNLLVNLLVKNDGTIK

SEQ ID NO: 128927 - protein, 60 aa, Heterodera glycines
MEIGAANVRQPIELFPKRTERRIFRENVTMFLTRKRTTGAFQLSLLLRRVERERDLNTDN

SEQ ID NO: 128928 - protein, 74 aa, Heterodera glycines
MSSSSSSISVSVQHQQNPTHQQQMMVHNNANDDANSANANFAAVLGTGGGEGAWAQLWVMCDNFWSIFGTFLSR

SEQ ID NO: 128929 - protein, 365 aa, Heterodera glycines
MSIYRALTVCIKNAISEFNKRFSPSKIHSSEKVHELQRSIFTKLITCTVNKANKHHGTTNDDFLSKLHFDVLAQICEADDQMKEIVLKNKKHLKDFMNANWYKKLSGLLEKEDEYFSVSESFNESDGSENEIFDDPSETIIEENENSKNLMEKHSIKNMNFEFGEKSAEKCENKNFKNNLTTTKMDEKNSDDEFLALNSENEEQWTKKKEQQNKKAKNINVRKNKNNNNSEKEMTEQKRKGKNGKNKLEENDENLNLNKKNYDLLDESIFKKIFENFLEKHWEPQSMEKQCLEYLGTIALFARAIQAKMNFIEQMSKHWANKSVNGIAKKWEHFIFNEEILFEFEQFVQIKLYFLQNQLDEYAFE

SEQ ID NO: 128930 - protein, 18 aa, Heterodera glycines
MYSSLIIYQLFKSNVILK

SEQ ID NO: 128931 - protein, 164 aa, Heterodera glycines
AEAAGIGEVFLFRRATALAISYRMLYLDEDEAQLCKQQQQCSSIDGTETGGAGAETAALIIPLDSSSDSDKQQSWGEKFVAILFICEYCIELSVYDFHHHHLARLISSKMLILTDPTAQTDLINTFLRRHLTIFRFKLFKLLTAGMPKQIAAIVPTIKKHIGAH

SEQ ID NO: 128932 - protein, 112 aa, Heterodera glycines
MPLLPIAVLLLSYLLLPSPNDRSERMIGQQDKGWSLSLFERTPKMATYLLALTVSDFKHKETNYKDVTWFGDLVTMEWWDDLWLNEGFATIMGMKAADYAENSTSRTVKRRF

SEQ ID NO: 128933 - protein, 266 aa, Heterodera glycines
ISISGTQSTNIPINGTQPTNIPIIGTQSTSIPITGTQFSYISITGTQPTNISLGLNPPTFQSLGLNPPTFQSTGLNPPTFQSLGLNPPTFHSTGLNPPAFQSLGLNPPTFQSLALNSPTFQSLGLNPPTFQSLGLNPPAFQSLGLNPPTFQSTGLNPPVFQSLGLNPPTVQSTGLNPPAFQSLGLNSTAFQSLGLNPPTFQSTGLNPPAFNHWDSTLQHFNLWDSNLRHSKQWTQISGILNTGTHSTHQLSMTFQSLGLNPPHFNL

SEQ ID NO: 128934 - protein, 26 aa, Heterodera glycines
LNGFTNLRFGFHISFVKLSNFYLKKS

SEQ ID NO: 128935 - protein, 110 aa, Heterodera glycines
MHLHIFDSHANEDRMCNENNGQTKGGERKRQTKCDFDQLRSFGVVHGEITRNGPYRTIQQQTVTKSRQIFEREERLPNGQTFHGSVQRNHKQQKKKGQDIIIKNGQNQNL

SEQ ID NO: 128936 - protein, 368 aa, Heterodera glycines
MRNRSNNEPSPPKRRRMPNILKSGSNNNNNNNGKRRNFRHYVRALNTDVAFNKKFRLMNAKSTFMIQTLPSNPESLLRVIFGHCIQSSLDEAQRRGIEPSRLGATITSQLLDPDIWIPIRQITPNTVDTILNRFLDVAQSKSREGSLWGAPFSVIVTTLDTVNLPQRDTITGRGSEHRTLKGAYHIIKEKNLLRIRNNNNSYCLFYALEISRIYHCMVMPKQTFSNYINKMHSQQQDAERLMLDAGIPLNQERYDAEVWVPRVVDHWNAVYPELKFKVFIFGTTGQYRPKYKYGPEEFLTPISLYYNNDHFDGIRCGVGTAIFGRDYYCFACELPFKNADTHKSSCILNCKECGRIGAGRPCRDDGFK

SEQ ID NO: 128937 - protein, 202 aa, Heterodera glycines
SKSREGSLWGAPFSVIVTTLDTVNLPQRDTITGRGSEHRTLKGAYHIIKEKNLLRIRNNNNSYCLFYALEISRIYHCMVMPKQTFSNYINKMHSQQQDAERLMLDAGIPLNQERYDAEVWVPRVVDHWNAVYPELKFKVFIFGTTGQYRPKYKYGPEEFLTPISLYYNNDHFDGIRCGVGTAIFGRDYYCFACELPFKNADT

SEQ ID NO: 128938 - protein, 29 aa, Heterodera glycines
MIRRGAKVTKRGATVIRRGATVIRREFLE

SEQ ID NO: 128939 - protein, 111 aa, Heterodera glycines
MKKHFGFSLFSVGIAAGLMPMLFMLMIMPSSTDGHEVFVMTMDEQLLEEHGDLLTIELKKGASAIYVATLKRKIAEEIDSFHSIRTIYAHQLTIRLDMVAIMTLRLMTTKQ

SEQ ID NO: 128940 - protein, 57 aa, Heterodera glycines
MSVPLKVSNDDEDSLAVLAVVQDRRRKLMNQGPDHSILVFEKATKCNSCFLKEDPLP

SEQ ID NO: 128941 - protein, 455 aa, Heterodera glycines
SEEDVVVAFASSNDVFDVDEAATNYVHLTTLEQLPVEAEEIRDQTAADDLLQQVFSYVRNGWPQKCPTNELMPYFVRRNSLAFVGGSFLTGNRVIIPLTTLHFAHPGVVRMKALARKHVYWPGLDHEIEVMVKSCLDCQLAAKLPQKAPLRPWPIPEEVFGRIHIDFAGPCHDGNTYLILVDALLKWPEITQMRTTNAAATIDMLNKIFHRYGAPKELVSDNGPPFSSYEFRQFCKSKGTKHTFSPPYQPHCNGQAERMVDTFKRQAKKNSTSKKQNWISGFLFAYRTTPNNILNGFSPAELFLGRSPRTPLSILAPSQQQNKPEQNRQYQDGMKKQYDSHHGTKDRQFVPGNSVLALNYGKHSKPSWLEGKILSGKGLIWKVNIPTLGITVTRHVNQLRSFVPYQAGKVQNDQIHQPELIHEQNLPAEPDELSPQTPKTVRCPPTPRPVRERRP

SEQ ID NO: 128942 - protein, 94 aa, Heterodera glycines
MALAWPKYWHCMVKTMPNWHGQWHIDMAKTMQIDDSSFYFLNLRDLLAFATEPVQCTLDKLYEQFEPDDAGGPLMFFRAFLGPRNSRLAFSLIS

SEQ ID NO: 128943 - protein, 24 aa, Heterodera glycines
MPMYSNASAAAYAQCTRRCLWPFD

SEQ ID NO: 128944 - protein, 39 aa, Heterodera glycines
MGKIGTGKFSDGHLKAILERIGQLEKQQQQQTKGEEKLK

SEQ ID NO: 128945 - protein, 56 aa, Heterodera glycines
MENDQKNILERIFSELEKQTKKKKAFQEELEKKVTERIVAVQSKVDKMEMAHQQQK

SEQ ID NO: 128946 - protein, 140 aa, Heterodera glycines
MLGIFVYGSLADYRRFVADHPTFVRDQLRVEDEQTLETKMKQLTLILLAEKAQHIPLTTLVNALDISDRDHLEEFIVDAIHANAIQGKINELDDQLMVSFYQQRVFQRAQWEQLHVRLGALLENARWFRDNMQSVVAVEE

SEQ ID NO: 128947 - protein, 264 aa, Heterodera glycines
LTSTFVGAVLWFLEQRTAFRLTTVFSACIDELCRQHKSPGAASRYRFLLWATVPSASLRRRASLSTRWGSFTSIGHVDQTVGWKRRRRTLHREPRELDVYELQRRGGLRKVKSASSRRWSFLNRTISPCSGASSPGLPSGSISPSPSDIVENGITPEAEENALNEAIAANSHDSTATTMAGGSSSSASGYCSNISGASACTRLSASFTEPEDPSAPFDPPPPTPHPRGPNSLVVMPRNHPPTFTFDRNVLEQNELDGDDERAKK

SEQ ID NO: 128948 - protein, 109 aa, Heterodera glycines
MRKFELSTFCSNPGSGWLCNDIWMDILPLFRRPQLGRKLALLSPRFNALVDKHFDSKNELTILKQIRIDKMKTMPKLCVVKRGIGIFKQFPIPDHPMHNKLRFSKLQIK

SEQ ID NO: 128949 - protein, 49 aa, Heterodera glycines
MACACTWIQEKYRAGSRISILSKLVVMPHCRNTSSKSKTFPTKAEQDVW

SEQ ID NO: 128950 - protein, 72 aa, Heterodera glycines
MTEEEEEEGEDSAKEEDENDEAAKWDEKSATPDSFMGFIIASSSSSEEEKKILRIFGLMESGKYCFNIPFLH

SEQ ID NO: 128951 - protein, 248 aa, Heterodera glycines
MFKYPTIVLVLITFIILHIAVPSAESFINLSAVGDFFANLWDSRADNCFYAARYHGNVSDQFHEKVKYWEIEDVQNVSDRRISKDCSGSFYGCQTHACIDAKGNPVFVFNLCASSAAASGENNTGHCSHPELEELCAMEGGKSKCAICENGMCNEANIELQNVMGLDINGTIGTAVVENGTKSAKTGETGGDTTDDGNSATTDANGNGGDATTDKNSGAMIRAGIFSGEKNSIRGLRRGFFRGEKTPI

SEQ ID NO: 128952 - protein, 61 aa, Heterodera glycines
MNRILSDDKKMSKKEKDERILWKKNEVGDYEATLFAIFYNNLGTKIRKKPENEIPNTEIYI

SEQ ID NO: 128953 - protein, 24 aa, Heterodera glycines
RQPTFGDLFKIVWKSFFESIVDQR

SEQ ID NO: 128954 - protein, 45 aa, Heterodera glycines; identical to SEQ ID NO: 124814

SEQ ID NO: 128955 - protein, 866 aa, Heterodera glycines
MQMDSLRDSSNAWIELLGRLIGDDKDNGEKEYVKFDKNEKIADRYDAATTKLRDLRDLEATLSAAAKLHRGRADREAKADQLANPQQQAPMLPAMAAPMTVPTFTAPLYQFQPIQLDKFFGQKRKWPEFYESFKSAIGSQSISKAQKLNLLRNLLGGEARELIAGFRLEDANYETVLQLLKDTYGAPEEHIRSLHFELANLKPCRSLRETKDFLLQLERLTRELNNAGEDIEGPQVFLMLEKKLTPPFLRSILTKKGEDPANWTTTKFRDVLTEAVRKEVQIQEVMGEYGHHYVQPKAEVVSAAPVQAPRTPNQRSRRPNQPMALRDMTFIASSLDEGHKHQGYVSQQHTQQAKKHCQQMRNQVQSLKKGPPYPCIFCNSNHWHDECQNVDTLNQRISIVREKKLCFKCMKPNHRASNCARPSKCYHCKRRHPTALCRDQYKAKNGINTPSTSCSEEKPNANDGKRSTVIEQQQMCNAIQSKETRALLMTTKATIFNPSRPSLSMMGTIFIDPGSHRSFISSSAAEQLDLNVLSTEECYLSSFGEREPKRYISDRVAIGILCPDQDRFIFNLNALKFLLNDLPVLQLNALDNDELQQKKLSLPNESRQPDILLGMDVWHQLNVQPIEQLPSGFTICQSKIGNIISGTGRIELKQPSNISFVLMVNNDESPQSSKAAQRQKNIQQKEKDELRRHQRNKLLSSIATLRSRRKRESAPISSKSIVIDLSSDSDASGIEIIQNPVRDRQAKSPNEHSTAPIPMAVQRLTPTRKSSSVAKRPAFSSSKQPKGKVANPAQTSQTNELNRKMKALSPTASGSGANHHCVATLARSSDSTTVIDKGSQQNCPNMSSATISKTPCQQHSSEKTLN

SEQ ID NO: 128956 - protein, 254 aa, Heterodera glycines
MTNHEAQLWSTNDELEVNFPGPIAGLFKGEQISTATNCFAQPATLFVKRHNLQMFSPVHQVQNCQYATEFCQLPDNSTLIWKSTCNGNECQTCDYEKAEVINGKFTAAYGESMATWISEDHQKALTFAKNAPELIACDGTRIVMSEQNFGIAKEQYDDIVTTTTRWKRGIRPEQLASQLSASQVANRRIHHALAKKPDRRSNHVVDSSRLRLFNLPHAARHCSPMHSGVFTQSHPSDSSQPRWSTPAVDIPTHR

SEQ ID NO: 128957 - protein, 39 aa, Heterodera glycines
MFSVRFFAFLLLLAVLCFSLVECGLIGFFWTTDKSLRVK

SEQ ID NO: 128958 - protein, 85 aa, Heterodera glycines
MAPPSTNEQSLRQLMHSLQLLLRGKGARKVTIQPWLAVAGEQPEQHEEDEKKQNGAKRAGKSDGQTKRGEEDEFAIDLSVVQKNP

SEQ ID NO: 128959 - protein, 289 aa, Heterodera glycines
MCTESTGGWTNWTNFPGFIKERMTIENNYAKQLERWNDEWNHYSEKHLPDGSMKRSFTLILDESKELTKVHSSVKERFNDEVLKTIELFKRDNYHRSTFRGFKEAKEMEDEFEKAQKQWKKLFDRVEVTKRTYHSAARTEKSMYIQYMNTKTDNAQTDGTEAKARERFEKCHKEVTRARTAYEQILKEITAYNGIYMENMAFVFEKCQQMEMKRLRFILEMLSGMQKILVDLVNPPKSVESLALLWVFLSQITLQTRPIALQTSSTLSQHDRCDYWRRFEAVVSPPWRG

SEQ ID NO: 128960 - protein, 266 aa, Heterodera glycines
TYNKNRRAKNPKLNTIVISVARINKNGSSKIIRISIIMDGKTIKFIADSSDINIIDEIAYKCIGSPPLGESDEEGIFFDGRRCQFIGKGFATFKFKGIEVKQPFYVAKAGALNLLGAATMDKFGLWEIPINQITSKNNETKIREAIKELPSKFEQVFSEGLGLCTKMASLMLKSDIKPVFRRARPVPYSALPIVNNELERLEKINVIKPVEHTEWAAPILVVKKANGSTRLCADFSTGLNDCLQLNKHPLPLPSDIFSTLNGKFFS

SEQ ID NO: 128961 - protein, 180 aa, Heterodera glycines
MVDTFKRAFSKIKGEGCQETLSKLFLLTFRTTPSENLNGKCPAELFLGRRPRIALDLLRPPIRPTEKDLKMEAQFNRRHGARFRSYNVGDQVFARHKKGEDWRAGKISERNGVIYAVNFTDNSTGRFHANQLHARAIGDEDIPHPLDAIAADQRCAAAARRACPTLSRTPTEASCAFGYC

SEQ ID NO: 128962 - protein, 37 aa, Heterodera glycines
MTNEIFIFPGFTAPIALTLYKIVSRRIQHMYIKLRSL

SEQ ID NO: 128963 - protein, 127 aa, Heterodera glycines
MTFQSLKLNPPAFQYWDSILRHSNLWDSNLRHSKHWDSTHQLSMTFQSLGLKPPAFQYWDSTHQHFNLGDSTESPAFQTLGLNPPAFQSLGLNSQAFQSLELKSLAFQTLGLKSPAFQTLGLKSAAF

SEQ ID NO: 128964 - protein, 76 aa, Heterodera glycines
MPENRKVEVALRQVDPTVAIPYWDSTLEAALPTPADSHLFTPEFMGSTDSAGNLVTGIFAGWRTLDVRATQISLDH

SEQ ID NO: 128965 - protein, 43 aa, Heterodera glycines
MSMNVARREKVGPGLNSVLDLDLGFLVKIQENPGLGKVWVTEK

SEQ ID NO: 128966 - protein, 190 aa, Heterodera glycines
INIWNKSCRALHYLMEATAPMATSTDEGGSPRANMEEGLLSLPRDSVTLSVPSSRLKMPRRSKEDRLLSALGPFIYLFLPKSSHPIKSPNLFKKMFFVRQLESLAFHRDPFNRPELVHTLRGRELVLFVLLYAIGVIAIVFIFECTMPVFWINDQSRAEQRRRAAIVVRSAQKVMLDREMPSSIGPLRKT

SEQ ID NO: 128967 - protein, 234 aa, Heterodera glycines
RYEPSPLMFSERIDGILRFLLRQPGLMPGLHMSGELRDKLFRQGGPHGLDLAALIVQMGRDHGLPGYTRVREACQVKSFDDAEIVVEPKRILPILARHFRRVQDVDLFLLGLAERPRRGALVGPTFACLLTAQFQRTKRADRFWYGHRMDPTKRADRFWYGHRMDPWAFTEQQLAELGRTTLAQLICANSEVVREVQPRAFELPDNYESVREVQPRAFELPDNYESNGFICSSI

SEQ ID NO: 128968 - protein, 371 aa, Heterodera glycines
HHFQMPFQLIMLMFALISPFHFVSSRFFDLDGIWHFSSQNWSKFSGNVPGDIYADLFTNGFIEPGDIYADLFTNGFIEDPLFDPLFGNGDGFCRWVPRHRWIYERNSNFRTKRTRREESFTDLSGIDSPASVLLNNRTIAQLDNQFVSNSVDVWSDVLRENILRIEFESPVEEANFRAEKYEAFHGHKLPPQCTPPQCTPPIYNGECHVQFLRKMQANFGWDWGPSFPTVGIWRPIRLEFFDFPTVGIWRPIRLEFFDLLSIRRFSPVISLGNGKIPKKFYCDFTISLDVCDFRPPFFDLCRRPSNFHQIELNRTRNGQSLDSLKMLDSLKMEIPAKSVQLWHPIGYGNQSMYTLEVKRKWVKFGHKVEIS

SEQ ID NO: 128969 - protein, 105 aa, Heterodera glycines
MDSSSPHANAVTKISADVLKMNFMKKTITRIERQKKQNERERTKEQISAGKLEVLPPRHYPTVEHIDDDPNITLGGVMTEWRYSVLMDNLRFGRFSFKGQNPEVE

SEQ ID NO: 128970 - protein, 47 aa, Heterodera glycines
MANFLYIYSSLRILPQSVSSAFSIVHCQRNISIDNKCHQQNQATKGR

SEQ ID NO: 128971 - protein, 121 aa, Heterodera glycines
MQFHERRRNGIEDEEEEEEEEREEEGEKRRTGVNPTHPNPTHPYPTHPYPTHPYTQLIHTQLIHSTIRVVAVAFNATTKTVQPKNTTTKTVQPKNTTTKTVQPKNTTTKTVQPKNATTETA

SEQ ID NO: 128972 - protein, 212 aa, Heterodera glycines
MQELTDVEILHESEDGAKLLVDELIKGHVVETLVQQPLVKLNEQIQDEADAVYNAMNVLLDFHPQANDLCVSQGLFDWLMVRATKRKVFDANKLFASQLFAMLLQSCESARKRLTEKRDGIDMTLRALAVYKRHNPGSPDEHEHMENLFDALCAALMYVPNRQVFLDGEGLQLMILMLKEKKMSREGALKVLSHATAIPDGGPNCDKFVEIY

SEQ ID NO: 128973 - protein, 121 aa, Heterodera glycines
MTIQFDQNCPPMLKRMCFNGVEQFSFLLYKWCRFCVRRGPSESAFGAIRAESEVRPFAEGWRRRGDIKKTKKIMVAAACAWRIIIVDNCGGTRARNASVSGLEDFIRPDDADNKVSSPLLR

SEQ ID NO: 128974 - protein, 23 aa, Heterodera glycines
GVATAGEEVEETIFSLTIEKKEF

SEQ ID NO: 128975 - protein, 50 aa, Heterodera glycines
TVGVNSVWPTPSQQCSKSYNFFLCWPNFTIMVSFESPRCLEDIYKLFLSD

SEQ ID NO: 128976 - protein, 67 aa, Heterodera glycines
MPSMEPAKFGIGIVQRKMPKMEDNTDLNKIMTTNRHGGIGGDANANTTDGGRIKQWKRMAKANENGA

SEQ ID NO: 128977 - protein, 232 aa, Heterodera glycines
NFAGKRGGRSRLLQNTPTHSLTDVPPPVSSARILECNQTDPLVTITFDHLEPEDRTKPVEEFWLRYTVDQDVDQGKWHVYPVPVKAFQHEVIGDSLRQVNGRLSIMLKPFGTYAFQLIARNAIGDSAAYNIEGVCQTAQQAPSRNPSGVRVIGTQPDNLIIYWDPMGREEWNGEKFAYKIFYRRMDEDGAWKEVVVEDPFADQFTIDLGDNARAWDAYEVAVRAMNGRGLSK

SEQ ID NO: 128978 - protein, 167 aa, Heterodera glycines
MFLISIALAFSIQFLSSVADPENQLGFKCTNVSNSQNYGCSVEGNVLRFFVIGDIGGEEYTVEGKQQQCTVEGHGTVADCEKNPTVVKYYRPTVAQKAVAKAMDSLATSNGVTPRKDFTKVFASKKSKKELYKIASGEMAPHFLLNVGDNFYDEGVTKEDVAERFEQ

SEQ ID NO: 128979 - protein, 124 aa, Heterodera glycines
MLFPQLISDHKFWPIKELMNPKNDFYEKNVDKVTLAIDVTLNDEKTQEKFISDPNKSSGTLSMEIENLSEFEREVIGSERRSETWHIKGFSWKILAKIEKKNENTDEKWLSFFILCNAPKEGAS

SEQ ID NO: 128980 - protein, 131 aa, Heterodera glycines
MRRELEQQELELFMLCSRLVRQFCEIDHKISAEDRKNFFGRYCEVTTWMEHNAGAPAVEVTQQKEAFEHLYQSIIDGASGNDYVATTGCVAGTSSANEVAVTGCLPGNSKKDEKGNVETKKRKRESDENEE

SEQ ID NO: 128981 - protein, 118 aa, Heterodera glycines
KSPIVVAGGGLVGLSVAYGLAKRGAKEVFLFERHCIGAHNSTRISTGMINNPCFYTDRSLQSVVRKSHELYAELDNRGTLGFTRCGRVYLASSDDTAIQARRMFSRLSADPANSAAEL

SEQ ID NO: 128982 - protein, 181 aa, Heterodera glycines
VDVEVEYSLRHCGYYALRHLRIEKFYVYWGQDIDSMTTPVECGRQDIDSMTTPVECGRVFRVDFEKEFIGKEALKEFIGKEALNRQLERGVSKRFVQLLVDGHDMDRDPWPHGDEPIYRDGTLAGWTTTAAYGFTLGCQVCLGYVQNEQFGVSSDYLLRGSYEVELAGKRFPCRINLHSPS

SEQ ID NO: 128983 - protein, 40 aa, Heterodera glycines
MAGKAAEELLVGHSYGHGGDLVAARPVAKEQFPPLGIVYE

SEQ ID NO: 128984 - protein, 154 aa, Heterodera glycines
MPSLTYIYEIFDPLDASWPVQVSKCQSLCSAVGARRVQPNEKRLAGSCAFPIIWPDQIGEQLTGINGVGIQISENSWRNETAQFVQAFAPPKGQVANARLKDGPNFTCHHLPNCAFINQRQEQIGAFVEDLLVATEKSDHRVVDVTEKWTLFMS

SEQ ID NO: 128985 - protein, 290 aa, Heterodera glycines
GLNKTVPPSNIAPFLKGLNKTVPPSNIAPFLKGLNKTVPPSNIAPFLKGLNKTVPPSNIAPFLKGLNKTVPPSNIAPFLKGLNKTVPPSNIVPFLKGLNKTVPPSNIAPFLKGLNKTVPPSNIAPFLKGLNKTVPPSNIVPFLKGLNKTVPPSNIAPFLKGLNKTVPPSNIVPFLKGLNKTVPPSNIAPFLKGLNKTVPPSNIAPFLKGLNKTVPPSNIVPFLKGLNKTVPPSNIAPFLKGLNKTVPPSNIAPFLKRLNNRAPGALFEEVRYMKCKIIFWILLNKENGGD

SEQ ID NO: 128986 - protein, 39 aa, Heterodera glycines
LYPKRSAEHVGQESTDKKMSTKIPKLQGEILCHHLSGGT

SEQ ID NO: 128987 - protein, 95 aa, Heterodera glycines
LFEYPKRTLEKIDFFVFGAVPPNRCAQIYGETESFRSSFPIACTLILRWIFAPHNCLSTPNGHLKKSIFLFSGQSPRTDAPRFMGRPNPSGIASL

SEQ ID NO: 128988 - protein, 69 aa, Heterodera glycines
METSYVIVNGKTVTEDSAKSENSLPWITSNGWSGINFVENKFEKTTNTQNVASSIETYATVLSRKPVSK

SEQ ID NO: 128989 - protein, 59 aa, Heterodera glycines
ISSQSQNTSQGKALQKSPPGLTFVDPKELTMSQYKRADFPPVERPKGYSQFSTQPTEKV

SEQ ID NO: 128990 - protein, 61 aa, Heterodera glycines
MNSNFGRALFIQHSPAEVSKQTLKSAKKIQKGFLLALAHFVFVSKKSDGWRATIAERHLRR

SEQ ID NO: 128991 - protein, 78 aa, Heterodera glycines
MTRIVSNVKDSKLGKDAIQQLKVATETAERVAQQVGEMQAYKQVSYMAKEIDRLADVRMYKRPGSAELNLMGEKIKHN

SEQ ID NO: 128992 - protein, 752 aa, Heterodera glycines
MKESVSAALLTHTVDEPCYIQPIDDGSVRQRASIAVDNDDSDDDEDDDDLPLRLCFFDAETSQDTPLQLNNRTVQKHVPLLIVAEVICERCLQAGISVNDGLGRRAPGCVCMTGMVRGQLFRQWSSPPFANAPGDNSASPVGAPAFNQRRFFFHSFDNDGNDPVDQFLDFLLHHGPKKAHTVCIAHNGGKYDFHLVLEALHRRNRPPKHLCTTGLKIYSMRLSGRHQRRVTFKDSINYFFCALDALVKSFDVPDHLATLKPFFPYLYIRRQHLSQRLINLPAQEFYAPDTMKAEKRAQFLRWHAENNGNGFQLREQLIMYCVNDVAILRESVIRFRQLIADNTQGLDPFLHASTAAGLALATFRRCFLPANRLVHSPEGGYLRGRRASAESQRYIRFFELEHPEAQVQCASWSVGEAHIEDSGYRVDGLWRRDAPLRPLAIEWLGCYYHGCRVCFPDRQQQLAAGRTAEDLYERTERRLFELEHDHGCDLHVVWACQWAERLRHDPNLKRRYDAVFVPCPLDPRNDALRGGRTEPFKLHHVCSDDEEIMCIDIVSLYPYVMKANRFPVGNPRVLTREVLLRPPTVPLPWNAPENNIFRGLLLARVLAPRNIRVPLLGYRTKDGRFTFPLCAWCADRRQQRPCRHDDDKRSWVTAYTHVELNKALQLGYVVTDLFEVWDYEEWDGTLFSSYVNTFVGLKVQATGWPEGCVTDEQQKAFVDDFERTEGIRLDSTKMEFNPGLRLIAKTLANSLW

SEQ ID NO: 128993 - protein, 183 aa, Heterodera glycines
MGGPCVAEGEALGQMKREHTDRRIVEFVAGGPKNYGIRHTARDGTDERANLKIRSFRLSYTAQQLLTFEAMKNLTLATYNIDGPIDDALDNDDLYVYGGGEHRAIRVNFPQIDRNVYADLYTQEAHKDYRPFYAKGRVRPGMQTRPFGYLEDDGQPNEGQRTHRRKRNLVEQDPTQPGHSGWF

SEQ ID NO: 128994 - protein, 53 aa, Heterodera glycines
MTLTPQLCEPRVKNFNGFNSCYRLDKQRLSRNGFRGRQQREQRANEKARGGGG

SEQ ID NO: 128995 - protein, 1058 aa, Heterodera glycines
MDAFQQFKREDVQFRHPFTMIVSGSTGSGKSEWIMRLLRNVDKMISTPVERVIYSYGELNTNVMNLQRAGKVGNVPVTVHSGVPRAEQVRECAKKEKTLLVLDDLVVGMSQQYLDALFTRGSHNWGVSVILTLCNAKKANALIRDASDEQLLCLVEICLNILKGRVPLRPRHLNKLKAHAQVLRRLARTRCSRSAKKVLLQHGDGLPAIVGLIASIALPLIADHTKRYLLVPEEIYQSLAAPPPSDGTPIGLVRTRIKQIKNDDAINEAERAVKYEQEVKRLNKLTKDEDERPVGVKLENLSDVVDAMPKPVNVTRPIVVSTRRHLKVGRARKENVEQLEDTDDDDDYQNPRSSSSNKRQPTQTEILKLIYKNAQSLGVSEEGQVLRAGGRPFITSSVDDIVSHLFNKDKRGQNKEPTAFKEFVERARQNPLLTIIMDLKKLRLLEFLYKDLSSPVAFTSVEPLLREARKSQPKINRTDVQNYLTSQRTYTLHRQAKRRYRRLPTLAPGLHTEWQADLAIFDRFAKQNHGFKYLLVCIDTLSRQVFAEPVKTKTSANMIIAFDRIFKRSKYIPWKVLTDQGKEFTARAVQQFFRTKDVEHFCMLTSPQFHAGMAERANRSIKERLYRYFTERNTYKWIDVVQDIVRAINHSPNSSIGMRPADVNFKNAEALRQKLHNAAENVVRRQPRYRVGDRVRIEKYKHVFQKGYLPRFTNELFTVVEVHTERSPVVYRLRDDHNEIISGWFYANDLCKSLEDKQQNMYEIEKILKKKKQNGIEWQTGNTVRIEVPPSNVTNPHELSKNLYRLLGEGSDPLAKKVRSTQNSFMLLINKARRWAREEYIKRKTKEKRSVRDEELLLQAMLTDTGTLVDLNSVAQGFLTREKSAATSNVPLRMPADDTNSYQEKLDEYFSKLSDKNLNILDELGMTKLNAEIKNLTEEERVILEATKEMGTEAWIQAYREIRLVCQFNYDVHRNRFVLNTDPRYVKKVKVSPQLAYILGFNNTEFIQSENEARFMPDMSGGVSSFHVYTPDLIEPMMIGDVTAPVLRIVTIRGNPDQ

SEQ ID NO: 128996 - protein, 161 aa, Heterodera glycines
SNTNNKVTSTKAPAPPPPPSATTSATLKVTQSQHAIAAINPKVTQSQQAAATSATVTVKKATATAKPTPSPSPPVAPATATTKAAKASPVVHKEFNENAAGVDVLDIMLGGSKQSVVSGEEKKQQQPPKTNVSVGRPLMSPPATESKDVLDIILGEPKQSV

SEQ ID NO: 128997 - protein, 776 aa, Heterodera glycines
MANKFLIIPEVLYRGLTSASSTGDITLDAVRQELDRTKMKKEQHLQHPQPEQQQQQAQLGRNLLVEAAAAPLYDNDDDDYMLEDGYTLPAPSQYYGEPMLPDYEDEIDEMDTARFSFASRRKMTEENGDGEKTKKKNKIYYSPPSSPKWEQTRRRQPLLTYERTGPPPPPRPTPKRESKQELNQQQQTPTLRQIIPPAPPPQGKREPKYEQVHDSPPPPPPPAPAQIKREPKYEQVHEFPPYPPPPQIIKREPKQELSQQASTSSKLSIPEREPKKEPQQQQQQQQQLQQQEQSTSNQPFEGEEEEADEAPTLPRTKRNGIKHQGKKSGKRRVRPERRKGRARVEYSPTPKFYNVPSTSAQKDDSKKYGKLFSIPPNKLTMKQRVERILIKCNHYGERMGVSGNSLINEETGKPYPRSNVSMIIKYIIDKRAAFAGVSRLLEEAKKRISDIHRSDVVNYLEGHRTYTLLRPRRVHFPRSKTVAAGFMTDVQVDLADLQSLSRHNKGYRYLLVAVDVLSKRLFVVPLRSKRADEMLLAFKQLVEQMPMTPHRVFTDKGTEFRNRMLKEFFEEHDIAKHEPVHSAVKASVAERAIRNVKQRLYRYFAQKETLNWIDVVQRIVDGINRAPSRVHGMRPIDVNFSNAQKVWHTIYGDMYSPMRKLEKRTRFKENDYVRMSREKGQFEKGYLPNYGDEILEIDDVLHHVNPVRYKLRDEKGEQFKGSFYDQELARVRKDAETSYRIEKVVRKRKRADGSTEMLVKFIGYPEREWIHESQIV

SEQ ID NO: 128998 - protein, 167 aa, Heterodera glycines
MQWIAADICTCPQNLYCLRTLNYLKPLLCIHKSVLNFTQFLAEGVQQPKQQTSELQSVLLLFVIGVLVLQLMQLCLLMNHRPRTMSRRRIRSRAPFQNGAENIGAHRLARFPPLQQQCRPQPLIIDVRPPAQPNAEQQQQQHHDRVDSERSSVSDNESFHSIVENEC

SEQ ID NO: 128999 - protein, 39 aa, Heterodera glycines
LPAIIDAARSKDRLLGILRSSSVLRAKIVRWKVKYMIKA

SEQ ID NO: 129000 - protein, 76 aa, Heterodera glycines
MPLFGGKFRRGMVTRNAPYNSHTSSRLILANALTLSTIAQPKAKQLIKGWEKYERFCKFPPLLGFLCFYFVNMTYC

SEQ ID NO: 129001 - protein, 180 aa, Heterodera glycines
QFGFIHESIRLLMIRMFGDDFWREALQKAGFESGKENIVNQHYPDSEALQKAGFESGKENIVNQHYPDSETYAIVESVSALAKMSREEVWELYGAFLVEYTMEIGWDQLLRTMSVEYTMEIGWDQLLRTMSPDLKGFLDNLDSLHYFIDHVVYGFLDNLDSLHYFIDHVVYKGNLRGPFF

SEQ ID NO: 129002 - protein, 140 aa, Heterodera glycines
KAIRLSDHLSANYRVKDDTSPFVKKILKAHVRVLLYYGDTDMACNFLLGQQFTAQLGLKRSINKQPWKVARQIARSINKQPWKVARQIAGFKTIYARGFLTFLTVRGAGHMRGAGHMAAPQWRAQQMDYAFSQFLLNHPI

SEQ ID NO: 129003 - protein, 183 aa, Heterodera glycines
MLDAFTTDSDVDTISPGSSLAATDPIQLGPTDQTKSVLATKIVLLYPETFEYFSVIRQNEFEFGDEELARNLKIEFNEMVEKVKDLRERTLPSEQRPKHPMIWLKDVLFMSPEQIKIIVAQQRAKTWCGSSVCCSTECCLTTNIPWTIGEPKRRFGHGIHNGLAWNRWPIKMSKRCDLLMNNI

SEQ ID NO: 129004 - protein, 65 aa, Heterodera glycines
MIKFFFAISFLLVIGTHLNNGTTDVKNIVETFVQDDTDLNELVDDAIIWAHYIGMVTRADKTKTR

SEQ ID NO: 129005 - protein, 41 aa, Heterodera glycines
MSMFFSTKGQHQFLSATKINVQNALNANLFILFANRKVGDE

SEQ ID NO: 129006 - protein, 115 aa, Heterodera glycines
INTPNYDVNFSPSMKIPFLEPIIEKYVDEYKKSRQLFAECMQKILRKSKNPNQTVKIIEFKKTIEKEMNDLLKHTDLPPDQLIDLLNTREWLLSMKKDIGKCKNSPTSSLNAKGR

SEQ ID NO: 129007 - protein, 176 aa, Heterodera glycines
RCVVEEGKGTIQSPPKTFRDCLFRICSVNRYAAQKQYWAEQKKARMGETVDEEMLEKLKVAAEKEREQNELEYSKMLGSVVQLLHVKSNKFLTMQKNSPARQERNAMRVYLDRIGNEGSWFCVDIVYKHVSLGDNVRKRREVKGNGRLGERDGLIRLIIRGRGEVIKHWIGEGGCF

SEQ ID NO: 129008 - protein, 50 aa, Heterodera glycines
MGWFTYIYDGWRAHKIIIHGKTQNDDPQMWGEIFSKEILLQCATDREFCT

SEQ ID NO: 129009 - protein, 92 aa, Heterodera glycines
MSHSQSEKSLDQQFDCCECVVDDLLKGRLGDSQFAQRNNVLRDCIQSLQSVAKTIDGLSLFSANDSVEELPTNSLRFLLVPAYLATALQEIG

SEQ ID NO: 129010 - protein, 283 aa, Heterodera glycines
MDYGTDIEECTDEFKRLFEEKSLNTWESYIAGNFKKNPSGMDIVEVDFADKKIDLTKMPLGRLSRSHVLKAYKVLTELQQILERKEDGKAQPTSRGVFVDFTNRFYTLIPHATGLKSPPILDNLNVLKEKCGMLDNLLEIEIAYNLLKSEEKEPKDKDAFDLHYEKLNCKMEVSKSANYCYVINGEGLLLLCEVALGEIQEEKDAKELRKPKRGKHSVKGVGGTVPNPSEFEQLDGATVPCGKAIKSGAEGHSLLYNEFIVYDESQIRLKYLVRVKIKNTPLL

SEQ ID NO: 129011 - protein, 202 aa, Heterodera glycines
MTIEHAKFRVIEVLQMQKQHCKRGPSCFKQSILLPPRMFSFTWNFSKKCGRKQSELLWNTRIALRENLDSSEMEELLQANGNFKPKKGGAEAMLDKLVDFVVFGVPQPCPQCNGPLNYSTTTHSYKCYGTLSEYTRCLYTTRTPERRPFFIPKQMKSGNKFLKTLKTALLPARLYPAAALTEEIIVKPKAFKSLNAAERATN

SEQ ID NO: 129012 - protein, 19 aa, Heterodera glycines
MENEDETPKEPPYGAEYQK

SEQ ID NO: 129013 - protein, 55 aa, Heterodera glycines
MAILKNLFAYLENYLIVVLSASLPLEKIGTVLVSVRCFCVICAVTTTENLLFRVS

SEQ ID NO: 129014 - protein, 46 aa, Heterodera glycines
MCESVQKDKIKRKRNLTSTGQKGIVSFCISFWHETRNFIHFKIFFS

SEQ ID NO: 129015 - protein, 473 aa, Heterodera glycines
MPQLNCTASATITSSAHSRHHIDVPPEPKAKHDKRKTSNGVCYQQTPTDETFGASQLEKLAELRKELGDELLQETTLLNDNLSLIRWLTGWNNKIDEIVPRFRRAASVFRCLNLNQFVIEDIDDLNDFSRGVSAGSEYYPGGVLGYDREGNVVSLQCMGLSHPKQLAKCGRVSDLIKIQERKLGRKLGLKVIIDLDGFNTDHLSTIALKVYGNVLVTMQELFPDLLRQVFVINAHYLVKTAYNIIKPVLSEQSREKVVFLGSDFHGVLARDIGPENLFIRWGGTRTPTRGHTEGGTLRMGGVPPESLRYCAKNNPDHIDDEELIKLNVPARQRREVEVEVPEPGPHSIHWLFHTNGDLAFGIHRSDDQMEVWPTFHLLTDYVPEYGKVRVEGGVRYKLVFDNSGGTFFSREVKYGLRVKKVEESEEEEREHGAKEAEKTNGVTARGEERQSVARDTEEEKENTIRDGEGKAKN

SEQ ID NO: 129016 - protein, 179 aa, Heterodera glycines
MEAIEIVRNERMSREAEDDHKRHPLLMGYSAGAEHRFIADGMQKIRHSHLEKSLMTLPFTFVPDLLKEMGKCVRSNYKSDLAERVILFLTRIHHNQIIHSLELLSLIDDLRTVLPKHIADTLNCVGLNIAALKFLQMRLESRQNAKMFVAPRAENNEKASKKKKQRRKVKEIAFVSSVI

SEQ ID NO: 129017 - protein, 184 aa, Heterodera glycines
MDEMLKRYLKFAIKFMAKRQRISEQKLKLQGIGKLQALKALIKFYVHEKCEKEQANDGQQPSKSKWERLLPLLTTVVEDEEDGTNANFALEFDTKKKKKKTGGGRRRRRKKRELAAFALILCVALAVAILLLALNCKSVGLCLANRSGAQTQRQYSNENEAAVGVEATEEARVTTLFELLQSNG

SEQ ID NO: 129018 - protein, 95 aa, Heterodera glycines
MPKQNEIVLKYSFLDLTWFLDIEAVFYAISKTKKCLVVKTIFHISLHNFVSSARIETGIRPLERAARALQEEIRINSPMWPNFRPPATAPCFSQF

SEQ ID NO: 129019 - protein, 300 aa, Heterodera glycines
MRIFICFSALFLSICAFFDFKPIFAYDPLEFFDYLIECDPKAKILTKVRNDFSEGVEVSQNDAKELAKYLSSEKGNKTFGEVILSEASKYDKKREQMDSESAQNAKTPGKATENAKKDQKAQAKMKTAQKSSRRTNRLETSLMGSPKRIGNAIKEHVKKFLSQGDDIWALMVKVSKMYEQYEEMCKEIAEETIKNLIKQQKVREKCFRQHPLIMLIDLFKPHLEIAHDLSSKIMRKRTQMRKSLQIIAKIFSEYYEEEWEKLKNEIANIRLEELKMLSEKMDEFGKKFWEEIQKAEKRKE

SEQ ID NO: 129020 - protein, 915 aa, Heterodera glycines
ISGCFSGTQYFVYNLSIVSFSFIVVFEECLMSVAAGYAFDLLDGQQVDLFIAPPCTDSAQVALFVSTFYNIPSITWGQNSDSSFNSQSSQSNYPTLLSALPNYADFGQIIFGQIIISLCIFFKWSVMALIYQLSETGQCASFQQDLQIAINSNDKCDISYREEVKISSAGTSDAQYTISQIQSRARIVILCFDEFVQLRNFAAKLQEGGLDSADYVYLIYLIPGLTMDDSIESVNCVFYKIICVCFFSVFNLLFVLGGSKATAWWVDPNPTIQSAAYRIAQRSLYLMLDIFNKVATSGQVGNGTSFDQEVIRQVTQWPFFCTDCDQSLQASASSYAPLLHDSFYLYAMALSKAAKIAGALSPSVYRNGQLIRSQTANLSFEGMTGSNKFGSDGLRNFMTGSNKFGSDGLRNFIYLVSMYSSLNGDLTSYVWLQMNDAGVNSSWINATAEKLIWSSRNSSWINATAEKLIWSSRNGVKPLAVPLCGFDGNGCHMDFFTEYRGYVIAAGCLLLLILGSFAFGIYWLFQSKAREMERQNRLWQIAYSTLTPAGTKKKMMESKKMMESVRSLQSSTSSQFTRDSSHSHVSIKHNFNGIVYIMNGERVIGIQHSVGIRLSPQDMAELRTGIRLSPQDMAELRTMRLLDGMRLLDGDNVNRFIGLSIDGAALLSLWRYCSRGPLSDVISGSSSLTMDGFFIYSLVRDVAEGLRFLHASSIGWWHGNLRSTNCLIDDRWQIKLSEFGLRFFRAHEKREAKDLVWTAPELLRDNDIVGNKFGDVYSFSIVSSEIVNMKPIWEQDEAKGNVEIVNMKPIWEQDEAKGNVEVVRTGGKRAFRPKLEPSSQDLVRTGGKRAFRPKLEPSSQDLSPALLHLIKDCWDESPAERPKMETVTALLQSMNTGRCRNVPFSFFYFFGVYAF

SEQ ID NO: 129021 - protein, 265 aa, Heterodera glycines
MSVKNKNEIEQTLGNLIEFIKKNETFCEVKYLEMATKELEAVKKGKDGDKGIRIKQILQNRIMDTKLSILAKELPTKREMFENAKIGDIELAIFMPDFHAELSQAGQTNSYWANESDQIMKDYLQKAEELFRLANELIKPLKKIAGEQMEELIKRLEPEISKLISLIDDKENSEELSEKLEKRVDKIKEIGSKAMEIVLTMDTPKKEKICKTAEEMEKAIKELEKNTGKSDKVKAKMRKLKKLLENDKKQFVERPYKMERKRKGF

SEQ ID NO: 129022 - protein, 240 aa, Heterodera glycines
YRILLGRFNILSFILFNYFFKDVVSFTTIASKCSPLQVVNLLNNLYTLLDVVNLLNNLYTLLDSIIAEFDVYKVETIGDGYLCVSGLPHRNGHEHAQHIAKMSLAFMRNLGSFTIPHLPTERLRLRIGIHTGSTVAGVVGLSMPRLSMPRYCLFGDTINTAARLESSSKPMRIHIMRIHISTTTNHFLVNVLGGFVTQARGEILVKGKGVLETFWLLGLEGDPAVMRMLHSSDGNNATME

SEQ ID NO: 129023 - protein, 44 aa, Heterodera glycines
MRLNFNHQSAKLPSKLINDCPHGRQQFGITKDGKRSNLASLSAG

SEQ ID NO: 129024 - protein, 80 aa, Heterodera glycines
MVDSITYRLSEVYLLWRDAKQELIDTILEGVTVGLNKNIIRFFCEIELAYTALGNTWQIIEKTENLRKAPKHRKKNIYSN

SEQ ID NO: 129025 - protein, 131 aa, Heterodera glycines
MIIENEFVYAGHSSVCVLMKLIILLSTVCLIFMNANSAEDWQIALTFRKSMQIVVEIIACAICPLPMQIDVFVSTVNSDGHTVPMRMPLDVLFSICKFPSNSFFIQMIVFQFHYSNVLPTVLAVSGDASPL

SEQ ID NO: 129026 - protein, 122 aa, Heterodera glycines
MLSMEMVATKDDEDGEGQQLQQIEEEDNDNADILTHYIKPERNLWLLKRRPTVGGGKWQKQWAQWEAEAIGWNWTNAWNVIEVANEEDVDVIEDGNEHLDMDEVTYEGEAMDEIDEMDGTDG

SEQ ID NO: 129027 - protein, 112 aa, Heterodera glycines
MERNKRKFAKIVSSLKKDGIEISESATDTLFVSNSSHLVGVPFESLELLFRRFDLHCAFTVYPTNKSYSLVHFSEVNLAIAARNALNGTKPKDFPSENAAQIHLFFVRQSGV

SEQ ID NO: 129028 - protein, 56 aa, Heterodera glycines
IDISAEKWLMHYEADSLAKLENPPSLADGINRELERHMVQACLLLASKIEEEPRKP

SEQ ID NO: 129029 - protein, 68 aa, Heterodera glycines; identical to SEQ ID NO: 127362

SEQ ID NO: 129030 - protein, 72 aa, Heterodera glycines
MAESKVLYYTNICTDGQSESNPMPFGGGFSFTTTVPPAANGPFQFGAAPPVANGNVFQFAETTDCKAIITFC

SEQ ID NO: 129031 - protein, 118 aa, Heterodera glycines
MRNGSEVIDGNERIWWQKVLGQGTAENDRHGESAEAYQKQRDGLIVRQNGRKRAQGWTARKMGKKGTKGQKEKEKAKRKKRKGQKEKAKRKSLKGQKQKEKAKRKSLKGQKEKRKGKA

SEQ ID NO: 129032 - protein, 205 aa, Heterodera glycines
LPSVPHQNGVSSDGFGPGQMAILATERLDNTLAERESEQWPLEGLDPQLCNGQTFIGEQFFEGKRTDGNAKFGGEAKVTKDNQRRSGKDETKVQHPLISSYLRCYICRIAMRLNAADRAPHWKCLNDWLQTYAQQPVNPVTHQRLNAFSSDLFAWPRHGMGRPMRRVQRRLLLGFAPVVGVLPFARTACRCAAANAQRIAPPLFG

SEQ ID NO: 129033 - protein, 272 aa, Heterodera glycines
EFAGVALILLGFSFRVDSFVAFFLDTFDGLSLSTTLFTHILQLGTDFLATLVHIPLEQQHQSEEEDEETDESRRLPLKHFRRFLHFVLSFWHSVSPSFAPSPPLSHHSLNLPLSTQFDFVRLLVRCLQYLCIIWPTVHRTFLPSAADQSPLIEDEEIVQQLMEQQQNQLQLDEDKAEQSQFNVTLLRNVCTQCAEKIADALKPFLVNENASDEMGLAGVELLELLAQFGPADVEEGNGDASAVVLPGVLLTLAKTIYKHFDALRAIDSFSHF

SEQ ID NO: 129034 - protein, 161 aa, Heterodera glycines
MTFVGTENVQNARPQQRSAFLHFGEQCKAVQNQQLLSMAMAFDKHSDTEQSLLQLPFHVRGILHRPRRMDKLKEWVKVELAFWEVLLSTENHFQLSLVSTSSLSPHEIAFSIGWDLSRPQPTISEALSHIGFKEWPKAFTSTASDIERKDNENEETEEDDG

SEQ ID NO: 129035 - protein, 163 aa, Heterodera glycines
MVKIKSKGNWGAFERSRLLETQNDKPRNWHFGGRTARATARLKTPSANQRERPTEKDSFVGYGRLCGDWNGNAGDEFRMPNGGQTENAKEFHQAYSLVDGEGEEDGECEDSAILDKFHSEKTEENETNEPKQQKDSEEKPKMEQIGEEKQRKTKRKTEKSRIL

SEQ ID NO: 129036 - protein, 131 aa, Heterodera glycines
MARTTMSFLFNPLNEDQREEMCETWLYTFILFDSIESIQEHIEKAIAPAAGAHEIEEWMSNLDLAAVSKMFRINVIVCELVKKEVYRWQMYSPADLETSLSNVSQKKSSPSIFLYFHGQHFELIKQPQKIN

SEQ ID NO: 129037 - protein, 17 aa, Heterodera glycines
YREAIPEGFGLPINLAH

SEQ ID NO: 129038 - protein, 52 aa, Heterodera glycines
MLPLPTAPHRPRLLSVISRPSRIGEEPPLMIHEAAVLSSLTIFPIILAFPKR

SEQ ID NO: 129039 - protein, 135 aa, Heterodera glycines
MSLDTWVGRYPETYGYFDGGKIYGHNTGFFDGFPEFSSGDVVGCGVDCATHEIIYTKNGERLSECGKRREREKGGEKLAKKPYLTCCVNNSSDSMFETKNSTKPRLDPPETQEIETEKIRDPRLFNKFFVHFKID

SEQ ID NO: 129040 - protein, 469 aa, Heterodera glycines
MLICVGRHLKSANRRDEIMAKLHLEKMMAILEEENDETDGPFKGILINHKESFGTILNKDGIQKINEWLNLETKYFSLNEKFSSAASSSDDEQRFKDANYDEQIDEDNESNNPNDSDKLERNKQKEMENSRENLKNENFEMNYFMGGQNQEENKCKKEKCKWSKKESEKMEKEKRNGKKETEREENSEEKEEKENKGMERKENSEQIGEKQNEKKRWREKEEIKRKKLLEKKEREKEERSKKWMEKEKEERVIKRKKNLRKSEKGENYRFLSKESVKAMKQIKIENYSDLLNEKYLAKFYDKFLLNELEEENCVIYLHVAAFVRAIHSKSKFIKIRTKNHETKISKSFEEKWRTFAKNAMPTEGEQMEIELQKLFSLDIALNEIIYGPIEQKQMEKAIEMLEEKRKGKSKNKLGTYKRGEIENILEQLHLQIFGILCAKKLTNFVENEKIIIGERIKLIMRKENGEKEF

SEQ ID NO: 129041 - protein, 106 aa, Heterodera glycines
MEQMAFYNSGSSTSSHSSDYADGLGPLGGGVPVGVRTRLASQDTANKMMVFDPANVYSRPAQAEVPRCIFSGIPVRIPAFVFYFIVPKVIAHRYLLITLFTTDIEK

SEQ ID NO: 129042 - protein, 158 aa, Heterodera glycines
MGKLRDWTSGSYVQNVLFGVSEQCPGSAKLLGAEGGAAYIIDEDSASDSFGGWDAANGGGVAVQPIGYSNAINDDPSGGAADHPLYSGIDSVYSTAGGLSVLALVVLVGWRISRWRMLSELARHTSSGMCKIIFRGQANSPKKYFRWRKHLLFLFSVT

SEQ ID NO: 129043 - protein, 116 aa, Heterodera glycines
MAFLLPICLSYGIPQWSVPVLSNFVALFGAVNPDKPLTDEKVKIYFFCYLYFSPSLLMSMLWWCHDLMRNPDFLCTKMSEGHYPFSYKSIEKGQISNFLHVFILFFLLKELFLIGN

SEQ ID NO: 129044 - protein, 34 aa, Heterodera glycines
MHVPGDFDNDRSRQGLISTLWTRQRVISTAPINF

SEQ ID NO: 129045 - protein, 44 aa, Heterodera glycines
VLSSPWRRHSIFLGSHAIAASEEFEKCCVNGMNLAEYLSRIDGE

SEQ ID NO: 129046 - protein, 36 aa, Heterodera glycines
WTPLMYAAYLGHRELCQLLVLRGADVEAANERNQTG

SEQ ID NO: 129047 - protein, 215 aa, Heterodera glycines
MDIVHVVTSQQRQTQHYATPPMVQRYNMWHFAIFTNAFSFPVKPLYTPYLYAAMAPPHPQYNPYAYYYAPVAAPSAASSSSSAVPPFLHHPPPPHVHLMPAPPPPPAMFAPLSANSAAGTSAANNTASTSNYNNATGTSNFGFDCPPVDSNPSRWSAETLCRWLTAAGLADCAQRLLNEEVDGACLLLFTPINYQNLGLKLGPMYLRQFTFADNR

SEQ ID NO: 129048 - protein, 219 aa, Heterodera glycines
MKGVGAERCRKFKNAMDTQMKRFSENLWATEKPEKIEYAWAGERCETTVNDYLEKGQGGILDFSLITSFGYKLNPYNGWEEMQRQTFLWEIPEPSENYWATHFPVGDFFSEITDDAIVVESEQSVFFFEKETAEEREGIIGVPEEAYKMSNDVFILIHSLSKKQKREIMEKVEVSKKGRPFKQKAQLKQKNVQKQQNESILVNSNSTSSQNVLNVTTIM

SEQ ID NO: 129049 - protein, 183 aa, Heterodera glycines
MGSTRVSNNPKFGFNSQRCAHNLNVTFHYITLHYITLHYITLHYITLHYITLHYITLHYITLHYITLHYITLHYITLHYITLHYITLHYITLHYITLHYITLHYITLHYITLHYITLHYITLHYITLHYITLHYITLHYITLHYITLHYITLHYITLHYITLHYITLHYITLHYITLQTQICL

SEQ ID NO: 129050 - protein, 65 aa, Heterodera glycines
MLARKFRGIQGSQSWAKYYRIVERVRPPPISKVGVGSLLLRRSWVRIGWVLIATDWFRLTVGGAP

SEQ ID NO: 129051 - protein, 500 aa, Heterodera glycines
MFDAKPTEKLQDLVTQAKTIFEAAGMKLREFYGSNIEELKKLQPDDLTKDLEDNKVLGIRWKPKHNRLIFKLPIFEGKITKRTILSQIAKVYDPLGLMSPVLLPAKLILQEVQNLNPKWDDELPANINKDWFKLMAQWLDRGEAITIEFPRHIQAIDSVEFHCFCDASKYGMGIAVYQKAKTIIRKDECNLIYAKSLVKPIKVAAHDDTIPKLELQALTLGVKAVKFIQAQIKFADHQVIMWTDSQCSVERLRENKRQDRFVANRLQKIREANFQVRHVRTDSNPADMASRGADPQCLRTSLLWRFGPIWLSKADKWPESNVIYRPRDEFKEVEKPPIVDIPEQPIQAVHSFIASVMEDSVSLAGSDDESQQPRPKKKFKIPKRRSALLRPIGQQQSPLQGQHKRRKQLQDSGLRKLFQAISDQQGSSKATTKAIEESREVQKAPRHEQIEHEQRMVKKSQQEANRHLQPEKRQQKEIQEVPHSTTEEQQRETKRQFIKV

SEQ ID NO: 129052 - protein, 223 aa, Heterodera glycines
IEENLYVDNIMFDAKPTEKLQDLVTQAKTIFEAAGMKLREFYGSNIEELKKLQPDDLTKDLEDNKVLGIRWKPKHNRLIFKLPIFEGKITKRTILSQIAKVYDPLGLMSPVLLPAKLILQEVQNLNPKWDDELPANINKDWFKLMAQWLDRGEAITIEFPRHIQAIDSVEFHCFCDASKYGMGIAVYQKAKTIIRKDECNLIYAKSLVKPIKVAAHDDTIPKL

SEQ ID NO: 129053 - protein, 1050 aa, Heterodera glycines
MAAPIQQKLGAALKVLSRSRTAAELNIQADQAASNLENALNFEIQLEKVQKDAKTMDIFLDDVREALTAWADLLRKLPALERDPAEADFNKFEKKERINDKVDEAALKLRDLRDLIGTLTFQARLFRSKADKEERDAQAAYAQATQHTAQQQTTKTPSFTPPFYQFQPIQLDKFFGNKRKWPEFYESFKSAIGTHALSKAKKFNLLRNLLGGEARELVAGFRLEDNNYDTALQLLKDTYGAPDEHIRALHFELANLKPCKNLRDTKEFLLQLDRLTRELNNTGEDIEGPPTFLMLEKKLTPGFLRTILTKKGEDPARWNTTKFRDVLNEAVRKETQIQEVMGEYGHSQQHPQQRPQPQRPNFSASKFRDRAPIPQQRERTFITSAVDDNHKRLINRQPQYKTQQQRPRAPQPQQRNLRTFNNQRQFPTQRANATNNQRQFPTQRANAINNQRQFPTQRANATNNQRQFPTQRANAINNQRQFPTQHANATFNQRKPPSPCIFCDNDHWNKECRKYSTIQQRREVLRTKALCFKCLKSNHQASNCPQPKKCFKCKQPHPTALCYADEKPPNQITSAMLGQTQQNVSITTQDGSNEQTASTSQMCNAVNGSDTRALLMTATSTVFNPAQPHLSMTAAIFIDPGSHRSFISSKAAQLLDLPVVHTEECHLTSFGEREPKRYISDLVKLGFLCTSGEKLIFNLNVMKFLVNDMPMIQLSELDKTVLRQQKLNPPHEQRQPDIMLGIDVWHELQVQPIEKLPSGFTLCRSKIGKILSGSRRIEMHQTPNVTFVMSVHGTEQEEANQSVTFESTKEETEVFTIEDDFKKDEQLNNFFGLNLIGMDDTSTPIDQDHVMIHFKKNLTFVNNRYQVALPWNDRVDALPSNIHQAKARLVSLIKRLRSLNLIDKYQAILDEQVQNSVIEYIGPPESPSSAWPVHFLPHRAVIRADKATTKIRIVMDASAKPKNCPSAPSLNDCLYTGPQLLKNLTGILLRFRRMEHVILADIEKAFLQLSIRHTDRDACRFIWLNNPETAELNPISHSELRLYRFCRVSF

SEQ ID NO: 129054 - protein, 180 aa, Heterodera glycines
ETARLARLNRHTHVSSPTLPQQGGQRRTGRSSSSFKSAIGTHALSKAKKFNLLRNLLGGEARELVAGFRLEDNNYDTALQLLKDTYGAPDEHIRALHFELANLKPCKNLRDTKEFLLQLDRLTRELNNTGEDIEGPPTFLMLEKKLTPGFLRTILTKKGEDPARWNTTKFRDVLNEAVRK

SEQ ID NO: 129055 - protein, 341 aa, Heterodera glycines
MALSQLYLKECQRNVRVSNPTLQARKLLKRENLQARWISETTIEVFPCVPISLSNISYRTTKDCYKFIPVTIHLPNATRDAFLDPEMRILSLISKIASCSPFRYHHLQVQQNPNLWVRIDSRNGNVQRLAQTVIHELYDTILNKTDNDLDLHPLIFHQWQLDNDTDFASLPHIDEFEDSEEFKNKLEEQTTQRAEALGALPGGIEGWTIKWLQERLQEAIQWWISLASAYSTFLLCRDVILPCLIAYFLNPIRITLMTLIGFRPKNQPTPQIQPQYEDMPLREMPSTPIRRKRRQLPEQSTPPIRLDTTTGTASFRTRARAHSATEDTLFGRLRPMKLADD

SEQ ID NO: 129056 - protein, 17 aa, Heterodera glycines
PVNSCIGCKCRRCCTPN

SEQ ID NO: 129057 - protein, 35 aa, Heterodera glycines
MPMSKAKLCNSVLNTSRNECLSTFFAPGNTVSRIN

SEQ ID NO: 129058 - protein, 80 aa, Heterodera glycines
MPAMSAAASEADLRNDLMRLIIGEEHLLKIKAQYLDERTALNLRRPVNYIEVEHVRHFEKRPGHGCTARKIFLIFMRFVK

SEQ ID NO: 129059 - protein, 20 aa, Heterodera glycines
MNAAHVECQRLVTGLKRRAA

SEQ ID NO: 129060 - protein, 218 aa, Heterodera glycines
SYSNFSLFRFVLITNHLFKVLKFNGCYKTFFVLLKNNKISEYQFGFVRNRSTTSQLITVVEDWYEAIINGKNVDCIYIDFQKAFDSVPHNLLLYKLEKIGIKGKLLMWIKGFLSNRTFRVKIGDSLSSSKKVTSGVPQGSVLGPLLFLIYINDLPDALPSGVKIKLYADDVKLYICYKARADTEIMHKALHNLFEWANKWQIKVSIQKSFVLYLGSNN

SEQ ID NO: 129061 - protein, 81 aa, Heterodera glycines
MNQQQVIKTKRNNEKLEYDGALYVLHKFSDDRLKKFWRCEFHGPSDKCKGRLHTDLNNVVQKVVGVHSCDMNAAHVECQRL

SEQ ID NO: 129062 - protein, 22 aa, Heterodera glycines
MRKLQFVGPELLLIRMEQPKGD

SEQ ID NO: 129063 - protein, 314 aa, Heterodera glycines
MEDKTLLMWDTNTTRACEFSKIGTWKGLQLDNIWISDEVSFRLTFLNNTKKVNSCGLNLIKSEEGFAVQDLPSDDSNKSSKRSRKTRSLESWVTESEMNSKLGYLDEQVREMLTLSFSQTIKSICDYMLETRRWAATALLSDPTTFARKLFQSGKLVAKVAGPELIKVWPCIELQAHDYKFAKIGNSADSEFECFDKIPIKFRVKDNKRMAFIDPRTMILSSDARLAPCSEYRKQLIFVRGSLYEVDQIDAQVKQVNANRIDGFSLNLSLAPTYARHSFLHLALVNVSDFIGQFYDANFARESELTFQLKSEDT

SEQ ID NO: 129064 - protein, 123 aa, Heterodera glycines
NNCQFKAGQCEMEDKTLLMWDTNTTRACEFSKIGTWKGLQLDNIWISDEVSFRLTFLNNTKKVNSCGLNLIKSEEGFAVQDLPSDDSNKSSKRSRKTRSLESWVTESEMNSKLGYLDEQVREM

SEQ ID NO: 129065 - protein, 167 aa, Heterodera glycines
TELAELKTKSDKLTSELSAVKTFARKFRDERNKLELEKKELEADLKSKNEELVRLREQSAASALETTAAALSADTSAAGEPRSPVPPTLSGTVPGAIAAGALSAIRAAVGAGEGGGAGADNSLRRRMDQLMKEKQELLDKVKKLEEHNKVLQRELDESNEKVTRMDM

SEQ ID NO: 129066 - protein, 92 aa, Heterodera glycines; identical to SEQ ID NO: 124679

SEQ ID NO: 129067 - protein, 107 aa, Heterodera glycines
MEEFVGIYQFHCHPNFSGVSGLYPLQFSSRGRISDRKKGRLMLDIEKFSEFAQLSAGSCKRFLEDYVYIGGLPWIIMAKINTQIESTEKWMDFFLWCIGPKQGRIEM

SEQ ID NO: 129068 - protein, 687 aa, Heterodera glycines
MTIASACVKNFALNHLKPNSLAIVPEKGYTPQQNQSALAIKYLDWYSHINNVNIQTAHSRYGEYVFKREGQVYQVDGYIKGENGKRDKIIEVNGCLWHGCEECFEDLDDETKMPNGKTLGQLREREVRKHEILSRYVDLDVIWEHEINEQLKKDKQMREFFDNWKDHSPIKIRDAFHGGRTGPMKLLHTAKPGQKISYKDFTSLYPWTNFSTDYPLGHPKIISFRLNEQTVNWRAPSDNPYKGLLKVLLLPPNRNINVTVMPIKFDERLLFPLCEKCAKHITNEHPNGLKDNDYSCPHFNPNDRAFVSTCTHLELNAALEVGYTVRKLFHVLQYDQWSDNIFKSYVSEMMALKIHATGFPSWCSSEEEKKEYIEENRHRFGILLDNEKMKAEPGKRYIAKLCLNSLWGRFSMRNLLSKAIINNDESLIRQYTDDKKIELVDLEMIDDDNDVFMLTYKPKEEFVDENKYSNVVISLFTTSAARLYLYDALKKVADTPDCEILYFDTDSVIYVHPEDNDPLPTGKGHLGELTDEKPDHNILEFISAGCKNYGMKLQRKDTGEIEHDLKIRGFTLDAQTVQKIHYDTVKDQILRYGSEDPPDPIIVTYPHFIRPNLIQGKVYTHSLTKHYQPIFTKGHPSEMKVDELFIIVMRSLVRECLDWGPKGEAVPWVEKCIIKHINMYAELSNGR

SEQ ID NO: 129069 - protein, 89 aa, Heterodera glycines
MCKLMFEMEVRAHMDSVAVRASPTAVSFLTEFNAKLAEQQQGKKCETHLIVSYFNELFNVWEPVIEPVLHKDKGWQNWKLALKVLSFFH

SEQ ID NO: 129070 - protein, 194 aa, Heterodera glycines
KKFSNDSSHFLSLKNTFKTFNIFFAGRQFLTIAVNFLALVVLYMLYLLFGRWAQLACNITGFLYPAYYISIKAIESHQKEDDTQWLTYWVVFALLNVVEFVVFALLNVVEFFSNTILYYFPFYWLMKCCALLLWLYLPSTLGAQLLYTRIIRPFHLQQHKNIDSMYNKLAGGEPFSKNYLNLQISLMVNGTMCQ

SEQ ID NO: 129071 - protein, 164 aa, Heterodera glycines
MTVQFFSQEQQYKRQLKAKNETAKFLQDSLEEIALARQEQGHAHGAQAIEFAQFLKKVRTGEGGYVNNQELFKFSKLFEDELTLDNLSMVHLRALCRLLGIAQFGTPEILRFRLRMKLRELKADDQLIEREGGVEVLSAQELQAACRARGMRALGLSEERLRQQ

SEQ ID NO: 129072 - protein, 122 aa, Heterodera glycines
MVMEREIWALLHNLVLAEDPSNAATYLIDEWSQKFGKMHKLLANCGSYDNTDPYDEAMRGLLMVVMDKEKIPIKKLDECRAIVPTLMANAAHRHVGQFANGSERADKSLFRQDFFGRRVQMK

SEQ ID NO: 129073 - protein, 1173 aa, Heterodera glycines
MGNFRLGILTQTEHTTQIHLQNRATIPPPSAKCAGRSCPTSSTTDTTDRRAAICQPTTKCAGNSCPTDASTVAAERHAANSPSTAKCDFNLDQIVVAFSQSLGVSSGNSCSTNSTGIRRTAICPSAAKLAVSSTRKRSGNPTTATTAPAERRATIRPPTAKRTGLFYALEIARSYQLIGKSITENKFRYLMKTEKKQREMAIELMEKAGISTDDKAFGTQHLEAVQKYWDREFPDMFRIVAFEMKTGLRPIFKGEGVRKHEVCVIREGNHWEGIKSVSWFFGVRNFCVGCEVTYDRPERHRMECKERCKKCCRMGFGFPCANVCEEMHCGECNLKFYNPECFEAHKKAACNEYKKCEKCGEVYQTLRPQKAYRIVAYDLETTVDGGEHRPNLVSAARTCNICAGEERECEICEGPSKITWSVADGFDPMSEFVVWIMGFQRFETIAYAHYAGRFDSHFVLSELTKKEIATELMMADLKIYQIKAGRVYFRDFWMLSQNKLADLPKTLGLKTAAKLYFPHKYNKNENFGKRLSNLPPLEDYCPDSMKEEEAAKLESWHNENFQKEFELGEQLKTYCENDVEILMESILKFRRLFLGITGDLDVIKDSVTIAGVVMKIFRAKFLKDRHIPIMPEGGYERAENQSKIAVKYFEWLAQKKGVKVRHACNGGEVEFGGLKECDVREELKKNKEMKKFFESVPDKGPINPRDAYAGGRTMPFCLYAKATEEIEISMFDIISLYPFVNYDTPYPVGVPKIVVSRNFNVNWTAPDDVPYDGLLKVKVIPPKNLLYPLLPVHIDEMLLFPNCWSCARRAKNEFMMTKDVKKCNHRPTQRAFLGTFTSIELRKALELGYRIVGFYRAYHFEQFDSQLFKGYVRMFLKIKVEASGWPAEVKSEDEKRAFIEMYKAKYDISLDYDKIGFNPGLRMIAKLGLNSLWGKFSMRNTLSNTEIVGSMERWMELGRDNTIDLGARGPLLQCSVRPSDHPCPPLPTIESRHCFQGVHAQAAIIWGIKMYSFQKYFEEALEKEDFFWQKNRAEVEALLIEASNYKIIIHRDNESRYSDYIATYRRTPLFCFCMIERNLRFFYDTGTGTPIGRVTTVLHVTVEASYTGEGFISPMFSFWFYWEGRSQTTNESFTSRLYLYTVSMLRAMGKAWGRELLLNPVEVLIDMFYQRID

SEQ ID NO: 129074 - protein, 168 aa, Heterodera glycines
MAPLTMDQMQLLAKLWSNGFTLRAKMANRSDCIAIIILVHRISNGSTTSKSATTSVSYNIQLYFHVNTIPTEPFELVNKRTNEKLTLKQEIDEFDVNVYNWLLQRCPIGETARVPAIKWGDSLNPSANLNSIRFDLWSFDKSIEPLSPPTEEEKEEEEADKSNGNVVC

SEQ ID NO: 129075 - protein, 235 aa, Heterodera glycines
IPIIYIAYESVQILDRPRTQRLFTFDHSYWSHDGFRVSNDGHLVPETRDYADQKRVFDDLGAQVLRNAWAGFNCALFAYGQTGSGKSYSMVGLGKNRGLVPGLGKNRGLVPMICDEMFHSIEAEKKKYIQFKYIQFKVTVSMFEIYCEKVRDLLSANPTNKGPIKVREHPKNGFYVEGLSSWPVEGLSSWPVASYRAVEKLLNEGTRARTIAATVSNGKRERERRKWSSTNREKK

SEQ ID NO: 129076 - protein, 20 aa, Heterodera glycines
TDQKRTKLCRDTERKRNNLF

SEQ ID NO: 129077 - protein, 91 aa, Heterodera glycines
FEYPKRTLEKIDFFVFGAVPPSRCAQIYGETESFRNSFPIACTLILRWIFAPHNCLSTPNGHLKKSIFLFSGHVPPNRCAQILWGDLIFPE

SEQ ID NO: 129078 - protein, 198 aa, Heterodera glycines
MQPGAKKRTKRKNAENTHGEAMECEEEEEDAVDEDAENNWMLGYEEAGEKPESVTTYAYAHAGSRYDHVLIYGEMLRMGVRPELIRQGNHLLEMKTRKTGVYTTTVFRDSYKLIPIKLANFVKTFGLEIEGVENKKYFPHKFNKAENYGTVLDTLPPIENYYPGGLFPAERAKFEQWYDENRETGFELSEVIADYCKT

SEQ ID NO: 129079 - protein, 150 aa, Heterodera glycines
MAEAAIRQLSDVFQQFLTAQQANAAAPAQPIPMPNLANFDCFGLGDHGESDIEGWLERFALALDCSTPNLQDDLKVKLLLTKLSETAYAEYSKHCLPKKPTEFDFAKTSEMLLSLFAKQNQCGSADMSAYGLKSKTRRNFAASSTATKGC

SEQ ID NO: 129080 - protein, 980 aa, Heterodera glycines
MEVTIWVNDIPIKFVLDGADLTVLDEVAHKAIGKPRLTHCNEQAVYHDGTSCKLLGKGTARFSFGGKTINGQYYVTKKGSLNLLGIDMLDAFGLWTLSEGKLTKKSPILQQETTLAALQTKFKKSPILQQETTLAALQTKFPLVFAEGLGHCTKAKAHLELRPEAVPVYCRPRPVPYNTRLVVEEELDRLLEQKVIKSVDHTHWAAPIVVVKKANGSARICADFSTGLNNALLLHQHPLPLPDDIFAKLNGGIFSQIDLKDAYLQVELDEKSKEVCTIATHRGNYQFQRLPFGVKSAPGIFQSIMDSMLADCPFATAYLDDVIVVSRSSEDHQKHLEEVFKRFEKFGFRVKPEKCFFCQDQIKYLGFIIDQDGRRPDQTKIQAISEMPVPTNVSEVRSFLGMINHYQQFVKNMRFIRQPLDELLKGQSVAMVGRLSKCLEVVSADASEHGIGAVISHRVSADASEHGIGAVISHRFSDGSLKAIAHASSSLSAAEKNYSQIEKEGLAIVFAVQKFHKYLFGRHFVLQTDHKPLLSIFGNKKGIKACTANRLQRWAITLLGYDFEIEYQNTADFGQADVLSRLIAKTPVPDNEVIIANIRESNETGVLNFVTKTLPLDHRDLANAAKSDQVIKNVKKFVCSHWPTKNKMAADIVPFHRRRHALTIEDECLLYADRVVIPASLQKDVLQLLHRGHPGMKRMKALARQYVYWPGMDEQIENFVKMCNECTMEAKMPVKSELHSWPKADGPWKRVHLDYAGPFMGKMFLIIVDAYKWPEVFEMRSSNSAATIDKLRSLCASYGLPEILVTDNGTQFASKEFKEFVTENGINHLFSAPYNPMSNGQAERFVDTFKRTCRKIKGEGASEMLTTFLATYRTTPCEGKCPAEMFLRRKPRTTLDLLRPTMEKQFNRRHGAKTMEKQFNRRHGAKPRSFAVGDKVLARHRLSQPWRPGKITKCKGVIYDVEFFDGKFGRFHANQLLVRS

SEQ ID NO: 129081 - protein, 34 aa, Heterodera glycines
MPIHKFNFLICHGNISSKFNCDNLPFITIESRSN

SEQ ID NO: 129082 - protein, 205 aa, Heterodera glycines
TIVHLLSIREWLVSPVSLIIDGFFSIVDREMQEAWKLLNIRVPSLKDICTKSISENEKALEEFRTFPYESFYWNKNRKDLKKRMANASPYSVAVHKDNNHPFSSIPKSRRFRKNLFSFLIRDGDYRLSWDFFKHISRRIHCPVTKFYRYINGLVQIVSTDKKKPRIFIYFYQEGEGKYRAPSSYQGWLMRTEIDFDEIITTYLVK

SEQ ID NO: 129083 - protein, 71 aa, Heterodera glycines
MAKMPTVVSKITKYYLKFCIFKATIEPKNTKRDGRAAENEKTWICENCKKINGRLNKVCFECATKRPLKMA

SEQ ID NO: 129084 - protein, 24 aa, Heterodera glycines
CTCGVVVKLSTFHNFSPGFNSPLG

SEQ ID NO: 129085 - protein, 360 aa, Heterodera glycines
MSDRRKEAEEKMEKAIFISADCWLCVFDLLPPRQLGLGIAMISHRFDYYVDEHFKTRKWALKIIEIRSKIGENGTKEMAIVNSNCESLPIPQIQLPKKIIGFKSISIYFIDQNVIAFLHRFRQLFAACQINLDIYAHNDRISEFILHNIWPMIVKHICAIQLSDEVFYRLRKFVPSILDDCPSLRVISAYYTGFFAEFPCNDSVAASDGQAVVKWLFTPLQSNVPKVFKCWLYMDAWTWPSNIEPFKTAFSNASSPVNFIVVMCFIPTSFPDFVVPFDLINELTREQLALKRTDDYSNRFLLVRCPIARDESKWTKWEKEAIDWQFYEQWNIIDIRINDEGEIGDGLLNANPGPSDHQQK

SEQ ID NO: 129086 - protein, 102 aa, Heterodera glycines
MSLWMTLPGKMCSVMSGSNVAASRRITGNKRFLRSVTINPAVEKSRSLSVDVAGAEKYFFDSLDSETKCLLHTEAQQLFCFAKNDQAFGRWMTNAADRKIAT

SEQ ID NO: 129087 - protein, 182 aa, Heterodera glycines
MNQLHNFTAKKLYEKLALADDQFDEWLVELGLLHGRRTCPQCGNEMGRCQPRPNQHYGKWRCKNAQCNRPEMGYLVGTFFAGSHLAIKQVFSLSYFWAQELGTQDQMMREIDIGGFVNCLVEVTQITMIGPQTVVDWRNFFATFVPGMCRIGIVINFNRILGHNRNRIIVIGFCLEIRLLHP

SEQ ID NO: 129088 - protein, 111 aa, Heterodera glycines
MQVNPQNIISLLQKHFSNNFNDSTISPVEIEMANNFISIIERCLKNEEEIEIVEDLAFDENADKKFKFTSYLGTEAYSAARKKIWQYNPGVVYPPTKFHLEVPPSPEHSPL

SEQ ID NO: 129089 - protein, 272 aa, Heterodera glycines
ILWSDLTSMVLKMKSIPSISEHLGDLRFRDQPPKAAIGSALKNLYFLGAIDERVSLTQIGNHMANLPVDPQMARALIASKDYDCIEEMLSIAAIMSTQQPCIIRPKKIDRSRFMKAMEQFANYHGDHITMMNVYNKFMSCKKVNTSEEERKKWCNQNFVRFDALNEATLIRKQLSDKIKEPTRRNMMQFANPNSPEYFKNIKQSLLHGYFMQIAQRDGERGRLFKPIVDRDMSITFDKFTFVHPESTLVIYHQLVETKNAVTMRTVTWIDKK

SEQ ID NO: 129090 - protein, 45 aa, Heterodera glycines
MVDRSLLQKGKKCFPQKVQFEHKRPGLISTREFSQRRLSEPTDEP

SEQ ID NO: 129091 - protein, 98 aa, Heterodera glycines
YLSAPVEDALEAAATAIIQIHVEKQYGDILVFVEGEEEIEKVCDKVKERLRELKRSDLRKCVIATNIAESSITIDGIVYVVDSGLAKHLKYDTKKGIT

SEQ ID NO: 129092 - protein, 49 aa, Heterodera glycines
VGVNSVWPTPSQQCSKSYNFFLCWPNFTIMVSFESPICLKDIYKLFLRD

SEQ ID NO: 129093 - protein, 54 aa, Heterodera glycines
ELLVLFDSSMCLLLICKISKIFVKFQKSYGQKELKSPVIRTFFALILLCINKNF

SEQ ID NO: 129094 - protein, 34 aa, Heterodera glycines
MADPIDSKYFGFVPATEEQQEHTLKRGNMPKGTK

SEQ ID NO: 129095 - protein, 118 aa, Heterodera glycines
MGICQTGNSADVFCLGQFVPSAAVLSSSSIGAAAGDRQQKGRQQQQNTAMANVVKTEQQQQHNEEDGQVEYDQLTPTIPSLFGEDTNRLDVRQQQQMCHVDQLMKTCESIGGHRFMHN

SEQ ID NO: 129096 - protein, 86 aa, Heterodera glycines
MKHFNCWDYEARSFDYPYYGSYDLELIDAKNLTICYTRRKYNNVTANMFISFPTDHRQQLFPFVSLLSPGDQIDANFGPNFLFANT

SEQ ID NO: 129097 - protein, 267 aa, Heterodera glycines
MALGAGQRPLRRPGEHAAAAEAVVFGGVSHQYLDAEVINFLQRFRRLFNTYISLKFTIPITEFRAWQAVARHIWPLLKNGLGTLVNVKRKQLALMRKHISPTFLFDCPNLVEIVSPVLPERPTVDNSAAPETSSRDLYMWLHTTRVDRRPLVYKLLKWNNRWDQFVNELMMSFNTASVPVNYMVFTSFEFIYTRREQMVNMLTEERLTMLTNVHPKRDRCLRIVLRPCRETDRAENRSNAQTVDQQQMSPKHNQWPLGWNYLIIIFS

SEQ ID NO: 129098 - protein, 133 aa, Heterodera glycines
MSSLSIKFVNFFLFPLTILLAQCSNSPDGFGAKLEAKIHKLPSSADVPMNASLLELLDQFETIEFDGTVKGKVRCGFGLNQCMKMECTLDAYSINNMEFNEGFVVGDFLTLTQNPQGCRFTLALFGAKSHHIY

SEQ ID NO: 129099 - protein, 59 aa, Heterodera glycines
NGAMVGWTVGNHFGTFALILAVGILHGKRQHFKLKIKTTFNVFPLFALSESNSDSRLKF

SEQ ID NO: 129100 - protein, 256 aa, Heterodera glycines
MHGGKRPSGQVINKYLRVQDKQSGEQVRDRRGTERGRGIERGRGSGRETKRGTEKEIEEEQKVEKDQKEKAEEEQKGEQKLEEEEKVEEEQKGEQEEGQKRNRKRKRKWKRNRKWKRKWKRNRKRKRNRKRNRTGTESGRGSERESGRGTERGTEIGRGRESGRGTERGTGRGTEEEQKEESGRGTESGRESGRGTERGRGTEKEIEQEQKVEEDQKEKAEEEQKGEQKLEEEEKVEEEQKGEQEEGQKRNRKRKR

SEQ ID NO: 129101 - protein, 70 aa, Heterodera glycines
MIYPGLKNDYIIKTAYCSTNVRFHSFFIRTSRLYRSLPKEARLLNSTEFAKLLDTYDIDVLLLKPPHLIQ

SEQ ID NO: 129102 - protein, 195 aa, Heterodera glycines
MDKVTPNFKEEKRTNAIVVPPKDAIVKRNNKTAVIAHLHVFYQKWALFVKGFVTQTEEGGKAAEISLNYPNINPHFHGVNFAKNNLTTKITNIASVEMVALQYRAERTLLGLSSDEMKQYLIRVSKFFENEFRSDLIHVMSISQSYVEAEFVRASLSMLPYLGFGFAVMAFCTAISIPLSAAYFQQATVHKAFTH

SEQ ID NO: 129103 - protein, 134 aa, Heterodera glycines
YNSYWQNASTPQPAHHYYTGGTGSLVYSTISGDAHSICSSNADVSARLSTRTHQLSSSLILVPTPPATHYQHHHHYPNHHHQQQITVDPSYNNNIVSMSSPSGTGAIGGGGGGHIGIYHQANSSKKEQFSICDR

SEQ ID NO: 129104 - protein, 18 aa, Heterodera glycines
MEEMPVVPINASWKILKT

SEQ ID NO: 129105 - protein, 28 aa, Heterodera glycines
QRLLIRLQRTTNDRQRDKGKKKGGGGRN

SEQ ID NO: 129106 - protein, 97 aa, Heterodera glycines
MSINLHDKKSLMDNILPVVEINQTTNGITVSSERIAIPRTIQFDILGKCRECKSTECETEWCVSKEGVTIWCTRFKISPRFVPFDVIYDLSGYTFFK

SEQ ID NO: 129107 - protein, 66 aa, Heterodera glycines
MRTIILKKCCWLTIGCDFISEVLNLSVGHSTFCSLSRNSLLQLWRPLLNPNKREAMKHARSHHWTF

SEQ ID NO: 129108 - protein, 26 aa, Heterodera glycines
TQITNTNVYQKHDTHNCVTLNSNNKH

SEQ ID NO: 129109 - protein, 18 aa, Heterodera glycines
KFAFLELGFESNIKINKF

SEQ ID NO: 129110 - protein, 26 aa, Heterodera glycines
VADYLRCFINGRFKDEIKYENVNVLL

SEQ ID NO: 129111 - protein, 111 aa, Heterodera glycines
MAGILSIFSSFLEANGLGGPDFWGRSILVMQITVHLVLIASILLQLVQMLFVGQAGTEFFIWCWYLSACVTFTLYQAMSVFSVICLFTSEPMFWTTFNLFLANSFLNRLVF

SEQ ID NO: 129112 - protein, 15 aa, Heterodera glycines
GYRNIKILKSGSFCA

SEQ ID NO: 129113 - protein, 70 aa, Heterodera glycines
MAQIHFKIFLIFSLITFSQCRINSEPSEKEGPSSIGGIQNATSDHRSAAAASDHHASSCDGFGWTLNKGK

SEQ ID NO: 129114 - protein, 27 aa, Heterodera glycines
MHRSHQSHGIIMGIRENDMSGDAKSDR

SEQ ID NO: 129115 - protein, 104 aa, Heterodera glycines
MDTDTGWINDFKQTFVRATTSARYTIQFEVPTSVPIGPFELVNERTQEKLTLCKTSEDLWAIQWVMKRCPIGETAMIQWEAPQNSATNLNNVNIYLCCVSCTKW

SEQ ID NO: 129116 - protein, 144 aa, Heterodera glycines
MQFSSVEHLRLTLNSLIREVYQQQQFSSGHDRASRTKRQVTDLFFHENPVDYWEKIGELRTKQEQFEKEVKQEESELSADTTDVERKKLLQSELPLKRIRMQRKKYELEELERAAERRDQESPENEQRKISDFSNIIPKIITKN

SEQ ID NO: 129117 - protein, 223 aa, Heterodera glycines
MSKYIGEKDINKIRQLNTEKIEQLQAKAVGLKDNASFEKQIERAKQLIEYRRKRFAALEFEAKKRDEQQQFVAAAANTITAPTASALIGREALKKRTGISASTDGEVGDKADVGPQTATTTTHGEVLKEKILEQQKHTDKDDKADVGPQTATTTTHGEVLKEKILEQQKHTDNDDKADAGPQAATTTHGEAVREKILEQQKSTDDDDKAAVGQQTIPTATKTH

SEQ ID NO: 129118 - protein, 302 aa, Heterodera glycines
RQMNAGRSINLMDHVFGMLEQYANKLEENVHERTRELEEEKRKSEILLYRMMPRQVADRLKLGQSVEPEHFECVTVFFSDIVKFAELSNQMRPLQVVNLMNELYTIFDAIIDEHDMYKVESIGDGYLCVSGLPNRNGNLHAKQCADMALKFLKALETFRISDALKFLKALETFRISDHSFERIRLRIGLHSGPCVAGVVGLAMPLAMPRYCLFGDTVNTASRMESSSSPNIHISKETYMLLHNNFDGYAVEPNIHISKETYMLLHNNFDGYAVESRGEVIIKGKGVMETFWLLSNAEIRSNN

SEQ ID NO: 129119 - protein, 101 aa, Heterodera glycines
MSNNASDEQKEQKKGDDIDQNDGHLTADDRSGLKKIKEINRKREKEKDLKNIGDGSGEKDKQKEEKAAVDGSQKTAQRIGQSEQKWGEIGGERKRQKQTAD

SEQ ID NO: 129120 - protein, 42 aa, Heterodera glycines
MQVFLFYISYLFFLLVQYFGYQRFFNALQKDAKSFADIKAFN

SEQ ID NO: 129121 - protein, 88 aa, Heterodera glycines
MIDEYMTKTIVTNVKSPFRLRSKFIKFLLDQATVEHVRRLISERGIHSERQRIARVVVLEQLRLELEDRNLYTAPFSCEYYKQAKRHC

SEQ ID NO: 129122 - protein, 19 aa, Heterodera glycines
MPIYRFSWSLIANPTKNEK

SEQ ID NO: 129123 - protein, 83 aa, Heterodera glycines
MHFVLIEGQKASHPSQMLCDLEFDIIDGEKGREAAVVSGPGGIRVGTAIRYNPQQQLAAGKDFKRINASAGGSRLPPRPPVAK

SEQ ID NO: 129124 - protein, 20 aa, Heterodera glycines
SLAPKKLAQIGVKHLPVRGD

SEQ ID NO: 129125 - protein, 72 aa, Heterodera glycines
MRMQSPIINRGRRKTKLAFKSLVPSSFVTYRTFISFCIFRISTVGLSTVKLSSQGLSTKAYAIVCMKVVIVF

SEQ ID NO: 129126 - protein, 124 aa, Heterodera glycines
MRQRMDFHFQPIFSESEKMYAHFYMDPLKELYRIKNAKIGGSAQRGLLAQQIINQISTKVKEMDQRLKILLPIFGFENLEMPLFSIEQEGKFAEDPFFNISRHTSNFWTMTEALVLILKRRRWR

SEQ ID NO: 129127 - protein, 204 aa, Heterodera glycines
MPFSIKPSGLFWHRRVLVETTNEGTGGNYHALLYAIVRENRRAPQQNGGGGGNGQSGGNGGDQQNNANANDRNDLAAAEKRELLGYSPLIKDKEDMAEAVPNCKFTVKKVVKTAVYANKEKDKDKDKNDDKDEDKDKDKDEDDCPICFNEMKVNEEQIQVHEHEVKSKTRAGIYAGGDINLPAGLSNERYQGWHGIPISNVFGV

SEQ ID NO: 129128 - protein, 322 aa, Heterodera glycines
MELAEGILINDIQVQRLALEVLTNCLCGPTNQGDADCEFCLMYVLTTLLHKQQPATEADSIRELACRALNGIARFEPIRQILSKLPIIANNELITLIQSPILLEKRIEHSRFCEQARQLIECVSQTKLQDFAIGMTQEHLWRAAVVAKTHIKFNEKELLQLIYQHLSDIGFKRTAKQLQMEGELPNVPASRIPSTPASLPGFVNCICLSNVSEIHLIKPRQNEAAFANVLARRISKADAPISHPQPFTPRPQSVSSSKQITSGSRLPLKLLSSAHNTLSTGSSNFSVASNLSQQTPIANVNNAFSLKMRPPKSLSEIVINYF

SEQ ID NO: 129129 - protein, 16 aa, Heterodera glycines
EAIPEGFGLPINLGAS

SEQ ID NO: 129130 - protein, 50 aa, Heterodera glycines
MDSVRDDEKAGAAEDGGSDNAECRCCLIYVYAHAFLLAFHLCHHCLIHYN

SEQ ID NO: 129131 - protein, 140 aa, Heterodera glycines
FSHPMGYDLHFPYSFTLGMHQVIEGMDRAMTGMCIGEKRRVTIPGKLGFGDGGRKRDGIKSDQDGIKSDQVLHYIVQLVDLFRPTPGPRWREEDGLEIEVTHKIEESACRRSAPGDTIHQHYTLNLADGTFIDSSFSRSK

SEQ ID NO: 129132 - protein, 469 aa, Heterodera glycines
MTFGYDPNVPAEVILLPVHFPGHWTLIIHDVQFGTHFADSLPTTYGRLDPQLTDKIKNIISDILPSAVLTGIVDVENLTVQHDGNSCGYFVCLYAESWLMNNRTFVLPDLSINYEKKRILWHINELYGSDNVPYHPREGVPTPCPIVYRHTDEAQSTSKAAELMEVDEYDDIMIIEPHTSGQAVDAILTQAQVAGENQADTLGLVSESCIPQEPIAQADDVIFIRPKTPPRRSMRVQKRLSASVSRSPSPAPKRPPPANSLGVATPITRRCSAFHKGWQCAAAAAKHFPEYCDSGKLGDKKCADCGAHLFSHEDSSICCRKGRVVLPMLNPHPDELKQLIVGNKQSREGKEFVRHMSRYNNLFQFASVSAGNKPSPAGGPMAVILNGEFHRRISSMQAGTTQIPGFGQLYILDPVEAMEQRRNNPRFTGEKITNEDEFVQGHQLNEQTLEILEQMIQVHHPAAQAYKQA

SEQ ID NO: 129133 - protein, 104 aa, Heterodera glycines
GAAVVKVSKRQAVDEGLRKYRKRVKEQQAKEKKQKEKKPPPNSTNDAAGGNSTGNNHHGSRPAPAGGPDDPSPDEPVSNASDGAAPAGDDVSIPREEINEMKHA

SEQ ID NO: 129134 - protein, 67 aa, Heterodera glycines
MQFLPNSGKVKFLVEKAGADLEIRDASGRTALMGAAFEGQADIVQYLVSKKARTDWKDENGSGRIIR

SEQ ID NO: 129135 - protein, 59 aa, Heterodera glycines
FLGPGVVWAPTQKYKNVLFLKIKILKTKPEGSLATWHKLGLINIRSFFTILLIPNPIIF

SEQ ID NO: 129136 - protein, 54 aa, Heterodera glycines
SRAGPGILGKTGTGTCRDLRSRDRDLGFCPGPGTGTNREILKIQKNFKNLKKNS

SEQ ID NO: 129137 - protein, 599 aa, Heterodera glycines
MAKPNDCGPAAFHFGKQSRLQLHVFCDASEHTFAAAVYIRSETADGSEANLIFAKNRLRPRTANQRFTIPRLELLAILVGIRAMRFAEKELLRPIDERHLWSDSQIALSWVKSDEPKAQFEQRRLVEIRQGPPTIFHFVRTDQNPADVATRGCTPAELRTRHIWWKRPEWLTSPETEWPDELTFATPADSPSADPPFEESETKTLMAKQSPLPPPLIDPARFSTMLTLLGTTILVLQFIGRRRPKWLRSGTSSIPRSGPPTGDSFRAARTFLIRQDQRSSPDGYDKHPTVFNEDGLLCLKTRLLHANGPPTLASPVLLDRHSSLTRLIVQEIHADLRHAGVDWTLTEFLSRYWMPQARRTIRAPSFINVLRRFISRRGRPKRILSDNAPTFVQTSKALDILTGPPSETDAVTFAARRGIQWDFIPAYSPWMGACYERLIGLVKSCIKRTIGRRILDYDDLSAFLAEIEASVNSRPITWVSDQPDSSKPLTPKDLIQPGLPNDLEIVDSDLDYDDCLSGPARLAALWKAYREAADHFWLKWSHEYLLAIRERAGWTHKGPRLRTPTAPHIGQVVIVEEDLRPRNLWPMGIVVALNGSLPN

SEQ ID NO: 129138 - protein, 140 aa, Heterodera glycines
MAKQSPLPPPLIDPARFSTMLTLLGTTILVLQFIGRRRPKWLRSGTSSIPRSGPPTGDSFRAARTFLIRQDQRSSPDGYDKHPTVFNEDGLLCLKTRLLHANGPPTLASPVLLDRHSSLTRLIVQEIHADLRHAGVDWTL

SEQ ID NO: 129139 - protein, 115 aa, Heterodera glycines
NITARWDGLPMPKQPTLLEGDDVGTLLTSQLNEEDEAKTGLNCPQKVLKLIKIMVPHVVLVAVLIGAGILQALETRTELMARSRKLIRLDQLIENFTESSWHIDYMISVAAEVDD

SEQ ID NO: 129140 - protein, 36 aa, Heterodera glycines
MEESPELLNKSVGGLAEFDFSLCERNHALKRQMDGE

SEQ ID NO: 129141 - protein, 69 aa, Heterodera glycines
MTLYASHDILRVPSHFTRPNNTLRVPSHFTRPITLYASHHILRVKKCFSNRQSETLYLPNSLIVLACIL

SEQ ID NO: 129142 - protein, 89 aa, Heterodera glycines
AKKRYLFFIFIIFWFKNILNTFLYFERLLLIQNFFKFPKIRNPAQDPADFKCRICRINPAGSCPVKNFEFQSCNRIRKFEISGLYIHYG

SEQ ID NO: 129143 - protein, 76 aa, Heterodera glycines
LFKMTGLSENVAFSRFVSEFGGRCKELKIANEFARDPSRANKYTRTLKDGKGSWQLCVDFSKNLIDDDIFHQLISV

SEQ ID NO: 129144 - protein, 43 aa, Heterodera glycines
MIHVLIHGHDLRVNLRSFIIHVSIYGLKHVSIHGHDLLVNSRS

SEQ ID NO: 129145 - protein, 182 aa, Heterodera glycines
MQYNAFKPRREAGQFQNFVPHFTVESPSTLLDNYVSMSTVAFGQLWNGKMGISDGLLIMQYNAFKPRREAGQFQNFVPHFTVESPSTLLDNYVSMSTVAFGQLWNGKMGISDGLLIMQYNAFKPRREAGQFQNFVPHFTVESPSTLLDNYVSMSTVAFGQLWNGKMGISDGVRSFLKIPLFV

SEQ ID NO: 129146 - protein, 76 aa, Heterodera glycines; identical to SEQ ID NO: 128275

SEQ ID NO: 129147 - protein, 244 aa, Heterodera glycines
MKFENNATAVFPNSGTASEAKNERASEFSQKGKFSETKRSHWTDSDQKSMTKEKWKKVERAPRNIAPKVDFRIKRNCDEKNHNFGPKEQVGKNFEVKKGSGENSGKSGRIFSCKNSEVQLGTIEILEGRKEFERKRLKLGRNSQREKIGRNVSLDGNGPRTNYGTNLNSFRQNCVFWPRRANADQMSRETLPFDRGWVELTASCPDSTSTYADRQPMMCGLRCNGSELIPNGPHLSTAGCGMCS

SEQ ID NO: 129148 - protein, 917 aa, Heterodera glycines
MANLRTPPLTRQRALNFGIALDNTGNQISAQFNPNLGQNRSFSPELGHVEMVGNDGVSEYGEDFDDEQNLRSRLLAMTMNISNPAVNVPDENAQNQRMAMNAPLVNSGILRVNNRNVGVNGLGETRERFLSNNFELGVSNLNNAGLVPTYPPDHESTPVSALRGEIRAFGNLVENRRHENELLAARNDAQYTQPRVDGVHPVFVRQMAVHSQLTALRLSANHQAHVATSSIEPLARNAQVDNIGCNNNPQRQMENLQQNLHRQMVRNGENFEPGNHNYGCEERNPNAEQNINPRPNSQHFHVANQNHPYVNDIPDTQRNEMHDMILAQAIKSLNNFSYSMALNSLPELKGSSGADGVRSFFRHFDVATDEWPEAKRLSALRSKCLGRAERAFNVAVANNPFSYDSVKRAMINLLEETDARQMSAFEELMSGVYRRNNERINDLADRVSSLVRKAYPGLLEHLYDDYSIRHFIRALQNPELALTLELARRPSMIFDEFVALAARAEATQKASKLAMQRPNYFARFNSNFQTPQYNQRPMQHFRQENFPQPYNQQQNRPNCYNCGKFGHFARQCTEPQRNQGTPNNNSSASNFVGQNFLVEQQKKPPQQNQNLFVGGISMSPADVEKLFGKDGTENETKNLNKVSIGRIMALKVSVCGLTAKAMLDGGAQISMFSSKFFAKLLAEKRIGTEQLRPSRHNTRVIDINGNAVECIGIVSLPIVRKGKCVWIRFHVSHASFGYEFVFETNALARLSFKLFDEANDELVSFSEVNNVERNSVHVIYHTTIPSRNKNLVHSAQQMKFKSNATAIFTNSGTKSEVENKRTSEFCATKSGHRPSFRQKWKKVEWTPKNIPPKVENRIIRNCDEKGHKKFSPKEQLGKNFEVRKGGGENSEKCGRIFLGKKSEVQLGTIEILEGGEE

SEQ ID NO: 129149 - protein, 95 aa, Heterodera glycines; identical to SEQ ID NO: 128210

SEQ ID NO: 129150 - protein, 64 aa, Heterodera glycines
PIPSFMRHQLHSFLVLPNCLKCIPKNALKMIKPVFSRISCQYFPIRNDTVNSFASLIHSCFASD

SEQ ID NO: 129151 - protein, 41 aa, Heterodera glycines
MPINFVLNDFLSRLLNTQQDKMPLFLNLRTKKNSFKWKSNG

SEQ ID NO: 129152 - protein, 87 aa, Heterodera glycines
IIFIQKIFFWVFGAVPLNRCAQIYGETESFRNSFTIACTLILRWIFAPHNCLSTPNGHLKKSIYFCFRGSPPEPMRPDLWGDRILRE

SEQ ID NO: 129153 - protein, 31 aa, Heterodera glycines
MGANIQRRIKVQAIGKLIPEGFGLPINLGAS

SEQ ID NO: 129154 - protein, 122 aa, Heterodera glycines
MARFLIQNPQHQQVCGAQQLVSLVVGGTVCESHRLRVGRCSRVVVDFSDNSSGGSFCAANAGGRAKMKKMFVTGGDGTEQQQDDTITDEQQQQEDEDDDDDDEDEFRILSAHRKQRKEKLLI

SEQ ID NO: 129155 - protein, 79 aa, Heterodera glycines
MKKGVQNSIYALKFFDLVKKILEPGAGPDPVQDFAGSQSAILHFLENAEFAGLIRPDPVLQKFLNSNPATIRKFEISGL

SEQ ID NO: 129156 - protein, 481 aa, Heterodera glycines
KRVEQIEIIERTVEESRRSESALVNFQPQSSVRTSSERILFPDPEKRFQLTSERDAGRDSSLLYSPSGNRFGIKLQFSFIGQNSFIVREAPLQQSTPERNQQTHKNGLTISRHGYDADEVRTEAWGRRAVPSYGTPPRREDTATKSILKTVPPMASPEGTVGENSWRKSPASVEGAEGRERKGTDYNNRSVQRKDSYRRMQVKQEGSQHHFTEVNGRKKGEGKETDGRRRRTDKGGESVELAKKLIRFPPQRRRMDPPPRLSAVPRPASAAARPAPPLAACLFASPPSLHLRLLALPSAVRRVPRRNGGGTSAQQPSRLFVHLNSPAQAHFELIGNPPFKSNSFTAVDFDTGFVAIADHGFVAIADHALTDEQGTHTTCFVMELDRSAMPDMDVLQDALSNTYSEVHSQFGWQEYWQYVAEEVDSSFVLQKFRDRIDDCQWQYVAEEVDSSFVLQKFRDRIDDCQKATKWYRLKHTVYTRG

SEQ ID NO: 129157 - protein, 137 aa, Heterodera glycines
MGKIRSANGPIGRTLALPKAYGTKDAKGRGGKLGELAKGRGRRTKAAAEEEEKRRRGRIEKTIGNSMRMVVKGRERESEGETDRESEGETDRESEGETDRESEGETDRESEGETHRSLATNRYFHYAKSKLYKMPMP

SEQ ID NO: 129158 - protein, 117 aa, Heterodera glycines
MPTTSTATLLDTSATTSSNTAMESDSDEEQFPPPPPIDGTIGTANESHPFRAMLPPPSLPSIVFPRNLAPPPPPKRSEETRLQMAEQNPFEMREAQSELMAELQQRQRMRTKESAEK

SEQ ID NO: 129159 - protein, 41 aa, Heterodera glycines
LTDILASAKSAIKLWSQAANEAELQLIIERKLTEETFSAYT

SEQ ID NO: 129160 - protein, 147 aa, Heterodera glycines
MVAGVQQQKIAAKTSNNTRPKTAAVMLIMRIKAHLMEHVRHIVLMSLRSLQIASPDSFLDGTIQQIRNGHPLEMALGPPKMALAQKLSQIECHGSGKRDQNRICLTMERPKTTKYSPKSLTKPSANCVAVFGQTALTLAFILKTNII

SEQ ID NO: 129161 - protein, 95 aa, Heterodera glycines; identical to SEQ ID NO: 124528

SEQ ID NO: 129162 - protein, 152 aa, Heterodera glycines
EVIGLPFIDHSFFVSSMAFSSVFCRSPSLLSLLPILLLIIAQFVNGMDFDEFELPSDRLDAFQKRRARELFGKRSAPPPAAVANYERHSRRTRELFGKRAAAVEPFTEAEEGENSGESQKAIHWQRQRVAKFAYYSSSPMLFLMLFLLGQFH

SEQ ID NO: 129163 - protein, 39 aa, Heterodera glycines
KWDNLNLIGNVPPLRRSIQKIFVCLHSILIHFSHKNVLI

SEQ ID NO: 129164 - protein, 34 aa, Heterodera glycines; identical to SEQ ID NO: 124987

SEQ ID NO: 129165 - protein, 63 aa, Heterodera glycines
MEAVHNETPSGMPTHKLTIKVNKILFDYCLTNKSRTRFTMRINHKKNSFSQLMNINQQIILNI

SEQ ID NO: 129166 - protein, 374 aa, Heterodera glycines
MSSEILWCAVFLLLLVGCATILFWFFLDNAKKRRRPHKKEIFICGDCWLLVFDFLAPSQLGLEIALINRRFNCIVDEHFKTRKWKLGEMRIFHKIGENGTQQMQIVNSDGNPLPIPQNPLPNKVIGFKRITILYIDQNVIAFLRLFHRFFAFSSIFLFITENVRILDFVLLNVLPMLRDSIRLMLLNTIAFRRLRQLAPSLLNDCPSLHTVLFEDSIFPEFPPDDSANASDGQAVTKWLFTPRSDGVPKLLQCSVNSTDEQWSSTMEHFKAAFSNASSPVTFRIHFLMSSPLDFIVPFDRINEVTEEKLTLKQSSANDFLLIRSPIGWDNRNWKNLRDEIIARTNPIDIRVKDGGYDDGLLDDASPGPSDQQKK

SEQ ID NO: 129167 - protein, 35 aa, Heterodera glycines
MGHCRHQRTKKKKKRVKATMKCSRRLPDQVDQRNE

SEQ ID NO: 129168 - protein, 58 aa, Heterodera glycines
DEQFGELRAEIGKIKEQQSTMMSTIMQLQMLLLQKKNENRQEFTESADHSLISAIGVQ

SEQ ID NO: 129169 - protein, 169 aa, Heterodera glycines
MPVDSVADRMRNIKSADLIVWMQWFQSAHKGKAGHSIKREFIWLYARVFYDRYGNGFDKYFEAEFSRIEVLMEKITQMHTDATAAFALQKGICCELPEKWRTIINQGTMNESILEVIESDEGKERKMGTNEFVQQLHFDVIREFCQNIDQTEELVQRKIGNIIKSKLKL

SEQ ID NO: 129170 - protein, 62 aa, Heterodera glycines
FSSNGMPICWKFFLICPLFIIPSNFVDNLCSVLTLKNLKKFSVTCQKLYNFNLLFIIFPIFL

SEQ ID NO: 129171 - protein, 95 aa, Heterodera glycines; identical to SEQ ID NO: 124528

SEQ ID NO: 129172 - protein, 147 aa, Heterodera glycines
MFGFNYLPIFPQITQDQLQKQMLEYKFGWILDKVQKNRGKMPSVGTTKIPQYVFPVNQVMANNNELQSFLLSLCCNWQIVTLAPGLPTPVRQAAELAKRGRANFNELKRSTPKFIPRVEDTDQINYTVLNNRLCYNGHILADTRFNA

SEQ ID NO: 129173 - protein, 268 aa, Heterodera glycines
RITKFFSLGVKLEQLYKSWSSRDKHFARFLTERREMLQGIRILRQEPVETLFAFICSANNNVPRISKMVEKLCQFYGDSVEVNAQRFYDFPSVTQMAAHLNCMEQTLRDAGFGYRAKSIVKTVEMLADGKLGFGYRAKSIVKTVEMLADGKLGNSAYLWLHSLRNLPYHEAKLALMKLPGVGPKVADCICLMALDKVADCICLMALDKHQVVPVDRHVFNLATEIYTPTFLKGCKTLSTAIYGQIGAFFVDLHGDYAGWAHSVLFSTL

SEQ ID NO: 129174 - protein, 172 aa, Heterodera glycines
MPFNCEFAGGVCAEIGQVLAVWLFQWMFIDFAFVGTALFLLLLLHRSLWPLALLYFCWYCYDFNTPKKGSRHFRWLRNLHLWKRVISSSAASIGHSLSLAPGGNAVGIVPGGVAEICFSQMDEGLHKLKLANRKGFVKLAIKNGADLVPVYHFGEQQLMRLAILPALLDNIQ

SEQ ID NO: 129175 - protein, 192 aa, Heterodera glycines
FSWFFPEKDRREDPQTLRMFSTIQVFTACFVFTACFAGFAHGANDVSNSISPLVALLSVWHNGSVEQSEQTPIWLLLFGVSAICAGLWLLGHRVIETVGQKLSHVNSCSGFTIGFTIEFGAAVTALLASKLGLPISTTHCLVGSVVAVGSIKSGEGINWRIFASIATSWLVTLPVSAAVSAALMFIMKTFLL

SEQ ID NO: 129176 - protein, 174 aa, Heterodera glycines
SPSPSSFVPTFSAPFDGAALSLFQNAFLWALIVGFLLAFVLGFGMGANDVANAFGTSVGSNANAFGTSVGSNVLTLRNAFILATIMETLGAVLVGYNVTDAMRKEVVNIDLYMDHPLVGYNVTDAMRKEVVNIDLYMDHPNQFLLGQLAILGGSVWLLTATLLRLPVSTTHSIV

SEQ ID NO: 129177 - protein, 64 aa, Heterodera glycines
MGQWRQLEFDFRTGQPDIEQIVAGWDPADNGLQMKISLRAEAMALSDALATSKLIKCCMIGPSN

SEQ ID NO: 129178 - protein, 321 aa, Heterodera glycines
IMVPIQINGHKIELAADSCSHLTIIQRPMWLSLGGPKLIKSGKIVGSFSGHKLCLLGQFKCSVEFKGVQIAPFEQATEQPIATTLSSIFNRKLWQLQFPMPQGLAEQLKNAFPQVFAPGIGRCSKMKAILHLKPDASPIFCRARPVPHDVQDAVDKELDRLLEMDAIRPVDFSRWAAPVLDVRNKNGAVRICIDFSTGLYDALELHPLPRTDDIFHALRGSKIFSQLDFRDAYLQLELDDKSKTLVGINTHRGLFQFQRLPFRVKSAPSIFQKTMDQLTAGINGVFTYLDDVIIASRNENEYRFLLTMVNAVSQVGWKAKF

SEQ ID NO: 129179 - protein, 162 aa, Heterodera glycines
MGLKHRMDAKIDASGNVKRFSWDESRELVLSTILDPRFKLSFLNAEKHDRYKIWLTNEAENVQNGSSEFHDLFSRCEQNIATECGLDITAQPLPSPETLNNRQKAEVEVNDYLHDKKIPIDSDPYGYWTGDNAVKWPLLTCLAHRFLSAPATSAETKKCIYL

SEQ ID NO: 129180 - protein, 201 aa, Heterodera glycines
MWEWSVIFTDCAVNAVLDLSFLHLCNLRYNNIGSERQMIQRRGRARHKHSLSILLALDTGIEQREFSNMRKEAMASERADYHPKTMNPAPHLAWMLIFKVYFIQIQQMMRCIEDMQEQDEQTLRRSIEEKAIELAELRNDEKMKEENKRAQLMGRRFDLRCACGTVICCSDRVRSVMGTLFVCCDPKVWKRSKHTLTRAPT

SEQ ID NO: 129181 - protein, 25 aa, Heterodera glycines
TWTFRGSAVEAKKEANGKEKNWAYN

SEQ ID NO: 129182 - protein, 240 aa, Heterodera glycines
MFFLKLFLLSFLVIGGQCCCCLSKEEKQQMDASRRVVEEVIKDIIRLTNEAKDFSFSAHNTMVEAQIIKDRNSGKSEIIFWHEKLLNGKNRKIKNRKANSILLEAAKRETERAWRDVVVLSDDVSDFAKSSRETLNRAIKSREKAPYANGVRELYLKMSDSIWEIFKFLEQINLESEKAESAWREFERCKTFDQATKLEEQSQNSLTEARRLHFESRRVQSQMLNYENRLQTIVWEHMGI

SEQ ID NO: 129183 - protein, 104 aa, Heterodera glycines
MYSFKKYFETALEKEDFFWPKNRAEVEAMLIESSQYKVAIHRDYESPFSGYIEMHEHTSAFCFTMVERDMRIFYDSGAGTPMGRYTLRIAWLLVVALSGPSKSL

SEQ ID NO: 129184 - protein, 357 aa, Heterodera glycines
ECDVKAELKRNRAMKRFFDAVPDKGPINPRDAYAGGRTMPFCLYAKATEEVEISMFDIISLYPFVNYDTPYPVGVPKIVVSREFDVNWTVPDDVPYDGLLKVKVIPPKELLYPLLPMHIDNMLLFPNCYTCAKKTKKEFVLAKDVKKCNHRPERRALIGTFTSIELRKSLALGYRVIGFYRAYHFEQFDSQLFKGYVRMFLKIKVEASGWPSEVRNEEEKRAFIEMYKAKYNIWLEYDKMVFNPGLRMIAKLGLNSLWGKFSMRNTLSVTEIVNNLERWTELIKDDTIEFKRPIEINEGVMRAIYQKKQEFIKEHKVSNIILSLWTTSAARVKLYEYMEQVYREEGSKLLYCDTGGH

SEQ ID NO: 129185 - protein, 70 aa, Heterodera glycines
MLFDLISSGRSLPLGPTNERVFFSNALRNHKNILLQLRTVPAPMLGLKKRRPKFGRIVGKKYRNCSLFSI

SEQ ID NO: 129186 - protein, 48 aa, Heterodera glycines
MTAYNEYSKHRLPKKPTDFDFAKTPEMPEKLVCIASVSVDQPDRIRQD

SEQ ID NO: 129187 - protein, 53 aa, Heterodera glycines
MIEDITGRSHVKEICFYTKDGGDRKIGRSRKAMAIVLMYGLMNGKSLELFLCS

SEQ ID NO: 129188 - protein, 72 aa, Heterodera glycines
VDDVQARCDELNLQFVHRFGVMPDQHLVNLGIDLLVGLGLSMDYGKLAITHKGKMAKWLTEEEIQIEMEDSY

SEQ ID NO: 129189 - protein, 64 aa, Heterodera glycines
PSCGCVNERIRRVDAAIVVGHAKGSGRDLKANATDLKQQFSHHFCVSLFTKKSDLLNPEDFKVL

SEQ ID NO: 129190 - protein, 91 aa, Heterodera glycines
MAQKAVHSIQETQSVLNYGGVVRHHGWKVKFKIVSDQIQAAPQQHIPPMAPIQIDQTPVRDQTPVRDRTPEPVKSPRPQRQRKKPIRYSPG

SEQ ID NO: 129191 - protein, 92 aa, Heterodera glycines
MEVSGRIEVEPQETWLNLRLKSVSTEDLKKELGRVKDDQRQNAYQDTLAALVYDVNATAEVLRRGSLKRKKPKSHEVRFLSARYSCTDRHVQ

SEQ ID NO: 129192 - protein, 142 aa, Heterodera glycines
ISKKSKFLTICVGHGYGFIRATTSSASYQIQFTVHAPTEIVPFEYVNERTNEKLTLEKAENNDESMDEEDDDEWDERWIMKRCQIGETTAALNQNSGNLNNVSFTFYGNCIGPLSPPAEDEEAGQSAGKESTYCDMDGLIWK

SEQ ID NO: 129193 - protein, 243 aa, Heterodera glycines
FIDHSVFAFIRANKQIWDKGTNLNLYVPYSHNAKSVQQIWNDFVREIWPIFAPKIHHLNFADSHHLDNLRRRTSPTILTDLNQLNSINSNRLLPDAIADDGPNATAGQALSKWLNTPTKNGKPKQLSCDYTSKTKRMITNFKEAFLRANSSSASYEIRIKYFKSKQIGPFELVNERTNEKLTLAKETEYKWYKKWIMKRCQIGQTATVRWDDKKTNKLNNVRLHLHYQFGCLFVSFSALKSVP

SEQ ID NO: 129194 - protein, 85 aa, Heterodera glycines
MLTLTKENSDENVDEENDNGWEERWIMKRCQIGKTIQWDDKKTNNLSKIGFTLYEFGPLSPPKAGQMNAKNRLKMNAGPSGEQKK

SEQ ID NO: 129195 - protein, 390 aa, Heterodera glycines
MLNHELIVGLILTFGKRQSHRVTMKMNRRWICSDIWMDTLPFFDHAQLGLKLALLSPRFNALVDKHFDGKSELTLLGPIAICKDIVTEVPKLCVFIGANSVEFPLPDRPLPNKIRFNDIRIVYINHSVLTFLRANQQIWDKAISLDLYVTSAHNAKKVQQISNDFAREIWPIFAPNIRHLNVYDVQHYHKLRRHISPTILIDLDQLNSINSNHLLPGAIADDGPNATAGQALSKWLHTPTKNSQPKRLSCCEYAHTSETKGWVNSFKEAFLCATVSSASYLIRLALYESTEIEPFELINERTNEMLTLEKEENNDENVDEEYGYKWHERWLMKRCQIGKTIQWEDKKTDNLNNVIIAFYGFGPLLQPQPGQINAKDLLEMNPGPSGQPKK

SEQ ID NO: 129196 - protein, 33 aa, Heterodera glycines
SSHAPFCEIFAFKWLFLLVLKCPFSLGLSCPSA

SEQ ID NO: 129197 - protein, 76 aa, Heterodera glycines
MGEKREEKGEEKEQQKREETGKMGEKREEMRERGGKEQQKEPQRKKKQETTTTKAEKNTRGQNGGPTEGQKGPNSK

SEQ ID NO: 129198 - protein, 220 aa, Heterodera glycines
MLDELSQQCRTERQMPKKDKLPEKEVSKEQTTTIVFNFQQTKSPARNESPDLDELEAVQMALENRVPPVAFRLQQIQNRLNAISSQLSTSARDRYQQRIQLFVNDFNECAKMVKAKKRAMEERLADQTRISGQMEELEFWCDETEALVEFDEPLGALNMAKLEKHTEKVRERHESVDAKMNSFRNLDKMKDKFVALDNVEQQAKHEVRRSVALLGKRMSD

SEQ ID NO: 129199 - protein, 72 aa, Heterodera glycines
MTKQHEDNTLGLRCRLKMNDAQLQTLGKTIQGKDDEIKELKAMCEELMQKKGIMDDDEDEEEEDDDGEMDGE

SEQ ID NO: 129200 - protein, 242 aa, Heterodera glycines
YIDHSVLTFIRSNKPIWDRMGTKFEFFAKSIRQLGFTSGDAFDNLRRLISPTILTGLDQLNSIDSNELFPDGIADDGPNATAGQALVKWLHTPSKNGQPKRLYRNNYFGPQNLEWVNNFKETFISATTSVSYNIQLYFHVNTIPTEPFELVNKRTNEKLTLKQEIDEFDVNVYNWLLQRCPIGETARVPAIKWGDSLNPSANLNSIRFDLWSFDKSIEPLSPPTEEEKEEEEADKSNGNVVC

SEQ ID NO: 129201 - protein, 198 aa, Heterodera glycines
YCVTVNCHDERATVAKTLEYNITKDSKDGLWTTFSEGGKSFERVLFDFNEEKCKDYSIFIKTKKLEIENKKLLENEHYSLLGILAKDYVHVNKKAESNGRTEFNITCKYFFVNFTPVLTRKEEFYEIKVYCNDKQQQNLVYHSDIQCGKDGCQRIILADEQKCQTNVYDVQVWRWSERWTREKLVLLSQEAHIFQTFI

SEQ ID NO: 129202 - protein, 419 aa, Heterodera glycines
GLRPITEEFRKECQIAWDHFGSEGRRVFAFAKKLFQAPQNTKFTAQSDNYPQDGLTFLGMAAITDPPRNETANETAAAIQQCKDAGIKVFMITGIKVFMITGDHPTAASADHPTAASAVASQIGLFGLQNDMVMDIKKPQNDWAIVLQNDWAIVLGESLAQMSPAEWDRLLAHRYIVFARTTPEQKLLIVEECQKRGTTPEQKLLIVEECQKRGETVAVTGGGVNDAPALAKANIGIAMGVNGSDIARRAADIVLTDDNFASIVKGIEEGRLLFDNLRLSIAYTLAHLWPEVLSIAYTLAHLWPEVCPIILNFTLGMPLGLEPLQILILSIDLASELPPAVSLAYESPERDIMKIPPRNRNAELVSSRLLLYSRDIMKIPPRNRNAELVSSRLLLYSYLFSGTFITLGCIGAYLSVYWY

SEQ ID NO: 129203 - protein, 48 aa, Heterodera glycines
MLKNAQAETGRAEVGLEDVSYVFGANGINSKFDVPPISHLLFAFCFSN

SEQ ID NO: 129204 - protein, 52 aa, Heterodera glycines
LSQNKQQTVETTTNKSKSRGNHTDRKSMHSRASFLRCIVKTAKLFIFRLIYI

SEQ ID NO: 129205 - protein, 64 aa, Heterodera glycines
MISSKKTLNIVLSLAHLMPLISEFCLRRYAALVVFIVFFFEPMYELAMPLDISSAVLINHIYHF

SEQ ID NO: 129206 - protein, 314 aa, Heterodera glycines
MKARKTGVYTTTVFRDSYKLIPIKLANFVKTFGLEIEGVENKKYFPHKFNKAENYGTVLDTLPPIENYYPGGLFPAERAKFEQWYDENRETGFELCEVIADYCKTDVQILAHGMVKMRQLFLSETRHDITDSVTIPSGCMKYWVQLAHHDKERVAIIPHLGYEKRGKQSSIARKYLKWRAEEELRENGRVLRHVESPGGEFKFGNYSLDGMMERPDEDKNLAIEVNGCYWHGCPSCFPDDAAIVGGGETAGALRARDAKRTRDIAREFEVEVIWECHLNAMLEDNPAMKAYFDNCPDSGPIDFHDAFFGGTFSI

SEQ ID NO: 129207 - protein, 68 aa, Heterodera glycines
MPDERVLHLECFESGDYDMMELYGPDRAKEMLIDLRDYAEAHGMPCKHVKMLLYKLDKGLIKWKGTKP

SEQ ID NO: 129208 - protein, 46 aa, Heterodera glycines
MSKKGHKQFLEYVVSIFSSHNFSEHCQRCWQYSSLIEVYRITHHSY

SEQ ID NO: 129209 - protein, 239 aa, Heterodera glycines
TPKWTPSGALPFYRLSKESMKVVVFHWRLAAPTYATPLMILHKVRLESSSTGSSFPAKFAKPVPLAVVSLDSRRDSGNLVDPFVRVGKPTRHLATLRESCYSPVYPRLIKFPWLNIQSTGQKSDTVNVHKDHPSPLFLDSRIPRVRASSKLVVQRQPKCIPRAYTQLKRSTSSSHHSTHHPRKNSTQPRAKAACFTQQPGPDLSQFFSRSYESNLPTSLTYIILSTRGCSPWRPAADIG

SEQ ID NO: 129210 - protein, 97 aa, Heterodera glycines
MYSEYTNNYKAAIQMFEESMRRKRNFEELVKRAEQWEECEHLSMVSHLICPVQRVMRYQLLLREYQRHLSSTDPDWEDTEVTPTRELLTKARLWKCT

SEQ ID NO: 129211 - protein, 237 aa, Heterodera glycines
SCKGHEDKCQNWGYLNPNDCTKCHCPDGYGGQNCKELEENLNCEDLSGIARELVANKSAVFSKTKAKCAKLCCAASLTDLNANEYKNWIAAEKPDMDIVISACLSPKWTVPSTVFELTSIQFQIKGSRHECLLTQKIFDTIGLGLRLIKADAGTVSFWGYSKPETKEIIRVDEVHCLTYETAGVPKRFKSLQVEEQPPMKKLNPSPFLAMLHHLSMCSCHLLAIHERRGKSVISGSV

SEQ ID NO: 129212 - protein, 97 aa, Heterodera glycines
MLLLPDPPLPLLLLQTLLLLLLRSDISHRKHNTLPRGRVCLHKSRPPHPNLPVSGGRVFICRRVGCANTRIGRCCAWLNMKWGTDEIIKDPGVHKKK

SEQ ID NO: 129213 - protein, 238 aa, Heterodera glycines
MGILETKPPKQEGMALLGANRHKHLKLLMNCLSAQIVISLVNWLIKCLWTANERKLSDSNCGNVLLWVAINERMGSVGQGNICRPEGRQNAKNPPKIGSAAATASANSTMISNEGEAGGESAEAAATSELIGTTPAKASAKRSSNGSTPKGKCQSKSGGGKSKGNGSNEQQHSDDTKVENERATASTTSSTKNNNNFTSSLGTVGGTAPAAMAPFLAAMNPAGYGRGTIGRGFIGWGA

SEQ ID NO: 129214 - protein, 124 aa, Heterodera glycines
FCGEHSAASRSQDGRFAPVFNFLGDIRPLRGLRTGASRPFFNFVWDIRPLRGLRTGASRPFLNFLGDIRPLRGLRTGASRPFLIFCGTFGRFAASGRALRGRFLILWGTFGRFAASGRALRARF

SEQ ID NO: 129215 - protein, 248 aa, Heterodera glycines
QSDESDHFAGKIQFKGHIKETQDKVTKVIILLGRYNSKDIIKENQDKVTKVIILLGRYNLKDIIKEDQDKVTKVIILLGRYNSKDIIKEDQDKVTKVIILLGRYNSKDIIKEDQDKVTKVIILLGRYNSKDIIKEDQDKVTKVIILLGRYNSKDIIKEIQDKVTKVIILLGRYNLKDIIKETQDKVTKVIILLGRYNSKDIIKENQDKLPTVSPANFDIFQFPTHNKRTPSVALDYVPIKNSSMGLGI

SEQ ID NO: 129216 - protein, 145 aa, Heterodera glycines
MITPTTTTMVLEGAEVPNSQKAKEFAKVLYNYEAANSDELSLSEGTVVTVVSRHCEEEDWFIAEHDGRRGLFPDNFVRFLDQGQMQVECGGRMYFMFFKFRLPQMLNRRLCRRNPPNLAQLPTLRPMRCKMPLFLRSVREILSML

SEQ ID NO: 129217 - protein, 254 aa, Heterodera glycines
MNVSDEEIHFSRTVRHLNQRLFFGLLSQFSGNIAIVWDGKAMTTQFDMIVTPKLLQEHNVTKNYKLELVAQPDTQHVVYLIYATRQSVLLLMRNWLHQLPDDDLRLHHVVFIPDASLTLRQQLREDQRVWDRLQSVDSLPLHWFPTEQHKLLTMELPQLVAQLVLNGDWNFLFRCATAIRQLEQLITGSDGALTMRCKGEWSARIVDMCRKIRDDHPRVAGGERNCGRGPMGGPVESDVSTIDFRRSMRRVVGH

SEQ ID NO: 129218 - protein, 220 aa, Heterodera glycines
MLLTNPNEFSNEKQRYLFELSIYSNEIWHRFLAQRHFANIAIQFWHSKTNFLVEKWTEIENKQIINEKDEQLKMELHEMLSNFSTDYKRNFENFGWKIFGEILYRNWLARTLLSNARLSEEWNKLNKDSQTKAITVIFAAVNENRKSKDGKRKNMLKYMEKWRKTLEQLKLDKSIFDDFVEKKYLIGQMPAYWRAHIEYIQEINCDIMSNFPEAVKYIFI

SEQ ID NO: 129219 - protein, 70 aa, Heterodera glycines
MTLAKVRRRWPIGFWAHYIFARWSQRPKIIFNQKAKTMATRKVKNSKADLGLLMLYAVKGDGKQELFGCA

SEQ ID NO: 129220 - protein, 75 aa, Heterodera glycines
DSSKDQNQQQQNENDEFKQYMDSVFAAIRRLLMGPGRRMTCQNLAMRQLASSILGPMASAEDIYEPTELAKLALN

SEQ ID NO: 129221 - protein, 172 aa, Heterodera glycines
VTLLGDPTHQRTLHALLLGLLDTLSEMLHMFRDLLLRCPVPAEWCRPSPLFPLINMCHHFRRQSLRRIQLRLFAKHLRMSAALCRRDFGTPAHFDAAIWCECILSCVALAKCCATTTTQKSTMMAHNAEAEDNGTTHSDYEEGEEEKVLCDQQIDNSEGEQKLGKYATEILR

SEQ ID NO: 129222 - protein, 109 aa, Heterodera glycines
MGRPFLPLAFSLVLLLLAVVISTNCANASPIVGEEQPMAPEQKATKGTNDGQMGDDNRTNRRNNSKSLDRELDSLTLLLLPRHTDIHHNHPILRKKRKESNVMRIKETK

SEQ ID NO: 129223 - protein, 129 aa, Heterodera glycines
MAELFTQGEHWELAIETNRELANIYETATFDFAKLADLLARNAALYDKVTKTLRMESHYFMIAFYGKSCPSHLVTLKFVARGRPLEQWGCFKQRFVANFSDFKFVDTLDNCEETYREMNGKFLQATEKF

SEQ ID NO: 129224 - protein, 165 aa, Heterodera glycines
MGPVVTNDKLTETAAMVGEGFAQSLVNLAGMIRGIVQADVGGGIRNYQSERAQANALFHNSLAGSFMEHRQRVEHWLGPVKSVLPEKTSIYMLEATAAAAVETMTSLSHAVTDGSGGRNQSAQQLSAVSSTPPPQQKLTRMTSLHENGMTTTNNNMMMVYPTAAA

SEQ ID NO: 129225 - protein, 62 aa, Heterodera glycines
ETKKKLNNPRETKKKRKKPRETNKKRKNPRETNKKRKKPRETNKKRKKSEGDQQKAEESQGD

SEQ ID NO: 129226 - protein, 129 aa, Heterodera glycines
MPMEFKGGWEQYAEDYCFIQNTYYVAPEEEIPAEINERDERQFGYYQWVPIVLALQAVMFYLPNWIWKTLHQQSGVDLETAISDARALRSMHSDKRSQEMGKLVQYLNETLELHEVRRTPRYCMFTVGC

SEQ ID NO: 129227 - protein, 126 aa, Heterodera glycines
MRSVRTSIRRKTSAGRQRHRLRPRIDTETALLDGRNSASGAMSRISNYQSVVLQQDFNEHGAKPRSRINTAYDIILITCDHKNEKSAHAKRHISLPDIVIDAATPKMDEKSTAEGDERQKFIKNSK

SEQ ID NO: 129228 - protein, 31 aa, Heterodera glycines
MTHGQWIKYLYKFSLIIFTFHQHNRIINKEH

SEQ ID NO: 129229 - protein, 129 aa, Heterodera glycines
MRGREKGRKRRGREKGRKRRGREIGRKRRGREKGRKRRGREKGRKRRGREIGRRRRGREKGRKRRGREKGRKRRGREKGRKRRGREKGRKRRGREIGRRMRGREKGRRRRGREKGRKRRGREKGKWLIN

SEQ ID NO: 129230 - protein, 87 aa, Heterodera glycines; identical to SEQ ID NO: 129152

SEQ ID NO: 129231 - protein, 88 aa, Heterodera glycines
MRNSCQPMSNLWPDYVRQRLQSTYAYLAGSLALTAAVGVAAARSPGILALTSAPSLLVWFGSLAAIIGSGLVGSLWHFWCGFGSPLFC

SEQ ID NO: 129232 - protein, 33 aa, Heterodera glycines
MNRSESFRLLSSVDSCRSDGFQTSGAYSNNGLT

SEQ ID NO: 129233 - protein, 148 aa, Heterodera glycines
MAATDGMVEDGKVGNDLESAKFTKIFTLAYKDSESKNGFGDFEVIEKKLDQMKGIGVNAIWPTPVLKYYKNALGPEAIEKLEVSDQLGGAEGFKKLIKRAHDNQIKVIVDLPLTVNAKGNWANKTSDTKSGRGRYPMLTKHSFKMVLP

SEQ ID NO: 129234 - protein, 93 aa, Heterodera glycines
MRRPTEEVQMETKTEEQMRKEAEELWEQQRREELNEALNKKYTELLKQLDFPEGKFSLFFMGYKDLDEIPSDDAAQKKFALSTHSTIELTQSY

SEQ ID NO: 129235 - protein, 85 aa, Heterodera glycines
CKCSATLRIVPQKSGTEDLTGQIDHHSFNNKSNSWGFPYFITFAIKLVKSFQMVPNLSGFDQKLKEGRGKNNDDLQQESDDGDGD

SEQ ID NO: 129236 - protein, 77 aa, Heterodera glycines
MAPRRKRKAAQLVGQDEAVVNGPSAQLPTNDGQQLASAAPVTNNGTVQQAENDGTDAVAAAAAIDGTGGQVQFLYFR

SEQ ID NO: 129237 - protein, 45 aa, Heterodera glycines; identical to SEQ ID NO: 124527

SEQ ID NO: 129238 - protein, 66 aa, Heterodera glycines
IIFIQKIFFWVFGAVPLNRCAQIYGETESFGNSFPIACTLILRWIFAPHKCLSTPNGHLKKSIFLF

SEQ ID NO: 129239 - protein, 111 aa, Heterodera glycines
ITYFIIEEKMDGSDFIRSVFTVSASVSFVLGILFNTFMAWMIIKKTPAPMLIYSKILMAPCIIDIFLSLCAFIVQPIPRWPSAGPAQILDQFDHRLSADCPCAAPLSVRLS

SEQ ID NO: 129240 - protein, 46 aa, Heterodera glycines
MNLYIFLSALIAFLLIRKEWKKIYAEINKKNGVGQRSIDKWKKQFG

SEQ ID NO: 129241 - protein, 30 aa, Heterodera glycines
ETEWPDELTFATPAYSPSADPPFEKSETKT

SEQ ID NO: 129242 - protein, 788 aa, Heterodera glycines
MQQFSNTVRQLPSGRYSVRLTWREPRPPLPSNWAIAYRRLLSTTKRLQCAPELLDRYSAELTRQMDADIIELTGRDDDEHFLPHHAVINPKKLRIVIDASAHAKGTPSLNDCLHRGPVLLPDLCGILLRFRSASMPVLADVQGAFHAIEVEPEDRRFCKMLWLKNPARPVSGDNLLVYRYKRLVFGATCSPFILAAVLLHHFERHDHPFAKELAANMYVDNLLIECETEEEAIDKSSIAKQILKDADMNLREFLSHSPNVMGRIPEDDRLDKTPAKSPKRHRHHCYTAFSPEHHCQHVRPAWTRRAMSSARQTALPTAMGRMNRLGRPPPRCRAATWSQTLSLWQHQTLVIPRHSILGKHSRLQLHVFCDASEHTFAAAVYIRSETADSSQANLIFAKNRLRSRTANQRFTIPRLELLAVLVGIRAMRFAEKEFRRPIDGRHLWSDSQIALSWVKSDEPKAQFEQRRLVEIRQGPPTTFHFIRTDRNPADVATRGCTPAELRTRHIWWKGPEWLTSPETEWPDELTFATPAYSPSADPPFEKSETKTPVYLEATTDLSAPSFINVLRRFISRRGRPKRILSDNAPTFVQTSKALDILTGPPSETDAVTFAARRGIQWDFIPAYSPWMGACYERLIGLVKSCIKRTIGRRILDYDDLSAFLAEIEASVNSRPITWVSDQPDSSKPLTPKDLIQPGLPNNLEIVDSDLDYDDCLSGPARLAALWKAYGRPPTISGSNGVMSTSSPSESAPDGLIKVPAFELPPPPTSAKWSSSKRTSAPGIYGRWASSLH

SEQ ID NO: 129243 - protein, 82 aa, Heterodera glycines
MAIKYGPKIAKYGHKMAKIAKYGHKWQKCQNMDINFSKLSAKFLQIYWLKLHMRYISKFFDSRKINNKSEIFAFLLIFDIIY

SEQ ID NO: 129244 - protein, 51 aa, Heterodera glycines; identical to SEQ ID NO: 124998

SEQ ID NO: 129245 - protein, 279 aa, Heterodera glycines
SLGLNSPAFQSLRLNPPAFQSLGLNSHAFQSLRLNPPAFQSLGLNSHAFQSLRLNPPAFQSLGLNSPAFQSLRLNPPAFQSLGLNSPAFQSLGLNPPAFQSLGLNSHAFQSLGLNPPAFQSLGLNSHAFQSLGLNPPAFQSLGLNSHAFQSLGLNPPAFQSLGLNSPAFQSLRLNPPAFQSLGLNSPAFQSLRLNPPAFQSLGLNSHAFQSLRLNPPAFQSLGLNSPAFQSLRLNPPAFQSLGLNSHAFQSLRLNPPAFQSLELNSHAFQSLRLNPPAF

SEQ ID NO: 129246 - protein, 101 aa, Heterodera glycines
MASGFGMFLFVKFGQFFLKTFAVWALPVVIIWTICVVALRRQFSLISTNWFQSIHLVCRPLRLVMVLMCQIQQFLLAKHCPNGCTLREKMANPSDFVVAEI

SEQ ID NO: 129247 - protein, 142 aa, Heterodera glycines
LQKTLTNSRDGVDPNYSRTEDGIFSEKASSIFFGHFIIDCSGFTFVDCMGVNALKEIFIFTEMREQRVLVYFAAAKAPVRDLFPVRDLFEKCGFFRYVQKHNFYPTIRDAVAIARKRRNAAEKINKLKCEIMVKEGEGSLKI

SEQ ID NO: 129248 - protein, 41 aa, Heterodera glycines
MAFCSLLRLSLMALGKSDTGKSDTGKSDTGKSDTSGKSDTA

SEQ ID NO: 129249 - protein, 111 aa, Heterodera glycines
MTMSVLMNGTESVPLSLAVDLRQEKAFDIGVGVSKSPDHSEEFLPVEADVPNVENNDFSSKTILCEQHTGGESNDDELDNDQPQKSTANAKKKRGTKRRHMPSVAATKCLS

SEQ ID NO: 129250 - protein, 28 aa, Heterodera glycines
TKTVTVRWKCCTNVRRVAKMCTELMSAL

SEQ ID NO: 129251 - protein, 61 aa, Heterodera glycines
MEQQNDDCIERKSSMVLQEYSVIESEESMLDPHVKPKASALWQNVSSEGQFEETLTHPLHN

SEQ ID NO: 129252 - protein, 129 aa, Heterodera glycines
MFYQEQQIMKVFAKLESFSCLMFFKKGDSVETNNFTIDFNSKNKYANINDADAKQIIDDNLNLDFGAQQSRIFRNIFQKLEGPSDGASSSPASDENKNKQKGKIISSLLSLGGKNKEKKNRQPNVIDFI

SEQ ID NO: 129253 - protein, 95 aa, Heterodera glycines
MAAWHFEKLLRDFSFQISSPENDKKISVNNRSLPQQNDTFLQIEQCVREMLLEKESRRDYFGSSFVKMTIDVSLLLYSDTMPKFALRVISQQMLS

SEQ ID NO: 129254 - protein, 205 aa, Heterodera glycines
MLLPFQVCPRFPLIFAELVSRCFSLQIILPQIRSVVAELLLWLDRSDQKRIIILAKALRAYLSALNEWFPNLKPLVTNLSKTNEKYANLEETEGEKDGHGEEEGAEKVDGHKKQWEGDPNYPLVKDVVSILNRTKHFIASANLPLLLIVLDVLRLSLLFVRDYEDELLPMIHQNWMGLIRLFKIGTAGHLLDSQKLIMIKAIEVN

SEQ ID NO: 129255 - protein, 359 aa, Heterodera glycines
MNFRGATEAYAIVHSMPFARLSHHVVKLAIHLPNQQPIVYRAFQLVSKAQQIQQGELPETQCSAYWKQWQNEWKNDPKFKDILFEKVPERFRWAKDKWVLYKRQQIKRPPIGRIVPVPPSDPERFALYSLMRHFPGDPDHLKMVNGLLCTSFTEAAIMHGLLEDDKIWDKTLAEAALSRWPDQMRWLFVSILVYGQPSNAIELWNKYNDQMYNPQGIITLAQHKVAELEALADIDWRLHSCFNLSCVHFSLPDPPTSIAKNTDAAIEEFFFGDDDLNLPPGQPNPRPQPNTPPPLNSDQQKVFDAVLLAIQSNPRDSTVPRRFFIYGDGGTGKTFLFGQIIRRLRKAPYTYKVLATAST

SEQ ID NO: 129256 - protein, 83 aa, Heterodera glycines
MRLLPFCFFLLLPLLLCFFLFTFGSSSPIVDSEMFLPPRFYRTIWPINAKRSPSIGLSLAEYMAAGNQGQEQFHFIPGSGRRK

SEQ ID NO: 129257 - protein, 78 aa, Heterodera glycines
MRRKKVPQKEKWSELLRNDSLGFTFRKKWDAVSVLASIRNRMLAMSMSAFKKIMMFSPNLNSSISDEETMEKIKSYRA

SEQ ID NO: 129258 - protein, 57 aa, Heterodera glycines
MAEDDDEDVQEEAGKDVQTGFKQKAKKVKKTLAKVLAQRAKKPGELPAAIIGDDVLV

SEQ ID NO: 129259 - protein, 192 aa, Heterodera glycines
MIPNPLCTDWMRGEQLLTGYVERGDLVEIRRGSYMHWAVFIGHISGQPLVIHISTESSDMGISTKKEFVRKMAKGCAAIVMLLTSICSTLQRLVLSLRFSFLNLFKVRSDPFLNVISTDFCRVNNCLDANRRPFPPSIIVERALTKASYAYLIMFNLLQILFSLELVGIISSKTTVNTLLNGVVMLFEKASR

SEQ ID NO: 129260 - protein, 33 aa, Heterodera glycines
LAFLKINCCQSLHHVFKASLRKGCSYGRFGDLA

SEQ ID NO: 129261 - protein, 245 aa, Heterodera glycines
MRRKSAGLSLLLLKHSRRSHEQLQIPNASAQALLRVPPVYTQQKGSAVPSFASSSVPYAQQQQQRQYPQNSVQSSPHSHSLSAAYAHPQPLFVPSSSSPPFQPLQIRPQQSPAAIPSVRHSSVPRGDDVDRANASPKNKIPPAVCAVFSVLEVLFGVVSLFVGALNANPYNCLIQPNVPIYLILSGILLIINGAARLFLSLSASPTDSTKRRDTRQMRHSHGRRPALTYAVEGIGLFAILVVLIL

SEQ ID NO: 129262 - protein, 95 aa, Heterodera glycines
MCSELDTDADSGDQSDGRNRVQLDARKAHEAGQLHGHAGHNAGDLCCLGINVEYFIFRIIIVHQKERKTYANSQHQVVVQVQILLPKGESDALKK

SEQ ID NO: 129263 - protein, 164 aa, Heterodera glycines
MGQMQLLAKHWPNGCKFREAMESRSNWVAVLLRQKSSETLLKRSWQTAYEVAKSIFRQANGGPFFETTKIEVLAPPVGPEDDGKMYGESGSAAILIALYALASGLFVKKNIAVSAVIKKNKQIGKVGGLRYKVMAAAKARKTTGVLSTENKTEFMKFEKKVKKH

SEQ ID NO: 129264 - protein, 112 aa, Heterodera glycines
MPSNVMIQYDNKFVPIEQKYLSCQNVPNGGIGYNCEFSLDNLEVDEESSKLSIWANFNYFTIFVLPALRGAKKTGNFVGDGWRKLKNIEEQFLLGRKFLDKICRGWPEKFQK

SEQ ID NO: 129265 - protein, 51 aa, Heterodera glycines
LFVTANSSCAPKSENALVNGQTVMDVIYLRNNFLARNVTESCPPNKDCQIT

SEQ ID NO: 129266 - protein, 41 aa, Heterodera glycines
MARKDFRFPTFLGSEFRLPKFLMKSRKFFNFFLKPVSFVQF

SEQ ID NO: 129267 - protein, 172 aa, Heterodera glycines
MERNSKNNFLKRLDKKLLPGYIIEINGKLTKSLDENLPITISLLSQTDDPKFAEIEHIIKCKEETGVKCPAFCPLQLVFFWNSSSAAVQLNVFALNGIENINISTNKDLPQFPHTAGKEIKLRIHIAHTKYLLTEHGLSEEIPFGDEEKRALPPWLVEFIHVIYKIIGTFLF

SEQ ID NO: 129268 - protein, 300 aa, Heterodera glycines
SGLGFFFSTTFVMSNQQNGDVAVPAAVAPNEQPNQSERFHDFDNVESLFWHEHDLVYGDWTSGAIGDGSRQKAVTMMPTPEVLQRNGSLHQLNKFKKKYYQKTANLLTGKTGQSELDRQKAEEGVKFDILNYWHPNITVSLVTDFSAWTRGQLPAPFDEAVKFDPASNRYYPIVFFNSYWNLATEYQPVNDTVPALNLTVTFAPLSLFKWQLYASQQMRGKWAQMFGGEIFEESDADQDAIKQALIETSPVLLGITVVVSILHTVLELLAFKNDIQFWRTRKSLEGLSVRSVLFNIFQSL

SEQ ID NO: 129269 - protein, 30 aa, Heterodera glycines
MWINPHNEFSCAAAPAITAEIGTKRSLTKK

SEQ ID NO: 129270 - protein, 63 aa, Heterodera glycines
MCGSGAKKVWTQQRLTRWKGGIVNNELITKLKAYWSVIIDKYSSVRNLEYPIKITILILSAFV

SEQ ID NO: 129271 - protein, 133 aa, Heterodera glycines
LVIKKLQSKKGAQKRWNKWEERKAQTAKARQAYLAKRTAPQPDTDAEMPQPSEEGPSTEAPARDNDGRPTSTPSPMTPQEMDVPSVEMVGRYAHLGTPEKVVEKLVKHVTLLNALHYRGVENSQENGNKYPNF

SEQ ID NO: 129272 - protein, 119 aa, Heterodera glycines
MGDLETTLSTTPTAPMDTGETTPPPLAIDERSERIEQLEKQLKDRDDTIKFLREQVRNREALISDLRRSVICVGSWTSTLYHRWHHQRAAKAQPLSPGDLDGLETAVYQFKAFLDEQPM

SEQ ID NO: 129273 - protein, 126 aa, Heterodera glycines
MERHNKKQQANIGQLIKENCDWLCALARTKSAKKCNKMIKKANTEQLLSLVEICLNLVASRFRLTTRQKKRLLPHVDTVRQMSRARSERGARRVLVQKGAGFGGLFAAVLTPVLIELAKSVMTKNA

SEQ ID NO: 129274 - protein, 209 aa, Heterodera glycines
MSDTSDINLDAVRHDLNRDRGERTNPSAKNVNYNQQLRRYLKMRRDLTNMPTKVEMSKGISVLLRRGGEDEDGEVVDTPPRPPAPPPPPPPPSGKRPPRGPNPPAPPPPPPPGRRPPRPPSPPSPPGSPPPRPQRPPRPCRAAAPSRRGGLIEQWRKRQYDIQQRRPVVRDLLAEAAAAPLPESDDEYDYMLESGFALPAPSQYYGDLP

SEQ ID NO: 129275 - protein, 46 aa, Heterodera glycines
MLAGLYLYLEGLQKLATFQYQLCPVQSPLNNSLGFDLSAGWPADLL

SEQ ID NO: 129276 - protein, 78 aa, Heterodera glycines
MSLMSNLIRIFRLMIKAIQHIWRKKTRNEIEIDHLNKFNLMKKELRKENVYKNLTTTQLESEFTKKFNLKTNWKIDEK

SEQ ID NO: 129277 - protein, 122 aa, Heterodera glycines
MESVAHDYTFCRGRFQSVNYDTYGQDEIPIPLATLIDDYVKRETIQDWKCPKCGRSPGRKELKFHSLPDVLIFHLKRFELLNDGIASKIESRVQVPLEGLDMGPYVFNPDVRANTLPKVPSN

SEQ ID NO: 129278 - protein, 80 aa, Heterodera glycines
MPKFWFPSTILEINTVKISKHKSQIMVYSYIYGTAISTAFAFYKIDEVASFCAVPFAVWTGLYCLLLNYFHDKQKQDKEE

SEQ ID NO: 129279 - protein, 49 aa, Heterodera glycines
MMRKGTTVMRRGTKVIKRGTILIKRGRTVIRRGTTEIRRGTNLIREFLE

SEQ ID NO: 129280 - protein, 100 aa, Heterodera glycines
MLFFNLPPKTLLLALVMLLSSKRSQSISNLQKMHSKTDYFKLATELVDSSSSFNEIIKAGKIDGSNFEIGWWEKRAFGILCVAKFGFKMDENLENYTKTL

SEQ ID NO: 129281 - protein, 166 aa, Heterodera glycines
VFCAINELGQTKRVDEALCGQSLEEKPVAREECVNEEKCTGTFFTGPWSNCTAKCDGGTQTRTVVCLNYDKKPVPEWCDEKEKPAEQQDDAEEAAPPSKEMCAIETVGTKEKLQIPCAEAAAVTETMNETVQLIKLASADETAPEAKETNATAEEAAPVEKPCSKT

SEQ ID NO: 129282 - protein, 36 aa, Heterodera glycines
RLELNKFKKRARSARQSKTTFEKRARSARTMPRSGR

SEQ ID NO: 129283 - protein, 70 aa, Heterodera glycines
MPTNGFLGSLISDHNPGSDQRDRSLHEVYMDNELTGFLYQGYPHCQGAHEDTYHSYKFSYFTYIFLLKFK

SEQ ID NO: 129284 - protein, 351 aa, Heterodera glycines
HVEIGSDAGHSTVSMADRLDTAISHHHNAASLTRFDTDHTDHRDFDQRLAQVIHGANGTFAKGFWLHQKSLNRWTLNFNQKDIENSLNRWTLNFNQKDIENEYRAHFAAGDSSERHSAIRSTANGLKKHKQLASAAAESKQQQRSRRPRYRYSGVFIDIFVATASVFLTGKIRLGMAPFGRRLLAMFASLCLAVVVLIGLPLLSRRPLLPCLHQWAPRHIVGAFLIALPVGIALFNVPLCTSTNPASSCAFQIGNFRLLYSFTMLLALFAHCNFSQLGAWPKTCQAIGVGLIFLQLGAWPKTCQAIGVGLIFLLSTWFCQQQLDHIRHLNDVLSTWFCQQQLDHIRHLNDV

SEQ ID NO: 129285 - protein, 67 aa, Heterodera glycines
FILFKRARSARLSSTKFKNELEAPVRAQQSLKRKARLSTKFKNRRQAPVQAQQRNFLRKITRFQKFF

SEQ ID NO: 129286 - protein, 114 aa, Heterodera glycines
MGNDPIDQMNELKKNQTDQQKRETVKKFDAIKEKLREKGEYKGKDQSKIERKIAKLLGTNRQLIQKWKNELNLKKTNRMKKSFYDEKKLKLIERIDEFKWPRKTERICQGIAHS

SEQ ID NO: 129287 - protein, 360 aa, Heterodera glycines
MSDNPKEAEKEMEKAIFISADCWLSVFDLLPPFQLGLGIALISHRFDYFINEHFKTRKWKLGEMKIQRKTGEKGAKGMEIVNSDQKALPIPQNPLPNKVIGFKSISIDFIDQNVLIFLRHFHRFFASCTTTLNIFTVNVRISKLIVLNIWPMLKDTIRGMALDTVNLRPIRQLAPSMLNDCPSLRVITFYGPISIEFPPDESANASNGQAVTKWLFLPRPDKLPKELTICIEDSAVEQQWLATVQQIKAAFSSASSPVNFVITVYFPPSSSLSAVMPFKLTNEFTGEQLALSKEDGEEDFSGFSIIRCPIVPDDKRQQQMIKELDKRWNRIDIFIIRDDGVGDGLLDGSPGPSGDQKQQK

SEQ ID NO: 129288 - protein, 239 aa, Heterodera glycines
MMASAVGPISRLPPAAVAACASAAADNGSGGLLAAVAATAAAAAAAAMFAPPTDAIAGNNATTPATTMVPPRSSAATVATPAAASLLVAAMNAAAFARQQHHHHQQRQWAEAAAAATIAKPITAQVLMVAPVAVKLAAALYKVKRRQPPQNYRHRRRHATAAATVGRRLRQSTGAAAAVCGDPFMPANEGRPSVANKLVSVVVAGGRSRPWGHKQQQQQTTSCRRPSSVRLSSSNRRRR

SEQ ID NO: 129289 - protein, 132 aa, Heterodera glycines
MDSARNADGVAQCRNGGLAAMKPCWGGGADDTAGVTVVAGGVMPASASFASSKLLLPNAQVGCRKAAIWDAFVRELWPIFETSIHQHLNFAGHKHFDILRRLISPTILTDLNKLNSINSDDLFPDGIAADDE

SEQ ID NO: 129290 - protein, 82 aa, Heterodera glycines
MDIATSKIAAINPTRLGLVLNYSVFLADLLKSVNEARNLAKKAIDLAEAEIASMTVPLDDDASINLQTLRENMELWTPARPR

SEQ ID NO: 129291 - protein, 274 aa, Heterodera glycines
MTDEPETKDQLIYLIIVCEKARRFDDMVEAMKKLIKLDPNLGLEDRVSLALAYRGAMSSRRSSWRTLVSIEKRTGPEMNERQHQVVPPSIFGGPGGTFSVKNVTDPFFPQTQVMESYRKHVQNELVTICQELLTCINEMLLPKATDPEPKVFYLKMKADYYRYMAEVATDGDRSGVVELAKGAYQEAMDIATSKIAAINPTRLGLALNFSVFNFEILKSVDEARKVAQKAIDLAEAQIATLTVPLADDASINLRMMRENMELWTPEGGSHTKTT

SEQ ID NO: 129292 - protein, 280 aa, Heterodera glycines
MSIEFKHFFFSALFLHLICVSHQITAEKECQEYENEFMGSFNGFSNASEFVSFNKFTKECFSLWFCEKTKFVYPKNGKDIDATISEIMTKIHKKYCEEIGKGQNIENTLNKMENETENLIKNLKKDPKLQEKVQNMVEMELSKNRKLNEKIQNAMERRKVNSFYDLLNAAFQTFFGNCKNCSIMPQKELSGRRKRRMAKHEMGNTSNTANEQNNFSIAGQNLVTQPTVVHNSNETGLELVTHSSDDNDHQNGGTNRGFFECRTPTTKSEFVSDSSNFAGR

SEQ ID NO: 129293 - protein, 441 aa, Heterodera glycines
MVDAKHSSVSGKAERAFSAAAVNRPAKFDAIRSEMESLLDEWDCTAIQAFNELWDGPKRRPGENLEEFAERVYQLVLCAYPGLPLDLYNDYAAKHFIRALENAKISIALEMARRPGLSYDSLVALAVRAEIAQKAAKSIAENENAHIARSFKPNKVEKTTTDWEKFYVRPTNKSVCYNCRKIGHIARNCKVKFTWKKCGFEQNNSNMNFQKENQRIRTDNLPRAKIFPKVSAPKRAKDGRNERNLSQKPIESADASTIFAGLFASFLVVANAFSNVKAKTHSRRISSTASSSSKLPALWNPLNVAFEKLRKRENSKENGINSKVKTPKGNGQLRTIVFSKAGEELADSTGPTTKLLKADTERKLSAVDGTITNKSASSYAIRPVQNCQIMMLVCATADCPSLLPLLEAECPADGFEALRTSLCRGRGCHIIVDLNYFGVLF

SEQ ID NO: 129294 - protein, 22 aa, Heterodera glycines
MCKMGLKKTLIKDLYIDVGIEE

SEQ ID NO: 129295 - protein, 118 aa, Heterodera glycines
FKAGVIGFNGKWAADQTSLYGDIDESSEHRNNKIWTRAIKTPMWQIVKYADDNVQYIFYGVKSCESMVKCRGCRLDKCLVAGMDPTLINVPPSDKFKQFLTELEKRKLSAMLTHSEKN

SEQ ID NO: 129296 - protein, 48 aa, Heterodera glycines
MRRLRCSTNAPASGPMCVLNCSHIAKAVALVCHGGTSGRKITCIRLDY

SEQ ID NO: 129297 - protein, 32 aa, Heterodera glycines
MQDLSLAMSLKQWRTIVKDPNLAMSFKQWRPM

SEQ ID NO: 129298 - protein, 22 aa, Heterodera glycines
MAYRMPRPLHKCDKCVIINLIK

SEQ ID NO: 129299 - protein, 371 aa, Heterodera glycines
MKFDGSFTKDVCVQYRKYLDILYEYLYHVHAGHSVTRPTFIENAALSRYNRDLIEFLISLSTISKFYLFDSEFALSSVTDREEIKIFCKFELENENCLEYHHGLAYNEKEFNKKKRQKIDSEIRAKFELLMEKHFNKLWENAKLKNGNKNSDRMSISLAKTMPSDYAVHIYDTFLGMPIYDFDTLVSEECAKNMGLIFYIENQMEDEALINFVKTGGSKMTNIEIAEDIEDFYEAVEMHLGLLLLMRNNWHCANAKVANAENECQKLRYFVEIFYQYLFREWCGIAAVKPMLQTNNDFEIKPVILSVEDILSSFNQISMYFFGANSSADKNKFAHLLGELATYKLLNEHELDYNGTPGTCFELHPDFISRE

SEQ ID NO: 129300 - protein, 113 aa, Heterodera glycines
MFCESLVRCARSRGVQMELPKRGIDHFDDTSLEFVREQFKLFSKHLVRFVIFFAPAKDASHAGDVHHTFKLQGIKQGKSNFFLLIVVMFKTQNFRKFNSKNIGRNFSILRNIN

SEQ ID NO: 129301 - protein, 370 aa, Heterodera glycines
GQQLLESTLRNVLDQQSLRWIFVGGKGGVGKTTCSCSLAVQLAKYRRNVLIISTDPAHNISDAFNQKFTRSPTKVNGFDNLFAMEVDGNLGDEDDKCTHNLGDEDDKCTHLPICIHLIHCFRFSADIFSIGKNFLADFAAGLPGVDEATSFSQMIKLIRSMDLIRSMDFEVVLFDTAPTGHTLRLLQFPTVIEKGLSKFLKAKTQFMPIVSQMMAPMLGLPDSTLDSTTDKLEETLQVVRQIKDEFRNPDLTTFVCVCIDLTTFVCVCIAEFLSMYETERLVQELAKQEIDVHNIIVNQLLFPDKNSDGSVSCKKCLCRFKVQQRYLAQITELYEDFHITKLPMLDEEVRGPEKIKQFSERLITPYSSAV

SEQ ID NO: 129302 - protein, 201 aa, Heterodera glycines
LPLLVDIVKHRHELNSKSTAIHALLISPGQTRIFDKFEEVPNYALECSATENVVVLFPSKNSQSIAQFVRENGPLHRIVVLDSTWNTVGQLRNMANIAKLPMVHLRQYTTDYWRPQNGLSADHLATIEAIYYACVESQEAEREWRRTEERRRMGEGEEKEVRENGGSEEKAEEEQHRLDKLLFWFYFFRKMVPARIFRMKK

SEQ ID NO: 129303 - protein, 104 aa, Heterodera glycines
MEKNGTEEEQTADDLTPKTMAIFELLDYIVNRPPPVLPRGLFSDQFVDFVNRCLRKNVAERATLALLATDAFYKRHERMEETAEFAAWVRSVIEHRNSNALLMG

SEQ ID NO: 129304 - protein, 170 aa, Heterodera glycines
MSSKRRNPLNLSLPPTVNEEGAVGADGAWVGGQPPTEGVGTEGTADASLDSKLRSLNLSGSQQQRMYEWITLKKQASDTAYWKWVNVGERKGTNWRKDNAIGELSDDVLERICDLGHGNGGVVHKMRHTKSGGGVVLARKLVHLEVKPSVRNQILKELEVLHKCNSPYIV

SEQ ID NO: 129305 - protein, 73 aa, Heterodera glycines
LQNGKKNGAIAGICQRQKLEESGQWATDLTAQKRALFAVRFRFRQCGRVGTRIGLPPAVTARKGKSRQKVAVA

SEQ ID NO: 129306 - protein, 107 aa, Heterodera glycines
MSELSGDVLRKWNVLQSVPPSPSLANVKIGNKMQCMAKNICDINEMWKGAKLTKRFEIRKKCEEMVKNWEQMTKEISTEYENADNKNSALNKNGQVFLADFISARIH

SEQ ID NO: 129307 - protein, 127 aa, Heterodera glycines
MLGKRQFVLINHVIIIHFTLIKMLDTILTKPYIKVPVSPQNPSVQEDILSGVGLGMSFGAFGGGSFGLVLLGIAGGHYGALMNEQYTNCQTLVRACICNKATCVLNADERCLLSFLFYFFNEKIYLK

SEQ ID NO: 129308 - protein, 117 aa, Heterodera glycines
MLSFIYTDDISGLNGGNAMAVLYAGPYGILTAEELAGIKQYHSQSKMCGTPGFLLNYPLLFPSHQRNLSFEKIVMDIEKVSEFAAESTIRNCAELMKTKIVIANGRRQPFEVFRNYS

SEQ ID NO: 129309 - protein, 103 aa, Heterodera glycines
MEMISEVNYVGQWTVSQWNGTEFAAPIMTKNCGTTFVRRGTTVMRRDTIVIGRGTKVIGRGTKVIRRGTTVIRRGTTVMRRDTIVIRRGTTVIKREETLKYND

SEQ ID NO: 129310 - protein, 27 aa, Heterodera glycines
SCGCGRKHRLNLLPIVDTCVLKMIHAS

SEQ ID NO: 129311 - protein, 41 aa, Heterodera glycines
DDHSRKSSQIFEEGVRVGFAGDQGHTQTQHGNANVNRLSDC

SEQ ID NO: 129312 - protein, 73 aa, Heterodera glycines
MASSRPGQFTHKNYPLRYALGLTKDVLKERKVVRIDIANDNEFLRAADILDNTRPSTFRSMKTGRGWPNEPTL

SEQ ID NO: 129313 - protein, 137 aa, Heterodera glycines
  unsure (1)..(137): unsure at all Xaa locations
YPLRYVSFRGRGGNVINANLVVFFFSRKVPAFLRTIMPRGSTTLHERSWNAFPYCKTVVTNPDYMKDNFLIRIETMHLSDRGTTKNVWMEXHHHYKDVLKERKVVRIDIANDNEFLRAADILDNTRPSTFRSMKTGR

SEQ ID NO: 129314 - protein, 48 aa, Heterodera glycines
MRKVSSREEIVQQRVKVANAKNDRIVMPLTIEEYQIGQLFSVAEASRQ

SEQ ID NO: 129315 - protein, 150 aa, Heterodera glycines
MSLQYVGIAAVILGTAIALFQTVSLSTRRQIAAQNGRSSSSGSKRQSKSPSSAKTLAHKIAATVIAEKSLSSIPDNEILQLMDIGFQLLDEVLLRHPHRTAAAQAPTAAVPFAVPRRLRGPRRVQSGSHCAARLAEDPLLGQDHSAAWEP

SEQ ID NO: 129316 - protein, 54 aa, Heterodera glycines
MTVVQIVQEHQNRPLCFATLSFCEQLPALFGETTHLIIDEAGQAPYVQSLNLWI

SEQ ID NO: 129317 - protein, 100 aa, Heterodera glycines
SKPRKKWSSKNRNYAQKASQTILALPIPSTIAFIHPIMSAKIIRVPKIACDLSLEKNGLSKNRNYAQKASQTILALPIPSTIAFIHPIMNAKIIRVPKIA

SEQ ID NO: 129318 - protein, 117 aa, Heterodera glycines
MCTFCFIFVLSSFATCATDESNSNLAQRQNDQQFAIAEADPSATTVSSPHCPSCSDKSSASTMAQNGAYPTTEDRTKEFWTTDGTDDLCADHVSYLEPQTRTRTKSLKRFVHNISNF

SEQ ID NO: 129319 - protein, 41 aa, Heterodera glycines
MGKLKNERSLNFMVKKRPAKEGIPFFIADWIIGEKELPTLD

SEQ ID NO: 129320 - protein, 351 aa, Heterodera glycines
MRDQLAIVPECGYDTTNTQSLIALKFLDWYAKKNGVSIQTAHSPDGEKKIGQYTVDGYIASTDTVIEVNGCHWHAHDHPRHRFQPQTVMANGKTAQRIREDDARRMVFITSQVQQVLVFWECEINAEKRNNDEMKRAFAQYKDSGPIRLKDCYHGGRVGPQRLHYEVPEGWRMKYYDVRSLYPHTNAVTAYPVGHPTRVNIIGEAEQAVDWRRADQVPIRGILKVFVVPPHHVDVPVLPVKFDQRLLFPLCRTCALQHPHGSVNEDYECTHREDDERGWVSTVTSIELEEALRNGYRCTAYYRSVEWDDTQWSDRVFRGYVAEFMAMKTHASGFPDEIGTTKEDQQQFIEE

SEQ ID NO: 129321 - protein, 74 aa, Heterodera glycines
MPLNQQMKNYNSNHLTKYLEKNGKKKKKNKMKRKSSKKEENIHEKNGNKIMPKFAKKLGTNRTKIYKWIKEFGL

SEQ ID NO: 129322 - protein, 251 aa, Heterodera glycines
MRQNGGYLNPNDCTKCHCPDGYGGQYCDALEESAKLCCPRALTDLNGNEYKNWIEAEKPDMDIVISAHLSPNWTVPSTVFELTFESGKEKFKCVKIENLYAEKRNPGTGTLRCYNPTKNQYYNCSCNGDKKCLAEEKWAHDRFLCPIIQVNGIQIQIDYRYNWTRLDVDCYKAEGGTVSFWGYSKPETKEIIRVDEIHCLTFEAAGVTPPSQKRFKSLQVEEHLSMKLNPSTLLGNASSLIHVFVPFVGHP

SEQ ID NO: 129323 - protein, 54 aa, Heterodera glycines
MQTTNDERKAKTQQWKSTNSCSLSVIIWFKFSLSWENHGREVRASPLLYGPDTV

SEQ ID NO: 129324 - protein, 860 aa, Heterodera glycines
MASKEELKTILEAQQKQFLELMKTLMSKNEAPAHSDLFSKLNSQIPDFRYDPENDSTFSLWYERYGQFVEKDGQALSDDMKVRLVLGKLSATDFIRYEQQVLPKKTAELSFQETITNLKALFSDTKSVFVRRFECFQLTCSPGQDVLDFGATVNAKCERADMNLSKEEIKCLIFVTGLGEMHRDLRQECLRQMEKARKVTPPRDIKLEALLEECRSIQSLQHSAAALANPGQVHAIPSKPKILSDGRAKNWQSNSKNWPSKPIQFQKFSGNNSYGRNNGFQNKLVKPQDKNVEQQKCKRCGRAHLLKECRYPVDVQCFGCGQRGHIKTNCPSSAKSNSIGVASIFSVANSKRGWIWTELVVNGHPINLAADSCSDLTIIQRPVWISLGEPKLEGAGRLVGSFSGHKLKLLGGFKCKVVFRGVELNLFCSVADTDAPSIMGLDWIEPFERHTQMPIATTLKVVSAGNSGPVSCTIQSSDPTQLAKEVRAKFPKVFQPGLGRCTKMRAKLHLKENAKSVFCRARPVPHGVQEAVDREIDRLLEIDAIRPIDFSKWAAPVLAVRKKNGAVRICIDFTTGLNEALELNRHPLPRTDDIFHSLRGSKIFSQLDLRDAYLQLELDDESKTLVGINTHRGLFQYQRLPFGVKSAPSIFQKVMDQLTSGISGVFVYLDDLIIASPNMAEHLLVLEKLFSRIQDYGFRIQLDKCHFVQRELKFLGHIVSADGIRPDPSRSAAIREMPPPHDLGTLRSFLGAINYYGRFIKEMRAIRAPLDLLLKKETPWDWGPTQQNAFEQAKRLLQSELLLTHYDPEKPIIVAADASQHGIGATISHKFPDGSEKVVEHACRSLTSAERNYSQIEREA

SEQ ID NO: 129325 - protein, 46 aa, Heterodera glycines
QNAISSDLPLQFPHQFPSNFRPFASFLSPILSSQCPSSVSSLFFSL

SEQ ID NO: 129326 - protein, 140 aa, Heterodera glycines
DEFGGMEENCVMEGPGLGFNCGGIEGDEFGGMEENCVMEGPGLGFNCGGIEGDEFGGMEANCVREEVGMAFEWEGIEDEEFGGRDANCVREEVGMAFEWEGIEDEEFGGRDANCVRKGVGMKFKGGGIEDEEFGRREEEG

SEQ ID NO: 129327 - protein, 97 aa, Heterodera glycines
MTFQSLGLNPPAFQSLGLNSPAFQSLGLNSPAFQSLALNPPTFQSLGLKSPALQTLGLNPPTFNDIPIAGTQPTSISISGTQFSCISITGTQPTNFQ

SEQ ID NO: 129328 - protein, 92 aa, Heterodera glycines
MCPVLHRQAHPDVPARSDPLAHLDRPERKVRENPLGYIKAFMHLSSTTGKLGESGPQGPQGDQGNPGPYGKPGALGAQGPPGQPGAVGSCAH

SEQ ID NO: 129329 - protein, 25 aa, Heterodera glycines
MNFRAVFCFSENANIFYYLIIIFGI

SEQ ID NO: 129330 - protein, 171 aa, Heterodera glycines
MSHNQPKKAKYEQAQEKEDKAPLTDDAEKKEAKADKASLTDDAEEKKQKMTEKEITVLRLHMYFFKKVRTKLYTVIMRTNQLLQHQQKCLCRKMAPVLRFHYHLMRDEEENIFDIEVALAAIIGEEKIFGHHFDGSESDIEQATRNLKAMIEEEGSNNFGCMRDFSVNFSH

SEQ ID NO: 129331 - protein, 49 aa, Heterodera glycines
IFYRFLNVWIFFGLPKLHRTWLFLFSFKSPQIFLQLNYAILSLFPENLA

SEQ ID NO: 129332 - protein, 94 aa, Heterodera glycines
FEYPKRTFEKFDFFVFGAVPPNRCAQIYGETESFGNSFPIACTLILRWIFAPHNCLSTPNGHLKKSIFLFSGQSPRTDAPRFMGRPNPSGIASL

SEQ ID NO: 129333 - protein, 43 aa, Heterodera glycines
MFGFFFGLPKLHRTWLFLFSFKSPQIFLQLNYAILSLFPENLA

SEQ ID NO: 129334 - protein, 89 aa, Heterodera glycines
LFEYPKRTLEKIDFFVFGAVPPNRCAQIYGETESFGNSFPIACTLILRWIFAPHNCLSTPNGHLKKSIFLFHKYFFRKCSKAHQILFTS

SEQ ID NO: 129335 - protein, 157 aa, Heterodera glycines
MGRHRRYPMKKTAKNTNQAQKIERLSFDTDQTPLQTPKDSRKNKFSILEHRDLEKSPYRNMNKKPSNSMLEEQPTTWKEQMLKKLTDEVAQQKNKIQKRNKKPKNRLLEETQKLGYHHMPWESAKTLIYRIQQDQNKAINEELLKVGNWIFCFYPSF

SEQ ID NO: 129336 - protein, 80 aa, Heterodera glycines
MDSADRRSPTPDMELCELSSWYDILQDDDDNILNWFTPVTARDVCQEVLAFAQERRMPFEKIVKWKQILDKICAQIAQNK

SEQ ID NO: 129337 - protein, 90 aa, Heterodera glycines
MTRANDLLIICLIIFVVPTGVLDADDALSVFVSYSNSGYTNAKFSIHPRVMQNTGGSRGRLTLDIENFEDFLMEDEGKRESVIRVIRGLP

SEQ ID NO: 129338 - protein, 58 aa, Heterodera glycines
MSELVAECLQFDFSEIPNIFAVYSECLKLKGPNAIRWAQNQCQEKEDEQNASHWISAE

SEQ ID NO: 129339 - protein, 77 aa, Heterodera glycines
MALNTSNLMFLIATGFVGGLSKKLFVFIRFTFLARPLFASSEIRRSNAPEMPHKICLWARTCLKEYVHQRNEKGLFT

SEQ ID NO: 129340 - protein, 110 aa, Heterodera glycines
MRLDLAPNAHGNDWPYAELKSAVSSANFLERPRPTKRAISDAIISAIPTTSFLSSPSAFDAGLLLSPLPVTNRIGHLLREFSDRQKAICAQHFGIGTVLGNKVGSIVIDN

SEQ ID NO: 129341 - protein, 38 aa, Heterodera glycines
MILSMIFHQVLGFFQNFKKLNERKNSWTDGGENCILLS

SEQ ID NO: 129342 - protein, 63 aa, Heterodera glycines
MSSSLDVFKLTDDDAMKFLLCESHIGTKKDGLPNGALCVEASIRRSPLTSVPRQSLAVSRPAL

SEQ ID NO: 129343 - protein, 49 aa, Heterodera glycines
VNIDHRPQTQKCLKTVRIDVKRFEMCWKNRIRGALALFQDEKCRKWSAK

SEQ ID NO: 129344 - protein, 44 aa, Heterodera glycines
MQKCKKKLVKIKNGKCKNILKRQKENLVDDKPGLGSVLICQICF

SEQ ID NO: 129345 - protein, 149 aa, Heterodera glycines
MRAILFLAMVCLVMAVILETANSKAVKNKNSKAVKNKKVKGTITTPAKGKAAPKGAAKGGKVKGTITTPAKGKAAPKGAAKGGIIKKDAKSKGKGKKDAKGKKDKKAKPAKGKGVPKNDNKSPAAKANDKKSPNKSPAAKANDKKSPSK

SEQ ID NO: 129346 - protein, 26 aa, Heterodera glycines
MSIIDSFVVPYPISSGILVNQFLLAL

SEQ ID NO: 129347 - protein, 136 aa, Heterodera glycines
MEKVDVDTQTDDGTEGMEITDDEKIILTVKEASRAVVAHESVWSDPVEMAYARNGKGETRRRKHCEKLGGKHQQLEDVEFCLAAKLGVEIVLKRTIASDEDITEATNTVGTWSKDQAHIARKQEFVVGTVMMVFWV

SEQ ID NO: 129348 - protein, 50 aa, Heterodera glycines
MFMNCLKCWFHCLITKIKFRKLFVLTPLFITRNHYFGASPLKKTILEVGH

SEQ ID NO: 129349 - protein, 119 aa, Heterodera glycines
MASVRHRNPMAVLVVVLSSSLFSPAFALAPLRQCAASLECATGGRLATLHNGGEPALVACQQFRVRHQLLHHCALPLPSWNPRGVEVDLGFVDVANLGEKTIIYGKNRFFFSIAQFNRS

SEQ ID NO: 129350 - protein, 51 aa, Heterodera glycines
MNYDELSILKEETVVKTNGESFTDGQQMKELREKFEKMELILKNTKLELKN

SEQ ID NO: 129351 - protein, 90 aa, Heterodera glycines
MAPWHSKMRKHCEWKNVNGPKFELTKQREKWGKIGKESEKAGGEVSAKMKTKVNSKINGKAAGQKEMNYDELSILKEETVVKTNGESFTD

SEQ ID NO: 129352 - protein, 31 aa, Heterodera glycines
AIWSDNLEILLTGCVRTECLFSVAKTTQSFA

SEQ ID NO: 129353 - protein, 52 aa, Heterodera glycines
MVGQLGDFVDGLCEDGVSIEVIEQEMASFFGKTLETELNLEPKVVLKSQPAT

SEQ ID NO: 129354 - protein, 42 aa, Heterodera glycines
MRECWISVPVIQNIFDEGGRENNFNKERNGKGVHVSSSLILL

SEQ ID NO: 129355 - protein, 50 aa, Heterodera glycines
MWITVRTPNSFGNKRILEICPGKFTQAFSESTLYGSESAEEVAAATQIAR

SEQ ID NO: 129356 - protein, 121 aa, Heterodera glycines; identical to SEQ ID NO: 128908

SEQ ID NO: 129357 - protein, 104 aa, Heterodera glycines
MNWVLLRAGFPPVSIPVEQRHRYYHVLREANDGDLRPFIRFIAELTDRTLESLIAGSVSSVCEIGDDCSASSSSSSSSSAGGGDAIDATTNGPKEGEEEALDAN

SEQ ID NO: 129358 - protein, 130 aa, Heterodera glycines
KAELSEHYKFNLTRLTDIDVIAKKDYPFSVSFNRLNTSNFKKASVPSWAVNFIRLKGEHIKLLDRPSVLNEEKKQILWGYAKQLSMTIVVVVVFVVYSSFIITPFIKKNNNLNLTASLDTVLNYGDEVFL

SEQ ID NO: 129359 - protein, 138 aa, Heterodera glycines
MPKCAVSAQKSAEITEAECTGIHNFKIIFQFLYYPKTIIFDRFVGDTLLLLEFDLSKPNISCKNYLHENHDFSIGPESTHKLNKYGQHFHLLINATAKHFAIRIDQVGFQLDCKYGISKKFSYDKYYIYPPWAVDKIQ

SEQ ID NO: 129360 - protein, 58 aa, Heterodera glycines
MEFLNEIHGISWPLFELNGLGRLDIVLFPSVGMEVNVKNTLQLYYVSPLLKGVSYNYT

SEQ ID NO: 129361 - protein, 124 aa, Heterodera glycines
MTLLKHKFSQSPQLKELSVASPQERNWRGIATALLVIVAMCSIIALAVLVLTPPLLDADQPQKRVTLADVLTHRFLNSVESLEWLDSRRLLVKEAESVRVLELNEGAENGGPIGWTWKTLPGDL

SEQ ID NO: 129362 - protein, 297 aa, Heterodera glycines
MVAGREEAEERRVVVLEEGPMQLVGYLSVVIWIIFNFIPQNSVQETVAVLDMVPIQLVCHSRKFESQNGGLGNARPNAENNGRGRESYGDRRGGGRGSEGDGGERFGRGRGVRGRPEFGERPPNHSQRGPFANGGDERFPRDEQGLSRPRHTYKKRSIECLYEEDFLVSERYVDIRDEDEDLAVFGHNEKFTSYETWKDFNLEPKLVDNINRCKYVLPRKIQSYTFPLIRDGYDVKAHAETSSGKSAAFLLPIIDRIMKLKKECAFKSKRGCPYALILSSARELVIQVYEQARKLCD

SEQ ID NO: 129363 - protein, 329 aa, Heterodera glycines
MDPPPSHPKNQQTQSANAFSANAAPAPLLTYGRGIFGFIFHAEVVDQQCYQQQSADSVGYGPLVPAAFVSVPLEQQQQASQKGAVTSSAAKPLPQQHFVPPPPSFYTAGNRSSNAAAAALLGVVPPPPMLPPSVGGSAVVGPPPPTAYATQQQQSINAVTSSSAKLLPQQPPQPFYAAGNYSSKAAAASMFGVMPRPPMLCPWGGGSAVIGPPLPAAYAAQQQQPIDPMPSLSSTLDYGQQQHSSFQHQQMVGPTSSTADLHQKLFVPTAEDLSDSMIYPFDVTHLFCREKTSEILDPQLDEGLKKAKQQVSSVANAQSSDEQRRKLLT

SEQ ID NO: 129364 - protein, 181 aa, Heterodera glycines
PYYDPIPLKVSHYFCHFVLAPVHSLFPSQGIHVQSLVQMACDSRLLDADSRQRAMQTIATNVEEALHVKHQALGGNRFRMLNMIICTRSSGAAVTFLYISVKMLYTVNIVVNIVGQIFLLNTFLGNRSRWYGLQVLNDLMNGHEWEESGHFPRVTLCDFEVKVLGNVHRHTVQCVLMINMS

SEQ ID NO: 129365 - protein, 94 aa, Heterodera glycines
SVHLNNFYPKNFFWVFGAVPLNRCAQIYGETESFRNSFPIACTLILRWIFAPHNCLSTPNGHLKKSIFLFSGQSPRTDAPRFMGRPNPSGIASL

SEQ ID NO: 129366 - protein, 45 aa, Heterodera glycines
EKGHKTDNVALAEQRQSVTKRVRGSQQKLSLIHADLELLSVRATD

SEQ ID NO: 129367 - protein, 123 aa, Heterodera glycines
MIVVTIRTKLMRSAVEHHDHVPSPSFAATTGAVFRTPRSAMGPSNALTDLTNRSAPRANVWTACANVRTAHAFRTTNGAIVAATVPMRRTSATAPTIRTVASAPSTNLSAPTVCAFRASSCGF

SEQ ID NO: 129368 - protein, 202 aa, Heterodera glycines
MQQHPMHHHPHYQQPQFAYPPPPLSAPNAGTGAHMQQQPTPPPQAAQLHAMAASATPTGLFIYATNFGTFQQAAAAMGPPNELIGPMPGQHQQHPMHHHPHYQQPSFAYPPPPLSAPTVSTGGAHMQQQQTPPPQTAPPTHHQHVMPTALFGYNPNIGPFHPPPAMGPTVEQPHQQVFFFSFSRIQNKCFEEKNKKNLKTAE

SEQ ID NO: 129369 - protein, 110 aa, Heterodera glycines
MALSSLIELGKNRQQTQRDEAENGIDNDDCRFDGSVAVSSPSVISSTFAATPANCSAETFQSHANGTHNVTTIKTEDNESGDELPPQGNAKKQTNEGILNAKQKIRIPLF

SEQ ID NO: 129370 - protein, 135 aa, Heterodera glycines
MGHVVFINKFEKYSNLVADYNGYSIFEDLQLGDPTFKDPTFETNSMTINQGDLWPNLINKITQIGELYRSAKLFENPSAVTQQLFAKLNLPNGNWNPGSKDWWTRYSGVILNILDIWGTHGMPEIACLLGVSVTI

SEQ ID NO: 129371 - protein, 94 aa, Heterodera glycines
MCKFASFLVIFFAVFLLFAKGDAMKLKSTKDWIKKKFSSTSSPFSSQSVSSSSFHNPLIESSFSFNPPEEKAITAAHFFQKLLGTGTDIICDSR

SEQ ID NO: 129372 - protein, 87 aa, Heterodera glycines
MVIALLLSSALRLLSMLRVLTLPFRLLSANLPSECLKIFSLLVRLIEHVKSFRVIPTMLYLDVKEKSYRGKRAGAETQAPKRKIFVF

SEQ ID NO: 129373 - protein, 270 aa, Heterodera glycines
FHYCTKINANDILINEVIKRFTPNPVLVIIQASQGRQDLALPTDAYVEVQEVHNDGSPPVKTFEHVPSEIGAEEAEVHNDGSPPVKTFEHVPSEIGAEEAEEVGVEHLLRDIKNQTAGTLDIKNQTAGTLSQRIAKSVDGIRGLENHLAGFTSYLHRVASRELPINHAIIFLIQEMEMLNLLPEVLSPDFVDAHNVQTNDHLMCVYIGSMVRTIIALHNLIDNKVRKGDEAQKVAEKSAKEKTVKETEKNEANDKEIVKNTKLYDHFAGK

SEQ ID NO: 129374 - protein, 48 aa, Heterodera glycines
MVDELTSSTKIDRNKNSYGIEDLIVIQNYFDTKFPNRFLIVAFSRNMG

SEQ ID NO: 129375 - protein, 102 aa, Heterodera glycines
NFILYLYQLMHFLQKFGITTGIPQKTGIATGIPKNPGITTGILKSPKLRLGSHKRPGLQLGSRKIQGLRRGSLNPRNYDWDPTKDRDCNWDPAKSRDYDGDP

SEQ ID NO: 129376 - protein, 280 aa, Heterodera glycines
LIFLKIMIFDFYFFPPTIHVSLLKKLLVPSPVLLVMQRTTTSLDRNLPSKAEIISLLAVRSRMADHALRRNFLGADRCLAMYMRPRDTITMVGGYCSDIRESNMWLLCPRSLDIRGTLNEKPCPVSEHCSFRAHDQFLELAWKISTVLTPPLIVQDAGYVTCHVSRKLSSYWLRRVKRVLLHVHQAKTWPAIRRLHDMPRHSNTLTIERLTISNPISCTILLYKSRSKGRKARSTQTHCHHPSPKIYSASGKEPWVLATNLPVEIRTPQQLVIYSKGMQI

SEQ ID NO: 129377 - protein, 47 aa, Heterodera glycines
MLTIFARQGPTILTEKQLRNSRSRIPSAFSSSFPVLVNFLKKWEEVH

SEQ ID NO: 129378 - protein, 62 aa, Heterodera glycines
MAIKLASFCPIFLFLLLLPILSTFSLSPKLNSSVADAVVSCGVPPLNKNFTRFDYLVYLSKY

SEQ ID NO: 129379 - protein, 18 aa, Heterodera glycines
MDKQMSLIIDGEKKDTFG

SEQ ID NO: 129380 - protein, 143 aa, Heterodera glycines
GRTPLHEVAKLGDEKMLKIMWKMNADANIRDKEDKTPLHVAAERGHTQVVETLIDKFGSSIRARTKDGSTLLHLVSAEGHADTALAFLKEGHADTALAFLKRGVPLYMPNKSGARGVPLYMPNKSGAVSLHKAAAAGYNEVVK

SEQ ID NO: 129381 - protein, 503 aa, Heterodera glycines
ILINRGTKVDIPTRDNYTALTVAVRSGQASVVETLLGFGADVHITNGQIGETALHVAAGLPCGDIECAQMLLKSGAQPNVQRVQDGRTPLHIAVMLLKSGAQPNVQRVQDGRTPLHIAVNKLCFFLCRLLLAEGADAQLKSKNGETALHLAAKHCHFPVVQLLLDHLSSSKDADSMRSFVNAITEDGQTDGQTCLHYASQIGPEQVHFKDEDAKIVSLLIDNGGDSELQALSNLETAMHMCARTGNESILLAMVNKIGPGAVQIVQNKKSKNGWSPLLEACARGHVGNGWSPLLEACARGHVGVSRILLQHHARIDVFDDAGRTALHLASANGHIELTKLLLKYKAFVTALHLASANGHIELTKLLLKYKAFVNSKAKNGEAPLHLAAQYGHPRVVSMLVQEHGASLEAITLDNQTAITLDNQTALHFSAKYGQLVVSQTLLALGANPNARDDKGQTPLHLAAEDSAPCAINADQSALTPPRSFLLSIRGRNASAETLQRHSL

SEQ ID NO: 129382 - protein, 115 aa, Heterodera glycines
ASLKRGHIAAENDFPDVVKLFLKMKQNNHAVLTAVDHSGFTCAHIAAMKGSLAVVKELMMIDKAMVIQAKTKCLEATTLHCLEATTLHMAAGGGHAKIVKILLENGANPEDENAL

SEQ ID NO: 129383 - protein, 179 aa, Heterodera glycines
KELADRHVLISSQNEKISQLDNAIAKQQQLRHLFLYENGGQNERVVGEAEKTRECMAGEDSGGAEKQTQQQQHNELDRTRHEMDRLLERVRELEREKRQRQQRQQHVGGMTTAETVDTGDVGKMPSEDTASNGIDEQTDALKHRIHELEEALRESVGITSEREKALAEQKKVNQKLSDQ

SEQ ID NO: 129384 - protein, 137 aa, Heterodera glycines
MLSSDSKSSPSTRLFNETFRFCVLAVLFGLLKFPTTPFCCCCNAAASRARCLVNGGERLIIFLKQHEFYWRILKSTTRVLYWRILKSTTRVLYWRILKSTTRVLYWRILKSTTRVLYNSVGCMKSPTRGQKNDNVDI

SEQ ID NO: 129385 - protein, 24 aa, Heterodera glycines
TTWLNASDLPKDGGEWTLWQRRIP

SEQ ID NO: 129386 - protein, 52 aa, Heterodera glycines
MGRSKLLRKAIHLGAQFLASFLMGKCKIIIIWSAFLVIRKLMIHYVDKDENG

SEQ ID NO: 129387 - protein, 125 aa, Heterodera glycines
MKFMKIMQEECARKIQFSLSNGKEIIENGNLLSAVAKTNEIALRIFRRIKACPFLEEFAGLWLLPADIWPKFGQMPTKFVFMVANGCQLIRVDGPPQKCATFDHLAFEKPRAIRQQIIKPLVGIN

SEQ ID NO: 129388 - protein, 221 aa, Heterodera glycines
NFTSTALLTWGCSDEADKNVCEEFFMNASNTALRSTKQRCECQFGDQGKDMANEHVKLPEAEKPGPIPTIPPSALNKRNYGTNSQGKNANGRWMGGPYQNIAQKMKSVLPLSLFFFFYCLAFPCICYGIHCKTGMYDTSGNAAIVISECAADHHFCSAIGCAIGTEQITVLWSCEKQNDTKVLVKRVSFENHTCMAQIGQKDANMSNEEFGFPELVQLVLK

SEQ ID NO: 129389 - protein, 38 aa, Heterodera glycines
LIEPVKSFRMISRLFDSVNNFKSYIDSKLAQTELARSA

SEQ ID NO: 129390 - protein, 102 aa, Heterodera glycines
MSRQLPLIMFVIALQIGFAEGGFFSAVTDFFDNVGQSLEKAWNDIKEPMLDAGALYLAPLSSLLPVTSFGALVALVIEKGVDNPHGTGTEFACGPNTNAIFK

SEQ ID NO: 129391 - protein, 307 aa, Heterodera glycines
MTFQSLGLNPPAFQSLGLKSPAFQTLGLNPPTFNDIPIAGTQPTSISISGTQFSGFPITGTQFLCFPITGTQISGTPISGTQFSGFPITGTQFLCFPITGTQISGTPISGTQFSGFPITGTQFSGIPITGTQFLCFPITGTQFLCFPITGTQISGTLISGTQFSGFPITGTQFFLCIPITGTQFLCFPITGTQISGTPISGTQFSGFPITGTQFLCFPITGTQFSGFPITGTQFLCFPITGTQISGTPISGTQFSGFPITGTQISGTPISGTQFSGFPITGTQISGTPISGINSQAFQSLGLKSAAF

SEQ ID NO: 129392 - protein, 41 aa, Heterodera glycines
MYGLKCIRHYEGVICEQVSAKGFFRLASKVSLAGIFHNFWS

SEQ ID NO: 129393 - protein, 102 aa, Heterodera glycines
MSPNKFALLLLLICFNISAANGFKSPFSELKKFFETEEACQKLCEGSCLDPQKACYSKCGNTKQQCDDECTKCANGPLSKCKGKSADLCFPSGHEKAFKDAQ

SEQ ID NO: 129394 - protein, 44 aa, Heterodera glycines
MGWRVCGPVVVFSMHANQMHAEYECRQIPPLILDAIPFPSSGGE

SEQ ID NO: 129395 - protein, 640 aa, Heterodera glycines
MLPQNVSPSAPFGNATGTTAAAVPSAEALDRNNNNSSSTNINNNGTISAMSQQQQKQQQAPAVGTVPTSARRTTIAATTSTTIANIVLRELDYGRSQLLWKCSIDEIQGMETEIGQQKQQQRRQAEDKQKQQQLVMNNSCATEHDDDEHGDGKQQQQRLGHGVMDEQQQLYLHHKLEQLEHDVPTCRATILTVPPSTMAAAAAEAVPQAMTLMTATHVIVRSARFTTKWRRNTLLARERMARETSSSSLMSSIDGRQLMQEKQEEVNSTDDTPKGKAAKDEAEAAAQVKDALHRMKEGSTESRTASRESDHCDNANGRCSRKCSSVLGSARAVPRRRRPSSLDASIDSSTTCGAASETAHNSEAVPLFGGTAAPFSERPSASSAAGADLVELVCSTDCGGASAVNRHDSIIRFIDAHSPPISPLSPTAVAGGDERTARRRSSIFRDMIMLGTGGGSDRRKSVAKCEQQQQQGPLAAQPLEAVPKKTTPLLADQPTTSASSSVTSMSSYFKSFFRRTSKTPLQEQTQAQNAAQENNAKTNNNGTTTERRSSSSCRMSIVPSNTEQSNVVQLEQHDQDKLEQIPTNTSSKASASIGRRELAPSFSPPMSAMPMANRRWTVREQRVAFRRTKQRQPPANRRRP

SEQ ID NO: 129396 - protein, 85 aa, Heterodera glycines
MVPLLLMFVLLLLLLFLSNASADGTAAAVVPVALPNGADGDTFCGNIRPVGVTKAISTCAMRKPSLKENIGPFGLTNSHQLIYAL

SEQ ID NO: 129397 - protein, 346 aa, Heterodera glycines
TPKAATAAVLKLQNAMYEEKKLIVLCLPNVQQHMIPADVEPLLVLVNVKSGGCQGTELLSAFRRLLNPFQVFDVLKGGPLVGLYVFRNISKYRILAAGGDGTVGWVLQCLDIAKQDAACFSPPCAVLPLDAACFSPPCAVLPLGTGNDLARVLRWGGGYTGEESAADILKEVIEAEEVRLDRWAIVFHEEERSQPSAAGMDEGQNEAQVMSNPEDQTSMIIMNNYFGIGIDADVCLRFHNKRDANPEKFSSRLFNKTQYVKIGLQKAFERNTQYVKIGLQKAFERNCKDLWKRIELEVDGRPVELAQCEGIIVLNLLSWGSGANPWGTAREEGGFQKPTHYDGLLE

SEQ ID NO: 129398 - protein, 52 aa, Heterodera glycines
MRIEERCGRRPRAGSELGSSAQTTGSSSATAHIHNHRRANGTRSRQPQNDTV

SEQ ID NO: 129399 - protein, 71 aa, Heterodera glycines
MHIRNFNVQSLANCFDCLAFLLKLTFQIVPFCAGARMASSSSGQVEHGTGEAQIVRTLVLISDLHFHKGLI

SEQ ID NO: 129400 - protein, 76 aa, Heterodera glycines
MCRVRAIQFFKKMFAKFMLFLFCYIIGKKFSLCEQILSPAIQDYSECGVSNFDPFNERSAEDTEISHAIKRGINYH

SEQ ID NO: 129401 - protein, 54 aa, Heterodera glycines
MSRCGLISCSSSSLLASVWCTAKRMAVKPQFALMPTSEIGAAEVPLAEAKKSQL

SEQ ID NO: 129402 - protein, 116 aa, Heterodera glycines
MQNEAVLLNGSDKGGASFEFDDGSASSDTTDAIDDEFVVPNSTDESDETCDTFSEFNEAHTSSRKQKKGKAKRREKRSKALRTTGKRLIICNGLGTKKQAFDGSTNCIFNTSEGNG

SEQ ID NO: 129403 - protein, 95 aa, Heterodera glycines; identical to SEQ ID NO: 124528

SEQ ID NO: 129404 - protein, 64 aa, Heterodera glycines
LRSGKNKRKINVNCKTYNEDPDSKLLKTINLAVKNEIYGRISFIALFESGPHINIYQVMKNALR

SEQ ID NO: 129405 - protein, 219 aa, Heterodera glycines
MPATNSPHSSNLAEKATDSLLNGLQNTPAVTYEDLTVATDGFSPNKIVGRGGYGVVYRGVWKHTPVAIKRIQGKCGSDERQQRERIRQSLQELKTLAKFRHDNVLSLYGYSLDGPEPCLVYQFMSNGQRAFSASRNPQGIVEFVLKMCTEAKHKDDTNFKNKCYFELADKRTPKTDDERSLLIFNKLLSVGISCTEKDRFARPIFSEIFARLNDEELED

SEQ ID NO: 129406 - protein, 25 aa, Heterodera glycines
MLEIAILDSKKLTKIVSKNPKIVKK

SEQ ID NO: 129407 - protein, 91 aa, Heterodera glycines
LESLSTLSLLFVVAHSVQFLHAFCFNCRPFFAWFCYCRRRLIPWPPKSSGISAVLIRFRFRCVSIVILLRINFLRAQVVRYSPLLLMVAKP

SEQ ID NO: 129408 - protein, 174 aa, Heterodera glycines
MPATTTCIPNDNADTVEERQIDERETQFDLETDMDSEQGRHSKVTYEPMIAPIDSVLEPVFGVPPKKRELGVRKPGPLENISERQFYRYRFAMRENSRGAFHWLWFARRLAEYFVNAVLNRIERNEMEHIKAIQQRKNYRQTLARDYIKAIEQGLQQQGRNAKLGNTCRIHCIL

SEQ ID NO: 129409 - protein, 95 aa, Heterodera glycines; identical to SEQ ID NO: 124528

SEQ ID NO: 129410 - protein, 116 aa, Heterodera glycines
MPSLNSSEISPKNVKKCYEEEKVINFPNLTPGKTTQRRKESKRRSTRRSHQTATTQRSNEKAIEDKQFYRNRALQYLGEVEETEAKKSVLNKALCDWKRKRQTQEGKLWQWDWHNG

SEQ ID NO: 129411 - protein, 32 aa, Heterodera glycines
MCALSRKKLKITSELNCKAIEALLNGVLKFGK

SEQ ID NO: 129412 - protein, 55 aa, Heterodera glycines
MRACSPILKDDSLRPPIQWASPKLAQFVAMDGADSAAHFPWEELAWQLGPRNSLM

SEQ ID NO: 129413 - protein, 55 aa, Heterodera glycines
ISYKDKSNFESLRPPIQWASPKLAQFVAMDGADSAAHFPWEELAWQLGLELRRCS

SEQ ID NO: 129414 - protein, 68 aa, Heterodera glycines
MAWLSLLWALFAGTLSFVFVPLFSTFSLVSVFLALVTNLPIIVFDLLGKRSHRIYLPFLLINVGLRIN

SEQ ID NO: 129415 - protein, 184 aa, Heterodera glycines
LVKISKNDNKYYGSNDLSSSALRRLLEQSKKSRSLQLKGAGIKRVPSGIVEVHSLLRILELSSNKLRELPSTIGTFTMLKQLYIANNRLTNLPDEIGCLKTLELLDVSGNNQLTELPDPLAACNSLTQMNASNNKFSTFPSVVTRLVRLEVIDLSEKSIPELPDEISNTSLPFLPQKKGNFSLR

SEQ ID NO: 129416 - protein, 676 aa, Heterodera glycines
MFPDDDGYESEDDEILLPPPPIPPQLGHPPPNVPAVRVQPMHVGQQRLPLRDLPQFEDHPQNVPAVRVQPMQQPLPLRDLPQIFHPPPNVPAIRVQPMQQPVPMRAVPQFLHPPPNAPEIGVGPIHDGQQPLPLRALPQFAQPPPNVPAVRVQPVQQPIPLRDVPLFVNPPPNVPVIRVQPMPQPLPLRDMPQIHHPPRNVTSIWIKLWLLFLSLWVFLQGIHVRQIQREYAVPQFAHPPPNLPYHPPENVPAIQPRQRPRQLRDVPLFDHPLPNGQKFGLKPIFKGQGVRKNEVCVIREGDHWDGIKSASWFFGVRYFCVGCEVTYDRPERHRMECKERCKKCCRMGFGFPCADVCVKIHCEECNRNFYNNECFEAHKKVACNEYKKCEKCAEVYQTRSKHVCGEKFCKLCKVCHPGRQCFIKKIQVRPQKAYRIVAYDLETTVDGGEHRPNLVCAARTCNICAGEERECEICEGPSKITWSVADGFDPMSEFVVWIMSFQRFETIAFAHYAGRFDSHFVLSELTKKEIATELMMADLKIYQIKAGRVIFRDFWMLSQNKLADLPKTLGLNITEKLYFPHKYNKNENFGRRLPNLPPLEDYCPDNMKEEEAVKLEKWYNENYQTEFELGRQKKYGFLNYIGFRGTAEDILRKRRGNSVAISFEVSTIVFGNNRGF

SEQ ID NO: 129417 - protein, 166 aa, Heterodera glycines
INLARNFERLCALRKLPCGELFIQFGFIQFGFEDELEDAKYFADFLAYLSFGRSGPTATTRVVTYSMPIKIGELFGAILIYVLGSANPLTMKKRTAGGYLMRQHFPRLLQFPVTEMASHGLGQLVRADGMELYRLMNPHHKGDVGYLMIIETTQHPGSYYFNFSIE

SEQ ID NO: 129418 - protein, 21 aa, Heterodera glycines
MDFPSPVAGSMTSPLTSSTRP

SEQ ID NO: 129419 - protein, 226 aa, Heterodera glycines
MLFSFFLFQFYSVVCSIASKRSPEPWGDTLKSIDDNARDFKWPDRHEKGTWAAVAATGEGSRAKAETGVNREEGSGMEEEEDSHIVRAEALSEREGGVAVAAANKGQTQKTSDDDNDYHDGAHQQVVVMARGGEDARAKAEASGGPRSVVETRISDNQRGGERLALGSAIIHRQGRRRGGGGGGRNRKPSERQRRTRARTKTLLPTINFTPAPPQYMELNNRQKGN

SEQ ID NO: 129420 - protein, 42 aa, Heterodera glycines
MRIKYSEFVLVSKIDFSRHLVHEHMYTSSKMQADTRKIGIRT

SEQ ID NO: 129421 - protein, 67 aa, Heterodera glycines
MSHRRSHADNVETMAQLIAGLLPPLALEARISGGNALGNQLVTQLGLSVQAAQNVDMAILGRAKLKI

SEQ ID NO: 129422 - protein, 121 aa, Heterodera glycines
MSNTKAAGQSAAGASEIADQVEQKHNAMKSTYDKVLALLEEKEGGNEERKQRAEELRKRTTELLAKIKRSREEKISLIERADSLDVELNNFHTSIEELSDQIDQVTSEIDRRVEFHATCDA

SEQ ID NO: 129423 - protein, 38 aa, Heterodera glycines
KRIERTRFDEVLVSQKKCKHLKIYKKFKNENSCEIFWK

SEQ ID NO: 129424 - protein, 91 aa, Heterodera glycines
MWDEQQPMTSQGTRRRISHFANSLWTTPAIGGNAVNGNRRTDETSHNQFRTARMDDDSVQTLDDSDVQMVEESDRKAAPPPKAERGPLLLT

SEQ ID NO: 129425 - protein, 34 aa, Heterodera glycines
MFLGVYSLLINMAALEAFRNFSCRINVEEIEKKF

SEQ ID NO: 129426 - protein, 96 aa, Heterodera glycines
LVEDISDQYDDSEQPTIIHHEPATPTTMFDNYGPIEKIVVVGTGLMGSGIAQIAVESGVKVCLVGRSQEKCDQTRLKINTGVQKSIKKRMANETAE

SEQ ID NO: 129427 - protein, 121 aa, Heterodera glycines
MLAKRKQHVGESLDEFAQEIRTLVAKAYPDTSLEMNFEALALGDMEDDVKREHEERLHKFRAGIAKDFFRANMTASIKEKILFMDEPPTFEDAITQAKRVQQMQGALAEDLCKQTQGTKAE

SEQ ID NO: 129428 - protein, 160 aa, Heterodera glycines
KVKEKVEEEEKVEEKQKVEEKQKVEEEQKVEEEQKVEEKVEEEQKVEEKVEEKQKVEEKVEEEQKVEEEGKRKRTRNRKRTRKRKKRGRKRGTANGRGTESGREEEQQKVEEEQKVEEEQKVEEKVEEEQKVKEKVEEEEKVEEKQKVEEKQNVEEKQKV

SEQ ID NO: 129429 - protein, 308 aa, Heterodera glycines
DPNVVNDQQQQQKHILPLPPQQNEQNEVKSTTGLTPAEAVRRSQISALVEPKQPQQQQQEINNGAGDEHGGYQFVTHHFPLFRSISVLSDNWYDWVEGNQTDKAGNQQQNVIVHQSVNSTINADEHGISDEASPVASLSTIDLGRVYTTVGTVMESLLVNFAHLWQYRLFRFAFVLLSIYFCLGFLEQCAVAMTAACVRWAWPPVHFMLGSSRGTLFYLTDCFHFYGSKSFKEDYDDDFFESTCIEVIAPPEHEIIYGPSAFVAIFVAIYALATGRKVQKATALTGELLRNKSVVKIGGLRQKVKAAA

SEQ ID NO: 129430 - protein, 144 aa, Heterodera glycines
MFYSADIFKNAGLQGQWPTVATIAMGTVNVLMTFVSVVLVERLGRRTLHITGLVGVLLSSAFIAISLLNSSVQWVSYLSILFVLLFVISFATGPGSIPWLFVNEIFPSNARGNANSIAVLSNWGSNAIVGYSFPMLNVCLCTVD

SEQ ID NO: 129431 - protein, 96 aa, Heterodera glycines
MFFEATITFAFVSIWDRPPFFIVRDCVPQFRLPFTERTLEEIERVEKGHQIGHGTTKVGKRIAHFQVGSRIGTTKIRIQGTTHEDGNRTREKNDDE

SEQ ID NO: 129432 - protein, 49 aa, Heterodera glycines
MARRAAKNMCKKWSKYKNFFVKGEIGFKWLIVRIIFIINIIWAFFSGTF

SEQ ID NO: 129433 - protein, 99 aa, Heterodera glycines
RRNLFYSRHNPSPTLLINCPNHLLLLPVAVLLQPVVVVVVAVSAASAQFQSVATPSSAWSCGCSSAPRRSAATRAAVRPHSIWPGRPPRPISPSPDAAP

SEQ ID NO: 129434 - protein, 69 aa, Heterodera glycines
MLWLNLIMDTLASLALATEMPTEELLERKPYGRKKSLISRTMIRNIFCHAVYQFTILMVLLFKGFQPLV

SEQ ID NO: 129435 - protein, 67 aa, Heterodera glycines
FEYPKRTLEKIDFFVFGAVPPNRCAQIYGETESFRNSFPIACTLILRWIFAPHNCLSTPHGHLKKSI

SEQ ID NO: 129436 - protein, 163 aa, Heterodera glycines
MSLLPISRCSSLFHAARSLACRRPPPLASCHCLLSVPSTAPFSSHLSSSSPVVLHSLTTPVTSTHWCHRPAFASQSTPSAPVPNSTNNTPAAAGGGGIGLYQRYEQWLQNYPALYKLHRLTVDGSKWCYSDLKTFFWLAYGLRKGRITLNDLNARELFIYIQA

SEQ ID NO: 129437 - protein, 34 aa, Heterodera glycines
MDDLRRNERKLFPRIVDALRQHNPSSAKIQFFSY

SEQ ID NO: 129438 - protein, 50 aa, Heterodera glycines
MKANGQNGKKKRFAVKLMSYGTKFTFKFMMRVLLRGLASQRIGRPKLVRR

SEQ ID NO: 129439 - protein, 236 aa, Heterodera glycines
WLFAVFRLLQLPFCSPFNCPPPQKWGPGPPQNCPSPTDPNNRPPSALERWFTKAMFESALERWFTKAMFEDLFPFANLGWDLFPFANLGWGPDRCFPYSYESFAIAARYFPRFGTESPKENGLSRTENERRDLAAFFAHAIQETGQNDISLYQSIPNQSAADACFYRGGLFNWFEGGPVSAFLDSNLPGFRPTDGAKCLSNGRCSPSFFPCANGTSDDGRFFKSCYFGRGTIQISY

SEQ ID NO: 129440 - protein, 126 aa, Heterodera glycines
NFEECEWQFRYHRWNCSPQELNTFVPIHKKGTREAAFTYAILSAGVTHEIGRRCRLGFLRSCGCSETTKGVNEDWTWSGCGDNIDYGYRFSRDFIDVREKEESNKRSAEWHGRSLMNRWNNEVGRK

SEQ ID NO: 129441 - protein, 110 aa, Heterodera glycines
MDANSSTDVDLRKQHSNGNGNVRQQAENNGTEQQQNNGRNFLQAPTSFHDVVLGVLTQLSRKYLFIDAQKKALFYLAMVIVLSLLSHAINLPSGYLTQVLDFIFKIFVRL

SEQ ID NO: 129442 - protein, 115 aa, Heterodera glycines
MSLSPTLDSNNKNEAKTEEEEAAAKVEVVIHQRHAFQGVFGVSLIKILASISSNFESRTRFRTKSETSYFFSNEKGLMIFYCNIRGFQNVSMCFKSFLGEKTKFEVSTFYLFIYS

SEQ ID NO: 129443 - protein, 118 aa, Heterodera glycines
PGLDPDLKKPGFFLDLDFPGFCPGNQGPGPTWNPGPGYSDNNIENVNRRSLIYLSEKSFSTEHNVNTSRGLIMEHLVKFMGFREEFLRADASSYIQPITANKRPPGPSSPPVFSNEQL

SEQ ID NO: 129444 - protein, 36 aa, Heterodera glycines
MAKMEGEESEKYLTLDNWKLDELNKLDIGRTEHLDI

SEQ ID NO: 129445 - protein, 191 aa, Heterodera glycines
QNLSANYTQFFLTVPNKTQFFTIQSLYLPSFILSKLTIVPFLAYIETAQLDGETNLKIRQAVPLTAQLTAVPLTAQLTDIAQLSALRAHIECEPPNRRVHEFSGTMCAGDDEKPAAIDQFLLRGAKLKNCRWVFGVVVYTGHDSRLLMNSTSAPLKTSRIDVMTNQRSVILFLMLVLVTIVSVRGGGGGGG

SEQ ID NO: 129446 - protein, 233 aa, Heterodera glycines
MYTYQTSEIERKLKHCGVRALTVDAYQAQECDVIIIVTTRSKYSEVGSGKTDNMHFFEDDQRATVALSRARHAVFIIGDLVSISAGQVWKRFIEMAITRTSVVRAEYVLALLGRTLMRSPTCLFDSAKRESVEDESFLESWALKHGLRLDRTNAFAQQSQQPRAPSFQFQNRQFPALQTTGSSDRAGPSGNGGEQRGAPTLAPQYGRGQGRRGPDNQWMHYGGNPKRQKGGRR

SEQ ID NO: 129447 - protein, 75 aa, Heterodera glycines
MAYATEVNRKKWHDNIGNEMDRIGLGWDEQMDKFTTGLGREKVGQCTLCTKYEILNAADTAIFKKFASKKIQLPP

SEQ ID NO: 129448 - protein, 89 aa, Heterodera glycines
MLKPPSQVGTDKRHNERVERLPLRAFKKIGRVGTLPALAHTSAASAAIQSVMSSGEEATTPALTSGGGASSTRTAGGGSAFQRWGGNRR

SEQ ID NO: 129449 - protein, 237 aa, Heterodera glycines
MGSLKVDRLGVLIDLNGDLLSAWSNMKRKGTDAISSLLLARVRARFSSLPDQQQPLWMVAEMLEIAKMRVDTESKRQTLEEPKVTEGNCETKNSPRKKEDGRISSEFQLHEHFSKITVQDGAFGAPISSTRHQKLLQKCNNIASHSQAPTPTPNGMTSFSSKEVPSPAVVPIANAMVKLGKAIETVESSKGIQPTQQQKQSFEGIVMFTHTKGDEMYWLFYDEQTRRFTRMASAKGS

SEQ ID NO: 129450 - protein, 58 aa, Heterodera glycines
AVVRPSRPSGPTKPLKSTADVPTSLYSADPIDCAKTTKGRKAVSRPPPPPAKKTDKGK

SEQ ID NO: 129451 - protein, 21 aa, Heterodera glycines
MRTRPIWQVKQRLLTSQKKGF

SEQ ID NO: 129452 - protein, 244 aa, Heterodera glycines
MSFPAEQNCTLPTETQPIMNKSILYIPIRIPRSFPVFKCWNVTTVACTESFLRVVTLDHPPKKFESETSLDDCQNSLNYRPMNRISEKRWESFKSIRKEYGWYGVNCYNNVQTVIEEGNGGILDGEMLVTSWGDSLKIEQFTIGKDDWVRLPGAVELLMWRIPSGEYWDTHFSMGPVTTETWPGQAIVVHELQYTFPISKDQDRKNQVIGVPREAIKSQNNVLNHYVGEVERGQISSETTQFHQ

SEQ ID NO: 129453 - protein, 162 aa, Heterodera glycines
GPAKFAIKMFHPCANFFEGGNFRGKLPFPKDYPLRPPTMRFASRIVHPNIDRDGDRDGNVCISILHEPGDDRFGYEKASERWLPVHTVETILISVISMLSDPNFDSPANTVETILISVISMLSDPNFDSPANVDAAKTHRENPTEYRRQVARCVRETEEQAN

SEQ ID NO: 129454 - protein, 125 aa, Heterodera glycines
MVFKSLKFRSRRHFTSDVLRNLYVNVKARVKEDIRKTDFISLTIDGWSSHEGKHSLLSVTVHYIGSNMEPTFRVMEAVPIKGSHTGEKMCGLLSQVLNDYGVNAEKVHLIVRDNESAMQKATRIA

SEQ ID NO: 129455 - protein, 137 aa, Heterodera glycines
MPPQSKYIKYFKISHGTAKCLSCSYSYGSKSTTFPKTCLREHLQRHHPDKYEELLKEEEKAKVKPNGQQSIQSLLLASTSTARLCLSPTPAKMPRNESPFSSSQPKIVKSFCNYLDISKFQSRLSTMEFGWRNDKKG

SEQ ID NO: 129456 - protein, 50 aa, Heterodera glycines
MIYLKINFLFTFLFVNLCFVIAMDNDELTKLVKSSNKATKNKQKVNHVIL

SEQ ID NO: 129457 - protein, 191 aa, Heterodera glycines
MKGFISHHPGVPPRELLAINCSDEKGENVCYGAKCVEDKNGQENNATIYVYDCEADRNPCHLPNGIEPWISSETGLKWHCQCMICKGTDKCNENFFPNETIKDLLPPCHGQENRTNRTNFSSWLSDEPAKDENGISVQQATGAKPDAIDQGNDQGSEQKLRGAEHGPEKMQNNVDQGAVPKQNGTDQAKES

SEQ ID NO: 129458 - protein, 167 aa, Heterodera glycines
MRYSTSFFAFIFIIFIQHIQCSSSTPTSNAANPARASSAPVQAPTPSPAVAAQASTAAVPASSAAVPASTAAVPASSAAVPASTAAVPASSAAVPASTSSGTTVQQNSASIKGKEIDEAQSSPECSICLEKLNEGNQSEALPCAHVFHQHCLSKWYLAFSFMSLSMA

SEQ ID NO: 129459 - protein, 68 aa, Heterodera glycines
MAQKKILVLVEACQFENEYLIEYLTKNQIFIIVDASFPKQQSSDDEQNVSNEKQHDEGEKVAKVIAKR

SEQ ID NO: 129460 - protein, 24 aa, Heterodera glycines
RTLSTAVRQRSSKIYSMPQILWAG

SEQ ID NO: 129461 - protein, 164 aa, Heterodera glycines
MTPMPVTFCFINQQNMNVCTTGFPMGCYVTKEGKPKDACVLDGRYRQQDSFYLFNHVDIKIEYSIKHESKGGMNCGMEAAPQPIGAGEKEFKVIYSYSIVWEPTDVKWSSRWDYILDSMPHTNIQWFSIMNSLVIVIFLSGMVGMILLRTLHRDIARYNRLDEE

SEQ ID NO: 129462 - protein, 18 aa, Heterodera glycines
MTHIHKKERAFGITKSDF

SEQ ID NO: 129463 - protein, 116 aa, Heterodera glycines
MSVPSNPLPDQSASIGNLSIGPGAKYAEIVDGSGGSALNLLLLITLAKSISSAGKVSKLSDTVLRMDYEHRNRPVQLTVNWDAVTHDKLDFYHFHWTKPEDEVLDHLEVEAFIFIL

SEQ ID NO: 129464 - protein, 175 aa, Heterodera glycines
MSFKRVNSFQPAVPLAKKWDFRSIGNNFAEEMENYKLMDYQSTTCEKFGFTKNITEFRVNPDVERPDEAMKDAIDNMIKVALKTTEEKMKRKVRMFGVAITGAGLASPVWVPYRAYPQNNADVIMQEINKLGQSGDGDENAFPITMKITCVTMPSGEGPRNVHKFDFGFKEHQRI

SEQ ID NO: 129465 - protein, 122 aa, Heterodera glycines
TFMAQFFSSVLCVTPFLVLAIGVDDAYLMMHAWQRITDQMRRKPHAWQRITDQMRRKPIGNISRCSKLPKVLVETGPAVLISALTNICADAVGSFTGSPEITLLCVGNMAAIAVDFIYQITF

SEQ ID NO: 129466 - protein, 86 aa, Heterodera glycines
MHAFCARAIYHRACQSKAKQQRCCFERIKGIESVNRLLEKYICNLSTILRKSVHRLLEKYICNLSTILRSEVRNDKLHDSNQFFVL

SEQ ID NO: 129467 - protein, 219 aa, Heterodera glycines
SNEYINTSVRCLQMMLRKEKYRRKFVEYDGVKSILLALNGRANFQLQYQLIFCLWSVGFFRTFNSKSWKKFVNLIPISFRNLLEKIDNREMVRESALQMVQCKTLKTLELMDAKKFDDPDLVRDCITFGNFGWEIKKFRWTTLNDKVDYYFIKLINNKQILRILIKILETSSDPLPLSVAAHDIGEYVRHYHRGKTIVEQYPSKIVEQYPSKQTMMKML

SEQ ID NO: 129468 - protein, 176 aa, Heterodera glycines
MELGLQSLEKIAIHGDIKPDNFMYVKKVGENETLKLIDYDGATFIPVGLFENPRRLANKVVPREFYVATPTYAAIEYYEENMMLTTKMDMWALGIIIYELILVQATFNERISMGKITQILLGIGNIYLGMQRNSRGIKLTEESLFENDSWAKNNCASLLTILNVWQKYPKTALIIT

SEQ ID NO: 129469 - protein, 29 aa, Heterodera glycines
MLIKKGSNTKLIRSLLHGDLISPFWLGTR

SEQ ID NO: 129470 - protein, 174 aa, Heterodera glycines
RNIKHIYTISYDFIINLNNLVENFECSTYDHDCIIFFNSKVVFVAFCADWCPFSRKLKPVFEEAAIKWHDNNPNTAAIKWHDNNPNTSVVSVVWAFVDSVKQADVADKYFVNKYPTMKVFINGELIKNEYRVFINGELIKNEYRSTRSVEALTDFSTRSVEALTDFVKKQLEVS

SEQ ID NO: 129471 - protein, 290 aa, Heterodera glycines
MDMHSGELHKKFHETLDEKIAELQKKALEQLDAEFGEAPAESMPSRHAPKAKQVGLADNEDHQPLNRQQSLSPKDEQLQQTQQLMDRISDKLERVQPKHQKVAESIRAIRSQGVRLMGPGSKMSQNVKAKMVALYQTAQKQCESEHSYLEQVLADIQKQISASKYEVKDVDDDDDDGEKLQVVPPTRLIPLPHFRADPRRHAHALFPVGAIVLALYPQTTCFYKGIVESSPTGPNDDYMIAFEDNTFPSGYSPTLPVPQLYVLTHCEVTPQHRKRKKSPLSDLTDEASSD

SEQ ID NO: 129472 - protein, 252 aa, Heterodera glycines
QPDKEIHDLVSSIFGPWNYATRKSKRQLYWMPKLKHTNKYLDRRVVEHKKLEGVEYLDRRVVEHKKLEGVELAQIALKMMCRDSGTQISSFKVSRTNPEHHNWIVSGQSPLQKPEHHNWIVSGQSPLQKRIIANLPDQSTCHVDASRVWVQDHMASFIIYSRNSDVLLFSFLVCFFSQNLHRGYKRLWEGHSDYRTNLHQQSDQTILAMAIFGVNSNDFASSWLNHLQEDNPRLGQLSVLIRLKELRRSLEK

SEQ ID NO: 129473 - protein, 118 aa, Heterodera glycines
MFIRAQSLSESVFPLVRSFASSSSSADGFRNTYNPRQPIIWKENFRKMPRNEKTKEAFLKQIEIFQKSRGKRGVGHVEFIEAALKNIKEYNLHKDLDIYKALLNIFPKGDLLPTNIIQ

SEQ ID NO: 129474 - protein, 52 aa, Heterodera glycines
MYKQRKAIKIANLNAMYFIWLTTRKSVTSFVTNAGLTQSYGVRGDVTSNWER

SEQ ID NO: 129475 - protein, 129 aa, Heterodera glycines
LFEYPKRTLEKIDFFVFGAVPPNRCAQIYGETESFGNSFPIACTLILRWIFAPHNCLSTPNGHLKKIDFFCFRGSPPRTDAPQIYGETESFGNNFPKSLNFNSGVGFLVPLKLVEEPPNGKLEKNQFFF

SEQ ID NO: 129476 - protein, 286 aa, Heterodera glycines
MTQPSNIQLLGLHPPAFQSLGLNPQHFNHSATQSTAFQSPGLMQPAFQSLGLNPPAFQSLGLNPPTFQSTGLNPPAFNQQDSTHHRSNHRDSTHQHSNHWDSIHHRSNRRDSTHQHSNHWDSTHSISIARTQATIVPIAGTQPTSIPITGTQPSSIPIAGTQPTSIQITGTQPTAFQSKGLNPPHSITGTQPTNIPITGTQSTNIPISGTQPTNIPINRTQPSSIQSLGLNPPTFQSTGLNSPAFQSVGLNPPTFQSTGLNPPAFNHWDSTHQHSNQQDSTLQHFN

SEQ ID NO: 129477 - protein, 95 aa, Heterodera glycines; identical to SEQ ID NO: 124528

SEQ ID NO: 129478 - protein, 78 aa, Heterodera glycines
MTCCSDERQADADVGDHFSRCCFEHFVDGETEFDFSKTDRWRFECRYGSHVQQYSFFEASASAENSDQQQQRNEAEDE

SEQ ID NO: 129479 - protein, 121 aa, Heterodera glycines
MVYVNGQKGVAPGTPNVPNGARAEPKTNFGETLLKYYEYYEFVPSVLSWYSHFSTLSVCKDFSVHHKALEYCKETKASDEKLFMKAAEEINELCSLLEEATKRVKAMVKNGKKEHFSWDGI

SEQ ID NO: 129480 - protein, 131 aa, Heterodera glycines
MSGYGSGYGSTGYGQQQYSPYSSSYGSGGYGTSGYGGYGQQQYSPYGSSGYGSSGYGGYGSSGYGQQQYSLPSSYGGWGRIKAIRQTFGHFEQLRLIGLRWLWPTGSLRYIEHLLRNGEKKRDRGKTTQKL

SEQ ID NO: 129481 - protein, 64 aa, Heterodera glycines; identical to SEQ ID NO: 129150

SEQ ID NO: 129482 - protein, 152 aa, Heterodera glycines
DGCQADHVGLVCPPQKTDYGIRVTVESFRYQTTTQIQYTCLVRICPFAPCPQTCPPVDGCPGDDMHSGTRELTLHSGTRELTLEQIRAALIANPQLQRQLAFCRSSRRLAPFPFLALQQQRIVLGGDTIVRRRLVVVNSEEELRYYVKTGEV

SEQ ID NO: 129483 - protein, 91 aa, Heterodera glycines
MNQQQVIKTKRNNDKLVHDGALYVFYKFSNDGLKKFWRCEFHGPSDQCKGMLIYKRTEIDEEQFLLADTGVFQIQGQNGPQRMQQQINTKE

SEQ ID NO: 129484 - protein, 59 aa, Heterodera glycines
MGSFFFGRVKREMLLPVLLLRVVARVRPDSRREKPTRTNPGSFPSRGKPAPNGKLKRIS

SEQ ID NO: 129485 - protein, 23 aa, Heterodera glycines
MLFYPISVSLILFTFFAGSAEAQ

SEQ ID NO: 129486 - protein, 190 aa, Heterodera glycines
MEIQKLEEERNGLRTERERLGEEFKGKLCRAESLFEMELTAAKMLYMRELQALREHEEALKDELAARQEEFHDRVVEMQFQSRQSKDEIIHCREEITQLEKALGQKAEEIQRLSKEVRDNLKRRKFNNYLEMSFKLKKLAIARRKTEETIYQLVQVKSEAEEAARELSAQRERAKRLNGAEEARERLEET

SEQ ID NO: 129487 - protein, 281 aa, Heterodera glycines
SGLRPLVNDPNKKDTKSLARNHIIEVSKSNLITIAGGKWTTYRHMAEEAVDACVKACNLKPKNGCMTPGLMLEGAHDWYPLLYINLVQDYGIEVDVAQHLANTYGDRAFVVARMCKMTGKRWPIVGNRLHPIVGNRLHEEFPYLDAEVSYAIKEYACTAVDVIARRLRLSFLNTYAAHEVLNQVVMIMARELAWSRQETEKQLKVAKQLKVARDFINNEMGQEARMQWVSDVPLNLTKEEMQMAKEREMQMAKERFNQLDKDKKGHITVNDIRRHFRVWCH

SEQ ID NO: 129488 - protein, 60 aa, Heterodera glycines
MSTDNGAAANVQPEQDEKLIAQPEQTAGKTASPPRKRINNEGPEEADTESSQQKKQRMDG

SEQ ID NO: 129489 - protein, 176 aa, Heterodera glycines
MSSWFSYIRSSIIGDELPSTSEADVVDQIGPTEDDILPRTGQSVDTLSSCLASAASQQKLDYGQEDSITPSHGNSSLPAALSQEQQEHIKNVLRRAERSGRHAKVVVDLRHLKRGRHSTAAAQTATITTTPCAPSIGTQQQLERHEQQQLKRNEDEEEQQQEGQFIVQMDSLPEGK

SEQ ID NO: 129490 - protein, 157 aa, Heterodera glycines
MNFYSTAYNILVFSPTLSRSHMISNGRVADALASDGHDVTFIEIEYAVPIGALNATKLANLWQIPGKFFNVNFGGKSLFKVLADSAFEKPSLVDIFFSSKIFQASLNDACEALIRTQSQQFELLKKRNFDVIISEQLNFCGAGIGHLLDIPVNIVLS

SEQ ID NO: 129491 - protein, 75 aa, Heterodera glycines
FLLFHCTKNEIVIDSVPSFSSVCILGGLLRKYGIEKSVQNLCVEWMTKVPPQFLLENLSIVKRAMSTSCAGYSTG

SEQ ID NO: 129492 - protein, 392 aa, Heterodera glycines
MWSGVGPPIVRRPLIRSFRFCKRMKNLARQYVYWPGIDDQIEEIVRSCQTCASEAKAPVKTTLHSWTKSDGPWKRVHMDYAGPFFGKMFLVIVDAYSKWPEIFEMNSTGSAATIGKLRYLCARHGLPETLVTDNGTQFSSKEFKEFTRLNGINHLFSAPYCPMSNGQAERFVDTFKRTCRKLKKEGITEMLDTFLATYRVTPNESLPECKSPAELFLQRKIRSKLDLLKPKKRPIVIRDEAMERKFNRRHGARPRSFDLDDMVYARHRLSQDWRPGHITQKKGVMYDVTFQDGSVGRFHANQLMVRHSDVDEEDSLDILNDAFGLPLAQANQQLGDVVAQPAGGVIEIAPPSPHPDQPQQPNEVNEERAVQQNVQNERPKRNRRPPDRYSRG

SEQ ID NO: 129493 - protein, 217 aa, Heterodera glycines
MSAFALRFASFLSLTALLVVRCSADESSSSEEEQKRPISDAAVPSSSNEMPQVVPAAVARRKRSIFGNFFAGLFHRNNETSTEGRRPSNGTESAEEAEKVKEKEEEKEEEEKEEEKKEKEEEEKEEKKEEEEKEEEKEEEEKEEKKKEKEEEEKEEKKEEEEKEEEKEEDEEKEEEKEKHNATDQSAVGREKRSPFGIFMKYKKNGKQLSIGQHATN

SEQ ID NO: 129494 - protein, 101 aa, Heterodera glycines
MRCRRKVVARRTAQSQRKKRKRQRKRRRRRRRKKRRRRMSRRRRRRRRRRKGGGGKEEEEKEKDNATDQSAVGREKRSPFGIFMKYKKNGKQLSIGQHATN

SEQ ID NO: 129495 - protein, 94 aa, Heterodera glycines
MPKTSHILLICLLFFTTFLVKTEAKIEETIELERNPSAERTEGCCCCGGWGYGGYGGYGGYSGYGGYGGYGGYGPFGVGLVGLTGGLLFGGWGK

SEQ ID NO: 129496 - protein, 188 aa, Heterodera glycines
MPIITPTFPEQNVGANLNGATAKVILNELRIAFQQIRNDQNFNSPLKSKKFNEKYAHFILVVCSGHQINLAKFTPFVGKSIRYELHNFLQNSSLLSKRVDFFHVYPKAFSVNGSSSGEHSNRVISQWLVGIELLPGKIVDSELRSELSQMLGNFDAKVKNAFNYFLFHAVDLFSEYVEKNELKLRRFD

SEQ ID NO: 129497 - protein, 112 aa, Heterodera glycines
MPNIGQLPPGKYNWREFEKLQKEIGNKIEHLIKNDQFDMGMCRYDLKDRAKRRAEMEKKMQMEISNNQILDDLMGFLNTKMLLTMLTKIFLLYPNGSMPFLVEKFFLTYSTW

SEQ ID NO: 129498 - protein, 310 aa, Heterodera glycines
MIEQIHAADQYEREKAEEKRKTKEEELSSKVKDNLKRNLNELKSERKANYESEEEEEEENCNGKMPKFDGKVPNRNEQEMANWETKSEENSEEEDKLDQNELLHLKIGHFSDDNLLSLKYGELFWAVSKESWENDEENDALTVKTLCWTLHLGVYANEISNRIGLFGTLEELKIIGKNEKLEIEKQWEKLKMVELSKIISRCERNKLMAKLHLLLKKIVASMDGFCAENGTNLWAEIRETKSQLHSRKLAKTMAKSETERQLKRKMDKVILALIQTENNGREDGMPKHRAEFEEQLKAVKHFDGQRKLGN

SEQ ID NO: 129499 - protein, 208 aa, Heterodera glycines
MPTVDFLCQASSLSRINGTVGLEPILHWISQQQGFIKYFTMYPSAGGTQISERFFNSRGAPPASYNAMFKHGVVADDVNEFSIEKCEHSLKLKACVTADGTTDWALKSLSAYDEALSNVLHNCLRIPHLTFDYAMILRAEDGTGAIFKVRHKGSNLRDEMEEVPMDSIPFRKIIKKIHKIAIWPMFLGCISISWKGIPKIECLTFEAN

SEQ ID NO: 129500 - protein, 85 aa, Heterodera glycines
MPKDKYRASEDESLNSNNGFSIVNEKTQELLQFGQFWCNRWMLIRNQISWDWAGFVMKIFNDDVSSYYKDRFIFALNDEQYDDPE

SEQ ID NO: 129501 - protein, 74 aa, Heterodera glycines
MVMTKTECNYGAPEYVTKFVMIRCPMCRDENKWAKWEKEAEGWEHRMGQRNRNLIDIYVDEENLDVGEYVELRF

SEQ ID NO: 129502 - protein, 90 aa, Heterodera glycines
MNSNFQKILPPAPVYKNFFRKNEIWGPDFPDIWGPDFWGSRHLGIPTFGDQTFGDPTFGDPDIWGPDIWGPNDIEQKTLKKTADIWQPDI

SEQ ID NO: 129503 - protein, 125 aa, Heterodera glycines
MCPLPLHFLKELNTHLKTNPLNHSNGHFSVDEYNSLQKRITLINLNDPPLSQVMGTLIVTLMSLKKAMESGNFGDSLIKMGNQRLKFALKFVAKRHGIEFDERNNFSLWPKNSQKLYFSKWVILY

SEQ ID NO: 129504 - protein, 55 aa, Heterodera glycines
MPWYWHSDLPRCVSRRMAQQRHPYQQPNLHVPMHYGYNEAYFPGNFVHSRATDFP

SEQ ID NO: 129505 - protein, 84 aa, Heterodera glycines
MRAIFSACDADELKRLLGAEQNGATLLHVAAQNDKADVIKLLIENGAVAPTDDTNSVTIQFTCGDGHLPVGQFLKSSVFIFCKL

SEQ ID NO: 129506 - protein, 95 aa, Heterodera glycines; identical to SEQ ID NO: 124528

SEQ ID NO: 129507 - protein, 63 aa, Heterodera glycines
MNTEEAHLLGIFFDTLTRAIKHGILLERIRLLDGQMLRLINEFCQIDVAYLLTQIDVVQELYE

SEQ ID NO: 129508 - protein, 66 aa, Heterodera glycines
PDEAGFVTNGLFANWTTMDGRHSFQRMFGDQDDGEFINDARIDWVMTQDIVESVMAFTLPTQAINA

SEQ ID NO: 129509 - protein, 48 aa, Heterodera glycines
MIDIKLLSNFSFSRTVLYFPAKFLIFQGLSLIFLSIFLFAADLILMIL

SEQ ID NO: 129510 - protein, 294 aa, Heterodera glycines
MPKWALVLFTLLPSFHCLPLHFLLSPLQLSPSAQRLHLVRVRPSDAGVFTCVAVNAAGVANATFSVIVLEPPQIVDFATEFKVIEGSEQRLECKVLGTPTPKVQWQKGGSELLANRGVHFAFTPPHAHNLHIYSTRKEHGGRYTCKASNKGGEVRQNIQLTVMGQWEKGKSGGEEKGILGKTIMAFWERRLNPIAFLVQNDSDYPFHLLLCSHFASVPPTITEGERFIRVTEGANLTLECPANGVPTPQITWHKTDEEGRSKEEERIKKTNTTEEGPPEGGKMILRELRETDGG

SEQ ID NO: 129511 - protein, 34 aa, Heterodera glycines
MKECHCDVEEDNFCFLCCGSANDRCLPAHEHDIL

SEQ ID NO: 129512 - protein, 70 aa, Heterodera glycines
MSLFRNRSQLETVATKCTAMNTFSAFLRPCGTRTSSRPITTTAEIGVTDFGGKLGFYIAKKFTDFLINIC

SEQ ID NO: 129513 - protein, 31 aa, Heterodera glycines
MGSKNPTQNQSTGYREAIPEGFGLHINLGAS

SEQ ID NO: 129514 - protein, 100 aa, Heterodera glycines
MTVADQHTAERAGTNATRWTSQDHFPTICQQPQQQQQKLRPSESFIRSIQQQQQELKQQQQKNTSNTIPSNSRMHRRQKKRSKWHTLDKCVSLVSILEAN

SEQ ID NO: 129515 - protein, 25 aa, Heterodera glycines
MGTHATNSSRRRRYAHNCFPNFLQF

SEQ ID NO: 129516 - protein, 177 aa, Heterodera glycines
MGFDLLVENNADLSASGDQRIARNGGDVLFEFDQSPIIPPTQQNVDNTTIIQMDPIVHESGYENKIGISPTTTAEQFESVQLEAAEQLSTVPTTSKKAFSLNLPLFSGKNGRTKKGIKTPFSTGAELFGGSNEILSSNDQLESTNLNAQLVIKQMEGDNRPKESVGGGVSDEKNGYK

SEQ ID NO: 129517 - protein, 238 aa, Heterodera glycines
DFPRSVILQFTSYKIMRSEFYPFLPMIRRFFSTKSDVWAFGVLLWEIFTYGMAPYPGVELNNVYVLLERGFRMDPPPECPDCVYRLMLQCWNWSPSDRPRFKDLLLSLFSQQPSESVDSERLRSASSLAFAAASAAQKREERKRTEREGTEMSSKREKDRLRKSMSSPRSEAETGNDPLLKRPEPKPRRSIEGKTKSTSMETRDTPSSSSSRGNRRNSTTRTILSENSDQAKTARIRT

SEQ ID NO: 129518 - protein, 44 aa, Heterodera glycines
EFWAKPGPGLAGDVRSRDRDLDFFRDLDRDQPGIFKNSKKFLKI

SEQ ID NO: 129519 - protein, 399 aa, Heterodera glycines
RSGLDKPNYINMHNVMSFALGGGFIMTFYDAKSRSCKVLDARETAPAASSREMYGTDEWASKYGYRAIATPGELAGYWLAFKEYGSGRVNWTDLIISPAVRLARTGVPISEYLAYVLGVKEKHFRTLPSMKSWINPATNRVYEFGDVIRRPEVYEFGDVIRRPELADTMERLANAQNPVELFYRGQMAETIVAEIQKNGGLLSKDDLANYRPKVYDSPLISGGFRGALRMCGPPPPSSFAVTQAIVAVMTNYTRFGNPTDGVLDDTNYTRFGNPTDGVLDDTEFYHWLIEAQKFAYAQRTKLGDVDFVPEAMELARNMTNMTSTRFHREILKRVPPKAMFSAYYAEEPFQKEDHGTQKEDHGTSHVSVLDAEGNGVSATSTVNRWHVTVRYPSLMPFFI

SEQ ID NO: 129520 - protein, 190 aa, Heterodera glycines
MKINFVIIFFLFVIVVIDGTDEDLFDDLWKNVKLSNSKNINKPIFGEINAIKEERIVKNENDEQKNANKLQMENTKPNLFQKIKKKPLEEQNNHLKLKMPKIEMDKLSEESFEIEFDEKADQNVSSTDHSNSSDDEDYNNMNAETRKEIKILNEFNLMKKELRCNYKTMPIVQFEREIAKKVGHISYQNL

SEQ ID NO: 129521 - protein, 21 aa, Heterodera glycines
MASKASGFRAGVYRTNPCLWE

SEQ ID NO: 129522 - protein, 214 aa, Heterodera glycines
MRLVHGKDPTPDVHYLHEKDDYHFVNAVHKYIVRHPELPWDSPEFNPSANIQQNIAEFREIFESEVFDENYELKTREEKNELIELVKGFRFYFADELGRFTLRIFSDKISHITLTDQLAYVLGYEQQQEIHNEDQAKYAVDLAGGVSHLCIYLNSGIIESMIFGNTFANLLQVIAVEGTSGSVVEKDFQSPLFHKIVAREVDVLDVEIRTLTGR

SEQ ID NO: 129523 - protein, 214 aa, Heterodera glycines
MTEGITKKTGVSCDCQFGEKGKEMGNQQFILPPIAPIVENVTDINALKNRLECKIGVFRENGIGQIHIGFCGADATHCFAASCKIASGVIDTWGCQPSNDYCSKVGKLCHFCKLGKKDEKHSNMNFMIPTFLKKNATRVTKGIVSSTVLAPLPEGTTTTTTTTTVSTTTTSTASKTISTPSANLVTDISDEMSETTVDGKTESRPFHPQSFLFN

SEQ ID NO: 129524 - protein, 131 aa, Heterodera glycines
SIFPLSLFLSLSSPPLFHDELKRLKLLIEEYSDTFSQSQYDLGMFSEAEHHITTTTDEPISSPPRRVPYRYRELKKHIELLASGVMVESDTPWVTPLVIVQKKDGGIRPCLDFRKLNEVTIPDRYPLPISG

SEQ ID NO: 129525 - protein, 40 aa, Heterodera glycines
MKSFIMIPTIMDLDAKEKTKDMPNITESSIDLLLLEFGTS

SEQ ID NO: 129526 - protein, 40 aa, Heterodera glycines
MRFPSTILEKSTVKLFQAQKPKSNNCLIHIHSLRIPIIAD

SEQ ID NO: 129527 - protein, 16 aa, Heterodera glycines
MRREWAEKHYNEKRKK

SEQ ID NO: 129528 - protein, 76 aa, Heterodera glycines
GLLDAFPSFNYFPLAIINSITFILFSPFSFSHCNVSPPILFAFSPSPVISQSVVVMEQTSIIYSDFSLRINPTTNE

SEQ ID NO: 129529 - protein, 40 aa, Heterodera glycines
MEIGFGEQLFLTKNVKISKNFHFVEFSYSSKRSYFAEFIL

SEQ ID NO: 129530 - protein, 114 aa, Heterodera glycines
MASINTSSNDPLYLAYRFAGPSADLIVPAVALNLVALVGIVLNGTVLVVTVKSNSLRGSANFLMALICICELVHQIGHSFFLVVVISGKDFVSLLTADLIMIGNLILNIFLILI

SEQ ID NO: 129531 - protein, 95 aa, Heterodera glycines; identical to SEQ ID NO: 125597

SEQ ID NO: 129532 - protein, 330 aa, Heterodera glycines
CPKLKLIMSATLDSARFQNYLNYCEMLIIRGRTFPVDILYSPTPVISYTHAAVETAYSPTPVISYTHAAVETALQIHLTAKRPGDLLIFVTGQKETEKVCRLIRWKCDDMVSQFETEKVCRLIRWKCDDMVSQFGQLYCFPLYASMPLDKQYCFPLYASMPLDKQQRVFQQCIPNKKCTLINRKCIVARKCIVATNVAETSITIDGIAFVVDTGFCKQKIYNPQIRVDSLLVSLLVTPISQASAMQRAGRAGRTQPGQCYRLYTENAYKTEMQPHTTPEVRINKNENIYMYNNLNKKFFIGGQFGQDKAPTLQRQLNMERFFDLLVGSSS

SEQ ID NO: 129533 - protein, 119 aa, Heterodera glycines
LKLDKMKLESIKQNKSTPFRGVLDVRFEPGQTLTVKGIVGEKARQFSVNLHSRTADFSGSDVPLRVAARVDRAKIGLNSMVNKMWGKEQRKGHSLKPGKPIDLRIRAHDKEFQAVQAHA

SEQ ID NO: 129534 - protein, 233 aa, Heterodera glycines
VPRLQERKSLLQIIIDGKAFKRYAYQSPLQSITHLSIDGDLAIQHIHWGGKVYHWGGKVYPVPYETGLPHGFPIGKCLKMSGTPSLRKGGRFEVNLLRKNGHIALHLNARFDEKAVVRNSLEANEWGNEEREGKMEKAVVRNSLEANEWGNEEREGKMPFERGHCFDLAITNEANHFGIFVNGQHFANFVHRSKPEIFVNGQHFANFVHRSKPEDIFGLLIQGDIEVCQAKAI

SEQ ID NO: 129535 - protein, 182 aa, Heterodera glycines
MTHSFGSDQLITATEHSLTADHQQRSNGQKQFVDYYDPTIEDQYIQHCEIDGQWVILDVLDTAGQEEFSAMREQYMRNGRGFLLVYSVTDEQRGAQIVPASVAGEGHQRISGAVGGQQISEQQGRQLAAELGVPYIETSAKDPPVNVDAAFHELAKKNGPNRMASKAKRRSSAGSNKKCLIQ

SEQ ID NO: 129536 - protein, 225 aa, Heterodera glycines
MSVNKATVGAIALSGSTLLVCLFGIASIYSDIQAIWNELDMEMDQFKMQADDLWKDMLKMGAGTAANRARREAYGGYQASGSQPQPSPGALSSPQGVEVPPAVMPGFAPGVSPSVNSVFSPTAGSNNVFSPFAPTGSNSINNGLPMPFGQSPDGPNGGGTFPGGFITPAGSGPGCKCKSRNTCPAGPAGPPGDIGPSGVPGIPGKDGIPGQAAEDSQNAPLKGCF

SEQ ID NO: 129537 - protein, 146 aa, Heterodera glycines
FQSLGLNPPEFQSLGLNPPAFQSLGLNSAFQSLALNLPTFQSLVLNPTAFQSLALNPPAFQSLGLNSFQSLALNPPTFQSLALNTTAFQSLALNPPAFQSLGLNSAFQSLALNPPAFQSLGLNPQAFQSLQNSISPILRNPITGNE

SEQ ID NO: 129538 - protein, 62 aa, Heterodera glycines
MIKILVLRSLNISMKMNRMPSAASALKATQKRHSKRNHLQAVGWTLKCMPEKCENPLPWCNF

SEQ ID NO: 129539 - protein, 71 aa, Heterodera glycines
MLTTNLTFIFRHKVFWGDKNLKYPTMTIYILPTCMKKLFGDSICCFSLLAAEGVAAHWSTFDCSEKLNSMI

SEQ ID NO: 129540 - protein, 99 aa, Heterodera glycines
MSHINPLNNRPYSSKYFELLETRRRLPVVKYQHQFVQHLQSQKQCLLIVGETGSGKATQIPQWAMDFVHGTAQKVICTQPRRLAAMCVANRVAEEMDVS

SEQ ID NO: 129541 - protein, 91 aa, Heterodera glycines
MFSFVEEGWLFSALSLGTLLGTILIGHLCTLVGFRRTFTAYGILNGLGTVAVPLAVKFLTKPFHFVAIFGARFFQGIFLSMSLVAIGNMMC

SEQ ID NO: 129542 - protein, 44 aa, Heterodera glycines
MPLSGFLCDSSLGWPGRLLFPWHSDAFHIFTFLFVLSGNAITAQ

SEQ ID NO: 129543 - protein, 18 aa, Heterodera glycines
MGIWVRKEKGINCMCSYA

SEQ ID NO: 129544 - protein, 82 aa, Heterodera glycines
MFSNNSFGATLILCWMGNRNRKGRSFIRRKTSQEIEDKGVFLFQSSDFGINYDKNRPKMVKRSDVEEVRGHQFSDDETNPSQ

SEQ ID NO: 129545 - protein, 100 aa, Heterodera glycines
NDKSAYSLCTVAYSEGKDKPIHLFTGLTNGQIVEPRGSREFGWDPCFQPDGFQKTFAEMTKEEKPDGFQKTFAEMTKEEKNQISHRAIALGKLREFLQNE

SEQ ID NO: 129546 - protein, 53 aa, Heterodera glycines
  unsure (1)..(53): unsure at all Xaa locations
KERAIRSITSFDRFMACLFQCQTVAKHCHRKQSEFVEGLLVMXEQSKKSAKRQ

SEQ ID NO: 129547 - protein, 140 aa, Heterodera glycines
MANEFDPNWNDEEISAHMGNLTDREAGSRLMHPRPSERSLFKDDEHFFGILTDYEMQKKEISEKAIHLLHKHILGSREPHAAGVYRSNDLLVLEKKPTAAKEVPAQMKEFVHWANSNENNGDIARFAALVHYKLVNDSFT

SEQ ID NO: 129548 - protein, 86 aa, Heterodera glycines
MENSLRTDVLLPHHPICSFGPCPLATFLGKEKTKIGIEKFVYFLFHTAALHFTSHKNIIIFHAVISYPFFMLEIPTNLIFFFNLHI

SEQ ID NO: 129549 - protein, 319 aa, Heterodera glycines
MNRRWVCNDVWMDIFPSFDRAQLGLKMALLSPRFDALVDKHFDGKTQFTIWKAIEIRKDTDEMPKLFVEGKSEGFPLPDRPLPNKIIFSSYKQLQIQYIDHFVIEFLRSNQQIWDKGTKLKIIVWEKNEDNKPILDDVVREIWPFFATNIRQFGFDGAEFLDNLRRLISPTILSDLDQLNSILPGDLFPDVLADDDFDGPNATSAGQALAKWLHNPRKDGQPKSLHCWEMMASTNFEWLNSFKEVFVRARTSVSYTVYFTFFVSAPIEPFELVNEQTKEKLTLKKESDIGSSHSWLLKPLSPPAAAAEKEASQSSEKGV

SEQ ID NO: 129550 - protein, 106 aa, Heterodera glycines
MSLLRAQRFVVERFDGCSVYHTPLPYEFVVTNFTKIEVVQFAPKLVESFEKLIPGCLYNECLQIHCEVASIKIGVGRVNFEEILTTPVKRRSSETFDQIKKSQKNG

SEQ ID NO: 129551 - protein, 123 aa, Heterodera glycines
MHKGCSKVPSTSDVRSPSVKRKRMISNLEIEEDEEITTSDEEREATANANKEPENDDEDEEEESEDEEETPLPEALAVTRSRRANAGRRMAELMAQQTNEKDDFYGTLYGGFEEVFLFSKTIF

SEQ ID NO: 129552 - protein, 29 aa, Heterodera glycines
MGIWVKLLTKVGAHYPLKINCISVSEVTS

SEQ ID NO: 129553 - protein, 186 aa, Heterodera glycines
MLNPLERQFLDAAEKGNRPVLEACLAKQLPDVRIGNALLVGAKFWFAIQKVTWMALQMKAMAIQCFTFPPPKCAIREGVYELVEVSGGTKGQNQRKTQRIKKVLVNHPSITSKTKANPNTNICTAKLRSGDMLGEGWAKYLDPTETATSEYSSDISPVIMAAHLIQFEILQMLLRKDANIEKPHKH

SEQ ID NO: 129554 - protein, 141 aa, Heterodera glycines
VVTWYNTGSAVSGRSDLDGGQLATYQAIWLTDQPGRLSYVIINYDKLGFDAADFRANSRSGRCRALFNGGNHTGFVDVDPTQLYKNSPKILAQRSGVPHMVRGRYMFRVDDVVRPGGCSNKTGGTCIRIFIMKIMALLSKC

SEQ ID NO: 129555 - protein, 92 aa, Heterodera glycines
MIGRAVRNRPFIFEGIFKFILYPRKMAISFFEKFYTSQKRLRMRRRAVHNRHFISQRIFIFRGYPRKMDISFFDKFYTHTNALEHDREGGAQ

SEQ ID NO: 129556 - protein, 208 aa, Heterodera glycines
MMKGIREAIDQKYIKQAFVMINEDKEDPDVSLYISIAYSLAFLQVATEVFSVGFCYNEQHTMTVLDDKGNRIVSFGYKGEKVFRMQVKHIIKKLSVVTKNLEPLKKGAVPYLKLTYYENTPDDYEPSMFKHCENTYTFNKSNPPTFYKFGDISNKETAISFVLESVYIKGADVATLDDLLFDQAGYKDNDEVNMLDVTAEGFFASEEV

SEQ ID NO: 129557 - protein, 21 aa, Heterodera glycines
MRTRPIWQVKQRLLTSQKKGF

SEQ ID NO: 129558 - protein, 127 aa, Heterodera glycines
MTFQSLGFNPSAFQSLGLNSPAFQSLGLNSPAFQSLALNPPTFQSLGLKSPALQTLGLNPPTFNDIPIAETQPTSISISGTQFSCISITGTQFSCISITGTQPTNIPITGTQISGITNTGTQPTNFQ

SEQ ID NO: 129559 - protein, 64 aa, Heterodera glycines; identical to SEQ ID NO: 129150

SEQ ID NO: 129560 - protein, 48 aa, Heterodera glycines
MLITRFKGYVMIPRLCNLVESEKNNSTQKFGPQMSGLTSPPPAPLYRS

SEQ ID NO: 129561 - protein, 31 aa, Heterodera glycines
MNKRTKMKTKIALIIFGTTICWLSDKLGRIS

SEQ ID NO: 129562 - protein, 83 aa, Heterodera glycines
MEFAPPKFVEPKKPLNKKTAGRIFVTATKAEQIPIELVLLRNFNCPFNGSDHHAPGNVCIWRAARYSSAAPTYFPSMDGLMDG

SEQ ID NO: 129563 - protein, 61 aa, Heterodera glycines
MAARLGIRFGLLMNLLLDTVTVASELLETMAMADMFFPSDHFFCFPDAFVGTLLVHTIIKI

SEQ ID NO: 129564 - protein, 19 aa, Heterodera glycines
MPIYRCYHHHFAGSTSRAT

SEQ ID NO: 129565 - protein, 159 aa, Heterodera glycines
MSLNNWVNDELHKVIGYSDSSTVAYMIALARKSNDCDDFLKRLQDVVPTNNLKTFAEKLLERVPRAGMFFLRNAREYPSSLAAKKVTPITKGPSESELQNLRLKNLSATLKPLAYEVEEPGTSTKEAKSGREKKRTRNTRKRWESSSSSSEDEQPNEVA

SEQ ID NO: 129566 - protein, 52 aa, Heterodera glycines
MSGPQMSGSTKVGSPNVGSPNVGSPSCKSPKVASRNSGGKPGTYKSRTDFIL

SEQ ID NO: 129567 - protein, 29 aa, Heterodera glycines
MAFLEAKNDPMLVFDELMFKWLAFSEADN

SEQ ID NO: 129568 - protein, 39 aa, Heterodera glycines
TTTLGQILVEKGTGVTIDLYTFHRNKELWGDDADEFRPE

SEQ ID NO: 129569 - protein, 89 aa, Heterodera glycines
VSQKLQRTIEKTRQHGGITSLAAKSHGSTAAGTASSISFTPVHGLEIVTPMQKEEASGKASTYFTPSTNFIAPTKPAIKKVKQQMQKME

SEQ ID NO: 129570 - protein, 166 aa, Heterodera glycines
MTFDVITRVAMGQRESRQFHSEDAKWAVAAFLRFQNNWFEYLATLFPWLGAKVIKPFIRQTGKIRHDPFALMDNKIREAVKERRRTRQHHHEQQHQNNGNNNQFESDQKRQVDFIDLFLDAVTDEENIEYKNQFCVFNKAVTKVVGWAKCNKFLSFFLIGLKSEFL

SEQ ID NO: 129571 - protein, 100 aa, Heterodera glycines
MFWLILLQISFLFFCLFLAFYFFWLYRAAYWKRRGIPCPDGKLFSGNLDEMFWEEKLRFFQLAKWTEQYGKVPPPPLLGFYDKLLTYSGSLVCHHTLKRG

SEQ ID NO: 129572 - protein, 41 aa, Heterodera glycines
KQKMGKIIKLIAWLKFNQINISWYHSIALIVLFQNIIFLNF

SEQ ID NO: 129573 - protein, 95 aa, Heterodera glycines
MFEYPKRTLEKIDFFVFGAVPPNRCAQIYGETESFGNSFPIVCTLILRWIFAPHKCLSTPNGHLKKSIFLFSGQSPRTDAPRFMGRPNPSGIASL

SEQ ID NO: 129574 - protein, 26 aa, Heterodera glycines
MQTYGWAERLAPIKKNANKAIRDALL

SEQ ID NO: 129575 - protein, 110 aa, Heterodera glycines
MFKLSFVLLFCTICCNATNGTTANEEQKEETTEQLQVTTPQPSTAPTFVLDEENVQTLVEDAIDYSHKVFLITRLPTAKDKSNMSVFAPFTLFPSPYPREMYKQAIDVAK

SEQ ID NO: 129576 - protein, 356 aa, Heterodera glycines
MREMIVQNKDKICEAIYKDLRRNKETNMKMEVDGPLQAIDYCLSELDEWMKPQKLDDHQLGKPLVIFEPKGVALVITAWNYPAALAFQPAIEAIAAGKKTSKFWNLTFSISGNTVVIKPSEVSPNTSKLLKEMFDATFDKKFIAVVEGAAPETQALLDQRFDHIFYTGSSSIAKLIMQAAAKNLTPVTLELGGKCPVVVENDADLEKAALRIAEGKWLNSGQTCLAPDYVMTTAEMKPKLVNALQKSIQTLYGENPKKSEQYSRMVNQRHFDRVKALLDKTNGKVLYKNGEPDRDDVFIPPVLVDTDLKDALMQEEVFGPVLPILTVKGLDEAMDVINDGEKANASRPNIKINLTL

SEQ ID NO: 129577 - protein, 228 aa, Heterodera glycines
TGTQPTNISMSFQSLGLNPPAFQSLRLNSQAFQSLGLNPPTFQSLGLKSPAFQTLGLNPPTFNGIPISGTQPTSISISGTQPTSISISTLGLNPPAFQSLGLNSQAFQSLELKSLAFQTLGLKSPAFQTLELNPPTFNDIPITENQATSIPILGLNPPAFQSLGLNSPAFQTMKSPAFQTLGLNPPAFQSLGLNSQAFQSLELKSLAFQTLGLKSPAFQTLGLKSAAF

SEQ ID NO: 129578 - protein, 179 aa, Heterodera glycines
EEDDVEKGRTKNPFDQRKEEDAELDQVTISTTAMSAGTQNATGQGHVHKVIMVGSGGFVENYEPTKADAHRKQVVLDGEYCAVDILDTAGQEDYSAIRDNYYRSGEGFICVFSITDLDSFDQLVEFREQILRVKNADPNVCILLVGNKSDLDAERKVPLEQAQQRDQFHQRWKGALFCI

SEQ ID NO: 129579 - protein, 404 aa, Heterodera glycines
MNSDNSSAINSKSFDQISEIGSMATDGLLQDDGVPDYAKIIIKQQQALIATLMNMQQQQQESRYASTISLFQQHQPHFLSNNDSSFPPPGIPTHPSPPPGIRPPVSPAPVSAPPPPPPGFRAPPGFNVSVSSRKFELDSTKSDTGGSHKFDIREELKKAFALDDTNENDSSSAEQQNLSPRSQNIREAQNARLPMSSSFSSIENLQNFTGLSQQDSSSPVSALSRQPIAAAVPSPQSASSSVCALALNYVLVDQMVLNYERVYEQKEKMASETLTMVDRQSSPERSIYQRFANLGAVLYILQRLHRLHPDGFTVAQYVQFENVRNIGSNLFRLLRRCSSNNAIRVQHLLEISVKRFVVSLHHSKCHFSPNWCPSAPPCPTPTLWSTCAIASRPFSNCVVRLKTI

SEQ ID NO: 129580 - protein, 118 aa, Heterodera glycines
MSARIQHEAFFEHFGIVLDNAEGVYFSGQEIAGKVVIECREPRRISELLLEVKGRARTHWTKSRKMCSENETYFCEQFNTEYTRKLPKTEAENDAGGGTPREGGRTVAERRRESIKMM

SEQ ID NO: 129581 - protein, 33 aa, Heterodera glycines
CLSLFLRNFIHIQMLSSMIGRAVRNLPFIFEGI

SEQ ID NO: 129582 - protein, 92 aa, Heterodera glycines; identical to SEQ ID NO: 125147

SEQ ID NO: 129583 - protein, 121 aa, Heterodera glycines
MHNHTSQTPARGQPMMVNRTRIMDSGRIEQLSSVKEWKEFAKLGKPVPLNQIRFTTPPCPIPPFLAVSSNSPNGATNTLPGVSRTANNFPNLVCVRVPLAPTPLPQYLVTLPTHFPMHHNH

SEQ ID NO: 129584 - protein, 133 aa, Heterodera glycines
MWRRIVLLCTVPGADEKAEIVMEIELLNGNSAMLSHERAMALEQRGKVKEWTGAIRIIAGGAEPYSRRIETKYRIHSDFGIWKKIVEILTDETSQKENIEENDSENSVGKFRVVLIYLEQWARRAKKSEKQRT

SEQ ID NO: 129585 - protein, 209 aa, Heterodera glycines
MDQQHAHAHQQHPTDNSQPKQQFQPQQLDLHLGQMVDPSFLLQDFQLAQSVTVGVNGQVGMVPFLGFDLQQQLNSLATAPATDHQQMNAVSVDIGPNATRFLPSVTKVQQEKNMSAEFVNDRQHIGYDLFCTTVNRGTAVVELEEFEVRNGASLPTYGQHHFTSADQFGQLGIDQHRFVHLSAGQILEGKQIKAEEQQQPPGTTVAMSY

SEQ ID NO: 129586 - protein, 266 aa, Heterodera glycines
MKFAKKMLMIPEAEYLALRSAMNSGDYLQNEKASLDAKISQNLQDPDISEDLKAKRHDWLYKERRTVKGILENRPQKVVIENHVPGPNVAPYLGLNTQSKPQETDEHRKIIIPRKRLEEQTPDPESDNDTINELTPEPQTTSTLKPIPIKTIIHPTLLNGLFRYVKENKDLFKITAAGKVQSNMNLPIENSNYRDVLLYLAGKKDETPRGAKFLKDRLLKDPTVKDMVDKSKVMWGRGRKKAIKSIKTPGIVREKKPFKPLIWARL

SEQ ID NO: 129587 - protein, 88 aa, Heterodera glycines
GLCHDQQQRLERCVMQAHWSGLFPDRTIPEFDRAGYKRFNRHWDDDLAMFRLKYKLHPGSWFYIKRYNPRIREYRPFKADEIPDIERE

SEQ ID NO: 129588 - protein, 102 aa, Heterodera glycines
LSCSDILAFSFLWLLSSILPKTGLCHDQQQRLERCVMQAHWSGLFPDRTIPEFDRAGYKRFNRHWDDDLAMFRLKYKLHPGSWFYIKRYNPRIREYRPFKAD

SEQ ID NO: 129589 - protein, 45 aa, Heterodera glycines
MNFVYDNGDGWHFVFTFGWKSPKMCRTWVEKGPDFKISPNQCSKY

SEQ ID NO: 129590 - protein, 115 aa, Heterodera glycines
MRQQTGRENWGGFYTPGGTETTAAVNARRGQKRRVFKLKGNVEMNEADRTANEELDNVINISANANANNGINGDEAAAAVSDGDANANNETNCQGAAAGMSDGGANANNGTNAET

SEQ ID NO: 129591 - protein, 258 aa, Heterodera glycines
LTSYGPGTQMSLSGQKFFLFPGKNRKFSEKNTSRSSKNYFDVAQLNQLNPMGMPTHLLRLKTGSIVVLLVNLNTSKGLCNGTRLLVKKLTDNLIECETIGGGFSAKIVGIPRNRHTYKDKRPDGVSFERFQFPVRLAFAMTVVKAQGQTAFRLGIDFTEEPFAHGQLYTALSRATSRDNIRIFAPNKPLDDNGNPLIRNIIASGIISCLFCQITAINKSFIPIISCLFCQITAINKSFIPNPGQTHPLLFKGGWLDGA

SEQ ID NO: 129592 - protein, 1103 aa, Heterodera glycines
MIAKEFLSNENVYNSLLAFASVSVGYPFMQRTQNIAYGGDRVNETTIKKLDFIIRKYNPLAQELVNFHKQYQNTLKEKGPEAVLNFRLTLVEARDAPASVRDVSIHSRQANLPDEGNSLFAVWAESEQPPFLKGIWITNDEGKLKKFPPHHPLTDSLCYPLMFPHGDNGFHLKIPYNPLNKPEKNEAMEIDVESDENTGDSDADASDDDNESVASSVDSVDKRGPRQFLSIRSYIRYRMALRKHKNIHNIWSSGGGLSQKFTLDYAARIDTNVANYLRRPELNLRSTLPENALRWLSRNAGLSSTEDLGSIVMFRRSEPGTRAYFQHKFYDATTIMSRFKKPGNASFFLTFTTNPRWREISRNFLHKGQKTVDRPDLICRIYEDKLRHLHYLIDKKNILGKMIGQECREFQKKYGGPHAHRVYHTSLLAIPENVDNIIWAHIPEEPAKNDKSDWANFIRKLRELLPKFQFHDCGPHCLNKKGKCKKGFPKPFSKFTVLHDDRPAIYFRPSPEEGGQTLTVKRGKAQVIYDNSRISSYNPYILVHFETHHNLEYAYGQSTNLKYLYKYPFKGPSFSYVKTNEENGKISIDEPAFYARMLYRSSPEAYSRIMSYKYAKLSHTVIALSLHLPGQQKVYYKSGQEEAIGQQLQAGILPETPLTAYWKMCETNPDVKKILFERMPEQYSFNRSGKFWKKRVISTNPRPKTRERKPIIGRIYPVSPRNPELFALYLLTKHFPGNPQQLKIVNPPHVCSTFLEAARLRGLIDDSDVWIRTMTEGSASLGPAQMRQLLANILIFGATENCLIDGALLWDKFLHHMCDLRCTDAERPARIDRALVLLEKLLVRLGKQCKDYGLPTPTISIMNNPQLGLDEFFFPQHANDDDANDIDTSSYERGKLNIEQQKFFDLVKTAFIDSRCSRLFYLYGDGGTGKTYLLNYILYHLRRIGAKIIPTASTGMAATRFYAGGTTVHSAFKFGINVEPGKLPSIPFDSFFGRRITECDIIIIDEMTMLERTVLENIDALCRLMCSQKRHLPFGGKCVIISGDWKQSLPVVIDSYGSPAQVSACIQSSPLYSLFTKFKLTQSMRVNPNEIEFLKWLDDVGRG

SEQ ID NO: 129593 - protein, 263 aa, Heterodera glycines
HYSPSPHLQNGKSTFSDRKCLSDSSDVIHHHPVFVKDTSRYWYKPTISREEAIAMLKDKPPGIAMLKDKPPGTFIVRDSNSFPGAFGLALKVAQPPAGVPSSDGNELVRHFLIGNELVRHFLIEPSPKGVRLKGCSNEPVFGTLAALVYQHSITPLALPCRLILPEFDPAATPEHLNSNHSLLHNITPYNFTYFYSINTKSLTTPPFHNFTYFYSINTKSLTTPPFHLSTPHFFQLLQTHLNSLSHFKLSSHSITFTDNLKIL

SEQ ID NO: 129594 - protein, 18 aa, Heterodera glycines
YREAIPEGFGLPINLGAS

SEQ ID NO: 129595 - protein, 102 aa, Heterodera glycines
MLNRANDQFLLCFILKIKDEEEYQRNKMRPHEIDQTRPVAEVPRTKKYLENDRAIKNLIEQFDQLGPDQRDDQRWITHLHALSFRLTTKGIQMHLSAGHLLG

SEQ ID NO: 129596 - protein, 167 aa, Heterodera glycines
MAKILEEEAEGEEREREKFGEFLKKRKRFLGELLDTDGIRKIKELLNYEVIFGISKKNYRKFAHFLFQNEYFSASENLKSDSSTSEEEEEKEEEEEGEKGKEKKEEKEVGKGVGKEEEEGGGEKEKRKERGKGGGGGSSTESDQTFEEINGIFNEEKKNNVKEKRQK

SEQ ID NO: 129597 - protein, 234 aa, Heterodera glycines
KVEEEQKVEEKVEEEQKAEEKVDEEQKVEEKDKEEVEVEEKVEEEQKAEEKKRNRKWKRKWKKQKVEEKVEEEQKVEEEQKVEEEQKAEEKVDEEQKVEEKVEEEQKVEEEQKVEEEQKAEEKVDEEQKKVSSATSIDYSDRNPIEKPTKTTEDKSLRSQQQSNDDSDLTEQQQQQQLSPNCPLRRSTRVSVLNAKKQTQQNERTESERSADSATKDNDDELEMVGNRRLQQNH

SEQ ID NO: 129598 - protein, 59 aa, Heterodera glycines
MLATPLFLFLITQLLLIGAVVGNDQPIATTLIEKLRSFLKNMLDTVTEIDEANSRQLIV

SEQ ID NO: 129599 - protein, 95 aa, Heterodera glycines
MDAVKRELAEAKQIRKNRQEYDALAKLIKDELEEAYAKQKMLEQRLIEKRKNMYTLAVLLDNLEEMNKESEDVPMSEGDDASPAGAVPSSSAGSL

SEQ ID NO: 129600 - protein, 638 aa, Heterodera glycines
MGEKREKKREGKDKEKKRKKEREERSTQKHIDSALHIEEEDEEEEQNEEDVEKEELSISDSVVMKSIYAVENHEADGMVSGGDAVPLPSAVADSPFLEVDLNRTLTPQSQWTNESTGTMHSPDDDESSQNGQSSSSQSAPISSALDASLTNLYKEKENDECDDDRSMPRRASERTLDRFEDVRTIASSDIEVIRQMDDWSVTSSYPNSSHQQSNTQKIGQIRSIGELQQSQTPPELTTKLDTSEQSQREMDEKIAILMAKLAHRDQKIEENAAEAKLQSQFAEKEKQLTDLLDEGRKLSEYSGRQAKEVRKLKQQLEQLDIVTAARDSAVEELQEAHQQLQEQENAMEQLRDELENCEHKARKLQAQLDDKMTNATNLEGKVCEQLTKVEALTAEKRRMEKTLQTTSREREELAQENKKLAAKLMNRKAQDRIIGERERGLEEELRQERLKSESANARIRELEQRIECIQDMNRDIAVEYQTVGEGANSPLLITISSLEEKLLGLERENDILTRSTRQMSAELGAMKRRHEAEMGTIERSLEEEKQQNAQKTEELAKAFSERANIQTRIEKLEDELSQSKREHSERVNRMEKRMEQLETDIQAKRNELTELQRKNCEFQQKIIASTVERRNNANSLLI

SEQ ID NO: 129601 - protein, 47 aa, Heterodera glycines
MYFLISFCSAHGHSDNHCVLSDDSVRVFGRRSRHAKCVYFGLILVPN

SEQ ID NO: 129602 - protein, 109 aa, Heterodera glycines
WCIFGFAVKQQTKLDVDIHLEKGTYAYANYGYLCINGKGKGTNAQYSYGVGDTCFDLKSDDAKSADAVARMAFRIPSPFAVAALQKSPKHQQVDSSTELNWSRQTNARC

SEQ ID NO: 129603 - protein, 68 aa, Heterodera glycines
DLKSDDAKSADAVARMAFRIPSPFAVAALQKSPKHQQVDSSTELNWSRQTNARCVCLHSVLIFNFQTE

SEQ ID NO: 129604 - protein, 194 aa, Heterodera glycines
MSQSPSSMSSSSSSAESSHSAGNKGGQPNVCALVAKTGFQKTGHVESHGDHVGKMLGNVSDDSEEGEEEEAAQQQHAEVAVAAMDDASSDSPATSSDEEMPMEQRQQKQRDAEGTEGNTEEAEEDDEGQIGRRKAQLQRNEQDEEEDDMDEMFARDDDVEMHGIEGEEEEGAQSTSQRDAEGEEERQMDTTLGE

SEQ ID NO: 129605 - protein, 237 aa, Heterodera glycines
FISADCWLCVFELLAPSQLGLGIALISHRFDVYIGEHFKTRKWALKFIQILLKIGENGTKEMEITNLDGETLPIPKIQLPRKVIGFKRIIINYIDHNVISFLDRLSPLFASFPINLAFGTNKMGILDLVVRNTWPMLGKNIHGIESYPSFLHCLRHFVPSFLNECPPLRFVFFCFGELFPEFPADDNAMASERQAVAKWLFTPLQNDVPKVFKFEFVRNEWENWPSKIDAFKAVISI

SEQ ID NO: 129606 - protein, 345 aa, Heterodera glycines
MKDESSVFINLLFDHNFCFLLPIDAESSPLSTTTAVDENLFHQLVHHLFQFILFVVNGQKSNGICGFIFKCSCLNCLFFPYPNHSILCIIMCRPLLFLLVSLSALSFKFALPPELGMPNGPRTGAASSVKVVELSHPATARHGTGTGSGNPYMDYGIEENFSLIGAIFVGQLIFCFLASSDKEFIMKIGTNVNRLKMALQLDWKKAAKTLIQQNGSLSAAEFEEALPLGSFMKDFDGMALRIVALELTKGIGQMHGTKMCKTMPVPKASNIDHLGTNCTQIVFADRMPQFWLNVSVSPYFIACEQFKAPFDPSTMFNQSRTSSDLFDACQKVPTTPNCEKLAHYL

SEQ ID NO: 129607 - protein, 109 aa, Heterodera glycines
MDKLFCANFAVKTWEKESGAPIECQFDVKSVNAKIDETEQIGTKWVFCMYASANEKLQGKPNIFEQPNKVEEILKPKYFIFNLEIKPTYGNDFVFYMPCVLNSIIINKF

SEQ ID NO: 129608 - protein, 150 aa, Heterodera glycines
MKTCVVCTCIVSIVYSIYMNWFPERRPFHCLIQLGYFEPMTSITKYITATLPDAGLYDAVQIAELASICTPFFLYGITVIKMVHDHKKNPSTSINFGHPLATSRHNFSCPTAHSDAVAQQGFALISAQRFDKNIRHNFVTLKSNFDYNHM

SEQ ID NO: 129609 - protein, 329 aa, Heterodera glycines
MVCRVSSSVGRLFICGDCWLLVFDFLAPSQLGLGIALINRRFNCIVDEHFKTRKWKLGEIRICYKIGENGTKQMQIVNSDGNPLPIPQNPLPNKVIGFRHINIFYIDQNVIAFLRRFHRFFAVCSTVLYIRTENVRILEFVLLNILPMFRHSMHLMFLNSIAFRRLRQLAPSLLNDCPFLCAVIFYGDILPEFPPDESANASDGQAVAKWLFTPRPDGLPKWLRCFENSPDQWSSTMEQFKAAFSNASSPVTFCIYFPMSSLADFIVPFDRINEVTGEQLALEIYAHDCCLFRCPIAWDRRKWDNVWEEMYVRQNPIYIRIRDGGFDDG

SEQ ID NO: 129610 - protein, 226 aa, Heterodera glycines
MNELIIEEKGKVIKGSKLAINLGCFVREIWPIFAPNIRNLVFPNADDLDNLRRHISPTILTDLDQLNSINSYFLVPDGIGDDGPNATAGQALTKWVHTPSKNGQPKRLCCFNANGPQNLEWINNFKEAFRRATTSVSYHIQFYFWVEPMPIEQFELMNEVTNEKLTLKQEIDEFDVNVYNCELRYDNNLGANLNNIRFDLWGGNSCCIGPLSLPAKEEEADESNEK

SEQ ID NO: 129611 - protein, 57 aa, Heterodera glycines
MISIDASIVVPDWIADDGPNATARQALSKWLHTRAGRNYGLRITDYGNYGLFGVTDY

SEQ ID NO: 129612 - protein, 111 aa, Heterodera glycines
MRISFYKTTTPIEPFELLNERTNEKLTMMKKDFGGSDWLFKRCPIIEETAAVQKDNNLDHLNGVHFSLYNDCFGPLSPPADQNDKESFSTPGPSDQQKKERSFKEMTDHLS

SEQ ID NO: 129613 - protein, 130 aa, Heterodera glycines
MPDLPLPPNQCLGYLDVCCRLLLGVFSISQSGRFSIRVVDSFDPNDAACVEDCQECFTDSVWQDLAYIQSNFGRLSHAITKLETQGLTIQESLEIFAGVQNEMDNAIGEKAERIRERFAFIVSNNAGLET

SEQ ID NO: 129614 - protein, 373 aa, Heterodera glycines
MGPHLVPQSTPTLSHAMNGPPSSSAGLAGRQWKQCRRWWPHRWALGGGAAAHHLGVPSAMVVVSSTAASSAGQPPPTYNNTNAAMGGGVGQHRMGPHGQSSFVQPQQQQNTGGGQQQHQPMLQGPPMDSHHHQQQQGPPLPMTIAQRQSAAVQQQQQQSSANPNAAGGAMMVAQSPLGAMMNSQQQSMNNANSGGPPQMRGGGIAQQQQMLGAGGGAGQPQDPEKRKLIQQQLVLLLHAHKCQQIERSELRQNRAPCTLPYCSVMKGVLEHMVGCSAGRQCQYAHCASSRQIIAHWKNCNKDDCPQPSSSASACSGPSSVGMNNTSTGPSAAVGPTSVGSVGGGPMSSFGSPPSTSSAVNNLLDGYTPNTLVF

SEQ ID NO: 129615 - protein, 120 aa, Heterodera glycines
MEKLVLGDDQKSADSAASAASRNDSVKKCITSLVHACICRDANCRRGTCHKMKKQQSPWAQPPQSPRQQQIGACGLQQQQQQTVWCAADANVGHDDVTKCNATAAAATERSDGRGSGVPS

SEQ ID NO: 129616 - protein, 126 aa, Heterodera glycines
MPVFWSITLANCVHWQGPAGLHRVPSSGALQQQMMSPNSQQQQHITPPPYVRSAAAAQQSPLHHQQQQPFVGGGVGAVQPPGQQQQHQERFGTAGAQPQQVVQQHHTKQQQQRLFQQQQQIRGKQK

SEQ ID NO: 129617 - protein, 18 aa, Heterodera glycines
YREAIPEGFGLPINLGAS

SEQ ID NO: 129618 - protein, 54 aa, Heterodera glycines
MPHWTRAIFSIQQPSRTQRAADFNFSSKKPVFGSVKHREKPNLHPPRPKEYIFG

SEQ ID NO: 129619 - protein, 106 aa, Heterodera glycines
VAQRYFSSSRKQTEQYLERQANDQYSRRAREHSYRARSAFKLMQINDKMHFIRPGTNNNCESANARLKHSLQDSLRLTRVQVHFCYSFLLKLALCPAPGSWCQVLS

SEQ ID NO: 129620 - protein, 243 aa, Heterodera glycines
MFNKSSNYDKVLQHLPPREDYCPDQMKKADLQKFDNWYNYNRSQPFDLKEKLPEYCCNDVRILTHALVELRREFKQLTQRDGKHGGIDILWQAMTIASACVKNFALNHLKPNSLAIVPEKGYTPQQNQSALAIKFFDWYSHINNVNIQTAHSRYGEYVFKREGEVYQVDGYIKGTNGRRDKIIEVNGCVWHGCEICFGNMDEESRMPNGKTLREIREREKRKHKTLRRYVDLELYGSTKSMRS

SEQ ID NO: 129621 - protein, 519 aa, Heterodera glycines
MNDQQPIPSFMTNFPVSGQQKAALQFAFYNTLLFSLLGILGICLASIFAVYRLLYLFLMPMLWALLVGTVLFPLKRMISEGLKGWLDRLDGENRPLLVGLAFLPVQITKGWLDRLDGENRPLLVGLAFLPVQITLQFSFAVYETALSFTGLCLGLGYFALFTGLCLGLGYFALKVLCHYGAFSSLLLLIGRIYGFADSLIEISTRNWVFLLIFCYSLGLVFLLIFCYSLGLGGWIYLHEIGQINKKFARVLSLPIWFFLLAYLSDFFGFFRVFIFILCSLPIWFFLLAYLSDFFGFFRVFIFILCCSLLVLISAGLIGTNAENEDEEKNDEADTETEQSQRENGNGTNVGTALGGEARLDQVKRWISLNWFDLNLLSPKKAFSSDVHLRVIGGLCALLWVVNHDLLLFFFVIIPFAIAFAVHLGAQIGLFAFILAQIGLFAFILQHLTQCKEQIVHKTIKFVHVIVAGPLRKFVHLLFTSDRMFVIGFRDRVDLLSSLIVMAILAVGCLFALLFTLFQL

SEQ ID NO: 129622 - protein, 358 aa, Heterodera glycines
MKKVAQQQQQQTNKRAQNAAKVLKVITPEQQIECHPKTNAAGIPTQLICKVNGQQVTGDEQCQDSSSCVQFNNKQQDDVTIQTEAIAVRFNGRKAWLKVSQAYKNTQCGLCGHYDDSDDQGEELRMANGQRASDLAEFHRSYALEDAEECPQQVMNNFYSEQQQQNSEQDTFYGQFNQFEDEDEADDEQQQQSEKDEWQNEQFNGQFEEQNDGQVTDGGNPFEGIFNDQQQQQKCCCCCDDDEDEEGTNEQSQCRQNCQNGGECPEKCNKNDQKQCRKSSPPQPQQQQNCKGSDDEQCKGICNDGDEACAEQQQQQWKAVWPILRTKTPRAEPRGVLFHPPGQTLPAGCLPVQSDERL

SEQ ID NO: 129623 - protein, 77 aa, Heterodera glycines
MPIIRPFRRQSNGMAQVNSPRDMCRVEVTWSLCADGRRTQFIVQTFRGFGITALFEQNGKAGGKFDIKKVKYLININ

SEQ ID NO: 129624 - protein, 119 aa, Heterodera glycines
MVTKVFLLFPGETSVAFLLEKFFLIYSFWVWPMPLQLKEINYAKEEAFLNWSPEREWFERKQSEVGHAQIWMEMPIISPVVPYTNMANKIQPSVAKNILNEFLNGKLNKLMERKKNPIN

SEQ ID NO: 129625 - protein, 178 aa, Heterodera glycines
MGQVPPKLNFNGKLIQIILTKFGKKIGTLLKESFVDVYTNEKDEKIGREKHEKFRMELEDELFAIGDDDDKAARIMEKLEKMVSYEERTTAQSDSMKEEVKKAEMKRKTIWQLMENLNVLWEHSLPLALLEHLLSPNELYILHQTDDENVLNGSTLRRFRTFYAFVELWAKGGDKTEE

SEQ ID NO: 129626 - protein, 176 aa, Heterodera glycines
MAGDRDWPHPQNAIKNVMPMPFHSVTLPPVNGILPSDAMRLNAVEVLEDVDFRYAKELCDAHSDWTLAYERKRTRVWTRRVDDASGGGNGGKQSTLQMIKTRSEFADVPAALCYDMLQDTDYRLKVSPINRFFIYSSTKQFDAVIPYRTITVGQIHAEDGACRLFEPEQRHLLLRP

SEQ ID NO: 129627 - protein, 50 aa, Heterodera glycines
  unsure (1)..(50): unsure at all Xaa locations
QRRIKVQTXREAIPEGFGLPINLGASVQGDCPENPKKNFLDKNYLNELTR

SEQ ID NO: 129628 - protein, 54 aa, Heterodera glycines
MKDGQNPNAFPLSINCICLKLNKQLMKSITELPNSSINAKRGKHRKSRRIKSNN

SEQ ID NO: 129629 - protein, 129 aa, Heterodera glycines
IINAVRSISTPIITVALADERDEKLARRVKARIEKTTLGDISDYVEQVFLPDDLFVLIKLNTRRIRAMQLEVTMDTIIDAICAAKLPVPRILCDQVRSVGKSMLLVRPVESSKCSMTMYMHYLKYHLPS

SEQ ID NO: 129630 - protein, 1526 aa, Heterodera glycines
MTRRTVLQQLASVFDPLGLVCPALHDAKMFFQSLWETKLDWDDPLPTDKVQEWNTIATTWNQQKVRVPRRVTPLEVASHQLHAFVDASKDAYGACIFIRAQHGVAITAHLIFAKSRVKPKGSNLTIPRMELMGMLIGIRMLQFAEKQLGLAIRHKFIWCDSKPVLGWVSSSEQQPRFVENRLKEIRAVDQVRFRYISTEQNPADVASRGCTVLELTSHPLWWNGPSWLIHPEDRWPITIEVKPANDDVQNIAEIAAIVPIVQKDEAWICADRFSDWTCLRNVVVLVLRALRRWLTMSSKPIIGLCSRVSACGPIQASDFQLAERLLIELAQVDCTDLAKQRPEVRLRTDEQGLIRLETRLGNCTASDDWKSPILLPDQSPITLLIIRDRHEKVRHSGVEATLTSFLEKFWCPKARGTVTREVKKCLRCRRIQGPAFALPAMPSLPTDRVVRSAPFEHVGIDYLGPTMTRIVTGPTTAAHKAWIVLITCLATRAVYLEPVLDLTASSFLLILRRFTCRRGVPTRILTDNGTQFVLASKVSAALEAGRVPTSALDRFLAREAIHWRFIPQLSPWQGGVYERLVALVKSCFKRELGRVMLSWEELVTYTAEVEAVLNQRPLCHVSEEPDGILPLRPIDFLLPRAKLGIAFNAETENEEFRISSTNQRDTLIQRWHSVSSSIDHFWNRWQKEYLLMLRQRLQWKFKKQRNQIAREPTEGEVVLISEEKLPRNCWPMGRIVELQRSHGEIRNAKIRLATGKVLSRPLNRLYPLEVASSAGQDESHQQLTNPPLEEHHNRTQTADSTPICQLRARRNSPGPTHSMVTRSKTKALASVLSILMCLFLIGASQTNASSTTKPKRGKGLPIRCRGCELTCTKTGVDISIPNGIVKFLLCCAGGTQCITQSGVRKSFHRLPKEHLLFDYDCEAMYWTKRGNKRIGSVQCPGRDACELIDCWVCLERLANPDCRPDVTFGLIGGASFFTFLFLFWILPLMCHVTMFWILQHLFTLLVRLLCCFWPSQNAPQREESPLLAFQSLPTPRRRQMSRSRFRPFPKLQTTLLLLTLCAFTSCARAQVVSITASAEKCQRSDFGSVCHLESSTTVTLLPSGLPVRLLLRHPDERVLGTLEISMRSLTLHCLPKSEQWLRSYHIETVSVKRCPSRGNCTREFCDEVNNGRKTEVHELSEWTKHPGFNRCSASCSFWWCGCLNAGASCIFYRPHAIANSPIVYEQISCPTWEYRLRTSLKLSVNANFTKEPSVSLTPGITFRWKDLSITPIASSVPPAPIMANKFLSDGNNMAISDEIQSDLQCPSRANAKRLNCTLRWGSCPMCLPDHDSAKINCQCRDVKLEPALADPEKRLPIQLKNLLLRNERRDIFAEITYAPIQLSIQFEGLRIATEEDLTKCHAMSKGLFGCYSCHTGAHLHLQCHTDFGSALGYVRCSDGTEFTALCHKTPEVLNVSLSFNRAEVDINCTIECSGGRNPFVINGHLRYVPKHFQAPNGGSSFASKAKPSNSCLIWCPDWNFDFSDVF

SEQ ID NO: 129631 - protein, 196 aa, Heterodera glycines
MSSKPIIGLCSRVSACGPIQASDFQLAERLLIELAQVDCTDLAKQRPEVRLRTDEQGLIRLETRLGNCTASDDWKSPILLPDQSPITLLIIRDRHEKVRHSGVEATLTSFLEKFWCPKARGTVTREVKKCLRCRRIQGPAFALPAMPSLPTDRVVRSAPFEHVGIDYLGPTMTRIVTGPTTAAHKAWIVLITCLAT

SEQ ID NO: 129632 - protein, 22 aa, Heterodera glycines
MAKEENVTGQHLFIYSSFIYKQ

SEQ ID NO: 129633 - protein, 79 aa, Heterodera glycines
MYADPAGSRTKIKFADPVAGLEFKIFCRTGSGRINPTNPAFSKNAGLRTGILQNPAQDPVLLRALVSGIVARNVSILDS

SEQ ID NO: 129634 - protein, 163 aa, Heterodera glycines
MFAQHFRRWPKCITNGQISADGTVADERVAKGTETTEDGQPSEGGAEGVRKKRENGETGKGGEGEDRTVTSKWREWRANGPHIQPTRQGSAPISPKRRWTADAECEGSFAIEPIDGAELRGQCLAKIAKYQTKRKALDKAVGTNFFVGIQDELLAFRRAKQKQ

SEQ ID NO: 129635 - protein, 33 aa, Heterodera glycines
FNLIIVRNAKLKRCTNRLLYETPLYELPIIRTA

SEQ ID NO: 129636 - protein, 339 aa, Heterodera glycines
MVEQCKDCQNSAKMPRKAPLHPWPVPDGVFDRIHVDFAGPCQDGRTYLILVDAKSKWPEITQMISTNAASTIDILNKTFHRYGFPKEMVSDNGPPFSSFEFRRFCEHHGIKHSFSPPYQPHCNGLAERMVDTFKRQAKKEGTNKNQNWISEFLFSYRTNPSQVLNGFAPAKLFLGRMPRTSLSLLAPKNDSSPNKINVYQSKMKRQYDQHHDTSDRQFKIGDTILTLNYGRYGKPSWLEGKIVDGKNLVWKVKIHSLGIVVNRHINQIRSFIPKIPISKDFVEEQRPNSPTKTPTTKNNQPHGSHDEQPSVLARPQRERRPPKRLNIGPNAGARYEIEG

SEQ ID NO: 129637 - protein, 140 aa, Heterodera glycines
PFQQQVEFEWQGFLSFSELPDHWCSIAYFELDTQSGELFKVPWQIKEVAIDGGMDPSGASRVAIDGGMDPSGASRFCLGALANVHRSEASERARMHIGKGVGEASERARMHIGKGVGTQRDRKGSNWLRCLSQKSVFVRS

SEQ ID NO: 129638 - protein, 159 aa, Heterodera glycines
MHSLIILGIAFANLAPNAFGQQWPKATSDETVSATIKVSGGTKDFGYKRLTASSALGTGDQSEGQKALIRAEKGAVIKNLIIGQNGADGIHCYDGCTLQNVWWEKVGEDAATFRSSSGCKEYNFLVTGGGVKNAKDKVFQMNGGGTLTIKDFVVIYTYI

SEQ ID NO: 129639 - protein, 136 aa, Heterodera glycines
MVVSKVTQQNNASEDELELHNAWPQYSPADKVLPTRFLQIIRLINNKFKERLPAWQIIEQHPQHFTHFFMQILQMALDEKLPFVHQIDIITFLCNCFNSLEVDLVCREAEADIDAVSYCERLVSLFIDLEAQLTTR

SEQ ID NO: 129640 - protein, 37 aa, Heterodera glycines
KRGDPFVLQNFFTIKNHDNFLSGVLKVANHESDMYFD

SEQ ID NO: 129641 - protein, 103 aa, Heterodera glycines
MSVSPVISRMLSVEMKEKQQRMITLDELGVDMDQFMEFLEAITYLNGPFLPNPKNVLMLLKLADYFQVSALKSRCETHLINCVEIPLIDRFLLIDRYGLDNLK

SEQ ID NO: 129642 - protein, 19 aa, Heterodera glycines
GLLESWVRVPPGELPFMFY

SEQ ID NO: 129643 - protein, 438 aa, Heterodera glycines
MSADQLKQLLEAMRVQSDAIQQLMGQTPQNAASASLNHANLASSIDGRISKFNYDAETGNTFEQWFKRFGVLIEEDGKDLPESTKVRLLLGKLGDEEYGKYRDSISPTQPDKVTWVDSITKLKGLYAETRSLFVRRYDGHVYFILVDSFSKWPEVYQMNSMTAAATVFTLRSIIHRLGIPEEIVSDNGTQFHSSEFAALCKEFGIKHTFTPPFHPQSNGQVERFVDTFKRAMTKCKGEKNSLEKVLLSYRSTGYSPDQLFLGRKLRTKLALVHPKGQIDQSEKFEKCKFKQHQKDYSTKMAQQFDRNNGTKAIEFLPTDSVLLLNYRLGKSHWLQGTIVKRLNNSPTYRVHVPTLGRIVHRHANQLRCRLDFEDNSNWEPPIQEQMAIEPNQRTPPRQHAAIDQRTPPVVDQARQKAKSPIGVRRSQRVPKPVKRFTP

SEQ ID NO: 129644 - protein, 222 aa, Heterodera glycines
GLNSSAFQSLGLNPPTFQSTGLNPPTFQSTGLNPPTFQSVGLNPPAFQSLGLNPPTFQSMGLNSSAFQSLGLNPPTFQSVGLNPPTFQSTGLNPPTLQSVGLNPPTFQSTGLNPPTFQSVGLNPPAFQSLGLNSSAFQSLGLNPPTFQSMGLNPPAFNHWDSILLHFNHWDSNLRHSKQWTQISGILNTGTQPTNFNGTQSTSISITGTQSTNIPINGTQST

SEQ ID NO: 129645 - protein, 73 aa, Heterodera glycines
MSAKPLLELYVKASGIDSRRIGACLFCQEFWMELYALYEVGCVRVEVKTVNVNSEGYKKHFSGAQPPIMVEQD

SEQ ID NO: 129646 - protein, 166 aa, Heterodera glycines
MANLVKLVGFFILVLLWPKALANITSEVKDMMDKFSSLKAYTNDIVKKLRNVSDNIDDFIWVTRPVSALIKAGAKTAFQPNAEELEAIKVWHNFVKVEFENLIEVTQQLKPGIKYYLIQDEYIKAVKRPMHGLEELYKNITDPDKDRSQYLEKFRAGCLAQLEVLQ

SEQ ID NO: 129647 - protein, 92 aa, Heterodera glycines
MIGRAVRNRPFIFEGIFKFILYPRKMAISFFEKFYTTQKRSSMIGRAVHNRHFISQRIFIFRGYPRKMAISFFDKFYTHTNALEHDREGGAQ

SEQ ID NO: 129648 - protein, 92 aa, Heterodera glycines
MIGRAVRNLPFIFEGIFKFILYPRKMAISFFEKFYTSQKRLRMRRRAVHNRHFISQRIFIFRGYPRKMAISFFDKFYTHTNALEHDREGGAQ

SEQ ID NO: 129649 - protein, 85 aa, Heterodera glycines
MSKICTKIDQNMYIARVRYIKRQPATYVTASEIERASSSYNFELYRKDMAIIRDMLLDDIELFQSVPQCKPMEGLTAGPGPGTGQ

SEQ ID NO: 129650 - protein, 37 aa, Heterodera glycines
MLIGRIGGGFGVADHESVTHFDQFRSPDLNSVPILTK

SEQ ID NO: 129651 - protein, 57 aa, Heterodera glycines
SLEEKNKNPLFSFFSLSLMPNFPFEPTRVGLLSSAYFRFQVAFQLPVSLCCRASIRA

SEQ ID NO: 129652 - protein, 159 aa, Heterodera glycines
MFVDQTKRQKCAESFQKVGKRNSTGTNTKKLFGERSGRRCGEVQGRNFEFPPIVWVVMHSLLSHCQLLADSHQSEGAFSVVRFGQHGFMHLSNATLRALDIFTIGGEIERLDMVEILINFTSIRQTLYNDYLRRIPDIKFLARKLVQRKAGLIVCLFVF

SEQ ID NO: 129653 - protein, 764 aa, Heterodera glycines
LIKLNCFRRIRSLANALSTISQKANLEEEFDFGALGGRFGWFVRADSEAAEERTPFDRPKFSQVLQLIVLQLIPFLCRYAFFWLRNVFSRERLFIDIFRPFRHFPYTALPCGAIGSGSISRDFRGAFCRFNLRPGLVQQHNEPIKADQFVLTLSSAADQFVLTLSSADGSLIRQTALSAVPSFAASDELSSWEFSLSPNDVTYRALYPRAWMKFELPEQKVVVLMRQLSPVLPGDYMNSSLPCTLFNSSLPCTLFTFRIVNNSDYPLNVSVTFTFRNAIDVNDVTPATECNSNLFKTSKGRLKFHWLPLRKCQMSAEGVLLHQSVFGMPCTFALGALPRPTTAMSATRSFDPSGDGFCLWNSMASGETLAEIVRSCLVTAYESGSKRSCLVTAYESGSKQCDCDQEMAFALIWHMPFVQFGGGKRTFRRWHMPFVQFGGGKRTFRRWYSQFFDQSDQQSGAVALCEYALANYVQWEAEIDKWQGPILSNPALPNWFKSAALPNWFKSALFNELYFLTAGGTVWMCYDSEWRQQETQLSDYSAAHFRRFGRFGYLESWEYRMLNTYDVHFYAWEYRMLNTYDVHFYASFALGHLFPQLEHSLQTDFNDQICHFDDQICHFDPKTVKYHMSGVHSPVKTKNRVPHDLGNPAEEPWLKTNVYRMHDTSEEPWLKTNVYRMHDTSEWKDLNLKFVLCSYRTFCTVLGRDRQFLAQVWPQVQIMVAEGVWPQVQIMVAEGLEHWDTDGNGMIENFGPADQTEAWKMHGV

SEQ ID NO: 129654 - protein, 186 aa, Heterodera glycines
MANVVEMTIEKIDEVKSRLGSHLNDPEQFVAGLALCTLGSICSAEMCRDLASEVEKLLLKSTNTYLKKKVKILRLLRILGRDDPRVSEEMNDILAQVATNTETTKNVGNAILYETVLTIMETKSESGLRVLAVNILGRFLLNTDKNIRYVALNTLLKTVAIDFQAVQRHRTTVVECLKDADISIKK

SEQ ID NO: 129655 - protein, 174 aa, Heterodera glycines
MIFPEGSVFFQLDPSIFKESQPQIIMPEGYESGRGKFEFALGYIGCSVIGGFGVGSVRGMFGELGNPQNRTLAWNPWYTRMLNAATKHGSGYAQTAGTAMFLYSVTELGLKLSRADDLLNSFIAGPIAGGLFRGLPHGLRAGGVGALAGLGLVTVWNLCDRDSRRELREILRLS

SEQ ID NO: 129656 - protein, 25 aa, Heterodera glycines
MTKFIQKEIFGSILKGVFFVFIAFF

SEQ ID NO: 129657 - protein, 333 aa, Heterodera glycines
PAETETTPAETETTAAKTETTSAVTDTTPAETETTPAETETTPAETDTTPAETETTPAETETTPAETDTTPAETETTPAETETTPAETETTPAETDTTPAETDTTSAETDTTTAENETTPAETETTPAETDTTPAETETTPAETETTPAETDTTPAETETTPAETETTPAETDTTPAENETTPAETETSPAETETTPTVTETTPAETETTAAKTETSPSATETTAAETETASAETDTTPAETETTPAETETTPAETERTPAKTETTAAETDATRSPTAPSTRGGYYPGARSTHSSSAPTTPSTRGGYSPGARTTDSSSAPTPPPTRGDYYTGT

SEQ ID NO: 129658 - protein, 325 aa, Heterodera glycines
PFALLGKFICTVQFSDKPPQTLIAYVSGEVGHNLLGLPWIEALKIIPRQILFPSSKSADQATMIENFSAVKPPNKSINDVASLTAALQNDFTEVFEDGFHWAAPILAVKKKKGKSRVCIDFSTGLNNALELNRHPLPRPDDIYASLNGAKFFSNLDLRDAYLQMEMDEESKQLCAINTHRGLFQCQRMPFGVKSAQAIFQHLMEQICAGIPGVFAYLDDGLIAMKTLEQHITALYTLFGRIKEYGLRIQLDKCKFLQPELLFLGHIVSANGIRPDPSRSDAIRKMPAPIDKSTLRSFLGALNYYGRFVKCMRELRAPLDKLLQKD

SEQ ID NO: 129659 - protein, 114 aa, Heterodera glycines
MARGGTDEGGTVAGLLFSHRIQSDQKTSPKATEGRVQADAENEYDIGGLQPFTLYEFTFVAFNEAGSSDPVTMKQETVNDWVPPPREVQNAERHNENVGVSSSSTSVATYISVG

SEQ ID NO: 129660 - protein, 85 aa, Heterodera glycines
FSCCPASSSPLPIAPSTRVGMPPPPPPMANALRRPPPCPETQLILFFFEFHIFCVALLIYFCSFWCSFIPFLIFFRFQTNTINIS

SEQ ID NO: 129661 - protein, 21 aa, Heterodera glycines
MRTRPIWQVKQRLLTSQKKGF

SEQ ID NO: 129662 - protein, 71 aa, Heterodera glycines
LFEYPKRTLEKIDFFVFGAVPPNRCAQIYGETESFGNSFPIACTLILRWIFAPHNCLSTPNGHLKKSIFLF

SEQ ID NO: 129663 - protein, 92 aa, Heterodera glycines; identical to SEQ ID NO: 125147

SEQ ID NO: 129664 - protein, 35 aa, Heterodera glycines
MGSVPNLYFFTDLQFVSFPKFDTTNSDQFAKMPPI

SEQ ID NO: 129665 - protein, 59 aa, Heterodera glycines
MASSLSCCPKFLSAPCGSVESERLFSKAGLICTDLRNRIKGDNANRGHLRLSNKQQRWI

SEQ ID NO: 129666 - protein, 271 aa, Heterodera glycines
MNDKIDWLGRFAASHPFLGFFSNRRDSTHQLFQSLGTQFSCISITGTQLTSISITGTQPTSIPITGTQPTSIRMTRTEPTSISIIGTQFSCISITGTQLTSISITGTQPTSIPITGTQFSCISITGTQPTNISITVTQPTSIPITGAQFSCISITGTQPTNISITVIQPTSIPITGTQFSCIPITGTQPTIIPITGTQPTSIEHFPRLFFFLVAFPYGTTFLAFSSSLLVSCGISLWHNILGIFIISSCGISLWHNMTHISVSHESHRTNH

SEQ ID NO: 129667 - protein, 89 aa, Heterodera glycines
FVCGDCWLLVFDFLAPSQLGLGIALISRRFDFYVDEHFKTRKWKLNNKLLIMQLDIEENGTKKMQIVKSAFGNPLPIPRNPFPNKVIGF

SEQ ID NO: 129668 - protein, 15 aa, Heterodera glycines
MPLTRLPTKANNFIH

SEQ ID NO: 129669 - protein, 32 aa, Heterodera glycines
QSADEKFVRNWVEESAEQRPLGREVPCHGPIQ

SEQ ID NO: 129670 - protein, 71 aa, Heterodera glycines
MSPVIAPFVLAIIGIIALPTIEGAVGRQQVKLGEQYKYENVPGKLMVKRQTAASKEPQYLFAGQTAWTTDG

SEQ ID NO: 129671 - protein, 555 aa, Heterodera glycines
MAYRRLTTMLQRLQKTPEVLKQYTTVITDQLNAAIIEETTIGAGKHEHFIPHQAVITPKKLRVVYDASAHTRGAPSLNDCLLRGPVWLPDLAGMLIRFRACRVPVIADVEKAFLMVGIEEDDRDVCKFLWVRDPFRPVTTDNLVTYRFRRLAFGLTPSPFCLAAVVRHHLRKYDSNFAEELIRDTYVDNVLIPADTAEEAAIKGQEAKRMFADARMNLREFLSNDETLNSSFSDAEFLGKTTAKVLGLEWNAETDKIRMKYPGSEPDTPISTTRRTVLSSVASLFDPLGLVCPATLKAKLFFQKLWDDNHEWDTPLSREEAREWEHILASWEGESNVIPRGVTAGRGHPLQLHVFTDASEIAYAAAAYIRTGGESGCNSRLIMAKSRLKPKKAATTFTIPRMELMGILLGVRLAAFIEKQLHHPIAGQHIWSDSMIALHWVRTASAQPQFVANRLFEIRKATATTFHYIRTNENPADLATRGEVPTLLQHNDQWWNGPQWLRGPRTEWPSELEFQPDQEGLPSPAGQEEGQSAFIVRNEASTGLESEQFPSSLLT

SEQ ID NO: 129672 - protein, 90 aa, Heterodera glycines
MLDLARPTEENADQKKPKDSPTYRDRIKRNFDRGTRERTFEIGQKVFIRNYRDGPKWFRGLIITKNGVIYFVRTMRGIETTNNFLIHKSE

SEQ ID NO: 129673 - protein, 22 aa, Heterodera glycines
MKGDFNFGEAVKNFQLLDEGIY

SEQ ID NO: 129674 - protein, 181 aa, Heterodera glycines
MVAAEELEDVKEEVIGRLLKLLPKVLEGLKPKPAELSTEVDRRIQALDVVEEQLNVVKRARATDEMVTGAMAKVMAQLRNASRGMGTMDMSTLSSLQSNWDNLMRKDTHWQIRKAINSLGGCPKDPQGNTLMKQCMEEAITKVDRYIDDVNDWFKSQRPIDMDDWKWLAAEIQMIIRWKSP

SEQ ID NO: 129675 - protein, 143 aa, Heterodera glycines
MPARERVLAPSKLMELMEKLGNVLVTDPKMRQKIDKYDKKRADEAARRAAMMPPRQDPQAIAKRRTWPKEDGLALERGHLPQGNNQSPTRLQSTPRIWIQEDDRWRQPMTFSRKDVRERSWLESDTDSDLDSPLPCCARGEGV

SEQ ID NO: 129676 - protein, 101 aa, Heterodera glycines
MRATREKTAAFSRWPVSGISGPMGLQGPPGLQGQIGNSGSTGPPGPPGKQKPGIFAFERFLCAPTEYCLCSERFNGLPPDEGPPETAGGRNARDGNWPKCV

SEQ ID NO: 129677 - protein, 26 aa, Heterodera glycines
MFPKRCHRAERKMGKDRLDNAAPGIS

SEQ ID NO: 129678 - protein, 97 aa, Heterodera glycines
HAVEGNSAILRFDPDRVVQQECLITTFQTAYFFTRNFEEAQQKLRTFTSNMNRPFVVRYNPYTESVEVLNNKRSLMLAVNSLRSDINLLAASLHNIL

SEQ ID NO: 129679 - protein, 145 aa, Heterodera glycines
MEVPDVEAAAFKVMLSFIYADDLSELNGENAMAVLYAADKYGIDGLVSHCLQIPIQNLPNVFLAHAHARLFNLEALRWADEKCRKNAIECSAENRREALGPALFKIRFPLIHTSEIARCKLELRMFGNPSNCFAKSRNGGFDDKM

SEQ ID NO: 129680 - protein, 278 aa, Heterodera glycines
MAPRRKRKAAQLVGQDEAVLPTNDGQQLASAAPVTNNGTVQQAENDGTDAVAAAAAAIDGTGGQQLAANNNGGQHAEAAVIDGTGMPNGQQIEAAADENDDTIGQAINVNADCPNVPPGVLPNPKTRQYQVKSVLAQFTHASGRKCYFLEWLGFRGRNSWCLSEDTDCTEYIERFGTVATVDAVLSALLGESVPASIADELQANPKFGQVLAKLDDIEDEFILRTTQYNILFAKGLMESPEGKTIIEDVSTQMHFFNLNYIFPKAKSKLGRFVAKCMS

SEQ ID NO: 129681 - protein, 119 aa, Heterodera glycines
MKRRVAPLTTAAAVSAEQHKIIGPESPKPHEETPKNVEPKDELATKKRKVDDRELWKLAKGKFLLTTYLCHDDWNRLYNNQQKVKRLEGDRFAFGFEMCEECVWANCRATDLLAPMKKK

SEQ ID NO: 129682 - protein, 185 aa, Heterodera glycines
MVLVSTFCAQLLNCPVKSLRDRLNHPEDRALVLKHIIGRKARTTYNDRNGMTKTFFVTGISAQGAAFLPAYGQLRNPFNINVAAHFYTRHRIKLHFPYAPCIIERFSGGGEDRHYPMELLELIDDNMDMDINNNNEHWLGRLFTEIDDKQSSSNSSDTTMRLVFEGDMDEDSGRNECSQSTVPLY

SEQ ID NO: 129683 - protein, 399 aa, Heterodera glycines
MGGRTGPLKLLRKAGPGEKISYYDFTSLYPYINFTTRYPIGQPNVHVLNQEVDWRSAADNPYPLALLKVWVVPPRRVDVPVLPVKVGERLCFPLCITCAKEHPTGGVHNDYHCEHNDRQRGWVSTCTSIELNEALDEGYLVTKVFRVLEYEQSDDKLFRPYIAEFMAQKIQASGFDNSIRGDAEKEQQFVRECAEQFDITIDPTKMAVNKGKRSLAKLCLNNLWGRFSLRNFGLAQTLITDDPATLAEYLDNKSIEVTSIDELDEQHILITYLQKKDWVDEHSCSNIVISLWTTSAARLVLLKAMQKVVRSPGSDLLYTDTDSLILVHPEERCPLKTGPHLGQFTDEYPDHDIVEFCSGGAKQVHFQFIFVYFSILPPFSTVFVCDARARRREPNWNMC

SEQ ID NO: 129684 - protein, 632 aa, Heterodera glycines
MQKPIPSNRPNSSVSKTLACGLEKMVNASGNEPLTVPVLADRSDPLGLKSVQPDTVPMESAEGTKEVEIMEVDEMSGEKGKKDEMGKEKVKSGGMEEEEESEGSESELLGEGGFDNLKLNPSLRAGNKAVEKEDKGKPYLVAQVRSDGVIAARMKLFWDFPELVFVPFSLFDNAQPIEIGDLFRLHKCEWTKSETGWEERGDWLYEATGRLNYQATATDVSQLRQRIPTQAVGILVDVQRARDRHVKVAMVSAPELSCVMRAYRRHFPADFTDNDIRYRSVVRLQLRQINSPPWVLYSQQFAYVLPSDFGKKRGDELLVHHANVIAGVEPEPMGYEFPFSAELSWAKVQLGEKVMAAAVAAQAFDVKADLRKHTLFVEPVVINEISTRSVIIQFVMPVPSIEELTELCKIWEVDLAVGCKVNPAAKAKPCAHGYVLSIEKRAFCVGYEIDVKVILSYQEAKDQDAQEEFDQMRCGELDGCVELIPQTSVRALQERMFTLRSNDCSKVAKDEAKVGRIMSILLGRPVKPESPKANNPLMTFGALSKLKEGQIDTALCMLDEVPRLVFQQAGPGTGKTFSAASIVATVLATDPTARVLALAPPNVAVVKLVLEMQDALAAGNHVEPNACLVLRD

SEQ ID NO: 129685 - protein, 27 aa, Heterodera glycines
KSHLAKYLEKNGKKRKKKNEMNSKKEK

SEQ ID NO: 129686 - protein, 267 aa, Heterodera glycines
MSRNMKEICDQNRFFNEKQKREIVEKFHKIKERIMQMGKKYSRKEWKKIERKIAKKLGVSYEKIYKLKREFGMMKKKNHSIEEKRIMLKQFDQIYAKLKMKFNEKWEGKREKCKKIIAKHLGINIRSIYQWKKQLKNGKLIKNQNKDEQKREIVEKYLKVKNEFMQNGKHSLKEWEEFRAEIKQIFGVGYSTIKRWAKKLKINQNVSKERKMLSIAEKMEKIKQYYQIKEQNPKLKEDEIAKILNIPKNSLRKYKTKFGIKPKNKLL

SEQ ID NO: 129687 - protein, 24 aa, Heterodera glycines
AELSPKFQSYDEAIKWRMMGVNHV

SEQ ID NO: 129688 - protein, 203 aa, Heterodera glycines
MKIYKLNFVIFLIINLFDETLSVDDNLCKKNEKIRPSFAEIFGQKWENEKMEANETDQSDQNSNWQNENELNSAVSIESNQNNNQLNDQQKIEIVHKFHATKEGIKKTGKYSHKIWNRIEQKIAKKLGIGRTKIYKWKKELGIKIKNDQNYYEMKRKEFIQRIDEFKRMSAVNGKQKQFAKELGIDRKTLSKWKKKFGIEMRK

SEQ ID NO: 129689 - protein, 70 aa, Heterodera glycines
MSFKRVNSFQPAVPMAKKWDFRSIGNNFAEEMENYKLMDYQSTTCEKKSRADFRNNGREIKTHQSILVDR

SEQ ID NO: 129690 - protein, 289 aa, Heterodera glycines
PPPPVSTRIVPPPTFSKLFTSLESDDGPIYWCRPGEQLIRTDESKFDEIKSKRTGGEVLALNKLKRALERREILFEDRRALERREILFEDRTPCHADHVTDENKAHTTAAVGLLQAVRSPTDKIGDRLVKDVICKIGDRLVKDVICFHAADFKRVTDILKLDLYEPPMSQCTQWVEEAKLNTLRREGIRYARPMSQCTQWVEEAKLNTLRREGIRYARFMLRENSVYFMPRKIIHQFRTISAFMLRENSVYFMPRKIIHQFRTISACGSVAWHVRLRKYYEDETCGESC

SEQ ID NO: 129691 - protein, 54 aa, Heterodera glycines
IYLNFQFFFGFFSKNFLSFFSAGTASDNVFYLFRKINLFFFFLIILIVFHPEIF

SEQ ID NO: 129692 - protein, 182 aa, Heterodera glycines
MFFPIIKNCVAVVDTKTPLDIEKIYLISPSTKYNPRKIHAVIMKVYNPNATAIIFSTGKFVCTGATNEKECRQAAEQVTERIKQCGYNEARVHEFAVKNLIATADAGFHIHLGPLYDFVGAKCCSFTPELFPGLVYRNQNPKMSIIVFSSGKLNLTGSRSKEEIDFAFNQFYQIISNFKYSP

SEQ ID NO: 129693 - protein, 104 aa, Heterodera glycines
MEEVNSVYQHYSHQNLSDATGLFPLKFPTHRRNKNEGTIEMEIEKVSEFAVEEVGSRRFSDAMDIGGFPWKIMAQIETKYGSNEKWLDFTLSNDGLENDKLDKV

SEQ ID NO: 129694 - protein, 31 aa, Heterodera glycines
MIFNNEAKSWGNNFISFAKIVYINRYLVQMI

SEQ ID NO: 129695 - protein, 100 aa, Heterodera glycines
MIEPIGKANFRKACALRDTRSMYAPTSAVDAASVPNLARNSATISVAERACFCVFSQWIIKLRWRASGLVSWHTTQLMRTTQLILIFLFFNYILIYIYHF

SEQ ID NO: 129696 - protein, 88 aa, Heterodera glycines
ALSSAIFLLSVAKISDEDSEDSNEAGSADNQRATEIVAEFLAKFGTLAASTADVGAYMERVSLSAHAFLKLAFPIGSIIASSLQISTK

SEQ ID NO: 129697 - protein, 183 aa, Heterodera glycines
MDTINNWMGKNRNLFYYFAFSMAIPSTILYILEMVTIIRHKQFAQLSFYKLFCVRAITIWESQSFLMILALIVFVVPLLSCLPIMKMNVTPMAYERESDGFFIQENVSGYSFLGYLNGMKSLTSVIFLLLSLLVNLSTLIAYRRSKRVHQQNSQNGSDVIEKKLLIYALLTFSGHAFVSVFLV

SEQ ID NO: 129698 - protein, 141 aa, Heterodera glycines
GPIRRFLIPPPNCSTRVLHSVCAIADDNSAALLSLKELKCILLASRQQFPIVDVRWRPLDDFLLLRCEDSSVYVWQIETANLDRIVAGLTTDEAISAAISAENGDDAVENGQQQMLKGASSQVQMLKSQRQHRNIAAVMCG

SEQ ID NO: 129699 - protein, 207 aa, Heterodera glycines
MQTIISVDESREPATPQQKKRKQKQQAVEQLLVEVPEEEHQQSGRKPAGGKGEIGEETEGTGGKEGTGQHLEEEAQLRQIGPTTDTTPRDAEQTGMSFVGKVNTLDQKIGPEAKRLQILLELTHNRHNRANLNAKQLHVVNEMFNLFMYNHTFVVYLSFIRYYLWQVALVQNCGHKQPISEHTDQPGTVAVKEEGQPTGHGKGGHRC

SEQ ID NO: 129700 - protein, 61 aa, Heterodera glycines
MNVSTHPGMYEFLPMYTNFEPNRTYTLTGIYEQSTKIDPPQFETNFVIMHKSEQTRQMMKW

SEQ ID NO: 129701 - protein, 74 aa, Heterodera glycines
MNYQNFAEYKGVAIRGAAAWERLGQHAFVNPYQDFASMSHSKGDEPLMERPYSKNKTNGRGNGVRSFGRQSMMR

SEQ ID NO: 129702 - protein, 32 aa, Heterodera glycines
MLLLLLLLLDMLLLLLINRLRRRRQPPRPNNW

SEQ ID NO: 129703 - protein, 144 aa, Heterodera glycines
MSGTIRTRIPILVKSLKNKIEKYYEQIEQGKYEFDSNDLPGCLKLYEFIKKEIFNFEKTFDSLTELDKKWKKIRNKLNTEDKNAEIKIYKIYTEKHDYLKILEEADSVIDELKSLNLEGINMKMMMRMMMMKTNQMMNKTEKKN

SEQ ID NO: 129704 - protein, 73 aa, Heterodera glycines
MSSKIEHRTDQKEKWTNYNDPSGNPNVLLCSYILIAVREREHLWELIRVWDKQVFQTKKLRVQLSKFDGGDDQ

SEQ ID NO: 129705 - protein, 149 aa, Heterodera glycines
ATTVHYYKLLRLVLSLSLLKYMSNSPRQINRIVDEEGQEWEVEEVQLDVSKTGLGFSISGGCDREPDLMYNDRYIRVTDISKGLVKRLKYPPLQKSLSQSHLSEPIASGTFQRSLSGVAADSRTLPLQPPVRSRKRMNGMAVPWIQRLD

SEQ ID NO: 129706 - protein, 108 aa, Heterodera glycines
MGFGFNIVGGEDGEPVYITRVAPGGAADQTGNIRMVKTNCDHRKTNIDFPKGDVLLRVNDVDLSMATHGEAAVALKAIPQGAQVKLLLQFRPKEYSEFDERLQQQNYR

SEQ ID NO: 129707 - protein, 53 aa, Heterodera glycines
FCICCSRRSSATSSRLPGSLSSVFFRLFVFSSSRPLFRWSSVVIRNVKNPLLF

SEQ ID NO: 129708 - protein, 239 aa, Heterodera glycines
MEWIGANRRGEEKCSGQKGLSVPTQQRQAIREPKGRKSSNGNQMPKNKVTNLVEDKSIAFAGVKPGKLKHQSELVNSNGSLKQKTKSKNDHQHRQSEEVVGETKGAFVMLIREVETKLHQTERNKELEEMREKEHDEHQQPRKEEKERGDEAEIGLNDEEERATWTTEDGENEEMDEARKGRTDESELEERVDETEKMNQEREWLHRQRNGEVEVGTSEISPKNQDVNGGCDLFASRKP

SEQ ID NO: 129709 - protein, 70 aa, Heterodera glycines
ITHLYKGDRTVQFTGDEAEIGLNDETEKMNQEREWLHRQRNGEVEVGTSEISPKNQDVNGGCDLFASRKP

SEQ ID NO: 129710 - protein, 214 aa, Heterodera glycines
MADENESEQRSLERMEKDMESVQMNGGHQQQEEVEVKQWENCFAVKALLKTNQKLQMTLRTLEEKLRNTNQEKDYYKKHFKGENGGTHNGNWRGQLTDDFGKELLMANKRKYQLENRTKQLELELRETQQRCHHLGESVKSMEKLLWLEKERSATLEREREQLRGELGELRRHGDALKRELAELSGEEGVGGTEFSTESHNHQVGIDGDTGKVE

SEQ ID NO: 129711 - protein, 88 aa, Heterodera glycines
MTRKDNFEEQKRKLEWRLGEMTQWWNDAKWSEHALEKDVRLRSCWFEVDSEGHQEVFLIVRMGWAEMDVQLAVLYSGHFCELGVRFVV

SEQ ID NO: 129712 - protein, 719 aa, Heterodera glycines
VGDGPSSSLRCGLGFCTFDWLQKLHTAKWLLAILCICAFNQSFVINAIFPVGLSTLEKRFCICAFNQSFVINAIFPVGLSTLEKRFQMSSTRTGIISSWYDFAVLIAVFPVCQMSSTRTGIISSWYDFAVLIAVFPVCYYGNYGHKGRWHKGRWISVGSLIMALGSAVCVLPHFSSAPWHMDHSQMDSNNDFGQCANTSRPDCAPSAAGGNTSRPDCAPSAAGGASDAYFVMFLLGQTLHGFGATPLFSLGTAYLDENVSEKSSPVFLAIHSFLTSVGPIVGLFVGGKIHSFLTSVGPIVGLFVGGKLLTFYDDFDRVSLAIKDLAIKDSADPRWVGAWWVGFAACSVVSLIISFPIMMFAHELPEAKKRRENEMFAHELPEAKKRRENEVDLCYFIRRVFHINPFSRCTPSQKCFVLLSSPTFVAIIFVGIFESIVLNGFSSFMPKILEIILNTSPTVGSYLSSVIIFGAAGGVMVGGILVRVIIFGAAGGVMVGGILVRQLQLQVGGMLKMVLLCHLVTLSLISCMLLKCPSRELVGITVAYDHKFVLSSSLTLLENLCNSESSSLTLLENLCNSECHCDANFRPVCDRSSGRTYYSACYAGCSLRQEEIDGTLWGDCSCVRNVSLPTNANFSSARHLANGFCPVDCGWTLWLFLFLLFLSVVASFAAGIPTQQIMLRVIPLQQRTLGIMLRVIPLQQRTLGIAVNWTFLRLLGTLC

SEQ ID NO: 129713 - protein, 556 aa, Heterodera glycines
NDNASTSSFAQNSLEELLTATDLLSYHDAYHDALKNVLKLRHAGDIGDTDSADLDGIGMSRPEQRRLMREYAKKFRLKKFRLKVFGEAKQCKQRKVTGETDHWQGPGGEEQPQHHIIPPERVTLCKKIGTGEFGHVFQGPLQTSPRITKVAVKRILPEKLISQHASFLQEAAIMTRMHHPNVIRLFGVVLETKAVMLVSELAPCGVSELAPCGSLLECLQCPSWREPFSVAVLSDFALQIAQGMRYLSSHRLIHLIHRDLAARNVLVCTPSKVKISDFGVKISDFGLSRCLGHGEDYYRSEFTPSMKLPIAWCAPECINFLRFTSASDVWAYGICLWEMFSYGKTPWEGMSGSQILHSIDTQRKKLHCPEACPREAYLLMLNCWEWEAHLRPTFEQICDRLPSMVPPLLVTICESGTAKSGQLNYGRDETIALIDKKGQPINYFFWRGISKAGKVGLFRPEDTIFWRGISKAGKVGLFRPEDTIAFLGAENPSAGDALSEQLRTEKGKMKKQLDKEKKRKKAVEISEPKGDLRHTCHVGADGRSFGLLNVNKSDLA

SEQ ID NO: 129714 - protein, 510 aa, Heterodera glycines
MTTSMVSLPPPRPPKNGTKQRKKTEAENGDEMTRSVCIGQINGNDQLLLISAAGHCSVAEYLNASSAAASLSPPALPPKPPRFRSFANFSDWPSPSAPSASPTDTLSQPKFGQHIQSPINLPDQTHPPEPIHHNSKPTEEERKRKKSKETEEDRGRKSDEEAEKRGKSKEKREGKDGGRDREGKEEEEERERGGKREEEREEEEEENEEDESLIRRPSSVCCEFSSKGEDGEEEKRILQVLTDLQRDLTNFSLCSLDDCSEGRPLLDGEQRREKKLTEEEERKRHLRELSLERHGIVTGHSAEIVGMDRAELERRTNEERRRVLKKLVRDGGEESADEKRASFVGSFISSASKMLVGGTNHGTNGGKEPLANWPPEAQEAYKLLVQCGHNLKGTSINEGHSEGKKPSPKSNDGTLGQTAEMIELPKKIEYINSMLVGWEGEKRGKRSDRKDTLERRSDRRKDELHLAEASLQNESPPPVPPKPMARARWAQIGNNFDQGKTEDKQSRSFD

SEQ ID NO: 129715 - protein, 211 aa, Heterodera glycines
MRRRNLFKMFFNKYLFLFAAFLASDYVLYSKLSKFLLDENLDLEELNAKTFHRVTIDQLIANVSRSTPLDLLTKIPSRNDIDPEEKSAFAYQKVKQQKGGVADQSDQRRVELISSDQNKKMCVKWECQWRNEEFQNDAEPRDEAESVHEEEPMDDGRRTMGGGGGRCGGCEREDLHGGGGGRARTEPDGHQGPDRLAGRLPSDGIPQIRNE

SEQ ID NO: 129716 - protein, 85 aa, Heterodera glycines
MLIRLDHFSYNEFRYLIKRLAYALYFPYSVSTIEIQADKTHFFPQIESDRKLRVHFVSLMHKYSMDRYNVIGLMETKWAEKAMSE

SEQ ID NO: 129717 - protein, 67 aa, Heterodera glycines
MASNAGDLITTDIVFQLWHMFLKEEMARTQSPREPLGQMEEVGGGDDKLFLEDVDNADEKQRLTTLT

SEQ ID NO: 129718 - protein, 209 aa, Heterodera glycines
DRNRTPSGTHTSRLEFNEEEPLGEGTNAWIKLNVGGKVFLTTRQTLCRESGSFLAVFLTTRQTLCRESGSFLARLSQEDHSLPSEKDESSSYLIDRDSDYFSAVLNYMRHGKLILDHGLSEEGLREEAEFYNLPKLISLCNERISEREKQKKELQTKHVYRVLQELQTKHVYRVLQCHEDELTNVISAMSDGWKFEQVIPTIKRSKENG

SEQ ID NO: 129719 - protein, 133 aa, Heterodera glycines
MIENGMDVARMNFSHGDHEYHGGTIKNVREAAAKCTKKRNVAIALDTKGPEIRTGLLAGGGSAEILLEKDASIRLTTDSAFEKSGTAINLYVDYKNITKVVTKGSRVYIDDGLLSLIVEEFCGFIFKSLRRRF

SEQ ID NO: 129720 - protein, 637 aa, Heterodera glycines
MGARLKNNERLPENERQTDSERIRENGRQRDNERTRENERQIDNQRIRENERQIDSMMVEVSNKTTDQRINSEQLHVGQFTAAKGQTNNRIEGDTSLLRKSTLKEKAKGEKKQSNDQNNEREVIADKKMGAIKQPSDRISDWTRSNRNEEASSGKKMPNGRILWTKILPVQTSASNKSLPNSADKENILPTTDGRSLRNLSGDRPFSSKQLPTDEQKKSDGQKKDGPGGQQRTSDMRTKAGNSELSQRILQLLKNLRIAKEAVANYGTGRRRRRKRSAEKIADQKQGRRITENGQEMISDQKSDQSLADQGQAPLPGQQKAAITGQDFRERPGEEKPPDEKKAEEKGIEEEAKFVVEELFTGQIGEKADQVEEEEVKLRGEEEILDGILVEEEQKEREEPFGDVPEGMVDELVEKQLLKGEKDGTKAFAEVIRAVLKEIGDVLFDGEEEQNQIEEAQQGTQKLPKMKEAGEEAGDQGKEDTYQQQMPEVIGSDQPVFGDQRRPSIREDDNDGIDQPLSDQQTINSGAIPDQLDKSLPAADAQNDGHQFQESAKAPKLSEFDQQNEEENAGSYGRRWSDQSQRINDRPRGNSDEFGTRQADDQQQGSSRKMFDGVLRDRGGRAVRVEDLPGNSVLNKI

SEQ ID NO: 129721 - protein, 55 aa, Heterodera glycines
MLDWLMSNVQGFKDRKCARAFASAVLLKGFIKHVVNVSAFNEKCYYIFDGNLNSF

SEQ ID NO: 129722 - protein, 48 aa, Heterodera glycines
GKESCQMTMSNHNRMMNFNNVNIRKYDNKNERNGAGFGANSDTAAFEV

SEQ ID NO: 129723 - protein, 37 aa, Heterodera glycines
MALNLTYLLTLSLYCSNSMHEVGAVQKWNLNTKIKKF

SEQ ID NO: 129724 - protein, 69 aa, Heterodera glycines
IVHALAHAFVHRHRLHLHVAPEAIGQRMRVPLFARGRRRRVRVQPMCALQLAPILHLLETVVRALGCLS

SEQ ID NO: 129725 - protein, 119 aa, Heterodera glycines
MPFTKMINIVLVVNCTKAQGAAADKKSNLTSILWFCAADEKNAEKCAESYQKDGSLCQCQYGGEGIDHGNEQFIPTPPPVPSIVRCKYGMIYENKLGFAYPRVCEEGYHYCFAANITKK

SEQ ID NO: 129726 - protein, 290 aa, Heterodera glycines
MDENEHFSCDQLQMLVIDEADRILDMGFRHQARFITETFTHLRPGLYFTGLWGDLKQSKRIERFNKFNAVDGGAAMVCTDVASRGLDFRGMDWVLQMDCPSTVDDYIHRVGRTARMNRKGEAMLMLTPFQEPFVTFCCFAQAKECPRHRSDSLIAYAKALYFSELKEVFDVQSIDFDALSQNEMEEEEPFLKVSRRDVFNSITEVDMKEEILARISSKKPNGQDSHGYGHRAFSTSGAAQELSSALDEEIKAEKELVQDKLGGTSAPSVPGFKITTKGAEVRLSKTHGNE

SEQ ID NO: 129727 - protein, 85 aa, Heterodera glycines
IEVILIVNHSVDIEEDEEYEDDPQAEMETRASQRTTRVCSKTMMAMKMIKRMGVVGKRKRFETERESDEEEDTKQQQKKGDAICC

SEQ ID NO: 129728 - protein, 66 aa, Heterodera glycines
YLPIFVVFQITEKRMHTIGSSSFLKFFCCSFLPLFFPLFILNFFCRQNLYNTHFAPKHQENCSLMK

SEQ ID NO: 129729 - protein, 132 aa, Heterodera glycines
MANSVGAQTNGTKIASPSKSTSQAVLLAQAIRANDTELFASMVNRLGNNWQTISTTIKVPNLTDHFATITQWMENRVRHIDKLLQLQGKLSFMISAMPQQSDLWRARDEQPMIVFAADECQVEEEQQEDMDD

SEQ ID NO: 129730 - protein, 82 aa, Heterodera glycines
VTLEGRTRLPQRVQELVIDIGNAMTSIQQTSGSTDLLITSIRNFTSVDGIMANSEQNLVKIQNQMDRIETQTNGAEQNLKNV

SEQ ID NO: 129731 - protein, 25 aa, Heterodera glycines
MDLKLFLILKMSDNPKEEEKQMDKE

SEQ ID NO: 129732 - protein, 272 aa, Heterodera glycines
MPFPVRLTLIFTVPSGLLIAEEVVGIEKYRSQSKMCGTSEGLLYGPLQFPSNWRNLTFGKIIFDIEKVSEFVGEKVGSCRFSETVQIRGLPWNIVAKINGKADEKWLGFYLQCAAAEEDENWCCECSATFRIVSQKFDVKNSTGKFFGQIFDHTADQAGFHGFISFAELLDPNNEFYNREEDKVTLTVDFILKDAKMGQFSAPKTADKTIFMEIEKASEFFCEIIGSERKSETVLIKGLPWKIVAKINRSADDEKCLGFYLLCAVPKESEWN

SEQ ID NO: 129733 - protein, 135 aa, Heterodera glycines
MSSIEVRRVREELRKIIYRSRIVYDVDVRTIYENLIIITIFASSQLADFCTDPFVLCHLDACFAYNLTISPRDIFIGKKVRPVPYNAKDAVDGKLNRREKMEVIGKVEHTEWAAPILVVKKVDGSDEALKNSFAY

SEQ ID NO: 129734 - protein, 75 aa, Heterodera glycines
MCLRGGRCKGKTVEGRGRRKTKRKRKRKKKKKKVEKAGKEAKRKQQKEEEERKRKGRESGRRKKKEEEEGEQEGR

SEQ ID NO: 129735 - protein, 399 aa, Heterodera glycines
MVTAQFENSLIKQHFLIDLLKNEKKTKEVLDILGIDGLTIHKLQNEISEKIDHLNSKNKSKNKTKKKKYIKRKKEKIGEVLKGTEEENTEEISENFDEKKEGMEENKEKTIKNLEKEEEIGEKEEKIEEKEEKEGKLDENIEKEEKVGENLEKKEKMKEKEEKEEKEEKIEEKEEKEGKLDENIETEEKVGENLEKEERTEEKKEKMKKNLVREEKFDENEEKINEKLEKRKLEEKVSKSKDFETENGTKLKKKDEQFATEKLEVNEFAFIKLGDFEDDQFLALKYGEFLGILSRNDGEKARKAWSPALKQFGEKENLEKCEHSLAHLLDIGILANEIWHYVQTMKALNGKSKDLAKFEKEWAQLKQLKLEEEISPKNLEQTLFSLMTRIVVEGITAKN

SEQ ID NO: 129736 - protein, 56 aa, Heterodera glycines
MGFFFYLIVAVALFGGGMFVGMSLGGKKSSDGASGSGAKKEKKHKGSKSSSSEKSQ

SEQ ID NO: 129737 - protein, 104 aa, Heterodera glycines
MDLTPIHRIHVAYVWLNHFHVQLVALDVSRVDTRAVFSTHCSALLAGLSGTSGPQLSLDGQLLALRTLLQNVDDARSQADVFRFQFDESSWAADPHRQHPTQRL

SEQ ID NO: 129738 - protein, 41 aa, Heterodera glycines
MHWFDQQAANNCKFLRFANNALRKYLLYLISKKFLREKEGF

SEQ ID NO: 129739 - protein, 55 aa, Heterodera glycines
FFSFFRNIFVFFSAGTASDNIFYLFRKINFFFFLIYFNYISSLNFLINIFKLSPY

SEQ ID NO: 129740 - protein, 69 aa, Heterodera glycines
MEATALALIIVGKNDKFWEHKQRWSRSEVCRFRLIISNIFGMKSAENGVPNSAGTQVTVLYKALKRHYK

SEQ ID NO: 129741 - protein, 90 aa, Heterodera glycines
MLTANSRHQFQMFPPPFHVAPSVLNRPMALSLVFHRAALAAHSSADRCLPNGTICAKECEIRAAHVGSNGVLELAWTFRKDTPKSLANVN

SEQ ID NO: 129742 - protein, 102 aa, Heterodera glycines
MLQFRRVMRTILLLQLLRLLFPLHHHQQKRSFQQQRKNAKECAYTCHRNHDCKIKKTSPTAYCDCWEKFGCRALITGNLVKREQLLNLFLQNGKLVDKLNAR

SEQ ID NO: 129743 - protein, 158 aa, Heterodera glycines
MDTSCGRKLADTFFEPLMDVPEPVERMFCCTLFSAILSKGGTLYWRGIFPFTERRKLWEKARMKKKQVTSASSNDIVVGSEVRTKSSPIYSVGSVAVNFAGGLPMIGTLYEDAWTLNETCRFRVQTPDNYDAIPIGNDKDKQQQQQQHREKRVSFSRP

SEQ ID NO: 129744 - protein, 139 aa, Heterodera glycines
RIMMTRPGVRSGGFCRTGVIIDRNRSNRPMIPASSVPEELIVQCQVVLQGKSRDVIVRELQRTNLNVNEAVNNLLSRDDDEMEDLDETGEAYLHEELLSLLDAGLRSDGDTDGYEYVISRDMARRRDGWTNKKKNWGPI

SEQ ID NO: 129745 - protein, 82 aa, Heterodera glycines
MNYFIEILLLLLCTLVQKDEAEGRIVFADDHLPPTSNAIGLHGHRHATLAELGAQPLPKVVAERYACLNIACLFPRLGFFTG

SEQ ID NO: 129746 - protein, 45 aa, Heterodera glycines
MEKLEKRRKAKIAYFLKYKPPGLLFFIFFKSGLKRMNEAAFGLLF

SEQ ID NO: 129747 - protein, 223 aa, Heterodera glycines
ANWRLLSATSYAFCDDSLNSLRTMTKRCDQKLSNVAPTATIFLGLLILGVGRTMPFSLGLPLIDDNVRKSNLPLYFAGMFCIRIMGPMLGFLLGSFFYFAGMFCIRIMGPMLGFLLGSFFNKNYYTLGMPYGMTPRDPMWIGRWWAGFLLIGSVLLLPSLALFFFRNPKQKASAGEENEDEGGHRPRLALVDRHLEKGEDGEVGIGIDIQIYPWNGTQAIVPK

SEQ ID NO: 129748 - protein, 38 aa, Heterodera glycines
MGSRNAPNFHLHRKLIRSAPNFAGILKGRENNLFLNII

SEQ ID NO: 129749 - protein, 95 aa, Heterodera glycines; identical to SEQ ID NO: 124528

SEQ ID NO: 129750 - protein, 16 aa, Heterodera glycines
MATMDFWSIFFITFGA

SEQ ID NO: 129751 - protein, 140 aa, Heterodera glycines
MHMYYIPLDRGGLTSILNFADSEKQKLWGLKNRNFWLCFHLKLVAQLAKKSQLFVARKKVYENLYFLKMKFYFQKIDAGISENQQSRKYTPKLVITNRKNSSSPGSETLMSSRVDVRTNPPDQNRSAISTNRSVIRPSII

SEQ ID NO: 129752 - protein, 335 aa, Heterodera glycines
WHGFLGDQLSAEFFVTDQQLLKECREKLANSELRETKLVFKNGELNAENRALKAELEKQKRMMEHIELKAKVFNMEQEKQQFEKKYVSVEVFNTLVERIKQLENQQQKKEEGRNVFVDHQLLDIFLAWAKQQKENVGQQHKKENVQQKLDGKCVMFDKIMSRKLQRVPAIRRRRRFASIGFATKEMPLDGPIGQHLNSYGYQSNGSFGCNFISRPCKMAFGTMPIPFNGAVGKQRGGYGGSANWPFPLDFVPVPMPSDRALAYQSPSFSTGDVVGCGVHLDTRLIFLTKNGLRIDDYSFFTTTPTDSLFPCVSLWTGDKIEANFGPSFKFNLATL

SEQ ID NO: 129753 - protein, 87 aa, Heterodera glycines
MSSSSGSPDSFFRSANDQAAAAAAEEVGKYEVFSWHGFLGDQLSAEFFVTDQQLLKVGHLKTYKERASGSVPDSRNVPKTEKDFCKI

SEQ ID NO: 129754 - protein, 158 aa, Heterodera glycines
MCPNGKFMSLEEWAAFILRIFLLTQKDVKRLWNMDPTFLDSTSKVQPYWRHSHLQFNQQQINSNFYPKFEQKLSENWQNDEKFTIVLQAYRRDAQLLYTLKSLDGLRYLDRVIVIWGDFRRPITEHAYTWPHIHVPIFVVSASVWHFETQKTTFININ

SEQ ID NO: 129755 - protein, 146 aa, Heterodera glycines
MLIQIRILNSLVLIFVIIFLTIYTTKYFKVQNYVFIIASKEAVNFFDWSKCAEFGVFMPNNSNLMPKEEQLLAKWMISSNYWQKDIEKACFLVYFINKKSNLLTEHLPNDGMNSLIIFLNDIKPTEEFRKKNFRAIFVASDFNEGY

SEQ ID NO: 129756 - protein, 326 aa, Heterodera glycines
MNSKLGYLDEQVREMLTLSFSQTIKSICDYMLETRRWAATALLSDPTTFARKLFQSGKLVARVAGPELIKVWPCIELQAHDYEFAKIGNSADSEFECIDKIPIKFRVKDNKRMAFIDPRTMILSSDARLAPCSQYRKQLIFVRGSLYEIDQIDAQVKQVNANRIEGFSLNLSLAPTYARHSFLHLALVNVSDFIGQFYDANLARESELTFQIKSEDAIVTKTLSEQWEQVNFLIRFGLMIRDEYVGRGTTRRMTFGGNKTQKIVKSPARLNMMDLNASVEFGNEIELSPVKLIEPAQTQAYKIAGKRKRPYCSAQNGIQTFQCSQI

SEQ ID NO: 129757 - protein, 81 aa, Heterodera glycines
MAYARLRTPLLEISNMIIADVTKLDFIGTICSGILSKGNTLALESDMVKYDQLSKGITESTHLWWKTESCQCVMVCFVAFI

SEQ ID NO: 129758 - protein, 149 aa, Heterodera glycines
LTKPIYLRKYVGRGKAAAKKLHKLEKKDSFKNQTKAENLQQQHDPLTQQRRMSFSNALDAIRARTLSNTNSPAHPLFRESNELLLHQSSAVDHLQKMNDVKCRTKNGGNIGGHRKYFTMFEGGNEIDSEELKAEDELPNEDKNESKEIP

SEQ ID NO: 129759 - protein, 20 aa, Heterodera glycines
MLVDNVPEKRQENKNYFKLL

SEQ ID NO: 129760 - protein, 207 aa, Heterodera glycines
MSSSKRKHQWHLLANVSDYSKSEKGFQSDEKLDDNDLEVAMINESCLFGDTVFQQQSAAFFALPSLLPFNNQTNIVSSFVSPFNEEQNSDESDAAAKSIAYDVVSSLFDGEPLYSSESFSDDEGSMVVNASILQVLQDDETESELEQENTEATKENETAKSVSEESESIEFQPTVPTCNNSMPTLLSQMYAADEQTLPVFDSWEELG

SEQ ID NO: 129761 - protein, 192 aa, Heterodera glycines
MVTNRWNLLSSPNASTLDLPMALAGHSAHVIGNEMHILFGYNPFEGYMFTPQIYSFGWNNLGSFGAPLFRHSAVILDGIMLLVGGNSHNESSTTRKKDCYSEQIYAYDMICKRPVKIYSKEFEAIARYGHSAFVSGGNMFIVGGFNGEMLNDVLLFTPGSPFSQLPRAKRRWSLTKNTVQGLPWETSKDKTG

SEQ ID NO: 129762 - protein, 154 aa, Heterodera glycines
FSHFFTAKLVPTVAFSCLALSNNLTIFETQTKKILDQKWLSLFSHFFTAKLVPTFAFSCLALSNNLTIFETQQKKFLTKNGYLFFLIFLPQTWYQQLPSLVWPYQTILRYLKRKQKKFLTKNGYLFFIIFLPQTWYQQLPSFVWPYQSILRYLK

SEQ ID NO: 129763 - protein, 33 aa, Heterodera glycines
MLFSNPFILCLLLNFLIIGPSQFIGQFINIIGE

SEQ ID NO: 129764 - protein, 62 aa, Heterodera glycines
MATFNVAHLITLIGVGSIAHRLLLMSNKIKTKLKLEKQNENVFTELHDNQNGLSTKLENGGK

SEQ ID NO: 129765 - protein, 82 aa, Heterodera glycines
MRRGATVIRRGATVIRRGATVIRRGATVIRRGATVIRRGATVIRRGATVIRRGETVIRRGIKVIECGTKMIRRGTKIECNLL

SEQ ID NO: 129766 - protein, 100 aa, Heterodera glycines
MSWFIEKPFELLPVYYYYYLNTKNKTQRIVSSLSFFEMENPGFFLFCLDLDLDFFFTFDLDLDFLDKNPGPGKIQVAEKWPGPGSRKNPGLDPGPGRALL

SEQ ID NO: 129767 - protein, 250 aa, Heterodera glycines
MLTAYGEFNGRKRSRFDPSYSPLNNQHSLDKKQQLLDGVAKLNFDNLVNDQTISEESWAQIAQLTTLLKLAANIIGDSMAPQIDNAAEMERRRSVVATGIPESVSDIPSERVAEDHNTVTRLLDQLGVECPVTSYRMGNQAPNGRPRPLKIVLAASKFQRITITHWSKKRAELRKIPQMQRLNLRESLTPEQLSARREMQKECTAKRAQTGQDWIIYNDRLILRDDIKGKSTAMFPPTVSLITNVHPTKN

SEQ ID NO: 129768 - protein, 426 aa, Heterodera glycines
NFLTKIPKIFTNLSKKIFKDETPLILYENKTIIDDGEKAEIFAKHFALTFQNSSNYPQPPTTFSNSSNLPTLSNIQFNVLDVLEILIYLPNKNNTSPDNISFKFLKTFHLILARHLTDLFNLSLCSGNLPKIWKTSLVLPLFKNGDKNLVNNYRPISITCSCCRIFERLIAKKLTEFLLKNNLISEHQFGFLKSRSTTLQLISSLEDWYNAILRNQKIDIIYLDLQKAFDQVPHDLLIYKLKKTITGNLLNWLRDFLLGRTFKVRINQKFSNEFPVKSGVPQGSVALISVFNWAETWGLNFSVKKSSVLYLGKNNKKIPYTIKNATIPESKIIRDLGILIDNKLKFNGHVSIILQKAYLKSRILFKKIKTKSTKTWITVYKSFISLLEYATEIWNPQTKKEINRLEKFQKNFTKNVFRKCCLPYIS

SEQ ID NO: 129769 - protein, 73 aa, Heterodera glycines
MFPGLSFSSVVEIAWHGQGQDPAGLILQILYFPKYAELRTGILQNPAQDTVLRRSLVLVSNPAFFVNFGVLRE

SEQ ID NO: 129770 - protein, 224 aa, Heterodera glycines
MDIWSAGLTILQLTLKKTFGYKEKVDEKIGELFRSAKLKFEGGKFKPDPAKLSLPIDIYEYSRDHLKYDEYWPSGNWWYNYLTVIHDILTLWDKMPEIVFLSVNMLNIDAEKRMSAKGIIDYLEGKCKPKEYEKNAEKMALFGDVSDEKLKIFMGTEHMGFCIFEKYLNDGLILFGGDNDEREKKVKEDFNKMENIKQNLIKNAVKSIETFMKELEERDEICDH

SEQ ID NO: 129771 - protein, 142 aa, Heterodera glycines
LLSHFVSQFSSNKFNFIKIKKNDFSFFVFRRALAKSPVVKRAAAIQEQEQKRVSKHRTSRYWLDEQGPVLSPSEHIWLPSSASSASSSAVDTECYLGEKDCQKMGEKRRCSGCHIVAHTACFPLLAKMNLSCKMTFRDCAQK

SEQ ID NO: 129772 - protein, 61 aa, Heterodera glycines
MEKEYKQSVRKLYAGKHRGYLLMPVELPNPNDPNGDRFSGQGHVLIHSAIRSMNNTPIADG

SEQ ID NO: 129773 - protein, 99 aa, Heterodera glycines
MDDAVELVTALENMRVNIDLLSVKTDKYFIPDIFLRNLANAKMKTRIGAVLNEFRKKIKDEKLAKRCKALIKVCFWMRDMHKNKGIKNILNTQNCGTKL

SEQ ID NO: 129774 - protein, 36 aa, Heterodera glycines
MAPLSLKGGRGQIDKLYKLTTNCLLNVCLRSTKMCR

SEQ ID NO: 129775 - protein, 68 aa, Heterodera glycines
MKYSDGYCNNLLKSPKFSCTTSASSLCCSRAKFRFCGVIEQANEETETIFINIFNCKNKICLITNPNF

SEQ ID NO: 129776 - protein, 81 aa, Heterodera glycines
MECSSTHLDDVDRTSNFAEALHSVTKFGGNLVAVIQQFGASLTRSDVSRRRLMPTWQFVWWENSNPKRKGSIMMAMLKFFS

SEQ ID NO: 129777 - protein, 129 aa, Heterodera glycines
RTDAPRFMGETESFRNSFPIACTLILPWIFAPHKCLSTPNGHLKKSIFFVFWAVPPNRCAQIYGETESFGSSFPIACTLILRWIFAPHNCLSTPNGHLKKSIFLFSGQSPRTDAPRFMGRPNPSGVASL

SEQ ID NO: 129778 - protein, 30 aa, Heterodera glycines
MEIVSKNNPKTQLRIKIMEKSQKSVSRNPS

SEQ ID NO: 129779 - protein, 84 aa, Heterodera glycines
MNVKGFHSRLTHKNRHLPMLLLPLISLSLFDLTNELTREQLMLKRKNDIGRFLLIRYPIVRDPSKWAKFEFRDAMISPSDQQQK

SEQ ID NO: 129780 - protein, 122 aa, Heterodera glycines
MARPRGSGRDPFKARSARARRRAGNKRKAAAGTAANVQAANRRPICLICLKKMTQVRQVRTICDHVFHYVCFHRWLKYRLFCPVCLLNFRTELYHSGNAVFEGAYNDGHVVLIPDGEQSNSG

SEQ ID NO: 129781 - protein, 209 aa, Heterodera glycines
MTWTQGKVGKEKHNYLRLSSSSLHCATTTTTLQKRPHRRFSSFVRSSVLHINSLAVFAMALRRIKQELAELKQEPITGCTAAPMDDGKDMFHWKATIKGPPESPYEGGTFHLDIVFRRDYPFTPPIVKFETPVYHPNVNKQGGICLDVLKTTQWAPSLTISKVLLSISSLLCDPNPNSALEMNIAIIYRNDREQYNRNAREWTQKHAMK

SEQ ID NO: 129782 - protein, 92 aa, Heterodera glycines
MDEEPRDEMTRQTTDGWERMQKTTAEEGGGGGYIQLTLFPHMIPTVKIVLLYLTFYCPNKLFMYNTKLDIAFVRSQLEMSADHLSTVALFTI

SEQ ID NO: 129783 - protein, 69 aa, Heterodera glycines
CTLQFYCPNKLFMYNTKLDIAFVRSQLEMSADHLSTVALFTIRYEHNVSIVVRALRHGVSRMIQFRAKV

SEQ ID NO: 129784 - protein, 92 aa, Heterodera glycines; identical to SEQ ID NO: 125147

SEQ ID NO: 129785 - protein, 61 aa, Heterodera glycines
MIGRAVRNRPFIFEGIFKFILYPRKMAISFFEKFYTSQKRLRMRRRAGAIAILFHRGFLYL

SEQ ID NO: 129786 - protein, 105 aa, Heterodera glycines
MPLIIYFSVLFLLLIPICNIDIKEWKFLQYYILLSSIPMFLPSAINPIVSICTIKYYRYELVSGLKRSSEKFVKLFFRQNIHPQNLNETAHKEDQAKWATNVANN

SEQ ID NO: 129787 - protein, 139 aa, Heterodera glycines
MPLDECVGCHWDNYGYKSNGTFETSGSVWLNEERYEFSRGDTIGCGVNLASRRIIFTHNGRQLAQAVFRKARSMGIFNLLDGDDDEAPVQRKAVHKTFSVQCITDVHNSRQWTNTIRTAFATTINSDNPIVRRKQLAAY

SEQ ID NO: 129788 - protein, 33 aa, Heterodera glycines
MAHECYGFGNVRAIKHAHRARCWGICAAPQAAH

SEQ ID NO: 129789 - protein, 27 aa, Heterodera glycines
MRDGTFYSNFKCASIMYSVIKEAKILF

SEQ ID NO: 129790 - protein, 173 aa, Heterodera glycines
MFEFRVRDSEIHQIEFIFMISGHKSPWKHVFIIKSKFFIVSSKLPSFNWTVPTISLFTNFPVKQLNCAPDWYRSEFRPAAAASVAADYVEKKIPMTPTLLLALLLPLALSNRQMSWSGTTMECAHVFYFVTYSPHCSLLCTDVLMDTFPFLDPTRPQNGTDFATFRLFSRRAF

SEQ ID NO: 129791 - protein, 213 aa, Heterodera glycines
MSFFEVFALCARPFVGKARIFFVLRRNTTKGFGGELARRSNCRIHNYPNGDGELYIDHFVIAFLRSNKQIFDNGRGTNLYLNVFYHFNRKRVQRILDDVFLSEILPIFAPNIRRLDFPNDDHLRHLLRISSPSLLTDLNQLNSIDSDYLVPAAAIDDFDGQNATSAEQVLSKWLHTPRKDGQPKRLRCCIGCALQTKKWMKKFKQVAPIFFRH

SEQ ID NO: 129792 - protein, 38 aa, Heterodera glycines
MGDEAMPNWTNGSVGRAENLDNLNNVSIIFRGFTNCIG

SEQ ID NO: 129793 - protein, 81 aa, Heterodera glycines
KFKRSNSISGCDSERKPLIEWSNEEEISTTEVEPELVSRTTAKTTKCQGQKETEAKQIQKLMDEKYKSRALMDGLKQSGLL

SEQ ID NO: 129794 - protein, 73 aa, Heterodera glycines
VDSRGQQIGRNLRVAGGDVLLGQDYVRHCGQQIRNQLADTMRQHEIGQHLGKCGKIDAFIGILLRNSLFSHTS

SEQ ID NO: 129795 - protein, 80 aa, Heterodera glycines
IATPLRYACTLVGIRIAFNTLRRLGKLRTTREIDLTVRQRLDLLIEHRDQKRSAKRAVRHQNNSMKRHSLCSSRTRTKLD

SEQ ID NO: 129796 - protein, 146 aa, Heterodera glycines
MSARRVLVAVGQLNVQHDLQQNFERCARMVRRAGERNGCKMVFLPECFDYIGRTVAEQIDQALDTRGPYIGKFRELAKQHGLWLSLGGFHHKRPELRSDHLPRNTHLLIDSDGQTRAEYDKLHLFDLDLPGKVRLMESEFSSHGHK

SEQ ID NO: 129797 - protein, 101 aa, Heterodera glycines
MATIIHLAAIYEHPAILRALLDQDGSHIDARDSEGRTALHYAAALAGTLREDDADGSGGDDKEKSRDAAELECFDILLDSGANEGLLDVEGRKTWKNGILI

SEQ ID NO: 129798 - protein, 183 aa, Heterodera glycines
DDFDNATALADHLKALHKDKDRYLGYFNWTKFYQKRWVPTVKTSAFCQLCEMVHHQMEEGGEFVGRNYTVKSHKKLWGAQRCRENYVQNDSKTPRKNLNFVIFVSQPNSIPNNGLKSPAFQTLGLNPLTFNDIPITENQPISISISETQFSGFPIAGAQPTSISIAGTQPTSIPNNGLKAPAF

SEQ ID NO: 129799 - protein, 53 aa, Heterodera glycines
MYNCDKKGTTVIKIGTTEIRRGTTEIRRVTKMIRRGAKVTKRGATVIRREILE

SEQ ID NO: 129800 - protein, 46 aa, Heterodera glycines
LHRIAEKIRDQFPNVDRLIAKRKPSLSKRLTESKNLEMYLICNFNQ

SEQ ID NO: 129801 - protein, 278 aa, Heterodera glycines
FCTSTNHCCTSSNHCCTSSDHCTSSNPCSSSNHFCTSFNHSCTSSDHSCTSSNHFCTSTNHCCTSSNHCCTSSSLFNLLSFCSSSNHFCSSSNHFCSSFNHCCTSSNHCCTSSDHCCTSFNHCCTSFNHCCTSFNHCCTSSDHCCTSFNHRCTSSNHCCTSSNYRTSFSHFCTSSNHFCNSSNLCCTSYNHCCTSSHHCCTSFNHCCTSSNNSLPLLICTSSNHRFTSSDHCCTSFSHFCTSSNHFCTSPNHSCTSFNHSCTSSDHCCTSSNHCCTSS

SEQ ID NO: 129802 - protein, 102 aa, Heterodera glycines
MIKRGTTVIRRGTTVIKRGATVIKRGTAVIKRGATVIRRGTTVIRRVIRRGTTVIRRCATVISRGTKVIRRGTTVIRRGTTVIKRGTKVIRRATKGLEEVQQ

SEQ ID NO: 129803 - protein, 102 aa, Heterodera glycines; identical to SEQ ID NO: 129802

SEQ ID NO: 129804 - protein, 279 aa, Heterodera glycines
MGVFQHCMDEAIIDSRQSGVEPTHLGCIVSSQNLSSDIWIPIRQLTPDTINTILNRFNDVAQSKKQDDVTLWGEPFTVTVTTLNRNALPAKRQLKGGVARKLAPVHHNIHPNCLIKIQNFDDDNYCLFYAIQATLVRSIGDLDRRRFHDYVNGNSEMRGKLKNDALEMMNAVNAPAGQPNYDAEVYVPRIVDWWNGEKFVGQWKFKTFLFGSAGHYKPLFKYGPEDYVVPIILYFEEEHFNGVQKSGNLFGKPYCLSCEKTYDRPKRHIVNCKARCIKW

SEQ ID NO: 129805 - protein, 443 aa, Heterodera glycines
MFGLDVQDKPFFPHLANRPENYGCQIFPTKSNYLAGGINPEKRKEFDIWYAQNQNQPFLLDEALASYCKNDVDILMAGLIAFRTEFLEMSKRPADPDGKANRATYTTPHNGIDPLKHCITIASACMRHFRTNHLKPGHLALVPEKGYDSCGDNQSDLAMSFMQWYTEKYAVRIQNAFSAEGEKSCVTYYPVGHPTLHVPCEDVDWRRPEDNPYPLAILKVFVIPPQKIDVPVLPVKVDDRLCFPLCMSCCKKCPNGGLNAALEEGYRVTMLLRVLEYNKSDNQLFRSYMSEFMAQKLHASGFDEEIRGNSEAEERFIKECREKFDIKIDRAKMIPNKGKRALAKLAVNNLYTDSLIYVHPKGANPLKTGPHLGEFTDEFPKHDILEFISGGAKQYGLKLRKKGSENEFDYVLKLRGITLNYDVTKNQGLCYDTFKTRTTSKSI

SEQ ID NO: 129806 - protein, 179 aa, Heterodera glycines
MVLLTEKIAQLLNCRITELRDRLNHPSDCEIVVKAFYGKHIQTTYKDRNGYTKTLVFGGITAQGAATTMAYGRLGRPYNVNVAAHFYVRHRIKLRHPFLHCVIERFPEGQEDRFYPLELCKIEEVDESKWLGQIFTEINNNNISATNSTNFADTQTSNDDSKSVDGRDEYSQNDCYSLW

SEQ ID NO: 129807 - protein, 202 aa, Heterodera glycines
MSVPSNDNQFPKTTNECQVDDDDVDTDPSPEEVEKWTPEEVIEWEKRIFGKMPPEEEFWQEIIDDGDKDNRGGRGNFRLRYNPLAAVELTLLGNRLEDRARRHRVAIGASTSASLLVFQAQQQEHRRREVQRQFEVAEQLQEEIQAAEEGENDQENEDQHQQQQQGGEEAQHGGEEEVQQAAQQNFERTVRLQLRESQRFHN

SEQ ID NO: 129808 - protein, 69 aa, Heterodera glycines
MSISTNSTNGDFIPTDGEVNCESISLDNDGQSDGKVTVQQQPKEFREKCAKMEMNFKIIKLELEKVAFT

SEQ ID NO: 129809 - protein, 361 aa, Heterodera glycines
MKTFFVLILYVLLLKNANEQTEAGKINKEKSFDQIFGQGWDDGEEENICRIDQIFNGQTADQDNQFDQIFGESLEVKEGESEEMSTNSDQLEQLQENVGQISDHFSNAIGKKKREIVEKFDKIKEKVKQMGKKFTRKEWHKIERKIAKKLGVNQRKIYKWKREFGMMINKYSIDEKRETVKRFDQIYGKFKMKFNENLEGKREKCKKIIAKHLGISLKSIYKWKKQLKNGKPLKNQQIDDEKREIIEKYFKLKNEFMQNEKHSRKEWKEFSANIKQIFGIYYRTIEKWDKKFGIKQNISKGRKHYTIVEKMEIMKQYFELKNQNPKLTNGEIGEILNIPKGSLERYKAEFKRKSEGVPNTE

SEQ ID NO: 129810 - protein, 90 aa, Heterodera glycines
MVGEGEAKEERINQFNCLSQTTKVEENVGDNRRINEKKEKEENEWQLVGRKRSSARSEQNLLGEMNEWPFIASGKAKKAPKSAMDLPTDE

SEQ ID NO: 129811 - protein, 49 aa, Heterodera glycines
MSISDKIREAREWSYCIDTLKASVDSMYEICRIQQNILGCESKNVIPNF

SEQ ID NO: 129812 - protein, 33 aa, Heterodera glycines
TGFGISRMNAVRDQWAPKTHGNMFSQLYTNVSP

SEQ ID NO: 129813 - protein, 84 aa, Heterodera glycines
NARKWTGNGTCEVHEGRLWHLITLISSSETIVGNSRFILLLYVLHNLCYFIYTIFVHFQYLLIYSFGLCKKMNNESFVGMCSIQ

SEQ ID NO: 129814 - protein, 19 aa, Heterodera glycines
TFAFSSLALPNTHTIFEML

SEQ ID NO: 129815 - protein, 19 aa, Heterodera glycines
TFSFSSLALPNTHTIFEML

SEQ ID NO: 129816 - protein, 19 aa, Heterodera glycines
TFAFSSLALPNTHTIFEML

SEQ ID NO: 129817 - protein, 19 aa, Heterodera glycines
TFAFSSLALPNTHTIFEML

SEQ ID NO: 129818 - protein, 19 aa, Heterodera glycines
TFAFSSLALPNTHTIFEML

SEQ ID NO: 129819 - protein, 19 aa, Heterodera glycines
TFAFSSLALPNTHTIFEML

SEQ ID NO: 129820 - protein, 19 aa, Heterodera glycines
TFSFSSLALPNTHTIFEML

SEQ ID NO: 129821 - protein, 123 aa, Heterodera glycines
MNAKIIRVPKIACDLSLAKNGVSKNRNYAQKASQTILTLPIPSTIAFIHPIMSAKIIRVPKIACDLSLAKNGVSKNRNYAQKAPQTILALPIPSTIAFIHPIMNAKIIRVPKIACDLRLEKNG

SEQ ID NO: 129822 - protein, 114 aa, Heterodera glycines
MSSARLPKGSNEGTPSSDEGEFKKIVIGICAMQRKANSKPMRSIMLKMNEFYKDFLDFVIFPEETILNESVENWPLCDCLISFHSTDFPLKKAIEYEKARRPYVLNDLHRQFDL

SEQ ID NO: 129823 - protein, 533 aa, Heterodera glycines
MVAFGTELDEGTRDIGIGGVPNGGRKWGRMCSKESWRLSSACPPSARKQFAPTVCYFLFPNCVSTVPLFSPPSLRFSPFVIFGDLSVLPDLLRHSAGRTSDFSFVGCQRRIAIDGIEIIGQDLAILEERLDQFMAEVFAHFITINCSLLIRSMQPLHPCVRSLEVREIKGQMFAMEKMPGRHVEKAFVCLREAIHSLANAKVSKLSPLIVSRMNVNSMRFVLHRHTNNTQPTPFPLSFQLIVNSSTPLDIHWHRLAMGVSPDGKMSLRLLIEENRPEDAISQLCLSAKSADHSVLASIFAVISVLFLLSFVLFAIVFRFKKRKRKESAKRNRSVQISSSFVTQSQTPPIIVPSQFNGEEEEQKMAKLENWRAMAVSTDTFSSIGFSSCSTFPRHSNIIGPSDAEADGDGVISDNEFAEFEFMDEEDPISDQQSNDNYQQNGQQQKEQRNGDKMDQLNDHNSKEEQIGKRADENGAEKSARSEGDFSFLVDEEEFDEFPAKTVEEIDQTHKGEVPVNKPPKPLTFAEMSLLGAS

SEQ ID NO: 129824 - protein, 333 aa, Heterodera glycines
ELLALLIIFVYALNYAYGKSKNHSIAHKWFMDNRERLEKQFALVGDDGTSQENMGGCLIRETDFAYSVWCTGRIGCRSMHSQIKLFKRQDLLGMMIGLVRPRPDNVVYKIDLDPDEMDSFVLIFGQRKNVQKTVKEMHDLSTYVTERKNVDKVQLPSSICVFAEIAETIPAIIDASTLQFLKKCEKYVEYIHFSDQYAGAKQPDDQYVRLPETHPTLVFSYIITDDNEEGHLMDSMLLNFTFFMLDKVRRYRLSKEGKAKADKKRQNVQENFLKLTHQQRQEAAQTRREEKTRERKQRVIEEEDPDRQKRLERLEQKRDAKQKQPKMKQFKIK

SEQ ID NO: 129825 - protein, 53 aa, Heterodera glycines
MTTEPNGAVDQQQQQLLFASTACACRPNTMEWCKTTSFIVFASQRTICIVSDQ

SEQ ID NO: 129826 - protein, 66 aa, Heterodera glycines
MAKETDDWTIKADWTHKFEDDLAVNDKWAMSNLLGMASQLNFTFQLGPPGGKRGYMVQIFVFKRSI

SEQ ID NO: 129827 - protein, 48 aa, Heterodera glycines
MLNVARPPKYVCIEGGHNETVPELYNPFYLSDSPYGAYSKLNNDEKLA

SEQ ID NO: 129828 - protein, 23 aa, Heterodera glycines
MSSLSSSSKLAASLMARCSSLNP

SEQ ID NO: 129829 - protein, 89 aa, Heterodera glycines
MMGIRDRKNWQNFAVLREALALAQSYFYMWQIGAKKREMRQKLFELYPSFNSGELFRRDITKKHPADQLRRKADHHQHINQRIGRGGGM

SEQ ID NO: 129830 - protein, 108 aa, Heterodera glycines
MSGQDSGIQAGQCGQKSQRRDLRGREKGVGFWDLDGTTLVMASLLFFSWHKANKTHGASAAASLRPHGQTVAVRSCGDCINFFTFRRCDEALDFLQRKIGPEKVENSF

SEQ ID NO: 129831 - protein, 23 aa, Heterodera glycines
MWRLRWSKTGQPDEHSSSIQQFF

SEQ ID NO: 129832 - protein, 284 aa, Heterodera glycines
LLHQRCWEYDGSSGRLSPGILRNFHGAKGYVDGIDDKENPRPGIECCAARGTGAKSVTPTTTCCYWECEIHRMLERSKEMRKAFEDYVDDGPLVIRDAFMGGRTGPVKLLRKAGPGERISYYDFTSLYPYINFTTCYPIGTPKVHVLNHEVEWRSAADNPYPLALLKVWVVPPRRVDVPVLPVKVGERLCFPLCISSAKEHPTGGVDNDYHCEHNDRQRGWVSTCTSIELNEALDVGYLVTKVFRVLEYCPRVRRAVQHHHRPNQNGGQQREAVPGQVVFEQLM

SEQ ID NO: 129833 - protein, 190 aa, Heterodera glycines
MVLVSTFCAQLLNCPVKSLRDRLNHPEDRALVLKHIIGRKVRTTYNDRNGLTKTFFVTGISAQGAAFLPAYGQLRNPFNINVAAHFYARHRIKLHFPYAPCIIERFSGGGEDRHNPMELLELIDDNMDMDINNNEHWLGRLFTEIDDKQSSSNSSDTTMRLVFEGDMDEDSGRNECSQSTVPYISFVFAH

SEQ ID NO: 129834 - protein, 118 aa, Heterodera glycines
MKRRVAPLTAAAVSAEQHQIIGSESPKPHEETTKNVEPKDELATKKRKVDDRELWKLAKGKFLLTTYLCHDDWNRLYNNQQKVKRLEGDRFAFGFEMCEECVWANCRATDLLAPMKKK

SEQ ID NO: 129835 - protein, 99 aa, Heterodera glycines
MWPPIIRSLKGERSYRVKAVLATYTHSTKRIGYYVDWLLCNLLGRDPATVLKIDDLNISFAPSLNVQDIPYKKAIAQLGEFVKNCLEAPAPEQSDSEDE

SEQ ID NO: 129836 - protein, 73 aa, Heterodera glycines
MSSATEKILLFLFVVAQRIGDMVKGRPIEAVGSAEVVQKQFDAAAPVNLFTCGAHRFDYVRQSTPAAGSAPRA

SEQ ID NO: 129837 - protein, 288 aa, Heterodera glycines
MPPKRRRCCLNQSCEDCRRKQAIKAIEADNIRAKACQGEHDPACVVNLRITNPELHREAYDGMDAVVERITDGPIDVHCPDCDLVYSHYAVKWIGSERDWHGLGPGVTIVGTNQLDSNDVREFETEKREREKEVHDGLMLGRVNENIDLLNQINEFEDFAADPGRMAKKIVFELEEEEEREEEQEEEREEEQEEEREEEQEEEREEEQDEEGEEEQVGTSSDVGNKKRRKKKKKRSRGGKGFRDWMNKEKEKEASASGNDAGGEEDENSHAVSITSSTAKKAIMDFAL

SEQ ID NO: 129838 - protein, 96 aa, Heterodera glycines
DAPSGDPFAADPPRHPALIVNMQKPFNAETPPSLLIDSFLTPKELFFVRNHMAVPRTNEETHKVRIDGIGHRGAVESVTGTKPDGFKGLLPVHQCE

SEQ ID NO: 129839 - protein, 65 aa, Heterodera glycines
MHQQKQRQKKEKKKKQQQQNVKIITTAAAMHLTTAHFTAHPSLALGFLTRDLAEYEDLVHRLKKK

SEQ ID NO: 129840 - protein, 74 aa, Heterodera glycines
MRQLSTVCLKNQVTVTGSFVQIQYPMTHFLDTKIDVNGAVPSISDGNVEEIKILKNCVFAFDPLFVRLSKMNNQ

SEQ ID NO: 129841 - protein, 29 aa, Heterodera glycines
MAISFFEKFSMQQTLSNMKRSAKNGYLFF

SEQ ID NO: 129842 - protein, 29 aa, Heterodera glycines
MAISFFEKFSMQQTLSNMKRSAKNGYLFF

SEQ ID NO: 129843 - protein, 29 aa, Heterodera glycines
MAISFFEKFSMQQTLSNMKRSAKNGYLFF

SEQ ID NO: 129844 - protein, 29 aa, Heterodera glycines
MAISFFEKFSMQQTLSNMKRSAKNGYLFF

SEQ ID NO: 129845 - protein, 73 aa, Heterodera glycines
MSRIYVGHIPYEARERDVERFFKGYGRIRDILIKRGYAFVELDDPRDADDAVYDLNGRSMMGWRVVFHFDREF

SEQ ID NO: 129846 - protein, 147 aa, Heterodera glycines
MPCGENNISLSLHNFVSSARIETGIRPLERAARALQEVKKLFEFLQFCFHNFRKLFGIIMPKQNEIVLKYSFLDLTWFLDIEAVFYAISKTKKCLVVKTIFHISLHNFVSSARIETGIRPLERAARALQEGMERKNSYFWDFFRNQN

SEQ ID NO: 129847 - protein, 156 aa, Heterodera glycines
MVEMGTEIQTSRNELKSFQEEVDKAKNITLEHVEKNDMKEAKKSADVAKGIARQAKTKYTSTLEEYNDKSEKGFSGMVVRLNEALEAEKGPQKRERLANEDVQFNYDSIDQKFIVYLSSAVTHIDLSKHLAYVLGFKNTRLFHAEEATYMPDLTGG

SEQ ID NO: 129848 - protein, 56 aa, Heterodera glycines
MNFLFLFLINASAIKHVLGNDSICGENEVYKADFENMLIKLIDINGSSAELEKEFG

SEQ ID NO: 129849 - protein, 104 aa, Heterodera glycines
AKIELLRSIEADLKAERKLREERKKQSQERERKQLEEQQQLEEGGASGGDAGGVDKMPPPPPPPRQLEAAGGGGNDGIIGGGGGGEGGGVADEMPSKKERNLHR

SEQ ID NO: 129850 - protein, 114 aa, Heterodera glycines
MPPISRAIGACVHRPPITLRSNCSVWTGSHVSSRATTLSRSSMAIWPIRVKLDNKIYKFKFVALEKLAYFWPRFCCGLPTESMFTEVKGHEVIIIASAVQKGNYSVGLTYSITE

SEQ ID NO: 129851 - protein, 69 aa, Heterodera glycines
MSKFVIIARFLLPIVLLLISSRPVSASYQDDLDDDDEEVDYMAGYTEEQKKCCTDWLQAVQKLFPRMLH

SEQ ID NO: 129852 - protein, 87 aa, Heterodera glycines
IIFIQKIFFWVFGAVPLNRCAQIYGETESFRNSFTIACTLILRWIFAPHNCLSTPNGHLKKSIYFCFRGSPPEPMRPDLWGDRILPE

SEQ ID NO: 129853 - protein, 41 aa, Heterodera glycines
MNSLPFLSLWLLIGTLLLLTAFVANCQNLFQPSQVSLGSEK

SEQ ID NO: 129854 - protein, 208 aa, Heterodera glycines
MLVAVQRHSLLLQLLPCLRWFNESALVELFFSTLLGSIPIETVIPFILNTNLPLNKLDEQCDGKNSANTDATTTTTTTTTAEATMSEQNGGANGTPENGDEQHGDRADVAVEQHRAVQPAGAGQGLPSAAVAVAAAAVAELLSLNSPAGHRKEKHVKVEQSEAVDSNDDDKRDGCAVEDDYQQRDKHNYEHEKEEKQGQQESKQYQQH

SEQ ID NO: 129855 - protein, 470 aa, Heterodera glycines
MEFLNDHTQAREDIERMEESNRQNRNFPSNRPPQNRVQRQYYPNFPHNQMKPNPRNQQTSTPFPYTSAFTTKSKPVRLAQFKPNPTQNRTQNKTFCRFCERENHASKECKIYSTPEKRNERVRELKLCLNCLNKGHMANECKSTYLCFNCKYKHNTLLCTRKQTQYKPKEQKTRVNMAKNYENHEETQTFMTMDYDKNLSNYEEEELLMTAEVNCINPDKHKVKKEIILFDNGSQKSYITEECAQSLQLTTIEEKLLAISTFNQNKPKIIKSRLVKVGIKTLKGEVEYITLQTVEKITDVTKMVNKENVDVLGVKIPISHASPQILIGIDHYWHFMLPNSQIQLLPSGFYSINTKLGKILSGKGTIEDTNCNSVTEKRKKDETNQILQKFWELENIGIIDSPHMTDEDAAMIHFDKNVTFKNNRYHVRWPYKRENPNLPTNFGLCMGRLRNVVKQLIKNNQFTNYDKILQ

SEQ ID NO: 129856 - protein, 207 aa, Heterodera glycines
MTFQNVPSSLCQERMIDAQPLPIIFGHSIGGPSSSTSGGTNCGSVGRRVSNAGGKRRSAGTNNNGTGTNHQHLRHSLSAMLNISSSSVSSVDSSSSLLLFPPLSASSHSVSGSSPAKQQRRHHQQQAASSSTANCCANADDGMGDDKMEDHQNGNKLLAKMVVDGQQQQTNHANGKGTAKREADEQMEEEEGSSNGGEGPHEAAKRP

SEQ ID NO: 129857 - protein, 205 aa, Heterodera glycines
MNEMAELKAIINRLSAIEKLISTNNNNTLATEMTAQFSAIADRLGEIERKLNNNNNGIGSAEDKERKRSLVLIGLPESEEEVPSLRAKDDAKTVEEVLDRLDVEVCPQMVYRMGRRSDEKRKGPRLVKVVLPASTFQRFALMQWGRRRTELKKRAGWERLLVRPSLTKEELEIEREQRQKKWMEFGQKKTDENITTRRGGNEKNF

SEQ ID NO: 129858 - protein, 84 aa, Heterodera glycines
MPGQSFQNRIIQLVAESQGRRERSASNTKLRWQTEARQMSNKERTIARGSDHWSVEGQSISDGQQQQNGRETFAGELLANGLIN

SEQ ID NO: 129859 - protein, 78 aa, Heterodera glycines
MLQTRLCFYLSDQLNDSILEALARHFLITNFSGIVSVTLRQNKLVCLELVGIPLLTSNALKAVNSNRLRSVDLSGCRK

SEQ ID NO: 129860 - protein, 683 aa, Heterodera glycines
MREPKRRTESRPDQSRHAEGTQNRDQFPRVFMVRSNPSSQRPITPGASALRTGTHAPHRKVADRNRNRLAQSRGPAPTDNGCSLCQNWGHRPSNCPTYPTFQERRQRFFEQRRCLRCLSSDHIASCCPRPKACRWCQRDDHHSLVCWVGPGKPIAIREPAGPETREHIGSKPVESVMMVQTVLNSESNSRPPEARAKAKRKRPKRRRSHLTKQSENQGERSPGTDLRAFTAMGESLPAFLMVCPVIAANDDTTRQCRTVLLMDPGSQVDYAQTILTKQLELPNAGSSPLVVQVFGGSKKKVPSAKHRVKLKRLDGGWEQLEVSSVPNVCTPIHTKLVEPGTHPGLLKPMDATVQPQIVIGIRKFWDLVIGFKKSAEGAFLVDTVFGTVLCGEHFGAPLGQSVPRDTILMAISGEENRWNRMPASSGVEAADKSKPSIYENDRLGIGPLNPTPKNPRDRKDPPHVQPEKRCRVEQQRTKCELPESDQDGTTEPCERGLSQCLLGASLLWKVMTWVTRHPIRVFNRLTGGDIPEPTADQVKGQERVQLARRARAAARAWRNAERGRASRPGAAMALLPLLCFVALFSSSEPMSVMLRSEDCASTPSGFKCSGSAAMIIGPEVGELRDSVNGITPKGIGPLCLFLQWEGGISTVARLGPPRRRPQCRESDERKRMGFGWPGLFPAD

SEQ ID NO: 129861 - protein, 150 aa, Heterodera glycines
MTTKTAKDEKLRNANKKWARQIDKITQKDEMGKPMVRQSEEKKQLQKGIGILKLTQKAFIKVPLILVDDESTSEGINCLNSEISEKFLQNFFSVSNRIFFCHGFGVVSASDLKERLRWIIRDNALLALENAHPQLMHFGGKSPIWTCGIS

SEQ ID NO: 129862 - protein, 170 aa, Heterodera glycines
MQKACISPVSTLLNEVELARIFNETKCKVVFCADSLLERILATRPLCPHLKYVVLISTTNCQSAVSLPNSQFQSVFHWSDAVGSSNSVDLSRPLPKIDVEKDVMFMPFSSGTTGLQKGVMLSHRNVKVAFLVPPILVLLAKSAAPSRYDLSSLKLIMTGAAPVGTDLLDK

SEQ ID NO: 129863 - protein, 31 aa, Heterodera glycines
FLFSEFVAFKIERLRNLFAVQLHFVIRPFVS

SEQ ID NO: 129864 - protein, 54 aa, Heterodera glycines
MGLQGDSFALFIMVSQLFFRLISCKQTAIEFMAPADIKSQTNNEQEDDDFGYAK

SEQ ID NO: 129865 - protein, 78 aa, Heterodera glycines
MFNASTTAGGDECGTNGKMKIQISFTNRTIIVENENFMFKRPYTVYAFIILIIFSPFTKLRSYINVHEIIMRAITQLK

SEQ ID NO: 129866 - protein, 84 aa, Heterodera glycines
MINTGDGGALTVLKDEKAMTYYGIGEGATVLLFTQFEIAVKYKKDNAEKMCTVRMKGTDLVAELRDKIVEEMKNVFPLIVYNSI

SEQ ID NO: 129867 - protein, 217 aa, Heterodera glycines
MAMLSFVFSIGILTWTYDYMVGNDHLNLSLINAEEIFQIQQFLDGNLSDFVLYCGQNDYFLGQITMGLYFVENIICYAVIVICGYKMARFVYKNLDKSSARRQQINRQITINLILQAFIPLAMNLINLIISVEMVIFEFQLSPSFMFIQMCITLPFHWLPVLNPLVSILCVGDYRNAVANFIRHTICRRQNAVAQQQILMNNLRNNNRNAQLPIVLS

SEQ ID NO: 129868 - protein, 120 aa, Heterodera glycines
MVAKSKVFGQIKGNSPAEQLQSLRRIALDTGLPEKENICRKCNRRGPIESQCDKIRAYHQNKGQNFNTNTVMLPAAYINSVHSSNLLKAPINVHGITIGFILDSGAVIIIINEDDYNAMG

SEQ ID NO: 129869 - protein, 72 aa, Heterodera glycines
MCCKNSSFTHTIGHVTEAIIKLMKKLNAEKLMSLCPKVVRQSNALRLTSAAKRTCAIVTSEWAKCQHKIIIN

SEQ ID NO: 129870 - protein, 63 aa, Heterodera glycines
MFLLLSQIFLLSFACQMSAKNLSNLHEMAKCHLGYDISVYNGHGCWCAVNDGIKKKSVDAIDE

SEQ ID NO: 129871 - protein, 425 aa, Heterodera glycines
MTAPIQALIRGCASKLGALLGTEIPPDLGINALPNQCQRRLYKFRNLLNDLERVVQKIEDNLGLANEYIGKLSRDNAIRKETEMQELMQELQINEKQKAADVLIPILRDKIEALEEKLDITHNTDGDTTSGIGPLSRSVPMRKNLPKTELKRFDGSPSQWIPFWDYFRTIIHEDSHVPKIDKFSYLDSCIEGKASAIIQGIPISESGYDDAIDLLLKTYGETKRLIRTLNRELMSLPISESFEDDESLYLKSEKIFRQLISMNQNVEDGMYYSNLEGKMSPEVLDKYCVIKDAEDNDDWDTSKFRNAFSRALDQIKHRQELRKNVIEPKRDKHELTMSFTAFSKNDKYQGRNKFPQRNSDQSHPRGRKFEPRKFRDQRHDNSDSSVSHSPMRDRRNSPYPKRDWSSSPEREKWKKDEQRKCQLCQ

SEQ ID NO: 129872 - protein, 100 aa, Heterodera glycines
MDHIYYGVRLGGAAEQTPNWPRKRTITPKCACSGKSKFFPVLPGPGFFSHLTWILISWTKIQENPGPGKIQVAEKWPGPGPGSRKNPGLDLGQGRSLIII

SEQ ID NO: 129873 - protein, 360 aa, Heterodera glycines
MKRRVHVGTCFSPLFLAEHWQLVVLAIEIYRHYGIQLQVVYLMSAVEGLYKILKAYSSKEHIQLEPWASIEIDGQIDKEMNLELDWRNQATAHTDCLLKYGYSAEFLIVGDMDDILIPDDKEYYAEFIRNDYRHKKNAVALLYQRYTVDIVTTQNSSKFSLFDALTSAKVAFYQPDDPKYVVNTSRAESLWIHWPVIIKPNTATRLVPSMEGRMLHFRNWHFLEDENDILASENYMHRKVKNAALWRSVALNESFLSTKTARQISRRFKSDIFKRNFGTFLKLPTKRMYAEMMAKCYDKIFYLHDKQVTDCPGKTLDDFCRYQGDKNHCLDGVIPCLYKNDECVPNHKLDGVTISSSVWI

SEQ ID NO: 129874 - protein, 68 aa, Heterodera glycines
MVIFGTVSFPFSSVCLLQNLRETVVKCLNWQSVIAGTDFPRNAKAENSQWIHFGVFFQLPSPLLFVLP

SEQ ID NO: 129875 - protein, 127 aa, Heterodera glycines
MHEFWRCKIKCPYCPARITVSRIWQQNEQGKRFKMGHYNNENHNHPPRTGNIMVRNAEDRLRQEARQANPMRTRDIVAEVRSSIPVGVRVAVESGTPSSSAMVRAFNWHKSNARRLQGDEGLDLDGS

SEQ ID NO: 129876 - protein, 218 aa, Heterodera glycines
MENQNTLKKGEEAEEEAVNSEMGIFKKEEGNKKAKEKEEKGEKEREKEEEEKEKEEEEKKKREEKREKEREKEEEEKGKKEEKEEQMEKEIEQEEDEKGKEHNEKLEEMKREEGPSKGVRFMERTETEGTQEMERLEEYERKLRRNTKEALELVDRLCELQRGQTAPSEAISGKIMAISNANWTMINANGDINTNCDARLMPNFDSIRLAPSDATIKK

SEQ ID NO: 129877 - protein, 260 aa, Heterodera glycines
MTAHIVQKHPQYAAKLLAKQLEFGDHHSEQPGNTMPKVEEGQFPVPNSASSLAATGIANTSSNDNGTEKEALSGTEEGASLCHSRGYGTETPFSTIVPSSPSVSISNFEWVEDIQIGDLPNQNESFARVPSPATPPPLAPSAQSKDIPFDATFEHFRVPPPATPPLSSSSSVLTMNTTAAEDSSNCSTIFSTTTTPKADAIDNENSANCYLDRFGKEWRLLVEAAADVKQLDQIAGEHCLNRKGPTKNDGRIYFKWVAMS

SEQ ID NO: 129878 - protein, 31 aa, Heterodera glycines
LSLFLLLLFINYLNFIKYVKINFSKIWDIKS

SEQ ID NO: 129879 - protein, 32 aa, Heterodera glycines
MAIRTVVAVENTAEATIPEKDGQLFDASTKPR

SEQ ID NO: 129880 - protein, 126 aa, Heterodera glycines
MGRKNLKTSKSLRPLENINDSVGKIGEDLEDEELEEADDNESLEDEIGAESGEGLDECRVFGQNSGPGYFRVQKSRVQVFKPGTGGTESGRGTESGRESGRGTESGRGTESGRETESGRDTEREEK

SEQ ID NO: 129881 - protein, 72 aa, Heterodera glycines
MSSRRGGGNNVEGKVYVDGLPEDATSEELDDVFHKFGRIRKIWVARRPPGFAFVEFEDTRDAQDAVRSLDGT

SEQ ID NO: 129882 - protein, 165 aa, Heterodera glycines
MPRPLFPLPFPSSASPPLSAIPRVRFLTLSLSFVSVVFFLLTLAFSVLILTNINALHTEVMVDIEQFKVNLGKVRIVSELCPMAKGVVSKAWDGMVELQAADGGQNNGKSAGKENAQTTIDRQKRQYGTMPSYSSAYVNKQQTSKPGEPGQPGEGGAEQLHSKMI

SEQ ID NO: 129883 - protein, 325 aa, Heterodera glycines
RYAILCQTWPQWHGEPKKGCELICRSAELADTEFRKGCELICRSAELADTEFRLGHTKIFVKNPESLFLLEEGRERKFDAFARVIQRAFRRFTAKKHLTKQKEAVSLLQGRKERCRFSMERRFVADYIGMDQRPYIGMDQRPGLQAIIGRRERLYFAAAVVKFDRRFRASRIDLLLTAKYLFLVGRKASRIDLLLTAKYLFLVGRKPLKSGVNKGKLVEVVKRQIPLQIPLTQLQAVTVSTLQDDLVLLSVADSYCSLVETPLKTELLAALQKTQLKTNGRLMVVTVLKGLPSESSQFFWGGGFIRPRHQSSLLIPFILIFKFRI

SEQ ID NO: 129884 - protein, 46 aa, Heterodera glycines
INKKHCQRQCLPKKRQKNFRKKAKKIENLNKFTSEKRKKSLQHLRF

SEQ ID NO: 129885 - protein, 53 aa, Heterodera glycines
LFFENFFVFFSAGTASDNVFYLFRKINFFFFLIYFNYISSLNFLINIFKLSPY

SEQ ID NO: 129886 - protein, 23 aa, Heterodera glycines
WYGRKRKESHESNLIGIFKRAYF

SEQ ID NO: 129887 - protein, 160 aa, Heterodera glycines
MAFPCPPLAFPLLFIFLLSLSSVGTVPLMGSADLVHLPREHQSTQRIQRLKTALNENEAKREGLTRIREPFGPDKPYCLKVGLPFCLNALNTIPQIQFDEKGLCYASPLTREVPPLPTYEDACKMLSLAEIMANCGENKGRKEQSECIENKGKQQKNEKV

SEQ ID NO: 129888 - protein, 431 aa, Heterodera glycines
FYNEELSSPQMPINYQVMKQGTDYSVHGCKAKAERNPIYRWTVGKGAINKFEFAGHDNSLMATAGQDGFLRVFNWKTMDLVGFFKSYFGGLLCLAWSPDNLYIATGGEDDLLTVYSLAERNAFQNGHHFPSGHEESVSSAPQIGHLPFANCDDLRTTNANSLQLLPNGKVTHRNGSSDDANDVSHCQPQLLYRVGTVGHDCQAFCAFGTFPKTFWLLRPFPNITSTKSPFLLHPQTLQMFPLEIPRSFPLASQMHCPQPKLIKQHGNSSNGANSNESTLKRGENYAQFLGTVQCPRLEDVPMIEPLMCKKVVVFRFAAIGVSVPFRLHTKDSALCSSARIASVVNFNLAEFYSNFCCLSDCLSGGNHLHLGSTEYIGETSERPGATTKSWDRTKTVTPFPGKTAMGRAFDRHVKQANSTPGTVIESIHSYN

SEQ ID NO: 129889 - protein, 74 aa, Heterodera glycines
  unsure (1)..(74): unsure at all Xaa locations
KTFGHXTKSXMDXPQXNEILPGTVHHLLLKKVGVLRRSFVCHLFQANVALFAYSFCFGYLSIVFVNIFFIKNKF

SEQ ID NO: 129890 - protein, 368 aa, Heterodera glycines
LGRLRRRKPSEGRSNKVPRKMQKKALRKVGKCPIVYSEDYNISFFGIEKCHPFDSNKWGNVFRFLIASGALVESGALVESAVLRPIEAKKEHLLLVHSKKYLRSLNGRFTLTRILEVGLVLLFPICLIDRRILRPMRFQTQTGGTVLAARVSLIRGWAINIGGGFHHASEGKGGGFCVYADVTLAIKLLFANELIKSAMIVSVDVDAHQGNGHETDFASDSRGNGHETDFASDSRVYILDLFNASIYPGDSDALKSVSSVSRAVPLPFGAEDDFYLRRLEMELDAAFADFSVPDFLLFVAGTDSLIGDPLGGLSLSPKAIFRRDEIVFGAAIRRRVPITMVTSGGYTNRSAKVIADSILNLNQKGLIQ

SEQ ID NO: 129891 - protein, 162 aa, Heterodera glycines
ASVSGLALPKLNELEIRLLTSLRWDVSIQSEDFEKVLARLEGFVASEMAQQNGVMSYNELCILSNTHGFNRSILCLLTVLLKFLFVLLAFHLALLAGLSVLNMAVSRKQELAASDACIYHHGWDDCSHPPILLANERKIDANLTKVVHKDDFFAFVHAFSIS

SEQ ID NO: 129892 - protein, 29 aa, Heterodera glycines
MAISFFEKFSMQQTLSNMKRSAKNGYLFF

SEQ ID NO: 129893 - protein, 29 aa, Heterodera glycines
MAISFFEKFSMQQTLSNMKRSAKNGYLFF

SEQ ID NO: 129894 - protein, 29 aa, Heterodera glycines
MAISFFEKFSMQQTLSNMKRSAKNGYLFF

SEQ ID NO: 129895 - protein, 350 aa, Heterodera glycines
MQIFSCAVCNAKCGISSSQQLLPFLDPELHILTASSPFADCGNFCYHYLQLSQGNWIKIDTRTATIQKIDSSSIGDPRSLGRQIFVGNHAASFSSMDDRQRTRRRAIRALGRMAAFGSMEVEGEGAQNGACAHTRSSPERVIGLTEEWFRDKLRLLVSYWTTACFIYVTFILGRDVLIPLVWVYLMGPVIVTIRNLVTGNQWTQRNRATRGTRRAPAISRIEAIELVPPPMPQEMRANETASSQQEEPELSPLVMELKRQMIAFRSKRRFQSRRNVATERQPRMSRRSFDGKRRICGRSNSPGPFPPFSPVMCPPFVPFFLCIYPSHFVPIDTIPHPLLYFSHIYYFIYR

SEQ ID NO: 129896 - protein, 46 aa, Heterodera glycines
NFFIWTSLFVTRNHYFGDFVTKIVKNHYFGVLSLFFHYFNIFWKIP

SEQ ID NO: 129897 - protein, 26 aa, Heterodera glycines
GRFAPVSKFVGLLRPLRGLRRALRAR

SEQ ID NO: 129898 - protein, 273 aa, Heterodera glycines
QRSQVLSLDNGCMDYSTIIHECMDYSTIIHEIMHVVGIMHVVGFYHEHERWDRDFYRWDRDFYIDIIWQNIDKSALDQFGKIDLTKTSYYGQPYDYKSILHYDSLAFSKNGFPTDSLAFSKNGFPTMLPKKGAATIGNAKDFSEIATIGNAKDFSEIDLAKINDLAKINRMYGCDAMATTDTRRNLPLPAKAPQRHKSPTFSGTKDGTLPQMPIGQVPFGDEKSHLDRGQSEHGQSEFGKGQCWRFLPFKAACARAVCWSSKDRCHATNLQHV

SEQ ID NO: 129899 - protein, 87 aa, Heterodera glycines
MAQAAGIASTRALHRQENSKKWPWKTDKRFWPSSTEKRQGILRHQQLPKRGGQGEKLAETNANAQRQKIFGEKAMETMPLTGQKQWP

SEQ ID NO: 129900 - protein, 349 aa, Heterodera glycines
LDKYEKIGKIGEGSYGVVFKCRNRDTGELVAIKKFFESEDDPAIRKLVAIKKFFESEDDPAIRKIALREIRMLRQLKHPNLVNLIEVFKRNRKLHLVFEHCDRTVLDDLERFPSGCPESLTKRLIFQLFSAIRFCCPESLTKRLIFQLFSAIRFCHSRNCIHRDIKPENILLTSNDVVKLGDFGFARIMSVNEIYTDYVATRWYRAPELLVGDTHYGSPVDIWAVGCVFAEMLTGEPIWPGRSDSDVDQLYLIIRTMGKAAITTAASKITSQQMKIFHNNAKITSQQMKIFHNNAYFRGISIPEPEEHIGAPINFKNEFGIFNRCVEMDPKMRWSAEELLDHEYFRSSE

SEQ ID NO: 129901 - protein, 96 aa, Heterodera glycines
LQSQNLADVLTTITDCARFIREYPFPGFVHNVLFKLAQAFQGELFGRKFEQSLNAIRLRIVTAIRECSGVNLGVTIPSEDIVRCIMKVSHSNDYKA

SEQ ID NO: 129902 - protein, 77 aa, Heterodera glycines
MAVQIAQLADERKKYKKKCDELEKQLKQQQKQHQQEKEKGNNDKKALKIFKEGNGIGKTEKSCGTSSADHQQQQKVN

SEQ ID NO: 129903 - protein, 67 aa, Heterodera glycines
MFIAKKEMELINSEQRRQISKLEIENRAFGEELKRQKMISFALELENNKMMMEKKQKQKEEMAKAKY

SEQ ID NO: 129904 - protein, 60 aa, Heterodera glycines
MHHHPPNHEKAINLSILTVSGPALQPYFPRKRKTFVSGKLPTRANKSVGGSLVGIVYGQN

SEQ ID NO: 129905 - protein, 142 aa, Heterodera glycines
CVSLTCHAWPFLVRGAICLVYSDNERDSSLLNSWLIASGHNFLEGFSVFSRTKLSNNRSVMPLDVRGCTRATLAKSACLPSPKGVGKPVKICRDWDRTLQLLSVNEEFLVGASHQLALNTSLPFVHTARRCPGLSHFEKFGD

SEQ ID NO: 129906 - protein, 155 aa, Heterodera glycines
MRKAKCETPKNANNAKGEMRKAKHRPIPARHFPFGVLSKDEVIAVYQFKSLPNCHGISDGIFPMPFSTNGRISDRKKGTLLMDIEKVSEFAREEVESSRYSEKVYINGLPWKILAQIKMKNGGTDNEKWLGFYLWCYAPKEGAKLLIINIYINNN

SEQ ID NO: 129907 - protein, 349 aa, Heterodera glycines
MNFNPLYTIDYENYFQLFLENLLNIQNEAKQNLDEYRKRSKDWYDAKPQVKANKFEISERVMVAFPGMHRNSRHKKLLWNHFGPYTITKISESSAELVPVDKTAADPITVPLERLIKVPKAVPDIATLPRGKNPYKNVLNAMIFMISAQLNFENMPKRATENWQLGTIAKECVGADKYGKEKSSAKILRVNCLNLKLKVKRERKANFSGQTQTDAGICWTSVCSQKDAEHELCTTLKLGELDPVLGQSGPGAMIVQSPLQALLAVFLLRSGTVTSNTAARTFVEMIIKSGPQMEMATYSEKRGDYVGTGKFPQENDQVKALEKCVEMCFVARAALSATGYKPLAMAPPN

SEQ ID NO: 129908 - protein, 39 aa, Heterodera glycines
MRVDFKYALAIQVRIHAMRSTFKSKTRFRAFERASIGFN

SEQ ID NO: 129909 - protein, 23 aa, Heterodera glycines
MDVDEHQPPWKKLSVNTVDNLTL

SEQ ID NO: 129910 - protein, 59 aa, Heterodera glycines
MANSGEHSSRRQQQQQRHPNTTAENNSDIEGTAHRVASVTLNTESDSRTSADLPAYPFR

SEQ ID NO: 129911 - protein, 49 aa, Heterodera glycines
MFSRQMLKGYYAKRGYNFDIRTLFDGIDKRIDACAKGFNEDPVVLYESN

SEQ ID NO: 129912 - protein, 102 aa, Heterodera glycines
MALTRLHHFTKALVTEANALSKGGSSSIVLGHSAEFERCIHSMLVMAQVFAPCLATEQWAKYQAVPKLNDQLQRQAEKPINENEWPTVDEDDGDVVHEAEMK

SEQ ID NO: 129913 - protein, 172 aa, Heterodera glycines
MSWVWKSRIWMSWVLDIWMDELGTGYMDELGMEDDTFFDSSWYYLRYLDPHNSNAPFDPDIVSKHMPVDIYIGGMEHAKVHLFYARFIYHFLHELGMVPSREPFAHFIQLGVVRAPTYKLPDGRYVPDSEDPMGVIDSYGLDETRMQLLIEARPNYQIDWPYPYPTFRMLAS

SEQ ID NO: 129914 - protein, 146 aa, Heterodera glycines
MRIQLSKTGVNFDWNRRLLDGLSSLEAEWGGVVGTQADWIGTCDVHRFLLQTEHSSGHGVEQQQFDLRLTDPTQLGTAQFVVITTEHSLAEEAAKHGKLSHNEPFTISEPKGVFVCPPDVAARRKHACPRQIYAKIGDFTTKGKSF

SEQ ID NO: 129915 - protein, 66 aa, Heterodera glycines
MAAPKVRFMTKIYHPNIDKLGRICLDILKDKWSPALQIRTVLLSIQALLSAPNPDDPLATFVLNEF

SEQ ID NO: 129916 - protein, 129 aa, Heterodera glycines
MALIMKPTFLMLISTCIIALVYASAEYDECEVCTDLFTEVMKKVDESGEKGEPAVKKMIIEHCKSVKGVDDKKEKLCFFIGAHPDSSTSVLGDIAKPLSFHKPPNKGCTEKVDYITRINELKPKPKGEL

SEQ ID NO: 129917 - protein, 162 aa, Heterodera glycines
DKKWYLEPVVIALSAGFLPFGSIFIEMYFIFTSFWAYKIYYVYGFMLLVALILIVVTACVSCVSIVGTYFLLNAEDYRWRWTSFASGRWTSFASGASVAFYTYNYAFYYYFFKTKMYGLFQTSFYFAYMLLFALALGLLCGTVGYVSSASFVHKIYSRIKLD

SEQ ID NO: 129918 - protein, 69 aa, Heterodera glycines
MVPRIGLVHGRGQTPKKWGTLIINEFRYLLYVKKHIKQYKEKESYAYVMQTFMCYRSFAYQCQPKGKSL

SEQ ID NO: 129919 - protein, 1327 aa, Heterodera glycines
MAQQQQDNKIKSAKGPGAYSQEMSWDSWAERFDFFIKLRGITDPEMKKLLLFTEIGPIYDELRMMAQPDDIRDMDFAEITALMCERYGEAKSIAARRHELFTARQHSGQSIRDFSIQLRSLIAKTEWGKDSIDMCLSALFVNGIVDDSIRAELIKKGDKDLKFKDAVELAVVLEQSNVDAQAIGSDSLKSLKGNVAKISGRGGGYDRAKGTNNSKSADSKPCYRCGRSGHWANICPGKADKCTKCGRVGHWAIVCRTNGGNKNPARVESRLWKSSNRVKQIQLQCDEKPPVISSLERESAKTETVPPSFIQLKVHKGNAEFELDSGADVTIIGSQDWSHIGKPELKESQGLLAYGGIPIKGVLGMANVNVEYNGMQINTDIYVVKGNKRNLCGRDLIRGLRIDLNKAFGINAIQIGSTNNDQKEVDKILEKFQEVFRDELGRCTRQISLKFKPGVQPKRCKARPVPFALKAEVEKILDQWVQQGVLEPTNNSDWATPLVIVPKPNGKIRLCCDYKVTVNQWLDVHQYPLPRPDDLFSVLNGGQKFSKVDLKDAYLQLMLDDEAKKCLAVCTHKGLFQFTRLPFGVASAPAIFQQVMDEILQGIEGVAVYLDDILITAPTQAEHLCRITQVLERLKANGLRVKRDKCEFMRESIEYLGHRVDKNGVHASEEKLEAIRKMPPPQNLKELQSFLGMVNYYGKFVPAMATVSEPLNQLRRMEEKNFVITEVLVHYDPGQPLYLATDASDYGVGAVLFHKSQQNGKEGVIIAYASRTLNAAERNYSQIEKEGRGIIFGVEKFKQFLYGRKFVLQTDHEPLKKIFGPKSEIPVVAARRLHRWSLILMNFDFDIEYCPTKEFGNADGLSRLPCPEIAKIDLDSAEVRAVQLENIDSLPVTAKSIASETAKDQILKKVKEFIEIGWPKKVESDQLKPFEPNKNSLELVNGCIMLGNRTVIPRKFHGKMLELLHATHSGIVRMKALARQKIWWPGIDKDIEMERKRCRNCQSDAPEERKVPLHPWETPDRVWQRLHMDFCGPFMGHMWLIIVDAKSKWPEVIKMKNITANATIEAIRIVFGTHGLPQQIVTDNGRQFASAEFENYCRSRGIEHTLTPPYHPKSNGLAERFVQTFKNGLRHMMGDSIGLDLAVSQFLLQYRVTPHASTEVSPAEMLFNRRLRTLLDLVQPNPQGNQPEMAKSKSGERMKRNYDKKAGKAKNFENGQPIFARNYHGGPKWIQGRILEKIGAAMFRVKTARGVWCRHFDQLKADLTSTADNRDQESESESEADAESDDEQQPQPIPIGSPRQEIRQKIAPEGGVPDQALRRSTRDRKKR

SEQ ID NO: 129920 - protein, 36 aa, Heterodera glycines
IARKDFRFPTFLGSEFRLPKFLMKSWKFFKFFFSKN

SEQ ID NO: 129921 - protein, 36 aa, Heterodera glycines
MGVQMGYIINLTELVTFVVSDLINLLQMTFLISTQN

SEQ ID NO: 129922 - protein, 32 aa, Heterodera glycines; identical to SEQ ID NO: 125422

SEQ ID NO: 129923 - protein, 367 aa, Heterodera glycines
MNRRWICGDVWMDILPSFDRPQLGLKMALISDRFDFLVDKHFDGKTELTIWRRIKIVKDEGPKAKLSVLIDDKCVAFPFPDHPLPNKIRFKDLQIYYVDHSVLAFLRSNKQIWDRSGIKLELFVPLYMTDVKLIWDVFTREIWPLFAKSIRHFGFHDGDYLDKLRRRISPTLLTDLDQLYSIDSGALFPDGIADDGPNGNAGQVLAKWLHTPTKNGQPKRLYRNNLLGPLNLEWVNNFKETFRRATTSVSYNIQLYFLVEPMPIESFELVNERTNEKLTLKQSKEYNLVNWLLQRCPIEETATAPVKWENRENSGANLNYIRFELRHDNNSGANLNNILFEVWGGNSCIGPLSLPAEEEEADESNEN

SEQ ID NO: 129924 - protein, 34 aa, Heterodera glycines
MEKSCKLWRDYIDYFLFISLFDSESIREPYLSFN

SEQ ID NO: 129925 - protein, 20 aa, Heterodera glycines
MHIMIFSRCSANMRNCIYFY

SEQ ID NO: 129926 - protein, 41 aa, Heterodera glycines
MVGKHNKETKRLKTNNSKLLYFFNKPCQRHAELRTNKWRLA

SEQ ID NO: 129927 - protein, 217 aa, Heterodera glycines
MFNGEQQNDGNDNGRVRGSTSAAAVVQQVPQGSNATSAAAAVMPMSFLDNNNINLPVAFSSGSDGSGGGGGALTVAGHMPWGLSTTGGGSGEGGSVQHLQNLVYMAGVPQSAGQAQAVTMTTAAAATWTANALPPHIRDAIERVHARQMQKMITVQPDFADILPPCADNGMSSLGWLMLDWQADMVMGCEFDEQQQHADHCGGGGTAAASCGQQHHS

SEQ ID NO: 129928 - protein, 395 aa, Heterodera glycines
ANLMSSSNTPIIVEAAEQQQHRAGGSTTASARPSSATGTTAIASSSHHSNMSITAAQQNTRGGGGSQDVRVAKNGNGNATDVHEQQSEDDGPNATAANLNSVGAQRVVDAEPEHDDDEEGTSETAWLSTARPPPPSCTPVGRPFCHRRRRRRLLHSISPPAGPSHGRRSSPPPQRACSISAQRNLHTVVQRINDLEAQVARDERNARERRQRARRQQLLLQQHQHMPLSSSSSPSPSPHHVANAAEADVITIDDVEPLGLAQQQQLHRGDARYFAHELMTLEDEAGAAEMIILDNEPLSVADREWLISTAFKMRQLPSSVKGSVEVDENGNSNISCCICRDWIVSDADSVVRLACQHFLHRKCFAQEAMRRSICPLCRRHFVTGETMPTNEDGGN

SEQ ID NO: 129929 - protein, 456 aa, Heterodera glycines
RCWVRAHSNSALPAHSGSSSASPCRSAPAGACRATPTCTRATHAEPPFAAAHPDAATPPATDGSVPGSPSQKKRSRRGFSPSNGSCCPTTPSSSAPMSTPLSSNNCSPMRAPASTVGAPPRHATLTARCSAQRLPSSSTPCAMHRSQITSAQTSTGTCFSNTAWSNAAGAASPSPMPPTSASSSSSPPSAGHSSATLATFAAAAAAAAPPAPGHTPHPKRTGPLCCRAAVAAADRVASAPSSSSPSDSLSSSSSSCSPASSAMPSPAPVRSNDSAKSGPKSAATPSPPTSTLPSPSFVPLLRSNGHTALMRNNTVPLNRSTPPADCAASRSNSAAIAAAEMSHSRSATESGSLSRMIISAAPASSSSVINSCAKYRASPLWSCCCCASPSGSTSSMVMTSASAALAPSSSSSCSGSASTTRCAPTLFKLAAVAFGPSSSLCCSCTSGRGSCLCCFS

SEQ ID NO: 129930 - protein, 492 aa, Heterodera glycines
MAAELERLAAQSAGGVDLFSGTVLFRISAVWPLERNSGTKEGEGRVEAKQYCVECERPVHRRSHPLGCRAVCGLCLRYDALHFPCRRDADTPQGGLFCAQCRFVFPNADCFATHRQCVDPPPALGLLGGGGGGGGAVVDRRRGRPYRSMCEERRLCAQCNVVVWARSGAHHCRRHPQQQQQQHVRAIATASTAAPMVPPAAAATVATVAAVGQQQQQQQQQHHCQKCGGPHDASRTPHFVQPKQFARQCQWQQPNTNGIADDAQGEQDEDEEDNESDGEEEEGADATRGQRQQQRRDNKAVRFIFWDVECAQERVVQQQQQQQQMLQERVADEWPAEGGDDYDDDADVGGIGDGEAAPAAFDHAVLLKHVPVLVCAEVICERCIAHGVELEREPLRRAPRCQCGVPWRGANRRRWCSRIGEQLFDDSGVDIGADELGVVGQQLPLDGLNPRRLRFFCDGEPGTGRGAMEQFVDFMLHTGPKGVRTVMLAHNG

SEQ ID NO: 129931 - protein, 103 aa, Heterodera glycines
MVEVSTNWWEIEAKSGYWPRETPNVGFDNMRRANVGHLVTEFALIYAKSKSCHLSLRDMRRAKFGHLVTEKAKVWPQGYEKRNSWPFCHRKCKSLPLRPLGQK

SEQ ID NO: 129932 - protein, 61 aa, Heterodera glycines
TIWSTPSGGRAARTTNAISSAPRVTRNGGEEQDKQKKRIKRWDWVKFWWYCARSGSLSIAL

SEQ ID NO: 129933 - protein, 46 aa, Heterodera glycines
ILGKTGTGTWGPEKPGPGPRFFFGTGNRDQPGNFKNSKKILKNQKI

SEQ ID NO: 129934 - protein, 205 aa, Heterodera glycines
MAAHHQHPHAVGAGGISAAGLLQQQLQQQQLQQQQQQQQQQQQLQNATNAVTAATQQHPMAAAFAAQAQLTAAAVAAAEASQQQQQHNASNNNSGNANNIGSGAMATVHTTLPTATIAGIPSANALQQQQQQHQQQVAAAAAAAAQHQQQQQQQLVVSSHQQQQQQQNNAVATQQQPPVQAVQPLQQQQTAIPSLAWPIFYVREN

SEQ ID NO: 129935 - protein, 50 aa, Heterodera glycines
MGSMEIKVPKHTLGHRPFVAQCLWHFVAAEEVPTVAAVAVLADFVNCKYF

SEQ ID NO: 129936 - protein, 76 aa, Heterodera glycines
MDSFLAFENLHDLAPEPHTKAIRSFHLFGVRLFECKGGLEHRVVEEYRDASEQFPSGNDARRRAFLALLRREPFYG

SEQ ID NO: 129937 - protein, 109 aa, Heterodera glycines
  unsure (1)..(109): unsure at all Xaa locations
RHFGHFLCQFISVLEENERIAEHNFPLARQPMARRIGRQNGRKAQNTLARIPRLHRRHFQMSTATIGRKGTEIIHLGCRLQPIVVGKHTKHKVTFAVRVKSMTAXATVH

SEQ ID NO: 129938 - protein, 150 aa, Heterodera glycines
YIDHSVIAFLRSNHQIFDKRGTNLYLWLPSSPLNMDTQRILDIFVREIWPIFSENIRHLGFSRRDHLDHLLRQISPTILIDLNQLVSIHSFDLLPAAIGDGFDGPISTISAGQALSKWLHSPRKDGQPKRLCCDNYNAQTNTDWINNFKE

SEQ ID NO: 129939 - protein, 163 aa, Heterodera glycines
MAIKASSISTVTSITSSSLLFGMFLFVKFGQFFRQIFATWAFTMVMIWTICVVSFHRQFSLIFRGMGYSEHFLRANAISSVSYEIHFSVHVPSMEMVPFELMNEWTNEKLTLAKAKENELDKSWIMKRCKFGKTAAVHWEDGKWDNNCNNVFFWLFSGTNCIG

SEQ ID NO: 129940 - protein, 28 aa, Heterodera glycines
VQEKNMDFHVNDSPNYYTNAFFNCSPNA

SEQ ID NO: 129941 - protein, 36 aa, Heterodera glycines
FVRFRPLTVQEKNMDFHVNDSPNYYTNAFFNWSPNA

SEQ ID NO: 129942 - protein, 108 aa, Heterodera glycines
MAVQRLTPTRKSSSVAKRPAFSSSKQPKGKAANPTKTSQTNELNRKMKAVSPTASGSGANHHCVATLARSSDSTTVIDKGSQQNCPNMSSATISKTPCQQHSSEKTLN

SEQ ID NO: 129943 - protein, 66 aa, Heterodera glycines
MDKALCALISSDRIIYNLKEYIIWTQRELLQDKMFDDETSSGLMRSMRANRGTLGTKIKYLFYIIE

SEQ ID NO: 129944 - protein, 208 aa, Heterodera glycines
MAFAEEQANGEAIVTLNFRSGRVCPYFHVCIYMLWTEMPINENAMNAEMPIEMNPLTRNGRSTWPVPYLQDAIPNDGLNKWIMFGNFFNLTIGPALETPDLFYHFRVFCDDDKLKSRMQKIDEEDKKVEKWTVSEEYDDYKFKSFTKGRTSTKVVFNSELRQKCDRYHIKVWATHKEWIRMDETAMTVGQVENEDLSNWEMRICPIGK

SEQ ID NO: 129945 - protein, 317 aa, Heterodera glycines
MGIVVALNGSLPNVRSVQLRMPNGQTVTRPISRLCPLETENQTPEPAPDATVSTPTDQSPRDAKNTEMSVNEMPPIPSLSGEPTISKHNGMLTRRKSRLFAIPPTTTMIIAIFVTHLWAQASPAQGIWPFDPDHPGPPPTSNCVGNHVNCTRKGVKISSNSAVQKVTICCSNACFDRLAASEISYELSSDLLVNEYVCSATFGLSSTRSCTAEIACPAVDECELIDCSICIDRPANWRCNPRLSLVLLLVIGSLISCLTGWIVCFCSSARVVLNRGYQIAAFLLSWPIRLAFFIAGRPWTREDRERVAERLELGVQR

SEQ ID NO: 129946 - protein, 97 aa, Heterodera glycines
MTTPLPDLKVARLESLPIKPPMDDIDESDEEDEGEEEQGEELKSKNGTEKEVVEDQQKTEEQKEKTEEKGGEKGTDECAEERDGEQQDEAEKADNEM

SEQ ID NO: 129947 - protein, 69 aa, Heterodera glycines
MDDIDESDEEDEGEEEQGEELKSKNGTEKEVVEDQQKTEEKGGEKGTDECAEERDGEQQDEAEKADNEM

SEQ ID NO: 129948 - protein, 222 aa, Heterodera glycines
YVQQAPEVIREFLSTKHLPVGSQSADMYSLGMVLYQILFKMEPFYERNLPLNKLLNKIAMAGDNLLNKIAMAGDNDQIIRPTFPNQNQIAANEEAYNLQLLSAIEACWLEAIEACWLEIPEMRPNIKRMKAIVIPEMRPNIKRMKAIVNANLRSTGSGSLVDQMMKMMEDGSGSLVDQMMKMMEDYTAYTANLEQLVKVNKWRFQLQKEVINFSFLKFFNKF

SEQ ID NO: 129949 - protein, 421 aa, Heterodera glycines
QLVITAHGYDKKFIEDFELRLNKVSPPLLLQYAILAYMSLYDALFLYGLAVRDAYEETKNQSVFLDGLYIWKKMTARQFIGATGQVLMNNKAIRVPSYATGQVLMNNKAIRVPSYATYHTKNGTMKIVVELTARLGDKLTMKIVVELTARLGDKLKCAMSENDCSEHVAHETMSHYYSVAHETMSHYYSTGDGSMPLDMPKCGFDGNLCDYTLIYILFGVILFLGVTIPLGYFLTIPLGYFLHKKEKERILYEMTWRIPREKVRLLEQHKKEKERILYEMTWRIPREKVRLLEQRSKKSMSIRSRSQESHSYDKSMSIRSRSQESHSYDESIGSESIGSKANSRLLAKQALANGVKCAFKRYQQNRSISFNKNDLSRLKELKNDLSRLKELKIMENENLNKAIGRKGGGGGGKIERGIMKR

SEQ ID NO: 129950 - protein, 569 aa, Heterodera glycines
LPLFGIVQQKLFNKTSHFNQHFLLPTPKLFLYLKFGHSPTRTVPSLTNRKCWKCEQRMNKQKKNKTNCQKLQVLQRHEREGHSPARNSATVRPISTKISLINVFRLFTMESCNRFSGVEYAAYLHYMKNTSVYFGPGCNNETSVYFGPGCNNEMLIIGRLVSRWNVPIIAHLSGDDALSDRAVFDTLGSVALTSATEMARAILTFLQLYGWKQILTFLQLYGWKQVGLVVGLVRPSVHFERLSLHSLRNYLKDANIEINVEIELDPYMTPDEIIATGRLRHLRNRARIIMLEMGMDLHIMLEMGMDLHSAKSFMIAALRSHMKTPDYVYIIPWLAHLHDHYPWEASNIEKQLHDHYPWEASNIEKQETRSAFDDTIVITAHGYDKKFIEDFELRLNKVSPPLLLQYAILAYMSLYDALFLYGLAVRDAYEETKNQSVFLDGLYIWKKMTARQFIGATGQVLMNNKAIRVPSYAATGQVLMNNKAIRVPSYATYHTKNGTMKIVVELTARLGDKLKCAMSENDCSEHVAHETMSHVAHETMSHYYSTGDGSMPLDMPKCGFDGNLCDYTL

SEQ ID NO: 129951 - protein, 128 aa, Heterodera glycines
MFTCFQPYNCKKVNLNRWKIIDKTNASNSKHIARAISVAEVSATEPSVSNTLEEVKCEKGKTKWHGKEWHGGERMACKGMAREGMAPARSERASSPDKWAMIGTFQRETNRPMISISKGRKERRINLK

SEQ ID NO: 129952 - protein, 108 aa, Heterodera glycines
MPTPGTTPETLPTRTTTTEPSTTSPKGTPAKDRKEGDQTRPTPALPIILPLINNNWWWKNTPAPPLRRERSERDGEKRRGNKEQKGGKERGKGRERGKGKTQKRSYKS

SEQ ID NO: 129953 - protein, 209 aa, Heterodera glycines
FINQFEKVPDTDSTTYGVKYDYQSVMHYAKDAFATAAGKITMETLDKQFQDVIGRVKDASPGDYVKICNIYACQTCMGIPFTPGQSRPTEGQKVVTLGPPTMPTPGTTPETLPTRTTTTEPSTTSPKGTPAKDRKEGDQTRPTPALPIILPLINNNWWWKNTPAPPLRRERSERDGEKRRGNKEQKGGKERGKGRERGKGKTQKRSYKS

SEQ ID NO: 129954 - protein, 123 aa, Heterodera glycines
MSRTCKTFCMPLVSLCLTFHKKWAQLRVSSVFDHFLLAHMSQFLIKYKNSAEKCLNAVLKLCKMLLKLPGIIRYNGIEEPLEHFVTDRELFFPRYAGNDCSNCGHCLPVARNDNRRLGEVGER

SEQ ID NO: 129955 - protein, 38 aa, Heterodera glycines
MISRLFDSVKNFKSYIDSKLARTELARSGESGGEEERD

SEQ ID NO: 129956 - protein, 46 aa, Heterodera glycines
MIGRAVRNRPFIFEGIFKFILYPRKMAISFFDKFYTSQKRLRMRRR

SEQ ID NO: 129957 - protein, 150 aa, Heterodera glycines
AKPATGPNRQRKPTEKKEKEENGDKDRPKKERKIAEPPQRVPFRHPTQIALNLPSQLQPAIPATLKYGVHLHSARHSFSTSLKSVSVDSEPRVSDQLKIPSPETLNRQIPPLLHGIRLPMPAGASSSSSNAFQETLREEEEAAAALASLK

SEQ ID NO: 129958 - protein, 191 aa, Heterodera glycines
MSKMGRMESDTDPNTVTILRKHQAPQRVLKSDAAVNAAKKRGDDVETTKKYFAGVNRQHKTDKNTAVVNRQHKTDKNTAVLDAETEQLHHERVSLKLGTVIQQAVSLKLGTVIQQARQAKEWTQKANFHRANEKVEVIREYENGKAVPNQSILTKMERCLGILTKMERCLGVKLRGKELGQPLAPASTAKP

SEQ ID NO: 129959 - protein, 155 aa, Heterodera glycines
QLNISLHRTSVTLFSMKGPNDANSSMQFELRLVSGRTEFPSVFLATRANFLLQKGENRNSAIISLRDPLDGPQEVHLELVLRLSVRGIFAGKYMANLTVFVSQQKAQPHHPPQLQQKNSAKRHRRRRRTHRNREERGASGHRNGIRTVTEKIGGW

SEQ ID NO: 129960 - protein, 205 aa, Heterodera glycines
YELASLLPLKKCFFIKSYLMQIIQMFGHCLSFSLVLINALYFKGTWADKFNATLTKKAQFHMDAKNFKEVADNYDNFKIKMPIKNVQLQLLGMPYKGEKEFMFVLLPTERFGLAKLLAQLDGKKLVELIKMRDKHTVTVDLPKFTLEVTHELNKPLTNMGMATAFTNNANFEGISDKNLYIGQVVQKAFIEVNEEGTTARAVTGI

SEQ ID NO: 129961 - protein, 82 aa, Heterodera glycines
  unsure (1)..(82): unsure at all Xaa locations
NIRVPKIACDLSLEKNGLSKNRNYAQXASQTILALPIPSTIAFIHPIMNAKIIRVPKIACDLSLAKNGVSKNRNYDQKASQT

SEQ ID NO: 129962 - protein, 128 aa, Heterodera glycines
MFVRSSAILLIVAVALVPLSDAILFGGGGNNCCCCCSPPPCPPPCPVQPCCCAPPCPPPCPCPPPCPPPCPPPCPPPCPPPCPPPCPPPCPRPCCCGGCGGGGCGGGPIIVNCAGGCGGGCGGFGFGK

SEQ ID NO: 129963 - protein, 337 aa, Heterodera glycines
VLNRLTYTATLSHLRRCNSPIGREGKLAKPRQLHNTQWGMICPAETPEGQAVGLVKNLALMAYISVGSLPEPILEFLEEWSMENLEEVAPMSIADSTKIFVNGAWVGIHRNPDQLMTTLLKLRRQMDIIVSEVSMVRDIRDREIRISTDAGRVCRPLLIVNDRKLVLKKHHIEQLKERDVMDEQQQFTWSDLVAGGVVELIDAMEEETIMVAMTPEDLKTGGYCESYTHCEIHPAMILGVCASIIPFPDHNQSPRNTYQSAMGKQAMGVYTTNFHVRMDTLAHVLYYPQKPLVTTRSMEYLRFNELPAGINAIVAILSYGGYNQEDSVIMNQAGIDR

SEQ ID NO: 129964 - protein, 83 aa, Heterodera glycines
AERNIIMQVTCNATQSTDRNVRVVALQCLVRIMSLYYRHMEPYMGRALFQAMKDAEDDVALQGIEFWSNVCDEELNLAAEVEE

SEQ ID NO: 129965 - protein, 65 aa, Heterodera glycines
QTWYQQLPSLVWPYQTILRYLKRKQKKFLTKKWLSLFLIFLPQTWYQQLPSLVWPYQTSFFSFFY

SEQ ID NO: 129966 - protein, 360 aa, Heterodera glycines
REPMLLRVRLFQTLLVGLLLGSLVGLLLGSIYNTAVTQSTVMNINGLMFQAVANMNFMFQFAAVHVFCDELPIFVFCDELPIFMREHSSNLYRVDTYFLAKNLAELVQYVVYPVIFSSIVYLVQYVVYPVIFSSIVYWMALLVASFDSSLLFTLSCVSITNVAVSLAYASACIYASACIFGANDVSTAVMPIFVIPLLAFGGFYTAVMPIFVIPLLAFGGFYISQDSLPSYFYPLKYLSYFGYAYEISQDSLPSYFYPLKYLSYFGYAYETAAINQWTRVHQISGAFFRIFYCCRCCRNGTDVLEGMSFSENNLWRDYGIMAAMIIVLRLVAFFALWLRSLIKLRLVAFFALWLRSLIKK

SEQ ID NO: 129967 - protein, 107 aa, Heterodera glycines
MPTKQMLLCSILLTIHFASQFLVFGLENSARSVAVRGSMFCNGNPYEGLTVRLYDRESLEHDDMMTEGTTDQSGNFELIGHEEEAEAMAEMDPRLIIFHVNLETQLP

SEQ ID NO: 129968 - protein, 152 aa, Heterodera glycines
MDISKWGIRMFVHRGNLSSVSVLDLPEFIVALHLVYRSLQNEPVPDRLSPALVPPSKLGIVRRMSTRSVDPSPHHSHPPREYRVMPSITSLCFISAHLELSRLQRRFPEHPIRLSRQSPHSPPSPGESSGRLSTAKRGKSKATVTVRPECGR

SEQ ID NO: 129969 - protein, 504 aa, Heterodera glycines
FIVLVVVPLMVIFLCITVKLGIPVIFVLLFHSFHFYNVSSVQFRRLTSKSRSSHLSFVEDAYSGSDSIRIFKAIKQFRAKGYRISDICNECFIVEIFSNRWLQIWLQIRLDIVADVSVFICVAVAIWMASQGVISLGVLALSFPIPFQFTGYLGEVARFWRESEVQMVCVERVNEYINNKWEADWRAPASERLAEWPSRGQIQFRDLCLRYREDSALVLNRLNFEIASSERVGIVGRTGAGKSSITMALFRIVEPASGQKSSITMALFRIVEPASGQIFIDGTDITTVGLHDLRSALTIIPQDPVLFCGSLRSNIDPFDDPVLFCGSLRSNIDPFDQYSDSDLWAALEKAQLKDTISGLEGTLLYKLTEKGSNLSEGQRQEGQRQLVCLARALLRQRTRILILDEATAAVDTYTDSCIQQCIRTHFNDTYTDSCIQQCIRTHFNHCTVLHCTVLTIAHRLDTILDYDRVIVMDEGAVAEFDTPTALLADGESMFAKMAKQAGVV

SEQ ID NO: 129970 - protein, 674 aa, Heterodera glycines
ICSILLSVLVSFVFTQTPYFSGKSITIGLHYNKNIILSSSARQSFSTGEVVNFLSTDLVFLSKFQVHLKLSLSPIGFASFGLWMELGMSSVFGFAVLAMTLPINAVLTKLMTHFEVAQMKIKDDRVKFVTDVLQMKIKDDRVKFVTDVLGGIKVVKLYAWEESMQKRIFELRHREVKNLWMIFLLDVFINLSFMLAPLIATLVSFSAFTIIYHQTMRPDVAFVSLLFFAMLRYAIYQIPQTISYSAQAFVSIRRVLKFLNADEQQQSHIIQAANEFCVHSVILRHCSFTWEKTPILHLRDISLEIEAGKLVGIVGKVGSGKSSLLSAILGQFEEGEEGSKCMVRASSIGYVPQKPWIQNKTLRRNVLFDGPFNEDKYWRVLDACALKADLKLLAAGDMTEIGEKGGINLSGGQKARVALARAVYMDADLYVLDDTLSAVDAHVGAHIFERVISNQGLLAGKTRLFALNSLGLLAGKTRLFALNSLSFLKFCDLIVVMNDGQIDSVGTGQIDSVGTLDELKQQEGPFAELMKEHMDPEESIRNLGIYGAFSSVYGEFVSKLYSQSVAEKETVVSPKTYFFLRYLTLFNCKKLDDSNKKENVSYGFMWLSFLYGFFLVQMFLAFFSTFSVGAYRASLAFHDKLLHSLFRSPMAFFDRTPLGPILNRIGNDIDRIDE

SEQ ID NO: 129971 - protein, 118 aa, Heterodera glycines
MDSDNETQMKFGKKNQIRGQEIDDFAGGKRLTSGGGQFEQLKKSGNVKKRKIEEKNLVKNCTRNDGTQTEQSNERIEVATREHHFASKIHKKEHTKSGHGQPQREAEVNECDDHSAKH

SEQ ID NO: 129972 - protein, 66 aa, Heterodera glycines
MVKESTKEGRDLWKRKRGAEEEKGMAREQGDEAEEPGDVQGAGADEASPDALSISKSRTELNGETE

SEQ ID NO: 129973 - protein, 41 aa, Heterodera glycines
MHKWCTDISPTRHHDSRRNDRFWIPILFSLVGDEASYGRSK

SEQ ID NO: 129974 - protein, 204 aa, Heterodera glycines
MEVRKKKLIENSEVIDAAEQAINGNGRLHLLGLISDGGAHSHIGHLFGLLDSFKQLKVPKVFVHFFADGRDASPTSGAVFLQQLLDFLIAEDYGELATIVGRYYAMDRDKRWDRIKALIFEKISFFGFSFFLKVAYEALVGGVGEQCEPANAVQLVNGRYAIQQTDEFLMPIVFSDEARVKDNDTLVFFNYRADRMRQITKCMG

SEQ ID NO: 129975 - protein, 86 aa, Heterodera glycines
MFNCLINLLSNLIATHLSPNGAYGLVFGINSFVALLLQSVVTLLIVDVNGAFALSLEAQFVTYSICMLVSSFTFPPLQLLVKCGKK

SEQ ID NO: 129976 - protein, 19 aa, Heterodera glycines
MNFKLIGEKRMVRSRFNEK

SEQ ID NO: 129977 - protein, 67 aa, Heterodera glycines
SPLLAATRVLNVAFSDDLCEGAYYEDSRVTALKCADDPEFVWSVGTSVRDMIVDSNANSFNKSESTE

SEQ ID NO: 129978 - protein, 30 aa, Heterodera glycines
ARGNINGIFVFSDPENPKNPKLDSFCFYKF

SEQ ID NO: 129979 - protein, 109 aa, Heterodera glycines
FFSSKVVYVSVPSAEIGKRIAHELVRSRLAACVNIVPQITSVYEWKGKVEEDSESLLIIKTGRERLEQLREAVIKLHPYEVPEFVAFPIEYGSEPYLRWISDQISDKEG

SEQ ID NO: 129980 - protein, 209 aa, Heterodera glycines
KDGTERTVADTVAPNVNKMLVPKRKVTADALLDSLRAEDGAKKHKQNAKVCLPPPSVPSSLSSSSVTLSSALWDHENDENAIVVIDNNTSTTAQSQDASINSSSHLIGCSNTTMNSSTMLVPLSDSMLLDASPLNNPFKKKRHYGHPLQSPVKNWESLPLLNQLLVTWVVLLQIEASWSSHVTICRDLSTSSTRSNRLRRCLRPQPHEK

SEQ ID NO: 129981 - protein, 491 aa, Heterodera glycines
MGKWPILPLEVLGREKQHSATNIISICSEILPRVQMANCFANGNFLSHPPAFLMAYGTRLLVNAPHSAAASDEKLVEGNVKGMRKESERAAEGTASLGRAFVPGIGSEVSDCFYSSMVPAAHFDVSARALCCSIVRFLPLAPSSSSNPFFSSHRRLRLLLNTFPFIFLPHGTLIKKSESNEIRFCCVCVQFDDGEGTTESQLAEAVLVTLPQEGQQTTTPFGHFCERLALQIEGQAMLNFEMSFHFVQNDEEMNWHLPNESHSEANEKDEAMTQYHQKCVQMVDFPWVFHPSSFIPFLAFRSAQLSVLSSLSHSIRTFLRCRCLPSVVGAKGQSAGEEAVVPLALLLKGPCGSGKSTLLAKLMSKLRTTDEDNAFVPVAADIVDCSDAEIFGRLFGEFRRRKVPIVCAISGGIKMSEEISAWEGPPLKWETHRIGPIDKCTQKEVLNKLSMHGDIMRTDLRIESANFGTIGELCRLVERLELRIGTNRTPA

SEQ ID NO: 129982 - protein, 249 aa, Heterodera glycines
KRNEFGEGELSIRFDQIAGLESVKSKLTEIFIWPARYPSLFGLSGVRVGHRAILHGPSPARYPSLFGLSGVRVGHRAILHGPSGCGKSMLIRALAGSMGATVFSVRGPQLLSKYVGKSEQNIRQLFAKSVRGPQLLSKYVGKSEQNIRQLFAKAKASKPAKASKPALIIFDEIDAIAPQRGSDNSHVTDRMVNALIIFDEIDAIAPQRGSDNSHVTDRMVNQMLTELDGFEGNTEGMDSKSRKTFVTWH

SEQ ID NO: 129983 - protein, 197 aa, Heterodera glycines
MSNSNDSDDLIIYDDNEDIKDVSSDSGDEVAMEEVTNAGTSTAGALSNEEIRDYQVLSQTELVDELNKLSSETSAVLRFNGSICKVLLHHFKWNKVTLIERFFEFPETSNTDSFFRNANLLDPTKHTKIEGKILGEGRPYVTCPELRCTIVADDEFVLKNVDNKQALRSYHKLVLNSFVEVDIFGSIQLQILFSVTP

SEQ ID NO: 129984 - protein, 253 aa, Heterodera glycines
MEQMQVLGFSWIETQFLQKAVEILVECRRTLMYTYVFAFYLVQNNITKMFEDNQSDLELATEQVNFNLSEYLERELPNEKVAEVKQKVQDKYRYVEQRRQILLKHCVEGRERNEWEFCQATIENKTDFRGIQLNPIRVLYRWPMDKLYKHFLRPTFGNYWATIIRVYVPKFFWFFMTFEFFYYVWKYESKSWQKRIGFSTINRPDRYVLVKDHDEETLKLGLTDYSRSDYFDKEFYQRIKTANIDFGPPKRPW

SEQ ID NO: 129985 - protein, 29 aa, Heterodera glycines
MEKAQMEDRTHRKTENCNKNCTCGIPCGQ

SEQ ID NO: 129986 - protein, 149 aa, Heterodera glycines
AQHETSHKDSSIYVVTFFNSSDILHKNATFGDYITLNHTAVSIINDTYKVTYVCSNKSISLTPDMDKFGKYIAFMFKPIRYVLALINLFLLAIIILITLLGQIEGEFKWFILNISTLNIFFYLFTEGGRCVVEDLFPLLQNSRISWEVV

SEQ ID NO: 129987 - protein, 90 aa, Heterodera glycines
MFTDSINNDLDDRRLRRQIANCNERRRMQSINAGFQALRQLLPRKDGDKMSKAAILAATAEFIQSLLREKDKLLEENCVVMAKKRRMDTE

SEQ ID NO: 129988 - protein, 24 aa, Heterodera glycines
MHCLCVASWDHVLVRVLTLLAQLG

SEQ ID NO: 129989 - protein, 114 aa, Heterodera glycines
VYSSPPLLWSQELAALAKTWALKLADRGSVLYPELPGIGENIFLLTSKCNGTAADAISSPSAGMATNCPPIGDHLTTGIELVAHWAAEAQKMDFARPRWNNVAFYRPAGNSNLP

SEQ ID NO: 129990 - protein, 68 aa, Heterodera glycines
MKEEDRHWNLIVQDYNNNPQNRMRGRGMARKNIYVQQDQAIRAIFLDRHNRPFLAYLRAIAYRMPEPN

SEQ ID NO: 129991 - protein, 291 aa, Heterodera glycines
MEASNANDNVRITIPRLNVQKGRRNNCSLEKHRKEIRQISKSAEFKAEDFALAERVLIRLDQMDDAEEFQHFKTVFEDDGILRLKTRLEMSEKPYSFSHPILFAKHSALAKLIILDRHQKRHHLGVDTTLTEFLSEFWMPSARLNVKRALRDCLLCRRMNAQQFALPTMPPLPGERVRRHAPFQSIGIDFLGPTTISLAGEKIKAWILIITCLATRAVYLEATLDLTSESFINVLRRFISRRGKPDIIWSDNATTFKLAQKTLELLSAPGPDQEVQNFLTHNRIQWRFIAQ

SEQ ID NO: 129992 - protein, 397 aa, Heterodera glycines
MPFTPGHNSGGTRKAKHRNNPRGPTMQRNNPRVHQTPIMARQAADHQRIRAAHVESDHWRTDCRFKDATCHKCQGQGHIAKACRRSSNQAKNRRERSVHTVVVKSHCMGIGTAAGRWWRLTFIINGIKILMNIDTGAQATILTLKTWKKLGSPKLDKPDIETRNCNEVAFNVEGKFVCTVCQPNQAPKKLVAYVSSEINYDLFGLPWIEALDVIPHEIMYPDIRPKAQPAPAEINAMAIPQPTHKISDLESLTKALQTDFSEVFGPGLGHCTKAKAHLILKSDAHPTFCKARTVPHGALNAVNEELDRLLQIGAIKPIEFSHWAAPILVVMKKNGKTRVCIDFSTGLNNSLKLNTHPLPRPDDIYTAISGSVYFSNLDLRDAYLQMELDEESKHLCE

SEQ ID NO: 129993 - protein, 101 aa, Heterodera glycines
MDQIVTGIPGAFAYLDDGIIASKTLEEHICSLYKLFKRIQEFGLKIQLEKCKFLQPELLFLGHVISAKGIRPYPGRSEAIRQMPPPHDLSTLRSFLGALNY

SEQ ID NO: 129994 - protein, 135 aa, Heterodera glycines
MADYNIQKESTLHLCLKLFGGARTGKTAHYSRSCCHEHEEQTEFDKADSAEKNFEVLSASLYDIKECAVCREERKCTIVLNNARQGFEIVDTGNAATPPQQQRQRQPPPQQQQQQHHLLPCFLDKFVLLLLRLSK

SEQ ID NO: 129995 - protein, 23 aa, Heterodera glycines
MTQLNSAIVIMTQLFTSNRDNHL

SEQ ID NO: 129996 - protein, 69 aa, Heterodera glycines
VPQTDTEKNRFFCIRAVPPNRCAQIYGETESFGNSFPIACTLILRWHFAPHNCLSTPTGHLKKSIFLFS

SEQ ID NO: 129997 - protein, 61 aa, Heterodera glycines
RNWHVRNERRRKQRKEKQQKSKRKTATKALPRGGHPKWATDGRRGMALGTNKNVIGGIEGN

SEQ ID NO: 129998 - protein, 214 aa, Heterodera glycines
MAGHLWAIYSMHISHCQHLISVTESFGRPQLFVLCSCPFSKVLKKSDALSSMFGVDLFFKQIFAYELAKEKNLKYVNGFDNPDVIAGQGTIGLEILDQVGDVDAIVVPVGGGGLIAGVALAVKTLKPEVLIIGIESEMCPSFKNAMEHSDEPLYPEASLADGRTKTTFIFNHLIKQTFTPIAFQGLAVPSVGHNAVFMADGLIDDLVTVCEESI

SEQ ID NO: 129999 - protein, 75 aa, Heterodera glycines
PGLKCPAHAKNFFYFREKIEIFPKKIPVDRARKTMFWKWSPFLWEKSLKNPKIQKPENRFLGLARKIFKIFEILK

SEQ ID NO: 130000 - protein, 94 aa, Heterodera glycines
MNFNNLTTPIDEQTMIESLSLDEPSNELRSVEKMDEELNKKEEPFTLAECCTAFDLVAVMFDCKIPVPYEEEQKRYVYEHQDKPRFIYITEDGD

SEQ ID NO: 130001 - protein, 129 aa, Heterodera glycines
MTVTSNSEFRLIECVPILEEVAREFGSYSSHRDYRVSGCMMIRTLTSLNRLYIFDAEDCIEVNGKYVSYFIAILGEGFLKARGRHEPKMVNEYYEKYDGLNGFAEFIRNWAFTFFCLHAFDDDDTSDED

SEQ ID NO: 130002 - protein, 101 aa, Heterodera glycines
TEEKVYWRLLNNIGEAHHYPVPRRRVHQNVFRGIILTHTVRSLVIERLRSIRMSPSASPYAINVTPSLGTASVNRMFTAVQPSLISSKPGESSCALVIWKT

SEQ ID NO: 130003 - protein, 163 aa, Heterodera glycines
MTNAQEDSPGFELIKEGCTAVNIRFTEAVPNEGVTLIAYGEADGLILIDRNRSITSDLTDPAGMPGTHWCAIWAQSPAVAYFFDSYGEMPIRLIKKYLSDNFKNIYYNKTRFQSVLSNVCGHYVITFVYFMSIGLGFENVMQILNRSNNPDGFVYRFVTKSIQ

SEQ ID NO: 130004 - protein, 95 aa, Heterodera glycines; identical to SEQ ID NO: 128210

SEQ ID NO: 130005 - protein, 80 aa, Heterodera glycines
MQNNQKAMLRRIGELEKEIKEQRKVCQMEHKQLMTVSETLENKVDKHSDLVTVLEMKIIALEKQQKELQKSKKRGEEGII

SEQ ID NO: 130006 - protein, 42 aa, Heterodera glycines
MTDEDAKRAEEEKEWPKPTRYVSYREGEFVFCGSFTSDIAFI

SEQ ID NO: 130007 - protein, 299 aa, Heterodera glycines
TSEHGIHMETAEIQSDVAPSEQTAGKGGGSDGNDRLTTLLQDAKVYARIRELREAGLWSATRLPKCEDPPRRKLHWDYLLEEVRWIATDFTNERKAKKEWARKVVFIPKKSDEKDSTNEVKKKEQSTNEVKKKEQEEKEAKRICGTVAKKIREFWTNVDKVVEFRATEIVESRKRKALEIVESRKRKALGQQLNFLVGAADKITSLLHEHMADSASVSRRSHSEKSRAGDLSEGEGMLTDGEDDERTIDTEEAHQQKAHVEMEVNELSKEANLELDEFLTSMPSGYMPSGYLESLGYKI

SEQ ID NO: 130008 - protein, 225 aa, Heterodera glycines
MTTVSEGEQSGSGDGGGRIFLIGLTDSCAVWKYVVELRDSWDEKVCMMVINKPEGGQLLDKYTECFAFCDKENQIGVLDFVDHPTIKDGYVFTLKAGEPLPHVDLLPLDGVGLPEWAQHNDCILLMLVRRMDHGDKQWKRQRMGIDTSTPPIKKKIELVHCINSVLVYAQNISDDVIRANEGECKAHIENLLCIRRQLARLYRLGRTSPIDTSQTVSDEEVNAED

SEQ ID NO: 130009 - protein, 301 aa, Heterodera glycines
RQSKCCWGSVFSEWSANRFVAVDGGRRTVEEPTSANDHRSDAASEEKQQQSRLLPKHKPSATVADGPPGPHSPLPYLLKPRSGFESATGTALSDAGDLDSLYTPRSRTPTTSSYGGRSVGGRSIKEFVELFRLFSTRMRKDLKDLFQDFVIAAHSSANSHVPPKRATSADCKSSCSPRVQSRLESQMSSYPSCAEFVPDDVLTRNSALHMCQLNDKQQKIYNALALASVCSSAPMDTSRNSMEYIDEQYAQKLIQEHEPDPTYRAKQIMSFEGFVRFLCDPINYAFVPEQTKPSEEQLHHP

SEQ ID NO: 130010 - protein, 20 aa, Heterodera glycines
MANFNGNADTFLCRDIGEFK

SEQ ID NO: 130011 - protein, 238 aa, Heterodera glycines
KMAFVPIKDGEFTSTIYAMIKENKFTECIRILQYELQIKENKFTECIRILQYELQRNPESRAALSLLSRAALSLLGYCYHHMQDFIMAAECYEKLSELFPQHTDYRLCHAQSLYNVSFPWPFFIIRSQINEPKMECKVVKLDAAIKYREEDVQNARILVEQFDSDDPDMEVNLACLDYKEGNFEGALRRFTEVDESPASQNQLTYAIALCHYQMHNFPQALQMVGRRKRKESEMHFNN

SEQ ID NO: 130012 - protein, 81 aa, Heterodera glycines
MASSSTIKIFSLFLLVLCIGLAIEQSQAYWGGYAYAYPYGGWYGKRQAGFGPSASVGTFGNGHGGNANGGGGGGAPPPTNF

SEQ ID NO: 130013 - protein, 499 aa, Heterodera glycines
EPVPAEDAYGGEDEQGLDVEEIWECQIREQLKRDDEMRAFFDDLGTDRGPIDPRQTFYGGRTGPLQLIAEPKEDEKISVFDIVSLYPWVNYATDYPIGIPAVIHPTVEEMIVDWTRPEHLQYQGIYRVRVIPPKGLRIPVLPLKIDERLLFCCCHRCAAKFRKLNTRRVHKCPHTDEQRAFTGNFTHIELARALETGYRVDRFWRAWHYDEWSDGIFKDYVRLLIKLKVEASGFPDGANTVEQRQQFADEYRRIYSVNLDLENVRRNPGLRFISKLMLNSLCLIMDHKIEVSAVIPLSDTAVRVMYKSKKNFVSEHTSSNIVISLWTTNRARLKLLDFMTQIDRTEGAKLLYTDTDSVAVLHKRDIVPIQTGEYLGQMSEEYLDYEIKTFVCGGAKQYGFRMLNKRTGEVEYVQKIRGITFDVNNSKALQFDHFLQKVKNYGRNTGDDNDDAPAVFSYDKIMPTRDSRIITRELRKKYMPICQKGIINEQYEVYPFGYE

SEQ ID NO: 130014 - protein, 608 aa, Heterodera glycines
MTVHFMNVFYVGLVLSYVPLLLHSELINVDLTVDNQNYLDRGKYLTFSKDATAQHFGYSWNTACRIEKCERNSEWAVSLQNVYTLHNYQSVFFEMKSLVKMSPLACFEYNGHSFTFFEDRESGETAIFRGRQQKIVERLIQHGRVVFDHLSGRLFLIDKHQRRISEIELEYLELWWLRTNQSSAHTILKSNFVAFLPPDKSDYTLVDNHVFVIRDQRIYKFHIDDYVKGNRALIFVANSSDVRFNYLIYKPKDQNINRGVFAHLRMSDAWMSISYLFNLFLIVLCTYILKQLRRKNRKNPLNGSGSTGYYSNPFIDDAYSSQHQQLLNIQLFSFAKTDTPYLPTYCMQRAIRYLIDSYGLSSVDDLYTCLKDEIKSGPEGGNCLYPNPLCAVDCVHIANADHPNQPVHIDGSLELIADVELYSTCYPKKKFEGIERTSVCGAEGLEDLPGRLAAVSVTPLRTIEQQQHEPDSGRAGSDQLLERRRTRKRDYNLVRVLCRFNNCGPYRLTKQLQKRRTENLAYLSQLDIETVHLRKNIKIIPDALCPIGANQVFAYRGFLGITVQQHLYTRHRVMLKYPTLPCVVQFGGGHHRDIFPIELLRVSKTETF

SEQ ID NO: 130015 - protein, 809 aa, Heterodera glycines
MEAFYIVLPSNTPGPGNTASNFTVRLPHTLELDSKWSVALSAIIYPYSFPSISVDEDDSISVKLVNPNYREDAGNSDEESQKFINLSVKIPNVQFQSVQSLQKTLNQIIQNAYDTKFGGSSSLNDGTPNKRVKRQTELSESGAGVIEVENFFTRNPFDYWQQIGELRKKHYQLRERVEKMTKEYNSTADDERKTLLSTELGVFQGRETFLKEHLHLIEEEAKRRDGEQQEANEQRLIDRFFARYPDNYREQLDEWRSSYLRDVLDLQTKMGEYEGVKDLKRLEELNSQTERMRNSIHVFGRKMEILNNAALQRDQKKSQEDFERLSHEQNLTFVQEFFQANPVNYWQAIQKNYEALQLEYTKKRELREKLEFETDATERDSLQRQIESIQRLIDYRRKRFAALEYEAKKRDAQTGKANSGLSAVAEGSNRTSSTRTDSFSPDEPANPDEAINSKNNHQNTTTTATAILSSETPAEQNLADQDNSIADKNEPGTPPSSGLEQSGDAATSVTQAEDGGNLPQAAALSSNNPKFVAKQSTVATERRKEKIIEKLIDEQVDRMVDGTHAQQKMLQEEGKDNDSEHRISTYKLIEEVLHGEHGQLMVQQRESKMAAEFAYNEITQRFGIRMGPGVMHVDLSKQLSYVLGFDHKTRIYNNQSAKYPPDLSGGVRQLYVYAPKLVEDSIIGDRMAPLLRVVNVSGTPGLDMPERGGGLLQNISRFLMPVATNLLKSASKEGISAGTRMLDDLAQGKAFKESLKTQAKQGFENLAEKLNQCGKGGRQRHKAITHRKNNKTGKLRGKRQIIDQLTFAH

SEQ ID NO: 130016 - protein, 90 aa, Heterodera glycines
EKSSKKSKKSSSSDLCHSPKKAKKEPQTPPSERTNASEDETTATPMEVTTTAPIKTEKAAVAMEEQGEEETLRERLLERVKLKQLKSEED

SEQ ID NO: 130017 - protein, 59 aa, Heterodera glycines
PPVTVVVPALVLADVVPVLAPPGRRPVRVAAVHGRAIANARGRVAVLARATKTAKRPAN

SEQ ID NO: 130018 - protein, 71 aa, Heterodera glycines
MSCSWLVMCGGSWRWPGKAVMPLCNAVSSSGMTSLGKWQIVRQKGQAVVMAKRVPRDREFLPKPGPGLAGT

SEQ ID NO: 130019 - protein, 185 aa, Heterodera glycines
SKSKYFELVSGFYKSYAAMQNFQRTAAKVKCRVVDVDEGRVCRVVDVDEGRVKVEMEVQEEHTNTFGTLHGGLTATLVDIVTTTALCATRRGSAGVSVLTATLVDIVTTTALCATRRGSAGVSVDLTVNYLAPAKIGDTILIDAFVNRRGQTMGFTGADIFRKSDGLKIATALHTKAFPREVSEA

SEQ ID NO: 130020 - protein, 28 aa, Heterodera glycines
  unsure (1)..(28): unsure at all Xaa locations
TXNLRCQTASLPHRVTFALKWQRKMRQK

SEQ ID NO: 130021 - protein, 43 aa, Heterodera glycines
SISICPSFSADGASSTKRQMSAYLSCIASASKLTERSTSKLTK

SEQ ID NO: 130022 - protein, 173 aa, Heterodera glycines
RFLPKIVSIFRKTRLFPSGGPFFKSMVKWLLVVPGAAGKIIGNFTLIQIVKSSHCFQLKHIMPGVVSMANCGPNTNNSQFFICTEKAEWLDGKHVVFGHVVEGMVFGHVVEGMNIVRQVEQQGTPSGKPTMQVSEIISASLSIDSFLFIYAASSVATSTTGAPQKGPFVQSRS

SEQ ID NO: 130023 - protein, 206 aa, Heterodera glycines
DSAEGGGGQKRREGLLQRFCARHPDSAKCRGNSGGTEKVPGSENGEGGGLMERFCARHPEHSKCNGGTEEGTDTTQQTPWHSTASPNGDFSAWSSSAGDYNRRPPSFHNFRPSFAISPNATDERRPTPTANVDMHAAQMDKGECCSLLQRPCCSDVKPEDPSVSFGFLSEEAREAMLKNCLSGAVDCKAQPFGMIQKRTMVLQVSK

SEQ ID NO: 130024 - protein, 196 aa, Heterodera glycines
MAGQKMPNIISRKRTTKTKAPQKGRSAEGETEEEEETEEEREEEKGEKVYSEGTEEERETDKREKGRETKRRRTEEDTEREEAEDDRFEIVYLPALKAPKRKLQQKAKATTTKKGHNEDRERGEDEREDDLQQLQTTRGRQRKRGRQSLIKLQKGQVIGGAGTPWPMSWHEARETQYQKPTKYSATPWGFFPVFGH

SEQ ID NO: 130025 - protein, 70 aa, Heterodera glycines
MLCLETPKHGNSHLLRGGISFCAAVLLINTQYAQHGLDELPTRLHYCASDVFIYRAETVEAIKNSSKKRN

SEQ ID NO: 130026 - protein, 94 aa, Heterodera glycines
VGVQFVPDVTHYEIMKLRLLNGGHAAIAYPAALLDIKLAHNAMQNKLISAFLHKLQTDEILPTVPPVPGIDLLDYCKHVQQRFGNPKIEDTIRR

SEQ ID NO: 130027 - protein, 77 aa, Heterodera glycines
MVASTLEQFNSLDDQELDRRILNAGLPIGLGEEQPAKGETSQEEMEQLYQQLTDEERKKFTELADGIFHDELAIYIF

SEQ ID NO: 130028 - protein, 263 aa, Heterodera glycines
SIWLSLAFISVFGLLAALAMLFGANVSHLVCRPLEEPLQRPDFLSLLDRFVHLYGLDRPSSVSPHKSSPSASDHFSLDQLFSANRRPADLISECAQKHTLYTMLGLDKKFKLIGREGLQDDYQYLQRSIMDNLSSHQLIDEALSRGIVPDDPRLSARQWHFFSGPMRDALQRLGQVRMPEWNSSDVEQAIEKLKTSYKEAKESPSWDNTISTASLLAKLGDDSVFRFLSDAVNLCEGEPVRFSSTRPVTGSLCISPPPKKLKE

SEQ ID NO: 130029 - protein, 49 aa, Heterodera glycines
MRENAISKCIARNKTCRKNLTTTTTTPATITASTILMLSYGNFYEKSIF

SEQ ID NO: 130030 - protein, 523 aa, Heterodera glycines
MLWLKNPARPVSGYNLLIYRYKRLVFGATCSPFILAAVLLQHFDKHEHPFAQALAANMYVDNLLIECETEEEAIDKSSIAKQILKDADMNLREFLSHSPNVMGQIPEDDRLDKTPAKVLGLTWDTPSDCITFSLPKDTDITATRRSVLRIIASTFDPLGLVGPCLLPAKRLFQRLWGEGTAWETPLPETEAETWNQTLSLWQNQTIVVPRHSILGKQSRLQLHVFCDASEHTFAAAVYIRSETADGSEANLIFAKNRLRPRTANQRFTIPRLELLAILVGIRAMRFAEKELRRPIDERHLWSDSQIALSWVKSDEPKAQFEQRRLVEIRQGPPTIFHFVRTYQNPADVATRGCTPAELRTRHIWWKGPEWLTSPETEWPDELTFATPADSPSADLPFEESETKTLMAKQSPLPPPLIDPARFSTMLTLLGTTILVLQFIGRRRPKWLRSGISSIPRSGPPTGDSFRAARTFLIRQDQRSSLDGYDKHPTVFNEDGLLCLKPGSCTRTVRPLSPLPSFSTATHL

SEQ ID NO: 130031 - protein, 149 aa, Heterodera glycines
ETEWPDELTFATPADSPSADLPFEESETKTLMAKQSPLPPPLIDPARFSTMLTLLGTTILVLQFIGRRRPKWLRSGISSIPRSGPPTGDSFRAARTFLIRQDQRSSLDGYDKHPTVFNEDGLLCLKPGSCTRTVRPLSPLPSFSTATHL

SEQ ID NO: 130032 - protein, 58 aa, Heterodera glycines
MPTVREILESLQKPIKRPRIPTNEDSVLNAERTDAEQQMEDTSTRNDLDVAASDDEEN

SEQ ID NO: 130033 - protein, 95 aa, Heterodera glycines
VIYNVIFEDGSSGRYHANQLRLRKTTQIVEDPLSILNEEFNLPIQMAPMANGHQNGQVLENRPDPINAEDQVEEPPIREEQQDVIQAVQSPTPQA

SEQ ID NO: 130034 - protein, 84 aa, Heterodera glycines
MKGIISFLLLFVIAPTNGAKPGNELNVVPSDIINNLKNVLESDELVLFGGNEWMANTSLEKALNTLRFRMIPTIWIWLTKKKFI

SEQ ID NO: 130035 - protein, 84 aa, Heterodera glycines
MDENFENIRTTIGVARKVISMEARLLDYKNKVQVPMNQLRDLMDLFKIGYSKKQSDVDEIKNFSASQHSLFHPLLNKIRLQITK

SEQ ID NO: 130036 - protein, 77 aa, Heterodera glycines
MLGFYDDISPQNKPSQKLCFKKSEKAINKVENWDGKPSQLKYSLITQAKWKKAVIFCYVENNSTIFVALLGAFVRAS

SEQ ID NO: 130037 - protein, 130 aa, Heterodera glycines
MSSPIKFSPSKSSDAKNETNVKAAVLTPNSLKLPNRKHQLNSAGNNGEQPPTKVRKVEDRELWKLAKGKYMLGFYLCSDDWNRLYNNNAKVVRTEDGRFAVNFELCAECTLKNARATDLLAPPKQKKSAE

SEQ ID NO: 130038 - protein, 258 aa, Heterodera glycines
MAINMNDKKGLLKQILGESDITVTTSGLTISGPRLTNPRFLPFEESGRCRSCKATEVEVDTMVTKEGITLWCTRIDKVQFVPFDVVYDLPGHCFFRVKNKARVFNIPYGDLLSDNTCDQIQLTLHADEERRLKRKAKAALDLVEQGLMEDAMHDGASWKKAKTAIGVLNKLLLVGTHGDNENKETAALTTSENQQQEQQPPTAPPSEEIVSIVPSDVGSQVLSSGEVKLEEEKQADLGDIDKTLDEFFASLKASTTSM

SEQ ID NO: 130039 - protein, 79 aa, Heterodera glycines
MLLSIFGLVFILISETLLFSSIEADKHIAKLTAYCNLTSDNLTFALPEPINAKVRARFAICMILKYTVTGIYYVQGCQI

SEQ ID NO: 130040 - protein, 63 aa, Heterodera glycines
GKKLVKIVENVGPAVPIGAAGKNFWKFECYLLRNLPIKLFKFSFGGGGIRKKFPLFAGKFLKI

SEQ ID NO: 130041 - protein, 72 aa, Heterodera glycines
MFGIRNSKQRKLIDDQLEDDDFEMEQFSPDWQLIDEISIKLLENGIGTFETLQRALPSVVLAQIERIVSVFF

SEQ ID NO: 130042 - protein, 269 aa, Heterodera glycines
MENVLRYNNSLSFGHVITQRSEEEYFRIVKCNNLIQYVLWDYNPPDGSLPLLHGQLFTIPSEQAETRLGEIAEQFELNAVLLCKLHEMLRKLHPMATLYETAAETFNQLPPDERVNLRMLVVGTNRQGKERTLTEDEAQPIDVQLPHDSLLKQIHPGRLQVETEAGSHLVAQLFMDSGQNVMPNMNYEVVLLGRKGTGAQHLKWWRREIDPATFPLIFPKGQFGFEDGLPLKLKEGEKFDTKQNAITNKNNDKPLDDNEDLGEAEEFLG

SEQ ID NO: 130043 - protein, 147 aa, Heterodera glycines
MGGGGGQLLIPIGALFQLRLNCFRTLATLLACGVSSVCTRLRSLRNPTVKMSKSDTDAKSRIELTDNAETTAIKIRKAVTDSTSNITFDPVQRPGVSNLVTLFSLFSDLTVDQVVTQSIGIDTLGFKGKLAELIKSVQSIAFVVSLL

SEQ ID NO: 130044 - protein, 186 aa, Heterodera glycines
DLVELYALLKLASPDQFKPNGQQSFIMRFAKLGDDEEVSQRFRKIFDKYCLRRNKILNDVPLCSEVILYHGLSKLQYDMYRAILSSNRCTMRTEKQARQSLMSTLVQLCKCCDHPYLFRGIEKEPFEEGEHLVNDSGKALILDRLGKALILDRLLAYLHKKGHRVLIFTQMQRFLDIVYDIMSLRG

SEQ ID NO: 130045 - protein, 126 aa, Heterodera glycines
LVGRFLENDRGPQAMAEFLALFDRSIQETTTDQLSEPAREKVRCLFNLRENKWGVVAEPNVGDGPLTTASTSVGIIGPDDVPLTEDECAFMEENLDNFVDNSPGESQCLNAFDEDNVEDDFEKFLQ

SEQ ID NO: 130046 - protein, 87 aa, Heterodera glycines
MDLGKTVDALAEDESVELLNESAEFRGDMDSSFGSDLHSVSFQEISSILRAKPDINVFYRTPCSGASRFSRRSSSARTQIGVIFQNE

SEQ ID NO: 130047 - protein, 44 aa, Heterodera glycines
LVELNLSWAEVDVDAMLAVCRLMPSGVRRLNLSGFRQLSSLNDR

SEQ ID NO: 130048 - protein, 150 aa, Heterodera glycines
MSGLCIAVVIKYADNILKTFANSFSIIVISIASIWVFASMPKPLFIVGAALIITAALIYAKFPYRAKPKADQRSNSNSATDSGSADSDSSNMSNCGTAPPTGRGGDRMPKEEDKVSRLTKLFRMGRSPTMAKLTPGQLDANGDGNGVQKF

SEQ ID NO: 130049 - protein, 98 aa, Heterodera glycines
MTNGPKQKPRTNSAKGPVVCPTWSSKQWEADDETLGDGKDIADLENEEKEDGEEAADEQPVPEPMKKKKKTKTAQSNAPVGTSRSSKNDGKNDLTNFQ

SEQ ID NO: 130050 - protein, 208 aa, Heterodera glycines
PKKKFMMPKPRPILKLRPKRPSLKHMPKPRPILKLRPKRPSLKHMPKPRPILKLRPKRPSLKHMPKPRPILKLRPKRPSLKYMPKPRPILKLRPKRPSLKHMPKPRPILKLRPKRPSLKHMPKPRPILKLRPKPGPEHMPKPRPILKLRPKRPSLKHMPKPRPILKLRPKRPSLKHMPKPRPILKLRPKRPSLKHMPKPRPNLGNCTN

SEQ ID NO: 130051 - protein, 51 aa, Heterodera glycines
MDSVGGGDFSSSAANGGRKTAEEKRASNLERRQLEKDERHSFLESSLSKGI

SEQ ID NO: 130052 - protein, 111 aa, Heterodera glycines
AFTDASSAVNFIFVVRFPPSFAKSVVPFVLTNNLTSEQLTLKSTSNSRLFVFVRSPIVRNASEWTKWENEAIGWDFVDQPNRIDVYMYREDQTGDGLLNKLTGPINRKKKK

SEQ ID NO: 130053 - protein, 270 aa, Heterodera glycines
MSELLRISIAPMVVRLKMYIETAQENLGKELADQSVRADLIAERQNLCKTISLLEKYNGKWEAIFLRVKGQALQDEEQNYRDFKPEGKAFMHWVDQARGLVDTIEGALGLSELGDAIPQPNQPAQVVQQAPVKHIYLLGCLPEKSVARRAIDLYPPSDENYPRVVEILKKRFGDEKTMVESIQAELLHLAKPAKSVQSLRQFSESIERICHQLLDYGENEQNKFMASTIKSKLPYHLLTQVVEKEMRAGGAFNCTELRRAISSIVEVKEE

SEQ ID NO: 130054 - protein, 174 aa, Heterodera glycines
MPRFSMIAFLAMRIPTRDPWFEEDWEPVLPLVPDHVDRRLRDPRLEEEEEERANDAHLRRERRVHGRIEPLSSWIERYHEPRWYETALDMGHEIDPFMPCLQEYVGFSPHEGGMLVDLYPVELVNIRNRVGVAWRAPAVVEEPHLPPPDQAQLPDGRLENRPPRVARRLQMNRR

SEQ ID NO: 130055 - protein, 149 aa, Heterodera glycines
MGTHQSTPIGVTFPPAPVLKSDFVYDGSNMALTREPLTIDFNCKSRQEAIDFNCSLGVQACTDCIPDHSSGLVNCNCRSHNLEKLMESPERRLPLNIKNYQLRNTGRKVIALTGFSPVQLNLQIEGLQMALELHQSLCTILPLNISGCY

SEQ ID NO: 130056 - protein, 1117 aa, Heterodera glycines
MVVRLKMYIETAQENLGKELTDQSVRADLIAERQNLCKTISLLEKYNGKWEAIFLRVKGQALQDEEQNYRDFKPEGKAFMHWVDQARGLVDTIEGALGLSELGDAIPQPNQPAQVVQQAPMVHQRHDVTLPPITLPKFSGEPREWPLFWKLFETSVESLQIEDFKKHIYLLGCLPEKSVARRAIDLYPPSDENYPRVVEILKKRFGDEKTMVESLQAELLHLAKPAESVQSLRQFSESIERICHQLLDYGENEQNKFMASTIKSKLPYHLLTQVVEKEMRAGGAFNCTELRRAISSIVEVKEEVQRCTQIFRGEEKPRNFPPHSNEGRANQGRGTPFRFSRPFREERWRPVEGNETAMRMSPQTNHSFSAIIQQRTPIPNRGSNRICFLCETKGHTPSWCTKYITPGARRKRLADQDRCINCLIMGHNSLNCTSPRRCSQCGERHHFMVCYGGEKQWNIPPQVQRNDFHGMGTESPPNQFIQGHERPDNRNDSVGMMSPQVNRSFLTLTSPQFSQRKIGTRTRQTCSLCCVVGHPPSRCPQYSTPGARRRRLAKQRKCFNCLMKDHKAQQCQSPKRCLKCGGKHHYMICYHGDAPIGSTPQQIREGRTVQKKQSSKQRGEFPRSKTLYSGVSSRVEDKPSESIAFHCSSTSGLKNVTNKSHSFFCRAMVMPKHDHQKMIEKSVLFDQPSQISYQSDSHFGEQKTPKVTPTDKKICGCCIKKNGVVSHSVFSIRINRMDNKWEETLPNRTEQSIIALTLCFYISISLMVLSILKALSIGRKTIAWLMIQLKVLLLCFEDQSTPCFQEGRQRGAIPQFCTARHILQIMAFTVILACLFPLPVKGGTETNAYPTNQCNECKLLCFNKGVKAKIPKEINKVELFCAENCYIHENVKKLTYELPKEILLNDFQCEGHFWMDSKHMFKKDILCPAVDECELIECYFCIEQLANPTCYPLISSMTLYGHLADNSIYQANNYLAGPNRPPKDRRPRATASQNWTSRRVYRTMAFVVLMANSLQDLTGAETIAVMAKSEKCFKNATSMRCIVENSATLTLLPVGQTNTLLLKTEEGVLLGSINVLLKALALECQSFTKEWQRSYAINVLAAKRQFILPGQHSLLGQ

SEQ ID NO: 130057 - protein, 55 aa, Heterodera glycines
MADPFDSKSFGFMPAIGEQQVLICWRAFYFAIKPPKKVNVRIYARIASIFWPTGV

SEQ ID NO: 130058 - protein, 28 aa, Heterodera glycines
VPSSARRTRRRRQCIGAQATHGSAQHRR

SEQ ID NO: 130059 - protein, 51 aa, Heterodera glycines; identical to SEQ ID NO: 124998

SEQ ID NO: 130060 - protein, 483 aa, Heterodera glycines
FFENQSLLELHYIKAFSTDDSAEHEALKLAVDLFIWVMWFEKEILQLDNEHAKTAPRLTMAWKQNRWYYEMTYDKLFDIEKENEREELAKIRQEIGILLQESKNFAEQKRQMIDANLKIELRSKRLQRLQKPSRTAPPFGTLDRELYDIRRKAMARDDQVEPEFKKWLQQTHFNRLSDYVSQCNEFNAKFVKGTSKETLKRVAEFVGEENADEINRKANDCFGKLSNFEEYLAADGTHIHGIYMNPSEILEDIRKSEEIDKEKEAKEAEEKPFDLDATMAFLNFGGTDKKGKMAKKDAKDGTKSSDRRKKGDRKKQLEGELTDDPYKTPTESSIMPKSDEICMEKSKTKKSKSDSNQKVKKNKVEKPKHKKEKPASIKPKENEKGSRTPKNKKIDKMPNDDNASKTSKTKKEKTVITPNDKSEKEIEQKINDNVITDQKNEIKETKKKEEKKAKTLKKRNKNDGDAQKEFESIGIIGNNKIIK

SEQ ID NO: 130061 - protein, 460 aa, Heterodera glycines
IKNETWLIVIEREFFALLFRCFFVRALLFRSFQALSFVVHLPFHQQKTISTSVFALTVFDPRIFTEPIVSTEELNKPLNKPLPPNDKRNYMYLKPMLFDQTPVFYRDEIVDKMVRVFLMEGKKELSPVFYRDEIVDKMVRVFLMEGKKELSRVNVLSALEIVKRTQYEKWLNEKDEKWLNEKDEKRRAEIILDPIEVANRAILNCRPLMKLEKTIKAGTLYLGTLYLVPMPISEKVAIFKAMKTMRDICRLKAGKKRNEKRPHSASSTTVALLTQFEHQYSVSTADITAKIGQLHHLGPITAKIGQLHHLGPSEFAQLAKEVRHLLADVEELLEQMELSAREIPSSSSERSKYETRVKSERSKYETRVKSYRNDKRQLDAELRKAIERAKSNAERAIERAKSNAERDELFQCGDGSVSGDQMDKLITNTERLERTSRKIEDAYRVTVETQQSALTISDLP

SEQ ID NO: 130062 - protein, 43 aa, Heterodera glycines
TCLWGVSGSLITNMTFIGPISNTGPEFNKKSKTQNLKNSHFSS

SEQ ID NO: 130063 - protein, 94 aa, Heterodera glycines
MYSSSSEEGEIHEHPQPNPPVQEFHPNPQAHDPLPNLQPNEKMFFVAETTQHRVVLLADGFEYNFKADSRMADGVCGHQKYHPGLGCRLHHVRL

SEQ ID NO: 130064 - protein, 332 aa, Heterodera glycines
LLRKIIESKLPPPRGPNSPNSPIPPPPNFLLFSRVIRPANPKKCIHFDLSEYSFIHPPARPLGARPLGPHFCSCGQNAGAVPPPTAAAAAMPSSAPPPPTVVALVTPNSLSAVTPDGPLPFSPPPFFCVHLFCGPPSAPPPFPAPASEAPPPGAPHFSTAKMPKCSPLPPELGPAVLPPPPTLLPGVPPLTPPPPPPLNAGDCFISMPPPPSPAVPLSSEWSGPFGAGPPPAPDESPIPPPPPLLFIGFCAETLDGPVPAPPGVPTPPPPPSCCGGPTPAAPTVVGHIMPPPPPTPMGKLGGGPPPPTTDDGYPPQPGGPYMPPPGYSRPNS

SEQ ID NO: 130065 - protein, 441 aa, Heterodera glycines
MFQQQPPPHSQMQQQRKENFLSSDSQAREKLSQFVYEYLYQLGATKTAEMFKNEFLAHNMPNLQIDLSSSSGPGFLYNWWSVFWDLYSAHPDKKDKVDATSEAKTYHKMFPNPAAMGPGGGPPQNFPDGMMPNAYYGPRGGPQPGPSSNQASPIPGGGGPPRYGQQGTRSGAPTPSSVVGGGGPPPNFPMGLAPPQMMALNEQQQLRMMMAARQQQANQAVRMQMQQQQQQHNNGGRAVRGGGAAQFNNAHPYMDSPSGTPPFHFAGHHDSAGGVGTPGGAGTGPSSVSAQNPMNSNGGGGGMGDSSGDSRAAPNGGGPAPNGPLHSLLNGTAGDGGGGMEMKQSPAFSGGGGGGVNGGTPGSNVGGGGSQTAGPSSVHSQSGAPGGGASLAGAGNGGGADGGPQQQQTPPEEISKIKASLMEGYAGQQQQEDFPQQHQFP

SEQ ID NO: 130066 - protein, 142 aa, Heterodera glycines
EEWFNSLANPQQNDGAIPSLQQAKAASVRQKSSSFVGPQQQPCPDERLIWQDERHLAEKCRNKNIRNGTNIGNDEHFGDADAGTSADAVERRGWCRFAASFGLLARLRHAPSNFHREIRHLNLAQCREVHKVAVIYAAKDQQ

SEQ ID NO: 130067 - protein, 268 aa, Heterodera glycines
GLNPPAFQSLGTQSTNIPITGTAFQSPGQNPPAFQSLGLNSPAFQSLALKSPAFQSLGLNSPAFQSLALKPPAFQSLALNSPAFQSLGLNPPAFQSLGLNSPAFQSLRLNPPAFQSLGLNPPAFQSLGLNPPAFQSLGLNPPAFQSLALNPPTFQSLGLNPPAFQSLGLNPPAFQSLGLNPPAFQSLGLNPTAFQSLGLNPPAFQSLGLNPTAFQSLGLNPPAFQSVGLNSTAFQSLGLNPTAFQSMGLNRTGAFRPHSPNFCAKGFS

SEQ ID NO: 130068 - protein, 484 aa, Heterodera glycines
MEERDNMIKGGCKTTEEGMKRKERMIGVEITGDGLASPVWVPYRAYPQNNADVIMQEINKLGQSGDGDENKKTLLLSEPIMMKITCVTLPSGDGPRNVHKFDFGFKEHQRIRMRFTPESTEWWHLKSQLIHGNQSVVLWKGPMGRENVVPIFLENGHWDGLKNYVCFFNRGRKFCVDCECFYSRDVFHTLECRARCYYCNRVGGVPCGKESGVKIECPKCHRYFYNWECYNYHQGHTCKLWKRCVICDKTYQFNPKKDHECGETYCQLCSVSHDPKRGCYIMPIEEKEDKDVYRIVVWDSETSQDSIYKGDQKEHVINYISVRVTCTECCDDKNRANCKICGEERTKDWSEAEGHEPTKDFVEWILTAFTNYDTYIFAHNAGRFDGHFVFNYLCRTGKNPIPLINGLKIYEFKVQNSRKHSMLIWRDSCLLMPVKLESLKATFNLGCEDKPFFPYYYNKTENYGIRLEHLPPMEDYSPGSMNKR

SEQ ID NO: 130069 - protein, 21 aa, Heterodera glycines
MAISFFSWGFDRKLGTNICLL

SEQ ID NO: 130070 - protein, 19 aa, Heterodera glycines
TFAFSSLALPNTHTIFEML

SEQ ID NO: 130071 - protein, 19 aa, Heterodera glycines
TFSFSSLALPNTHTIFEML

SEQ ID NO: 130072 - protein, 19 aa, Heterodera glycines
TFAFSSLALPNTHTIFEML

SEQ ID NO: 130073 - protein, 19 aa, Heterodera glycines
TFAFSSLALPNTHTIFEML

SEQ ID NO: 130074 - protein, 19 aa, Heterodera glycines
TFAFSSLALPNTHTIFEML

SEQ ID NO: 130075 - protein, 352 aa, Heterodera glycines
MSDNPKKANKEMEKAIFISADCWLEVFNLLPPSQLGLGIAMISRRFDYYVDEHFKTRKWKLGKMKIRRKIGQNGANEMKIVNANGKELPIPQNPLPNKVIGFRSIWIYFIDQNVITFLGRFDRFFASCTTMLSITTGNVRILEFIVLNIWPMFKDTIYLLSLDIVAFRRMRQLAPSMLNDCPSLRFVNFFDGISLEFPPDDSANASDGQTVTKWLFTPRPDNLMNDLIVSIQDSAMEQQWLATVEHIKASFSSASSPVSFDIYIDFSLSSSISSIVPFELTNEFTGEKLALSKEDEEADFEDEEKYYSLFSLSRCPIGSDDKKQQKFEKFDELYDRWNLIDIWIGDDGFGDG

SEQ ID NO: 130076 - protein, 45 aa, Heterodera glycines
MVKVKKTDTSDFYIKYINWFLLTREDEWSFFFFGFCRANRASEGL

SEQ ID NO: 130077 - protein, 109 aa, Heterodera glycines
MSDNPKEAEKEMEKAIFIAADCWLEVFDLLPPAQLGLGIAMISHRFDYFVDEHFKTRKWKLRPIVIQRKIGENGAKEMEIVNNFGGKALPIPQIPLPNKVIGFRAIQIL

SEQ ID NO: 130078 - protein, 343 aa, Heterodera glycines
MSDNPKEANKEMEKAIFIAADCWLEVFVLLPRSQLGLEIAMISRRFDYFIDEHFKTRKWKLRPIVIQHKIGENDAKEMQIVNNFGGKALPIPQIPLPNKVIGFRAIQIFFVDQNVITFLGHFHRFFAKCATNLAITTGNVRISEFAVFTIWPMFKDTIYLLILNIVAFRQIRQLVPSLLNDCQSLRSFNLCDGISLEFPPDDSANATDGQALAKWLFSSHPDNLPKKLRCYMNSIMEEQLSATVEQIKAAFSSASSPVSFIILIDFSSSSSLSSIVPFELTNEFTGEKLALSKEEEYEDLIGFTLIRCPIVSDDKKQQKFKELDLRWNRIGIDIADAEAAMGN

SEQ ID NO: 130079 - protein, 25 aa, Heterodera glycines
MYSFLYAMAIVHGDKSLLVSMSPVR

SEQ ID NO: 130080 - protein, 302 aa, Heterodera glycines
AFQSLGLNSTAFQSLGLNSTAFQSLGLNATAFQSLGLNPPAFQSLGLNPTAFQSLGLNPPAFQSLGLNPPAFQSLGLNPTAFQSLGLNPPAFQSLGLNPPAFQSLGLNPPAFQSLGLNPPAFQSLGLNPPAFQSLGLNPPAFQSLGLNPPAFQSLGLNPPAFQSLGLNPPAFQSLGLNPPAFQSLGLNPPAFQSLGLNPPAFQSLGLNPPAFQSLGLNPPAFQSLGLNPPAFQSLGLNPPAFQSLGLNPPAFQSLGLNPPAFQSLGLNPPAFQSLGLNPPAFQSLRLNSFQSLSLNPQHFHH

SEQ ID NO: 130081 - protein, 175 aa, Heterodera glycines
VNGFHCPPKETKNWEEKKDKTSQEKEDGEKGKANGQRKKEQIEPKAWEEEEEFEKGFAPLVDSFEAIYARNCYMRVRFPGSQTEVINVSSYNYLGFAQSDGPCAEMAAKAVEKGGLSTCGSALEVGQCSIQSDLENLVAKFLGVEEAICFSMGFATNSMNVACLVDEVGKTYPGI

SEQ ID NO: 130082 - protein, 132 aa, Heterodera glycines
MANVDLALDEIISKSRPPPPPPAPQQRNFGGKRPFRMNATNRPGFGRRNSLGGGQRFMRSGSDNVVWINIANLPDTVLTQDLQELFEDYNVFGIGVHYDEFGAHMGTADLFVDTPSAESIIRDFLNVAIDDA

SEQ ID NO: 130083 - protein, 40 aa, Heterodera glycines
MRETDGVLAKRANVRFFACVRAMVNNASGGCAVKKINKTA

SEQ ID NO: 130084 - protein, 124 aa, Heterodera glycines
MFFTFAANSASSNVYHYISAVEQRFLTDTGCIVGDTSAEDGQLGQLPRYKQPIEKAIFEKVECPVCGKRLFRHNLLVHHRIHTVHNKKKFGEACAYCTLFNSFDCTKNDGNRKRVGRVYGRKCH

SEQ ID NO: 130085 - protein, 255 aa, Heterodera glycines
ARLLSFFESIGWKVYTVPETASFFLGPGRIRFPDLSSEQAAQFQTDLLKALIQNEDVFFNQAELSEAEKIMIILDRGAMDGSAYIDMESWSNVLSACGVDNHEMRERYHQAWIGHQCLSIVDNSNCCSFDEKISKLIAVVCERLGIPISDRLAPNSKKRKWLVSKIVDNDAFLQIKQEKFSLQHDYLNTAGSSQVRLRSRSQNGKYTYTLTTRTFEDADGKKLPQPVETRKQLDRREYQSYLKLLDRSRQSIHKK

SEQ ID NO: 130086 - protein, 135 aa, Heterodera glycines
VFGAVPPNRCAQIYGETESFGNSFPIACTLILRWIFAPHNCLSTPNGHLKKSIFFVFGAVPPNRCAQIYGETESFGNSFPIACTLILRWIFAPHNCLSTPNGHLKKSIFLFSGQSPRTDAPRFMGRPNPSGIASL

SEQ ID NO: 130087 - protein, 95 aa, Heterodera glycines; identical to SEQ ID NO: 129573

SEQ ID NO: 130088 - protein, 86 aa, Heterodera glycines
MAVFPVFPIVWHSLRSLHHGKMSLYQTAIFCVSLLRFALPAALFVAFSLFSIVHLFTLEHPYLLADNRHFTFYIWQRLFQRHWLVK

SEQ ID NO: 130089 - protein, 348 aa, Heterodera glycines
MEWPAFWQSFESAVDRAALEPVDKLNYLHGCLRGKAARAVTAYRGGENYAHAVAALRRLFGDPRKIAEALQSELINLRPVDDSVGSLQHFLETLERVCRQLLNLNMPDDSPFMYQIIRSKLPSTVLSELVKMERAAGIPWGTPQLRAGLAEVLGVREEVERCLRETNTDRQTRFRHEARPSRPQRPERHENARVFSVAQSVVNSGEKRVPSCLFCPGQHWAAECNKVTDTENRKRCLLQQNRCLNCLRKDHQLKECRSKQGCRICKERHHSSICPSAKGTSSARQKQPKPLHKNKQTFGTERNSRPLVSSAVANDADSIPEPKIVNTIMAIVSPSVPHLVMIMALRAP

SEQ ID NO: 130090 - protein, 95 aa, Heterodera glycines; identical to SEQ ID NO: 125597

SEQ ID NO: 130091 - protein, 27 aa, Heterodera glycines
MVGRIKNVYSKVYDVPRRPFEKERLDQ

SEQ ID NO: 130092 - protein, 35 aa, Heterodera glycines
MLELNSNKTKKVQLEEFIMCICISAVDEPFKRKVD

SEQ ID NO: 130093 - protein, 242 aa, Heterodera glycines
VVNRTRQCWAGPDCATTRHQTADAIRPLGPKSSVPSFKGQAIVNAEMKTISYDDYKGGQAIVNAEMKTISYDDYKGKWLIFFFYPLDFTFVCPTEIIAFSDRVAEFKQLGCEVIACSCDSQFSHLAWVNTPAWVNTPRNDGGLGKMEIPVLSDFSKKIAADFGVLDKETGLSYRLFLIDPNGTVRHCLVNDLPVGRSVDEALRILKAFQFFEKHGEVCPADWEEGGETIDVKSPKEYFKKQK

SEQ ID NO: 130094 - protein, 339 aa, Heterodera glycines
MRLKYLSSVVSASDEISCAGDEISCAGALCYSPNGRKLAVGTPDRHILLFDDKFRRRDKFGTKPMEPKFGKMSYLIKCFGKMSYLIKCAVFSPDSAKLAVGQTDHIVFVYRLGDTWNEKKVICNKFAQSSANEKKVICNKFAQSSAVMAQCWPTESKLIIGLLDGKVRCLLDGKVRCASASSNKCSTLYRAETAVTVLAQHPNRKSFLSGHSDGTIFLYSFLAQHPNRKSFLSGHSDGTIFLYSFETRSHARLKSQVCVHPCAPQALLLSAVGIETRSHARLKSQVCVHPCAPQALLLSAVGILAAGTDRRIVSYSEHGAMQQFDYSINNYKREFNCLI

SEQ ID NO: 130095 - protein, 152 aa, Heterodera glycines
MSFSAIVNNLSAKVDNLSGVVNNHSVKLDNLSGVVNNLSGVVNNLSAKVETIEKKMAVMGAYNENNGTIEVTLHGYNVGKAIVERILNTENGTVHLHGMREPMSLAKAVEIGFFDNLSLTVVDPNTTQKAVFGRNIGTEKKYFCQARVIFFF

SEQ ID NO: 130096 - protein, 161 aa, Heterodera glycines
MVNSPAPNFLNLKEVFGNGSDKLKMDELTKDGGKEKEENEEEKEEEKEEEKEKEEEKEEETKEEEEKTEEEVTEEGNGEEKEKEEETEEEEEEEEECENGQKRETDEEEDEIERIIMSSSHLLKCEEVNRRTMSLVQSCSAHANLVGLQNREGMERDFFGY

SEQ ID NO: 130097 - protein, 209 aa, Heterodera glycines
MTCFECGTPYVLNMDGSRSLAPFNVICDGSKYCTGKYCVTRKSQYPRSFCATSWEDPKAIQCQKVNDPYDDQECICDRNFCNYPYDPMNPPPPTTTLPPPPPPTTTLPPPPPPTTTLPPPPPPTTTLPPPPPPTTTLSPPPPTTTTILATTSAYVITCPDGRQFGPNDLAVYMGQILKQAILGTYSNAFGNSALDSYKDGINTHICNYM

SEQ ID NO: 130098 - protein, 36 aa, Heterodera glycines
FALRLEHLGQRPAESDSNLRTEFDGPFSVETTLIIL

SEQ ID NO: 130099 - protein, 27 aa, Heterodera glycines
MRGFGVPEIIQQALFCFFKPSISEILT

SEQ ID NO: 130100 - protein, 57 aa, Heterodera glycines
MKNDQQKQEQLFGKITELEKKMNKQQIKMTLLTLRGNYWDATACNNGIEITDKFDSC

SEQ ID NO: 130101 - protein, 111 aa, Heterodera glycines
MIDGILSKHLRNIDQNNSVAMAQLHIRLAFLRKVLGILAFQFLATIGLGVAFYITDGVKVFIQQQPWFPFASFFGSIALLFAMFVYARSVPLNYFLLSGWTILQAVTVGTI

SEQ ID NO: 130102 - protein, 47 aa, Heterodera glycines
MSAGRALRTSVLYKIGVDHFLLRLTVFRVQEKRRPLPKHSFSSSIDW

SEQ ID NO: 130103 - protein, 248 aa, Heterodera glycines
MFPNDDGYESEDDEILLPPPPIPPQLGHPPPNVPAVRVQPIHVGQQRLPLRDLPQFEDHPQNVPAIRVQPMQQPVPMRAVPQFPHPPPNAPEICVGPIHDGQQPLPLRALPQFAQPPPNVPAVRVQPVQQPIPLRDVPLFVNPPPNVPVIRVQMPQPLLRDMPQIHHPPRNVTSIWIKLWLLFLSLWVFLQGIHVRQIQREYAVPQFAHPSPNLPYHPPENVPAIQPRQQPRQLRDVPLFDHPLPNGQ

SEQ ID NO: 130104 - protein, 289 aa, Heterodera glycines
MFPDDDGYESEDDEILLPPPPIPPQLGHPPPNVPAVRVQLMHVGQQRLPLRDLPQFEDHPQNVPAVRVQPVQQPLPLRDLPQIFHPPPNVPEIGVGPIHDGQQPLPLRALPQFAQPPPNVPAVRVQPVQQPIPLRDVPLFVNPPPNVPVIRVQPMPQPLPLRDMPQIHHPPRNVTSIWIKLWLLFLSLWVFLQGIHVRQIQREYAVPQFAHPPPNLPYHPPENVPGNPTTATTAPAERRATIRPPVAKRTGLFYALENARNYQLMGKSITEDKFRYLMKTEKKQRQLAM

SEQ ID NO: 130105 - protein, 203 aa, Heterodera glycines
MDTKLSILAKELPTKREMFENAKIGDIELATFMLDFHAELSQAGQTNSYWANESDQTMKDYLQKAEELFRLANELIKPLKKIAGQQMEELIKRLEPEISKLISLIDDQENSEELSEQLEKRVDKIKEIGCKAMGIVLTIDTPKKEEICKTVEEIEKVTKELEKNTGKSDKVKAKMRKLKKLLENDNKQFVERPYKMERKRKGI

SEQ ID NO: 130106 - protein, 133 aa, Heterodera glycines
FLSPPRLFLFHGFQFFFCHFQIFHLTKCFIFLYKFDEIAQCLLNFIFIFHGHLINQIRLNFNHQSVKLPSKLINDCPHGRQQFGVTKDGKRSNLASLSAGVRPWKILTQKSYKIRMPTLGKKKKLCQFLIYSF

SEQ ID NO: 130107 - protein, 124 aa, Heterodera glycines
MKQFLFTFFNILIFSFSSFKFSVSTRDEEWEKWEEWKTQSQEIIEEIQKVQLDQKYLLRMNIKDFCVKIFHGLTPAESDAKFDLFPSLVTPNCCRPCGQSLMSLEGNLTLWWLKLRRIWLIKCP

SEQ ID NO: 130108 - protein, 171 aa, Heterodera glycines
MGFYSLVEDKLMKEINGLPTLCQNFFKNFLEKIDFKQMMDDLMHYQQIRASLKHPKMNKIGDTVNIKVTVVQQLASLLYYGLLYQALLDELNKPKNLSKRDAAKFWIKNFLIFSLAAIRAEFNMAKYEMENGLDDDRINLLPKFSIGRHYNEKLAKKLAEWTDRMQKRHQT

SEQ ID NO: 130109 - protein, 299 aa, Heterodera glycines
MVFSRDKSGLAKQMNSLSAKARRKRKEWRQDRAQKGGSTPKSLKQTLAVPTADGEETSTQAAESGPSTSTLDLRPRSSTRPLSATPVRHHVRVRPKTTDKATNMDFKTTDKATNMDFTTTDNATHMDLTTMDKATDVDLAYEDAATQTEQLDKQLKEQEQTISFLRLQVRNRDAMIADLRRQLEQQAQKDQPTPSTRRKKNAATLEQTSRRNLAKKIADVIDRDRSRSVSRCSLQSLHREVRHKFGHYTPMKKEQLRQQQTIHEEDGLFLLSQLGTQKAYERMKALLRLIGGKFDVYRP

SEQ ID NO: 130110 - protein, 188 aa, Heterodera glycines
SLKSDAVPNVGYPNATPTPLDKKAKKQKRRNDGNSAIHQTVKQMIVGEVAKGNGKANRHKGKRKVTFSSESSGNEYYADNSEQKSEVVRKDLIATNGQFSEDSMENEEESLDDDLEEEEEEIGEDLEDEELEEADDDELRNGNLEDEEEANSSFFTSDDESLEDEIGEESGEGPTNPTILIGLNYSNV

SEQ ID NO: 130111 - protein, 36 aa, Heterodera glycines
MALNLTYLLTLSLYCSNSMHEVGAVQVFEFFFAVKI

SEQ ID NO: 130112 - protein, 511 aa, Heterodera glycines
KFEKRKEEKEVKVKRKKKKAKQKKQKKAAEEKEEKEGENTVIGEEREEGTNTVEKDTVGKESDQKEGKENEERKEEKAGKDKENTVIGEEREEGTNTVEKDTVGKESDQKEGKENEERKEEKAGKDKENTVIGEEREGGPNTVENVTVEKGSDQKEGKENEEREEEKVGAYSEGITEIGENNLVENNRKMKMREFGDGKFLAAKYDEYLEIINKGQQQNEQHTEEMGKSIALLNIGVLSNEISNRLEAKEWEANGSQRKSIGEQWERLKRTEYSQAEREGKEEKHLEKICQIIGEIVGAMGENREKGGAKCDQIIGQLHQRKLGEAIKEGKVKNWEEMGESSKKMALLNLYNGTMAEKKNQKLFYEYKNNANLTTIAEEKDKCQFKENNSQLFQTEKFQELNSAEEKKRKFRETEKVKKEIKLKNGQKNGREMAEIKQIFDEWSDAAHFQFPSLFFLRDTHSKFATICILPEEFEEKLIFGESNCDEKTEQRADKCSDNSLFCALCKVMEN

SEQ ID NO: 130113 - protein, 542 aa, Heterodera glycines
MKVSLNHLTNGKYLTLLENEFPEVLRIDILTKKSVVYRVQQMLMNRSNSELYINNFVLFVTALLVDQMARLHSQFGATARPKASPALRLLADKANAAAEDALRHFGSTSQLCVMNTILIFVWEVNIEKKAENVTKKAVKKLGTSECEEWRVQRQAMAEAMGTRLGTLITAAIAELLMIDKTKVQSALKYPGAQIRLLRLAGTVKRTDQLTEHFDLAQLFVNNALTNDDDFWVHYLQAMCRADKIERKSHKFGADLAAFVRWLRQKLTVERRLNSHFVLIRNYISDQIYNPIFDAEETTLMGGEEFLEKLFWGTKKMVEKLKGTEKKSENLFERWKLIAEEKKEAKKAKNGEFEAKKRWVGQIHAEEMRKLLKNGKLSQLSEVLNVFGSKTIREGLLQFFDVNEIDELFKDFKLKENKKTQIENLEDYFSEDEESEEIEEEFEQSEEELDEEDEEGEDGREDEFEGDEAPKKQKEIVAPENAKECAKRMSDRKEGEILECDQTEDNALADHRQNEWRSAVPSPSSANVSAFSVLGQFKIVSSL

SEQ ID NO: 130114 - protein, 159 aa, Heterodera glycines
MSSPNDVEQNEEKGPMKCQSFRWHSDGAEDEYGRYPFTEYPKKRQKILSTVLEAIGNTPMVKLNKIQSEFGIECDIYCKCEFLNPGGSVKDRTALRLVENAERVGRLRAGMTVIVPFSGNVGIGVAMNEAGTAMCHFDGTAEEILDALDGAVEMVVIGV

SEQ ID NO: 130115 - protein, 234 aa, Heterodera glycines
MVFEQRTKQTNFAAINVKFLFILIFLICLSNFVLSGKNQWKKQNKLEEETEQKTLWNIPPKQKVIDERHRCPEKEGKKRTEKATEENDDERIELMNIFKNFIRNESKNKRTEKLKMRINSLKLVLERTIGGILAFARKIGTKNEQKGEFIEEIEKWENKRREIEEKAGQKKMDGKMNNWLMWICLMYELGTKMVEGMAKHAAAQKGSLMVEAWRKYAKEKHIADILKVGGGNGH

SEQ ID NO: 130116 - protein, 368 aa, Heterodera glycines
IAFHAISAAIGGTPLVKLQRLPREDGIEAEILVKCEFLNAGGSVKDRVKCEFLNAGGSVKDRIARKMVELAEAKGILRAGQSTGILRAGQSTIIEPTSGNTGIGLALMAAIRGYRCIIVMPEKMSWEKECVLRALGAQIVRTPSEKGYTDADSHIGVALRLQREIPGAVILDQYRNDGNPLAHYEGTAEEIIWACDGKLDAVVVGAGTGGTMTGIAKKMRQKLPNCKIIAIDPEGIIAIDPEGSILANPNRQTHAYEVEGIGYDFVPYTTDRNLVDEWIKTNDANAFRTARRLISGEGLLCGGSSGANVAAMEVAKRMGRGKRVVTILPDGIRNYMSKFIDDEWMSKFIDDEWMRVKGFEGIKRGQKK

SEQ ID NO: 130117 - protein, 25 aa, Heterodera glycines
MKVFTVGLDQKPPLEEAKGSPEKSD

SEQ ID NO: 130118 - protein, 95 aa, Heterodera glycines
MGYENAGPYDYYHRASSAIGEKFDRLFSLAKSNELPPSLPISASMDRDPSTTSTTSAPAQPSEPVVAIDSFPQFMGLNGRRVHQPFGPQQNSVEV

SEQ ID NO: 130119 - protein, 198 aa, Heterodera glycines
MEQPMPQMFGSNGMTNSGPFSQVRDARLQFLRNILQKIKQHAEDIGFDGTMQVSIIEVEPQNGADGAETAAQENGNINNNNNIWGPQQRGVEMGQQPQQQQQQSLPAQMAFPMPQHFFPHPRPLIDDFKNSRSFLDGFGEFHPPSFVQQQQQQMNNHITEPEERPRMFGPWAQQQQMPNMPDEFQQQQQQQQQQQQPN

SEQ ID NO: 130120 - protein, 130 aa, Heterodera glycines
MNLRFPPIQPPQVNNEWAQQQQQQQNALQLQQNGAAALPRPAAFDRWNGGPPPSSSNNGFFVPPPPSPQFAQQQQQEQTEQQQQPQPQQSVVQQQQQQPQPQPLQQQVVSGGDWHSFLATKTQSSKELKQ

SEQ ID NO: 130121 - protein, 239 aa, Heterodera glycines
DKTDPDNSKDDDDNDDDENSNANRGTGTMFGAGPPSAQPSDIVKFPTVTVVEAAKNEHDDAVEPIPTSLGTEQPAAPPAQPTPAAATPQVQAAGAAVAPSQTEHQQEKKEQSADELVEVDAPPQPIVPQQNNQPAQPQQQQPQQQQQEEMTKTEQEQPQLNQQQQPSPPGISPFQQKWFPEVPSVFFQKDNSREEIEKTEKVFESMVQNMKRMIGKMFKVDDSDSTEIVQVKIKPIEAF

SEQ ID NO: 130122 - protein, 92 aa, Heterodera glycines
KKNNFVSKCQKLQKFNPPKPLLYFENVNSIVQPPKSHHSKCVTVKVICIHSFVEFCVFFLNFPGCFGITSSRVPRLKMELIGADQKLSAAGQ

SEQ ID NO: 130123 - protein, 21 aa, Heterodera glycines
EKRAGAETGAPKRERRNAWVP

SEQ ID NO: 130124 - protein, 78 aa, Heterodera glycines
MGRNGYRVRDSDQQNGSSVPQFRPGPAKNETEIGDDNKSAQSEHENEHEKKPNNEMSRINGGDETNERETNKTESEEK

SEQ ID NO: 130125 - protein, 446 aa, Heterodera glycines
FDGTNWQHKVKTRKPKVPMPNIGNANEGEEEKMPQPERAQITHMSREGDKMPEKEKANSNSDTAEQQPKHQHELEIGQFRSPTAEANDGSEGFEVITREENGGHQTEEGEEEQKANEGEKMPKSSGNAENTGQGEGTQSAATTTTSALASTTTTSETETAKQTERTTEQPQSSPREEGAGGGAANGPADTEVDILAPRGPPAADETDKEKTEVPLLPAEEKPSTTAPTEQTQTTPKTTEAEEEQTTPTPTTTAISAGHGVETLHSALSAAIGPGFLDYQIEALHQGSVIVEGQLLSREEISDAQSLPAHGPNGNGVAANQRQQEEEASQFGSKCSFLGFEIQAESTGYIIGGAVVVGVLIVVFAIFAIVVFGHRTEDDNARHGQCHQRTKHRRKAQRNERAAAADHPKRLAIFHSVGVHFSEQQTLRGGDRIARSVIDQRIVIFEL

SEQ ID NO: 130126 - protein, 48 aa, Heterodera glycines
MPSLCSSPLRVHRLNGRPTAQPMQCVFARRANGLARAEIHATERAPLV

SEQ ID NO: 130127 - protein, 194 aa, Heterodera glycines
MVLAQTICMGKLWEGSEKKHSHGIGNGPLAKIRNKKDENAIIGPIRMTKFSEKFENFVVFKCFGTSFNVKNFCGFVGKRLRYELLEFVENPLAFWVDFCHVFPKAIALSKCQTDGSKICELAWIVGIQMAPNQKANGTFKRKLNAKLSKKLEAKLQGDFEKGSFHNIQLKAEMASGETVRNWIAKEEREEDEEE

SEQ ID NO: 130128 - protein, 84 aa, Heterodera glycines
MFAASSPPPDGFRPLFAEERRDALKERPLRFWRDWDERRSRIMGQGLGPKNAWEEQIQWTERGMMWPYPIDNDYMAGEEEKENM

SEQ ID NO: 130129 - protein, 264 aa, Heterodera glycines
GSALISVPTRHFTPTVSRERKKRQKNASKKRHRPPLPSMVSCGTLRFLLAECRREYTWLDFVGGGMQLEFMVSIDFTASNGDVRLPNSRHFIDHLCLNQYEIAIRSVLEICQHYNDSKQFEAFGFGAKVPPNQTTVSHLFPLQANAQPAARGVDGVMDAYRTTLQSVLLYGPTSVLLYGPTYFEPTVRYASQKCANFPRDGSRYQILLLITDGLIYDMVKTKLAIIEASSLPLSIIASSLPLSIIIIIIGIGDEDFSKMDEDSD

SEQ ID NO: 130130 - protein, 287 aa, Heterodera glycines
SARHSAHAGGVNALGQVSTAGESTKKWPKNSRDLKDKDLLSKSDPMCVIYSLVPGKGGTGPEYVEIGRTEVIWNNLNPRWNTKVTLNYFFETKQQLRFDVFDIDTENTRDLSSQDFLGVFCLGRVVGKEGMKKVPNFGDEPGQEGKLIIRADEVDEGQKEMVRMVCHGQQVASKGIFSARDPFLEFHRLYADGSWVFCYRTEVQTRTVDPEWKPIEIYRTEVQTRTVDPEWKPIEISVRHLCQGDKNRDFLVECFDDFLVECFDYKLAGVSHFSINYLNSSGGQKWG

SEQ ID NO: 130131 - protein, 79 aa, Heterodera glycines
MYKPFVRNGFGRWHASLAVFATSAFFHEYLGGRAGNIVVWLSLILGQPMAILMYVHDWYFLHHPELHAAHRQNLTIAHF

SEQ ID NO: 130132 - protein, 169 aa, Heterodera glycines
MIRNKLESLQESRKKRYLSDISNTTEEDVNLGVKFVEPNADLDSHTTQEIAEDAQIEFFSIILAVFSWNANVLPLLLSNIYRLDTAPDVGCYTRDNNFDYQLGTSYAATPRVRHRLTGTINSYMANHYTYGTHKWTEAQRSIVKIEGQRQFAEKGKGNNKRSKCHQQQK

SEQ ID NO: 130133 - protein, 111 aa, Heterodera glycines
STQFSPTGNHCLLDLCIYFQKLKFLATLGTIILTINSEQAMRLPLEFGTGSPAPSTLKLNKKIHLQHGRTKSFGHHIFQFRRHSQIEGYAGKLKDLKILMIQLSMSRNEFY

SEQ ID NO: 130134 - protein, 26 aa, Heterodera glycines
TQITNTNVYQKHDTHNCVTLNSNNKH

SEQ ID NO: 130135 - protein, 61 aa, Heterodera glycines
MIIKKCTDKERSPSVRGVSEPKFGRFCHFFDEAPEGVQHGQNRLCAREESRVLGEGEELGN

SEQ ID NO: 130136 - protein, 152 aa, Heterodera glycines
MKLPLPVCLVPVPPVKICTGNIIYYCSMLIIPFWIILFLNVARWGILSMPEKMVGNGLNMGQLIQNDQNPNQIENQNGPNLDQIANQNDSNLDQIDLNAPNPDELIETGKLGEVPILLPRKYQDRTIQVEFIAHKIISDAETRQKFFKPVEL

SEQ ID NO: 130137 - protein, 48 aa, Heterodera glycines
MFTNFPLLFSAFSIFLLLLTLQFPPKVLGMFSNYNVLPLYQKNNGFNG

SEQ ID NO: 130138 - protein, 95 aa, Heterodera glycines
HLFDLSNSIICTNGSSMANASVISMAAAISKGSLLSQCQSQQTTKQSERPNDFDGHFVGATDCASRQRTYALSDSPVSSPLKQPAEAAGTVKIPK

SEQ ID NO: 130139 - protein, 92 aa, Heterodera glycines
MAIHCPASPIAAPFLLPLLLLLSPFVVQLNGISFVPSPLGFINPFIEGNLRFGPNGQFEASPISPTPLVSQTVPGWLLSRNVRGFTRPRKKT

SEQ ID NO: 130140 - protein, 72 aa, Heterodera glycines
MDDLMDEGVTDEEGFFHLSGKESEITPIEPKVNIYHLPASYITDGPVAEKVFPLGTLNLAGSFKGETRDCLN

SEQ ID NO: 130141 - protein, 116 aa, Heterodera glycines; identical to SEQ ID NO: 127487

SEQ ID NO: 130142 - protein, 118 aa, Heterodera glycines
MEDKFKEDLLQYLVSAGKAESASFRLNDQINAHSADHSALKQLFLSLESVIEPFKTQSEVIGLIGTELGWRPVIKLLQALLINGFATADVVLKERALKVLAELIPMYTSSAIGPHWSK

SEQ ID NO: 130143 - protein, 391 aa, Heterodera glycines
MANDQPLQTVLQFLRNGWPAKVADSEISPYFPKRDKIFEVDNCLLYEDRVIVPTSLRSRILKALHIAHPGIVRMKALARRHVYWPGMDSAIEKVVSTCEECQLGQKNPTKAPLSPWPTTDKVFQRVHIDFAGPCSDGHQYLILIDSFSKWPEVYRMNTISAYATVFVLRSIIYRLGIPEEIVSDNGTQFRSAEFATFCKEFGIKHIFIPPFHPQSNGQVERFVDTFKRSMKKMSKGGKDWIEKMLFSYRTTPHVALNGFSPDQLFFGRKLRTKLSLVHPNGEKAENFDQNSFKKGQSKYTDKMAQNFDRKHGSKVINFSPNDHVLLINYRNNKTEWLQGKIVERLHNSPTYRVYVPVLRRLVHRHANQLRRRHLLEDEARKRGTSSRTAAA

SEQ ID NO: 130144 - protein, 374 aa, Heterodera glycines
LINFVQNALMRMAGGDLSVGCQWPGSKDEYELQDAIGVGATATVFKAFCKSKNEMCAFCKSKNEMCAIKSINLEKCQTSVDELSHEIQAMSLCSHPNVVNYYTSFVVGEELWVVMRLLNCGSMLDILKRKIKAIGKDQAIGKDQAAYGVLDEVIIATVLKEVLRGLEYFHNSGQIHRDIKAGNILLANDNILLANDGTVQIADFGVSGWLAASGGDLSRQKVRHTFVGTPCWMAPEVMEQVLSRQKVRHTFVGTPCWMAPEVMEQVSGYDFKADIWSFGILCIELATGTFKADIWSFGILCIELATGTAPYHRYPPMKVLMLTLQNDPPSLETNADRKEQYKAYGKSFRTVIKDYGKSFRTVIKDCLQVWNGAT

SEQ ID NO: 130145 - protein, 143 aa, Heterodera glycines
VADTYARISHGLEKFGQLEAASGEKEFGQFLGKVTTSFEKLKKAEARVGTDEELKEVDTLRYFLGETQAAKAENEQAEACKKFEMISKLAKTELTELKKERIASFKKNLSELADLEVKQSKAKIVILQSAIAALNEMIGAQNN

SEQ ID NO: 130146 - protein, 251 aa, Heterodera glycines
QMEMWDFQKFVIKLTRTLRKATVETQHPIVVNISDALSEREKVKYTVQTKTNAPEFARVEMSVVREHDEFIWLHNCLEDNEEYAGFIIPPAPPRPDFDIPPAPPRPDFDASREKLQKLGEGEATMTKEEFVKMKQELEQEYLATFKKTVEYLATFKKTVALHEKFLTRLAAHPVFQKDQNFRVFLEYENDLSVRSRNKKELSVRSRNKKEIVGSIFKRFTQTADEVFLSGQVLSLFSFLFFLSFALNAENL

SEQ ID NO: 130147 - protein, 130 aa, Heterodera glycines
MSATVCFLSGWHLLQGNTAGIMATDGPHTEIGVELYGGRPAQHGRVDDGQRDEKRRQRATPQAETDEEHPSILPEDAGWFDRRPGGVFLKMLLHISLACFAVFMIPYTYEKVVPEEYRCKIKYKKNDGHH

SEQ ID NO: 130148 - protein, 122 aa, Heterodera glycines
MTSPTDQQEPIQTTEAADDKAKSDQHQQTNEEQTKCKKRRIEEKENLGLPIAQSTPLVPGPSRAIAHCQPNQSIVVAQNHALRHSPPPTMAPSPILGHYFPFGPNSADSSAVSMFPSPGRGW

SEQ ID NO: 130149 - protein, 199 aa, Heterodera glycines
MKNPEEIGEEESAEELVKLCEKWKMMALAVDAFVGGDLNVKPQFELVIILVNEKDCDLDQLLWTDTRKNLDGLSATLKCCRRFRCNSGSDHEKKVTNEPDYSLKKDFVLLRQFDQGNSLKLERYIGVLLMEYKTQKQMVATDPCEEAKLKVIKLMKDVQKSLDKKEKDGVTKTDKGGLNELIKMEKLKSKTGTRNDKAK

SEQ ID NO: 130150 - protein, 126 aa, Heterodera glycines
KILKPENWSTICNAGKDHEKKVTNEPDYSLKKDFVLLRQFDQGNSLKLERYIGVLLMEYKTQKQMVATDPCEEAKLKVIKLMKDVQKSLDKKEKDGVTKTDKGGLNELIKMEKLKSKTGTRNDKAK

SEQ ID NO: 130151 - protein, 20 aa, Heterodera glycines
YREAIPEGFGLPINLGASVQ

SEQ ID NO: 130152 - protein, 126 aa, Heterodera glycines
MSGLTAHFEPMIPQQNGGRPLNGLSLLSGVLSAASLPDSPLSPSSVGGGLFPPAFPSSLLFGTVPSPFFAQSAIVADQQQQLIAQLIAAQQKLASALLGSPPAAQQNATQTATMAEVGDTNQQKMF

SEQ ID NO: 130153 - protein, 502 aa, Heterodera glycines
MPRGQQFFQLAMGESHAEWDVVELLRHSALEGHWLCLYNVHLTPAVVNRLMTELGSLSGQLHADFRLWLTTEPDDQLPVVFLQLCLKAAYETPPGLKKNLERNFIGGRTEQKGTKRGTDEAAKAKAAFVLHWLHAVVQERRNFIPQAWLKAYEFSEADLRSAKIALNSLFGIAGKNNLKGVDWEMFRGLMLNAIYGGRIDVELDNRVLLAFLLELFNSKMIDGAGDELAPGLKMPMFGEQKDFMDWVSSTLPETDRPELLNLPRNIMLSWDLAQSDAAIAKLRRLFAALSLSQQNASGVGTFPRRDIAKAFSKHLWGEALAPLLSLWKRLNQQKPQMLQNAQERQKEMPKLEKEKANAKGEANADDPLVEMLQLEFAYALKLLQNIHSSLSAISRAIKGTNLPEKQTIEVAQSLINFQAKAMQIDFVDQSFFLSDSVFLGFPLGRWSVGAIEIFGGIGVQSAQHPNAALPGPVPAIAAFPGQFGPAFSPRFSAECFSPILRP

SEQ ID NO: 130154 - protein, 489 aa, Heterodera glycines
MGILDTSWESMRRFLAKGGVKEEIINFDVRRITPSTAKKVGALVKSKAASFDPVNAKNASTAIAPLAAWVTANLQYALILEKIAPLEQKKESLVKNLNAAEQQMERLSKGLKSLDKKVAELKTNFENCMKEATEIKIDLDREQATIVVAGKMVERLGGEYARWQQQQKELEDELRTVEHCCLIGAAFVTFLGAATEEMRAQTMANWREICQLPAAFDLLNFLASETAQLRWKSEGLLANKLAMENGAILFAVKNTPFVVDPSGTVCTFLANHFKGNSTEILRANQPDLMTKIELGVRFGKTLIIDEIDERIEPALVPLLRRDFHTIGARLAVQLGEKQASTEQRTGTADGVWHLLLAFLAVHLFGFFGFNRRFSQVDFNDQFRLFLCSRNEHCHLASHVSAVVSEINFSITRSGLASQFLSLAIELEKPELEQSSTQLSSQMEALKLEMDNLEQVLLEQLAVSDGSLLDNTALLESLNESKEKADKVAR

SEQ ID NO: 130155 - protein, 67 aa, Heterodera glycines
MQKKAAKKSKLLAEKQAEANGALAEITRSMSGATEQKEDMEKLKSTTEAENANIEQQKKLIEQQLAD

SEQ ID NO: 130156 - protein, 522 aa, Heterodera glycines
MLLDADAGIGHWHGRQSVRTGGDGKDRIGEGIGRTVGQTGGRRQKTEWHKQRCPLEVLVFNCDEGIDVRAIGRIFVGLIQCGAWGCFDEFNRLGRGVLSAVSSQVQLIQEAVRAKASLCRIGDLSVPVDFNSAIFVTLNPAGKGYGGRQRLPDNLKQLFRPVAMSVPDNQQISETLLFSEGFGQAKVLAKKLVTIFELAKEMLSEQQHYDWGLRALKTVLKGCADAMAKRRQNRGGTADDETEMVVQQLQLNTLSKLTFADARRFRVLLDGIFPGTKREAAQFADLIEPIRKASEHFQMRTTNAQLQKLFQLYEQLRQRIGVIIVGPPGSGKSTLWRLLQKALSLSGEQPGDHEPKRDAAQPTCGPNGLGHARVDGRHADPGGSHGRQRRNKPAWIVCDGDVDPEFIHQNEKELPAQFGDWLNKNLVPSLEWTVKQRNGALAFSQIGILNNALSLVQNAKSKNQFLVALLRAFAPFVSSDKRSELCQRVFSQNTCAIPDTKVPLNVYCDGRTDSLLGYSDDF

SEQ ID NO: 130157 - protein, 272 aa, Heterodera glycines
MNCQIWFGQLMCIMLLMVSTDYVVSQDDSSTSSSSSTIHRPHRLQLQPVHRPALQPRPLLLRPVPRPRRLQLQPVRRPALRPPQLQPRPVHRHQRVLRHQLLRAPQLQHPLQLRPVHRPHRLQLQPVHRPHQLRLQPVHRPALQPVLRPHRLRPVLRLQRVLQRLHQLRPAVRQPQLIRRPAAVPTRLVTERATFTRIGATDFRHGLNSIVPKHATCAHQRPPALQLQPRLQQAPHLPRPNRQVVHPVAALTVLVPDCAAVTVGCATVLAFG

SEQ ID NO: 130158 - protein, 356 aa, Heterodera glycines
MGNVEQQGKHCLLLRQQQPPRGKEAQVSSDSLTSINPPSGTSSSPSSTSLSTAADVPSQCNARHCQHPATPTTAQITDQEEVAAEASSARAADHLQLDIDQTSMNASFDSDQTGKDEYDQSTDQRWVLDQTVGSDRISDQYLRAAGQNRRAARKWEIDHDQSADQNWNSDQSQIPVQQIWKRDRNRSPYRNDQSRSTAQNRATDQNLRNDRNWAIDQSENADHKCGADQRWVKIDQNGLDNNRLSSSDHTFVSPSPPSTDHHHHHLHASNFSHRFFGHYFGPLLLHPIVRALITVGYMAYIGIAIAGCMNFREGLEPSHLVTSDHYIARYFDDMKTFWKMGPQLHIAVIWGKSMGL

SEQ ID NO: 130159 - protein, 126 aa, Heterodera glycines
SELYRETKCPNPKQSNIFEPDINYNLVIHNNGSSTELKWKCFRTKKYSDSKRRRINDGTDGAGPSEQRELPNEKRVPKITQDLLANFTGKQNDQNQQENERDRAINETLDLLDNFGSEDHQKAPAE

SEQ ID NO: 130160 - protein, 21 aa, Heterodera glycines
MRTRPIWQVKQRLLTSQKKML

SEQ ID NO: 130161 - protein, 95 aa, Heterodera glycines; identical to SEQ ID NO: 125597

SEQ ID NO: 130162 - protein, 329 aa, Heterodera glycines
TSQEREMEVTKLTGAKVKVWSRVWNETVSQLPLMAWGSSAPEISSAPEILLSVIEIFANNFEAGDLGPSTIVGSAAFNLFIIVGICIMAIPSNEIRRIDRVDVFWVTVLWSIPSNEIRRIDRVDVFWVTVLWSSFAYVWLFLILCVFSPNVVDVWEGILTLIFFPLTVVSAFVANKHAVWEGILTLIFFPLTVVSAFVANKHAKSFGKRILTTKAITSFRHTPRLSKQKRRDSAKSNGNGVSSDTDLDQLNGDSNALVKQKHFLEIIKRLRNENPNLSVAELQQLASSLIFTEVPKSRAFYRIQGIRRMTGNGDISSKKFREQAQEEQA

SEQ ID NO: 130163 - protein, 45 aa, Heterodera glycines
LDSNLFSLFHFLSFAMPQYNLFANRSLLFTKRFFVVGPPGTKGLN

SEQ ID NO: 130164 - protein, 97 aa, Heterodera glycines
MVVLLLILLLVLVVLQLLLLPFARSWRREGQRGRIFRGRHGRTAPTAALAHCAGGDGKRRQRLRVVHYRSPFAAGAATAAELLHFATETVEFLFLRH

SEQ ID NO: 130165 - protein, 120 aa, Heterodera glycines
MVNRSDCVAVIICQSMHLSTFSRSYEIHFFVYKSTPIEPFELVNKRTNEKLILIKAKRNARLNKGIMKRYPIGNSVAVPWGKNGNLNNLNNVSFMLCDAKRCNGPLSLSAAKQRKGCLIM

SEQ ID NO: 130166 - protein, 38 aa, Heterodera glycines
RGGRRTKSAKFAKFLTKSTHNFSQTQPNCTILVSYDSP

SEQ ID NO: 130167 - protein, 67 aa, Heterodera glycines
MKIHTIKLAIRNLVEDFDANENPNGDEILTHSLSFQNRLILNSFGNWHDPDNQWLYIRSRWPLGNYF

SEQ ID NO: 130168 - protein, 32 aa, Heterodera glycines
MGRAKEWKIDIFDRNGGREEHLLDKNGLIENT

SEQ ID NO: 130169 - protein, 153 aa, Heterodera glycines
MEAKKVLRSAIHLADLSNPTKPIELYRQWNERILEEYLRQGDREKQIGFIDFIVHPLYETWAELVNPDANAILDQLEDNRQWYMTRLEEMEDEEECSESDDTDDKQRQQQQQQQQQLLEKPFPKSASLLISSGQSTPQRSSDKPSAPGTPKMV

SEQ ID NO: 130170 - protein, 104 aa, Heterodera glycines
GVFSDLEVLAAIIAAAIHDYLINTNNELAIMYNDESVLEQHHLAVAFKLLQERDCDFMAGVIEMVLATDMSKHMTLLADLKTMVEAKKVSGTDTLLDKYQDRIL

SEQ ID NO: 130171 - protein, 67 aa, Heterodera glycines
MDDNKLYDPYDKVILSYKHGTHIMNGSSDDRRQHFQIGEHALRRRETNRGHIGLSINSKKIKNKNNF

SEQ ID NO: 130172 - protein, 111 aa, Heterodera glycines
VQRLRNTQSVPSEFGVPCKKEIEVYMQRINEWGLNIFKIHELSKQHSLTTVTYTLLRKRKLMFKFDINPGTLVNFLLHLEHNYRNNPYHNQIHGADVAQSMGVLISTPALE

SEQ ID NO: 130173 - protein, 104 aa, Heterodera glycines
MVVHWSILVRVDRDQPEFPGLPGHGFSDPVQLIISIYQFSTFSFFSNFKMSDGFAKMSRSDQLKIGRDRLLRCLAKCGGEYQSVRHLDVQNKYLEEYNAQLRQS

SEQ ID NO: 130174 - protein, 79 aa, Heterodera glycines
MDVELMNEFAMGRIGHAMGGGGGKCVTAEKGQPKRRQRRLTISRGRATNSAQNEAKGTAEGLAKELANFGTDSVGQWRS

SEQ ID NO: 130175 - protein, 41 aa, Heterodera glycines
MIMETEEGEKNEGMPFVTEILNVVNEMCGTEMPEKTQKEGL

SEQ ID NO: 130176 - protein, 167 aa, Heterodera glycines
MVRPTKSTIQKRNAAAAGCAVIEAQKARMAALKAILDRSVPAESGDPAFFEICQQIWAILGQFLGELWPVTFGYLTKPEELATAWASSLPAQVGLHPLHHSLPMKRLVSSVAHEGLHLLECQQGRQWPRAGSSTKHDHGPFFRAKCAELIEMSGGLIQPEFKEFDHL

SEQ ID NO: 130177 - protein, 155 aa, Heterodera glycines
MKNGDQNNCNWNESDKNDEENEQKSHQEQRERLRLILAGIGDGSIGPMKILSKTFFLTEVPFMANYEQVVSFLIVAKLGYSDSKSDGSSRNRRRRKKRNDMLIAIIVVLVVVIVALISCYFGRACDGSSSAPAGTSANKSASKSAISSKTEGARK

SEQ ID NO: 130178 - protein, 49 aa, Heterodera glycines
MWHFLRTIELHEMPEFFMDSHLNPDYYHRKKRTLYHRCIFAGCRAKICL

SEQ ID NO: 130179 - protein, 55 aa, Heterodera glycines
MTKLKGSMVIIEKRSKEGLQKECNFHMTAKAMGKHPEQIHQGDEQKKTKVNTTSK

SEQ ID NO: 130180 - protein, 188 aa, Heterodera glycines
MSDNRKEAEQKMAKAIFISGDGWLAVFDLLPPSQLGLGIAMISPRFDFYVDEHFKTRKWALKFMRIRSKIGANGTKEMEVVNYDGKPLPMPQIELPRKVSGFKRILINFIDRNAIAFLHHLRPLFASCPINLIINAASDHILEITLHLATDREKYLWNVFFLSNFQTFATICAITSQDGGVKTEAFIP

SEQ ID NO: 130181 - protein, 40 aa, Heterodera glycines
MVIIEKRSKEGLQKECNFHMTAKAMGKHPEQIHQGDEQKK

SEQ ID NO: 130182 - protein, 79 aa, Heterodera glycines
MACRCVRHFDDEKMGGQNAGGHRPEEIGRTFDGGTEVLREQREVFPSPATPLPHLFWVHPKITPGQNHAAKNLKKIFQT

SEQ ID NO: 130183 - protein, 56 aa, Heterodera glycines
MGNLPLISFIFFFSIIIPVANGVITRSLTPRRGAAGVLFGFQGLTIQGQMTTTRRL

SEQ ID NO: 130184 - protein, 61 aa, Heterodera glycines
MLVWWCCCCSPSSASCLVPTWPLSIGEAVQCLAKRMASTYTWKGCRNWQLFSTNFAQFSPR

SEQ ID NO: 130185 - protein, 23 aa, Heterodera glycines
MPFHLVSNNNEVKSDLATNGIYS

SEQ ID NO: 130186 - protein, 130 aa, Heterodera glycines
MVLPLTAALSKLLSCKPENLAEYLNNPEAVNKANAYLAGKKLKTTYQGRDSKTKEVKFGTFSVKPAAETYAFEGFLGKFPKIQFRSNTYAFRELLAVEEGGESQPVERPAAETDYLDYLNFRSGWQSTLY

SEQ ID NO: 130187 - protein, 139 aa, Heterodera glycines
MDTGGGNIKKAAVQRTSPTPKLGLTQRHKSLEEMANCRLGTGTGSSNGGTKLGGKLFRALAGTGNGGHGDSLQQKLSLAPPAAVNDGATNTVAAATVNDRNYNNRYHHHYLQQQQHGGNNDRNMVLSGEVTVQLKKVMG

SEQ ID NO: 130188 - protein, 58 aa, Heterodera glycines
MVRKENYKLTPGPLLITTSALAIKVNILVSNFFLPFLINEFKGVEEGNDSTPEGTGIK

SEQ ID NO: 130189 - protein, 77 aa, Heterodera glycines
MTLSNVPTIISRTVKPVISHNQSEAKRNVLIMYKKLQRSVKVYWWDFGIITTMTITFETCFLLKTSNRNRRYNSLRG

SEQ ID NO: 130190 - protein, 93 aa, Heterodera glycines
MFTFIARADVVISNGPAIGLGICLSACLFDFLRLYRCRVVFVESICRVQKLSLTGANLLFPNFSRVHRPMEEFAKEIPKKRIYGQARLIFMLA

SEQ ID NO: 130191 - protein, 71 aa, Heterodera glycines
MVASERGHESLIELSRSFWRKLWISNVHLDHEEFLESLRQLNIQIPPDEIIFNNRWGKLIEQWHCELLNRQ

SEQ ID NO: 130192 - protein, 231 aa, Heterodera glycines
MSIILTLIARVRDGLILATSIEGADDPEHNTVKYMTQAKMLFKKLNSPGTPQAQSVASGQYFFHYIVKDTVCTLCLCDQTLPRKAAFSYLEEVGSEFLNQHGTQIDATARPYHFLEFGIPFLLIYWDPFVSSDSYIQNIKRKHLDRGRNAMAAVNSELQDVTRIMVSNIEDVIHRGEALNILESRASDLSDLSKKYREDARQLNRRTAIFKLFVGLAVAFAFFMIFRFVYM

SEQ ID NO: 130193 - protein, 305 aa, Heterodera glycines
YSIAEFDQLNPPIEANFSDLKHLVDGIEHEWHMLTIQDVVWNHAAKNANWLQAIEAIIGHVHYERVAANGPRKEAVTLSEPLVTNYFYHPSEFGLNAWEEDEKFAFDPSTSARLMACNGWVMNADPMSNFAEWPSQVYLRRELVCWGDSVKLNYGQQPADCPFLWEYMRRYTEKCARIFHGFRIDNCHSTPIHVAEYLLHAARKVRKDLYVVAELFTGSEQLDNLFVNRLGITSLIREAQNAHDSHEQKRTPYDFVPTAAMCSISGSACGTVRGYDEFVAHNIDVVKEQRMYRKWSEFGEKAKEW

SEQ ID NO: 130194 - protein, 359 aa, Heterodera glycines
MNFRGATEAYAIVHSMPFARLSHHVVKLAIHLPNQQPIVYRAFQLVSKAQQIQQGELPETQCSAYWKQWQNEWKNDPKFKDILFEKVPERFRWAKDKWVLYKRQQIKRPPIGRIVPVPPSDPERFALYSLMRHFPGDPDHLKMVNGLLCTSFTEAAIMHGLLEDDKIWDKTLAEAALSRWPDQMRWLFVSILVYGQPSNAIELWNKYKDQMYNPQGIITLAQHKVAELEALADIDWRLHSCFNLSCVHFSLPDPPTSIAKNTDAAIEEFFFGDDDLNLPPGQPNPRPQPNTPPPLNSDQQKVFDAVLLAIQSNPRDSTVPRRFFIYGDGGTGKTFLFGQIIRRLRKAPYTYKVLATAST

SEQ ID NO: 130195 - protein, 49 aa, Heterodera glycines
MFAFFLAYQNFIEPGSFYSLSNRPKFFLQPRGREAAENCSETHQNLFTS

SEQ ID NO: 130196 - protein, 54 aa, Heterodera glycines
  unsure (1)..(54): unsure at all Xaa locations
LGPIKLISRKSRMNSHFXIFYRFLNIWIFFGLPKLHRTWFFLFSFKSPQIFFTA

SEQ ID NO: 130197 - protein, 102 aa, Heterodera glycines
MLGSVHKSSRTTCAHQRTGAFGGANASPTGQQLPCYDFCPVQATAIKSVPVCIPTEAGTLTGPEFLEMAQSRAATGGVYKGQGRIQSELMTRPYKEFLVHGQ

SEQ ID NO: 130198 - protein, 78 aa, Heterodera glycines
  unsure (1)..(78): unsure at all Xaa locations
PNRTAGRWVNRNHLGNDPASGSPTATLLRLLPGSSXLRLNRFRSAYRPKPEXNRPRISRNGSVPGSDGRSVQRAGTYS

SEQ ID NO: 130199 - protein, 47 aa, Heterodera glycines
MTSEEMTVAVGQAMLAVVERDASTGWGVVIHTISAEGVTATMIKSRM

SEQ ID NO: 130200 - protein, 27 aa, Heterodera glycines
MLKTLHFVIFNFENYLTISYLFLSFIL

SEQ ID NO: 130201 - protein, 75 aa, Heterodera glycines
MEAMMKNTDERAAAATQGAMTTEKHTKQTEVRKNQTTAYLLYQKIVILFREFDPVLLHKCDFDLIRIRVQSPERV

SEQ ID NO: 130202 - protein, 66 aa, Heterodera glycines
MAWDFNFIGRIKLTLILTIEPIRTISGKKTEGKGKEEQKEKQERNRGKKRKRNARRALVIMNKNLL

SEQ ID NO: 130203 - protein, 1494 aa, Heterodera glycines
MVNRETVDIRKSKIPINHACPQILIGIDHYWHFTLPNSQIQILPSEFFSIDTKLGKILSGKEKRKKDETNEILQKFWELENIGITDSPHLTDEDTALIHFDKNVIFEENRYYIRWPYKRETPNLPTNFGLCLGRLRNVVKQLIKNKQLENYNKILQEQMDTNVNEIADFKSKNLIHYLPHHPVIKESSNTTKIRPVFDASAKLRGSNSLNDEIHQGPKLLPDLCGMILRFRLKNFVLIGDLEKAFLRVGLNEIDRDTTRFLWVNQSYLDEINQKYREIEMRDVELRRFTRIPFGVNASPFLLTAVVNLHLSKTDEMFEKFKTLQIDEELCISGKEKQFKELCTELKENAYVDNFVMMCDDEKEIKFKHYWSKEIFKLASMNLREFVSNHEQSNKEIQKLEGSEIPKMTKMLGIKWNVDTDELELQIKIPLMSRDTTKRQILTMIAKNFDPMGWISPVILKYKLFFQKLWRSNKDWDDKLNDEEIREWNNISNIDEVSIPRSPFTSQNLKCASLHLFSDASELAYATAAYLHANNKTDLLFAKTRLTPLKGLTIPKLELLGLLIAARAVKFIIKESKLKFETICIWCDSKCVLSWLKCKKNLPIFVKNRVEEIKQIVSEFHITFYYVKSTDNPADLASRGTTMNEMKYNELWWKGPKWLKLGKENWPAHSFYTPEQNDSLYDDNIMEIENTQTNLVKMDYQGFIEWKKYNSWDKVTRICQILLKFVFFTLKDSPEFKTKFKIQKFQNELSLKFMAQKMLIRIIQKEMEPNNEEERQLGIYRDNDEILKCGGRLKNAQIKATNPIFLPRTHFGTHLIIMDHHRRNLHAGTMTTLAEIRKTYWIPKGRRIVDQIRKQCFYCKRYNAKPYQQPKMPQLPKSRVQITEPFQNVGLDYMGPLQIKSFTEKCWIILFTCFSTRGIHLELVTSLSVQHFLNAFRRFISRKGTPKNIWSDNASQLKLASKVLPEVLKLKDILKDDSIKNYFEKENIKWIFSIELAPWQNGAIERLNQNVKSAMKKAIGRKLIEFDSFQTLICEIEALVNSRPITFIYDEINSYQILRPIDFILPHKNLCIPPILEDETNDPTYLPKPTYYDQTIELWKKTTKILDDYWKIWTEEYLPSLRERYKTENKNPKNCVKSFPEPNEVVIIHDETPRAMWKTGIIKNVIKGKDGIIRGANIELPSKHVINRPLKLLYPLEINKIDCEENETITNLIKTTEHKQIGTNRKRKQSVLSSPKLSKVFLNTLTFLLLFMQLLPCLSHLYECPKTNEKWRTKYTTFCVENGFTIKQNKLTMEFCYCKIFCHKQHVIKNHPPYCGPQCKCPDWTNSCSFASYHRIKREITDQENIQKIISFFKPNVCSFNKTEKCSLMDKNIFSSIMLYDNSIHSVKSLNLLHTQANSRIDYRCLGEGNLTIGTQKFCQEHECTDTHGTKFCFYEPHEKTYLVKSDREIIPIKAWGSIERIFYLANDTLMDELKRKKREFDPFENEQISAECTK

SEQ ID NO: 130204 - protein, 113 aa, Heterodera glycines
MLYNVFKPRREAGQFQNFVPHFTVESPSTLLDNYVSMSTVAFGQLWNGKMGISDGVLIMLYNAFKPRREAGQFQNFVPHFTVESPSTLLDNYVSMSTVAFGQLWNGKMGISDG

SEQ ID NO: 130205 - protein, 76 aa, Heterodera glycines; identical to SEQ ID NO: 128275

SEQ ID NO: 130206 - protein, 36 aa, Heterodera glycines
TDQKRTRFCEGIKKTRKSTAMMLTPVILNLKFFINF

SEQ ID NO: 130207 - protein, 111 aa, Heterodera glycines
QKQNNKQPQFEGQNHLTAENTAQKIKEEPIEIGNEMPIINEKMKIKYEQEEEFNVKTEPNIGEIKVKEGANLNKKDLTPKESEGNNSSPIKMGLLYQVNIILQIFEDNENA

SEQ ID NO: 130208 - protein, 180 aa, Heterodera glycines
MRLLCLIGFSKNEQKVINVFLIDLHHLIFKFVENVDLINEYLSKGSEQISLTEPENPDNEISVDFGDEKMDNFSFNETVENIFEHLNVEKDTKINCENNRKTKKGKLSVEEKKQIVQQYINAKKSLDKKLERKEIKNLNEAIAHKLGVSTRQIRDWKHKYQIGIYLLVNSMAFVIRIFYK

SEQ ID NO: 130209 - protein, 95 aa, Heterodera glycines
MLIIPYFFKYNNNLHILQLTDFSVKSIRKYSQEKKLKIIRQFDEMLKEHKRNSSKKYTYKTENQIAKEMGINRATIIRWRKEFCLSSKKRNYLSF

SEQ ID NO: 130210 - protein, 54 aa, Heterodera glycines
FEYPKRTLEKIDFFVFGAVPPSRCAQIYGETESFRNSFPIACTLILRWIFAPHN

SEQ ID NO: 130211 - protein, 100 aa, Heterodera glycines
MDTISLQVLLAFAMFATTALAGLLPIKLLHAITRRQDENDEQRSRKSDYILTLLSCFAGGVFMSTCFLDIFPHIKSVSAYESRLHCLDMSSRVSRQGLKF

SEQ ID NO: 130212 - protein, 63 aa, Heterodera glycines
MPVSQANSWIPLVLSLVLRLRETRHTESKNFSGRDSRAANFKEIYRSEQFKISALLKDTAHNQ

SEQ ID NO: 130213 - protein, 150 aa, Heterodera glycines
MLFFLLLLSLSLFLLLVPNVCCHNAELVLLDPSQIGFFLPNYFVKKFEKKLFVKFAREFRPVFVAFAMLEPPYLYVDQSENIRSVDRAEVEKLMKFKLVSRLRKEKKLMETAQFNLTLAHDIQGALFSVPVPSVERSREQETFGITKLPY

SEQ ID NO: 130214 - protein, 178 aa, Heterodera glycines
VDLMHEPNLVLTKTDPPLALLASLWFYMTPQPPKPSMHDIITEMPRHFDEMMHNVSWQPDWSSTWREDRPCVCAPAAYGGAIPYFQPGFYPSQFVEENEANKAQCKKMLSEQPQNFGMDPMTSGCLNHTKVAEGAKVPPGTTTLTEKVPMSTAGTKVPRMAYGTVSYLRPNLTIIALG

SEQ ID NO: 130215 - protein, 105 aa, Heterodera glycines
MQNRHLEEVLHIWMKSCSVFAEEWKERTYEPVELKEILVNRRAIGEEPSLGWESWLTELTKRFGQALTAIRAKAFWPNAYYVLKETVVVGDNLAELLAKQIPNAG

SEQ ID NO: 130216 - protein, 56 aa, Heterodera glycines
MFNGEQQQQNDGNDNGRVLGSTSAGTVLQQMPLGSNSTSAAVAVMPMPFLDNNNNN

SEQ ID NO: 130217 - protein, 21 aa, Heterodera glycines
MAKKRLPLSENQQPTPPKRKE

SEQ ID NO: 130218 - protein, 53 aa, Heterodera glycines
GKICAGIGQSFGNGTGNEFGNGGQIEENAMANGGGTKLRNSEKPKRFSGKVPK

SEQ ID NO: 130219 - protein, 90 aa, Heterodera glycines
MCLLKCKTVVKNCYNSFQRRDRKKIKIGEEIEKSIVSSRWRTEGYIGAMDVGLPYQLLKFLFFKKDTKTSIDNPIQRLVKKNNNRLGLPY

SEQ ID NO: 130220 - protein, 52 aa, Heterodera glycines
MEIGAANVRQHFELSLKRAVWRILRENTMKQFLTMKRSLGGTISFLLRKMPK

SEQ ID NO: 130221 - protein, 37 aa, Heterodera glycines
MSKSVIDEINFPGAPIGPPDACFVNWFLTRIRSFSDF

SEQ ID NO: 130222 - protein, 97 aa, Heterodera glycines
MAEQFVQHETAEEQQVKAKKPNVDERFLWKITRGQFVLAIRLCSEDWNNLFHNKDKARRLEDGRVAIGLEMCEECAKLNCCVSDLIAGQKKNQKKPE

SEQ ID NO: 130223 - protein, 51 aa, Heterodera glycines
LDNYCEQLRVNEHSRRWPVVKQKNGNIRWGAFFSKNSSFRLTIPPFLCTIS

SEQ ID NO: 130224 - protein, 44 aa, Heterodera glycines
MCTQTALSVGATFFRRINWIFYYVLPSHFKCEALNTYASTDCQR

SEQ ID NO: 130225 - protein, 100 aa, Heterodera glycines
MERHRLIPGQELVDRNLAELEFHDYFATDHHGNRFLLVDSRTAEPENPVFFIFCSDAGIQRLRTYRNWACDGTFKSFYAAFFELFVFLSLSKGSSTAVHI

SEQ ID NO: 130226 - protein, 56 aa, Heterodera glycines
MDKIILHADLFLTLAIDIPNIFQIFVQIWSALLLKNEFVLFSNIVRICVRVRIWTK

SEQ ID NO: 130227 - protein, 78 aa, Heterodera glycines
HTLLPDQALELAKAASQVTTANANRNQRTAQQQLQAPTQNGGDTSSSSTSSVVSERRTSQMAYFEFPEADFDSLEALV

SEQ ID NO: 130228 - protein, 30 aa, Heterodera glycines
MPGGEICQGEKCKKERLLSVVLENWKVQKN

SEQ ID NO: 130229 - protein, 160 aa, Heterodera glycines
MKTQNEEMRSDEAERQTKEREQVKKLLDEYKRKVNKEMEKNVKKMEKDEKLKEVLREIEEAKAKHPGEKRKAAKSITEINEKHWDELYQGDIVLSVEQAQYLLDTVTKNEQEKSNSSPAGNGAEKRKKRGTDENGKKETFPILKWPLLTIPFSFHSIIRN

SEQ ID NO: 130230 - protein, 324 aa, Heterodera glycines
MLPLYRFVTTTRATKEVMSGRNFLLADSGIYREAGRQTTERREQWVFPVLYGLLTTKTKETYARFFRMVVSFWPNFRPDSISVDFEAGIIGAVKEVFSDCELSGCFFHLVRNFKKRLATEHLVERYNSDPVFQMYAKMITSLAFLPIEHLTLGIMALERELPLELQPVFDWFINNYTGRPRFDGTRNPALFDPVIWSVHLRTIQKRDRTNNYAEAAHRSLQRAFGCDHPSIWTFIDRLRKCQKIIDADFAKFSIGEQPSKKRKQYRDADRRILTLVERYAQEMGVQNPLVPIHYDPQYFANPGPNFNYVIEFLQGISHNYEMNP

SEQ ID NO: 130231 - protein, 248 aa, Heterodera glycines
SESPNRQSFTIHHFVYSLGNSCVFPQAVFFTSTLLTTIGYGNLVPVTSAGRMFCIFYALFGVPLILITVADIGKFFSTLIVLLYTHYTRAKLRLRQRLIGHGGGADAAGHSSTLMKAHLHENINISIPVTLVAAILLGYMSIGAVLLAKWERWPLFDGFYYSFITMFDGFYYSFITMTTVGFGDIVPAKHEFFLFDLFYIIVGVAINTMCIDLVDIEYVAINTMCIDLVDIEYIEKVTTPFFANSPNL

SEQ ID NO: 130232 - protein, 190 aa, Heterodera glycines
PIGNPACWIVYNRSRIDMGGGCPSLFSGSRGISNNSTNVGTLSGTTLFLKNESIDMIRNQDHFLHRLNDQQIRHEHEHRHRHHHQHREQHHCKQCCAKEKQNFQNFTAPRSRISILVENDGAVMPAGSLAVMDEMSYDTLVSQFLGTDDHEGMEKTMKFLARYELIANMLLCPECQEKQASLVKYKQFPE

SEQ ID NO: 130233 - protein, 46 aa, Heterodera glycines
MIRITENDQDLLILISERSEPLLVLVEMSTLFGINCNSHINFMIII

SEQ ID NO: 130234 - protein, 22 aa, Heterodera glycines
RSARRPAESPHPCACTDPASLN

SEQ ID NO: 130235 - protein, 101 aa, Heterodera glycines
MISNKFSKPKSAKKGPIAFIELLQAHVTLINNFRLRVITASPVGRFDVHYGSRAAQRFKGTFLKLMKLSFMGFLRSLIYRMHKIRKIVWMVSYDFSFNIII

SEQ ID NO: 130236 - protein, 101 aa, Heterodera glycines
MQHNCPLCTVSAVLEKKAKKSQMRIFMKNISRAEYKGFMTWDPTIGHPETWRLRSDIGTPTSRHLGAKRDLETRHLGAKRDLETRHLGAKRDLGTRHLGAK

SEQ ID NO: 130237 - protein, 29 aa, Heterodera glycines
MSRKMIKIRTISWGFLRLPDNPSVDNNPS

SEQ ID NO: 130238 - protein, 70 aa, Heterodera glycines
MNFFTVLLFLANSVLSTGAFSCGEFLETNSMKFKQTLDPDNIRHPSVNLGNYCGAPDMTMWLCIGCSSPD

SEQ ID NO: 130239 - protein, 81 aa, Heterodera glycines
MFTCLATTFNSKKIGTFEVEFLYSIILVYTYISCTAVATALAFYNIDEVACYCTVPYTVWTGLYFLLASYFRHTQIHNIEE

SEQ ID NO: 130240 - protein, 73 aa, Heterodera glycines
MSFFWNTTNAIVSSLLPVLPAFVMSSSHRRDLEAFSISNLYSENAGWGEVNRFLNMLQRQTTQPLSLWVGCNC

SEQ ID NO: 130241 - protein, 263 aa, Heterodera glycines
MFDKIDWLGRFVASHPFFAFSPIVGTQPTRFQSLVLKSPAFQSLGLNPPAFQSLGFKSPAFQSLGLNPPALQSPGLNSLAFESLGLNSPAFQSLGFKSPAFQSLGLNPPALQSPGLNSLAFESLGLNPPAFQSLELNPPAFQSLGLKSPAFQSLGPNLTWLSNHWDSTHQLSMTFQSLKLNPPAFQSLGLNPPTFQSPTLNPPGTQPSNIPINGTQSTNIPITGTQPTNIPINGTQSTNITITGTQSTSISITGTQPTSIQSL

SEQ ID NO: 130242 - protein, 102 aa, Heterodera glycines
METLKNFKLDALFKVLALPDKEFEEWLRELKLLHTTRFCDCGNEMSYKWIKDRNQPLWICNSKKNHDGKRPTIGFYTGTFFEGAHLSPKFSRSCHWSAYKLN

SEQ ID NO: 130243 - protein, 19 aa, Heterodera glycines
MKTDCYEQKWTVKCAIGGL

SEQ ID NO: 130244 - protein, 44 aa, Heterodera glycines
MLISKYNLGNTFDPIFYEKMFRGTRRCREAPPAENFEILTISQH

SEQ ID NO: 130245 - protein, 742 aa, Heterodera glycines
MSGKKIYVQLAQQFFWPNMYADCVKMVQKCRICAHSRKPRANEPPMKIVQTSEPLELVCIDVLSIGLAYSSNKYILVAVDHFTKYLVAVPIPNKSADTIASEFVKNFILIFGTPKKLHSDRGKEFVNETLNEIVKILKVERSLTSGYDPQANGITERANQTILAMLKRSTASNWTWDERLPFVIFAYNITPSETTKFSPYHLMFGKIPNFPTEIFLPVNPNYTVDVDTYIQLFRENIAQLIKLAQENSKIARIKMKNHYEKQPKVTADKFKIGERVMVIFPGVNTRAAHRKLLWNQFGPYKILDLSDSSAKLVPVDKPNFEPISVPIERLVKVPEGVPDISTLPRGKNPFKNQLNALLSVVCLVYREMDIETCEENGQFTQTKSVKFGNGTIKMDEFQKTENMGQLFIGQLRTIANSADGEVRAKDNADHPLVWEMQCGGLGTEHRNCVQLTAADLDPVLERAGLGLKVIGRQEKMENVEGKVGFKVIGTPMKALLSNFLLKSGAVSSVAGGQKLTQLVISAPVGFELIAYSGGREDLVKNGFFPTENDIESAFTAWVERCAVTREKLMKTGYAPIEVPLPNVVAELPESEKMGWHEMLKRANFVLEKVRATIIHRKQLLVETATVIIGDSSAKQLVKLWPKSQFIGAENGTITEVIRAFDGAILSSKVKVAIVMVGRDSIRGDETIENVMERVGRLEQLLKRFSHVPVFWLPPPFIKQKMVEHEELVVKMKEHFGAMQGNV

SEQ ID NO: 130246 - protein, 1416 aa, Heterodera glycines
MNVQQRQNADYQPRLTHQQNYAQFEERAYRQQNPGNLFVRNQPARYENANPNFGYGTSGNVMVNQQGGAQPPISNLEYVLILDRLPELKGNEGADKVRYFFKKFVSATEGWPDNKRISSLESKISGRAERAFNAALANQPYRFDAIRRAVQAQLEETDCREMGAFDELMNGLKRKPNEKLDELADRVQNVVLRAYPGLTQNLVDEYATKHLIRALSNPDLSLSLEMARRPGMCFDEFVALAARAESIQKATKNVPNERRNIEERTRPMQQNFSRFAQQFQPQQKQNFSQSFQPRENTVCYNCNEPGHFSRECRRPKQYFDGRANQSHAVPAAGANSFQMRPNGPEKRALPQTSTKESDQRRSQNFLKQNCIVVQEEAPPEAFCRGVQLSSEIAEFFANEFKERKDGNNQREMSSDRVGKILVIKIETFGAKTEAMIDGGAQISLVGASFLYMLIREKGLDLQKTNFARTNDRIADVNGKELRCFGTLTLPILRKGCEQVAIHFYVTSAPFGFDMLFGTNSLSALGFSLYDEPNNEMIHFEKATKSEDTVRMIFNMKFQPRTSKFVEMEVDEQWNGQDVLICPVPAEKAVRIDQSIGKVENGKIVCQISNLSSNVEQIDGNTVIGRVEEVELSYDSGNSFLPTKDFLIGEGENDIQFGDEMSLKVGHIPNEAKAKLMALLNDFTQIFAFSDEELSQTDLVSHQIATGNSAPIRSRIRPVPYAYREKVAEMIQNYLGRGIIRPSSSPWASPIVIVPKKDGTLRFCVDYRGLNSVTVKDAYPLPNIDNILLALGGKKIFSTLDFISGYWQIKMSPESIDKTAFATEFGLHEFVVLPFGLCNAVATFQRFMSQLFEGLINDFVFIYIDDILIASESWEKHQEHLKIVFERIREAGLKLKISKCHFSANELPFLGHILTTEGIKMDVNKVRPIMELPIPTSKKALQSLLGFLAYYRKFIFGFGAIAAPLYGLLKKDAEFAFGKLEKEAIKALKQKIFDDVILHFPNFEAAKNEPRRQFIMMTDASKIGIAAILCQPDENANVRPIYFASRKCNSYESKYCPTELEALAVRFGAKKFSQFITMPPTRVFTDHRALVHMFKSKTETGNSRVDKWLMQLNSRFILKVEYQPGKKNVIADLLSRSPALKCPDPPAEIEISRIAHIKMCQIQTELDEVKNRQEWIEKTKESELDFIYDFLNKRIVPQDPKNKQKLISLLPTFTILDELLYKCENDGKVRLFVPFIFRDALIRERHSGSCAGHMSGKKIYVQLAQQFFWPNMYADCVKMVQKCRICAHSRKPRANEPPMKIVQTSEPLELVCIDVLSIGPAYSSNKYILVAVDHFSKYLVAVPIPNKSADTIASEFVKNFILILGTPKKLHSDRGKEFVNETLNEIVKILKVERSLTPGYDPQANGITERANQTILA

SEQ ID NO: 130247 - protein, 40 aa, Heterodera glycines
MPVDDLSPNSLLADEYVPPQHLGSRFYTASETFKSILHAN

SEQ ID NO: 130248 - protein, 129 aa, Heterodera glycines
MAEDQEELDMTSTNPMPTTTMTKTTTIEMEEVEDEEGGGEAQEEEEEVKEQGEREGDGEEGTENITPGTETERETETDGEREREDGEGKGDTGGAAAEQSAEWAEVNKGEFAGSGKGTYWGNERWAKLG

SEQ ID NO: 130249 - protein, 119 aa, Heterodera glycines
MPGRPGTAGKPGSPGLSPNQTCPMQVKRDPPPCRPCPKGPPGIKGWPGFPGDVGPVGAPGEKGRDGDDGAPGESGPQGPPGFRGAPGAPGDKGETPKGGEINWRGNGAILNNSKSNGQL

SEQ ID NO: 130250 - protein, 300 aa, Heterodera glycines
PNVAERKKWLPNSCQLIQNQKAFPIKIIFLGSLTLNRHQASVLLANAFFCTFPAEFGHKGRRFPRFDFNAFRLFHLNTHRFRLFHLNTHRAVEKLKFLLHYFAQIRHCPPIGTLSFIRQAVERLPEWESERTKAGHLTALCDGRIEDEGAAHTQMDFANEFIGGGVLGHGAVQEEIRFLICPELVVACLICERMDDNEAILLLGAERFSDYRGYCDTLRWVYRKYGDDNTKRWGNSKTELLAIDALCTELLAIDALCFGSTMDFLSDQFDADAIKRELLKAYVGFSLQRLESPHGISTGN

SEQ ID NO: 130251 - protein, 64 aa, Heterodera glycines
ALCTESVLVAMRECFPHMYISSEKLELDPAKIRIKKAHFSDALHSVKPSAKRGILLLLFYLGVH

SEQ ID NO: 130252 - protein, 35 aa, Heterodera glycines
MSNFTTFIIKQSKWNLFDHIKTFKVRHVKSTPKKV

SEQ ID NO: 130253 - protein, 29 aa, Heterodera glycines
MVSVGLANAQRLVAIVTGGASGLGCATVR

SEQ ID NO: 130254 - protein, 302 aa, Heterodera glycines
VPFKEFPTSTFPMYHYQYRIIVIGDSTVGKSSLLRYFTEGKNAEISDPTVGVDFYARMIEIKPNYRIVGVDFYARMIEIKPNYRIKLQLWDTAGQEKFRSITRKLQLWDTAGQEKFRSITRSYYRNSVGVIVVSYYRNSVGVIVVYDITNRRTFEHVVDWMTEAEANLGGPDPAQLVFLLVGHKADLEEVFLLVGHKADLEEQREVLYEEGEYFAKHRRIKFIETSALTGENVNEAFLIVSREINAREAFLIVSREINARFETGALRICDGWDGIKSGLLRTQSITLSDIQETTKENSQCYC

SEQ ID NO: 130255 - protein, 161 aa, Heterodera glycines
MEYVQSSAAETDESKLFLNLNESENCELNEIYETESETERKEIEAAEQVINALLYYKKYALSKLRKQANAILLFNMMAECGAHMLGGTIQQAFEITQLRPASEHYMTKVKSVLKQILRDWSAEGILGTRTQCFSTAITVVIFAVRKWLKIKFCDSNFILFV

SEQ ID NO: 130256 - protein, 132 aa, Heterodera glycines
MALKEKVKKRRTTRRGHLAASVEDEVGSKQHEDGELIARHGKAQAEQFPGQSGQPRTGAITDLCWDLSHQLLFSASTDSLVIVWDIGGKRGNCYELKLCLLSSLSIFMVKWSQCQVDSSCVGCRLASLILRR

SEQ ID NO: 130257 - protein, 221 aa, Heterodera glycines
KFKSNNTFFFSKFGKTKPFSNTFSDSRLPIDPQHSLFPFENYELENTQWEDDIIWDSANMPATIEPRVLTLDYEDDPRAFGMPEDAAQVEEVLHHFAFAVHFAFAVFLQEQGVMKKSKLILAQVLKRQRQEVEEQIETQIAQIADKDPFNLSNDEYYAPKSSGANTKTHNLTIQHSLPAQNLHPALFPLLQHNVVAQLRHFHRPPLSRRTAQGMTGRTVPI

SEQ ID NO: 130258 - protein, 94 aa, Heterodera glycines
MANEYKQKGKKYSTKEWRQNYAEICKKIGVSHYVIMKWKKQFGMSKFITEKEKMEKMKIYWQIKKENPKMSERAIAKMMKIDRTNISKWKKLFG

SEQ ID NO: 130259 - protein, 123 aa, Heterodera glycines
MTTAKHQRTPDDEEEKNLRRKAKVALDLVEAGLAADAMMQDGTRWKKAKNAINVLANLLLAESLTDVSPTFDQQQQQQLLSKEEEREGCINSSSAAATTESAPDGDVMEDFVNSIQAVTSNMQ

SEQ ID NO: 130260 - protein, 156 aa, Heterodera glycines
MQWIKFNCTLCPIGLHCFYPRKYAKPVLCAHPSVRNITDFLSTGQLDEAATTTTTTTALPTTAEVSAAAAECAPPPAHLTAWIAVCTALVALLVIAEAAGQSRADGAIEEGEEPVYDEVPLDSDIVVEMRDEDNGEEEEEEDYSDFYELSQRWTSL

SEQ ID NO: 130261 - protein, 42 aa, Heterodera glycines
MKNSLLHLYILGIWLLSALMASPNLWVYRQILYDLISGQQLF

SEQ ID NO: 130262 - protein, 68 aa, Heterodera glycines
MPRYLFAFYGGRAVAEPKGTERSSTRKNALLQPAEAHNDVEDEERSPTDEKGREHDDEHLKGADSLPA

SEQ ID NO: 130263 - protein, 125 aa, Heterodera glycines
MPLPLVKVPTKRTLKGEVPIETIHTVFALIIPHGGLFFNLLVDWGIKIEGLFFKPLLDWGIIGDWGINGDWGIIRANTVNAEGEADKAIVAKNKAGPGQSSDPSDMIMLPSTSDAPRRSRRIAAN

SEQ ID NO: 130264 - protein, 81 aa, Heterodera glycines
SEDNTLVEWHNEIDAQRSRSLSARRDKRPEAPPKPLPKAAEPPTEVPQERWVDPLPEKLQFQQQENKFAELKCKYSRANAK

SEQ ID NO: 130265 - protein, 61 aa, Heterodera glycines
MRFLAFICSAIFASFNGQQNTYLSFDSSKCALLACKISKNLVKANRASEGLSNDIKKVGFG

SEQ ID NO: 130266 - protein, 80 aa, Heterodera glycines
MDMDEEAVAAVADEEEDLTLLPALTLPAAVPPMAFGVVAADAVASDERRLINAASRSSSDSGEHLMGDGGNADDELEELG

SEQ ID NO: 130267 - protein, 287 aa, Heterodera glycines
MVAPAETSATEASEAAKAALEVAWKEDEQQLLQRRHADDSALLLPATGGGGAATPPLVGFGTGMPSSDAVASAYQTATTTEVVVPKSSLAAARSSRAPLTQFGGRHNNNSNNNNRGWPTAWNHSGADGGGAVGGGGGGRGRYHHYHPQQKRLWKNNNSWQRNNQHRNSNDQFNQQQSQSFGGGGQNRPWFNNNHNQQHGQQHNRHQTLSFSSSGATPTTSYCSGNMNNTTSGYGSGFGGVNSSRYRGGRQQQQHEHPLQQSQIDYTQQQHNQRATSSSTTTTMDTKM

SEQ ID NO: 130268 - protein, 222 aa, Heterodera glycines
MANKFLLVPQEIYRGLTSASDTGVINLDAVRYDLDRARRERTNPTTKNVRYNQQLRRYLQMRRELADRPTKVELTKGLSVLLKRDGGVDDDDGEVVNTQPRPPAPPPPPPPPHHPSQQHHRRPPSLPDQQSSSSDDSHPPHPPRPPRPQRTKKNHQSSLKHDRLNQWQQRRRDLQQQQQPVVRDLLAEAAAAPLPESDDDDEQMLEGGYLLPTPSQNYGDIP

SEQ ID NO: 130269 - protein, 31 aa, Heterodera glycines
MEKICLVGCAAIIGLLPFKSYENRYKRKEKL

SEQ ID NO: 130270 - protein, 172 aa, Heterodera glycines
MRLDEQIPPAIMSFCRESVVFLTISSGEFAAIKIVKLETGDNFADIQQEILVLKECVHPNIISYYGSYLKRDRLWIYLHQRGKIHRDVKGANILLTHNGDVKLADFGIAAQITATIGKRKSFIGSPYWMAPEVANVERSGGYGSECDVWAVGITAIELAELKPPYYYLSPLQ

SEQ ID NO: 130271 - protein, 54 aa, Heterodera glycines
MAKKEENHQKQPNHWGGEKRARNGRTFAIHGKILSLKKTPTKSKKWKSQQKKRE

SEQ ID NO: 130272 - protein, 16 aa, Heterodera glycines
EAIPEGFGLPINLCAS

SEQ ID NO: 130273 - protein, 134 aa, Heterodera glycines
MRRVMQNREIDPVLEHHVGSDEEQTDGEGQAEQSQSPSNRLFIFANQLLDEDFVAPNGEVQNDEVIDDFDDPMDELVAEEIINLPQDEVWDDEFEQSEHQNLGDLLEVEDLENSIGRMQNLYAGFDVKKQWKRL

SEQ ID NO: 130274 - protein, 341 aa, Heterodera glycines
MLDAFGLMDDVRKKVAMTLNVNNVKKEESVVDETLSRLRAKFPNVFSTNLGHCKKAKARLSLMADAKPVYCRPRPVPYNTKLVVEAELDRLLAANVIRPVDHTRWAAPIVVVKKAAGSARVCADFSTGLNNVLLSNQHPLPVPEDIFATLNGGHVFSQIDFRDAYHQIELEEGSKELCTIATHRGNFEYQRLPFGVKSAPGIFQSIMDSMLADCPFAIAYLDDVIIVSRTRKEHWTHLAEVFKRIDNFGFWIKPEKCSFGKERIKFLGFIIDKDGRRPDSTKIEAIRRMPIPTNVSTLRSFLGMVNHYQQFVKNLRFIRHVGRPFEAGHGLELVQRMSESL

SEQ ID NO: 130275 - protein, 21 aa, Heterodera glycines
MRTRPIWQVKQRLLTSQKKGF

SEQ ID NO: 130276 - protein, 45 aa, Heterodera glycines; identical to SEQ ID NO: 124527

SEQ ID NO: 130277 - protein, 186 aa, Heterodera glycines
MVITRSPILTRQRALNLEIAVDRNGHQINVGGNQQNSLQRQNHSAGESFPQNQQIENSPISPTELAGFNGENGDDSSLVLEPNMTEEELRRRLLVVSIERSQPPANGNAGNGENAEGLRNAIRENDGRPNFGVNGQTFAHQRRPHDTFLSNLMNNGIGNFPQNLVHVPRTSTPTRNVEFEQQIGPF

SEQ ID NO: 130278 - protein, 38 aa, Heterodera glycines
MSALSYRTEIDRLSLAVNEIRVFDLLFEFGFGDRNMPK

SEQ ID NO: 130279 - protein, 21 aa, Heterodera glycines
MLVLVGCLHLAHALEGAVPHQ

SEQ ID NO: 130280 - protein, 42 aa, Heterodera glycines
FGATERANNANVRCNRVERVQRTKRWRRDIFGAECHAGRSRA

SEQ ID NO: 130281 - protein, 338 aa, Heterodera glycines
NLLNMSLSTDHLRFAQYSSVSQKSPSSIELLQRALEAFAVANQSKFANSSAHSAPSIVGSPLIPPPLAHSQSQQLATNGATAAATTMSSVEQQLLSLLNFSQLSSKNGNTLCSFAPHNLLSSDGFCLSSATITATTTTAPTIVSEATQQNNAIVDKVNEQTDEALANSASAAADPSVPIDLSSNQQQSLLLSSAPNLAPPSVPRGRKSCDIRRSASSVSYKGNADVHEHFQRTFSGKWPRRQPSLRAHLQASGRASVGKKEAALCIGENEAEGSGTVRTEEPMEEEEEEGESAARNGAERTNAGGKTGEKGRPKSRQQVKSVYTAVIRKLFTSNEVNQ

SEQ ID NO: 130282 - protein, 55 aa, Heterodera glycines
MASDGQALAKWLFTAHPDNVPKVFECSWGRNNKDDGDWPFKIADFKAIKAGNFIH

SEQ ID NO: 130283 - protein, 159 aa, Heterodera glycines
MCQSEERNSIGLKSEEMFPSIEKAPEVEQKLKEQEEISRRAKLEERKQQEEREREEKTKRENAYKAPRRTIDGESSRKQMDKERKQLQDTEPTESDTTSNWRDMQRAVPKEEKDKPLRGVSAAHQTNATKSNEGDSNWRTKPTGITSTADSQNSWRTMS

SEQ ID NO: 130284 - protein, 136 aa, Heterodera glycines
MTDLDAFFAKKASKGKKKGVIKLEEISVQLERRAMVFFKPFISKLSQNKRRNKEMRLDDNENKSSVEDISKSRPANEHNEDSERLAFDDKPNVPVVIKEMADSYVEREEEEKRASAEPARTWKTNSEVGFGISNFK

SEQ ID NO: 130285 - protein, 83 aa, Heterodera glycines
MGLETNQGITKSFSKFSIRVDNQNACHQNIETGRNQCQFEAELRTTKEWQNIHPNVVANPFKTWHLMGVRRAGDSDSGIHFEA

SEQ ID NO: 130286 - protein, 73 aa, Heterodera glycines
MDPSNECGNSANLVTPRFLFNCSNYVYILRSVAFATNPRLVLTIVENAPGLVTPFHHAHSQAMVKKDTDRRSS

SEQ ID NO: 130287 - protein, 35 aa, Heterodera glycines
VLVQKHSNVFGFQIHFPICPTDRKKSSTWNLLKTY

SEQ ID NO: 130288 - protein, 192 aa, Heterodera glycines
MSANAELQFVRIKTKAGSTEAEVTIGNGQPLSILEAIELLQKNFTAFEGISISHFDGDVLTLLHHLHSKLDCHHVNLAIETYNTDFSEQILDTILPLIQGVLKSIKMDAKHIENLTQLAPSLLCECPLLHSIATNKFSLEFTAKDGAPIEGQALAKWLHIANPEGLPKMIDFCYNANGLWTINKSEEMKDVG

SEQ ID NO: 130289 - protein, 65 aa, Heterodera glycines
MWGVANRWMDNEAVRQISAMSWMNEWPQCQNWAGKANLWPNPTIERPNRWMDNVTGLQSEFVIPN

SEQ ID NO: 130290 - protein, 34 aa, Heterodera glycines
FISSGDHCCCCCRCSCVRHSFSEDASLSLLCPAS

SEQ ID NO: 130291 - protein, 45 aa, Heterodera glycines
KGYIKGVEGPFDWYIVSKMQKPIIVNIIALANLGTGIKLNSLTIT

SEQ ID NO: 130292 - protein, 141 aa, Heterodera glycines
MDKTLADILEKLTQAIKQQNAPSTTQTAQNITLPDIQTFSPNSAEEFEEWLERFQFALDCAASNLDDEQKVKLLMTKLSPTAFSEYKRFCLPDEITKFNFADTKSRLLKLFSHPPSLAIDRYECLKACREGGEEFGAFVNR

SEQ ID NO: 130293 - protein, 37 aa, Heterodera glycines
MKKSVGISNIAENNPYIILVVMLTDSTFETLIKSKIF

SEQ ID NO: 130294 - protein, 69 aa, Heterodera glycines
FDYAFREYMMTELGFSEDVKKGLCEASCYYVDDVDQDDYTNSGFKNRASRFADGAKCETMVKLNFDIAR

SEQ ID NO: 130295 - protein, 68 aa, Heterodera glycines
MKLCLLFTLIIFLIVLININYVESVDKKLQQKTFDEIFGEKWEEKEEKQRNEKKKREIIGKFYKIREN

SEQ ID NO: 130296 - protein, 105 aa, Heterodera glycines
MTELGFSEDVKKGLCEASCYYVDDVDQDDYTNSGFKNRASRFADGAKCETMKIGVKRKTAKNEILAPKNVEKEWKQNYVEICKKIGVGRDIIKNGRNNLEFAVKE

SEQ ID NO: 130297 - protein, 195 aa, Heterodera glycines
MKLFPLFFKFILLIIKFDQFEAENKKLEQKSFDEIFGEKWEEKEEKQRNELKKREIIGKFYKIKEKIKQKGRKYSAKEWDKIQRKIAKKLGTNRLYIYEWIKEFGFQKQIKKSYKSKTDEEKLENVEKFIEMKNEFKRKRKHSRKEWDQNYAEICKKIGVNRETLRKWKKQFGISNKRITEKEKMEKMKIYWRIK

SEQ ID NO: 130298 - protein, 137 aa, Heterodera glycines
MLRKPKKTCKKCERCQEVRLMAEIKKENVKAGKCRGEHLPGMIIEAHKTKPTQFKELYTDGDGVLEKILEAVVHCDECANDFAYYKDLWNCSGSMDCGWGPGISWIGEDCLVLHFINSFPLCTFIPKTKRLQNLFVH

SEQ ID NO: 130299 - protein, 132 aa, Heterodera glycines
MTLSSNHRDSKQQHSSLWDSITTNIPISGTQPTNISITGTQSTNIPINGTQSTSIQSLGLNPPTFQSPGLNPPVFQYLGLNPPAFQSLGLNPPTFQSLGLNPPTFQSTGLNPPAFNHWDSTHQKAIAGTQPT

SEQ ID NO: 130300 - protein, 118 aa, Heterodera glycines
MFKIKTGSLSCKFQFELCNTKSQLTGHYALLEDPHVFPRQELGEPDTTVSYYSYAPWSENSNLKVRIKLLDGKSTQFSFYLLHDIPEPTKNMGATVMQMDVTVTSDNVATMKFTDFFV

SEQ ID NO: 130301 - protein, 99 aa, Heterodera glycines
MSYILIENEKQKLLAFRIFVLVRCLNGYQTRVIIKSNLMNRRIIAQQKRRQQERKFDESLERARMRRGRKSTRARTCVHEATHGWILWKTKDCSDTFEM

SEQ ID NO: 130302 - protein, 135 aa, Heterodera glycines
MENSRRYMTRQELRRLLDNGVAVEIEDNEINVAHQQGLRTNWTDYAAENFEASPNFQPAAVFMENHRREIAFSSLRVPIRTSSPNNQNRDPVAPPAQNFVLQNMLPRRLDNDTLSFGGEEGGVDQHTRTNCLDFP

SEQ ID NO: 130303 - protein, 328 aa, Heterodera glycines
IQQNRDPIGYTKRTRRYPSDRQPRQKHQQQQSKQSPMTDSSDGANPCESAMLSTTSASMPSSSFSGPSSSAYLIPAGGSSSAGAITPAYFCGARPSAYTPEYAGGVGLSSTGAYTPDYAGGGAGSSSAGAFTPAYIGGAPAHASAAYSAGASASSTKPLSIQIPALKLGPLAGPNGANFAGGYPNYNNNTSNNMQAQQQHHLWQQQQHQAQQQKHFTGANGTNSSHFGMRPNAQSISGGTSAGFMSSNNVGGTSSFSTSSSSFPTPIYGNTNAPQNDGGCAGGTTTKKQQQQQPPQNQTPPNNVPAEQMEEDTLLRRMIGIEQILIRI

SEQ ID NO: 130304 - protein, 161 aa, Heterodera glycines
MVMCTPSDISGKGLFYTISFNRSMIMHILLIIINNTIVLVLKFKKENQHFSKSIFRSLLFLVFLETIGWLPSIYFAQFLKTAKFSPITTTYISAGFTTISTCITSSANGPTLYYFSLLYREEINGFLESIGIKKSISTQHQQHINTMPLNVVTRHNNWTHH

SEQ ID NO: 130305 - protein, 95 aa, Heterodera glycines
LFEYPKRTLEKIDFFVFGAVPPNRCAQIYGETESFGNSFPIVCTLILRWIFAPHNCLSTPNGHLKKSIFLFSGQSPRTDAPRFMGRPNPSGIASL

SEQ ID NO: 130306 - protein, 41 aa, Heterodera glycines
IFYRFLNVWIFFWLTKTSSNLALSILIQIAPNFFYSLTRPY

SEQ ID NO: 130307 - protein, 88 aa, Heterodera glycines
KMALFRFNETKTNRGRSLISCHNFDYCFERDARIAEGFEYWRCPRRPPYCPGRATVQSAWQIDPDGNRFKMGRVTAPHNHPPIFGQHN

SEQ ID NO: 130308 - protein, 431 aa, Heterodera glycines
MAKPEHFLRTFKHIASTPPEIVAKAKYVSRTACANEAKACMDLLKQAQTYLQRAQEKDEEERRQREQQEEQRRRLLARQAEEERRRQEELKMRLEKLNQQRQKFVDETKDILRLPQVNEGKRIINPGKFAPFSTISTHCFLLIMFILHTKIREEKKARVSTSRKKREGGEAEDFVNDSSDLGEYEDEELRNAARKMKTKKRPEQEMSGGSEEDDATVERRQKKIKAVEKRKRDRNLDEQVPARLRGKIKSKAYLSSSSSSPSPAQSGAEKSGDEEEKERDDEEMEVRAEKGGEEEEREDEEMEERAEKGGEEEEEEEENEREEREEEEREKMLEEGEEREEKGENEHGEEEEEEHERRDEEGEENVHGEEEEEEHQPRDEEDGEESGGGGEGDEGEEMEEEEEKDEEGSERREAMGEGEEQDGEEEEEEEE

SEQ ID NO: 130309 - protein, 159 aa, Heterodera glycines
MDMDKILSDMRQHISNLQDKLHVANSAVSKGQIVNEKITLMKEYQDKIASLNSCWRARNRTQLVHNLQQESRQIIALEEENRQLRFALKEMEDGLHLIMNDYRKMFSGFMRGEELAEVANAQHKKVFLAGVSYEQYFGIARAAEKFMAISENKVAEDDQ

SEQ ID NO: 130310 - protein, 58 aa, Heterodera glycines
MVLLKSLLFFLPFYLFSFSLVSCPPPPAKRQKTEFQHENKANDNENRVEEEEPDKQGK

SEQ ID NO: 130311 - protein, 38 aa, Heterodera glycines
MPSFNTKNVGIDEVRKSSPEASDTGPRLDFRIFAIFGL

SEQ ID NO: 130312 - protein, 87 aa, Heterodera glycines
MKMEYDSAIFGFAIKEQEELDKTIQYKKGTYAWESDGSVWINGEGKGTNDEYYYGVGDTVGIGVHLITGQLFFTWNGQCLGWQTNNI

SEQ ID NO: 130313 - protein, 112 aa, Heterodera glycines
MREQRDVIFYFFRHHPARIFHQFGLHCLLIIQCCLRRAGQFDHYLPSSSAEEKGQEMVVAHCSAAKTPCGRSNACNKALESTAKHLWPTFVEPIGARKSFQNVAKPVDANQH

SEQ ID NO: 130314 - protein, 101 aa, Heterodera glycines
MIKNEDWHFANLSDVKMIEWNLLKLAFYKNDQGKKWKEIEEKLTEWKKEFLNSFQNERNNSKFQKMLQQLEEKLEKFEKAVTEKKKSVWTKIVEKLSEIFD

SEQ ID NO: 130315 - protein, 102 aa, Heterodera glycines
NYELAILYSKILQLIIVAITNINKYQKRYDCDIKFCNCLNEYPNCFQTKVCSPTHILNILFFRIYYAGQFIFLENVLKKDKNNYFILPSLDMHMYFKFFIVM

SEQ ID NO: 130316 - protein, 39 aa, Heterodera glycines
MSWRTDFCLKAIRIFIKAIAKFNITIVTFLIFIYVVCHC

SEQ ID NO: 130317 - protein, 217 aa, Heterodera glycines
MFSTVSIATLFLINAYSFYSITAEEANIGNIPASNDKMPKDLASDDKMPKDLASDDKMPRSGKVQSERGMETNLTIGNKKPSNDKIPRSAQIPSEMGMETNSTIKNKTPSNDKMPKDLARDGKALQSKVKTKKNLTIGNKKPSNDKMQKDLARDGKTSRSDKMSNKDITQSGNKTETNLPNENNLPNNDKMLNDDTELLDEFKALLKSDTYKTKGAK

SEQ ID NO: 130318 - protein, 200 aa, Heterodera glycines
GFFKLSDFFDQSFLNQDLIGQFGVGFYSAFLVADRVVVTSKHNDDDQYIWESDSSQFSIVEDPRGATLKRGTQVSLHLKEEAYDFLEPDTLKKLIQKYSQFINFDIMLWQSRVPVEESEEEKKETEEKKKEEAEEKPKEEKEEEKQKEEDEVVEEKKEGEEEEKKEEEEFRYVSKIKCSYNYIKIIIMHIHFLGGGGFAA

SEQ ID NO: 130319 - protein, 20 aa, Heterodera glycines
MNEKTYGLIQLQIVQDFWDS

SEQ ID NO: 130320 - protein, 22 aa, Heterodera glycines
MSTADTVCMKYLGLTNRIDLTR

SEQ ID NO: 130321 - protein, 95 aa, Heterodera glycines
CVTTPRTLDGRLQVHGRKGFPHVVYSKIFRWPDLHKNELKHKSFCVCAFDLKVEQVCVNVCVNPYHYQRVVSVEGIELESNNGRLVKKLLLHISI

SEQ ID NO: 130322 - protein, 380 aa, Heterodera glycines
MGPPHPPSTQEEDQSFQPPGFEEFPEAPSVDSDAEKSPATNENGVASLPMPPAPLSSGKTPTKQTNKLDLSPPIAPPGFASKPDTVQTNGTMTAANRMTVLTNTTAQTTALTQTNYPTTKPPIQTNPQTISANTQTNYPKTQTSVQTIYPTTQKTVQTIYPTTQTPIQTIYPTTQKPVQTIYPTTQTSVQTIYPTTQTPIQTIYPTTQKPVQTIYPTTQTSVQTNPPTISLFVPTNNTVEALPASLPTASQSQILTQDINGTTFSRIPKPLETRKSPEQLRKEVQKELPKDTKVPLELTPEFKQQKAEVQQIRAAFGQQNQAQIDAWKRKLAEMEAEKLRIEAGARQAEFQRQQKAQQEAWKKKMAEMEEEKQMREEAEK

SEQ ID NO: 130323 - protein, 80 aa, Heterodera glycines
LFEYPKRTLEKIDFFVFGAVPPNRCAQIYGETESFGNSFPIACTLILRWIFAPHNCLSTPNGHLKKSIFLFHKYFFQKVL

SEQ ID NO: 130324 - protein, 23 aa, Heterodera glycines
MGNHSSIIDLPCCCDCICCLRIE

SEQ ID NO: 130325 - protein, 263 aa, Heterodera glycines
MYDTTTFSRQEADSRQAFISQKAKEMCHDWYDEDGAQWNFIRDVETNASCPCMEHQAKFDLGRFMPHPRCSQTFRDIACTSTIGAKNCYMSASNIYGSYSGQHFDYGHGYAYGEFGREFRDEGVPPGGAEGGGAGPFGYGGYYGRERNQGNRFPTHYGQVCCYDEKGFLMQTTYQPVIKVIEETPYNPGYPLRAYEFGTSPYMGQFEVPGLSAFHHDYMPYFLCCKFAKFRCQLFYWRRPSSGCQQYQPPAIDFLCLISLICT

SEQ ID NO: 130326 - protein, 182 aa, Heterodera glycines
MLLFLVALTLICIVASRFEVDYDQLTAEQKERLKLSLNKINVGYDQLTAEQKENLMRSFKMIEEWNKTPGITYTVLFKYFLCHVISLIQLGINQFSLMSDAKIQSFVRRTRDDIGLPKIPHRCGGDCYQIKPKPLKEENELALVGKVDAVTFRQIDERKGEPERQAKCSPISRFLSFYGLIC

SEQ ID NO: 130327 - protein, 90 aa, Heterodera glycines
MSGTNSSVGGAGAAKLRPSVEFLHTGSSVPLWSRNPLANLFRRSKRKEEKHRRIGTTEQEEEGEDGAKQHNGKDGASSSNTKRVDKARKR

SEQ ID NO: 130328 - protein, 82 aa, Heterodera glycines
AAGVPPSLYVRLPQPDDPFYFCALAVGLAAVPPITFGISGPPLHVFVQADGVTDAPKVELEDKQLWEEFHKFGNEMIITTSG

SEQ ID NO: 130329 - protein, 112 aa, Heterodera glycines
MDNQKRLCLRAYVGLPNLEWLNNLRETFRHATTFSSVSYTVQFTLSASQIVPFELVNERTKEMLTLEKLSNYGGGEWLLKRCPIIGEKKDENSDAILNNIQFIFWGGSNCIW

SEQ ID NO: 130330 - protein, 58 aa, Heterodera glycines
TRVVQQLFYLTTSIDDAIEENRHKIGDQMYAFVTNLSNICEQLGTVGMDNVKMDEYLN

SEQ ID NO: 130331 - protein, 123 aa, Heterodera glycines
MNFFNLLTVFLSLVINCSAPPIRPLSSVAGIWKKCNGKNGTILVENGCTKLLLCYQSEMAKNKKISKRFGVGKGNIGKLKFVECAEEIAEDQWHGLIITKHQDGVISYESRQIEREKYFRIWI

SEQ ID NO: 130332 - protein, 1162 aa, Heterodera glycines
MQNQPPKRPTNFSIDSILYSNKKPRHGFLINQLLGVIQEGAGVSTTTTNKTANDYVKKLGSSVEHVPRFQYIKVKNQFNIEDVPANPEGLLAGIFQYCIDQSMQDSREREIEPTHLGCLISSPLLTSGDIPIPIRQITDNTVNTILNQFNKVAQSKQQQNVTLWGEPFKVIITVVDRSSLPIKRNLKGGARRNLAPVHHRIHDQCLIKGHKCYESYCQLCMSYHNPDRGCFIQPLQPKEHDPYRIVAFDLETMQHQPVSAQQPERREHQPNFIAARIACPDCIDNGNWKRATAGCRICGPYRTVTFCQRRFVDTAVDKQVIDENPLAAFVDWLVFQLPKKHDTFAYSHFGGRFDMVLVFREIFRIGFNPEMLRRGNKMYEMKIRKQKKRNPNITFRDSFNLMPCSLAALVPSYGLDVEEKPFFPHLANRPDNYGRQIYPTPDDYLAEGMMPEKRRQFDAWYEQHQAEPFLLDEALASYCTNDVEILMAALVAFRKEFFEISRRNEYVDGIDERENHDGIDVLRECMTIAGACMRPFRTNHLPTEHLAIVPERGYDNTQNQSLLALRFFHWYAEEHGVQVQTAHSPGGEKRIGPYSLDGWIETERRAIEVNGCTWHGCKKCYPRDNMLLPNGKTAGEVRERDAKRLDYLRSQLGRVDVYWECEIERMLERSREMRQSFAEYVDDGPLVIRDAFMGGRTGPLKLLHKAREGEKISYFDFTSLYPHINFVTSYPIGQPNVHVFNEQVDWHSSNDNPYPLALLKVWVIPPRQIDVPVLPVKVDNRLCFPLCIKCAKEWPTGGVDFDYHCDHSDQQRGWVSTCTSIELNAALDEGYRVTKLFRVLEYERSDDQLFRPYIAEFMAQKIQASGFDKNIKGQSDKEEQFVRECAEMFGICIDPTKMIVNKGKRSLAKLCLNNLWGRFSLRNFGLSQTLITDDPATLAEYLDNKSIDVTSIDELDTEHILISYLHKKDWVEEHECSNIVISLWTTSAARLVLLKAMQKVVRSPGCALLYTDTDSLILVHPDEQCPLKTGPHLGQFTDEYPEHNIIEFCSGGAKQYGLCLQRKEAGADTVKEYVLKVRGMTLNYDVINNQGLRYDTFKEEVVRYATTGDFEPITVTYPNFLRPNIREGGRVISMPMQKCYRPFVGKGIVGAEFKVMNFGHTL

SEQ ID NO: 130333 - protein, 17 aa, Heterodera glycines
HKHLFDLFYHIHNLIKI

SEQ ID NO: 130334 - protein, 185 aa, Heterodera glycines
MRGFELDGGAFFMCTEISPRCYTIQQVKIAATKNGLMSGTEGLKKRLSDVDDALKGFAMRRPSQTSASASPPAFPSALRPFPFAGLSTCASNSPLPMLPWWFTAECRQELMGVPPPPPDERVPTPDTRPPSSVGEQPMSPEQLRQRIRRQLEYYFSRSASEIAKSVVVLKGKPGQRPLSEMPNGR

SEQ ID NO: 130335 - protein, 101 aa, Heterodera glycines
LTHERADETQSSSAGNGTEFGRSVPSSSDLVLLVRAPSPSLRQLPFLSPVKNWGGFLSPKQTVETVSAISEFSADLFKTPSPARLGKRPIICANVGQLLTP

SEQ ID NO: 130336 - protein, 299 aa, Heterodera glycines
MKGYCSTEMEMFFFRENPPNRTLGVMNQNVVVADPNLENSEQLDSMEMRRRLLNPNNDSALGQLRQNERASLDENEEEEANQGFMRNRTDWTQNLGERAGPTQQIFRNFVFGHSQNEDDFFDHPNIRRTSTPVNENRCVGVGPQNLNEIGLLAEQIGRVIVGQLNSAHQNPNTNPALNLTQHGVEIHQQIHHSAVFARRANNIPVRMPGQQNPAAIQQNFGRPQSQQIQPPNFQPRQPYAWPMNEQCVQVQQPTMPQMNYQPPPTLTHIKISLILAWENLILGLYWSGSLTSQAPKDRM

SEQ ID NO: 130337 - protein, 131 aa, Heterodera glycines
MTLKIVSSLENLIRLTPDVHSILVLDGDGVPVVSAGEEIRNRSQYSISYNSLVEQAKKLGMGEQKFWVFRYEMNQVVMLRRDAFAVFIMASANANMGILCTMSAQLGPILEECKVIVNEVINGQMAGQSPR

SEQ ID NO: 130338 - protein, 46 aa, Heterodera glycines
KNFKLDALFKVLALPDEEFEEWLRELKLLHTTRFCDCGNEMRYKWI

SEQ ID NO: 130339 - protein, 167 aa, Heterodera glycines
SQAVLLVLLARLGPPEHPASPAAPGSREAQDSPDNKHRHALRPCRRVRNAQLGRPVSQEAKDRLGHPETMDSPGSLEQGGGQGPPGPPGPQGQPGQPGQPGGPGQPGQPGQPGIKRRENRTQPIKIIEMFFVSTTIPGPPGPPGNPGAPGQPGSPGQPENPRRTRTA

SEQ ID NO: 130340 - protein, 213 aa, Heterodera glycines
ATLTRVAQAQRQQHLSGNPTGSLTASDRLMKELKEIYRCQNYKNGVFTVEVFTVELQNDNLYEWDVKLKKVDNDSLLAADMRQLAKPPHNQDHLLFHFTFANSFPFEPPFVRLVSPFEPPFVRLVSPVVANGFVLSGGALCMELLTKQGWTSAYSVESLITQLGATLVKGNARISFERNAHINYSLARAQQSFRSLVQIHNKSGWYTPPKNEG

SEQ ID NO: 130341 - protein, 142 aa, Heterodera glycines
MVRTEDRSVGRPSDQSSVRSAAPSNSLERKTDHLVSDRGDHHLDPALRLFVSSLRGYVRLRFGFRFLCDFALFPGLSLYFVLVSFLTIGFGGHVWILAKVHSIFTKAFAIVDQFIRAQMALPRGAGVSFVRLDRDDFHPLYQ

SEQ ID NO: 130342 - protein, 182 aa, Heterodera glycines
MKMLLTFLLLCALIFENSIDQIEAGKISQEKSFAEIFGQRWDDGAEEENICQNDQIIHGETVDQNQYDQQFDHLEVKEEESEEMSTDCDELGQLPMPTNNGQSCDKFSNETNKNKRETVEKFHKIKEKVKQMGKKYSTKEWVKIERKIAKKLGVSQEKIYKWKKQLGLNIINRLRMNKNVKY

SEQ ID NO: 130343 - protein, 46 aa, Heterodera glycines
MAAQSSFPQRTLNQMEGRSISSSDDEDEDLMKMCGIGDEHGHGREF

SEQ ID NO: 130344 - protein, 171 aa, Heterodera glycines
RCMNPEEIFTKLEPIGRGSFGEVYKGINNQTAEVVAIKVLDLEEAEDELEDIQQEIKVLSQCDSPFVTRYHGSYLTGSKLWIIMEYLGGGSALDLTKSGRLEEKHIAVIIREILRGLDYLHSERKIHRDIKAANVLLSTNGDVKVADFGVAGQLTETVRKRMTFVGTPFWM

SEQ ID NO: 130345 - protein, 213 aa, Heterodera glycines
EFVELCLNMDPENRPSARELLRHKFILTAKKNELLRDVIERSTEFRIRQQQQQNLSADSDVDSDGNDGTTCWEYPTLKNTDILDHRQLSDIERAVLDAADNVATIKHNQVNNVPSTFVADVSVGIAPPPPPIRGVRCSSLENTLLPALDELTRTRHGAAHLDTIAVALKRAEQASPGLCDHLVTELITTMAHPQCTNAELRKAIDRLTTRRND

SEQ ID NO: 130346 - protein, 139 aa, Heterodera glycines
LDDIDRLNVVHITGTKGKGSTAAFLESILRSLGYKTGFYSSPHLVHVRERIRINGRPISKQIFTQQFFHIYNTLFEHKKEVKLMPAYFKFLTLLAFRIFCDERVDVAIVEVGIGGEYDCTNVIRRPIVCAINTLDLDHT

SEQ ID NO: 130347 - protein, 59 aa, Heterodera glycines
MPKNDLGFNDQTIRSRFVRKVFFIVGIMLSVVTLMSAFPFMCQPMMEFVQQHPVYAIVA

SEQ ID NO: 130348 - protein, 222 aa, Heterodera glycines
PIEGLDEAKFIQFYRRRDEISIVKDCLMFGDRTVIPKSLQKQILKMLHQGHPGVKRMKSLARMHVYWPMMDAEIETFVQKCTSCAAVAKNPIKTTLQSWPKSDGPWKRIHIDYAGPFHGKMYLIVVDSFSKYPEIFEMNSTNALATISKMRSLIAHFGIPETIVSDNGTQFQSHQFQNFVKSNGIEHIFTAPYMPQSNGQADAKQFSRPISCQPNPRTSNSG

SEQ ID NO: 130349 - protein, 132 aa, Heterodera glycines
MIHLIVHNKRNPGQIDESDHFAGKIQSKDIIKEDQDKVTKVIILLGRYNSKDIIKEDQDKVTKVIILLGRYNSKDIIKEDQDKVTKVIILLGRYNSKDIIKENQDKVTKVIILLGRYNSKDIIKEDQDKVTK

SEQ ID NO: 130350 - protein, 95 aa, Heterodera glycines
MCLTGDPINASKALESGLVAEVFPPDQLVSEAIKLRRKNCSKFTTDGRNGETGGEPFIRNDAPRRMTAKKAWRHFRRSANPTGKTHRDRERKDTK

SEQ ID NO: 130351 - protein, 98 aa, Heterodera glycines
MGLRTSDYKAYKSVLHSFAARNSYPLPYNFRIDYGFLNYLLVEKVNDLIYCILPKTLSFNSAPTNVFRRLQQSIELSGRRPSATVRHRKHWQRWWIYV

SEQ ID NO: 130352 - protein, 25 aa, Heterodera glycines
KTSWRRNGSAETRAPKRERRNAWVP

SEQ ID NO: 130353 - protein, 122 aa, Heterodera glycines
MEEKKEQQLKKRKKKIAAEHQQKQQHQQKQEHWKEERRKRKRLNTSRNNNISRSKNIGRRRDGREREENGGEKGAATEQVLLMDVGNPPPKSRKIIVTFLKGKFIHSIDSKPFYISDLFIYI

SEQ ID NO: 130354 - protein, 252 aa, Heterodera glycines
KRGTDLYLWISSSHSTNGQPIWDVFVREIWPIFSTNIRCLGFTGGDHLDHLRRRTSPTILTDLNQLNSICSCDLSPAAFGDDFDGPNSIISAGQALSKWLHSPRKDGQPKRLRCEDFKGQTDFDWANNFKEHFLRANAISSVSYQIRFYVHVPSMPMVPFELVNEWTKEKLTLAKAKKNEWGIGWIMKRCKIGEAVFVQQQKKDEKWINNCNNVLFWLDSDTNCIGPLSPPPKEEDEAGQSSEKGASSADNE

SEQ ID NO: 130355 - protein, 144 aa, Heterodera glycines
MALKKWAANVRGANVGPQKTDRNCRFWLVAANVVTRNQQQQKGNSEGGGEGRENGGKERKREEKKEQKLKKRKKKIAAEHHQKQQHQQKQEHWKEERRKRKREKGRRKRSSNGTSNANGCRKSPAKIPKNNCHIFERKIHSFDR

SEQ ID NO: 130356 - protein, 63 aa, Heterodera glycines
WMSFGFAVKQQNKLDGTIRSRKGTYAIDSDGKIWINGKETGINVEYSYGAGDTVGIGVNSIIA

SEQ ID NO: 130357 - protein, 200 aa, Heterodera glycines
MKSSHNYKMIRRKFWKKSVFWRNSKKSSQKKKIVETISALEQEPKQRKAFSNFRQNYWDANFRHENLQIIGNKSLIVHYKRNFSGYCSSAFAKHPILLDKNSSDNFYYEISIGNLKCWMSFGFAVKQQNKLDGTIRSRKGTYAIDSDGKIWINGKETGINVEYSYGAGDTVGIGVNSVIRQITFTKNGKQLGWQIKILNF

SEQ ID NO: 130358 - protein, 157 aa, Heterodera glycines
MHLKLCLLFFSILFLIIRTDQIGSENKKLEQKSFDEIFGEKWEEKRNEEQKRREIIGKFNKIKEKIKQKGRKYSAKEWSKINGKIAKKLGTNRNYIYEWIKELGLNQKNFYKSKTDEEKLKIVEKFIEMSNEFKEKGRTYSIKEWNKNYAEICKKIG

SEQ ID NO: 130359 - protein, 91 aa, Heterodera glycines
MSSSNLMVAASPYTRSASSVIHSHGARFGSDQPQTQQLQQHCIYHADGSMYNNSTLVEPGGVHGLHPLSTATSSSTLVVNINNNNGTGNAA

SEQ ID NO: 130360 - protein, 199 aa, Heterodera glycines
MSPAVRLDLASEISTMQRLRHQNLVQLFGVIFSEHIMMVIELCEDGSLLDRLRSQTKPRLLVTTLLNYAQQIASGMSFLESRKCLHRDLAARNVLLTHEEQVVKIGDFGLTRILKDNERLYIMSEPKKIPFSWSPPESLRFREFSHKSDVWAFGVTLWDFSLLAKSRGPGIVQLRFSNFSKVTFGCACPTFVREKFTIL

SEQ ID NO: 130361 - protein, 118 aa, Heterodera glycines
MAIVPSLLMLDQKQYGLPLPGQQNELANPLQMPNELTDHQRKDCGQKLAAEATLAIGSRGNSANELNSHRHSTAIEWLSDGQSQQMGTKQSQKRMEHKCASLPQNEIVAVSKSSGNLN

SEQ ID NO: 130362 - protein, 88 aa, Heterodera glycines
MIKKETERNGLFKRKKCLKNKGDVLMVLKKGSIICMYMHIMTANDCLNKTGIFEQPRSGFGNDHQQESNPDLPGFEISDFFKKCFDHA

SEQ ID NO: 130363 - protein, 59 aa, Heterodera glycines
MPKSRLPMSPSWRSSRETKNGRPTVNRWWRQCASTRSQTQNAKLANLSCFMTAQETKSL

SEQ ID NO: 130364 - protein, 166 aa, Heterodera glycines
MLLISVHVEQGVLRVDFPNRSSPVEVNLKEVEERNIVLRAKLFSDLQTDGLDCGDEVATALDEFLLEGKAAATTTEDGSGGGTVGRKLRLIYYGGDWLYTERDPKPDKSWWSNNPVPDVQDKQISVDARHFRPNLVVGGLPPFDEDRWLYVRAGEAEFVCYKPCTR

SEQ ID NO: 130365 - protein, 95 aa, Heterodera glycines
MENFFRFVQLANTFGFQFDLDQKLLRWNSSTVPTMVPEEEEAEMDAKTAQCQQHQQQQQPMEMETDEPTLITWTDQQQQEQQKRQQQRRKGGQTN

SEQ ID NO: 130366 - protein, 67 aa, Heterodera glycines
IEIIKGSGCPGASYTGLNFKRGKSMTALIFWTCKVVITGTKNNSEIDEMYHYILPYLKMAQKKLGRR

SEQ ID NO: 130367 - protein, 20 aa, Heterodera glycines
MPGNKPCRVDEKHISKPLKH

SEQ ID NO: 130368 - protein, 29 aa, Heterodera glycines
MAAEQQMELDFSTDGNNSEPSLAARIVGS

SEQ ID NO: 130369 - protein, 149 aa, Heterodera glycines
SFSLNYFIFRNIEKINLDCPPQLVPVPGEGATPYRYCSPSAPINDGIQGCGINRHCQYSTTLERYICCGLESDVRLPNVCPPQPANLVPVELAGNYRTCNPYARSGTPQACPENSACLYTACPENSACLYTGQDNGFICCRVQLQSSPF

SEQ ID NO: 130370 - protein, 122 aa, Heterodera glycines
MCELRSAFFKPLNLETIEEEADVLSQNSRVNLRNGGNRRSGVYSRPLSQTNTITTYDTQHDLLDVKSLTYQNMNTGNRVSGSLRFSTLRSALGIGIGVDKGSTITTNKSYAFPSRKIRKWNR

SEQ ID NO: 130371 - protein, 260 aa, Heterodera glycines
ISFKRKDKGGLNLTTLVPQSELDTDTVVPQSELDTDTVKTILSEYRIHNADITLKYDATTEDLIDVIEGNRIYIPCIYVLNIYIPCIYVLNKIDQISVEELDILYTVPHCVPISAHHKWNFDDLLEKIWAYLNLIRVYTKPKGQLPDYNAPIIYTKPKGQLPDYNAPIILNAEKNFLDDLCMKIHKSLSKDFMKIHKSLSKDFKCALVWGSSVKHNPQSVGKTHLLKCALVWGSSVKHNPQSVGKTHLLNDEDVVQVIKK

SEQ ID NO: 130372 - protein, 230 aa, Heterodera glycines
MKRPMDSTATPPSSKTTRISADALAGQIDSLSAAVNALLVQDDISQAVKLQFGVLLTTLHTCQHVIDGLNNNANNNSAEEQERRRSLVIIGLPENPSARPSERVREDQKVVSGILDELGVEAVPTTTYRMGRPDVHRASPRLVKVVLPASVHQHIALGGWKKERTRLRSLPNWGRLLIRPSLSREQLQAEYEQRQAKRNGMTNHPPRANNASAISNQLHELGQKMQQNFR

SEQ ID NO: 130373 - protein, 386 aa, Heterodera glycines
SNPFNSKLIARVFIKSNYPGKLPTVWKTSIILPLFKNGDKNLASNFRPISITCSCCRIFERILAKRITEFLLENNLISRSQFGFLRKRSTTLQLISTLEDWYNAILLNKKIDCIYLDIIKAFDKVPHELLIYKIEKIGIKGNLLNWLKDFLTNRTFKVRISQQFSKEFPIKSGVPQGSVLGPILFLIFINDLSPVIPDGISLKLFADDTKIYFCYDTESQRKKLDEALHCVSQWAKIWGLQFSPEKSASLYLGKDNFKIPYKFNGKTIKETQTIRDLGILIDNKLTFKSHISAILQKAYLRSRTLFQKIKSKSSKTWIKIYKSYIRPLLEYSSENWNPHIKKEIIRLEKFQKFFTRKVFLKCHLPVLPYSDRLKYLNISRRAFFLL

SEQ ID NO: 130374 - protein, 65 aa, Heterodera glycines
MQSTKLKQSKVSRRFLIGQNCEEMAKDWGQIEEDEKIGDEYDQSADDNGQVFLTDFFVGRINAKI

SEQ ID NO: 130375 - protein, 19 aa, Heterodera glycines
GPGSRSRVLKSSGPGPGRA

SEQ ID NO: 130376 - protein, 324 aa, Heterodera glycines
ECDVREELKKNKEMKKFFESVPDKGPINPRDAYAGGRTMPFCLYAKATEEIEISMFDIISLYPFVNYDTPYPVGVPKIVVSRNFNVNWTAPDDVPYDGLLKVKVIPPKNLLYPLLPVHIDEMLLFPNCWSCARRAKNEFVMTKDVKKCNHRPTQRAFLGTFTSIELRKALELGYRIVGFYRAYHFEQFDSQLFKGYVRMFLKIKVEASGWPAEVKSEDEKRAFIEMYKAKYDIGLDYDKIWFNPGLRMIAKLGLNSLWGKFSMRNTLSSTEIVGSMERWMELGRDNTIEFGRPVKISEEISRVVYRKKEEFIREHKVSNIVLSL

SEQ ID NO: 130377 - protein, 39 aa, Heterodera glycines
MRKATPTAAALADDEDEESIESRVAKVVAVPPANGRDME

SEQ ID NO: 130378 - protein, 29 aa, Heterodera glycines
MAGRSDRNCARANGPYIGQNATLQHFPLQ

SEQ ID NO: 130379 - protein, 92 aa, Heterodera glycines; identical to SEQ ID NO: 125147

SEQ ID NO: 130380 - protein, 18 aa, Heterodera glycines
MTKFIQKAIKISYYLFII

SEQ ID NO: 130381 - protein, 48 aa, Heterodera glycines
MSPKDGTELPKLTRNKQKSRLNAHKGSSPGPHGDFRMKRVYNGVAAVR

SEQ ID NO: 130382 - protein, 170 aa, Heterodera glycines
MAPRKQNEQFLDEIQNSDDDVKLVDSQSSHAEERPALKKRGRKSRWEKLLEDVNNAKKSNPAEVEVTDVDERKAANVFDYPTIFWKLARPKYGVFTFMCNECRNENFKRGDKRFILNTGSGQEKLEFTQTFCQDCAKLNFDCTDLIMKHQKKDDGPQKNGGLNTFFKTEK

SEQ ID NO: 130383 - protein, 165 aa, Heterodera glycines
MPPLTTALSKLLNCKAENLAEYLNNPEAVNKASAYLRGKKLKTTYSNKGGTTKEVEFGNFSLKSASETYAFEGFLGKCPFCKHSHILESSEVKVHQYFYIKHRIRLLYPQLKCIVEYHSKGHCKYYPLELLAIEDSAEITGEKPTDTNYLDYLGFRSVWQPTPVY

SEQ ID NO: 130384 - protein, 203 aa, Heterodera glycines
MLSIRNLSSQMFPREQGFLMDAYKQACADPYGYLLTTKIRLSLYPKMVKKQIVGQRVLDNYEYLKSLGRTTSHKKRRHLLSSAGCEELLTMVEICLNLLNGSFCLTRKQKQKLLPFANTIRRLARHYRGLVASREGVGLAKGDDDVAGQTNLGFVKRQLETVKRKRTANVSERNVLYNQQLRRYLKLRKEANDRPSNSATVLN

SEQ ID NO: 130385 - protein, 247 aa, Heterodera glycines
MNEKKDHLLPIIMSDPQRFGATDRGKILNPKTGREFIDSDLAWSIERLVDPRPENAPSPSGTKELMRKLAQNPLASSLLNRLFVGSGQRNTTYTLFKPKREKFQRLRTVPGGFMTSGLGRLPSPFAKEQRLSVPAVGGGCVVAAYEVFGQMPKLPETLYTDRGLEFVAKPMQEFFAENGIKKYETSSKKKAAVAERAIRTLKTRLYKYFSAKNTSAWVDVLPKSNLLLASPHQLERAARASSPRQSG

SEQ ID NO: 130386 - protein, 201 aa, Heterodera glycines
MANVPGQVREYLSTDKPLDDRPLDIDEIESEVAALNRRTDSGMPPHSLRLKVGCVVVLLINKSDKEGLINGTRIVLEELGDDRLIGRVINSNAIGGQVRFFLERTRNVYEDKSPGGIKYERLQFPIKPAFAMTIQKGQGQTIRTVGIDLEREVFSHGQLYTAFSRATDGNNVRVHAPNREIDAQGRAKVLNIVATNMLKLQ

SEQ ID NO: 130387 - protein, 38 aa, Heterodera glycines
MRKAKCETPKNANNAKGEMRKAKPRPIPDVHPGSEEEA

SEQ ID NO: 130388 - protein, 92 aa, Heterodera glycines; identical to SEQ ID NO: 124679

SEQ ID NO: 130389 - protein, 32 aa, Heterodera glycines
MANWIRSTKLTFEIKSVCSSLEFYDENKLYFT

SEQ ID NO: 130390 - protein, 44 aa, Heterodera glycines
MSVIWRTVRRMAKIWCSSKCLFCHLCSPSSPLITLFSILFPSPT

SEQ ID NO: 130391 - protein, 70 aa, Heterodera glycines
MIDQILIILAFIGTICDNKPSYCLIIKRRILSEKNSFLLVCIINHFFISLMNLFNVKILMVKKLNVNLCD

SEQ ID NO: 130392 - protein, 63 aa, Heterodera glycines
MLNISAYFYCSSLCFQLFIHRIMINLPSVQLKIEKIVVVEFVPRPFIIFERFMWLFLVDGDIK

SEQ ID NO: 130393 - protein, 110 aa, Heterodera glycines
MRCASPTRQSEWIDVNTYANIMTNNEMAEQSAFQSKLMLLRLKKVTHLPIDTDIKGNGEKEAEFPLTDFTSLMMYLILENISDNSSIDVMAIEDLDMEHILITYENKKSG

SEQ ID NO: 130394 - protein, 55 aa, Heterodera glycines
MDIRSQEVELSGTGTGTGRNFLFDKNQAFMLFYILQVNVCSYKFTTNTKYILQRI

SEQ ID NO: 130395 - protein, 56 aa, Heterodera glycines
MYAAINLQRIQNIFYKEYNFLFDKNQAFMLFYILQVNLCSYKFTTNTKYILQRKYK

SEQ ID NO: 130396 - protein, 50 aa, Heterodera glycines
MEIDEQHQSNSAGHVVASGECVQQSEQQQEMPDLSAMTEEEQLEPKIEQK

SEQ ID NO: 130397 - protein, 158 aa, Heterodera glycines
MENAEVSQCFSKFDNKFLFIIGHDNQYRKFKKTNERTDTIYLYCMNCENYNKQNSAGVIGSAIIREGQLDRTHQIMHHLQCKGVPLEQLTAEQIDRNQRRELIQCSADSKSIWREGSDRAREHDTAEDIEIDDPTGISFNYPNWQSVRRAYNRRKMNK

SEQ ID NO: 130398 - protein, 36 aa, Heterodera glycines
KIPSKIKGLLRTALPIMLESICMCIKFIKKRDSHFS

SEQ ID NO: 130399 - protein, 62 aa, Heterodera glycines; identical to SEQ ID NO: 126119

SEQ ID NO: 130400 - protein, 95 aa, Heterodera glycines
MEEGIGNCLEPNWKIKEKIAEKIGARMNTISAWKRKLDSIAKKRKIYSDAEKMEYAKRSEEMRKRNPMINWKEIAETLGIPCANLRRWTRNWTPN

SEQ ID NO: 130401 - protein, 36 aa, Heterodera glycines
SYRTTPKILNLIDSEQSYGSKSLPTTFRPTTFWGAP

SEQ ID NO: 130402 - protein, 47 aa, Heterodera glycines
MGAKVHLCVSFVMPKMLNCAQFSLPSFGLKYAHGLSNTLTPKKKKVK

SEQ ID NO: 130403 - protein, 89 aa, Heterodera glycines
MTEFGLDSNEFPGYFSDGLPFSVFEGLSLTLDKMFLYALSVGPSEGMIRIWDWVKMNFLFFSGRKKISIILRRDCRLIDIVNSNTDHLS

SEQ ID NO: 130404 - protein, 364 aa, Heterodera glycines
MKNLARQYVYWQQIDEQIEEVVRSCQICASEAKAPVKTTLHSWPKSDGPWKRVHMDYAGPFFGKMFLVIVDAFSKWPEIFEMNSTGSAATIGKLRYLCARHGLPETLVTDNGTQFSSKEFKEFTRLNGINHLFSAPYCPMSNGQAERFVDTFKRTCRKLKKEGITEMLDTFLATYRVTPTESLPECKSPAELFLQRKLRSTLDLLKPKNRPIVIRDEAMERKFNRRHGARPRSFDLDDKVYARHRMSQNWRPGHITLKKGVMYDVTFQDGSVGRFHANQLLVRHSDVNEEDPLDVLNDAFGLPLAPANQNLGDVVAQPAGEVIENAPPSPRPDAPQQPNEVIEEGAVQPNVQNERPKRNRRPPD

SEQ ID NO: 130405 - protein, 153 aa, Heterodera glycines
MKIAISFILAAIEVPMFTDYKNTKSIQLIKKEKTILKEMKKKLTEIFYALFKKFNIDAYNMKILANTFEQNVPKTLSNIGTMLREQDKIDDEKQYVRIYWRKCIITARNQLESLKDGILSQIFNYLDEYKTVENIEQIGETLKIIRETLLADD

SEQ ID NO: 130406 - protein, 58 aa, Heterodera glycines
MGQNLFIHCKHDQREGMLGTTSREVQRNYKLPDDVDPKSIRSNITRAGILRITAQKKR

SEQ ID NO: 130407 - protein, 110 aa, Heterodera glycines
MEWRLARRGFTVLPMYKWQRSGPYSLITALNLLDRHHVKFSILTLFIHHCFPDPKKLLNSLRELAIEHNCPILLSVVLPIRQFVEFDDKIVSAGRKLPDIPTKGTTFEAQ

SEQ ID NO: 130408 - protein, 60 aa, Heterodera glycines
KGWQTENSDSSNFRWNAAVNRWSPLLNWSIFLSFHFKMINNKAYKMPKCNSDCLYVKINL

SEQ ID NO: 130409 - protein, 207 aa, Heterodera glycines
AWGQKIAENQPNSGKSAAGDQQKIAKVGLEMKLLTAEVEAEAEKWDEYAENDIVKRAKAMSAMSYNMAMSAMSYNMYLFTKGDGPLKTTHDLFTQAEFFAEQANKMHKTVMEFAFEVPGSAEKNELLQILDKIPFHCQQLQVLVKSPTVGKSATFSKVDAVISEIKGLMNEIAKLVVDAVISEIKGLMNEIAKLVTACFVCATKVEI

SEQ ID NO: 130410 - protein, 308 aa, Heterodera glycines
MPPPRPKKREPQPKVDPRPSTSKKADIKPKREPKFEPDPRPSTSRQAGYNPAPPAPKKEPKHEWKQTKRLHSPPRTAPHRIPKREPEIEETPQEQPPCGPIGRTEYNHQDGIENQKRVSPEKMELINATLDKLYNEPSSPACFSGVTAVWKEERKKIKQSSKKEVRNYLESHRSYTLMRPRRVHFRRAKTDAAGFMTDVQVDLADFRALSRQNRGHRYLLVAVDVLSKRLFVVPLKNKRAEEMLEAFKELVKQMPMVPHRILSDKGTEFKKQLLKKFFDEQEIQKHEPVHSSVKASVAERAIPNVPAR

SEQ ID NO: 130411 - protein, 415 aa, Heterodera glycines
MSKAGIAGLKLMLSTGEYADVHFLLVPAHKLVLMHASDVFEAMFRFDANKEQAENANYPSAVEVPDVEAAAFKVMLSFIYTDDLSEVNGENAMAVLYAAKKYNISGLVGPSLQIPISELHNVFFAYAYACLFELEIDQKMLSGLIESDLLLFSDEFQIWKAVISILKLNLNFFFSFLALRWADEKCGQNGIECSSENRRSVLGPALFKIRFPNIHEEEFSKGVVPFGVLTMEEVYGIYQYNSHPYLYLRVPDELLYALKFPSHGRIFDWNTAKGNRRGTLALEIGKLSEFAGEKVGSRRISDAVHINGVSWQIEAQIRQNSEGKAKYLGFYLWYDASKEGEGNWRNEYSATFRIVWQKSKAANSTGTLSDRVINNTKNWLGFHLFITFAELMDPSKGFYNKEEDKVTLAIDVTVK

SEQ ID NO: 130412 - protein, 26 aa, Heterodera glycines
MKIAPNSKMLKNGQNRCKKVRNGLEK

SEQ ID NO: 130413 - protein, 385 aa, Heterodera glycines
LFPNVPIVVRDELKEQVSAHWKNVIGTVNEDGSEDLTAQYEQIYAKLLAQQNKTEWANMQQKVKKADKHKLCKKSVSGQKLKILVVSSPIFDTLPPKKAGGTEIMIYALTESLVKLGHDEMVKRHAHEYDIVHFHDPSSFIEFRHFLNHAVHTRHMPVDDTVFFGLFSDVPHISISEEQQRLTPIGKDTINHLISGAFNYIISGSYPLLDLNWVGSVHNGINLDDFKFVEVPKQQQPYLAWMGRMIPDKGVDVAIKFAIEAGMKLKIAAQIVDDHRKWWMKRILPLISEKHADLIEYVGEIGPEQRNDFLGNATAFLFTPKWDEPFGLGMIEAMATGTPLTSLDPELVYQIIMKLTIGYVLAMYSSALRLAPLLAPSSHAPFCES

SEQ ID NO: 130414 - protein, 320 aa, Heterodera glycines
MPSKQHNLRMKMKEDRRRTEKSVSPGRSPVPDGSADENGVVSHPGNVTPNIGALQLSTPASSIGSRRRARPSNAGTESITASQKSASSVDTQSISQNAESLPCKKKAKVDQADQPKNYEAITSTPISTQRSCGGRPTKMRRGPGRSKANDSMNESSSMNQSSEAITNLIVLPNVTEKINFSTVQIKFATSRNMACKIRRWADVGLYERDGETAQGPRSGPRFIETCWNDLTQFLNDAFVVEYLAYLASISQRKVVVVDPVVWQMGIDRVMQYKKMTFGYDPNVPAEVILLPVHFPGHWTLIIHDVQFGTHFADSLPTPYG

SEQ ID NO: 130415 - protein, 24 aa, Heterodera glycines
MEYTEGKDFLGSSFANTEAIKNTT

SEQ ID NO: 130416 - protein, 37 aa, Heterodera glycines
MADLKKMKRDTEAEKTAESKNGLQKRHFSRPSNNKMF

SEQ ID NO: 130417 - protein, 146 aa, Heterodera glycines
MKLFPLLLLIILFLIDKIGSERKKLQQKSFGEIFGEKWQEKEEEKRNELKKREIIAKFYKIKEKIKQKGRKFSKKEWNKINLKIAKKLGTNQTYIQKWIKQFGLQKNKCYKSKSDEEKIVIVQKFIKMANEYKQKRKYSAKEWDQN

SEQ ID NO: 130418 - protein, 186 aa, Heterodera glycines
MSANREQLTENLKKIIALHKLQQDMKLIRDSILSGNFAVNEMGNNNMIVWTVPVPRNAGPQGVAPPRPLAPSCPPPPPQLPVFPPPPPQLPFLPSPPQIGMAPFCPRPPQMSPVLAPLALPPLAPAPLPLPSCSTFANPFGVRAPPNKCAVCGRRFLAPRRRATTEKLPSAKKARVHGPEEPMDEE

SEQ ID NO: 130419 - protein, 44 aa, Heterodera glycines
MKLIENISIIYRRKLMNIIHQCIFHSFTTFESKDKSRKIKRLEI

SEQ ID NO: 130420 - protein, 24 aa, Heterodera glycines
IGFLAIIGIGDLIGIGFCLARHIP

SEQ ID NO: 130421 - protein, 38 aa, Heterodera glycines
MPTNYDYHSKRLWNRSWNTKCVALPYQSAENGKNLNNF

SEQ ID NO: 130422 - protein, 169 aa, Heterodera glycines
MSQFSDDSLPPTLDGPYSPVGDDGTELMDDAPPLENVIKHLPNTVVPSEENERKTRREPSITRELDAELFNRDGFVCLSAAQAEAGRFKAFRFIGQFLLSLTFGAVFPEDILRNLFTMCLSYAVEGAESMKISADHFIFLLTSKHLDYEVAVHFKKNRQHGNGEDSDSF

SEQ ID NO: 130423 - protein, 105 aa, Heterodera glycines
MEPGAKKRRKRKNAENTDGEAMECEEEEDAVDEDAENNWMLGYEEAGEKPESVTTYKLIPIKLANFVKTFGLEIEGVENKKYFPHKFNKAENYGTVLETLPPMED

SEQ ID NO: 130424 - protein, 64 aa, Heterodera glycines
MYPRGLIDPEYNCDHFEDSERETGLPKLEIVECYAEVAKLLTNSKNWGQQHLFNLAEKVLDGLG

SEQ ID NO: 130425 - protein, 19 aa, Heterodera glycines
FLNLGIVNMGTILTNDTAN

SEQ ID NO: 130426 - protein, 218 aa, Heterodera glycines
RRVNHRRVGVGESTIGESASASQPSASRRRRVNHRARWRRRVDHRRVGVGESTIGRVGVGESTIGESASASQPSAKLASASRPSASRRRRVNHRRASRPSASRRRRVGVGESTIGESASASQPSASWRRRVDHRRVGVGESTIGELASASRPSASRRRRVNHRRVGVGESTIAESASASRPSASRRGALNCSPSACMFAKCAIKTIIYIKIFTQIIFT

SEQ ID NO: 130427 - protein, 37 aa, Heterodera glycines
MYGVFWAADHESCVHFDQSLNPDPNLNKKSKIKLFDF

SEQ ID NO: 130428 - protein, 152 aa, Heterodera glycines
MKLLPTVLQPVLFLAFVANVFSYQEPILPVWCYEGIHVGGQANILTVNISGSDKKSLIFNGEMRKHLCVIYQSDSRQDVKECVEHVCYKDGELQMVFNLCAKHGYSQVCTPDDELIGLVVASQCQGGQYKCSRRYILKNDRTIPPAQRVKQT

SEQ ID NO: 130429 - protein, 316 aa, Heterodera glycines
MSLIWKYFKLSGRVAFCNICDFKKDYPPRAPTTPLISHLEHKHPDLHKEAFCSSAPSCSVPLTIAEDDFDGESVQPPKHIKSIILHSLQAKSPWEKDGEKTLIINTKIMEMIAVDLQPLSMVENEGFRRLIHELQPKYHMPGRKFFTTNLMPKIVETLKARIKKDIKKTNFISLTIDCWSSKDAAHSLLSVTCHFIYEGQPKFVVLAAKPIKGRHNATVLKDLLMKVFVEFSLEKSKIFVVLRDAAEVMVKVCTDLGLKSIDCFAHKCNLAIWDGVRKLNDDESTKSLLERIKKLVRKLKKSPVQKEQEGNLQKLL

SEQ ID NO: 130430 - protein, 100 aa, Heterodera glycines
MSESPKKVGKQMEKAIFITGDDWLSVFHLVPPFQLGLGIALLSHRFDRLVDEHFKTRRWALDEIGIRRTFEKDGQYEMQITNSKLDPSPIETKVFDFYLK

SEQ ID NO: 130431 - protein, 636 aa, Heterodera glycines
FQSLGLNSPAFQSLGLNSPAFQSPGLNPPAFQSLGLNSPAFQSPGLNPPAFQSLGLNSPAFQSPGLNPPAFQSLGLNSPAFQSPALNPPAFQSLGLNPPAFQSPGLNPPAFQSPGLNPPAFQSLGITQSTCIPITGTQFSSISITGTQSSSIPSLGLNSPAFQSPGLNPPAFQSLGLNSPAFQSPGLNPPAFQSLGLNSPAFQSPGLNPPAFQSPGLNPPSFQSPGLNPPAFQSPGLNPPAFQSLGITQSTCIPITNNKSRRFFCIPIAGTQFYDLQSPHWDSFSCISITGTQPSSISITGTQSSGISITGSQIYEHSEHWDSILQHFNHWDSIVVHFNQRDSSLQHFNHWDSILQHFDHWDSILQHSSHWDSILMHFNHWELTLQHSSHWDSILRHFNHWDSILQHSSHWDSILMHFNHWESTLISITGSQIYGVPNTGTQFSSIPVAGTQPSSISITGTQPTSIPVAGTQPSSISITGTQSSSIPVTGTQFSGISITGTQPSSISITGTQSSGISITGTQSSAFRTLGLNPLAFQSLGLNPPAFQSLGLNSPAFQSPGLNPPAFQSLGLNSPAFQSLGLNSPAFQSPGLNPPAFQSLGLNSPAFQSPGLNPPAFQSLGLNSPAFQSPGLNPPAF

SEQ ID NO: 130432 - protein, 66 aa, Heterodera glycines
MSKNTSTMLLFSLLANRIFLVTSVNDLTEAIGSMKEKLFTIYQKYDTDFTPNIPSILETERQEFFN

SEQ ID NO: 130433 - protein, 1856 aa, Heterodera glycines
MPNLRSPPLTRQRALNLGIRLNNNANQQGGQQIVEPQHLADRRLENEARHNSVSSVASSLLDPTEIRRRLLMSGIGENAAGVQNGPQDEQQFDALLNQHGNDLFQNENRGENFERDVFQPVVREPPLQFSENFENGPRQYELVGVRPVVTSTPHAVQPQRRPNSEPLNPGLVRPQAMFLNSFQQNIAANPNGNQRQRAEQRFIDEDERQAALVRHRQANLTHYVNNDRDFNAFHPIAGAQHVWRAQIQHVSYPNNPQIGEVNPQQIPRQNQGFVGNQQIFRPVAVRNDFHPENYGDNFNFGHPEQQNFGQQRTEQIQIANLEYVLTLDRLPELKGNEGADKVKNFFKKFSNATEEWPEHKRVKALETKVSGRAERAFNAAISSGPHRFDSIRRAMQNQLEETDCREMGAFDELMSGVKRRSNENLDALADRIQSLVSRAYPGLTQNLCDDYAIKHFIRALANPELSLTLEMSRKSGMSFDEFVALAARAESIQRATRVSSNENKYSDNRNRGFYFSNNFSRPQSSEFQGYSQQPRGRIVCYNCNEPGHLSRDCNQQIKGQRVNSNENERIRNQFATGSNSLAIRNNEESPKNNQRNFQPKSQNFLKQNCIVMQEDQPPDAFCCGVQLTSEVSNFLENELHEKNQSEESKEKDHVGKILVIRVETNNVRTDAMLDGGAQISLIGAEFLYKLIKEHGLDLRKSGFSRTKARIADVNGQQLKCFGMVTIPISRKGREKTPICFHITTAQFGYNLLFGTNSMSKLGFLLYDSVNKEMIEFEEGQQNDGNAARIIFSTKIEPRTTKLIEIGVDKEWNGKDVIILPSNIESGVKVEPTVGKVEDGRVIAQITNYSTLSQRVNEKTYIGMIEKVDEIFDTENSILSAEISSTMAYGKNESGKLGRADLHIGEILGHHKTELLELISQHTEIFATSEQELSQTDLIRHKIETGNALPIKSQIRPVPYAYREKVSAMIQDYLGRGIIRSSNSPWASPIVIVPKKDGTLRFCVDYRKLNSVTVKDAFPLPNIDNTLLALGGKKVFSTLDFISGYWQIKMDRNSIEKTAFSTEFGLHEFLVLPFGLCNAVATFQRFMTRLFAECLNKFVFIYIDDVLIASESWDKHIEHLKEVFKRIENAGLKLKVSKCHFASNELPFLGHILSREGLKMDMAKVKPVLDLPIPSTKKQLQSLLGFLAYYRKFIYGFGGIAAPLYSLLKKDINFKIGDLEKKAINTLKSKIVSDVMLHFPNFEAAKNDTTRKFILLTDASKIGIAAILCQPDEKGNIRPIYFASRQCKNYESRYCPTELEALAVRFGTKKFSQFITMMPTKIFTDHRALIPMFKSKKETGNSRVDKWLMEMNAKFILEVEYHAGKKNVIADVLSRSLALKCLDSPSEAEKVIIGQVRRSENGQRPQEILSHQEWVKKTKESELGFLYDFLTTKVLPIEPKSRQKLASSLHNFTIINELLYKCGKDAELRLFVPSSFRQKLIRERHSGVCSGHMSGKKIFLQLAEKYFWPNMYFDCVKSAFQCRICAHTRNPRSNEPPLKIVATAEPLELVCLDILSIGPAHSCNKYILVAVDHFSKYLVATAIPNKSADTIAKEFVKNFILILGVPKKLHSDRGKEFLNETLNEIAKVLKMEKSLTSGYDPQANGVTERVNQTILSMLKRSTASNWTWDDRLPFVVFSYNTTPSEMTKISPHHLMFGKPANFPSDVSFPVNPQYTVDVDEYIQLFRENIAHLVVKAREHSEKERQKMKNNYDKQAKVTANKFEIGQRVMVIFPGTNKRSPHHKIMWNHFGPFKILEISASAASVVPIDKLNSKPLKVPIERMGDRMDSQKSPKVNGKNLMGTEIKDFLGKFAELWHN

SEQ ID NO: 130434 - protein, 66 aa, Heterodera glycines
MENRGKFFFLTKLERKSGGKKSDGLWEDSSAVGERKYQNGLFRTNCMDCLDRTNVVQALLAMESLR

SEQ ID NO: 130435 - protein, 29 aa, Heterodera glycines
MLAALNFSDRILGGIRHPSPAFIRCHNLA

SEQ ID NO: 130436 - protein, 178 aa, Heterodera glycines
MDRENLEDSKNENKQLKEKIQKQEEEMERMRKALNEGQSSSAGAGTSSAKASASFSDQKIPVRGRLSLCKSVKYDVTLGEIERRVTGLEKITPNEYLRFLRTQKAKGKGRKLQEEIGKERWGPAIAAAMQFNLEREKNEQTCFTPLTEGEACKASLSHGWGWRNCWMISPKKFFKTKF

SEQ ID NO: 130437 - protein, 21 aa, Heterodera glycines
MSFASVAGQGDGYTQQELFKF

SEQ ID NO: 130438 - protein, 52 aa, Heterodera glycines
MVIRFKTSEKFECLTEEKWEIPPLKQYTKKEQTIDANISEPTLCAARGFEPR

SEQ ID NO: 130439 - protein, 54 aa, Heterodera glycines
IFSLDGTNEHEHIIDGKVQSVAISQNGDLYMTKQPTHGTEESAIWRSHIDHPIV

SEQ ID NO: 130440 - protein, 447 aa, Heterodera glycines
MLKQDKVWQWADCQNAFENVIKILKSDQLLTHYDPAQEIIVSADASEHGIGAVISHRFSDGSLKAIAHASSSLSAAEKNYSQIEKEGLAIVFAVQKFHKYLFGRHFVLQTDHKPLLSIFGNKKGIKACTANRLQRWAITLLGYDFEIEYQNTADFGQADVLSRLIAKTPVPDNGVIIANIRESNETGVLNFVTKTLPLDHSDLANAAKSDQAIKNVKKFVCSHWPTKNKMAADIVPFHRRRYALTIEDECLLYADRVVIPASLQKDVLQLLHRGHPGMKRMKGLARQYVYWPGMDEQIENFVKMCNECTMEAKMPVKTELHSWPKADGPWKRVHLDYAGPFMGKMFLIIVDAYSKWPEVFEMRSSNSAATIDKLRSLCASYGLPEILVTDNGTQFASKEFKEFVTENGINHLFSAPYNPMSNGQAERFVDTFKRTCRKIKGEEHRKC

SEQ ID NO: 130441 - protein, 217 aa, Heterodera glycines
MGPKKAPPARRKAEPSEGEEEVKRKKAKRIVIEDEPEEGANGTGSQLQQNGHEEAMAPVVKGGDEEDEVVSEVGIYLLPLAPSDAGGIAKMANSAGAASSVSINRLQFPQQHPNVLRRRFNGALSGRGNAQDGEEEEEDQEEQRTDRTGRKLFAQYKAQVKHLRLGFGSDCDEEAMASAVMPTFAGGGGIAELLTKSSFFVTGGQNLRNAKALAGDH

SEQ ID NO: 130442 - protein, 222 aa, Heterodera glycines
VEQRTEWRPFSHSAAATNRRKDKTPDTTRRLEMVSKQTTKATAISSRLEWRIDHFEKLMKLMTAISSRLEWRIDHFEKLMKLMKNGQNLISKQFSCTSGSSVVWKQFSCTSGSSVVWELHVYPNGKREEDVNNVSFFLRQVSFFLRQVGLQRGEDPVMTEFQIYALDASDCRISVCRDTKDFSNQQGRGKFQVHRDKMLASLRPDGKIFVFCFLPQFPFDFC

SEQ ID NO: 130443 - protein, 122 aa, Heterodera glycines
MALKAELETQKRLAEHNEMQAMEEKTDNEKQKKNEKEKYDSVFGLTQQLQNEQTKLFGRMDELEKQFGKLLQKKEEENCKYVSLGRIAQLINEEKKQLDKITAEFNNRHEEQTVNELALAKT

SEQ ID NO: 130444 - protein, 122 aa, Heterodera glycines
MKSDVIIGFAPKQPKMPLNGTLLNRCGTYAYSSTANCVLNGSWKNADVKFFPGDVVGCGVNLATQQIFFTKNGHRLDFAFLNNHLLDASSADQLFPFVILWNSGDQIEANFGPKFKFDMTTL

SEQ ID NO: 130445 - protein, 71 aa, Heterodera glycines
MLAKTCASTPNIVRTPVSATILSIQHGVSAKCHSFGCCHPFTRTASTRLSAGTRTNAILGTESGEAAGELL

SEQ ID NO: 130446 - protein, 26 aa, Heterodera glycines
MSSIERQNLAGFSRLIFLQMYLYKFA

SEQ ID NO: 130447 - protein, 39 aa, Heterodera glycines
MPPRCKTYYGKPKTFGFVKKVLFLKSANLIGNAANNADK

SEQ ID NO: 130448 - protein, 388 aa, Heterodera glycines
MAYISSPGPPMPPKCFSPFERLTLAGLRLGQCARLIRRLLGLAVLPVSAAHSLHWARCRCFCGAFDPLFVLLPEGKGPSVGAKAEKRRPGDDGTAAAGKRVVDAFGQCCGFAAQSARGCCWLHAKWALAANTTAPSPHVGTELQRRVHHHKQANDLNSAFYRKVQDERMRAAGVMPNDELLNPLLPYGGGGGDTLDRHIPTAPFGPPQTMFELKHSQQQLHHAQQQPYRFWENGATSADTMHSAGVGWHPPYYVQQQPQKQSYGSASANTEPTQAEPYQIASIQQEQAREMCAVFDHMVHGDLVEFLKVREPRGGTDNDEQERARNAEDFLRIATQITAGMQYLANKCFVHRDLAARNCLVADQQVIKVSDFARMKPKYARDYYRVIP

SEQ ID NO: 130449 - protein, 302 aa, Heterodera glycines
VSRWIINEWHVINKKTNHKKSNKENKCFMVVLTDLHAGASVYGKQISSVVKRVNSLDADVVFLIGDIVDAPRKLIEERVESLRHLKAQLGTFYVTGNHEYYYGNAEEWFALFESYGIRVLKNDVVKFNGYCLIGLNDITSEEVVKFNGYCLIGLNDITSEESGIPNHVMDVSVINYCPKIPNHVMDVSVINYCPKNATTIVLAHNPSAARKIFEFSQSNDHPVDLILSGHTHNAQYLVLHTHNAQYLVLMPFAYFILPYLYGLYVLSDGATKLFVSAGTLFQNAPMKIPFMSEIWSIEIEPR

SEQ ID NO: 130450 - protein, 95 aa, Heterodera glycines; identical to SEQ ID NO: 130305

SEQ ID NO: 130451 - protein, 165 aa, Heterodera glycines
MPLSWQHFLLIVFSVALSKVRPFPCGVCPKRILIEASVASSSCGVSEECDDPPKNAETIATTAAPLAEAKGNSSTEAGRDEEKGTERTAILAIAIRTFSNGSNEEVKPREGGHGLIPFVLDTTDAMGTGGAWPLLTVPNACAKPIFGEGTAKRAKRGRRRATERK

SEQ ID NO: 130452 - protein, 82 aa, Heterodera glycines
MDTDKARVKLEEVKDRYGLGGDIEKEKEKMGIYTPKHTPGERTPRYHRTPIDFAILDGIGNGKRLVQSTNDYGTIGAARMQG

SEQ ID NO: 130453 - protein, 67 aa, Heterodera glycines
MGAEEKTDRNRRGGKLIGMEADEKVNGMRGGKVIGMEADEKVNGMRGGKVIGMGAEEKLIGIGEEEK

SEQ ID NO: 130454 - protein, 106 aa, Heterodera glycines
FCLRSSVVVEFAYAISSRLNFSVHFTIADHSTRKCPSLSRHFLLSYSDHFSSSPIPITFPPLIPFTFSSASIPITFPPLIPFTFSSASIPINFPPLLFRSVFSSAP

SEQ ID NO: 130455 - protein, 92 aa, Heterodera glycines
MDRGITEYQLERSPGPSSGPCAPVAEGQRGAAQPMHRRLWQNRGRTDHGLQKGCDRKEAKTPSETELSLIGRISDQLREQQAMAQKHPIEHL

SEQ ID NO: 130456 - protein, 42 aa, Heterodera glycines
MAAHHQFVLQTGVQADQTQFKGGQNAQRDGTVTDRTHFGPTP

SEQ ID NO: 130457 - protein, 44 aa, Heterodera glycines; identical to SEQ ID NO: 126591

SEQ ID NO: 130458 - protein, 126 aa, Heterodera glycines
LLAWGPRWFFPSPGSSDAGQRCGAWPFLVRGAICLVYSDNERDSSLLNSWLIASGHNFLEGFSVFSRTKLSNNRSVMPLDVRGCTRATLAKSACLPSPKGVGKPVKICRDWDRTLQLLSVNEEFLV

SEQ ID NO: 130459 - protein, 116 aa, Heterodera glycines
MLSDTVATVMGAEHTVKAAKIPFLFYLAVFLKESSSYGNSRTQPSYGYGGQQSRYGTHEQNGGENGQFERQNAWRGGGGQWGQNQQNWGQPQQQQGATAAVEGGQIEKNRKINGKN

SEQ ID NO: 130460 - protein, 178 aa, Heterodera glycines
MAVKLMEKAGISGEEKTFGLQHLGLIQNFWDKEYPEMFRIVAFDMRTGIKPIFKGEGIRKNEVCVIKDGDHWDGMKSVTQFFCVRNFCVSCEVTRERPERHRLECKERCKKCCRMGFGFPCADVCAGIYCAECNRNFYNTECFESHKKTACREYKKCEKCGETPTQGKTTCGEKICRF

SEQ ID NO: 130461 - protein, 166 aa, Heterodera glycines
LPWNPVTIASDIDFQLPDFRFVNLSYGRQMRQYNAGAFDQLKVTFQFKRLYGYYIVQAYLPSYLFVFISWISFWIDRYALPARILLCVFWIDRYALPARILLCVNAACALIYQMGNVVQNLPRVSYVKALDLFFFVSIFFIFMSLCALDLFFFVSIFFIFMSLCEM

SEQ ID NO: 130462 - protein, 54 aa, Heterodera glycines
MTMFPFVTETENNGVDHLLSTTDQRQGEYFAVHLKGSSSIGMGFLSFYLFFLRL

SEQ ID NO: 130463 - protein, 101 aa, Heterodera glycines
MDKGAAGALLFLKKMLDQIAPPTGSADTDKMVADVHAYFLRHHTDQEVADVFGPDSDYAGGGTAGTRTDGTAFLRRSGLQRLPALLVNGVPLDNALVGGNQ

SEQ ID NO: 130464 - protein, 120 aa, Heterodera glycines
HLHDQIRRPPFSAYRGGVLLLHDNARPHVAFSTQQKIEKLRWAVLPHPPYSPDISPCDYYLFRSMEHFLRGKEFADQNEVENALDGFFGSKNDQFYKKGIEMLPERWGRIIDQNGECIID

SEQ ID NO: 130465 - protein, 99 aa, Heterodera glycines
MGGTPTLQAQPNANTMGGTPTPSPNECQHYGRNANTSSPTECHGRNANVLCRTATAAICPTAVCFPAGIPCPPLSSPADDLTVHIVNRKVKRQLALINH

SEQ ID NO: 130466 - protein, 92 aa, Heterodera glycines
EEEGTRQGFCHIRIQQRTGRKTITTVQGIAPEYDLKKIVRYLKKEYNCNGTIVEHPEYGEVIQLTGDQRQHIKDFLCKVGIVKEDNCKIHGF

SEQ ID NO: 130467 - protein, 249 aa, Heterodera glycines
MMFISRLVDRGKFLPGTEREHAYKDTAWKSPTGDPGFFHMSAPCIYASVLENLDLDAGMSFLNIGSGTGYLSSMVGFVIGEKGISHGVELYQNVTEFANDNVAVIQQSGEASAFDWSGFRFISENNLNADDNQQIPNIIAFGRENGEADDDQNENNSEEGREIEQTQNTTGEEEEEDNETDDNVGMSSTESDGQDKMKANNGKGTCKNEDESKPSPTVETEQNKVHQSASESEHFKANTGKGIYSVIKL

SEQ ID NO: 130468 - protein, 49 aa, Heterodera glycines
MGLTASVGQDNDELIDNLVSNDSLKTERVEKIMRIENHFDYWKGNRASE

SEQ ID NO: 130469 - protein, 51 aa, Heterodera glycines; identical to SEQ ID NO: 124998

SEQ ID NO: 130470 - protein, 257 aa, Heterodera glycines
FDDEAFLAFVKGPANFDKFCAGKGVTNDQSKELLAQIYGTHLGILFYMRKNWHCANVREEFEEFIDPEECQLFQNYLCIVYEFLFNVYAEQEDIMKPIFKQPIGFQISILMSLMSALELMAKFSKFCIYELKLIERNDSTLAETIQLENEQETLDYYKEKFGQNSKSGESSARAKFDKLMEKMFKKLEEKAMERDKLEKSSEKNFWQMAKGWPLSLRSFNGAASTSSTKAVDDAAQLYDSVLYLPNYGMADAVCFGF

SEQ ID NO: 130471 - protein, 262 aa, Heterodera glycines
GCSACACDPNGVNMTHTGEPYLKCNDIDGQCHCKQGRGGRTCADCQDFYWGNPLAGNPLAGCMPCECDTYGSQTLQCDRQTGNCMCKPGSGGPKCNQCARGYTGVWPRCQACGECFDNWDAILQTLGQELETLIGRANNIEDTGISSEYDDSFVEMENKIGEVISSEYDDSFVEMENKIGEVKRRMEGINITKEDEDMEQLRRQMDHLQKQIDTTREMLAEKNQRVTRVSTEVNLAEEGVKNLNESAQQIVQLANNLTERAD

SEQ ID NO: 130472 - protein, 48 aa, Heterodera glycines
MQTALIKKIMTFPDQIVIRSNSSRPEGPKPKQKNATTDSKHEPNPNIY

SEQ ID NO: 130473 - protein, 48 aa, Heterodera glycines
MVNKEQQVELCKESIDHLCNAINGIEDEQQKTTATCRAFNGKATNQIN

SEQ ID NO: 130474 - protein, 603 aa, Heterodera glycines
NHSSVEDRNITTNERATSVTLYRLIPNASYAIRVAARTNAGVGAFYIGEPVVMTEETLNRHIRLFERSENVWYRQPWSVLVCGIVLWCLLLLMMVLFWFRCCHQKGRSAAEAKEREFIKIRDGSVANSTTMVGGDARNAFWVAHEQFNGGTVETSSGTLARVGGQQNHQQHLSYFQPTNYSADRVPGPHNDAVNSQHHIALSNEMFSNGIPMVGRICPTATLQRHNGGDCSSPNSPHYHYAHLPFYAEQNNSLSTFLQQRPNPELYDAAVMHLTTNSKQRVNGNLEVVEQQPNSSSCGALLELNREWKRQQRITAEEQKKRETPQKKGGTTAQRRENEHDRDMGENQTYGTTGRGTRGGGGRRSQRSSSANTAQKQSSAFCSLRRVSHKENGSECRQNQQDSPQTDISYLQSSDGTNGSNNNNNKRSQQMNRQVKYDDTAPEYDPVMTDSLSQIVHREDIRKKIGPYFTLKLAYLITNPLSNAAGREKANRIVHSNRVSLIEDEGQEERDPLMEDAFGGDEDELDADGEMSENEHSGKESDRRAKRTTDPMKRCEEECNVANEHYYGFSPAPKRPNRQPMMGINISTLSVGVDRRTTASPAHR

SEQ ID NO: 130475 - protein, 47 aa, Heterodera glycines
FFLYCRNIEFAFDEIIFQFAFVPISFIRSNSLQINQNYNLKLTILNG

SEQ ID NO: 130476 - protein, 66 aa, Heterodera glycines
MLQNGLTILLLISVVIGHSLANLGPTIKHNPHFKTVQTAHHHDAIAKKHEASIEEGGILSENSFRN

SEQ ID NO: 130477 - protein, 31 aa, Heterodera glycines
MRIMFDGWAKVGQGMADHNTDQKQNDANKFR

SEQ ID NO: 130478 - protein, 179 aa, Heterodera glycines
MSSSSSPEKILAQPSCPKKAKVDERALWKIFKGKYMLAIYLCDDDWRNLFENKEKVRRMDNDHGMAMESLKKDFLEAKMKVLVEEKVAEAKELAEFSISDAERKMNQSLNNAMRVGRERDHHQLRCVVEEQHIRCRLLTLQNYPVATMTKLNIEFATSRRVSQTGDASHVLSDRRPDVW

SEQ ID NO: 130479 - protein, 87 aa, Heterodera glycines; identical to SEQ ID NO: 129152

SEQ ID NO: 130480 - protein, 75 aa, Heterodera glycines
MQEAVHQLKKATNALSEKCTNCAPEKRAYRSNFLLVKKYFEDTTSLIKSEVKLWQTVLEEKEEQLRSKDDERSLR

SEQ ID NO: 130481 - protein, 66 aa, Heterodera glycines
MSVSWGTQYSKLKTNLRLAANRLRLLQKKKTEQAVKARCEIADFLSTDKEDRARIRVETIIREDFV

SEQ ID NO: 130482 - protein, 97 aa, Heterodera glycines
VVTGGQYDVDVVLEDPNGKVLYKEARKQLDTHTYKTEANGTYKVCFSNEFSTFSHKVVYLDWQVGPDEQHKMMPIPRAGGAQATQMERSAETISDRL

SEQ ID NO: 130483 - protein, 110 aa, Heterodera glycines
KFIADFIGALKFDPEPRPTFPTPLPLLGGAHNFVCPTEIIAFSDRVAEFKQLGCEVIACSCDSHLAFGAWVNTPRNDGGLGKMDIPVLSDFSKKIAADFGVLDKETGLSY

SEQ ID NO: 130484 - protein, 123 aa, Heterodera glycines
MAPSSSSAAAMTPLGVILVSKDESAERVLFMYPFERQKCHEHKDSVVSMIGKDVPKLGGGGTPDDVPCQPAAIDSGDQQQQRLCDGIALDGISTGFPVKMLAPLLVAKGSNGNGTPFDIKVLF

SEQ ID NO: 130485 - protein, 106 aa, Heterodera glycines
MPLKFNCAIFVIDLPPPLPHRSANSPEDLWSRVIAASQSFKKAAFCEQVAEEEEGCAWLIRAEAVSSSSTDRVAAPCHQQASTQCQQEEDGEIVEEGWSHYHRHWC

SEQ ID NO: 130486 - protein, 172 aa, Heterodera glycines
MYKTNREDWKPEMSGRYNQRLTFFVNLEALNANGAEISEAKFEYSFRQTYGIQSPLNAKSLDNLVERMKQNETLFDQYFNYSSVQWMTRKLNETERCQKKTDRGRGRGNAMANQLSLIDKKCNGFRKSHLCVVEFVDFDQLERCINAKANKEHLDLLININIILFGRIKKKL

SEQ ID NO: 130487 - protein, 346 aa, Heterodera glycines
MFGTILLKPYLLLAGLCLFIYGTEAWKCKPGKKGPTGPPGPLGKPGAPGKCPTKPKYGKTTTPKYDTTTSKYGTTRPKYDITTSKYGTTTPEYETTTSKYGTTTSKYDTTTSKYGTTTSNYGTTTPQYDTTTSKYGTTTPEYDTTTSKYGTITSKYGTTTQKYDTTTSKYGTTTSRYDTTTSNYGTTTPEHDTTTSNYGTTTSEYDTTTSKYDTTTSKYGTRTPKYDTTTSKYGTRPPKYTPSKRSAMSEFADAVVIRAARAEFADKKCPVGRPGDAGPAGPPGPPGKPGKCPSPVERYVKKSEEKEGYKRKEETEEKKEAEREKRYDHSVESDGFDFISILSFES

SEQ ID NO: 130488 - protein, 72 aa, Heterodera glycines
MPQGTTAEPISALQSYAPNWMDQFCWQFEHLIYAMVWKSNAYERREIKGDIKTDLSRKTLLFIKNMDLNAKN

SEQ ID NO: 130489 - protein, 170 aa, Heterodera glycines
MATSTDEGGSPRANMEEGLLSLPRDSVTLSVPSSRLKMPRRSKEDRLLSALGPFIYLFLPKSSHPIKSPNLFKKMFFVRQLESLAFHRDPFNRPELVHTLRGRELVLFVLLYAIGVIAIVFIFECTMPVFWINDQSRAEQRRRAAIVVRSAQKVMLDREMPSSIGPLRKT

SEQ ID NO: 130490 - protein, 66 aa, Heterodera glycines
MNVKFRCAVNHGHGYREFHGFFHSRSRFTVPIHGYSVKNVHWIKLNIYKLHIVFIEKFSHFLGNFC

SEQ ID NO: 130491 - protein, 69 aa, Heterodera glycines
MKECLKKKLAQIDEMPKLVRVFCTFFTGHIDADKLIDALLHSGWSTVFNAQIGEKKHGKSILEKFNLEN

SEQ ID NO: 130492 - protein, 204 aa, Heterodera glycines
YPPFCSETPQETYRKVMNWQQTLAFPPEIPISTEAKNTIKGFCCEVDKRLGNHTIKGFCCEVDKRLGNHSGIESIKQCPFFKRVDWQNIRLLPAPIRIEVKGIADTSNFDHFGDSDRLLPAPIRIEVKGIADTSNFDHFGDSDLAWKLPLTIRHPPPKGKLPLTIRHPPPKGEFVHYTFQRFQCLVWKAHVFDTLLRFRLSRKG

SEQ ID NO: 130493 - protein, 53 aa, Heterodera glycines
IKFLKIFNSFLNRPKSLGLTFFSETDQKRTKLCRDTERKRKTYFKYYLVSSFK

SEQ ID NO: 130494 - protein, 23 aa, Heterodera glycines
MGKDLQRISHGKLAIDPIKTQNH

SEQ ID NO: 130495 - protein, 106 aa, Heterodera glycines
MRSGAPLLLLPSPAVVLFLLLRFFRCRVAVVAVAKVAPAVSVQRLALRIKALAKVVLAVEHAVDFMPKGNEDEKGILNSKSEKEKPPNGNEEKTISKRKNNTKRKN

SEQ ID NO: 130496 - protein, 109 aa, Heterodera glycines
MRRAVSVSPTKSAGDFCGAWQCFSSTDSRHAYLAYHHCVFNGEYDFCERFNAQCQSLNGHGGCNLCDSHHCNTAPEEAEEEEKHNGGGGEEEKRGTAAHPHDEMPTEKA

SEQ ID NO: 130497 - protein, 38 aa, Heterodera glycines
KIPSKIKGLLRTALPIMLESICMCIKFIKKRDSHFSGI

SEQ ID NO: 130498 - protein, 262 aa, Heterodera glycines
MLLLLLRLPPVLDPKGFNGKFNYLKKHDLSTGSVGPPLRSCEIRLREWEEAGYLPTNSPPQGEVLIHGANVALGYFKDEEKTKEDFVELDGKRWFATGDIGQFHRKKDLIKLSHGEYIALGRVETALLTNPNVDNICVYGNPQKDYLIALVVPNRKNLQALAEKNAVNESSWEAICANKEMAKLLEKELQNFVSGLFFRPTFALLNNSFSGKLRREEIPRKVIICAEPWTADSGMLTEALKLKRKNIERKFAEEIRQLYEGK

SEQ ID NO: 130499 - protein, 379 aa, Heterodera glycines
NPAIPHALHLLLRVAINANVVHSDWSAAPSPRPQSDVLRRRSIALLMFRNQNLMDYVFGMLEQYASSLEQEVEERTKELVEEKRKSDILLYRMLPRQVADKLKLGEAVEPESFQMATIFFSDVVSFTTLAGKCTPLQVNLLNGLYTAFDGLIDTHDCYKVETIGDGYLVCSGIPKRNTIGDGYLVCSGIPKRNGDQHAKEIAELSFAFLRTVSNFRVDHLPSERVNLRIGFHSGPAVAGVVGLTMPRYCLFGDSVNTASRGPAVAGVVGLTMPRYCLFGDSVNTASRMESNGKAGKIHISSSSNRFLTSGKIHISSSSNRFLTSVIGGYVTEPRGEVIIKGKGVMGKGVMETFWLLGRIGEVHLPEGPSVPERKSPAEM

SEQ ID NO: 130500 - protein, 584 aa, Heterodera glycines
PPRIEDGFLDLLSIRETSSIRIKSPKYLVQLELSNGKRESLIVNRIDQITGKLKRIDINSGKTEFIDEKPDILIGMAEFWKFFKSVEQIKENLFKVDTTVGPIICGQMKNNSGKLESLFENITAAVSVKTEEPKQFWNLETIGVWDNPEEKDDEIALKMFKETVQRKNGRYVVSWPWKGPREELPTNFAIAYRRLMSMLEKMRITPSQLRALDESFRENLKEQIVEESSIKGFGEHFLPHHCVFAPGKKPRIGYDGSAKPRSGKCLNDMLFRGPIEMPQLPGLLMRSRIPKIALWADIQRAFWTLELKEEDREFVKFLWVRDIRKPITKENLLVLRFKRVPFGVISSPFLLGATVRYHLSQIDSQLTNEIQKNLFVDNVFVGCKDEKEAMEKYVSMKQIFADARMNLREFVSNSYWVNNQILENDRLGKEKPKIMGVQWDVQKDEFLIKFAEPANSKMTRRRVLKDLNSIFDPCGWTSPCLLPAKLFFQTLWDSERKWDDNLNENECEKWIQITQNWKKANFTLKRRIEMGKSENNQLHEPLKTKKNESFYTKNGTFRGFDWNKGYEIRGERIGNKNKKQILMV

SEQ ID NO: 130501 - protein, 96 aa, Heterodera glycines
MKASCLTGAGAHDEMEEGKEEEKKEEGADEEKKEEVEEEEKKGEGEEEEKKEEGEQGREKGRRRRGREKGRRRRGREKGRRTRGREKEKWLISDKE

SEQ ID NO: 130502 - protein, 54 aa, Heterodera glycines
LFFEKFFVFFSAGTASDNVFYLFRKINLFFFFLIYFNYISSLNFLINIFKLSPY

SEQ ID NO: 130503 - protein, 50 aa, Heterodera glycines
MSELNCVVQFALGHCLRPPTKTTKKAPICEPMAIDEKRRKERPFDYLCWT

SEQ ID NO: 130504 - protein, 93 aa, Heterodera glycines
MNRRWICNDVWMDIFPSFDRAQLGLKLALLSPRFDALVDKHFNGKSELAIWRPIEIRRKDKGPEPNLSVRMDDKSLPDRPLPSKIRFKSLQIK

SEQ ID NO: 130505 - protein, 230 aa, Heterodera glycines
MDLQQGFMQIPVAEEDIEKTAFISHLGIFEFITMPFGLTAAPDTFQRVMNSLRRRLTAAMLIYLDDIIIGSETEENHLTDIKNFLLLLKKVGLKLKLEKCHWGMSEIRYLGFLLSEKGVRIDPKQVEATLTQDKFEGKIEENWGPEQEHAFQTLKQMLTTVPGLESPRFARAFTIECDASKKAIGAVLLQENGPVAYISRALNRHETNYPSIEREALALVYTVKEFSPYI

SEQ ID NO: 130506 - protein, 138 aa, Heterodera glycines
MQKLVKYQNELLAYYERERLLGENDAPLAMDGIIAELRGRWARWEEEEEEQEEGEEEEEEEEEGEEEEANESVMGSSIWSGSIDSAITGFSTMSATQRKKVLGRSRQWWQERKERKKAEKGRCAKTAGAPENDKLNFD

SEQ ID NO: 130507 - protein, 260 aa, Heterodera glycines
LKTGPEHYDKLHEMIERNPEKYGVDKSSGEILTNFKKPEAKKRNPSITLRDVDHFLHKQRTYTLFKPRKNRFRRLKTVPSGLHTDWQCDLCIMDALKEHNDGFRYILVCIDVLSRKIFTAEVESKKSEHMIAAFEKIFNKAGVLPNKLYSDAGLEFQAKKMIDYWKQKEIIKHVMYSPHLHAGAVERANRTLKERLYKYFSEKNTKRWVDVLDSIVRNLNSSANRTTGVRPMDVNFKNAAGLRNRLYKQGESSPKTPKFK

SEQ ID NO: 130508 - protein, 113 aa, Heterodera glycines
MSGFDPFKRLIFHLNIEEIWKKVVASEQTLFLHIVNGLLEELRQNLKQINQKLKWPAEMNKKDSDKQKKDRLSMSEEKKKDLLSMLEKKKNKESPCEEILPLSGAKEKDTKKK

SEQ ID NO: 130509 - protein, 63 aa, Heterodera glycines
MNFNQLFIFTILLPLLFLINSANFIHARSAKIQSKAGKIPKILCDSVDECPYGMRCKAGMCMN

SEQ ID NO: 130510 - protein, 158 aa, Heterodera glycines
MVDKFRETVQFVDDGAPSFLRLGAAKMVKKEQQRHCHACAKKVPDSELFICKDCNKPTKKHTVVTLDCLASERDRELAALRIEEILNHAQRMVDESRGMQNDIAKQFETMRENLLAKLSFFYALQNECLNGEQILLKEHIEEKVYSAIQKCEQLNEVH

SEQ ID NO: 130511 - protein, 96 aa, Heterodera glycines
MVARRAETVAIVRRLLFQLAKQANRRRVQQRRRLKQQQQPEDDDDQQQQDDGVAGGGDDERVEEEEEGDNDGGDQQEEDNDDDFIDDDAVVCFQSD

SEQ ID NO: 130512 - protein, 271 aa, Heterodera glycines
MAPYRIVAYDLECTTNTILDENSLKKETIHKPNFISARFTCSLCLGEIKECEICGDGPRHLKWCSMDRIDPLNCFVKWIINFQKYDTYAYAHFGGRYDSHFILRELANLGYKQPELTIADLKIYEIKFKKGEKSPKFFFRDSWLLMQNKLAHLPKTFGLDCESKLYFPHQFNKEENYGKILATLPPFDDYFPDELSEEEYEKFKKWYYANYNNGFILEEKLDEYCSNDTDILMKALIKLRKIFIDITKDKETPKGIDVMRLSTTIASSCMN

SEQ ID NO: 130513 - protein, 178 aa, Heterodera glycines
MNNADTVLHEIFRINQSYRFNPLDFCEIKELGRISVKNSDNYCLFYALTLSRFYQLINKNDEEAISRDQFKKIIANEQRQWEAVKQLMTDAKINMKEKSYGLEHLQIIQDFWALVSLAPRKEKHLTVRSVTGLFLMRIALSITKIKYVLYIKNVKNAKENLGRTQNIIAIRNIVENVI

SEQ ID NO: 130514 - protein, 271 aa, Heterodera glycines
MTAYRIVAYDLECTTNTILDEKSLRKETIHKPNFISARFTCSICLGEIKDCEICGTGPRHLKWCSRDGVDPLNCFVKWITTLEKHETYAYAHFSGRYDSHFVLRELANLGYKQPELTLADLKIYELKFRKGEKFPKIHFRDSWLLMQNKLAHLPKTFGLDCDSKLYFPHQFNKEENYGKILTTLPPFEDYFPDEMSEEEYEKFKKWYYSNYNNGFLLEEKLDEYCSNDTDILMNALLKLRKIFIEITKDEETPNGIDVMRLSTTIASSCMK

SEQ ID NO: 130515 - protein, 119 aa, Heterodera glycines
MNNADTVLHEIFRINQSYRFNPLDFCEIKELGRISVKNSDNYCLFYALTLSRFYQLINKNDEEAISRDQFKKIIANEQRQWEAVKQLINETKINMRAKNYGLEHLQIIQDFWVKIKIQD

SEQ ID NO: 130516 - protein, 117 aa, Heterodera glycines
VISGTTTKKNEFSLSCQFGDLSKYNSQQNLNFPRKCHFEFPNPLPKFEFPLICHFMTNHNFPHLSLVTNQKFPIKKFPPSPRLSLFKSSKFSVKKVQDNLKPFNRFWFGSPPPQLTN

SEQ ID NO: 130517 - protein, 175 aa, Heterodera glycines
MDDSILASINDDENNQQQMMPPPQPLSSAANAFSNHGSASSSSSSAHVDNLLLHSTNMMPSTASATDNLFVVADQQQQQQQQQQQQTENDNNNNSNGIIQSKQQQQQQAEQTERRSPEEVVDELIRIAEARFGLYLYLEGLQKLATFQYQLCPVQSPLNNSLGFDLSAGWPADLL

SEQ ID NO: 130518 - protein, 159 aa, Heterodera glycines
GLIHTQLIHDPTHPYPTHPYPTHPYPTHPYPTHPNPTHPNPTHPYPTHPYPTHPYPTHPYPTHPYPTHPYPTHPYPTHPYPTHPYPTHPYPTHPNPTHPNPTHPYPTHPNPTHPYPTHPYPTHPYPTHPYPTHPYPTHPNPTHPNPTHPYPTHPYPTHP

SEQ ID NO: 130519 - protein, 40 aa, Heterodera glycines
MRRPVKANNNNSRMAQALFRLRNNNRIRKMAWRGPTLTRR

SEQ ID NO: 130520 - protein, 75 aa, Heterodera glycines
MAEIWDKKAKMAKYGFIPENHQNMDLYGLKTFTKSKNFRENGQKIDDNCPTLTNCKSPKKSTQTTAFTSTLCINK

SEQ ID NO: 130521 - protein, 51 aa, Heterodera glycines
RLIEPVKSFRMISRLFDSVNNFKSYIDSKLAQTELARRSWPVPPTLWVKPS

SEQ ID NO: 130522 - protein, 32 aa, Heterodera glycines
LKYSVYVAQKISYSELIAFSKPLNSFALLICT

SEQ ID NO: 130523 - protein, 50 aa, Heterodera glycines
MAYNASTDVWFQYFNSNGPQWVILLAAYGFRALWATLGIMDHSGIVYITP

SEQ ID NO: 130524 - protein, 79 aa, Heterodera glycines
MTSHNSRNISYWCICAVYGNCEERKSDGNGRFDKNIYNDKALEEHVDAAFEEHAEQIERNDKDQRLGQFAIVGIHIGNY

SEQ ID NO: 130525 - protein, 66 aa, Heterodera glycines
MVIFEINALLIKQFIFENCLTPHPLSSPMTKWFATVRKRAMFAREFVKIWAPNVQTDKGRVIVGER

SEQ ID NO: 130526 - protein, 47 aa, Heterodera glycines
MVDWGREKPKMSGNGEINNDVVKGPLPAGPSPAGGGGGGSANDSSIV

SEQ ID NO: 130527 - protein, 87 aa, Heterodera glycines
FKAFYGMSSATAMLKHHGTVAEYRASEGKTVEIPYRGDVRETVKSLLGGVRSACTYIGAQKLKEMPKRATFIRVQMQANEVYSAFDA

SEQ ID NO: 130528 - protein, 69 aa, Heterodera glycines
MLFLQIAFLLLLASIQLAIGSPILKRREKKLQKKINFYPLLIILPLKFVPFETKRMPRNRRIQYCSVKH

SEQ ID NO: 130529 - protein, 241 aa, Heterodera glycines
MTADGQQIHKVNFLSARVTCSDCADSVQCAIEQCEICMNEDGLMERSKYWAAFFLLRFILSWTLLRKLYHSIAAASSKRRLFSWMHDTEGAELLYTDTDSVIVKHRRGVEPLQTGEFLGQMSEEYTGYSIKSFVCGALLQGAKQYALKMVDERTGEIRYVQKIRGITFDVQNSQALQFEHFRHKVLNYGRQGEMPAVFSYDKIQPTRASQIVTREQLKRYLPVCQKGIITDELDVLPFGYQ

SEQ ID NO: 130530 - protein, 131 aa, Heterodera glycines
MKIDLFLIILTLIYSQRNIESVKKIRENFDEIFGKGWEEKAEEEEQQRDNSANNLQNGGENGADLNDQKKKWTLKNDQQKREIIRKFDAINERMKSKEKYQIKNRVKIENKIGRILGTNRKLIYKWKNEWD

SEQ ID NO: 130531 - protein, 462 aa, Heterodera glycines
MAKRLTMQTGHPNFNVSLTSLLISIDRLSKSLELVLELLKTECQLAKIASKNSSSSYPTNGYLAKFCDKKTGQNLDTIEKLTEHLTDFIEKDLPKIVEAMKKTETTEIIFTGRVHGTMAEILPRAKQYPNDASLLLYAQAMKALSRISQEIEPGTTKDALTKTLKKHTVASDDGDTVTLMPSELTQIIMELWTNTILKGIANAGQEKYNYLQPQLNGTGADRSQDRRHRRAPPVFHIHSNIIMMILLIVQMSLIAVVGIDASRSDANWVTVFTAFFTMFFIWRVQIPGQPPPPSIHFSLNFNLILPVVQTWIGVGMPFGGAAQRPPAAGDDYRAQHLLAMLQMFNAMNGRANTAAPSADWNRDRSADITTTATTPATPTGNNGNDDRKQVEHYDPVSDTFVGAEETFVTTTTESPINWEGEGTEDSNGDTDDSLLREYVSIHLNIRDPVLRHMPFFFKFPMT

SEQ ID NO: 130532 - protein, 153 aa, Heterodera glycines
MKSLRNAAYGEKTMLARSEQGSLIALYDVRLPPKLKPLKKFDDLHLVTEYFGKNLRERIVEKLKNGTLWTHQELSYCIIQILCGVNFLHNSGIVHRDLKPTNVVMNERGNVKILDYGIARDIVPENLTTEAGTPIYRAPEIYLGIDSYDKKGN

SEQ ID NO: 130533 - protein, 124 aa, Heterodera glycines
MVKSVVSLLKSYKISSPSTTSNTTPSTNSSDDSCDNERQQQQQQSDDIKRVNGDMKSLRNAAYGEKTMLARSEQGSVWKSIATEEDGTTRNVTIKLLRAPFHSPGTAKYTLREVALLSTLNHPN

SEQ ID NO: 130534 - protein, 342 aa, Heterodera glycines
MPPGNEMLAPDWQMVNVNGANFYGNDTSSAVNNAALGGAVGSGQQQQQNPQHFVATNGIAIARTRPIKRPSVRRSVSALNIPMKVVASANATPNAAAGGANNNSNNCGQFGTPSPQPSQQYLTAGTANFGRPGPSPPQQQHQQLSYGQVQQQRDGGQWLSSATNNGGTSPESPLSNHQAQQTQQQSPATGGYRSRSASMNVLTTPTMESQQQLMFNTSMGSSTNNNNNNIFGHSMQRLTSPDESPLDHVNVHQQYAVSTYANNEQQQQQLLLSPSPPKRSASFTDMCASYQQMNIQDFIKSIYINNWLILCIELDPDGPQPKISLANQQQSAAHFAAFKGIN

SEQ ID NO: 130535 - protein, 20 aa, Heterodera glycines
VNIDHSPQTQKCLKTVRIDV

SEQ ID NO: 130536 - protein, 32 aa, Heterodera glycines
MFNEGQRMIINKIHEKVNITKGFDVEKKEGNK

SEQ ID NO: 130537 - protein, 63 aa, Heterodera glycines
GCEAGMCLGFAFRISPFALFAFFGVSHFAFRFLARNATFTPLRIGLNSHKIFQNFTYKLANFQ

SEQ ID NO: 130538 - protein, 193 aa, Heterodera glycines
QCQLKKRASGFYHQNVLSEEYKTIADYKQNAQWPCLEIDQYENVFWNGVTEEQRIFEYAQELPMQKGDKDWQPSLGSILELQFLSTNNGGLGVPIEGITSPYFYLRKAGSYFTAHTENSDLYSVNLLCPSSGTDNVGITIWYSIPAADFLKFKNLLSTFFVKEFTNDPEYLRNKSILVNPNIIRENGIRCIRT

SEQ ID NO: 130539 - protein, 38 aa, Heterodera glycines
MATVHFACNQQSFCTPLIKHKPNKNTVSVSNSAYRKLK

SEQ ID NO: 130540 - protein, 519 aa, Heterodera glycines
EKDKIGTRRNTAEERKEKIATGRNTVGEAKGNSGRNTAEEGKDKIVSGRNTAEEGKDNSEKNTAIEGKDKIGTGRNTTEEGKDKIGIKNTTEEGKNNSGRNTIGEKSGINSTGDSGRNTAEEGKDKIGNGRNTAEEGKGNSGKNTLGGKTGRNTIEDGTGESGRNTVGVESARNAAGEGKDKIVSGRNTAEEGKDNSEKNTAVEGKDKIGIGKNTAEPGKDQIGTGKNTAEEGKGNSVRNATEEGKDKIGIEKNTGEEGKDKMGTGKNTAEPGKDQNGTGKNTTEEGKSNSGRNTAEEGKGNSERNTAEEGKSNSGRNTAGEGKYKIGTGRNTTEEGKDKIGTRRNTTEERKDKIATAKNTAEPGKDQIGIGKNTAEPGKDQIGNGRNTVEEGKGNSGKNTLDGKSGRNTIEDGTGESGRNTVGGESGRNAAGEGKDKIGIGKNTGEEGKGNSVRNATEEGKDKIGIEKNTGEEGKDKMGTGKNTAEPGTDQNGTGNNTTEEGKSNSARNNSRRRTRQF

SEQ ID NO: 130541 - protein, 253 aa, Heterodera glycines
VFFPELPFPSSTVFLVANLVFSRFGCVFSNANLVFSRFGCVFRSGNFVFSFFGCVSSGADFVFSFFSCISSSANFVFSLSGFGCGCVFPSAILVFSRFGVFPSAHFVFSFFACVFLNANFVFSFFGCISHRIAFSFFGCVFPSANLVFSRFGCVFPNANFVFSFYGSFFGCVFNANFVFSFFSCISSSANFVFSFYGCILFRIVFSFFGCVSPTDNFVFSFFGCISSRIAFCFTDCVSSGAIFSFLSSLYFFW

SEQ ID NO: 130542 - protein, 163 aa, Heterodera glycines
MPDSLGKKSINVDEWRQILDVLWSDPKPQNGCWPNAFRGGGSYFGPDVTKKFLEKNGFRLLIRSHECKYEGYEFMHENRVLTIFSASNYYETGSNRGAYVKFVGKDKAPHFVQYMASKVHKKITVRERLSIVEQSAIKKLSEKLVSFNTELQKEFGKIDSTGT

SEQ ID NO: 130543 - protein, 144 aa, Heterodera glycines
MTFLTDILHPNVDMSGQVCISILHPPGNDPLGYEQASERWNRNRTVESILVSVQLLLAEPNFNSPANVDAAILFRNDPAQYRKEVRRRVERASASTPRARSSSTPPPVAQPPGEQQQGTPQPPATPPQGQEAQQQQQQTGEWYL

SEQ ID NO: 130544 - protein, 229 aa, Heterodera glycines
MSDHDNLVNPRWAHSLIKTAARKLYTERTWKEEHFNDLVHTVLVQQPTLKAFLLNVLLKDHHDKRAHEKWRNFVSTERCRMSNAFDMVNLCSKDEQTQFLSLPRRCAVYEIDTAHAFRVFERQLDEYFLKKTHRVLVGVDAEWNPYVARSRASLLQLALVNSVYLLDLDALYADKSFQQFIDRLFLDKAIIKLGYQFGDDLAMLRARLPACVGLYRPQGIVCIGQLVDE

SEQ ID NO: 130545 - protein, 165 aa, Heterodera glycines
MNVIFRFRPKSPKKIKSFFAKKKAALSSSKKPGAKKPFKNPFAKFKKSGAAGSDKKPDAKKPFMNPFAKFKKSGAAGSDKKPDAKKPFKNPFAKFKKSGDAGTDKKPDAKKSLFAKFKKSGAAESDKKPDDKKPLKNPAKIADKPGPHQQPVHHDPSHQPPLKKP

SEQ ID NO: 130546 - protein, 187 aa, Heterodera glycines
MENFTRFLHFINSLFVFNNYLFVSKSRPTSAFIVHQSFIGWHPRAFQNGRSQKACEPCTTGAELEALLTKTDKTEEDMKKLVHTIEVYLQPNPGGHLEFAIFWRKTLIFFPQFSAVRALDGLGEALKKERSVLNKKRLDLDVTKSRWKRASDDKKPAVEAELRTAQAEFDTQLVTIITALEALQTAM

SEQ ID NO: 130547 - protein, 46 aa, Heterodera glycines
MASKCLPPELLYEIVPFVLAKMLPQIRSRPVGCFTNFYCHVSSNGK

SEQ ID NO: 130548 - protein, 42 aa, Heterodera glycines
ILMSLSVIKCKYKNVIESVRTQICEYAKLTLKICHFMLCCRI

SEQ ID NO: 130549 - protein, 32 aa, Heterodera glycines
ARIQQSTTVKNKDIRKFLDGIYVSEKVAIADE

SEQ ID NO: 130550 - protein, 122 aa, Heterodera glycines
MAERCNSLRRGTGTGGATICAPPSSNNGKKRLPCPPLTFLNIPNFSLDELYARTFSRPDLEALVEIQEKALTAQKGELNLQTVLNSMRNANWTERIGAESATAERLHTAIAAMRTALAEKKR

SEQ ID NO: 130551 - protein, 110 aa, Heterodera glycines
MISNNIKANNNMCKLDKCTQSDDGKIGANFYAGGGCERCATFWPILEGKSRSRSSSKSVHQNGTIEEEGEEKRPKVIGKFVFAELFEKGGGRKSPNYGTMVADNNGRHQS

SEQ ID NO: 130552 - protein, 53 aa, Heterodera glycines
MEQHRQRLEAMYPAGTFSNTYFRTAPMPPPRALMVRDRATRPLSICAPLPGNF

SEQ ID NO: 130553 - protein, 224 aa, Heterodera glycines
MKKAEKRIKELEMTTEELKRENNELKKEMSNYDEAKKELERTREEVKEANERVGRAREEMEEKKREWGERESVEQLKKAFKLAEEVQKCEQKLSKMEEKEREWTEKVRECHWEGWKAQFATHCQVGRVEDEKAELAAELLAERRRVEKSETEFEMAKRLLEEKEERIREKERAQNAQQFPGTAEETHFELQEQQQTKVPMAKARKERDGNDGDEICRMSAELEK

SEQ ID NO: 130554 - protein, 18 aa, Heterodera glycines
MYHFTVSYTGKKKSGKFM

SEQ ID NO: 130555 - protein, 78 aa, Heterodera glycines
MYGSSRIPRPADLASNNSSRPASRASDMGSDFGTNGGVTSATPSRIPAPRAQQQKGVRFASGTGGSSDGSGRNTPSVL

SEQ ID NO: 130556 - protein, 114 aa, Heterodera glycines
MSQPNALAKIAKRLIYETRMCKELKEIGLQPHHQHRLEEAQQKFAKGECLTQCELTLLFMEQQERLRQKRFRQQQQLQQQPPQQQQPQQQQQPPQNWILSDLLIIFTKLSILCA

SEQ ID NO: 130557 - protein, 182 aa, Heterodera glycines
MRRLLEADQLALGCLDTWLMMKLSGCDDQSFVTEPSSASSTGMFDPFTSDDEPEFDNADGDEGGHDDSAVCFVPAFGGIQTPIGDDFACAALMGRNSRQSPMCPSPIFKDCGHLTKWTAPSATVVAVAKVWSALSACSLRGRALPLRHFAVDSTGGGMRSGGVFIIMNGNDGKDDEMPMEFL

SEQ ID NO: 130558 - protein, 40 aa, Heterodera glycines
MLGSAPNKRAQMFFKDSLSIGENTTFYTTFKKLSTNFSTL

SEQ ID NO: 130559 - protein, 616 aa, Heterodera glycines
MILFGTTITALGADELGAFNGRGPIVIQYFRTRHNRNLMFPEAPCLCEKGGRNHVSYYPLELIEVRETFDRDPPFDFGTRMPWDDNPETVNMGPLEGEKSPKRLSISSKGSSITVEYHGTPQSGAGNPMEGISPDNHSVIIQEIDSESPTGNPVEMRGDPPRSEERSIVMNVPANSKIELIGPLKCKIILLVLSAFIMIHSVGAKQLPSALIHSPSRGPSSLKMREAPMNQIFLHGFGGDVHPGSEEEAVNHRPMSAVDGDASFRMKGTNMSHPFLCAYGMNQGHKIVSSALWRQLYKEEGKEQKVTCLSLFLPLQPPELQPTMDISKLLDESEEFVQQQQQHHQQQQKQQVVRFVKIDEESDDEALRIDISESESEEEDDDDEEEAVAALEAAVASAAPSPVVQETKKPRIQGPMEAPKTKRVAAAEGPFVKRARIGGPLNAQKSRCNKCGLLGHLSGDEARCPKTNALVKAEMDRKKAAAFAKRAEATMECSAPPIIPLPVKGGGQARAARAGGVAASMVAGGRASAEGAFRASKERARQELMAAMEKPKAAAIRVAERKAAARPGLQVPMETNAVLNGLSEIGARIDRERDNHLSMAEELQQRGKRAVAAMDE

SEQ ID NO: 130560 - protein, 37 aa, Heterodera glycines
MILKYFMHKEFLFEFGLGIRIGVRFVVRDHKSPWQFV

SEQ ID NO: 130561 - protein, 71 aa, Heterodera glycines
MVMTIFTIMNINVALLRVYNGIINQKASAYNGNNCCRNTATHCAAISTLCSSYVQPAIVFLFMLHIMICKF

SEQ ID NO: 130562 - protein, 31 aa, Heterodera glycines
MGNGRSEQDGLANPPMLLHHAESELGSPLTS

SEQ ID NO: 130563 - protein, 40 aa, Heterodera glycines
VVACLSPMGQRIPIGGRTQDRHGKWKCIQEANAVKLVQEL

SEQ ID NO: 130564 - protein, 24 aa, Heterodera glycines
MSVFSWAPGDAAEKFFEKILLNSQ

SEQ ID NO: 130565 - protein, 129 aa, Heterodera glycines
SDPNKNADQPKSDGIDRTVVLIDQMNANKVSDQLEIDRPKSDQQKPSHWAKIKGPVLIANSTISHNRGHGIVIESTLDGRAFVNQSRIEANYGDGIFCRQKHDGLSSMQNRLGLEIGIPLSILDKKLAL

SEQ ID NO: 130566 - protein, 130 aa, Heterodera glycines
MKIKIILFSLLIFKNADNIYAGKINDEKSFDEIFGQRWDEKSEENGEKETDQHGIIGQMDDQNETKNDEINAQLLHETQFDQLFDENLQVKQESATNCDQLEQLPINFGQNCEQFSNAIDKKKREIVEKF

SEQ ID NO: 130567 - protein, 332 aa, Heterodera glycines
MEFKIVLLFLLMLKNLNTIYAGGIKEEKNFDEIFGQRWDEKEEKNEEKETDENGINGQMNDQNGPTNIENFVQRLFVEESNQIFDENLEMKEEESEEMSTNCDQLEQMTENSGQIYDQIPILNDKQKREIVEKFHKIKEKIKQMGKKYSKKERVKIERKIAKKLGINQKKIYKWKREFGMMIHKNSEDEKRQILKQFDQIYGKLKTKLNEKLYKKSTKCQKILAKHLGTHIRSMNKWKKQLKNGKTMKNKKTDDKKKEIIEKYFKLKNEFMQIGKHSRKEWKEFYIKIKQIFGLSYKTIELWAKKFDINQNISKGERKLSLLWKKQRVLSRI

SEQ ID NO: 130568 - protein, 24 aa, Heterodera glycines
MPNIFKILLIVLLAVVSFRLSAST

SEQ ID NO: 130569 - protein, 88 aa, Heterodera glycines
GKPCAKTNASMALQMLDKSSGVGPQPCGTNMSYAYFVTFVFLSSFLMLNLFVAVIMDNFDYLTRDSSILGPHHLDEFIRVWADFDPAA

SEQ ID NO: 130570 - protein, 166 aa, Heterodera glycines
CGNQYENDFRDINHTTLSERGALREAMRCLKCADAPCQKSCPTQLDVKAFITSIANKNYYGANYYGAARQIFSDNPLGLTCGMVCPTSDLCVGSCNLYATEEGAINIGGLQQFATEVFMKMNIHQIVCREIEQGRNSAHSQPVALFGCGPASIWATFLARLGYTDI

SEQ ID NO: 130571 - protein, 53 aa, Heterodera glycines
IKFLKIFNSFLNRPKSLGLTFFQKLIRSAANFAGILKGREITYFKYYLVSSFK

SEQ ID NO: 130572 - protein, 117 aa, Heterodera glycines
MEKIVYLKLMQIVLTLAFIWQLLSLHQFCGTFADPKAFIHDISVGRCKRFTLIGKDSKSGEFGAVFDQDKWHNQLSMISTNGRPIEEQQHQFMDELAAKLPSAERHCIPITVRQQNE

SEQ ID NO: 130573 - protein, 40 aa, Heterodera glycines
  unsure (1)..(40): unsure at all Xaa locations
LVCVLASAASLSICSVXHVRSRSVVVTDEQGEAXTSXQKQ

SEQ ID NO: 130574 - protein, 241 aa, Heterodera glycines
MLSPRFDALVDIHFDGKTELTLWRPIAIRNSVAAVPELHVFFDGANKSVPFPLPDAHSPPMPNNIRFKDLRINCIDHSVITFLRANQLIFQKGTNLRLSVPFGPFNIDDVQSIWDDFARQIWPIFAPTIRHFGFPDCHILDTLLRLVSPTIFTDDQINIHSINSGRQFPEAIGDDHFEGPTTATLDRSTTNYDGSIATSAAAGQALSKWLHISRKDGQPKQLRFRNFANPPNMEWQNNFKE

SEQ ID NO: 130575 - protein, 358 aa, Heterodera glycines
MKFAKKMLMIPEAEYLALRSAMNSGDYLQNEKASLDAKISQNLQDPGISEYLKAKRHDWLYKERRTVKGILENRPQKVVIENHVPGPNVAPYLGLNNQSKPQETEEPRKIIIPRKRLKERTPDPESNNDTLEELTPEPQTTSTHKTPVPIKTIIHPTLLNGLFRDVLLYLAGKKDETPRGAKFLKDRLLKDPTVKDMVDKSKVMWGRGKKQRTYTIHKPIRKKFPRLKTVPSGFHTDWQCDLCIFDQLKKHNDGYKYLLVCIDVLSRMIFSAPAKSKKSEDMIEAFDRVFEKSKIIPMKIYSDSGLEFQAGKMKKYFEEKFIIKNVMYSPDLTPGVVERGNRTIKERLYRYFTKMDTL

SEQ ID NO: 130576 - protein, 73 aa, Heterodera glycines
MRRDDIFFFKTVIDYKINKEYHFLYFYSRLAFLIIIFHGFDLSQKRREREFGEKREFPKRRELARGETFSIFL

SEQ ID NO: 130577 - protein, 106 aa, Heterodera glycines
MANDSHSSNALSETFGGSALLNITVDTRGIEEKLNNLQLAIEDSTGNLGVQVSDLNARVQSSQTLSSIATEDMRQDICALQTKEKVAVLDNTMKLASVKIQDVVKK

SEQ ID NO: 130578 - protein, 324 aa, Heterodera glycines
MLAGQKQPRDSGCGLTQPPKEKRMVLLMGKSANVQIVGPLSTGCPNVPKDSKKRFYGILFVKEQMQSHGLYPSEALQDPSTRASQIRRKQFTKGVRAPAKGAPGQPLACYHCGGPHLVKNCPKIFCYANYIKQDATTVGVRTRMHNVRHAATFHLMPALIEIGGACMRWTLMGDPLGSTIVAQKRVLKQFFVRVYTFEFKDPKCDHCGGPHESDKCIFGPRNKCAKGGYVHGKTAKCVETTDEHMGNGCKICGEIHDGDCPEAMQKLHCPHCGYDHKSYDCPNQPIPLCGVCGSLAHTTKKCQERCAFCGRKHLTKDCPDSQPG

SEQ ID NO: 130579 - protein, 18 aa, Heterodera glycines
YREAIPEGFGLPINLGAS

SEQ ID NO: 130580 - protein, 156 aa, Heterodera glycines
GSAFQSFKYYESRRTEIRQIFRIGQDLCKTVDEYKKELFGDDQSHKFCVYTRKGDFNKFTETKKDFTEQGIEFGFKYLMLIANVYLPKVMPRMNDMAFAIKTCDSLLITAQSSTFGWWIAYLMPDNATIFYNSKFGKGRTFFYENELRFFVLITSI

SEQ ID NO: 130581 - protein, 23 aa, Heterodera glycines
MAPPAAAAGEDEAGHEDKWGRHM

SEQ ID NO: 130582 - protein, 149 aa, Heterodera glycines
MQLFFLFAVFIAANAFDSAQSVGKTSAEDEVRAVTEGAAPQRQTPTRKSLKMFGHGLRHHTGMDLLMKLGQQQAEEPKSFSSMDILRLFDGLDHQFYHDLEKAQSLFEENAKVVKSLENRVVKLESAMAKAAEHCEPGKVQLVSAHYDT

SEQ ID NO: 130583 - protein, 67 aa, Heterodera glycines
MPFDELAECLPVQQELFNILKISLFKIPSDQICDQETSYICFFIQHRSITNYTFFSGMSGMSDHSFD

SEQ ID NO: 130584 - protein, 66 aa, Heterodera glycines
NFFLIIKNHYFILFIFILNSGTNFNRIWRHLTASAAIVGQYQQQQKQKHGTNNNSNNNSNNNSIKG

SEQ ID NO: 130585 - protein, 276 aa, Heterodera glycines
MSDFFLDNSDMDDNELELKLNNLQMLKNRRANKSLKMPPTDIGTTKLPVNGKGIDKKAQLKRDIETKMGTTDSEEKEKEPKENRVPPNENGNGYRPLSDNAKEKNAQLKREIKEILGIIDSEEKETEPKETKFCEMFSWVQNLFSFKLFFGLAFLLLSFAVFCWCASNKTQTSNTPIHSNSSSVPSIVRDPPFLVVWFPVIHAIVFYIATGSAIFANIFVFVMLVLCFRLLRRISASVQRREAEKMKEFYAKIEAEIDEEELEMAEFDANLRWDET

SEQ ID NO: 130586 - protein, 232 aa, Heterodera glycines
MSTPPKADDKKKEVGGILKIGNTCCMGAALQALANVTALSNFLIENENRLPNNKLVMEYVQMIKSILVLRQPAAPFELKEVISSLTNLFADSFQHDSRLRDIPLDKIDIWCFMRLFKDKDEDGQGDRLICISLAQRFTDESHYIMGASDAGQLPMDVPLISINHCLADFIKPEDIEGSRCAQCSNATPCLTVVDNSVDEAVEQEKAENCPTTSSRKNRQAAILSGIILKKKK

SEQ ID NO: 130587 - protein, 95 aa, Heterodera glycines
MPASILDLALEYKIKYDFFFAPVTLILAVLSLAMAFSAGFMVVLNRMFSLHMDVQENKNQVKELRKELDENVKNFNTLYSEFVNLKGEVNLLKGK

SEQ ID NO: 130588 - protein, 147 aa, Heterodera glycines
MAPGPCFHPAWLYIMDFTKSVIIDLIFVKPHTDDSPGFVFSGWQCAFHNDETYCAEKTAKNMSQKYKSVHCKCEIGEQGKDMANDKPIMTLPPPKPTSPPTPTTTEPPSEPLYVYIIGLLPAGAPGKLDIVKMASKKLGIGKIDIGK

SEQ ID NO: 130589 - protein, 47 aa, Heterodera glycines
FVIHRIQSREGQYKLCKVKKQAVGDKQVPYIVTHDARTIRFPDPHVK

SEQ ID NO: 130590 - protein, 120 aa, Heterodera glycines
MSRRMDRETRSRRVRLDNHSTQRTTASKTVEVGAEGSTTNQSRIKAEGGEHSDDETVADDPGVDDYRTLCTVRISFFKGFGLSYPKRTIQETPCWVELHLKRALQLLDEVMNTPLIDHLT

SEQ ID NO: 130591 - protein, 397 aa, Heterodera glycines
IPEIWKKSIICPVPKIQNPVNPVDFRPISLLCSVSKIGRKIAGKINFVEKNNLLPNCQHGFRKSVTTQLFEVVDDFSFALENKKSIDVIFFDLAKAFDTVPHNRLISKLKSIGINNSLLKWIQNYLENRKFFVKIGSDFSDEYPCLSGVPQGSILGPLLFLIYIDLPKFCETENVKIKLFADALKAYHVLSNISFSPLQNFINKFNRYFKLNGLKIASNKCLTLHLGHKNQKINYFIDDFPIPKNPAERDLGIYFTNDLKWAQHIDIISKKALRSAFAILKSIKTRDTKILVNLFNIYCRPILEFGSPIFNPYLKDIEKLENVQKTFLRVIFRRNNYAADLPNYAELLNIYDQKSLESRRLKIDLKLFYNLFNQKMYQILYGSPLPHDPFLNNLGEK

SEQ ID NO: 130592 - protein, 154 aa, Heterodera glycines
MPHLCITVTLFIVITLLTTVALTDTKVYELKKDFTFVNIACLKKKLNDSDANAEIDNETIGEQQKNIATTEQQKILVIQKNLPKQQKQELSQRRVEAVQQQQQQQPTGVVKLNTARLNNNSTVDERKTNSSLKAQIKPVAKHETNKPSNQVKIF

SEQ ID NO: 130593 - protein, 38 aa, Heterodera glycines
MCPVRNMNGKKIMEKPKNLLSDQRSSMVSNNWLLTKFE

SEQ ID NO: 130594 - protein, 46 aa, Heterodera glycines
MNLNKSDCKATREHLLHDNSVHFEGDNEIFMTNHIQFASASAAPVK

SEQ ID NO: 130595 - protein, 28 aa, Heterodera glycines
MGDNQRKYAIFPKCIIIEHTKNGIIMTI

SEQ ID NO: 130596 - protein, 33 aa, Heterodera glycines
MALVIFLINLGHCLFRYGNSPWSASFCWEWKKH

SEQ ID NO: 130597 - protein, 155 aa, Heterodera glycines
MKLILQLNVLFACFWSATFLSCRKGIIGTVDKPFVDKELTSPSTACPEKKELKFCAKAVCFREGKAEHYVTVYTCSTITDCNSAGREFLAKKECQANGSTEEACEEEKKKNKDNFIRKYGNYRCEQCQFGKDNEDNGNAKFPPYQPKSRKKIVFN

SEQ ID NO: 130598 - protein, 97 aa, Heterodera glycines
MPISNKIYRNPNTDFSSDQQLIAAQKFAQQFVVNFGFTSLKIGAPKNSEFFFNFCFNICHLLFKNTGSYECRENVTQLRNGEFNTRFDQLGDFVFFG

SEQ ID NO: 130599 - protein, 78 aa, Heterodera glycines
FLRPVEITDVEPSAFKVLLNFIYWDDLSERNGDNAIALLYAAKKYKIPELVKACVEFPVSELRDIFSALVRTRILEEE

SEQ ID NO: 130600 - protein, 244 aa, Heterodera glycines
MDSNKKRNESDGPRIEGKMGENRSSSSSSISSNLIDPINSNFNDPSADDDQPMLIPNEWAINMLMDTSSLMCHSQNLQQNQFIPNYKHFPSLSSSSSSLLSLPSSSSEATMFGEARENKIENEMEILNSNWSIVQQKTADKNNDYEIQKEKRQKLEELQMGNGALDEQQMEAQQAKKLLCIKFYKYNLILNGIEMHFYEHFDFLKMCSGKSGTKWMYNQQLETGGIGTSREIFAGISIPCFFLA

SEQ ID NO: 130601 - protein, 42 aa, Heterodera glycines
IHVFEVKSQDKEKQQERQRPDTLIAFHRIVITPEICGHRQFE

SEQ ID NO: 130602 - protein, 54 aa, Heterodera glycines
TFLVLFESIRKMLLACKFSKIFIYAQKNQSKKSSNYWVFEFLLAITFLKLNENF

SEQ ID NO: 130603 - protein, 78 aa, Heterodera glycines
MTPKLEGQSVYFFQVKVEIRDDQQLLFKSCNGQFELFLLTAEGSSHSDGASSANFSKLGPIKRTVCFFLVQFMKLTVN

SEQ ID NO: 130604 - protein, 254 aa, Heterodera glycines
MNPISAKILNAHYGLKHPQTKLNITLNEAIALGLYDPVTRQFLNNNEQMDYWDSLAFHSPNTVHLYVKFGAIKVTPMDLDYALKYFLDRYVGEFRLLEYQISLPEALKYGYIEIRKPQPTFALSLTDCIEQTWINRETGLFIARPEKPHGFGEAMRFNGDGPSEILKCDVRECFDSENNTRLTIAEAVRRGILNLATNTFVDTKNGTQLTLPQAHHRGFIHKPLTLTEAVRIHLLDENEQFRDGTNRHTLLQAR

SEQ ID NO: 130605 - protein, 69 aa, Heterodera glycines
MSLFYQENISATGPGPGSGQLSTEVPVLTGTGTSSGFFPVFPAKNSRFFNPKRSRSRLSQNSRSRGTLL

SEQ ID NO: 130606 - protein, 89 aa, Heterodera glycines
MPNMDIKYGYKCQNMDKYGNIDINSEIWKNMENMDIEIHPRSLKPSQNMTRFDPIPVPWTRFKNFGSGPEPGFCGPGNTRTRFLSKFPD

SEQ ID NO: 130607 - protein, 108 aa, Heterodera glycines
MEDYGIKRGHTIYVSVDEFKIYAKRKHYNIRYPVWVSSTDTVTTLEEKFKAVYEHANGCECLSFTLKEGPRGSKVWASAKMDELGIEEGSYVTLDTRYCEDPPRVGEF

SEQ ID NO: 130608 - protein, 31 aa, Heterodera glycines
SPIRTFKAKISQNNVIELFIDALPAPCPFDN

SEQ ID NO: 130609 - protein, 520 aa, Heterodera glycines
MVNGQPCTSFTDAAIRHGLLEDDKIWDKTLAEAALSRWPDQMRWLFMSILVYGQPSNAVELWNKYKDQMYFPQGITTSAQRQAAELEALADIDWRLHSCFNLSSVHFGLPDPPNSIAKNTNAAINKFFFGDDDLNLPPGQPNPRPQPNTPPPLNSDQQKVFDAVLLAIQSNPRDSTVPRRFFIYGDGGTGKTFLFGQIIRRLRKAPYTYKVLATASTGCAAILLPYGKTAHSTFRLGREVSLDKLPSIPLESFFARRIREAQLIIIDEITMLHNTVIEVIDRVCKEMAIRQHKDLLFGGKTVIFSGDFKQSLPVVPHEGLTAQVTACFQTSPLFGQFTTMKLTINQRLGQGQQAYLQMCRQIGLGETGEHFWIPPQFLVKSKEELIDYVYPNFQQLLGNDKELLNRLILAPHIDTCDEVNEIMMANVPGQVREYLSTDKPLDDRPLDIDEIESEVAALNRRTDSGMPPHSLRLKVGCVVVLLINKSDKEGLINGTRIVLEELGDDRLIGRVINSNAIGGQ

SEQ ID NO: 130610 - protein, 366 aa, Heterodera glycines
VERIVNERPITYTSQSEVIQPLRPIDLILPNIGNNRLEINTRSVENSDNDYILENSNTANVVQRYQKAMNMAEKFWQNWKDSYLLGLRERHQGNKHTPGKAPKLGDVVIISEPQTPRNCWKLGKIEEIMSQRTARVRISEKSIIERAIKHLYPLELAENANNSDSGIRKQEHSSVKQIHYNWAKEPPQNKALVKENSPNHYRWAKQPPKTINDITNVTCISEMNKDFDAVSLDCEEMERDLEDENKEEESKDERKGISQIPVEERRPRDGVGEKRVIINAPIAFVGDDEVEPIGRTFQDNGLRALVLVHSLRDIAWWHRLPEVVIINDVCQMVVVRTTEWAEHIRPFLSLLGRWAKPAVWIGSPYM

SEQ ID NO: 130611 - protein, 123 aa, Heterodera glycines
NKEEESKDERKGISQIPVEERRPRDGVGEKRVIINAPIAFVGDDEVEPIGRTFQDNGLRALVLVHSLRDIAWWHRLPEVVIINDVCQMVVVRTTEWAEHIRPFLSLLGRWAKPAVWIGSPYML

SEQ ID NO: 130612 - protein, 385 aa, Heterodera glycines
FNRNGLKYICELVQEDVERKTGKSYICELVQEDVERKTGKSGALPTELQVLATLGYLASSSFQLWCGDILGIHQASVSRAIFRVTRALCRKAGDFIYFDDYENARLCSIPAFNAVAGMPNVIGLIDCENARLCSIPAFNAVAGMPNVIGLIDCTHIPILMPSEDGRDYYNRKGWPSINALAIVDHNGRFLNINCKWPLAIVDHNGRFLNINCKWPGSTHDSFILRHSSVWQDFESRRLRGKYFLGDSGYPCKKWLLTPFAKYFLGDSGYPCKKWLLTPFANPINNSQQQYNNAHSKTRVIIEQTFGRWKRRFHSLQTIRIKLENIGMFIIAAAILHNIALMKGIPEFDQEEFVDDQPENDDRVVIGEDIISDGFAVRANIAQNYF

SEQ ID NO: 130613 - protein, 170 aa, Heterodera glycines
IQQLKWNFSLHRAVFLNQMEEVEKNLADVKKKDVHGNTALHIACMLGNEEIARILLEKGAKVRARNNAEWNALDEAIAYGDVELVQTVHSIFQAQTKIAMQRGDMTLLLDIHKDEKAVLLDNIEKKYCVFRTEEVLPQQLLTEKKITKYHLNANQLDFKRAKTLLNHEKT

SEQ ID NO: 130614 - protein, 480 aa, Heterodera glycines
WIAHRAGIRIFATGGIGGVHRGDSQDVSADLTELGRTPLGVVCAGVKSILDIERTLEYLETQSVNVVVLDKSAVFPGFFGPPTAIKGPYHTDSLDKVADILLLSFQMGLPNGTLIACPLTDDAVDKRLVDERNVIAEATKMALKEAEEAGIRGKEVTPFVLERIRQRAGKAATELNIALLENNARIAARLALLCSSKTLPAGIEKQPLITAGQQNSSSQCENGGTVKKRRPKIVCAGASVVDVSVFLDQSSVPPLGPAAVGTYLPARIIQTSGGVARNHADALSRLGCDVTLISALGTTTERNSGGGEESRNDTVDLYGRFLMEKCDHIDWSHVRHCPGTATASSVGICSKGTIISQAFIAVEPIMERIDEKYIRSMEAHIANADFLLVDANMNSGALRIAVELARLNGVKGTQTESQFRGGVSTTKRKVSLIAYSLVRTDKLDQGAEAVRSAWQKCSAQSECHIAEPERTGGSGATVER

SEQ ID NO: 130615 - protein, 38 aa, Heterodera glycines
MEKACKIWRDYIDFSALDFLFISLFDSESIREPYLTFN

SEQ ID NO: 130616 - protein, 30 aa, Heterodera glycines
MEKACKIWRDYIDFSALDFLFISLFDSESI

SEQ ID NO: 130617 - protein, 540 aa, Heterodera glycines
MKEQRNLLLRLDVEFEKAKLQKATEARGASFPFPINSSSDFLDWEYDDSWDRERYKDISPFVSPPQSPPKIVEETEDEMTDYGETDQKEGQRGFVEEEYETAPAKIGNIRLTLPKYAALENGTTNGQSDAQHSPNDGQSEHNDEELEQSQRMNTESREEDEKDVICSPSNELKVTQQSPDELVSVSVHSFAPSATPQHFPFETTTTLPSAEFSSDPLVPSLTSEILLNEFLRQNVTMSSSSNCDNKPLENDGNNSVVNAMTKSLLCTHENGAEIKLNDQQESSKEEFRERVMKEKEQREVNKEPVKLKIKLDKMNINKVEERNAHENGNEEKKDGREKKEREEMMRKSEKKRRKAEKKEKKKQAKLEERMKKEREELNKCEPQPSPSSVHLQNDDRMPTQSLKISLSRLACWTGTNNVTPEYSSNLGGHGFHSNKESVDLTNGHSTPKNCQIKPENGGGDPLKLRLILNRGGNSSVEVKSTEHRKKSRKRKSHEEKPKPPEEQEEAPPKVPRLKIRFGTGNNEEKIETNAQPKTEPSQCE

SEQ ID NO: 130618 - protein, 51 aa, Heterodera glycines
MIARIAEKIRDQFPNVDRLIAKRKPSLSKRLTESKNLEMYHRCNFNQPNLK

SEQ ID NO: 130619 - protein, 45 aa, Heterodera glycines
IREKQCGDKNVFPLNKWLLLPRNHKEHLPFYLLIYNYERKERIMI

SEQ ID NO: 130620 - protein, 119 aa, Heterodera glycines
MYGIKFSHAAPYCEILANVVSNTKTPFMISIELPDGQQTEKLVFEEPGAKNVILKGNNCASKHWQLNTFRWHFNLIQFFVTKFCLYTEEMKMASGNWRRSRKPTDLELKYPPSFSLDQN

SEQ ID NO: 130621 - protein, 119 aa, Heterodera glycines
MPNTGMENGLKKGWQMLEKYGKFRRDAMCDRIDQIRATWQDDGTQTAEEQKWLLKFDEEIEKLHLHRLHQLISWEVPNSKPKLAELFHMKRLEGENVFAYRLRMIGLASLEEADQMRRQ

SEQ ID NO: 130622 - protein, 87 aa, Heterodera glycines; identical to SEQ ID NO: 129152

SEQ ID NO: 130623 - protein, 193 aa, Heterodera glycines
MAFPFSVTSRAPKAGEQQGREYKFERKEDILQRIRDRQMIEWGEYNGALYGTTAESVREVVRSGRVCVLDCSARALETLYNSEFMPFVVLVAAPPFEELVQLSRLHGKPREEDELRRICDQSDQLFHSDYAKCFDLVLVNRNRDISLRSICCPSFAINRIHQRLLDALEALKTEPQWVPLEWLQGSANVKSKS

SEQ ID NO: 130624 - protein, 38 aa, Heterodera glycines
KRIERTRFDEVLVSQKKSKHLKIYKKFKNENSCEIFWK

SEQ ID NO: 130625 - protein, 87 aa, Heterodera glycines
KIVKKTNFFNKFLSYILPGKNRLTVHLKNKWLIRQRKRWSQVMYLYYLLGYRLAMRVHENRRRELLSENTFILTLDGDVDFQPFFRL

SEQ ID NO: 130626 - protein, 103 aa, Heterodera glycines
MALMTGRAVCAPMSPPPSLTIWEQPSAADAICKIYVCATMWHESALEMTCMLKSILRLDEVNEYYLLMGIISVGTLYIPSMNMHMHCLSKDTSYRNTKLGPMI

SEQ ID NO: 130627 - protein, 91 aa, Heterodera glycines
MAKQRHIGPHKKAYRRVEKRAPKMQEQAGEEEIISAYNIYDDRVELNQFTTAYDALWLALFQVACALLCHFSAKFACKSYTKRVLYERLAK

SEQ ID NO: 130628 - protein, 236 aa, Heterodera glycines
MAEKLKRAKVRLEFSEKMFYERALTEWRDKILKDSGNKNHAFVLRKALCNLKLFPLDVNGFSDLRKIRGIGVDIATRLSSAWKFTCATHFCTESPTIGQIKSLKSGEAFVLVEQSSTENGGRVPLVAGAKQRKAIPSQIGQQQKSQTNGKQKGHHFETAPLVRSNSQECVVMHKSESLEVMDFDHLLNVSVSQPAISSFAFEVSTQLQPIQTNLIPFSMFRIVGQKEQCLLRPLQA

SEQ ID NO: 130629 - protein, 328 aa, Heterodera glycines
ELVGDTHQQHMVRTVTAVTSLHILLFAGPVRMDLKCVKYFELVDPNGSLRQQRKLFRDKILRKHRKEQRNLERELRRRHRKQLEQRNLMEQNLEEQNKKKQLGKRQRGEESEKCRQTDGRAQNATDTKSDWNDSGHSLEKREQWQTSTDSRQRKKREENEEIGESSATSSSDDSFDSFPAANSAMATPSSLSSSALSSLEPELAEQLPEYMRSFTKSEPEEPYELLELDNWFGFRGSFSDLQVFTPNNDGEVALSSHGLFDARSLPFGQLRTIARGQASSRLFERNSYSGASITKVCQSQRFVKTKSPSMMASSEMMTAFKRECHCLS

SEQ ID NO: 130630 - protein, 78 aa, Heterodera glycines
MFFLNIFAQVESYRGIQRLFFMLYLRKVITDFSQKFCKFGKVFTRSDLQICMKNALFFSGGTYVYLPKIFFCTIHRFS

SEQ ID NO: 130631 - protein, 128 aa, Heterodera glycines
DGYNFLIGPYTGYRPDTNPSVSNAFATAAFRFGHTLISPQLERLDKALRPTPEGPLPLHEAFFAPERLLAEGGVDPLLRGLFGTPLKMPMSDQLLNKELTEKLFHRAHNVSLDLAALNIQRGRDHGIP

SEQ ID NO: 130632 - protein, 177 aa, Heterodera glycines
MVRDAHGRKMSKSLGNVIDPLDVIHGITLEQLNKKLEDGNLDPNQGRDINLDVLRVQGYRFFCNKLWQGTRFVLSRLGPDFIPSDTFEPSTLALNLADRWLLSRLSHCVSECDVGFRTYNFRQLTSAIHHFWIHEFCDIYLESVKSIIVVNNANKKGADAIAEERSKNGTDEVTTQK

SEQ ID NO: 130633 - protein, 66 aa, Heterodera glycines
MIHVLIHGHVRLIYSHYSVSIYGLNHVSIHGHDLRVNLRSFIIHVSIYGLKHVSIHGHDLLVNSRS

SEQ ID NO: 130634 - protein, 39 aa, Heterodera glycines
MFKNLIIYAFRNHNSSKSTKIQEKMKIEHKQRLHPPEEL

SEQ ID NO: 130635 - protein, 26 aa, Heterodera glycines
GTTVNHITLLGGKLLWFSFIDPDAVF

SEQ ID NO: 130636 - protein, 123 aa, Heterodera glycines
MKVKYTLGTVIDEHHPNMVTQNSANQRANHKAADDHEPLDKQIQLKFKITMDSRNGKIGVEFRLNGQHITKDINGTVLTCCPAELVPFEDIQYITAKSFDMELSPDTDVQIYCIPPEKCILKT

SEQ ID NO: 130637 - protein, 591 aa, Heterodera glycines
MRYYSLYKRGIITEDRWRWIKDRQTTVLQQKVLLLLREAGIPTTEPEYDAEIYIHQVQGLWSTKYPGEYKIFIFNDYQTRPITKSDVTDYQFPILLYHHDKHFDGIKTISKFWNKRYYCLSCESAFSNKSQHSMNCTSLCHGCREVGVDYPCESQQGYFKKCKHCNNNFYNNDCYERHLHKDLCSKFQRCEDCGVIYNIKYHGTTGHQCGERFCRLCKQFHVKEEDGENPCKSCFIQPLKLHKIKPYRIIAYDFEATQDKKVGNRFEHEVNFAAATIICTDCINNGEWKNSLLGKKCQICGPNRTITFSPFDYTNTKVDQKIITQNPLRDFVGWLLFDHNKKFSTVAFAHFGGRYDMTMIIKEVLAQGIHNPEIIKQGNRLYELKIKDNEHCPLTTLHDSYNLMPIKLSALIKSFGLKIQDKQHFPHMFNKEANYDNVLPHLPPRDDYCPKQMKKPDLQNFNNWYNNNYEQKFDLKEKLPEYCCNDVHILTHALIELRREFKQLTQRNGKHGGIDILWQAMTIASACVKNYALNHLKPNSLAIVPEKGYTPQQNQSALAIKYLDWYSHTNNVNIQTAHSRYGEYVFKREGQ

SEQ ID NO: 130638 - protein, 800 aa, Heterodera glycines
DSYNLMPIKLSGLIKSFGLKIQDKQHFPHMFNKEANYDDKQHFPHMFNKEANYDNVLPHLPPRDDYCPKQMKKPDLQNFNNWYNNNYEQKFDLKEKLPEYCCNDVKILTHALVELRREFKQLTQRNGNTEESTFCGKQTIASACVKNYALNHLKPNSLAIVPEKGYTPQQQSALAIKYLDWYSHINNVNIQTAHSRYGEYVFKREGQVYQVDGYIKDGRRDKIIEVNGCLWHGCEECFDEMDETRMPNGKTLGQLREREVRKHDILSRYVDLEVWEHEINEQLKKDKQMREYFENWKDRSPIKIRDAFHGGRTGPMKLLHTAKSGQKISYKDFTSLYPWTNFSTDYPLGHPKIISFPVNEQTPYKGLLKVLLLPPNPYKGLLKVLLLPPNNNINVTVMPIKFDERLLFPLCEKCAKHIDDNYSCPHFNPNDRAFVSTCTHLCEKCAKHIDDNYSCPHFNPNDRAFVSTCTHLELNAALEAGYTARKVFHVLQYDQWSNNVFKSYVSEMMALKIHATGFPSWCESEEQKSEYIEECWGKFAIKLDKEKMKAEPGKRYIAKLCLNSLWGRFSMRNLLSKAIIDNDESLIHQYTEDKKIELIDLEMMDDDVFMLTYKPKEEFVDENKYSNVVISLFTTSMARLYLYEALKKVADKILYFDTDSIIYVHPEDNDPLPTGKGHLGELTDENPDHDILEFISAGCKNYGLKLQRKDNGEICFDLKIRGFTLDEQTVQKIHYDTVKEQILRYGSDDPADPIIVTYPHFIRPNLIQGKVFTHSLTKHYQPIFTKGIINDSFQVLEFGY

SEQ ID NO: 130639 - protein, 189 aa, Heterodera glycines
MVHWTTKVSNGAKDGTGGAAKNGGGAARDTNQYFFQPQPADVEMSAYALLTYMLLDNKEHALPIVRWLTAQRNSLGGFSSTQNGQQDTHLFTINAQNALVLQSYELPNLDAPVELEAVGTSMAFVQVQYSYHRQTLREDVPFYCAKEVREVRNGNRLQLELCCNYTRAGARSNMAVAEVDALSGYRFDE

SEQ ID NO: 130640 - protein, 140 aa, Heterodera glycines
SKSNAPLMVSRFTAPVPQLLPAPRQRKYFPEAWIWADLLDDSGEVVYDAKAPDTITSWVASAFAINDKAGLGLAPSTVKLKVFRPFFVRLELPYAVKRGEKMALQVLVFNYLENEQEVTVTLKHQGFDFLQKDGSSIKKG

SEQ ID NO: 130641 - protein, 30 aa, Heterodera glycines
MYMHMRTDFAGGEERKLKEQPGMPGPPMPL

SEQ ID NO: 130642 - protein, 120 aa, Heterodera glycines
MHFDNDGDVIEDDYGENIDEYDSQQNLGTQSNPQLIGADPEAKTSEGWTPLHSAANWGNFEVIATLLSWGVDVNRRTEISLSFLLYFISNSIIFVDYFKAKLCLSIWQLIRWRMTRTSST

SEQ ID NO: 130643 - protein, 120 aa, Heterodera glycines
MVSNDTIMLHDEQISPRANLPPLLVRLAERHADQLDYVGVSFGLTLALLKFWKRLGFVPVYLRQNTNDLTGEHSCVMVPKLQGEEEVNMAKWLSAFFVEFRRRFVSLLGTSFSAFSPHLH

SEQ ID NO: 130644 - protein, 52 aa, Heterodera glycines
MIVVDIVMIVVIVVMSVVIVVMSVVLIKFICIVISFVIVNEICVIMSFVCVL

SEQ ID NO: 130645 - protein, 141 aa, Heterodera glycines
MANAMYAARARAAKAEKRQAQLRKAARARAGNARKREVVTIAWQTAEGWKERTTDHTMNDWPSVFIDVFVMDIHSFVVSYNHGVRARFWVRFRAFAKFKKLEFVMQLPIIPCLKNAIWTLKMPPPPPSPGARNFSPPPPRL

SEQ ID NO: 130646 - protein, 17 aa, Heterodera glycines
MVAAHRGTRDSAQSAPA

SEQ ID NO: 130647 - protein, 397 aa, Heterodera glycines
MNHFGLGISAGLTMLMRLMMRSSVADDEFEISSVIEISDFVWSCGPTVMVKGEDTVADLKKKFAEEIKIDPNRQELRNKIEPKRQMLRLGGRFGSTLEDSKTLKVYGIEKDQVISITFDEYEIFVHFNEKNYPIWVRKSDYVEDLEKKAMQMLKRELDINIDDIKLKSRQSPGSYDMFFEQWYTMEQYEIKEGAVIYVCYEYHYKTLVEFDIFIEYNQKKYPVRVKRADTVRDLKMKIGNIQEIGILPNQQQMLRLGGRFGPTLEDSKTLKDYGIEKDQVIIITFDEYEIFVHFNEKNYPIWVRKSDYVEDLEKKAMQMLKRELDINIDDIKLKSRQSPGSYDMFFEQWYTMEQYEIKEGAVIYVCYEYHYKTLVEFDIFIEYNQKKYPVRVKRADT

SEQ ID NO: 130648 - protein, 164 aa, Heterodera glycines
MGFKFIVGTTTIFLLIQSVGLITADRQKQQKQQQQQQQQKQQQNRIVLSPNRVPHWKVENNINRGPFYGQPEQVHLSYASDPSKLWVTWLTFDDTLDSLVVWGDQYSQLTRKTPATVDYFVDGGTEKTKRYTHRALIEGLKPGQRYCQWKSLILFLAFLINIKI

SEQ ID NO: 130649 - protein, 78 aa, Heterodera glycines
MTRTVDHASTVIIFCRAFFSANMKIFGSLPPISFFFDLHLNGHTCFFQYLFLEKWKQKTFFEAFNASIIKHRKDVPYL

SEQ ID NO: 130650 - protein, 132 aa, Heterodera glycines
MGHNFTMVELGWLCTALVSLMRNSSPPLVHTDQNAQQMLKLISDTKCSNSNSTTTTINGLSTVPTTVGTTATVQLNAALLEKLIRPGAADQQSQQNKIFADNQRLLDWLMTFVYMLISMFGIIGNIFEITTY

SEQ ID NO: 130651 - protein, 47 aa, Heterodera glycines
ERAGCRRRLLIINVLIEDHGEYKCTAKDDETMAQLIVHPKFVKKAER

SEQ ID NO: 130652 - protein, 77 aa, Heterodera glycines
MNLFVNGKKTTEHVYGRQEWENGTVYTYASLAFRPGKIHHKKVISCEAQHPETNTNLRDSITLDVFCEFGLIVMMIG

SEQ ID NO: 130653 - protein, 24 aa, Heterodera glycines
RTLSTAVRQRSSKIYSMPQILWAG

SEQ ID NO: 130654 - protein, 135 aa, Heterodera glycines
DEWKPCQNAAKAPVKANLQTWPKTHPWQRVHIDFAGPFFGKDYLIIIDAYSKYSEVFEMATKSTAATNNKLRYLFSRHGLPEILVSDNGTQFTSNEFSKFISNNGISHLFSAPYNPMSNGQAERFVDTFKRSFRR

SEQ ID NO: 130655 - protein, 95 aa, Heterodera glycines
LFEYPKRTLEKIDFFVFGAVPPSRCAQIYGETESFGNSFPIACTLILRWIFAPHNCLSTPNGHLKKSIFLFSGQSPRTDAPRFMGRPNPSGVASL

SEQ ID NO: 130656 - protein, 307 aa, Heterodera glycines
MGAKWTVREFRKAVGVQVKCMRAAESALAAMKGPERRHEQRSEPERGGRNARTGQGFQRAFMIRDQPPEKRTSNEAHTRTEVAMPPTRPANPNRVPLGSYSRPMGAHSQAQEGQGGQPRQGCSLCGQTGHQPSRCCKYGSAQAKRRRLIEQRRCLKCLGSDHTAQQCTRKTACRTCEQMDHHWLICWKGERRNEPPSHSRTEDAQQNRTMIIREIEAKHVRTPPPTESSKDGMGAKGEDPPLLDGEQRAFTTVGQQLPAYLMVCPVVVASEDGMTECNTNLLLDPASHGDYGDAALIKQLGTEKGRE

SEQ ID NO: 130657 - protein, 246 aa, Heterodera glycines
MAGLRMTRARLRQLERIARRRIPTARLRPIVGPKTFLDINYGDDEEEESTSAKLPGQQDDEGDMDYTPANDPTAPTERRRRRRRRKTKTEGEKGQTQTNSDRSASECDDAEDASSSMRSSDTDFVCSDMDEQQQPEQGTSQSATVETEQVGDEQHQKQQRCTHDEEEEEGQSVEYLTKVDNPIYPIFIKSLATDTEIDPEVRQQLYDDEDNDPEYVFPDFDDLCDEQEDEYEFRRDRATEIPRNFL

SEQ ID NO: 130658 - protein, 731 aa, Heterodera glycines
HVQLLCQAIVGTSQYANLVEPHNKSMLMLSELDGLSRERGAKSAFNVPTLEAAIYSAHDIKACREVNLALASTAAAETNGDELQPKNTVELLLAIGLYQLGGVQSHRNGKMRNRYQHIQQYFLPTKRVDQIRNHIKNVHSSPSPTIYHQLIMQAEKGHFPVTYRPDLGEKAQRKTPIEWPTNVQPYWLKWLSNLLGKCQTQMIMVDDGDNTDNDAGQQLHGVFEALNGTDQPSSPPAPPPAAFASADHLHQPASSDTSNSEAQTAQNVKVENANRQRHVKAGKKPRILATARKRCVPTATGAAPSTTSTMEQRKDDQQQLDTTTTVPYNNNEAATELLGDVFIPGEQQQPDFVDVEEEDHVVGVETRWRKRIRTASSTTTEDGASRLSGVAAATDVAEKGGTTPPTQTVTAAATMVNNNASSRRNCSSAANGAGGAEAATLSTMAQMTAKSAGVENINGTNCAESGVMPAATATSQLQKKSRRHERAERGMAALGDAHSLEQTERALAAAIYEDFGKRMFMHQANLLTFFLPLPPRKSTDVLPSGNIRKMPLSPFQDKLRAVQRVLATAPPPRYDPSLSAACSTAQSFASLWQLMGLTHPQLFHLFAAIAPEAQLPHALRVDPHWQACKRALRMLKTIHTYLAASRTLAQMKHMLKFLKETSRIGSTNLWTWTSSTSSNNNTRANAQQFPLMELATGTSSNSSSNMSDFPTDATRPNAVAFASDTAASRRN

SEQ ID NO: 130659 - protein, 39 aa, Heterodera glycines
MTCQTGIRADEKLLDFFEQCKQCKVRFGKIVINNVCPTV

SEQ ID NO: 130660 - protein, 242 aa, Heterodera glycines
MEYTDLAVCDKRLMEGNGQGKSETNKNINQNIASTSQSANEKEIKRIAEINHCREMIRKTMAALAIKSDNEKIHELRETEKSDEKNPTELINNIDCPSSSGIGLRCTDALAWVMIKPESDEYQIKQKKDKNRDDQLRMIIFQRMGKCALAVRLDKEDKWPYFALVYPNEKLNQYPCLGSITSVPKVEKFEYFSSSNSELYSQNPKEESGTIYNIIKIERNEIKAIDVDFNVYDDESYDSINQ

SEQ ID NO: 130661 - protein, 100 aa, Heterodera glycines
MDRRWICGDVWMDILPSFDHAQLGLKMALLSDRFDVLVDKHFDGKSELTIWRRIKISETVCGDRWQICGISIAGPFAAKQNPFSFPSDSVNQKLYRNQLI

SEQ ID NO: 130662 - protein, 201 aa, Heterodera glycines
MTETELRNRLLNVSIGRNIRNDNGTQNGDAPNLGQQNGNESVEIGQNLEHGGDAQMEFGQQMRGGLRDFEIFENFGHERGGLQNFGVERVSPNRHQHFGENRMQNRHISSEIRGQTNVRASNNREFVEQRPLLNRPPLAPQHSVIHRQYIQHVESLPPSFPYANERIPPAPSYAQPVFEQQRHQPRQNAPNPSQNLDVLHV

SEQ ID NO: 130663 - protein, 80 aa, Heterodera glycines
MKKFDYLVIGGGSGGIASARRAAEFKVKVGLIESERLGGTCVNLGCVPKKVMYNTAIHAEFLRDHADYGIDSMNVKFNWR

SEQ ID NO: 130664 - protein, 21 aa, Heterodera glycines
MITENGGQARKATAEEEAKVK

SEQ ID NO: 130665 - protein, 62 aa, Heterodera glycines
MSRNELVGFLLRQIKFHPIFANNFFSSSDSGLIHWDASALAQGANLNPPTNGREMTGHESAA

SEQ ID NO: 130666 - protein, 493 aa, Heterodera glycines
SGRINITKMLERRGEATPKEAETILQQQQMDDDNDNNNNISDDDNDNNNNISTAHWANLGTQTIPLLVLLGFDTEMKEDGCHIWRLRHFSKPTYCNVCLNTYCNVCLNMLVGWGGKQGLACSLCKYTVHERCVRSAANNCIHTYNPSKRAADKQDHRWMESNCGGKCAKCKANVSIFQGRHCGGKCAKCKANVSIFQGRHCRWCKNLLHSKCIPSWPAACDFGQFAHLHSKCIPSWPAACDFGQFAHHILPPVHIIPTFMDRSCSISTNFHILPPVHIIPTFMDRSCSISTNFHPMQKHSKLKVIPLPPNSRCRPLLVLINPKSGGRQGERIFRKFQYLLNPRQVYNLCKDGPEPGVYNLCKDGPEPGLNLFKSLKQYNILVCGGDGTDGTVGWVLESMDKIAYGDGRPKIAYGDGRPPVAVLPLGTGNDLARCLKWGGGYENEPLQTILQSIERSTQVKRKGKRRKSQGKKAKAAKQRGDRRKHFQSKDKGN

SEQ ID NO: 130667 - protein, 200 aa, Heterodera glycines
MHAATRHRVARNADACCGCGESPRGPPGPPGPDGNPGGDGQPGGPGQPGAPAQAPPRPKPSGTGCQTCAPAENGHPGPQGPPGQPGAAGEPGAPGYPGKKGPRGPPGPAGPDGKPGDAGAPGQPGAPGELKPGPVKVGPPGPPGYPGKPGGPGQPGQPGEPGHPGGQGPPGDAGQPGEPGNPGGAGEPGQPGEKGEHGHC

SEQ ID NO: 130668 - protein, 44 aa, Heterodera glycines
MPILLGRAIAPQWALRKASEKEKWPKQSKGCVMSLLCFCGCVLG

SEQ ID NO: 130669 - protein, 245 aa, Heterodera glycines
EMRKLWGLKNPSLMPVLLVRNLPEPLPLLTYDSVHKLRRGYRNPVLLLHPLGGWTKDDDVPLKVRIAQHEAVLKENVLDADVRIAQHEAVLKENVLDADWTVLAIFPSPMLYAGPTEVQWHARARLACGVNAYIVGRDPAGIQNPRTGDYLYEPSHGAKVLSMTTGLVGLEIIPFRVAAYDSFAGAMAFYDPNRHDNFMFISGTMMRKLAREGRQPPEGFMPPKAWEVLSNYYVLSNYYRTQNGN

SEQ ID NO: 130670 - protein, 23 aa, Heterodera glycines
MIDYCRKNGATVDMPSEAELFLH

SEQ ID NO: 130671 - protein, 708 aa, Heterodera glycines
MESEINISPNNGSDFDPVHFTPEENEKWANLLGRMRAFELAVCRQFRTIENAFSQISSQIQIQDTADRVRELESSIKELENFTEMDTFETKEKFIEVEEEIGKVSNHMERYETFTKVRFGKIVEKMKDEVRKITENLDVLKGRVQLLEFEQDNPEGFGEWFDDGQSQEHNRLPDDKGATEGEDNIPIGDGSCEIMVADPFLGGITPLEGYDGNPSVSFSRWVARFEDMLTLYPQYSEVQKLSRLRILLSGQARAEFDSIEPSPVSLSDALNHLKRKFENENTRSIARQAMASCRQAPGERVYEFANRLNEAVRTALSGENEETIRRRLLEEFLEKLTPELQFEVKAGRPTSYSNAYEIAQHFELLLATKRTNQVSVADSVAELSHKVEALAIRQHSVPKRGIERRVCYYCRRPGHVVKDCRDKKRDEERRGHGGQRDRPFYGERKWNYERNEREHRHRHFSPHDRPNYGGNEGEHRQRHFSPHNRPSHGRNNHRSPISYEGREYENERTQSPGRRVRFGGQRIGAARIASPIFLALMVILSLFGANFATNSVESPMICHPDSPATLWSIPIDPICPSWTPTELPVAMKLNVYRVNTVKYKTKATACKCIKTKISRRIGFFGGKYEELSTENVEMPTAMCRKMKDFDESSAGKMVQINGTLRATQNSLEPGWRTWPIGLFWRTVEIVNCYLYETVVFARHGNSGPSTRG

SEQ ID NO: 130672 - protein, 123 aa, Heterodera glycines
MKYSFNVREIQSLLNGFMCIFKPRDVSISAIEKLLMRRICEQANCLDPCRPLPTIEMPIVEAHPKSGALVVVGRKKQIDYSKHPLMVGQMFRPEDMRIEALNYLEPSCSGVCGKFNGYFLFLL

SEQ ID NO: 130673 - protein, 89 aa, Heterodera glycines
MSPNECSDRPFQQPDNVQQPHRQPDEDAELRAQIEDAEEDLLLNWWREDPTIIRFLFGHGRAPAIEAALLQRAEREAEILREYAENQQQ

SEQ ID NO: 130674 - protein, 118 aa, Heterodera glycines
MSNDAEKEFTPAGNPKAPALHMALDWIHRSWQEISKAVIIKSFEVCGLTTPLDGTGDEKIACFKPEGAIGPIGIKFLRDFRANETMKDGRNDHEEAGLSDDDDVELDAVGDVDEFFVC

SEQ ID NO: 130675 - protein, 207 aa, Heterodera glycines
MKSYGQYAKSLLNSLNGHELTLVSVFLTATFINTITINCMETIYPKEIVKIGTKFTFYTALFLVSGSAICFGFLTFLHSNLTFFLCSLVIRFFQAVGRTFFVLSIFTLSAELFPEHVSLIGSILETFEGVGQISGPIFGASLYEIGGFMLPNFVMGTAMALMAFAFVALAPFPTALVYEDELHKKTMQNIEEGKMEEQQKRVKQTFN

SEQ ID NO: 130676 - protein, 85 aa, Heterodera glycines
MDMVFEPFSVVLKKRDCQEIVDLIQMLPKSGAEIRGAMGRTDLSLLNHLVKIAGNYALDDMMLAYKKVHFHFMGSPTSSQETWLP

SEQ ID NO: 130677 - protein, 281 aa, Heterodera glycines
MTKAAAATTWDSSSITKPTGTTITSTTSAIVSMLLAPPKAQLVMNTSPSRTSTMAADKGHGMSTVNEQIDWKTGPKATLISVPLSVDQRCRRTDQMPSLAADAAAVQRESAYGVRESAIGGACDDHDQPPMLLRAEEAKRENVSTFEEEEEEEENGTTSDQKTDDNTDQQPPQLVLMIAAEKAAECEDDEWASDSCGMTSSLSSTAAPSKAASSKVAASALADQNNNHNDDDAVITGDERHEPRSPPPTKASKRRQSVYSDEPSSSKDGTHVTGGERHQPT

SEQ ID NO: 130678 - protein, 39 aa, Heterodera glycines
MAPTAANKQRLPMPMPTDFSELMGPKKVPQQQQQQQKQL

SEQ ID NO: 130679 - protein, 109 aa, Heterodera glycines
MVELYMKELLMQQKLQREYMLQQQQQQQQTQFHAPLLPLAPSPFPLFHALQHQPAVLPPASAATATTSSPFPTMAPLQFGTAPGTAGPFAAAPFCAAKPMASFSSVPDQ

SEQ ID NO: 130680 - protein, 90 aa, Heterodera glycines
MEVEETKATKLEQMFANVWQNWSHFVLLMGLEGNAKCFDRANTFVRSRPLEAKAEFRPINSMDFHSDVGRMLYTIAILLMVRPSAVRSSD

SEQ ID NO: 130681 - protein, 89 aa, Heterodera glycines
MFPHLQHQLGLTVQQQQQQQQQQRTVGGTKRRHCEEGGNSENIDIKSVSKRFHPMEAKENENNGKESSKEEEEEEDGAEESVAEEEEEE

SEQ ID NO: 130682 - protein, 42 aa, Heterodera glycines
MENGKGKAQTNKKTELGIFAKKYVSSNRSALSRPLFDSMFEK

SEQ ID NO: 130683 - protein, 212 aa, Heterodera glycines
MAKAIPDQKANTVSEIFVEIVVHQHSTPEIVHVTTTPYHQQSNGIAEGAMRIMANIISQIVNEKGNNWDEILPHAIFSYNVSIHAATKFSPFFIINLRQPKLPTDRLLKLPSPDELVSDISVYTRIQTEKAAKAWEIVRNEILKAQERNKEENDRIKKANEREFEIGDLVLFKKEVLGHKFDQRWLGPMRCCWGLKKKRKMLFYSQLMEALN

SEQ ID NO: 130684 - protein, 95 aa, Heterodera glycines
LFEYPKRTLEKIDFFVFGAVPPSRCAQIYGETESFRNSFPIACTLILRWIFAPHNCLSTPNGHLKKSIFLFSGQSPRTDAPRFMGRPNPSGIASL

SEQ ID NO: 130685 - protein, 69 aa, Heterodera glycines
LFEYPKRTLEKIDFFVFGAVPPNRCAQIYGETESFGNSFPIACTLILRWIFAPHNCLSTPNGHLKKSIF

SEQ ID NO: 130686 - protein, 34 aa, Heterodera glycines
MTNHSLAFISRRLGQWHKRNGVDFNAKCIRRMLL

SEQ ID NO: 130687 - protein, 122 aa, Heterodera glycines
MDPSAPAKKRGRPPKAGGVAKTIAKKPPATTKAAPKSPSKSPAKSPPSSPPQPAKGSPAAKNAVKPAAATGRGRGRPKGTGTSAAAKKKAAAPAGGGTGKRGRPPKKTAQKAKESDTDEHDE

SEQ ID NO: 130688 - protein, 62 aa, Heterodera glycines
MPEKSVKISKTLKVIRTTRLAEKFQNAISVLINIKTYLLIAAFAFQSGLAVIEFPITEIREP

SEQ ID NO: 130689 - protein, 198 aa, Heterodera glycines
MSDTNVVTNFIAGGVGGSCAVITGHPFDTVKVRLQTMPKPAPGQPPLFTGALDCALYKGMAAPLVGVSPLFAVFFGGTALGKWLLQNEPGQQLDFKQNFTAGAIAGVFTTAVMVPGERIKCILQVQSMDGSAGTTPKYTGPVDVVRKLYREGGIRSIYRGTAATLLRDIPASGAYIAVYELLKDKFSGGERNELTPMA

SEQ ID NO: 130690 - protein, 52 aa, Heterodera glycines
GIRDVFREMLREEGHRALFRGFVPVMLCAFHANAACFSGLELALWAFRQAGI

SEQ ID NO: 130691 - protein, 25 aa, Heterodera glycines
MEKACKIWRDYIDFSALEKASESLD

SEQ ID NO: 130692 - protein, 17 aa, Heterodera glycines
TCYEMYKNNFIILNIIL

SEQ ID NO: 130693 - protein, 152 aa, Heterodera glycines
MKLWVQKHSTNHFLYDQAKTNFKLEDEVTKLLNLLMIDASFDLEARKKCLETAFQVQFRNFAAIAISQEMDLKQIQKYVCAPLSEVMAFRQMDGIRDYSSGWCAGGIYMHRSLPSKAPIPSQACLKNIITFFSVGQIYKFGNIRKLYMFRSY

SEQ ID NO: 130694 - protein, 31 aa, Heterodera glycines
MSPIWPNLSPKMAQALIKKYFFYFLLSTVRD

SEQ ID NO: 130695 - protein, 33 aa, Heterodera glycines
TKRFFLNTPEAQCVQLCSGGQPLQFRKMDAFLL

SEQ ID NO: 130696 - protein, 24 aa, Heterodera glycines
MPNRYNKHMETNLMGKVIMVMESE

SEQ ID NO: 130697 - protein, 132 aa, Heterodera glycines
MIRRGTTVIRRGTTVMRRVIRRGTTVIKRGTTVIRRGTTVISRGTKVIRRGTKVIRRGTKVIRRGTKVIRREVQSDQKRYNSDKRGTTAIRRVIRRSTTVIRRGTTVIRRGTKVIRRGTKVIRRGTSWFKIK

SEQ ID NO: 130698 - protein, 62 aa, Heterodera glycines
MWVGVHLSSQTRPERKSRKIRVVAIIPKMWLEFIAKLAQKENPEKLGSSLLFRKCGWNSFEC

SEQ ID NO: 130699 - protein, 63 aa, Heterodera glycines
IEKRREAVRKRICPCFLRLKSAIDDQYNEKKKKFLQELFNSNLTKCNDEYKSQSMNKYLVECE

SEQ ID NO: 130700 - protein, 199 aa, Heterodera glycines
MAFSGIAATLLKNGRTVHNCFKLPLDLNSNSLSSIELREINCYNEKVLSKFPGENYIFKSIDDAESKGAPILPEILNKLETSSLPNHELKLKINCVTKLIRNLNVSAGLCNGTRLQILDIGKNVLRVMILTGDRTGEIDFIPRISLIEDKKFPYVLKRHQFPLRLAFCMTINGAQGQTFEKIGIDLSREVFSHGQLYVA

SEQ ID NO: 130701 - protein, 500 aa, Heterodera glycines
PAYSMYPTVTCPPTLALLPPPPRQPKGPPRRPPAPPPPPPPPGRRPPRGPPPPPTGRRPPSGPTTPRPSPPGSPPPRPERPQRPTPPRLPSPPRLKTKIEPRPPPPRPTAKREKQQVKLNWKKTQHPTPAPRAKREPELKLDPRPSTSRQAGYFPPPTTKIEPKHAPTKRPVPYRIPEREPKIREKPLQQQQPPHPTAVVEEIPYVPPPEGDQTPPPPPVTPKVPVPAPVTSPAKPTTVKTPATPSVTTPAPPTTAKPPVTVPSPTTKPITPTPPPTTTTPTPTTKSTTSPPPTTTVPPAITKPSTGPPPTTTVPPPITKPSTGPPSTEKPITTVPAPPKTTTTSTPAISAVPSPSVKPTIPVPPAQLKSSALSPKSKTPISTVKPPLPASVSAKVGTRPQTPPSPKAESPPHYDEEEDKDKLTVKTATPVKPSAKPIITAPPAQLKSPTASQLKPQQPSKPQAPPSGSPPRFEETEHQQPPPPPTSAAQIDPSQNVCEE

SEQ ID NO: 130702 - protein, 129 aa, Heterodera glycines
MERHKQQQQQQQVNIGELIKDNCDWLCALARTKSAKKCKKLIGKANSEQLLALVEICLNLVASRFRLSTRQKKRLMPHVDTVRRMSRARSERGARRVLVQKGAGFGGLFAAVLTPVLIELAKSVMTKNA

SEQ ID NO: 130703 - protein, 170 aa, Heterodera glycines
MRAILFLAMVCLVMAVILETANSKAVKKDNKKGAITTPAKGKAAPKGAAKGGIKKDAKSKGKGKKDAKGKKDKKAKPAKGKGAPKNAKPMAAVKAVPKAAENAQKGPSSAEVVAEENNLDTEAVDDLGAEESDFDQLAEDELLEDDAMDGEADEWEGMGEETEMDSQMAL

SEQ ID NO: 130704 - protein, 18 aa, Heterodera glycines
YREAIPEGFGLPINLGAS

SEQ ID NO: 130705 - protein, 154 aa, Heterodera glycines
DDRSQSTPGPGTSKIAEGVKNRSSKRSRRRVGGGPHGGAGEDDEDYPYKPDELAFNKTSYFKVEKLLAQFGWGRWAVLKAFSDLEHELEHITRTLLLHCVREFRGDEKIREYVWALITPEEKKTAAATGDSNSRYHQGWAALPEYNVCRLMLIS

SEQ ID NO: 130706 - protein, 60 aa, Heterodera glycines
MPKAAKSNAVLNRHWISKFPEGTYSTDGKINPGLYKLIDIAKILIGGFLAHKNPSPNYYI

SEQ ID NO: 130707 - protein, 116 aa, Heterodera glycines
MKNTRKTVKSRRRRRVLSMRTTNLIVEQQLPEERQNLLPANSATVGIGSDSVRLAYELPEALPSQSAGESDGERTNGPPNCNTKTTEEQQQQTDAVLLNTNVTAELTELMAKLKAL

SEQ ID NO: 130708 - protein, 191 aa, Heterodera glycines
MASNYQGFGFTPLYEKEEPASFYVDKKKIEERAKLGVMLGVYLPTIQHILGVTMFIRLAWIVGVAGVSHTFLMLFICCLCTFLTCISVSAVATNGVVEGGGAYFMISRNLGPEFGSAVGILFYLANTVATSMYLVGGIEILLLYLCPGMTIGGKNAHTDTGNFNPNYPDFHEYAVGKKADVSKEVFQDVKT

SEQ ID NO: 130709 - protein, 92 aa, Heterodera glycines; identical to SEQ ID NO: 125147

SEQ ID NO: 130710 - protein, 35 aa, Heterodera glycines
KIPLKIKGLLRTALPIMLESICMCIKFIKKRDSIF

SEQ ID NO: 130711 - protein, 30 aa, Heterodera glycines
MERACAQLESLGKVLDNATPSSILTFLVTL

SEQ ID NO: 130712 - protein, 40 aa, Heterodera glycines
MGAQENTDIPPTDCQFHTTAKRIGSALIATNEICSNWEFS

SEQ ID NO: 130713 - protein, 138 aa, Heterodera glycines
MAINREATRFGTEAMMAQRPQQQMMARVTLQNIAKNAGHIDITGKLIGIEAKTVGLVATPTPAPGIDDSPLMTWGEIEGTPFRLDAPDIQPSLEDAPAFRIPEVPIREKIAQGIAEQIASRYHNKRKRAMDQIQQMAP

SEQ ID NO: 130714 - protein, 100 aa, Heterodera glycines
MCAYKVVTVKFDWWCFQTMVESYILKQYARLLCKFNREVFCWMDRWYGLTLAQIRLIEEETKKALDEVGFYSATVHPIPPLYVIVVHFAQMTGRPRGMSG

SEQ ID NO: 130715 - protein, 186 aa, Heterodera glycines
MPFAIEEYQIGQLFSVTEASRQALGLSKDELNERKVVRIDIANDNEFLKAADILDNTRPSTFRSVNTGRGPLEQQWQTNCEPVMCAYKVVTVNFKWFGFQTMVESSMQKSFPRLFCKFNREVFCWMDRWYGLTLAQIRLIEEETKKALDEVGFYSATVHPIPPLYVIVVHFAQMRATGNPKGMTDN

SEQ ID NO: 130716 - protein, 143 aa, Heterodera glycines
KPKIDEEIDENNTFCDLLWADPTNNAQELRLCKDYEPDKGFLGEYGNYRFNTDRETSIQFNDRFAQEFFNRFPHIRGIFRAHENQPKGHSINEARTICTVFSSPRYTEDTDCGSVLRLSADLKHIHFVTLKPKATGEKLSREE

SEQ ID NO: 130717 - protein, 75 aa, Heterodera glycines
DWQENFKGDEANSDGIRMLAFFCARFVSAFPAGIFVSRAKFGGHFSAKIIHWPSPEEYPDKFSTNSVHKSLKSPH

SEQ ID NO: 130718 - protein, 42 aa, Heterodera glycines
IGSWSYQSEYLRLVVDERDVFLGDFYDNQEWLLVKHFYPRKL

SEQ ID NO: 130719 - protein, 54 aa, Heterodera glycines
LVTYHHAFVVLNNFSSSTAAVSQSVSTDRSHRSSAICDSQKETAMEQNGTTIGG

SEQ ID NO: 130720 - protein, 132 aa, Heterodera glycines
IFGFFKLSTKVFTISSLPDRDSRELTPRLSTNKYSFLCIAQIEQGDLVEVWDAPYEENARLATVHRLRIVRCRFDQRKGYVIKTKCWPNYIMENWVSGDEAEEEGEEEAQQQQEEGREDEAEGTAEEKGGRK

SEQ ID NO: 130721 - protein, 36 aa, Heterodera glycines
MRSILKGVFFVFIAFLLRNFAKKCRKSEKIVKKAKK

SEQ ID NO: 130722 - protein, 30 aa, Heterodera glycines
MSYGCSNFRFDSGRKSLASCYVYVYHIHLD

SEQ ID NO: 130723 - protein, 145 aa, Heterodera glycines
MDSFCLYARRFACFCWQFPAQLFNSNANSHFTFGRSHSSELYLLVSNNLKKFSFFIFIYVLEKTHFPEKNYRFPHFKQIFWAFIAQIVHKATHRIYQKQLPEEAHNSQGYRFSAPKNDQTAMNFVKIDDQWTRVSVKLFNAFMFF

SEQ ID NO: 130724 - protein, 52 aa, Heterodera glycines
FLRSLPPLVINGLFPLLRYAEQLLTLKYPEVIEGITRPHHLVQEFRVRKCIL

SEQ ID NO: 130725 - protein, 75 aa, Heterodera glycines
MRRGTKVIRRGTTVMRRGTTVNRRGTTVIRRGTTVIRRGTTVMRRGTTVNKRGTTVIRRGTKVIKREILEYLFSY

SEQ ID NO: 130726 - protein, 125 aa, Heterodera glycines
MHFVGGAANAVMGMRSAQQMLTESEPTANKMVMLIHRHKIDVASRAEIEQIARVDNLALLELSYSRWPVLDNRQAYWSRQLCMLAALIERLENTVPADIDEIFFGTDREEEEGEEGTRRVRQVTW

SEQ ID NO: 130727 - protein, 380 aa, Heterodera glycines
NGPGLFSLPFTVRTWLAPRVPQVSMSPEQRLERRPSPDEMEVFCDADGVPRPRILWWWDGRPVADGQDEMRIIDSTALDEKVRTRQRLLFQSTTRSGTLKCQAINEKGTAEKELEVRILGPGSPPSQISSSPVQDGFSVNWLPPLVPNVNWLPPLVPNGDVINYVIYWNKDAEADLADWSQKTVGAELDNVLISDQQEQTWSQKTVGAELDNVLISDQQEQTPYVFRVQAIGSAGPGIISPSYEVVTGLRHIPLAVTIRVLSPPPSVAPEGTLVEPGGPIRFQCVAVGRPKPLVSFSWVPSASAEPGEGPVQLSTEPDSNGEAHRYVSAETETRTNTKRRLLCEARNDQGQVQAEQLFQVLKPGGAPRDVSAEVDGDNRV

SEQ ID NO: 130728 - protein, 295 aa, Heterodera glycines
MDDPRGHQMESKSEIEWVIADGSENDVRTVQLKKEKQTDETEEEKDEESSAEQKLPSELDPEFVKTYLREFGHLKHNENGLSHGVKHFQRFLGYRQTGNVDLGTLQKMSWKRCANSDEGYTAQGGGGSMNYGICQDYFGVKKNAGNLALKIESQTNFLAKLPTENGTCITGLFRVEKNIGSGFGSGRPKNHRVGFRVEKKAGFRVSGFGELIAQAFRAWEIVIKIDFLETNNADNAQIIFTFESDGAKKEKSKNGEEEKEKEGKTGKSLSDLISTDRLVKKTEKEILIILAKNKI

SEQ ID NO: 130729 - protein, 157 aa, Heterodera glycines
LAIAKASSPPVARIVLNADENWSTFQTQEEGKIDIFVVLLHEIGHALGLRHSGDEHSVMFPMFERSVGEHLPVISNDDVEHLRALYVLFGNKNDGPKLRVKRSSSVASSASAAGAIAGGANANSNANNAFASFYADDDNTVLCCVCPAPMTLGDLKK

SEQ ID NO: 130730 - protein, 53 aa, Heterodera glycines
MALSEMPNQIDTIIRRIEKEITMNEQDKEQQLFAKIFAYARTQTNNAFNNFFQ

SEQ ID NO: 130731 - protein, 16 aa, Heterodera glycines
EAIPEGFGLPINLGAS

SEQ ID NO: 130732 - protein, 209 aa, Heterodera glycines
MTQQHIGLMKSSDPLKKQIMQKMIFNSKQIEKGRQAIGMNQRTVGHLLAICICCIAITFAKSNDFQKMDKIRLRQLLLYEFRKNSTPTQALRNICESEGNDALSLSTVKRWFTKFREGNEQLEDEPRSGRPHALDSDDLEQHVQQHPCSSSRQPAAEFGVHQTTVLNYLHQLGFINKKGAEVPHALTQQQKHQRVVTCTELLARLSAGM

SEQ ID NO: 130733 - protein, 477 aa, Heterodera glycines
DRDLVQNRVHFPKNFGRENSEDRHRIQKSVFNRSPISPSQTFSTEKSIEFFQNFPPNQIHFCEEEKQLVDLYRATTTQENAGKDVISSQLNPNSRPQFERVLNEEMVNQRRSPISTISNEINSDMKKRSPFVYEKFFNGLVQRIVEAKPIPKPSKCQTIEMKVQNWKAKSIIDPNSEINFINPEFLFKMSVSDKTDFLKWSFQPKCDLTGLPYEFATYKGQKIPVYGLVNVPIDIGDSELETWCMVTKIPLEYDFILSGNLLKLLENLKRDEDQANHGHANPQNLQTSPKFSAPPKPQLRQYKKVGQSSSKMWRQNRNSCPFPLNFQRMDKSKTEFTNQNHLKQFSHFPTKIFHSDPAQFSPKLQPIQPRTFLNSKFKKAKIEKKAFAQQLRPPSLLSIRTHIPQTLPVSNMSDNYNWTIPEFARHSHPVSQNFHFSNSLMSQQCRRCPTTTSARRPPWFVAEGGQTPKRFAGAQLV

SEQ ID NO: 130734 - protein, 99 aa, Heterodera glycines
MGMDHGQGPQHQPWELDPPLPEQHLEIGPQLPAEWAYQPPPQWAQVVHVEQQPQQQQHYHHHQQQQQQQQQQGAWDEGCETMMPHALDRIQDKEYGQYQ

SEQ ID NO: 130735 - protein, 52 aa, Heterodera glycines
MSERQLAGLSMLGINKVPGYAFYRQRGQALVAEVESDPEKELDVLVTHTPPL

SEQ ID NO: 130736 - protein, 251 aa, Heterodera glycines
MARPLRGLGLNSSAFQSLGITQSTCIPITNNKSRRFFCIPIAGTQFYDLSITSLGPTHQHSSHWDSFSCISINGTQPSSISITGTQSSGIPNTGTQPSSISITGTHSPAFQSTGLNPPAFQSLGLNSPAFRSLGLNPPAFQSLGLNSHAFQSLGVNPPAFQSLGVKSTAFRTLGLNSPAFQSLGLNSPAFQSTGLNPPAFQSLGLNSPAFRSLGLNPPAFQSLGLNSHAFQSLGVNPHFNHWESNLRRSEH

SEQ ID NO: 130737 - protein, 251 aa, Heterodera glycines
VARMAKEEFGFEQVSVWNDTFASFKVFDNIYFAGAFKGADGISQQFVHIERYMQNLRSYQKLYHQNEMYLKDRLTGLILTGWQRYSHTTPLCELLPAGIPSLARQAIFVSQWMNKREERTDQFMQEFLNCSVRHSTSATKFVRKGFTFPFVFEFKFCDCQFPGVELYSEIEELNLLRWKAAIERYISSNETEKETQNELEKMEEEFRKLRKTIASLLGHFFYEDTVDEWLAQHDHLNRFNDDDLGLPPPNR

SEQ ID NO: 130738 - protein, 67 aa, Heterodera glycines
MASDGQALAKWLFTHRPDNVAKVEMFCSASTSVLAKNGIVQNSFCQCFISRQFHHCHQSTVTIRRAN

SEQ ID NO: 130739 - protein, 108 aa, Heterodera glycines
MQTMELALLGEKPAEKGQINLMGTQWVTKDQLQQQMQEILSDDEVPHPILLTRSVFSVTINEDGRRECWRICKTRASAVKIVVRDGGTGLFTVNGQHYCTFRSLLARQ

SEQ ID NO: 130740 - protein, 55 aa, Heterodera glycines
MLFLKMLNSFLTHGSSWEHSGHFPRVTLCDLKIRQPNERFHEFTVQCVLVANFVS

SEQ ID NO: 130741 - protein, 21 aa, Heterodera glycines
GTHAFRRSRFGAPVSAPARFS

SEQ ID NO: 130742 - protein, 220 aa, Heterodera glycines
MSIVQDEEWKTHLGQCMFNVRARGDQTNAPTPPSSLAIFKLTKPEEAQKTEKASGATTEAKDAATLPLASSSPAAFIQVGPWAYPLEPGKTAILKNELGVYVMPNPSPDHPNMFVGIILPRGLAPGLESEFVYALKQFAVLNSSDIVDRMSEEQRERTRYLQSTPAKRRKIEKYRRKCLSERIAQFLIRTGQYIALNTQNAAQWTGEYVAKMGEQYRAGM

SEQ ID NO: 130743 - protein, 19 aa, Heterodera glycines
FQANILFLVNFGIYKMKHL

SEQ ID NO: 130744 - protein, 57 aa, Heterodera glycines
MYTEEDAEEFEKLSIENLPQNKVSELNMQNVNAASTSAAAAGGSFNGYAKMQLFLSV

SEQ ID NO: 130745 - protein, 276 aa, Heterodera glycines
NNELHILHFYESNVYPFAVEIHGDFARLGRIISGNAVGLVLGGGGARGAAHVGVIKALRQNGIPIDMIGGTSIGSLVGGVLASDPYDQDGLEQKTHFWFTGMGSVWKVLMVRCSFLFVSIKPFVRTSLMGHYLLDGGYVNNLPADVMRSFGARTVIAVDVSSADEKDFHNYGDSISGFWAQLRALNPWSTKLRILTGQEIQDRLAYVSSVRQLEMVKKAPYCNYLRPPIASFLTMDFAKFESIRRSGYRYAAEIVPNLVMTNAHLKTLISHEKMHE

SEQ ID NO: 130746 - protein, 234 aa, Heterodera glycines
MGKDETVTAQPTKKKQRKSSEMEGRPSSPSPVQQHRPSTTSSSTSNTTTTKWVKEGNTTAKSGANSTTAKKESALPNVISQITVPFPNLKNFKIPKVIENADPPPSTSSAPHFVPNKGGTTELQQQSSQSSLASSSNEKGSRSKFGPFKSSDHFEQRRPGGGAKQSKGAGHQHTHYQYNDKYAGGGGGSSSFQPHNAYSRQRAPKQSQAGGGGRHGGGNSEQPRKQHGAAPSTT

SEQ ID NO: 130747 - protein, 278 aa, Heterodera glycines
MGAGTDDAESQQCETVTRPSSKLTGRCSPNPGNSLSSLTQQNAFSTTSDQRVRPIEQKNVAGGNTDSSHLAQMSVEQQRQRFGMNVVYRQQQPKQPIAPMGGINPTTGRLIMASSHFVKCQRWNSGQRRPRKPRKPANVSFEQREGIPRSPFQHSESHPTIGKIPPLPTTPSNYISPQIEEDFRSKMMSVYEMGICESSTDDEEMDPPPPPKELMAHNQSESSTTDQKTPPEIDERAAGTVENSGNAAKKGGPPLAKCSVSSSQSSGGDQTAVADPPQ

SEQ ID NO: 130748 - protein, 276 aa, Heterodera glycines
KVVLKKVNVSEDYVHYFNKFGKLGQNYFIGINENDEATKSYLPYINCQKYNKNDCDKGRSDGCMKTVKCVVTDPIRGSQQLGDIIEPSLMDCWQHEERQLAECKQQDKCVADVRKTGQANQSSLFCCCRTHNCNRQMVYAEEKYIGPSTTTSSSIVDFPLSVGFNLLQLAIIFFTVLFIAIFVVFILSMPKLRKKICKRSGTAKFFLPFYRNTNDGKDQRKELLATEYDGQITLPDGEKVHKEKITLHEVLTVKRLIWSIFFSRECPLVALAKCTK

SEQ ID NO: 130749 - protein, 21 aa, Heterodera glycines
MRTRPIWQVKQRLLTSQKKGF

SEQ ID NO: 130750 - protein, 86 aa, Heterodera glycines
KNRFIFVFGAVPPNRCAQIYGETESFGNSFPIACTLILRWIFAPHNCLSTPNGHLKKSIFLFSGQSPRTDAPRFMGRPNPSGIASL

SEQ ID NO: 130751 - protein, 210 aa, Heterodera glycines
YKLIPIKLANFVKTFGLEIEGVDNKKYFPHKFNKAENYGTVLDTLPPMEDYYPGGLFPAERAKFEQWYDENRETGFELNEVIADYCKTDVQILAHGLVKMRQLFLSETRHDITDSVTIPSGCMKYWVQLAHHDKERVAIIPHLGYEKRGKQSTIARKYLKWRAEEELRENGRVLRHVESPGGEFKFGNYSLDGMMERPDEEKNLAIEVNG

SEQ ID NO: 130752 - protein, 307 aa, Heterodera glycines
MLEDNTAMKAYFDNCPDSGPIDFHDAFFGGRTGPEYLGASVINPETGDWKSRTIKVKDFNSLYPSRNMFTNYPVGHPTVVQFDKDVEWRRPEDVVGDDGIRLEGIIKCFVVPPRHCHYDIPVLPYRLNNRTLFPLCRTCSEMYPRGLIDPEYNCNHFEDSERGFSTTVTHIELQAALRSWYKVTHVYRAYIWPLACDWSNGLFHSYLLKFLKMKFEASGYPASCTEAGISEEESARRKQDHIDKAKQKAQVHLEADRIKHNPGLRYLSKLCLNSLWGRFALRNRLTKTEIVECHSELAKLLNDQKFE

SEQ ID NO: 130753 - protein, 218 aa, Heterodera glycines
MFFVTATYRGYCPAHDSFLYKSWLGMLNLTRAQLNDGVPDQEHPKREHQSPQKQYHLDVPLEELPQRLKMWIVPSGAGDVNADGYFQVKRIDARIWVSNEPESDSDSSSVNGDATSNGNNNKVPLSHSFAAWFHEMVTTFHHSNILSDERRTSIQQFVDELQQGFRTETGVDSLQIKLFGSVLSGFGSNDCDIDLCLINTGITKQEKVQQNGVISQEV

SEQ ID NO: 130754 - protein, 59 aa, Heterodera glycines
TKKTLNEFGNKVISAEWKKLGKMRKLYYGIGNFKTDQQRFYELLTECISLLTETDTSNV

SEQ ID NO: 130755 - protein, 95 aa, Heterodera glycines; identical to SEQ ID NO: 125597

SEQ ID NO: 130756 - protein, 86 aa, Heterodera glycines
MAIRERRRRRVISAFTERKDKKGKSGLCPPSDKNEGKVEQKAKRTDGPANANGQKESEGQLVLDESSNQEDEVFVEAHPMQPVTAD

SEQ ID NO: 130757 - protein, 41 aa, Heterodera glycines
MHQCHCPSMFASDRKTLGKSVTDQLISGNPSLISGQSSLIN

SEQ ID NO: 130758 - protein, 278 aa, Heterodera glycines
MDNKTLTSEDNTLVEWHNEIDAQRSRSLSARRDKRPEAPPKPLEWRCTKCSHEPFYTPRGLSTHMQRVHSGATHSPVRRPSIRTTIDFTAASPEPEEPKAAEPPTEVPQERWVDPLPEKLQFQQQENKFAELKCKYSRANAKVRWYKGRKELFSDGLKYKILIDKQSITLIINNPDPDDSGKYKCEANGVPTNSFFTVEDTPKGQRTRSGTAPGKSRRLAPVNNAASAGQSADKAHAQIEASFKFEKLIFVDGLSTDQLTSDGLSTDQLVMTDCPLIN

SEQ ID NO: 130759 - protein, 59 aa, Heterodera glycines
MSQSLVDLMKHLLSTGEDADVYFLLLSAHKLILKHTSEVFAAMFRFDAKNEKAEFGKKY

SEQ ID NO: 130760 - protein, 61 aa, Heterodera glycines
NLSREFLRTLIYKQFVHFCEIYTQFKNVDGCFLAKNSFILSLFFCLCFLNNSMEKLKISMG

SEQ ID NO: 130761 - protein, 312 aa, Heterodera glycines
TLPRHQQPPPAAPQVPPVPPPRRGTKRRHPPENGDESGELRIRKRVRQARRVRVYYSPEPGPSTSAQSDEQQQQQRELFAIPSNQLTMAQRIELIYIKCNRYADPEKMEMINTTLDKLYNDPSSPAAFAGVSALWKEARKKLKQLRKKDVQHYLEGHRTYTLMRPRRVRFPRAKTVAAGFMTDVQVDLADFQALSRHNRGHRYLLVAVDVLSKCLFVVPFKNKKAEEMLEVFKELIEQMPMIPHRIFSDKGTEFKNKLLKEFFEEHEIKKHEPVHSIEKVYRKRRKPDGTTEMLVKFIGYPEREWIDESQIV

SEQ ID NO: 130762 - protein, 252 aa, Heterodera glycines
MFPDDDGYESEDDEILLPPPPIPPQLGHPPPNVPAVRVQPMHVGQQRLPLRDLPQFEDHPQNVPAVRVQLMQQPLPLRDLPQIFHPPPNVPAIRVQPMQQPVPMRAVPQFLHPPPNAPEMGVGPIHDGQQPLPLRALPQFAQPPPNVPAVRVQPVQQPIPLRDVPLFVNPPPNVPVIRVQPMPQPLPLRDMPQIHHPPRNVTSIRIKLWLLFLSLWVFLQGIHVRQIQREYAVPQFAHPPPNLPYHPPENVP

SEQ ID NO: 130763 - protein, 267 aa, Heterodera glycines
MRKLRYPNNVGKRPEIAGETSKARKEVALDGGAFVGVEIDAEKMVGKLNFYAAGILYKEKDENVQPIEKVPDEKVPIGKWHKFEGQEIELMPREIDMTDENDNICIEFLALADADEMKDDAHFKMDDKERIQAKLGKYICKNMKENEKNKQKDPKKLNCKFDWTTVDDVQFYAEEAMGEMREKFGITYKKLAESFLSDDLADLGIKGKSSNKIYRTKDEKFLLKQIPQPYQMETMERTLKDYLKHMMQMGDKSFINKIFFVFRVEIE

SEQ ID NO: 130764 - protein, 56 aa, Heterodera glycines
MGHCASKDQKDQKRHNRRIEEQLRKEDFAQRWLLKAGFAADKACGVEVRNGICSVL

SEQ ID NO: 130765 - protein, 83 aa, Heterodera glycines
MGFGPFGAVVPKSGAMLFGAGKTVADDRSPPKRRRRDMAGQNVAETKRRRDRTPPRQNVAETKRRRDKTSPRQNVAEKKYSKN

SEQ ID NO: 130766 - protein, 32 aa, Heterodera glycines
HLELCSKRYQELKNIVIKAERRLLNVLGFVVH

SEQ ID NO: 130767 - protein, 33 aa, Heterodera glycines
RDVLNVYNRLKQIHHRRNAVASQQPEDLQKLSK

SEQ ID NO: 130768 - protein, 419 aa, Heterodera glycines
MTFGYNPNVPAEVILLPVHFPGHWTLIVHDVQWGTHFADSLPTPYGRLDWQLTDKIGKIISDILPSAVLTGIFNAVNLTVQHDGNSCGYFVCLYAESWLMNNCTFVLPDLNINYEKKRILWHINELYGSDIVPFHPREGVSTSFAVVSHHNGDVAQTSSKVIMPMEVDDSAVLPSSEDTAVLAQAPVIGENQADTHGVVADTIVQQEPIAQADDVIFIRPKTPPRRSMRVQKRLSASVSRSPSPAPKRPPPANSLGVATPITRRCSAFHKGWQCAAAAAKHFPEYCDSGKLGDKKCADCGAHLFSHEDSSICCRKGRVVLPMLNPHPDELKELIVGNKQSREGKEFVRHMSRYNNLFQFASVSAGNKPSPAGGPMAVILNGEFHRRISSMQAGTTQIPGFGQLYILDPVEAMEQRRNNP

SEQ ID NO: 130769 - protein, 29 aa, Heterodera glycines
MGCTMSQEERAALERSKMIEKNLKEDFVH

SEQ ID NO: 130770 - protein, 55 aa, Heterodera glycines
FIFKCQCYSRAVPSFTFEFAHFSFGLAGCWEVIWHSFPIWSHFLLQIHFKILIYP

SEQ ID NO: 130771 - protein, 290 aa, Heterodera glycines
ANPSLVMLDLSRNELIDLSPGTFLSQLNLLLVDLSFNKIVRTPFGAFGRRIATVLLQENPLVCVEQIHMLQQGNGSLSADQIEDNASEETEAAEESAFVQQQSTTPPKGSTDQFAETIETTINGHKMGKMPNIRPIQIGHKQRQKAATTQVNAVPSADGFVAESSPSAELTEQNAKLMQQNQKNNGAELDQFSLEGNEIRHQQRKDSKVTKEINSGPIPLNEKIENGEGISKVRDRTAETESQTATDTVIGELTDAPSSTTVDPRNDPAVIYPHPVPFLATGPKLHTAHS

SEQ ID NO: 130772 - protein, 66 aa, Heterodera glycines
MFIIKLCAASNSLKLHNFMLIILFVIYYFVEKQSKANFRPFRNLRLNKRADSGLKASLMFIRTERI

SEQ ID NO: 130773 - protein, 268 aa, Heterodera glycines
NDDGIMVNNKVCGAHHYRRRAPSIPNITIDDYSTTNNNNNNNDAGVNEAVNGGKMGAAIPLPAPAIPLPAPEGMNEDNQIVDQQSSSVIENWAFRAQEYRKSAFDTSLEPTDPEKSPVEHQSQHQNNEALNQANKNVVVVVDNDRNSACERAELDEHVEEKQHNYGIKQTTADDIDLLQLLDETEHLTEQLRSERDGLMLNMQRILARCNTVNISIETPRDQHQFKALEQVNKMIQSVLDHTNGNIAESKQKIAAFLNACHPDEVGRY

SEQ ID NO: 130774 - protein, 39 aa, Heterodera glycines
MPIRKRKCQSENSEKRMKNDVTICFILEKTELDIRHLSD

SEQ ID NO: 130775 - protein, 36 aa, Heterodera glycines
MQNSKVECRRSADGAKSRTQESQTRLEKSLGFKNQR

SEQ ID NO: 130776 - protein, 257 aa, Heterodera glycines
MSSGKGMVVAVEPVAEHQQQQQTDDSIAEEVFSEDIVSTFKPSEKSLHSILSLRSNSMSTSARDSMGKLRRDSASEALLKLRTMNCVPELRSPRESKSPPKPLRSPRGIDRFMAKFPHNSSREASFSEELSVKGEMLEELPNASQIGMLFDVSGASVEGTLSKLDSTADSKRGQSDIFLGTDFVESNKMERGNSLGGFGVPEVCSAGVKARAEKTSHVQLDTNRILLAQFVYDHLNIWPTQEMLMETDLEVIKGLRI

SEQ ID NO: 130777 - protein, 225 aa, Heterodera glycines
PQIPPSPFPPVPPLPPSPFPSLPSFPLGSFTPVPPVPLPPLSPEVPPLRPSPSPEVPPLRPSPSPEVPPLRRSPSPKVPPLRRSPSPKVPPLPPSLFPSVPPVPPVPLPLLSPEVPPLRPSPSPEVPPLRRSPSPKVPPLPPSIFPSVPPVPPVPLPPLSPEVPPLRPSPSPEVPPLRPSPSPEVPPLRRSPSPKVPPLPPSLFPSVPPVPPVTMPPTFPHCSRV

SEQ ID NO: 130778 - protein, 60 aa, Heterodera glycines
PVPPLPPSPFPSLPSFPLGSFTPVPPVPLPPLSPEVPPLRPSPSPEVPPLRRSPSPKVPP

SEQ ID NO: 130779 - protein, 220 aa, Heterodera glycines
MTNSQTVGAEVRGTRSGEETSGAEVCGTRSGEETVGAAVRGTRSGEETSGAEVRGTRSGEETVGAAVRGTRSGEETAGAEVRGTRSGEETSGAEVRGTRSGEETVGAAVRGTRSGEETSGAEVCGTRSGEETAGAEVCGTRSGEETSGAEVCGTRSGEETIGAEVRGTRSGEETVGAEVRGTRSGEETVGAEVRGTRSGEETSGAEVRGTRSGEETIGAE

SEQ ID NO: 130780 - protein, 254 aa, Heterodera glycines
KKRLEQLCAEHVLEKKRLEQKCAEHVLEKKRLEQLCAEHVLEKKRLEQLCAEHVLEKKRLEQKCAEHVLEKKRLEQLCAEHVLEKKRLEQKCAEHVLEKKRLEQLCAEHVLEKKRLEQKCAEHVLEKKRLEQLCAEHVLEKKRLEQKCAEHVLEKKRLEQKCAEHVLEKKRFEQKCAEHVLEKKRLEQKCAELVLEKKRSQQVSLPQRFGNWLLSMLQGPAAHQLFFELMSSENFSVRAAPTDVPPMSALAPSL

SEQ ID NO: 130781 - protein, 417 aa, Heterodera glycines
MTLSLMLGLKILVSFTHVVRVHDVVETHRLRQKKAAVMETGDAKQRIAEKKLAIWSGHFSKVLLLFCTHPFSSPAAAAAEKSQSKENPTDHFVGKELYLRNAKCRLSEHELSWNAFSYCKTELTNPDYRKDDFLIRIETMHLSDRGTTKNALGLSKGVLNERKVVCIDIANDKISECREKCPPVGIMDRTAVYDQWAAKEQMIKGTAPEHSSVAHQSERRERRNSRSSSVRRKVERVPHTSAPTVSSPERVPRTSARTVSSPERVPHTSAPDVSSPERVPHTSAPDVSSPERVPRTAAPTVSSPERVPHTSAPDVSSPERVPRTAAPTVSSPERVPRTSAPTVSSPERVPRTAAPTVSSPERVPHTSAPDVSSPERVPRTAAPTVSSPERVPRTAAPTVSSPERVPRTSAPTVSSPE

SEQ ID NO: 130782 - protein, 63 aa, Heterodera glycines
MDWININLNKIKTKFFQRLTGDPPLGFKPSLSQKSRQCTSKRLKKANDKNEEIPYQNYYFLFT

SEQ ID NO: 130783 - protein, 101 aa, Heterodera glycines
  unsure (1)..(101): unsure at all Xaa locations
MIGRAVRNRPFIFEGIFKFILYPRKMAISFFEKFYTSQKRLRMRRRAVHNRHFISQRIFIFRGYPRKMAISFFDKFYTHTNALEHDXGGRCAIYLLFLREF

SEQ ID NO: 130784 - protein, 45 aa, Heterodera glycines
KIPSKIKGLLRTALPIMLESICMCIKFIKKRDSHFSGIEYKYKNP

SEQ ID NO: 130785 - protein, 38 aa, Heterodera glycines
AAANRKLRNDVATECANVAIHRQQQQQQKNGSAIIMQT

SEQ ID NO: 130786 - protein, 70 aa, Heterodera glycines
KGDGAAAADKKEEKRKDKHKSKEGKSDDSNRRSKKDKHGKKDKKDKKKDAAEPAANAGEQSTAETTQADE

SEQ ID NO: 130787 - protein, 39 aa, Heterodera glycines
VRLGYSNNYGEQKSHAELSTGYREAIPEGFDLPINLGAS

SEQ ID NO: 130788 - protein, 53 aa, Heterodera glycines
IYQSAKNRMRSNPKKNGLSKNRNYAQKVSQTILALPIPSTIAFIHPFMSAKII

SEQ ID NO: 130789 - protein, 141 aa, Heterodera glycines
NRNYAQKASQTILALPIPSTIAFIHPIMSAKIIRVPKIACDLSLAKNGVSKNRNYAQKASQTILALPIPSTIAFIHPIMSAKIIRVPKIACDLSLAKNGVSKNRNYAQKAPQTILALPIPSTIAFIHPIMSAKIIRVPKIA

SEQ ID NO: 130790 - protein, 95 aa, Heterodera glycines
MVRIKQSFPSEDQCSSSSLHDNDSRPSNDQTGSKLPFKKADEPVQSSGEKKRLKTFENEHLNKKRKLQDTEQENVINLDLIDLEDINMDMIDLNE

SEQ ID NO: 130791 - protein, 37 aa, Heterodera glycines; identical to SEQ ID NO: 127515

SEQ ID NO: 130792 - protein, 102 aa, Heterodera glycines
MTHLVPKLRSETAEDFEQILLFLCQVRLTITQFKDCDDKKGPSRAGLSISVLQKRCRRVGNLDFGKATYSGREIFKSSPAKNCFLGILSTCSFRPTAGQVRQ

SEQ ID NO: 130793 - protein, 136 aa, Heterodera glycines
MYRNSDFFHFYSTMVPPHPQKYNKVCTHSFNTLCRKSQRLLDEEIKKSSTKQFPISATHFIFWICEIIPHRKDSDSSRSWIPPIHCHQSSFVITRRKAWPLCSHLALSLALCWLFSPPIFSFGNPPPFAHSSKGSE

SEQ ID NO: 130794 - protein, 142 aa, Heterodera glycines
MGSIDAPEHTSPWTVLLIFTTQCPTGEKLQDRCTGFIVSHDLILTASHCAFMSYNEIELRCRYEAETHKQCKKGEGYHCEEAQMKNENTNDRMGKMVVLNSLAVTEVESVNYLQENKQKHEYSVFNSIQLTFSVEKIYSETK

SEQ ID NO: 130795 - protein, 75 aa, Heterodera glycines
MKATNKYLNYRIVKFKGEAILQLCVFGPGWKRTCRVGYWIFKKLGPGTGLEKAGYPGLDPVWYLDPSDPSIYQKC

SEQ ID NO: 130796 - protein, 40 aa, Heterodera glycines
MALFESRGIVLQQCVDFDRRRRRTYQRMHGCFQRWFVNGP

SEQ ID NO: 130797 - protein, 21 aa, Heterodera glycines
ICGQSVVQAASDVRGCERPHA

SEQ ID NO: 130798 - protein, 177 aa, Heterodera glycines
PIIKNCVAVVDLKIPLDIEKIYLISPSTKYNPRKIHAVIMKVYNPNATAIIFSTGKFVCTGAANEKECRQAAEQVTERIRQCGYYEARIHEFAVKNLIVTADVGFHIRLGPLSDFLRAKYCSFTPELFPGLVYRNKSPKVSIIVFSSGKLNITGSKSKTEIDSVFNKFYSLLCNFKH

SEQ ID NO: 130799 - protein, 79 aa, Heterodera glycines
MDRLDTIIASLLNCSARNLCDRLNHPDEIQKVEKYLKGKTLQTTYKNQLESISVFDLLPVIFNFPLEKTMMETLGLLFR

SEQ ID NO: 130800 - protein, 379 aa, Heterodera glycines
LRFRENVQADAIRYVLERGDSCFTEYIGRNGGFQDIIIGSECAEEYVVAHETGHALGYWHTHEYVVAHETGHALGYWHTHQQRPDREKYISINWRNVLEEATASFMPFRSMLQAFGIKQVGGFLIRYDYGSLMHYHAVAHARQVSDFTIVPKELKYVTTMGTERMAFLDAKVINGCLYKRMMCPGHTLRCQSGGYPDPNNCNVCRCPEGLGGTECERLQPSNCGAELQASDQWQTLRSPNGKDIQCYWRITVSEGSRVRFRLSDGEFPCSYGCQFPCSYGCQSYVEIKHKLDVRLTGFRSYVEIKHKLDVRLTGFRSCCYRPKEDTVSDGNQIFVIFRPNGSCCYRPKEDTVSDGNQIFVIFRPNGRTARFSLRFIRQA

SEQ ID NO: 130801 - protein, 40 aa, Heterodera glycines
MLKLLISLLILNVQTNSTADNLPRGPDNPSANFNKLFFFI

SEQ ID NO: 130802 - protein, 332 aa, Heterodera glycines
DSSGGKTVIFSGDFKQSLPVVPHEGLTAQVTACFQTSPLFGQFTTMKLTINQRLQGQQAYLQMCRQIGLGETGEHWIPPQFLVKSKEELIDYVYPNFQQLLGNDKELLNRLILAPHIDTCDEVNEIMMANVPGQVREYLSTDKPLDDRPLDIDEIESEVAALNRRTDSGMPPHSLRLKVGCVVVLLINKSDKEGLINGTRIVLEELGDDRLIGRVINSNAIGGQVRFFLKEHEMSMKTNRLAIKYERLQFPIKPAFAMTIQKGQGQTIRTVGIDLEKEVFSHGQLYTAFSRATDGNNVRVHAPNREIDALGRAKVLIIVATHMLKLQMSNSP

SEQ ID NO: 130803 - protein, 49 aa, Heterodera glycines
MSPSICPCSVPTTNFCFSPAFPPKCHRRRRAKMRKHFNTSTTAMCSFFS

SEQ ID NO: 130804 - protein, 392 aa, Heterodera glycines
MVAKTPLQALLGIFLLRSGVASSLTAAQTLVEVIVKAQPKLELCMYFGKRGDQISSGKYPTEEDQRKALEKWAGSCYVARQALAATGFNPLEMEEPEGVNSLPESEKLKWKEVFGQSAWALECVRATVVHKAGRFLAHQRVLLGDSSAAALSQYIPNSFCIGQEGSMADIIRQFQPTILSSRVKAMLIITGRDSLVAGETAESIAEQFEMVVELCRRFSHVKIYWCPPPYVHNKSAEYDQLIDKMRALINNGPIISICITEKGRSVLEIFRFGDHFNKYLVTDDGKMRNPGCKILKAWIFSQSSFPGDIELSVRTLKSAVGVPSRDQADPRSDTTTAVPRDRVGPRRDQNPSFRILHGRRGSVRYQPYQGHLHGPARVRDSDRRNDGRPHRR

SEQ ID NO: 130805 - protein, 80 aa, Heterodera glycines
RKKITASNELVVEQDEGVAKAKPPNEHRYKRAAKDENENDAFGEDDGDENDYDGGEDEHGIWLNWRAKKRDNQSNKLGGG

SEQ ID NO: 130806 - protein, 524 aa, Heterodera glycines
MESLNMDAGLSLNSSGHSTFALAEKENQIEQMRRKLRVLESDNAELRTTLPRLKDAQGKDCTGEMIKMNKELLSAKEQCERWRTDYMELTKKYDMFEKSTITQLDQKDKQMTQLRHQAMEMEEENGKLREKLENEKSRVWHLQRGEFEDQLATPKAVQNEGADDQLSTPKAHNQMLANIMSKIPQNVDVVEDTYLCNVDDAEQLAAHLLMILETLDKNFHNANELQNDIFTFLASHSICSNNPEKFALLNSVYKKVTDNRLAQIRAGNEQFRSNMSTSTPEMDNDQNLTSGSFFAGNVTCRTSTLLEVCVRMFEKLRGTVEFFQNLLKILGVSAEELGEDIAKKLEAMKLDLDVSVGEAQSMLSEGGGLAAIEDSFAQCRVEREQQINDMKVEIETMRKSQQDVEQKQFKLEQSLAEERDRMLKVTAERDAFARELRDRETEVERLNSEMKELQKQTEELDRMKQMLQSEVEKMVGHCQNSSQKHIHNCTFFKDQLGTEGESAGAQSGGVGQNFRHDVSVLNAY

SEQ ID NO: 130807 - protein, 104 aa, Heterodera glycines
MKLVHPEPLPVERKLLMKTLNCANLCVFPFVRVEPPTKSAEEIFLSSSSSRFHQQHQQQRYTFRAREICEALLQDDDDEEQFGGPSSVMERNSKFGQTQNGWPN

SEQ ID NO: 130808 - protein, 174 aa, Heterodera glycines
MERTTVIFLLSTTATTTTKLSSSSTWITTDVEETGTDDSSSSSNSSSSSSQSVVVVMPPASDQLQSSPVIVPFLPPIGALITIDQQQQQQQQQFHPINNYETYCSVPGRLTLLSNQKKYRVSVGEIQRRLAPPECMNASILGGILRKAKNKDGGRLLREQLHVRVLGNFGMCRI

SEQ ID NO: 130809 - protein, 203 aa, Heterodera glycines
MSTDTLKVQLNGWEWVRTFRAQAKLHAFVSSCNKRLHSQRGQIDQFSEATLGRVQKMNNIMGDQKESTSSMRVHLNATLNDAQSMVDRFAHSDYKRVIATGVTPVRRRNSFSEELVELPPAQELIQSQQQLCTPRRTSFYRTRDSILDSSDFLTSLLSPNTLKENMNSTKMDEAGKLETIGESIERTASSTLSCSSRTEKRGK

SEQ ID NO: 130810 - protein, 85 aa, Heterodera glycines
MATAFTDGANFGGISAEEPLLISEVVQKAFIEVNEEGTVAAAATAKNVRYCSSSPGKEYRFVADHPFCVFLTRDDTVLFSAIFRK

SEQ ID NO: 130811 - protein, 157 aa, Heterodera glycines
GQRVSGGRPLASGAAPSPDGHRVDGLLLSRSRTWEPPFFLYPNLLLGCVECFPNRQQRLAAGRTAEDLYERTVRRLWELEHQHGCELHTVWACEWKERLRRDPALRGRYEHVFVPRPLDPRSDALRGGRTEPFKLHHVCAEGEEILCIDVVSLYPYV

SEQ ID NO: 130812 - protein, 59 aa, Heterodera glycines
MPIPGVLSQQIRGRGEHSKGCESVGERSVIARVGPLYGEGDRRSLVCDAILLTHRFGAV

SEQ ID NO: 130813 - protein, 20 aa, Heterodera glycines
MKDSKVIVAINKDKDAPIFQ

SEQ ID NO: 130814 - protein, 321 aa, Heterodera glycines
ESGKERARGTDCGRESGRERGREQKVELKVEEEQKVELKVEEKVEEEQKVEEKEKVEEEQKVEEKVEEKEKVEKEKVEEKEEENRKWKRKRKRTESGRERECGKESKRNRKWKRNRKWKKNRKWKRKRKWKRKRKRNRKWNRKWKKKWKRKRKRTESGRESERGTESGRESGRESGRRTERGRESGRERERGTESRRESGSERGREQKVELKVEEKVEEEQKVEEKVEEKEKVEEEQKVEEKVEEEQKVEPKVEEKEQEEPKVEPKVEEKQKVEEEQKLEEKVEENRKSEKRKSGKERGREQKVGEKEKEEPKEEEKVEEK

SEQ ID NO: 130815 - protein, 112 aa, Heterodera glycines
MSIYLQLCGLVALLLTVQCWPNPLFPFCLGRVVDFFQLFNAVCVHGFFLVGTFFLALAHLFSAPDAFYHYNFQLLFVTFAGFGLYAFDFWTRWKRDSQLRKEHQQNQSVYIT

SEQ ID NO: 130816 - protein, 151 aa, Heterodera glycines
MMEIPDRLTNPKKTPKRTHHCRRPTYLTHQESTCTRLKCVPCKPNQKGRAMIRDRIASMPLFKNDKIYLAILDNAQFTYYFNCGMIHIGFLSNYKPKTPNDTICKIRMEMDGKASDDSGLAAVRRRGTPPPGKASEVKTTPLYVVKSYQIP

SEQ ID NO: 130817 - protein, 58 aa, Heterodera glycines
FGPRGRLGPNPKIEKCAFLKIKILKTKPEGSLVTCHKLGSINIRSCFTILLIPNPIIF

SEQ ID NO: 130818 - protein, 168 aa, Heterodera glycines
MAVAALDTEFGNLAVFQPLIDWLLINYVGQPRPNGTWSQPTFRPEQWNVYTRTLNADARTNNHSEAEHHRLQGAFNCRHPSIFHFIDVLRREQKTTDVKYASFIAGEEPPPKKRKFLATDERILNLVRLYVPMNAGNINHDHNYHNRNQFHIILEFLRGISRNYRMNP

SEQ ID NO: 130819 - protein, 233 aa, Heterodera glycines
SPVDFASQQMNEYKSTKGAVSHFVFRSAFPFLRKMEVLTMSNGSPIPHNKNAVLSVGPHGPMLMQDVVYLDEIAHFDRERIPERVPERVVHAKGARAHGYFEVTRDMAEHCKAAMFSEIKRTPLFIRFSRVGGESGSADTARDPRGFAIKFYTEEGNWDLVANNTPIFIFFIRDPFLFPNFIHSQKRNPATHLKDPEMVSWNNQWREKGIMGMGYMLWQEPPKEGLRRSGHEG

SEQ ID NO: 130820 - protein, 28 aa, Heterodera glycines
VKINRNSRVHSIVARNSPEKLQNNVKLI

SEQ ID NO: 130821 - protein, 17 aa, Heterodera glycines
CKAYNFFHCARLFEKMG

SEQ ID NO: 130822 - protein, 318 aa, Heterodera glycines
NDGMPSIRTILRLPILMTLEEASHFRWNPFDVTKVWPHRLFPLLPVGRIVLNRNPQNGRIVLNRNPQNYFAEVEQSAFAPSRIIDFSSDKMLLGRLFSYPDTQFHRLRLFSYPDTQFHRLGPNFMKLPINCPFRSRVSNTQIDGLACPDDNGGGTPVYHPNSYGRPPVYHPNSYGRPKELATANESAFSVSGDVARFNSGDEDNYSQPKMLWLKVLDEDHRKWLKVLDEDHRKRLVANISASLKSTSRPVQERASEFGKVSADFGSALQAELEKGCQSRQEQESDEETNCELKIINWHMTSCNQTTRTNIKLIAYANY

SEQ ID NO: 130823 - protein, 136 aa, Heterodera glycines
NKKASSINSLNTSFRPHHHQQAVLLPSMRLLLALCLCLVYITVSVSSSNIAVAVICMIKCERRHGYHGTLEWETDKEGLLLAAQNIGSLFMLATGFFADRINGKWMVAVGLALCGGNLTLPFVASQIVWYAFGARI

SEQ ID NO: 130824 - protein, 187 aa, Heterodera glycines
FSAELATFFSSQRYLDHSMDNIRRCREYRKFQAMQYDQRFLPDRLIFLGADLAAAHFIVHRHGSVKFVGDDHGSVKFVGDDHWYKREGRAGTYYLPGTKTEGFYVEAIDASGTELMFEGFDNLYDLEFLRMLSLRDCRWIDDWVLSRIGGMFANTLEMLDLSNCHRISAKGQVLLRKNLLHFLRKQN

SEQ ID NO: 130825 - protein, 20 aa, Heterodera glycines
MGLNSEQGGKAKAKRGLLED

SEQ ID NO: 130826 - protein, 141 aa, Heterodera glycines
KNRITLKKLLKHFGASNSFYNRLYTSHYSAKIIRVPKIACDLSLEKNGLSKNRNYAQKASQTILALPIPSTIAFIHPIMSAKIIRVPKIACDLSLAKNGVSKNRNYAQKASQTILALPIPSTIAFIHPIMSAKIIRVPKIA

SEQ ID NO: 130827 - protein, 168 aa, Heterodera glycines
MRLLDHYAQFFGLDSPPIDPSKTLQRLAADIFVWYNRMESKPRSIGGANGQQFADFLYFYCRIFNDSLSTEIAREASFMFSSFVDETFKFVEKMEKKKLDDPNFEIALAEMIHSVREKGKLGWIESGDKFNEPIEAIKAMHFAELNKFLTNKKKQKNLYGKFAAILAG

SEQ ID NO: 130828 - protein, 143 aa, Heterodera glycines
MDNHNNNSNNGGGSNNGGRKPPPSRTGRKRLHENSSGGGGSNSANIFVGGDTSSTVRAVSSRSRQPQQHNNYNDLELLLIGGTEDGNSTAPQPQHAQTVQRPTGTENGRQMLAVNSASHGTPVDGALPNVDGGGSGGVLAQRN

SEQ ID NO: 130829 - protein, 397 aa, Heterodera glycines
MVSAHYSTLTTAPPFESTSTLSTAVPSVTSSWYSTITRTETMTTTKTNPWTTTTWAPMTTTKQRWTPTMSNSASTWTTRRTRIQYVTKARSQQTDATTPPNTIKSAKSAKRDLGTNRDGADVFWCSDRGSTIWELKGPENSPFCRPPPSLTAEWHNLAIELYAKSIRPEQIDSAWHCSVKRTTENYYTNLLGDKFVTIVKEFPPVNKRICKQMALHQECPYAKSEMINHEGQLWSTNDELNVNFPGPISGLFKGEQTSTATNCFVQPATIFVKRQTLQMLSPVHQVQNCQYSAEFCQLPDNTTLIWKSTCSGDECKMCDYDRAEIISGKFTAAYGETVATWISDDHQKALTFAKKAPELIACDGVRIVLSEQNFGIAKDQYDDITSSVDLPRMATRQ

SEQ ID NO: 130830 - protein, 305 aa, Heterodera glycines
MSGPIQKGIINALKTLDNAKSATSLLQHPDPDLSNWENAINLEAQFDRVVKEIRTTEMQMDSLRDLSNAWIELLARLTGDDKDNDEKEYIKFDKNEKIAERYDAASTKLRDLRDLEATLSAAAKLHRGRADREAKADQLANPQQQPPMPPAMAAPMTMPTFTAPLYQFQPIQLDKFFGQKRKWPEFYESFKSAIGSQSISKAQKLNLLRNLLGGEARELIAGFRLEDANYETVLQLLKDTYGAPEEHIRSLHFELANLKPCRSLRETKDFLLQLERLTRELNNAGEDIEGPQVFTSTAAAAAAQI

SEQ ID NO: 130831 - protein, 708 aa, Heterodera glycines
VHFNPICSSTAKSASTNNMDNHNNNSNNGGGSNNGGRKPPPSRTGRKRLHENSSGGGGSNSANIFVGGDTSSTVRAVSSRSRQPQQHNNYNDLELLLIGGTEDGNSTAPQPQHAQTVQRPTGTENGRQMLAVNSASHGTPVDGALPNVDGGGSGGVLAQRNVRNLNNNGGSGGVADATGALHAVALPAQQPLALTVSNSLDNGGGIVQQPNGAVSGANVPMWSLNNSAATFAALMTAGGGDGSCAARPGGGMPSMVRGTVGGGLEALPPSVREAVALVHARQRQKMVNNNIQPEFASVVPAIGENGFSNLWWIYLEWQPDMVMNRVVGLVVLAGPFTTQTDISGYDVRIIFDHHDLEHEMAMHGWQECVPRMSNICAGQIVEFTRLKVRAQGHNAKGSFPFTLLYNAESRHRIVGQSSSAVATTVFNPPSTNTPIIVEANDSNSNAISIPSGVISGSISQQGGNGLFGGGGSNVMAAPHQTDQQSGMSANAGSEQHRLIMQSDDDYDGEEQQDEQIRGSGGSDGGPAANFALTSAGTVAPRTETGVSSTPWLSATRPPTPGPSSSSTNAHARHNMQQQPRSSPPPVRVCSITAQRSISAIVRQMNTNAAAVARDESRSRDRRRLRQLNAQPRQGRRLSTPRSSRGRNTLSPRPPHNVITIESDAEEEALGVAQQQPLADEDQHFYDDEMLLIEDQIAQGLVEGQPTKW

SEQ ID NO: 130832 - protein, 1632 aa, Heterodera glycines
MATIFNPSRPCHSMMATIFIDPGSHRSFISNTAAKQLELTVLRTEECFLTSFGEREPKRYVSDRVAIGFLCPNGDRLIFNLNALKFLLNNLPVLQLNTLDKQQLQQKKLFPPHESRQPDVMLGMDVWHDLHVQPIEQLPSGFTICQSKIGKIISGTGRIELSQPSNVTFVLTVTDENVFTAEEDLKANEELNKFYGLNIIGMDDSSTLIDRDEVMKNFKENLSFVNNKYQIALPWNDRVAQLPTNYHQAKARLISLIRKLRTINLVDEYQAILDEQQQNSIIELVNSDHSCGPVHYLPHRAVIRTDKSTTKIRIVMDASAKPKSTPSAPSLNECLHTGPLLLKDLTGILLRFRRMEKVILADIEKAFLQLGVREQDRDATRFLWLANPKEANLEQLKREDFRVFRFCRVSFGLTVSPFLLNATIREHLALHDTDVAQRISDNLYVDNIMVEIKPSENSNQLVTEAKIIFESAGMRIREFFGSHIDELKELDSSELAQDLENTKVLGIEWKPRHDQLIFKMPIFSSPTTKRKILSHIAKVYDPLGLISPALLPAKHFLQIVQNLNFKWDDPLPEKMALDWIKLMHAWDGFGFNFRVEFPRHIATSPNEEFHCFCDASKTGLGVALYQLADSSYGKKESNLIFGKSLVKPLKVADHDSTIPKLELQALTLGVKVTKFVQTQLNFDDQQVILWTDSQCSIERLKEERKYDRFVNNRLKKIREARFKVRHIRTDENPADIASRGTDPQSLQSSLLWRFGPVWLTKVSQWPESNVTYNPGEEIKEVTEPPIVEWSNAVQQREEFVPAIQFERFSNWNRLRATAAHVIRFTVAMLQKRQNSEPTSSPLLTHGHPLEKGPLTAKELEMADEWILIETQRQNWPSESVITNLKLFKTKPLETLKCQGRLGNANLPIHSKNPIFLPAEAWTTKLIIVHNDRIHNHCGPRILLSKIREKFWIPRGRQTVQNALYSSRIGCLECKREKLKPYAYPEAPNLPKERVNETRPFNNTGIDYFGPLKVKRGLETVKVYVALFTCLTIRAIHLEVAEDYSAEAFLRVFRRFAARRGVPRVILSDQGTNFIAGAKVIKENWTTDLLTLEVQEQLAHQGITWNFNTAHAPWKGGTWERLIGITKNALRRSIGRRLLTFDEFGTLVVEIEAIVNHRPLTFESDREPDPVLRPVNFLIPYGSTETNFPSMATDPEDPEYTPNPNKLKTMLQKADSRLNSFWEIWRSDYLLSLRERANQRLNNERQTPNEGDIVLVEEEANPRSVWSLARVLKVQIGRDNKSRSALISHKGKEKWRAVNQLYNLEIQPEFPEIHSTAFVMSNLDNDIDSVSLAGSEDEMPQPKNKFRIPKRKRAFLRPIPQQHSPLQGPRRKRRELQDSGLRKLFCAISEPEGGSKATTEAVNESRAMEKAPQPIQKEFNEKMAKKQREKARIKTSDRLKQKLADLSSVSAQTEAEKDEQQKEREIHDQQRAERRNEVKEAFEKPSRKEREEARSFWSAKKAESMKEKTKGRPIEDMPKNNEVLLTELHQLETQGWTLHDQKGKMVEPSEFLGGTRPSVNVRFKEGHYTNLTPEEMVFHGPPVSESEPEPEIVVTEEVSSSELQEENERRVRESGTHSPTEHRTFREPEELRD

SEQ ID NO: 130833 - protein, 108 aa, Heterodera glycines
MILAREEDEIMEVDPTPSTSAASSSGLMSRNTINTLMVISMFALMFLQPTAAAPLRIHRASLSQNAQRFLQMVSAHYSILTTAPPSELTITLSTALPPVTSCGTAQAQ

SEQ ID NO: 130834 - protein, 160 aa, Heterodera glycines
MATQQHNVQLYLNYSFNFFISSDRTVSTTTKRELDQFERILSSESDVQTLIDITQELFYIELAIFITFGLSGFPIGCTPGKYLLGLRVISCLDVQPIVGSSDRVMVTCMPSVGFRSSLTRAVIKNMLTTFLFPLSTAFYLFNHNRAIYDLAAKTMVISLV

SEQ ID NO: 130835 - protein, 57 aa, Heterodera glycines
SRDGPRFRFSHFAFAFFGVSLFAFRFLARNATFTPLRIGLNSHKIFQNFTYKLANFQ

SEQ ID NO: 130836 - protein, 40 aa, Heterodera glycines
MAKPNNKHKLISNDLIAFGNKKHLMGGFIRSNQRRDSSAG

SEQ ID NO: 130837 - protein, 119 aa, Heterodera glycines
MHLFIHIFLSIHICLSTFSYAFESLNSLGTIGNLSHNQKTTIFGNKVLAKRSTSGISIVSGSGGKKPPHKGSLIKPSKASPKKKKAKSSMFSKIANAFKIVKDKKKDGGSSSKSTKSKK

SEQ ID NO: 130838 - protein, 132 aa, Heterodera glycines
MRKLHAALDEARDLLELEQLADRLCTFVRAKEGMVGAEDLGKDLEHCQSLLDRLDESQGIDEGTLAEANRLGGRLIGRKSAESDYVRKRLAEVNEGWQRLAGRLSIYRTLLNAALAGQRSDRANGSDGRGTI

SEQ ID NO: 130839 - protein, 38 aa, Heterodera glycines
MPFDNALHCHRQEIWAKNGQGIEITECGIIEVGISLLS

SEQ ID NO: 130840 - protein, 53 aa, Heterodera glycines
EERAHFRYPQTIDDAKRLGRVLIRYKDQHFYTVLSGVAAIYLMSVFINDNMVL

SEQ ID NO: 130841 - protein, 122 aa, Heterodera glycines
MPLDGAIGQHLNSYGYRSDGSLGCNGISRPYKMGFGTMPMPFNAAIGQQRDRRYVGSANWSFPLEFVPVPMPSDGALAFQSPAFSTGDVVGCGDVSVPSTKKAQRCLTCQIGRDGVLSTWYG

SEQ ID NO: 130842 - protein, 338 aa, Heterodera glycines
MAIRQHKDLLFGGKTVIFSGDFKQSLPVVPHEGLTAQVTACFQTSPLFGQFTTMKLTINQRLGQGQQAYLQMCRQIGLGETGEHFWIPPQFLVKSKEELIDYVYPNFQQLLGNDKELLNRLILAPHIDTCDEVNEIMMANVPGQVREYLSTDKPLDDRPLDIDEIESEVAALNRRTDSGMPPHSLRLKVGCVVVLLINKSDKEGLINGTRIVLEELGDDRLIGRVINSNAIGGQVRFFLERTRNVYEDKSPGGIKYERLQFPIKPAFAMTIQKGQGQTIRTVGIDLEREVFSHGQLYTAFSRATDGNNVRVHAPNREIDAQGRAKVLNIVATNMLKLQ

SEQ ID NO: 130843 - protein, 147 aa, Heterodera glycines
MVENIEQWEGHLLKEKQSKNANGEKWQKRGEEKKADEEEEEEGRQKGGVRGIEEKGKGKEEEGEEEKGKEDEGKAKAEYSSEKADQTASSIKISDLQHDIKNIFNRFENEQQNYWHVECPEKTIEIDLLREEDRKILGGKKSNERDN

SEQ ID NO: 130844 - protein, 457 aa, Heterodera glycines
MNTTGLMRIKRLMAHRSGTERHKKELLRFMTVQMLMEMRMLPDNLQSQISERKGQAADEAGLSARLQSPRGFKLLIAKANTAAADALRNFGSPFQLCVLIKIANFAYAPKHNNSIDAITEKMVKKLRTDECENGIVQAQILKKEMAAELGAKITVIIAEIASADLTKFRRLFSFPGTKTRLLRLVGSRERIEELDNKIGLTQKFAENEPKNDELLWTHYLFVMLTNNKIELQSHKIGADLVVFMHFLGQTFNAGRHMRKLFRLISDYISDQIYDPIFDSDEDELNEIEKFLREKMFLETKKMVEKISKDDNVKASIQFKKWEVIVKKVAKKGTENGKEMKKIGEWIGQLHRAKFTQLIRRNNNWKTLKNILQSKGTANIRQKLLNLFDTNAVESVFEEFDFKNISEATGDIRNSFDIKWQLENSDEYGEFGMMKEEEERSTRTNRERDEERMRERCR

SEQ ID NO: 130845 - protein, 235 aa, Heterodera glycines
MDENSPQNAMAENLDDKATELINFFKSYILQMVEAPLETHQKFQINSAKWNLARKIEGMLAFLTELGTKLNKNGLLDEIERLKSDWDEITELEEKGEEENNKMLCLIYQNGAQILKMMLTYIENDEGIREKWKEYLDKHRVLDIIEPIKIIDPVDCADTEINARISMCLLNEPLQWHIIGQNFYELLENSAELRHFMCMCNKIANYAEIKIVLGEMIGRKYLTLLDDEFPEIMRA

SEQ ID NO: 130846 - protein, 272 aa, Heterodera glycines
MNVLLRKSLSETLGLKSPSSLSPLLVNIIFIDEAGQAPTNQIIHILSLAPNLEKILAAGDPKQLQVRSSELPEELLQYGFNSFLSHLIFIPNIPNTKLTISYRGHPILTQCLADSLYHGDIVAGVTAEQRSMITSSNFPLPNQTAPLLLVDLPNPDYRELTSFSRLNSAQNHIAHSILSLLSLILPPSASITCLCLYSAQAKAIRSLTPLNVTVLTVDSFQAQESDAIVLITTRSLPTTPDEMRQFSYSYFSGPHQLPFLSFYMMYVCIGFA

SEQ ID NO: 130847 - protein, 82 aa, Heterodera glycines
MGDQSTTINAPHLATSSSGYICETFSAEELIPIILRDPEKKPRDLSGSRVGREPDSGILLLVVFPKSCDSFYPSNCTVFTFH

SEQ ID NO: 130848 - protein, 56 aa, Heterodera glycines
MLALSRHSPGCQSRASLHFGPQILLNSHAITLPHMGPKKNSSSCALGAARRWAHVK

SEQ ID NO: 130849 - protein, 40 aa, Heterodera glycines
MAIYFFEKFSMQQTLSNMKRSAKNGSLFLRNFLCNKRSRT

SEQ ID NO: 130850 - protein, 29 aa, Heterodera glycines
MAIYFFEKFSMQQTLSNMKRSAKNGYLFF

SEQ ID NO: 130851 - protein, 29 aa, Heterodera glycines
MAISFFEKFSMQQTLSNMKRSAKNGYLFF

SEQ ID NO: 130852 - protein, 518 aa, Heterodera glycines
MDMSVQVTFIGALISLFQCASSRRDADEEMEEQIKTFFGLNIIGLSDNPEEEDKEEVMRTFRKGLTFKEGRYECGLPWNERVKDLPTNFQQARARLCGTVKKLRELNLVDEYQKIFNEWERNGIIERVPDPTQTTGPVHYLPHRPVIKMDKATTKIRIVMDASAKPANHKGAPSLNECLHTGPLLLNELTGILLRWRRMKDLILADIEKAFLQLSVREEDRDATRFLWLEDPQKTEISSPTYVRTVVFRFCRVSFGLTTSPFLLNATIREHLSFYDTVLPQTIMENLYVDNILINVKKNEDMAQICHESIELFRQGGMKLQEFFCSKPIAIRSLPVELLAKNQKEIKVLGIPWTNEDDEICFRFKKFAGKHTKRNILSHIAKIYDPLGLVAPAVLPAKHFLQKRFEAKNGWDEGLEEELIHEWNQIMETWQTKEGTEVQIRFARRVDNEDEVDKEMHCFADASGKGLGVAIYIRESTEKMSANLVFAKSLVKPSNISDVAATIPKMETIHNAGSEVVK

SEQ ID NO: 130853 - protein, 356 aa, Heterodera glycines
MGPLDLLNGTSSQLRSHLFSAQPAQQISVNGNGIGLANAAASAHHPATPSVPNNRFSPRSTAANGINCPPSSSAINGTTVNGSPLNLATQIGNQTVGLVESIHQQQQRAMAAALNSRGGTVNGSGNNALDELNQLNQLRAMLPFFNPHQLLPMGSLNGLAASLIGPQALINAVGANAGGNVAGMNGGGSGRKRELEGGGSGDTRESLNNKVQRGDAQTTSTSPTSTNSPDQSLQHNGFHHPSSHPPPHHSSDRRRSLFLSNANSVPTPSSTVASTTAFAMAAAAQHAAAVAAQQRENNGERTLKCTGCQERLEDTHFVQCPSVSGHKFCFPCSRKSILKQWKSHPTVDIHAAGDSD

SEQ ID NO: 130854 - protein, 67 aa, Heterodera glycines
MNGRGRTPTNGETNGGAPIGSETAMCTLLNSTKCVKESLDHPNRSPGTVSGDSSGGENAVALNGQSP

SEQ ID NO: 130855 - protein, 65 aa, Heterodera glycines
MNIFGVIVAGRMVKTDFTTHKEGEYTTELFDIANINHIVVFLTGLQPLPPDIGASSDLSENALSI

SEQ ID NO: 130856 - protein, 28 aa, Heterodera glycines
MPKIKSKSELMRKWVNMHIKAYFWSFRE

SEQ ID NO: 130857 - protein, 98 aa, Heterodera glycines
MPSLLSWPGVLLLGSQPNCCSIGRTFGFASTSKRIAQMCRWSVWCSALCWRVRSSSRFSSRIRCSKSSWPRNVPSCEQYAETRRIGNDADANKTQSMR

SEQ ID NO: 130858 - protein, 85 aa, Heterodera glycines
MPSEPPSEPFELVNERTKEKLTLKQKSEELNELAVVYNWRLERRPIGETATAAVQWKDRYNSDVKANLNNIIFNLWSFNKSIGPL

SEQ ID NO: 130859 - protein, 48 aa, Heterodera glycines
MSGHFGTLTPRLVHPTSPVLLTKNGPLGAQTFNAWVQSQATLASYPFR

SEQ ID NO: 130860 - protein, 36 aa, Heterodera glycines
KPKLFGLFKKELKIFKIFIHLPFDRKSIREPYLTLN

SEQ ID NO: 130861 - protein, 45 aa, Heterodera glycines
LNLKKCQRLLFLKFFEILTFSLLIYYFAKLIHKYFLERALKRTKC

SEQ ID NO: 130862 - protein, 276 aa, Heterodera glycines
MACAVAAERATIHQELQRFTLITELIRVEELQETQVNITFRHQLNSVGEMMDMLQIWEEDTAISCRVDQNDETKPCALGFVRRIEKRALDNGFEVRVEVFLAFQDAKGQKVWEQFEFLREGALEAVELRPMVSTRALMERAELLTKNGCSIIAKDHASPANVIMAILLGRRVPRNVALQSVEEKVMKKGAVGLLKAGQCDSAERMLEGVPRVVFQQAGPGTGKTFTAAAIMAAILREDPARTRRHASWQWYRRTLPSVSWCWKWRKRCALRANPSQ

SEQ ID NO: 130863 - protein, 56 aa, Heterodera glycines
MSEFTAQMFLETLKVHQKDSRHFFAARWIQSYDKANIENHLLQQCHIYYIPLLLTF

SEQ ID NO: 130864 - protein, 54 aa, Heterodera glycines
MAMKKSSKSCKVGVGNLTDENGNVVMKGRFKMCPKGFKKCAKNEAFGTTAFCVE

SEQ ID NO: 130865 - protein, 190 aa, Heterodera glycines
MASRKQLPSLAGILLELETDTARQVTAMLKLQQLDKALHKAAQSQRPDLLQYADGSFDRPRIVYLGGGTGGNGTDGTVAKAAQTQRETSVIQLCVTYGNKNLAFRLMDRLNAYEEQVKAYLILGSVFEICPFYDTSPTQFREVKKAATLAVEREDLQMLQSIKCRLAPSSANWEEVKKITDTLLKKAAHA

SEQ ID NO: 130866 - protein, 174 aa, Heterodera glycines
MLGGSKQSVVSGEEKKQQQQQPPKTNVSVGRPLMSPPATESKDVLDIMLGGPKQSVVSGEEKQQQQSSKTNVSVDQPLLSSTQPKDVIDDLFGIVPKTGEKNRAQLFLNEMLGGSDEKEKGPPLELLMEFERFKIVFHDPAISGLSFSPQVGRVCCPNCHFVLLTVSLQIFVSH

SEQ ID NO: 130867 - protein, 139 aa, Heterodera glycines
MGTVWAFCALLYNVHLLAAQNNAFNAEEICRPIDGTPFHAQCLLSSVVKQKGFIPKHLRPPWLNSPLFEDNKLSSEAKESENGCFSCYRGTKASNGKIQDEDYCACVYKDQAPNDGFSKIIGTFDGLNCLQDLYKMASW

SEQ ID NO: 130868 - protein, 65 aa, Heterodera glycines
MPNGSSITVLVYEEKEMTNSNYTPICDDNKQRDNSRSSPNGTHKNNCFSGLSAHFLAGLHALERL

SEQ ID NO: 130869 - protein, 142 aa, Heterodera glycines
MKGVQINEPIHSANDELDEPIKKWAKTKKLSKPKWKMPIETMANHDDEAYADLYVYNAGNYTNAGEECQNCLNFSKIDGLIGQLTESLNATETIINELVKKFKLVPIDLDSPMSSVTMLDQSTNSERIHLAGNVINSAIIGN

SEQ ID NO: 130870 - protein, 125 aa, Heterodera glycines
MKNLTDLPSSSKRGLTHQSSFVIMEISDNVKMDEQHSDDKNGQEKKEAKNLENAEKAMKEFNIRKKNVKCQKCNERAKILRMVQQIQKNNKEQIIKLVQNCKHSNEQEEFTEPNIIGTTIYGEQK

SEQ ID NO: 130871 - protein, 154 aa, Heterodera glycines
MQLAFTIISTRTEFNENSKLEVTLANADRIGKALLGISEPIEHKFLEYLKISKIFLLADSLGADETTLIEAECKNLEKFITNFGATRAPSAEETNKIGKNNLEFYIHLFKEMQQLLDSIKRTIKIEIREVWKDLIAFVEKFEEKLETFAKLTEN

SEQ ID NO: 130872 - protein, 36 aa, Heterodera glycines
MTSKALTNAKNKHIVASKFAFGNIGIQNNLRIIEFL

SEQ ID NO: 130873 - protein, 40 aa, Heterodera glycines
MSDNMLNTIFQNVTEKEFEKELIVIVHESVMFNGQCSFFD

SEQ ID NO: 130874 - protein, 78 aa, Heterodera glycines
MTTTFKARNTAAFDEICLGNLEVQQKSKKKNKEDIVKFDVDRPGECPSVKIIIIFLFVTAPFVLFSVMVISYYFIQFQ

SEQ ID NO: 130875 - protein, 89 aa, Heterodera glycines
SYMGSNSRGKTGPEKGIGTRRRGEKIVIRIEFCLGRKPLLCPMSDSSIRRLSILSILPTDMSRSHHHKGAKMDGRIVVLVCPKAINKAD

SEQ ID NO: 130876 - protein, 170 aa, Heterodera glycines
MWKNPKKAKKEWKEISLCGDCWLSVFQFIGPYELGLKFALLSDRFDHLVDEHFKTKKWAMGFLEIRLSSRGKRAVIVNNFGDGQRSFYPIPQKPLPSNIVGFESIRISYVDQHVVQFLHRIRRLFDSVPTNLYIATAALAETVYRPKHFVRSCEAIRQHILPLLRANVRA

SEQ ID NO: 130877 - protein, 32 aa, Heterodera glycines
MIIFSMFLKNKLCQILIDNTFLKSINFKFRNL

SEQ ID NO: 130878 - protein, 244 aa, Heterodera glycines
MDKHLITDFEQSNRLLFNSFSSTPLPMIIQRNQRTQSTQSLTTANQKLPLVTVATAKIPQMFRFNTQFDQRRLNIGSVIHFECTVERCEERIGKTPSAITPCPRTNCDRKRIIAEKQQQPVITTQAEQHHNVDDAVDEDGAKVTGEDEELELVTQLLRAQQLEEEGEEEAQFGGVEGETDEDEAVTEAAQKKQQKQNGTEMADEKGKGKANGGKAKGEAGRNRTAQEEEEEAKAISGGANNRKA

SEQ ID NO: 130879 - protein, 63 aa, Heterodera glycines
SARELTPFFSINHIFIIHFLSRSHELYYFLYLYRVNLIKDLNNINFLRFYTASETFKSILHSN

SEQ ID NO: 130880 - protein, 106 aa, Heterodera glycines
VERIKLTCEQTLAQSVADAAEFDKHSYEISMLNEKLRQVCINYSHQIEALNEQQRHEYRQLVRTMYANEKSVYHGGTKAFASLAGSFSCADDTLYNCPSTANAFAP

SEQ ID NO: 130881 - protein, 55 aa, Heterodera glycines
MAYNLFAKLLLCLNCLRLLLTKFVFMVLMGCQNEFRKKKSNLHCCFCMHHTTLAN

SEQ ID NO: 130882 - protein, 57 aa, Heterodera glycines
MRKAKCETPKNANNAKGEMRKAKPRPIPAPHPVKCCHHHYLIFSSIIYRSATFADNL

SEQ ID NO: 130883 - protein, 50 aa, Heterodera glycines
MGTETDGRTILGGKWTKRDEQKVTHQQIKWTNCPPQISSHPSIHFIHFKK

SEQ ID NO: 130884 - protein, 261 aa, Heterodera glycines
LEKFLHFPIFSHSRHNVELINGWLGKRHLHQLAVYRWHASFICSVNTMPIVLVDWYDIREQKRLMELRASVSLHGRSDTLYEKAFPLYEQCSNKAHDQFLNDLERILPSNTTPLIVSDAGFKVPWYKSVEKLGWYWLSRVRGKVQYADLGGENWKPISNLHDMSSSHSKTLGYKRMTKSNPISCQILLYKSRSKGRKNQRSTRTHCHHPSPKIYSASAKEPWVLATNLPVEIRTPKQLVTIQKKRMDQTLVYGSWRMPVKT

SEQ ID NO: 130885 - protein, 206 aa, Heterodera glycines
MGFPHRPVQMTIPYSSTNPIPAVAPVQAMPMIGGIPYGMVSAGGQLAISPSFGAQLAPNHGVAGFGRGVPAGQQFIGQPLVLGYPQNAGFIQPTMVHPTGQMMAPIGLYPSVAGVVGPPQMKQPPISQTVMANMPPPQPLYEGEISFVTVSLKFLLDVEPLSAEEHNAILYNSSAEFHTALEASRWNAVSVLPDAKRKELYNMLHG

SEQ ID NO: 130886 - protein, 99 aa, Heterodera glycines
MMTPHQDFHNSSVAMQQQQTLCPPESTLWMGDLKPEWDANFVREAFGENAGDVTNVKMLFGERYMSCRGAKVYRNEDGASKEQGLFGLLLKLTNKRLWY

SEQ ID NO: 130887 - protein, 85 aa, Heterodera glycines
MIYDLLEKSVCRNHDFFWWGRHNKKSERVHVVYRKEARALRNSVPTTESAHDFMQFIAFIPSRDWTIRQWTIRQWTIRQKWTIRQ

SEQ ID NO: 130888 - protein, 42 aa, Heterodera glycines
TVFSLIKAPGGLFFNLFRKGDIIGDRAFNGDGGIIFQQIFND

SEQ ID NO: 130889 - protein, 104 aa, Heterodera glycines
MYDWSCSSNLNMFLSNAKLIFLRFPVDKFPERLTFSALPHSLRILNICARRTENFYSNRKTSRIIEILQLAAIYCPALSVLMLPIEFQAGERILDEVGRFNRYF

SEQ ID NO: 130890 - protein, 100 aa, Heterodera glycines
MNRRLWKIWICGDVWMDILPSFERAELGLKIALLSYRYDALMDKHFDGKKELTIWRTIKICDGIGPEPKLSVQIEDKRVEFPFPDCPLPNKIRFKHLWIT

SEQ ID NO: 130891 - protein, 259 aa, Heterodera glycines
YIDHSVIEFLRSNKHIWDRNGTNLLIQIESDTNVIKPIWDVFTSEIWPIFATNIRHLSFAGHYLDNLRRLVSPTILTDFDQLNSIDSGVLLPDGIADDGPDATAGQALFKWVHTPSKNGQPKQLVCADYDEEVNIDWVNSFKEAFLCATASVSYNIRLELYDSSTPIEPFELMNERTNEKLTLLLVGEDGYEFTEKLLKRCPISEKAATDQWENEKNWDDNLNNVQFSLLGGKSGPYGHQRMKKKKRVKASKYRRTARK

SEQ ID NO: 130892 - protein, 32 aa, Heterodera glycines
MSNLICVVAKVRLGHWPPAEEEKADQSIENVV

SEQ ID NO: 130893 - protein, 39 aa, Heterodera glycines
MKRKRVCREGKCHKYTSQITYKNGQFTQISCDRDYAFFT

SEQ ID NO: 130894 - protein, 214 aa, Heterodera glycines
MLIKAFTATSMAFFVLFLVAHSFELALAFAVVDKDEAQSTTTEAKNQATTFIPNSRQDDLEAADAAELLGVLLEDHDEPQQQHEWPYNSNNNNRRKVVSSSSSVFSSSSSSSSSSSYEDNDDHDHNADLKPASLPRMARRIIVQQQQHYGNRMPQQRHQRRFRIDPSHPIHILFPLPAREGRKTQNPFGITILKARPVVDEVGFIKKKYEPIDY

SEQ ID NO: 130895 - protein, 48 aa, Heterodera glycines
MGKGRAFGQRLVQKGPHNGKGKGGHSSRCGQGGHSHRQRAAKAGCSER

SEQ ID NO: 130896 - protein, 71 aa, Heterodera glycines
KFEVDTINILLLKLCPTWSICLDENRHDSSLSDRSRPPTFPRTATLRASPISSPSRPLHPAEFEANFLSPR

SEQ ID NO: 130897 - protein, 280 aa, Heterodera glycines
VNFCYAHDTCPECIAKGIWDQPLDRSCGICGLTRTFAWAPFEFYNTEVETAYVVDDPLTAFTKWLLHFEADVLGLDPAEKRRKRKRANGDNNNKARNPAANAFIDMEAEDDDSDDNDAENNYMLGYDEEGEKPRSVTTYAYAHAGSRYDHVLIYGEMLRMGVRPELVRQGNHLLEMKARKRGAITTTIFRDSYKLIPIKLASFVKTFGLEIEGVDNKKYFPHKFNKAANYGVVLDTLPPLEDYYPGGHFPEERKKLEQWYEENRNTPFDLREVIADYCKA

SEQ ID NO: 130898 - protein, 254 aa, Heterodera glycines
IKGRVDAFITLHTYAQLWIHPFSHEITLHTYAQLWIHPFSHEYQSFPNDVAKVKSLALSATARLRFPNDVAKVKSLALSATARLREVYGTNYKVGTGADLLSPASGGSDDPASGGSDDWAKQTLGVKFVYLVELRPQLRVSNGFILRQEELVPTSNGFILRQEELVPTAIETFEAIKVVIQGVLVENNHRRRRNSRGGRRKGRRRSTKNARKRKRRKSNGRKSKRRKRKGRKSNGRKRKRRKSNGRKSKRRKSN

SEQ ID NO: 130899 - protein, 425 aa, Heterodera glycines
QKTLPSSDLSPVLEQRSGAGGSVLGGVSSVGGASTAATAQFFSSASALASEANSMRGSTISLTGAGLGGAGSGTAATSTHAPPSRLSAPLDTQSLTASSCGVGTASALPSTTSAGGGAASSSASVLRSSIKDSSGGAANKKDPSDSTQALFLLAENLAELIDSVCKSEDKEKLLPALQAVWNNTLPYLKAKSAKNVRFFLASSQFLASMSSYNYMRSVWKKNAMDLLWDNSFFKMDIHALRQWLIVIDNLMTNDKTSFKELLSRADHHLHVDHSVNTDHQQGAGVRDACPVPEAAGVRHSQLGAGPICGPIKRNPRHIKKKITADRKFTSLPSAGDPHAGVHVLPRAVGPHESQFICVHLAVDGHRIGVHVLAQIDHQLTSTTPTSSSGGASSSVDEQKSVRDEQCMQLFLAACKLLETLCALPS

SEQ ID NO: 130900 - protein, 80 aa, Heterodera glycines
MQKPTKQFLERCFVVGHQIVDYDQPLAQRVDVHFEECCRKKDFSLLPSFVKTAIFGINFQYNNMKFQIGQFTGKIKMLKR

SEQ ID NO: 130901 - protein, 549 aa, Heterodera glycines
SADKRKRVASSAARDSTYDQTSLVGSLLGPGDAAAAMPRITSYAGGDTIRRIRTGHRRQDSLQESIFSTGTQELRLFDPTELPNSTCPGDHKQPLLDETFSHMLFYAESPSIVDLGRAEKLFRTMGTLLRSGNGLGRHLVNSMLFTNMSELVNRTGTTSSGKTGGGNLSNIGTNSVNNSMATIGGASTAATQQLLDFMARHYQHIQGDGFWCTETAHDQQNFSVQKKEDGIAGGSGGTAAVTSTSSESKSGQQQRHSTLFEIFSTIAALDCFTELLHILDDTVREASSKELATFVQQIYRQTKTQKVILTLMLAAIPTPPNQKGWRMPLSMDIAEFNNGPPHSKHFRDLIFAYHRSLLSLASALVVLEYSLHTHLLALPINRNASPSSQITENQINYNSSQNRSTIREARYSVVELRLFLGVILNALKRCPARHELWLHFLVGILPYLDRALATFVVHTVEQICRNLYECVFINGSTASVAGLNSAALALVSNSQQPMGASVMEHPKNPIQFVDYRINRTNDVATTVGDDGTMPTVIYPANYILNVRVL

SEQ ID NO: 130902 - protein, 79 aa, Heterodera glycines
PCRTPFQRVQNYAEEQAELNDGVARLTNGGPILGGVVVDLVFSDLRRWRSVAIDRKGQQMGLKGQNILFFGRNFHIFIK

SEQ ID NO: 130903 - protein, 69 aa, Heterodera glycines
MSLDNISEANQVILLRLLTDKMLNDQPPNNTIMLKILETINGKKDFEQLSAHFLITDESVEVYMKKYRE

SEQ ID NO: 130904 - protein, 57 aa, Heterodera glycines
FLMASKIVPIAVSPSFNFLRRPLPSLVSLRSLFKSPLDAPFCGIYRTNGGICRTDDI

SEQ ID NO: 130905 - protein, 69 aa, Heterodera glycines
CRLFSQPSLLLSVLRIPRAFRLSRDRVDCALASSVSVLYLFCGWNELISLLAESGFVGRAKANILKCHG

SEQ ID NO: 130906 - protein, 123 aa, Heterodera glycines
LAKDGFDIVIPQCSPLSPGELLGCTAPVLPKDVTALVYLGDGRFHLESAMIQNPSVPAYQYNPYSREFTRERYGTELMLANRDAAVAVTRDAQCFGLILGTLGRQGNAKIFNVSEQQRGRKRE

SEQ ID NO: 130907 - protein, 45 aa, Heterodera glycines
FSVLDSRVEKFLGFFGSRFSYRFPGSFLGLGFSVPGKNHFSHSPT

SEQ ID NO: 130908 - protein, 21 aa, Heterodera glycines
VRLGTQQLWGAKSNAELKYRL

SEQ ID NO: 130909 - protein, 138 aa, Heterodera glycines
MLQFVGLQVADQQIDEDHDGDNVDGHHHGHRRLGQHRVVDLARTWRLLFRELLSERAFQHLTHHNVVVVEELALEVLLDAEAPCSVHLQKNAEQFDEQKTDGVNGLSDGHVNGQCLGNAQNQSQRGTELRSAKNKEYM

SEQ ID NO: 130910 - protein, 117 aa, Heterodera glycines
MVSATILICQIANTIIFASFAYNFGKLYIMLDDYMRKTDAMNITMPNSTVQFQYKGINVDRITKIDNYHDQLWNLFIAEVIELIFPVINLFMFAWIVKDKRRRFPSRVQIIYLVNFK

SEQ ID NO: 130911 - protein, 47 aa, Heterodera glycines
MSSQYKFWKRLKLDINFLRHTFLTQLCRKCPMKGPSTSISLKKATIR

SEQ ID NO: 130912 - protein, 76 aa, Heterodera glycines
KYLLLIILKFYPKDSITPIVVKRCFSTAIFHLNYMRKSLHPNILKNLIFASEFEDFIMRKICLKIFVCFSFFSFGF

SEQ ID NO: 130913 - protein, 62 aa, Heterodera glycines
MPINTATLADRIKLLLDNAANDGDVHFLLLSAHKMILKTVSDEFNSLFQSAEIENGEIDGAK

SEQ ID NO: 130914 - protein, 67 aa, Heterodera glycines
MLKFIYTDKLDELSGDTVFKVLYTAKKYGITSLIKACAELPLSELDNVFEMLLKARSIEEHVNVSIK

SEQ ID NO: 130915 - protein, 69 aa, Heterodera glycines
MDLILATDWINNAYPEMDLQDTNKENKEPTKKQEEEADDPSWISLIDEEMKREPLAPIDVFNFQLYCGF

SEQ ID NO: 130916 - protein, 533 aa, Heterodera glycines
LTNLHGCELHVVWSCQWMERLRHDPELKRRYDAVFVPCPLDPRNDALRGGRTEPFKLHHVCSDDEEILCIDIVSLYPHVMKANRFPVGNPRVVTREVLLHPPTAPLPWTSPENNSFRGLLLVRVLAPRNIRVPLLGYRTKDGRFTFPLCGWCADRRQQRPCRHGDDRRSWVTAYTHVELNKALQLGYVVTDLFEATGWPEGCVTEEQRQAFVEDFERTEDIRLDSSKMEVNPGLRLIAKTLANSLWGKLAQRVGQTEIRYTRTPAEFHALLDDPTLDKLDFVHVSDHMDRCVVRKRPEFAKAPLTNCLPVAAFVTSYGRLQLYSYMEHVLAIDGAELLYCDTDSIYYVNKMGGPCVAEGEALGQMKREHSDRRIVEFIAGGPKNYGIRHTSRDGTDERANLKIRSFRLSYAAERVINFEAMKDLTLSTYNIDGPIDDVLDNDDPYVYGGGEHRAIRVNFPQIDRNVYADLFTREAHKDYRPYYAKGRVRHGMQTRPFGYVEDDGPPNDGQRTERRKRNFVDHDPAQPGHSGWF

SEQ ID NO: 130917 - protein, 35 aa, Heterodera glycines
KNFIFYIYSRITAMHIAYQYCIITCHRILINLLKK

SEQ ID NO: 130918 - protein, 77 aa, Heterodera glycines
SAGASAGASAGASAGAAGASAAAGASAAAATIAPAGEAAERKCPKKGKLPNEATAEAAAIAPAGVHGNSPTHDSPTD

SEQ ID NO: 130919 - protein, 171 aa, Heterodera glycines
MTAAGAGVDGAVQILSTLFLFANYAIVLPMFLLCWMMVVHWLRRPGLMPSPHQTPSTSQHPHRHGGLHTIFENTVEQKAGQEKDVRQQQQQQPQQQRHTSAAAAAAATVITEAMVREAHRMTSQLAAAIPEPMRSAVTSSVAIPMLVSAQSGAGRKEATQQNSEEEEKERN

SEQ ID NO: 130920 - protein, 324 aa, Heterodera glycines
GVSAFGASFQSLGLNPPAFQSLGLNPPAFQSLGLNPPAFQSLGHNLKHSSHWDSIHQHSNHWDSIHQHSNHWDTIHQNSSHWDTIHQNSSHWDSIHQNSSHWDSIHQHSNRRDSKSIPVTGTQSTRIPVTGTQSPALQSLGLNPPAFQSLGHNPPEFQSLGHNPPEFQSLGLNPPEFQSLGLNPPAFQSPGLQKHSSHWDSIHQNSSHWDSISGITVTGTQSTRIPVTGTQSTRIPVTGTQSTRIPVTGTQSPALQSLGLNPPEFQSLGLNPPEFQSLGHNPPEFQSLGHNPPEFQSLGLNPPEFQSLGLNPPAFQSPGLQKHS

SEQ ID NO: 130921 - protein, 131 aa, Heterodera glycines
MEDKVEEEGKRKRTWKRNRKRKIKWKRNGKWKIKWKRNRKWKRKERGREREIGRERERGRKRRRGRKVEEEQKVKSGRGTESGRESGRGTESGRESGRGTESGRESGRETESERENGRGTESGRESGRGTE

SEQ ID NO: 130922 - protein, 53 aa, Heterodera glycines
KEEQKVEEKVEEEQKVEEKVEEKQKEEDKVEEERKVEDKVEEERKVEDKVEEE

SEQ ID NO: 130923 - protein, 170 aa, Heterodera glycines
MAEFRAADNFDGLRVGNGRFLDNYIGRMRFNVPMTAPLFHPHEWNVHQRTLDDADRTNKFAEAFHRKLQRQFICTHPTIWRFIDTIRCEQKAIDADISRCVMGESAPQKKKKYREADARILRLVHRYNDINNNHLPQNDHNYANVNVNPKTLTIFSLVFPETMKCDLSLF

SEQ ID NO: 130924 - protein, 34 aa, Heterodera glycines
RFRVLPCRVAIFAWPSRGRFRVVAYKREFITHIY

SEQ ID NO: 130925 - protein, 187 aa, Heterodera glycines
MELSLFRNYKAFFNSAVSSSHCEQFTLIGMDSTTGEYGAMPDKQKWHMQLMASSGSGQPIDEQQQNHMDEFSSKLPTVGRHCIPIAFSLVKPWVRDNKSHLQKVADLFAIQLLCGLLSLFVIAMHVLDQPRSWGYESIDYERTTFCAVLWCCPALVSSVLLLHWTSYWHCTNFRADSTNVPLITLVD

SEQ ID NO: 130926 - protein, 37 aa, Heterodera glycines
QWPLLHLSLAAEELQQLIEPCQQINNKQIKMTDSNTL

SEQ ID NO: 130927 - protein, 126 aa, Heterodera glycines
MPILFFHSPKWSLDSRMHQIWKAQAMPTKLTPTDFPFTILGQFYAISTPISIGDVALTDECSPRVGVLVAFCKCISAARTFEAVRVEHVEQSAAEDEFGRFDWNGTAGAVRLARRSAERSVGGGLW

SEQ ID NO: 130928 - protein, 65 aa, Heterodera glycines
SFGTSSCQPNCARCAIPIEPAELVFRSGLFNVFHTHCFKCSCCGNALAKGDQYTNTGGALICQRD

SEQ ID NO: 130929 - protein, 29 aa, Heterodera glycines
MMAFVKSSVPFFCETIRKVAEHLQLQSPS

SEQ ID NO: 130930 - protein, 964 aa, Heterodera glycines
LKTAVLFNKKPVEFHLDTGSDIVVIDQLTHEYVGRPPIEKCNEIGKAFDGTKISFIGKGFGTFKFGKIEVEQTFFVAKAGSLNLLSCKMMDLFGLLDELKLKISNPAVNACPGGTEIQALEKEFHEIFSEELGHCLKEKAHLALKDDARPVYRKARPVPYNSLEVVESELSRLEKMNVINKVEHLEWAAPILIVKKADGSARLCIDYSTGLNDALLDCQYPLPIPEDIFATLNGGKIFSQIDLRDAYFQVELDENSKNLCGLATHKGNYRMERLPFGVKSAPAIFQSIMDKMLAGLEFATAYLDDIIIVSKSIPEHTNHLKEVFGRIQAYGFRVKLAKCKFFRDQIKYLGQIIDKNGRRPDPAKIYAISQMPAPNDIPSLRSFLGMVNHYQQYVKNMRFIRKPLDDLLKKEIDWSWSEGCENAFRKIKETDASEDASELGIGAVIYHKFQDGNIKAIAHASKSLAPAEKNYSQIEKEGLALIFAVQKFHKMIYGRHFTLQTDHKPLVSIFGSKKGIRQCSANRLLRWSLILLAYDFTIEYINTKDFGQADALSRLIAKGNETEDEKIIAMINAETDFETNFGQTISKLPLKFSDLVAASERDENIIQVNFVKNGWPNEKAMDKENQIVRDFCRRKEELSIEKGCLMFGERVVIPKVFHSKILKLLHKGHPGMKRMKQLARQYVFWPKIDQDIEDFVRECVPCQAAAKAPIKTNLQSWPKTSGPWQRVHLDFAGPFFGKHFLIVVDSFSKYPEVFEMSTISTAMTIEKLRYLASRHGIPETLVSDNGTQFKSTEFAKFTAANGINHLFSAPYNPMSNGQAERFVDTFKRAFRKLKEGMSSVKEIIETFLVTYRTTPTDSKSPAEMLLGRKPRTTLDLLKPPPIKKFNRRFGTRPQIFASKDAKKFNRRFGTRPQIFASKDAVWARHRLSQNWKAGTICGCSGVIYNVRFEDGSGRYHANQLRFRK

SEQ ID NO: 130931 - protein, 32 aa, Heterodera glycines
MGFFCRSNVLLHLDLTIPLRCVGVSVLSHTPW

SEQ ID NO: 130932 - protein, 27 aa, Heterodera glycines
MHSSHQIHGIIMGIRENDMSGDEKSDR

SEQ ID NO: 130933 - protein, 199 aa, Heterodera glycines
MALNPPTFQSLALNPPTFQSLGLNPPTFQSLGTQPKSISITGLNPPTFQSLGLNPRTFQSLDSTHQHFNHWDSTHQHFNHWDSTHQHSNHWTQPTNISITGTQPTNISITGTQPTNISITGTQPTNISITGLNPPTFQSLALNPPTFQSLDSTQEHFNHWDSTHQHFNHWHSTHQHFNHWTQPTNISITGTQPTNIQSL

SEQ ID NO: 130934 - protein, 154 aa, Heterodera glycines
VLMHRGIVPKVVSLNLLGWSYAILLSLGNNQQMRSVALPPAHFQRGARRPRLQPCQVHTHGHAVRPTVGPRTDPLAHPPGTKRRNSELHAVRLARDNFSALHADQSGARRSAVRLYPMRGQSVASVPPGAAELHRPWQLESDGIAPGQPGEGLP

SEQ ID NO: 130935 - protein, 102 aa, Heterodera glycines
MVFDNRRPHNTQVLEKFIRQEMGAETMFSDLKWPRLMFTTTRAEFFPVQLELMRNYKLPTNDEENEELGYRTPDDLLLWKVLRRSSAAPTYFASVDNKYIDG

SEQ ID NO: 130936 - protein, 71 aa, Heterodera glycines
MISTNDDTDSSWIAIDNEVIPLNPCDTNLFDLVKRRNSPPKIDRLPNPWLPFFPFLNGLDDELLEWVLFEL

SEQ ID NO: 130937 - protein, 129 aa, Heterodera glycines
GSPGGAFARLCHSRAISNFGDFLGIFEQMGLMVGGCAECVGFVPSLYSLPPQTVASYVQCHGATAAARKFNIPPAVAAYYYRKEFKKQGGVSARRASISVHQQQQGMAGGDGTKVGTKEGKKGGKFQMR

SEQ ID NO: 130938 - protein, 243 aa, Heterodera glycines
MPKQKPKNDINELKQEVSMDEHKIPLEELFRRFGSSKDKGLTKAKAKEVYDRDGPNALSPPRTTPEWIKFCKNLFGGFALLLWIGAILCYIAYSVDCFTMERPSKDNLYLGIVLMSVVIITGCFQYFQERKSSKIMESFKNLVPTYALVIRDGEKTQIPSSMLVAGDVVEVKGGDRVPADIRIVSGHGFKVDNSSLTGESEPQSRSAECTNENPLETKNIAFFSTNAVEGTATGVVIYTGDRT

SEQ ID NO: 130939 - protein, 82 aa, Heterodera glycines
MSVPRSMQRMVTVREGSGMPNRTYIRKAKLSSRRIISAACFDTSDPAIPTNLFHYVLRLFAHPLPLRCQPFSVPANRSLRRR

SEQ ID NO: 130940 - protein, 405 aa, Heterodera glycines
MTVAHTWFDQQIETCDTTENFTGDRHKARETETALLRVASLCNRAEFKPGQVGIGVKRRPWNCLFRIRFRFSKGNAPAMLSIHETDDGHPGYLVVMKGAPERILQRCSHMLLKGQDVEMTHQMREDFERAYLELGGMGERVLGFCDFRLDHDKFPKGFEFDVEGPNFPIEGFRFVGLISMIDPPRAAVPDAVAKCRSAGIKVVMVTGDHPTTAKAIAKSVGIISEGMETVEDIAVRKEISVDQVDPREAKAIVIHGSDLREMNEDQLAEVINNHDEIVFARTSPQQKLMIVEGFQRQGQIVAVTGDGVNDSPALKKADIGVAMGIAGSDVSKQAADMILLDDNFASIVTGVEEGRLIFDNLKKSIAYTISSNIPEILPFLMYVLFGIPLPSRTVTILCIDLGTDM

SEQ ID NO: 130941 - protein, 52 aa, Heterodera glycines
MADNGFFPKDLYQLRAQWDSRGINNLVDSYGQEWIKCNWYVCMLLYNLAVIL

SEQ ID NO: 130942 - protein, 281 aa, Heterodera glycines
KAIGCFPNALANYAKSVESHREQTVKGKGHRTWPRRRVEQTATIASVRFDWHEQSRIHCVAADEKHKLGKDGPAFHFRTEAAKPRQFGQIKENLKIGPIHWLFIIIVIDRPHSWASPTTKGTAFTCAIRWSNAALSSFGMALYHILFRLAPFDRTTLSPKEIIEEVKRRSLKPILENTSPEEKPAIGEKNGKRRNDCFLTVSGRDGTVLAEEPRTEAQTPSFGPSVFQRVPGKKMRGGIAGQFNRSNATDERKARAEFGKFGGATKRGTRGGTRRDGTAAA

SEQ ID NO: 130943 - protein, 100 aa, Heterodera glycines
MPFSVVLLQLLLLLPYVLSLLKVGLVESDPLLVALCLQALTDARAQGKCTTEEIQPYLFNRILPLRLFWSVRSIRTLKSRLCGRVCHKYLRNALTESSKD

SEQ ID NO: 130944 - protein, 105 aa, Heterodera glycines
MPLSPVLILFRFLPLFLLLLLPPAVVPLQCFQTQHSLSASLQGNALSCPSSSLSCTKSTDFNMQIIARTCQSTNCTKNNSSERNEEKQCLSFCRQQNQQKNAASL

SEQ ID NO: 130945 - protein, 26 aa, Heterodera glycines
MAVKDDPPEIRGVIWCAEHEFDLLLT

SEQ ID NO: 130946 - protein, 62 aa, Heterodera glycines
MAELDKLISETKVKFDNDLKELELAKRHFSLDFVQRMETEFAKIFPETGGYAAPGTEAQAQE

SEQ ID NO: 130947 - protein, 112 aa, Heterodera glycines
MIETESIDELEEAAFGEHSERAEGQRPGGRSDDANFYGPSARRSPSSMTSGGRGTTTVHTRNLLAFWLLGLCNNFGYVVMLSAAQGHFGTVGNAAKRHGSMHYKTNQTFEFL

SEQ ID NO: 130948 - protein, 39 aa, Heterodera glycines
MKMGRKRQFFCYFEPSNPTEKEVENATIMKLVTCRRMKY

SEQ ID NO: 130949 - protein, 184 aa, Heterodera glycines
LPLLSSFPLLFPISVGRMLHFIQFSRISLPSKLNQKKSEKVVVSSVRMDRLSWYQTGESMEEILCQAGSVGIYDGDLKQSSFEQGTASLTYQRIIWSSFEQGTASLTYQRIIWADSTDPDCRLVLHHSMVHKIEKQHDCRLVLHHSMVHKIEKQHKTMFGRGGKIVTVNPRLATRKGPSRERHK

SEQ ID NO: 130950 - protein, 255 aa, Heterodera glycines
MDEEQSTSKILVCHITTMNATKSPSKDSDEKVHGDDWWDDYCYVCSQGCDETTGSLGCCDTCPKVFHAKCHVPMIKKTMEELPNGWQCTLCLPCDPLSQISQSFGEREKLLCSKVYLACFVDFSNVEHFLNAVSTAESDYYSVIKEPIWFNKIATKISSDEYKMISEFVEDMNLLFRNCSTFNLPTNPLSNSGKKVYTLYMKAMREFLPAYEKQIWIYVSLYNGRVSVASSNDEESVRRRGGKRGGQKAKSQTPC

SEQ ID NO: 130951 - protein, 291 aa, Heterodera glycines
AEQHQRTHEHISVAGMDQGDKGELTKSFENIYLAFEDMSKLMEAFEDMSKLMEQAREMVVLSKNITERLRQKKGEITEDETVQLKSYLLSLGVNDPVTKSSFGWSSVFFDKLAAELTSVLLEPIKESGGTMTLPEAFCESGGTMTLPEAFCRMNRARGMEMISPEDLLNACQRLDNPLSLFNFDNGVPLSLFNFDNGVSVLQLRSLNALQISDEILQMVESAGAMDASQLSKASGVPLVLAAERLRYAEEQGKLCRDDTIELRYAEEQGKLCRDDTIEGLFFYPNKFLDID

SEQ ID NO: 130952 - protein, 436 aa, Heterodera glycines
MHSSYHKRNYICEYHPDRYADLLKVQEKSAKNKQSLLEQEAIVDTLLEAKGLLSPDVYVLNGRSQEWAFQKLGLSSEPRKDPFIAEEVTDNHKIALCYVCGETFISFSKEEEFRDAWFSHLSTSIHQRCKAMQILVHEDNLVECEGVPAECELRTNSEFRRIDDSSDDEANYGPTVGLDYLIIYNVSDPHPPFSQECKEYVNTVGDENAWSIHIFDDAHFERAARRALYHYERSVVTRSCDVLDNFAHSYPPIWDEQFSVSLGVLSIQSRCEFGLEFIIRDTLSSKLYCTCCFVQCDDNDTQMFSKHARSLEHITRAMHSMNKRNMITLSWRFPNANDRKPLVMDYLVNCRKKLRQEKHGISVYNPALVYKMNCSSALPKRLFKLAKIAPNDRITFIAEHKKKRQPRIVPLNNALNEFCRIEVKLEKKEVIVCHCE

SEQ ID NO: 130953 - protein, 95 aa, Heterodera glycines
LFEYPKRTLEKIDFFVFGAVPPNRCAQIYGETESFGNSFPIACTLILRWIFAPHNCLSTPNGHLKKSIFFFSGQSPRTDAPRFMGRPNPSGIASL

SEQ ID NO: 130954 - protein, 135 aa, Heterodera glycines
MPMGSGMGGDNGGMGGGGMSGGMPGGMNGGMGGMGGGGDMGGYGSNQGGGGFSNGGPSGFGSAGGASGMMESARYVQSAQGLPPIQIPPYSAEEDGPGSAGHKNAMPPIQIPPYSAEESDDKNVKSIIKPLLPGN

SEQ ID NO: 130955 - protein, 78 aa, Heterodera glycines
MKKDEKRLITFSKMELIIEHTLDVAEDGKRNDKNKLKTIIEWFKNGAWTLEKEGDYDYGLAYSQDKQKALKRVRVVVC

SEQ ID NO: 130956 - protein, 31 aa, Heterodera glycines
MDCIVTLSNSTYVMAETANREKIGYRMIPRM

SEQ ID NO: 130957 - protein, 142 aa, Heterodera glycines
MVDFTKRPSTISYHRICTKIYNILGFVSVCAKKPIPKSGIFYFEVNDLNGFASFAAVGLAPKELPLGERAVYFDGTNTDQQNNSYEYSLHSVGFASSFFPIFKNLPSLEPGDVIGCGVNLNTREIIYTKNGKRISGKMKQNK

SEQ ID NO: 130958 - protein, 48 aa, Heterodera glycines
MFIYYCCRTTEKLIPMTDKNRNLPPVHFSVNSGADFTWFNASNTDDCR

SEQ ID NO: 130959 - protein, 181 aa, Heterodera glycines
MYIATSKSCNGISGEPSSSSPPVNWRSGALRGGRKVTKEPAYAFILPNLEQYPADFRHFLERDIIEISTLRRLENSGHLNWWCQHDSNQRLWPLVTTGDGNCLLHAASLGWHLGCPRPAAELAQHAARCAEIREPKTCHLPALALARVQEQFGVGFGAVGGGMAPGMERRVGVGIADTAPK

SEQ ID NO: 130960 - protein, 33 aa, Heterodera glycines
MTITIGQRNKRSMGRRMGEVRFFFCNLANQTVT

SEQ ID NO: 130961 - protein, 102 aa, Heterodera glycines
TTVIRRGTTVIRRGTTVIRRGTTVIRRGTTVIRRGTTVIRRGTTVIRRGTTVIRRGTTVIRRGTTAIRRVIRSGTTVIRRGTTVIKRGTKVIKRGTTVIRRD

SEQ ID NO: 130962 - protein, 87 aa, Heterodera glycines
TIFETQTKKILDQKIAISFFSFFYRKLGNNRCLLLSGPIKQSYDIETQTKKILDQKIAISFFSFFYRKLGTNSCLLLSGPIKQSYDI

SEQ ID NO: 130963 - protein, 39 aa, Heterodera glycines
MYSKFYLSPMGDKWRLGDYFLNSSERGDNWRLRCFFIIY

SEQ ID NO: 130964 - protein, 37 aa, Heterodera glycines
LRPPGGLFFNLFRNVDIIGDRAFNGDGGIIFQQIFND

SEQ ID NO: 130965 - protein, 82 aa, Heterodera glycines
SVHLNNFYPKNFFWVFGAVPPNRCAQIYGETESFGNSFPIACTLILRWIFAPHNCLSTPNGHLKKSIFLFSGQSPRTDAPRF

SEQ ID NO: 130966 - protein, 95 aa, Heterodera glycines
MSPADFYQQQKSIHTKQMLQQSPIAQQFHPSSTSNSVFPQLSDFVEDGLVDDLVVPSISNEDDFDLDLIEPMRCGDHQQQGYHQQNQHQQQNIIE

SEQ ID NO: 130967 - protein, 305 aa, Heterodera glycines
MAGHHSDADVEELMAKHKAVLEREQRALAEQQYWRDFAFQPSGESIAEQALHPTGLEMEIQRYNFEHQQQERRLQQERIWKEQREAEMLEKKMRRIQLEQQKSQQHQAKDSTRKRTQQQAQISTPTKAETKNCGKNGTLSSPGNARKQPQHAVSRLYFSEANAEPEHAAPASAVLTTEQPIAIIQPDPEAIRAREIIDQRLNIQEADFVEDVHCGSDDKAPGPHPNFNAVHMEIVSSKKEGSWRDNNETCGVCTEPLLRGDLVTQLPCDANVKHIFHTICLRRSLTINRTCPKCRRPVNIPDDIW

SEQ ID NO: 130968 - protein, 89 aa, Heterodera glycines
MAPKCLGGKHNECHVVPSLALSPSFSAGCTVPPIRNGRLDQFEQGEARGDWSPGLKPECVPQVHPAVEGQILWSRPGRRRRRRRHLLSG

SEQ ID NO: 130969 - protein, 66 aa, Heterodera glycines
MLVVIIHPEQWNGGSDRCTIAELKRRGLRPRIQMAGSVMPHIPESRIYYQERQSHCKQLELDDLER

SEQ ID NO: 130970 - protein, 33 aa, Heterodera glycines
MGGPKTYEVTEESLKQLVNFQMNICGSVHSYKL

SEQ ID NO: 130971 - protein, 136 aa, Heterodera glycines
MDIAADTLLHPIALLLLRLHSRRVSETSSEVEDIVVAELTSSNKVLSGSAVRKFHDLWVFCRSAVIEEVYAGILLKPMNRVVMVLLSFIADDKLSAEQVELKALAYAWFLDCAHHNELHKIVQMLTLMLLNPVTAR

SEQ ID NO: 130972 - protein, 77 aa, Heterodera glycines
SHFFYFAFENAVCPNYVTEKFWKALRNLVVPIVLSRKVMEEVGIPNGTFIAVDDFNSVKALAEYLKELQRDKDKYMR

SEQ ID NO: 130973 - protein, 36 aa, Heterodera glycines
MKSAQFSSLLQNQSILINKNKWKPWFKGQLLTKSDY

SEQ ID NO: 130974 - protein, 92 aa, Heterodera glycines; identical to SEQ ID NO: 125147

SEQ ID NO: 130975 - protein, 46 aa, Heterodera glycines
LFTEDFILEVSQKNGYLFFDNFIHIQMLSSMIGRAVRNRPFIFEGI

SEQ ID NO: 130976 - protein, 53 aa, Heterodera glycines
MTMKRSQPSGQKPVASSSDDVLQQQNGGIAKRKVLKMAQILFYHILALMICLL

SEQ ID NO: 130977 - protein, 39 aa, Heterodera glycines
MTLTRIFRTILTFTRIYITILTLTRIFQNDSDEYPCLMA

SEQ ID NO: 130978 - protein, 71 aa, Heterodera glycines
MSWVFRFDLNWILKGGNLAKIFNPSPFQDKFLETLRTFKLPFSNSGQMYFHPEFRKNLKIQGFVLYCISEM

SEQ ID NO: 130979 - protein, 76 aa, Heterodera glycines
MAMKCFTYIFLGAKTKARQTKCFYLFIHSLGFFPFIIYFSSTSLLHYHNPFIVIVVSLSVPYSLSLHLFRDDDEDQ

SEQ ID NO: 130980 - protein, 100 aa, Heterodera glycines
MMILANGADPNATDSAAMSPLAHVLEKKKTGTKSEESTVKKPECVDVEEAIWKEWQQMALKTRRNEQRKTPRRKGTGVLEPSKHKPRPSRKLRPKPKLKA

SEQ ID NO: 130981 - protein, 364 aa, Heterodera glycines
MMILANGAGPNATDSAAMSPLAHVLEKKKTGTKSEESTVKKPECVDVEEAIWKEWQQMALKTRRNKQRKTPRRKGTGVRALSLDGGGIRGIVLVQMLIEMESLMYGEGLQAGGHEKNFVQKNFNWIIGTSTGAIVALALVSGISLIDALRLYLRLKDSVFGARAQLIGYNAQNLETFLQAQFGENKKMAELSRGNIKGLKIGLFTTATYVGQKPPRLVKFRNFISALNEYDPYKTNIWLAARYSTAAPTYFESRDKFMDGGLLANNPSLELLDEISKENALAKQHNEPQYELECFVSLGTGKAPTEPVGTTSLEIGIIGAIKNLAGILMDQASHSPGKNMDFHIIGIPNYDPSKMVELWAPWCR

SEQ ID NO: 130982 - protein, 49 aa, Heterodera glycines
MMILANGADPNGTDSAAMSPLAHVLEPQQQPAPMSIYERFNKEVCEKNP

SEQ ID NO: 130983 - protein, 97 aa, Heterodera glycines
MTNLVSFQIQHRLAKHMDREHFEKVLALIFWEKADPEKAMLPKRPLDLGPGKRGQVLTALNLFVFCKAYRASEELSNVTNNVGFGTKFVVFVDYQKV

SEQ ID NO: 130984 - protein, 167 aa, Heterodera glycines
MHPFVLRNFLSENDWPPLRLWTDDYLTEKLGKGQCLNVRIGEKRHFRGKVLHEHQCDRHTFENSASMLKWMKSANFGPVNGNEETSSAYPNPNTHWAYLDYRDVLELLEQDEAQYVDWSLLGMKNATGEGENWRNSTVWIGLFGVAGRESDIHFYQVRTPDPNSNRN

SEQ ID NO: 130985 - protein, 75 aa, Heterodera glycines
MEGNHWRREQLFHFAEIVRLDLMKTTVIATQCANISSAGKAEKIQKEMHAIGIMLQEISSHVATWIEKKLENIKK

SEQ ID NO: 130986 - protein, 107 aa, Heterodera glycines
MIETPQKFTDKVTEEEGNISAAEMKKMRRKANKVKAVEEKAKQNGQIQGKQVKQLGNHKGWKQLELLLVMLQCLNKIVTLDPSNENTKKLFGKYMEKCLFFVDDSVF

SEQ ID NO: 130987 - protein, 201 aa, Heterodera glycines
IRGDLSNGDHSKNNVLFGAGQQPSGFYRMYEPKEVIGRGLASVVRRCVEKGSRKESRKEYAVKIVDLSTERQSEREAKRLSEETFSEVRLLKLLSGHPSIICLHEFFITTTFVFAIFELARIICLHEFFITTTFVFAIFELARCELFEALNKSVTFSEKRTRLVMRQLFDGVHYLHSVSYLQVMRQLFDGVHYLHSVSYLQ

SEQ ID NO: 130988 - protein, 24 aa, Heterodera glycines
RTLSTAVRQRSSKIYSMPQILWAG

SEQ ID NO: 130989 - protein, 218 aa, Heterodera glycines
MDKAGGFIGYMFVPVLGEKGIIHKNLSELLVEAGLASVHFTADRSSYYNHLLAAEKSAKGAKLGIWKHFDETTGGNTTTNHEEERRKQDNDASERKLQFKKVLATEIYPGFRFAAQYFDDGPTIEKLMQALQIEMKGVPTGQFVPKRQQICAAKYTDGDLWHRAKVEAQKGDKIDVYYIDFGNREALSLERIAPLPPQFHSQPPLVKEFQLALIAGVN

SEQ ID NO: 130990 - protein, 276 aa, Heterodera glycines
MSANNYSAVRNNGPAQANRGRKRAQPADLELERLREEKRRRRQRRKEEEVQRQRALIRLRTDYRNARNAVMAGQYRMSVTATTTFLAIPQITQVRGQPSVPFTSVINYEPNVPIVVPPPLLGQQTIVPHLPAPVPLLPRSDDAVSNVTAALNSNTQFGPILHRTLATSPTNPQPVPLFHRIVTRPTDPRLGFQAAHQPSAVPPMALLSQIPPPPLPPFLQKPSTSARPCAATSAKSRKKAYSSDDSTWSGGSEACTLPKRRLVICSEDDGEEKKKE

SEQ ID NO: 130991 - protein, 141 aa, Heterodera glycines
MYCESCAHHVKKASISLYMKLELRDCEDPEISQIATVFSVVAEHYMNLKVEQFANMVDEHPEQLEALLKSKIEQTVIVKLNIKFKAKGELETLDWIISSIQQENGEEGMPQEGKKSTDANTEDGEIIEIDGPLKKRVAKKN

SEQ ID NO: 130992 - protein, 307 aa, Heterodera glycines
MAHFEAPKADEKQPQQRTPLFEQKQHYVHRVERFALQRHVTEFVLNGQYDEPEEALLRAFEHIIARAVRNAEDSQQQTDGAGISAGDGARRQQRVTRLGILLNGRGLTDPIVLPIRPPEQNTAEVLMAELDKLGQSDGDEEVHGGGISKRSLLLSEPIEVVITCIAPPVGAAPRFYQYQHWGYDDRQMIRVTNLDDNFCLFHALIATRAYTDQEFLKTTSQRQSATDADHGHQSNAVPAEIARRVMTRTDFCAGYEALNRLVSNRERMNAAVTELMRAADIPADQEAYGLEHLDQIQQLWVSCWCWK

SEQ ID NO: 130993 - protein, 371 aa, Heterodera glycines
MCHLQLDFWLRRMLQNWYCLVDDMKSNHNLKVIKRARHEVNAPPAVPQSVDQLIVPPAYQTYESTDGEVEQFLLADSGVYYEAGNENPQRILLFGRESFGRWADRMKDCFGDGTFSLAPPMFYQIYTILAKCCFNLISRENCFKAWVVGYRRVPLLADVQVASVLREDVWTSPSSVADILACLVQHGLRDSCAQRRCCHVSCMRNQILLLPFRAEFAKKNQGTKSLAGCSTITLDNRGQMELGLNHSSHQNNGTSRTLNGEARTNNYAEAEHHRLQGAFNCRHPSIWHFIDVLRREQKGTDGKYASFIAGLEPPKKAKKYQAADERIFNLVQNYNPVNPNYDNDHNYHINQNHHIILEFLRGISRNYHMNP

SEQ ID NO: 130994 - protein, 95 aa, Heterodera glycines; identical to SEQ ID NO: 125597

SEQ ID NO: 130995 - protein, 64 aa, Heterodera glycines
MLDLVYKEKSYSQKHAGAETGAPKRSGPVTKGSVTKSSALLVNSTFLNFIKNKRGTLSFCKIFL

SEQ ID NO: 130996 - protein, 46 aa, Heterodera glycines
MERFVQWLNEQLQKHDIGSGQKRDWMELAAHAHYAIVRQMTNLYGM

SEQ ID NO: 130997 - protein, 26 aa, Heterodera glycines
MMYRIRGPVYYEEFIFLNTHTMLDFL

SEQ ID NO: 130998 - protein, 81 aa, Heterodera glycines
MTVISCEMKHIMTVISCEMKHIMTVISCEMKHIMTVISCILFFSLHLKRNPELDLLFLDKNPGKSRPMTNPVCRKIAWTWN

SEQ ID NO: 130999 - protein, 271 aa, Heterodera glycines
ALSAECFPANVLITGGCGFIGSNFVNFAFDRWPQAKFVNLDKMAPGASEFVNLDKMAPGASEERIEKKCRNSDRYLFVKGNLTEATLVRNILTRNRIDTIIDTIVHFAALTHVDESYANPTEYMQENTVAMTVLLEAAKDHGQLAKLVHISTDEVYGDCLNAEEEVYGDCLNAEEPKREQSPMEPTNPYAVSKAACELLLRSYWHSYKVPYVMVRHSYKVPYVMVRMNNVYGPRQFRNKLVPKFVRLAMEKRPFTLAGGGTPKRWNLENFE

SEQ ID NO: 131000 - protein, 246 aa, Heterodera glycines
NLIKLKCEVHAMKMQFDWEMPETSSTIIAWGMAHLLNNPQSLTRVYDELDKVMGDERRLINAGDKARLPYTNATINEFLRISNMIVQNAYRRVFVDVTIGNFQIPKGTCILPQISVVLADDEVFDNPKMFRPVFDNPKMFRPERFLDENGNFVTCEKLIPFSVGRRKCKCFAESMAKMEIFLFTANILNQYRVLSVGKVLPSIKREMGITIHCLSVGKVLPSIKREMGITIHCPKFECRVEKRIGH

SEQ ID NO: 131001 - protein, 19 aa, Heterodera glycines
GLLGSWVRVPPGELPFMFY

SEQ ID NO: 131002 - protein, 275 aa, Heterodera glycines
MAYKKSIYETKHNKRYNDEERVQIIENYAQTSKIINTKFANYSKEQRAEMISKIIGVNIGTITKWKRRFSLQRKRLNDVQREEIMAEYYKLKNGEEKLSDVAIAKQLDISINNLKLLKKTCGHIQNGTNNKKEEATKKEKLPNGKKKKEIIKKKKQINDRQNGEELSKSSNASTEEEIPKKKKTQKEVKKGQKESKSGEKIIKTEQKENKSGQKVIKEEQKESQSGEKIIKEKQKESQRGQKIIKEKQKESQNDEKIFKEELKEIKTEPIEIKQE

SEQ ID NO: 131003 - protein, 169 aa, Heterodera glycines
MEMELKMAKLELENKEQKLKQQQELIGEQNALKEKLAKIEQEKKNIATSDQFSEMQNDRKILLKKISQLKKEPKQRKALLNFKQNYWVANDCDEKLEIIGDKKLIVHYKGDYKVISSALDSPLYSRQMNRINQCDMKRTLMHMKVMAVFGLTEKERDQLPNIPTVLAIP

SEQ ID NO: 131004 - protein, 81 aa, Heterodera glycines
MIETQFNAFLNKEQQRAFEFKIKLSGRTCTLSINGVKLSNNQFRQLPAWATNYIRLKGGWKRHEKKAKIDPNAVKIIYKAM

SEQ ID NO: 131005 - protein, 128 aa, Heterodera glycines
MRKHEIQLFKNDFIINYCQNHINKMVNERRILYQKANYFYKIDKYDEAARTINLSIVQSGTKNEEINKMEADLFANANKKDVKQRLEFIKRLEVLRSLERLDEEKETALNECLWNLQDDLLKTCRDVW

SEQ ID NO: 131006 - protein, 53 aa, Heterodera glycines
MEIDHLLFLFYWPRLIFTFVLPVTIILIANLAIAFKVRSLNIIQGQCEQIETL

SEQ ID NO: 131007 - protein, 137 aa, Heterodera glycines
MTNSGGNYTPPAQTQPNYSCQHQSPYLAHSQRLSAHPSPAPSVRPLSQTPSSVHSMNNATIQQQQQQQTQFNQTATHSYEQHQRFLADQRQRMLDFQQQQQFVASHQSVSVSTFQQRKPREMHSITFHKGSHGLGIR

SEQ ID NO: 131008 - protein, 44 aa, Heterodera glycines
MTYVFCFYIILAINLYIFRLVNRDQIAKLWSYSQTKIENFNQTI

SEQ ID NO: 131009 - protein, 36 aa, Heterodera glycines
LYVYFILQIVIYIMLLVTRNQTEKFWNYSQDIRLFD

SEQ ID NO: 131010 - protein, 36 aa, Heterodera glycines
LYVYFILQIVIYIMLLVTRNQTEKFWNYSQNIRLFD

SEQ ID NO: 131011 - protein, 108 aa, Heterodera glycines
MLMNGFETGLLSINGAVFCTYPDLIYTSGSVGLCNRTWLLCIVPTVYAIILSLYTTPILFSGLYMSWFFNPYVGYVDDFGKIVKIFNIFSIYHTVSLSQLQYHSPMHT

SEQ ID NO: 131012 - protein, 81 aa, Heterodera glycines
MFVIFGLSAIYITFSVLLIIQTQSYNNTFLQVVLISFFNGMAAGIYIYMQSVRISDALIIAGTYAWLLAHGTQMAAFHFLN

SEQ ID NO: 131013 - protein, 102 aa, Heterodera glycines
MAFVRSFRRYNDYYRIGMDQLIGWVLVSEDSFVRRVVLQENLAAQLELLPRFMDDNASMHYNSREKQFATRYQLQNPLPSIFVAEYGDCPTMKKVAKLGNVH

SEQ ID NO: 131014 - protein, 86 aa, Heterodera glycines
MRRRLQKRFKYYEKKQKLEETAARKKATAAEKRARETEEEKPDETKKVGKERGKGECGREKEEMGGKKEEGKEKKKSKWEKGRKNG

SEQ ID NO: 131015 - protein, 86 aa, Heterodera glycines
AEILKNSSNCQKRRNSPPNPLRVDVIEGQLPKLFSAAQHAHLQVLLHKARISDGFALALNKRKCANGLARKRSECCLMRLLISFNF

SEQ ID NO: 131016 - protein, 376 aa, Heterodera glycines
MSSDNQNEAEAKMANAIFISADCWLCVFDLLAPSQLGLGIALISHRFDFYVDEHFKTRKWTLAFIRIWHKIGENGTKKMEIVNFKWKALPIPQIQMSRKVIGFKRIYIQYIDQNVIAFLHRFRQLFAACQINLNIQTDNDRISEFILRNIWPMLGKNIHGIETSASFFHLLRQMAPSILSDCPSLRFVIFYAGDLFAEFPPDDSAAASDGQSVAKWLFTPRPDDVPKVFKCCFISADCWLSVFDLLSPRKLGLGIAMISHRFDFYVDEHFKTRKWALKFIEIRSKIGKNGTKEMEIVNYDKETLPIPQIQMPRKVIGFKWINIYYIDRNVIAFLHRFRQLFAACPINLDIDMRSDRISEFILHNIWPLLGKNILVL

SEQ ID NO: 131017 - protein, 126 aa, Heterodera glycines
MFNCWLTLDDGNLASRIEHFKAAFANASSPANFIAIISFPLPFADSVVPFALTNELTREQLALKVIDNSHRFLFVRCPIARDESKWTKWEEEAIYWRICDQWNQTEIRICDGFLDEIPGPIDQQQK

SEQ ID NO: 131018 - protein, 401 aa, Heterodera glycines
FRSPIRDNQNAFFLTFMALLIFLMQCGFAFLEAGAVRMQCGFAFLEAGAVRAKNVTNILTKNVLDSLITIVNVLDSLITIVSYWSLGWALAYGANPVTILSPFFGASQFFGQQISDFGRFFFQYVFAARASTIISGAVAERAEFTTFFVYSLLVPGFAFFAFPVLAHWGWSSVGWLHKGITVGEHNSFHTDLAGAGVVHLCGGTIDLAGAGVVHLCGGTISLIAAWMMGPRIGRFSSEGQPCKMEGHSVPLASLGLASLGGFILMLGFLAFNGGSVADISLPGNGLLVAKAMINTLLCGAFAAICTLIIHKIRNGKWTVLLTMNACLAGMIAACAGCNQMDAWGTIVTGVGAGLIYMALSGLMLRLPFSHYPFSHYLSFFSCFSLSHFYTLSLFSFIVRSD

SEQ ID NO: 131019 - protein, 37 aa, Heterodera glycines
MHQQKQRQKKEKKKKQQQQNTMTSIVTAMKTLKYSNE

SEQ ID NO: 131020 - protein, 67 aa, Heterodera glycines
RSRTKRRRTNFSTITFFFLNQIKHSWYYSKAFEKCYYPANFQKFLFMHKKIRAKKVRITGFLSSFWP

SEQ ID NO: 131021 - protein, 102 aa, Heterodera glycines
MTIGMVGSVAMSPRAAEVHRQMLQKLGMDASNVPPNRAVNTMARGLFNGWLRFGDADALVVFIVSPEDKFRFDERAIENELQQISDGQIEVERMTSEEAFCQ

SEQ ID NO: 131022 - protein, 44 aa, Heterodera glycines; identical to SEQ ID NO: 131008

SEQ ID NO: 131023 - protein, 36 aa, Heterodera glycines; identical to SEQ ID NO: 131009

SEQ ID NO: 131024 - protein, 30 aa, Heterodera glycines
MEHSVKNNNSIIWLSDHDSLDEKCINLLQG

SEQ ID NO: 131025 - protein, 205 aa, Heterodera glycines
LRIQVNPENKVEFPNISPEKTLGLSKTLAHSLPQIKGYQKLCVKVEERRLESYCANCSEHEWELLRLWKLLKPEEALEGRITDQWQQIGFQGDDPKTDFRGMGMLGLDQLVFFAQFDLDNCQRVLSLSNHPIIGFPFAICGITITFPFAICGITITALCKELLFDDLLKNHFYNELLFDDLLKNHFYNALDQPSLSEDHFHQVYC

SEQ ID NO: 131026 - protein, 199 aa, Heterodera glycines
MNALSAVFPATNILCCMFHYGQNLYRKMKGLKLVQMYGEQSVRGEAVRHSFRNVLSLPLLPPTYVRRAFSVIAGTAPMEMAQFLLYFARNYIGMTQRQLLDGANAFGKGLCHHPALSDFISEVSGSIDRQVDAARSARNFIHKRYVLQDAVIMRILADATYNDDAEIHDVMTALGLQVEGYAGKLKDYENTEDSIMNFA

SEQ ID NO: 131027 - protein, 395 aa, Heterodera glycines
MGFGGQFGVQSDRQDKSAAGWDEREKAAKHESQTDYKKGFGGQFGVQSDRKDKSALGWNEVEKVKPHESQTDYKKGFGGQFGIQSDRKDKTAHGWEEHEKVEKHESQTDYKKGFGGQFGVQSDRQDKAAHGWNEKAREEGDGAAKTAAETQKNGAQRQQKSDGPTHGAAKSLRRKFEQMASQGEQQNLDRVREERERRKREDEQLRERRGEEERQRQQRLEEQWAKQSEEGEKGEEQQQKVQQQPKQRPTIGVRLPYAAAPVPEQQQQRNSRLVEENSAEIASEHSVAETEVEEPQPPPVKVLPSVADIAQHKMFMGAVSHDELKKHANLDTKGEEEKLRDSGEWADEPKNSMPKETDEEQKERAQQQQVGREKQRENSKNKEPKIKPKLYLNGR

SEQ ID NO: 131028 - protein, 183 aa, Heterodera glycines
MFMGAVSHDELKKHANLDTKGEEEKLRDSGEWADEPKNSMPKETDEEQKERAQQQQHHQYELPPIVYDELPDVVTSSAITPADAALSNHSENDQNVPPPADPTPAVKEEPSAGESTAAPLDTSAGATAIALFEYERQDDDEIGFEVNDIITDIEQIDVGWWRGVCKGRYGLFPANYVQLTERK

SEQ ID NO: 131029 - protein, 104 aa, Heterodera glycines
MIRQGCAPIETIHLLREFGLRSTDEIQRERLIEAGKGLKMLEIEAREIAREDESVEREEEGKDAREEERVAEKERDIGRKEGKREESAAKEEKDAGRKQQQKAN

SEQ ID NO: 131030 - protein, 112 aa, Heterodera glycines
YCDQTVPDEFLHLIYPGPVTLLFNRTDAVPSDFNPGCSTVGVRVPQAKFVRDLCRRMPFRLLAQTSANVSGGPNPLCIRDFEEIWDDIDLIVDAGEIIENNGADEGSTGGRT

SEQ ID NO: 131031 - protein, 42 aa, Heterodera glycines
MNQFPWGLRMTKYEEQLGADLIEHGLAGHNIAKYSIEKKLNV

SEQ ID NO: 131032 - protein, 17 aa, Heterodera glycines
HKHLFDLFYHIHNLIKI

SEQ ID NO: 131033 - protein, 53 aa, Heterodera glycines
ISLEYLLLPPRSALVEAPAGPTPKAFNATTTTLLHVMGRLRDKHVYKPMDVEY

SEQ ID NO: 131034 - protein, 95 aa, Heterodera glycines; identical to SEQ ID NO: 124528

SEQ ID NO: 131035 - protein, 95 aa, Heterodera glycines; identical to SEQ ID NO: 130684

SEQ ID NO: 131036 - protein, 326 aa, Heterodera glycines
MHLYRGHEQKIVKKFLANANRPMFDYMTERLYISDKYERQISEIELSYLERLWTNKNPTNFTLLKLNFVCMLPQDKTDFIIIDNKVYLIRSDRRIYKYGINDGQINPKFVSNISDTKFNFLLFKEYRDDVINILQASSPTPQIKLLLWSAYTFDVLLVVICAYVIRQIRRTSRSSKTSSEDVGMFDQMELEMFSDNPKDLVYRPTTLYALLKSEIDSEPSNYYPNPLQSVPCVHLVNEEYENQPVVVEGTLDLIGDLFFSTCYPKKRQGIDWSEPLYAELKDLMVCPGDLRKCLSHFGHRKDQRNLVVDELDWHDDDDDDITEGAW

SEQ ID NO: 131037 - protein, 87 aa, Heterodera glycines
MHAFCARAIYHRACQSKAKQQRCCFERIKGIESVNRLLEKYICNLSTILRKSVNRLLEKYICNLSTILRSELEMINFTIQTSFRCSN

SEQ ID NO: 131038 - protein, 19 aa, Heterodera glycines
GPGSRSRILKSSGPGPGRA

SEQ ID NO: 131039 - protein, 571 aa, Heterodera glycines
SSIVTPLSETHDCPYSKGYCILSDKSVLIWQIDFERKCNFIPIGNKNGKMMDKIWLSDDGELGLSFGNQTNLIDCGQNITVSDQGIGSIILEDKTRRRKRSKKETKNRVVDGIVTSSQLASQLTYLDAELTQTMSFAFSQSLRTFCEFIEENRRWVEASFFSNPTDLARFTFSNPFIYAKRAAQTLLKIWPCVPLDQKDYEFRPTKLQNQCFEFIPINLKTQGREHFAFIDPKSMIISPSSRKGSCEEFRKIIIQIEGQILEIDQIEGKITSVSPNKLIHHEIKFGLNNLLPQIEAHAFHKLVLLNLTDIKDHAFVSNMVKLSQMTYQIHEKDTKITATISQEWEEVESQMIKAVIGDYRKMWLIIMSLIITILSIDLAIRLTIGLSEIYAGNGRLGNLLFGTTIQKAGSRVRKLRETKIQQGEIYEEPINQINWPPRIRRAGNSFKKSFTRPFKRNRHGPNPTQMSTHFELNSLMGQLGSLNNNTMTGTTFVSLNNFQMKCLVETGSSTSVAPKALADYLGIKTFKSEAHLMSASGHPVHVKEAARVTLKIGNEYVDIIVVFSMMNFHGQ

SEQ ID NO: 131040 - protein, 30 aa, Heterodera glycines
KERTPSDIPIFPFHNWPKATVLIDTSLSNK

SEQ ID NO: 131041 - protein, 129 aa, Heterodera glycines
MNLFVNGKKTTEHVYGRQEWENGTVYTYASLAFRPGKIHHKKVISCEAQHPETNTNLRDSITLDVFYSSDRPKIDLISASAAGTALKAGQNVTLLCTAEGGNPPPQLTWSNQNGRIHEEDDYSYDTGTQ

SEQ ID NO: 131042 - protein, 54 aa, Heterodera glycines
MLDLVQNDASVCPPLHMERLTCAMVQQRHLSKTMTREGKAAKKSEGKSHQFLAA

SEQ ID NO: 131043 - protein, 72 aa, Heterodera glycines
MRSSITPSTFLQSVFRLNKWKSHNYRDKELWVINRDERNPKLNKMLTNWLWNDHLPNENAFFIRANLKYGAS

SEQ ID NO: 131044 - protein, 35 aa, Heterodera glycines
MLNFSPDDDECEEGFVIKKSFGERILCAKNSAIYN

SEQ ID NO: 131045 - protein, 73 aa, Heterodera glycines
MAFLSRLSILPNSPISLLAVSLAVLAFVALASANPPTARETAPNAQQNNANSVATGEIAKNIAEKMERMNEFI

SEQ ID NO: 131046 - protein, 34 aa, Heterodera glycines
FFNFPIFQDFSESGQMLRKDADLLLDHFKSRASE

SEQ ID NO: 131047 - protein, 130 aa, Heterodera glycines
MAPTALMEDGGTSTVTSASSRSTRSSTGSSSGSCCSSCGGEHCSQCCDETSSFISSTGVTFMSYYFFQYFKSIKHMPLDLRQAVHDGEDPRMVVVFSARGMPNMCSNEKCQSWGQILVGFSMNKLFWQLL

SEQ ID NO: 131048 - protein, 38 aa, Heterodera glycines
MAMPVIRAQPGHIPLSDSEEDEQLMRRSTGMIKNETPQ

SEQ ID NO: 131049 - protein, 84 aa, Heterodera glycines
MAEFNTVIHGSSAFVGWQCCSRIGRAIGIERDPFLYELQCQIVAEFGDCLSPRVMFAMLALHQKVVRPIGLGPIGLSLYPNSAI

SEQ ID NO: 131050 - protein, 234 aa, Heterodera glycines
MASKNNASKKSTSDYPYTALSDQLAAISQQMDNNSVDPITKQLLKICVELLQHVQQQQAVISEQDLQLQHFKQQKMMEEAIQDHERRRSVVVMGLPESQKQKPSERVAEDRTAISGVLNELGIESPITVYRMGSPDQAKAGQNRPRLMKVIFGCSKHQKQTLAQWNKGRAQINQKLGMSNIRIRPLLSQEELKARRVLQEECSRKRKEDGGEWVVYADKVMLRSDIAAFKNNTN

SEQ ID NO: 131051 - protein, 46 aa, Heterodera glycines
ACNQSSKAKPSADGQRWAVTNSSEGEWQQQSVRTQIGTQMLPTGNL

SEQ ID NO: 131052 - protein, 57 aa, Heterodera glycines
KPSIACRFSAQQSTNRVFDSLQKIIPYTSFLQPNIANLISCRLKAIHCLPVLGTAKH

SEQ ID NO: 131053 - protein, 179 aa, Heterodera glycines
MASSSASAVGDNNGWSPEAKKRRTIIGTLLRRGDILETNDGDDKTVERNDQTAADDDETDQTHSNRHHFFLKFMMNYNGFSVETQQSVDLSCMTFANAGLEMDEAEQTMMNNEDEQNCSDQPIVQRTTQDEYVVSEDWPNANNVGTKKARKSETTTTTRRTSVKLTAGQKALEVVARVN

SEQ ID NO: 131054 - protein, 16 aa, Heterodera glycines
EATPEGFGLPINLGAS

SEQ ID NO: 131055 - protein, 39 aa, Heterodera glycines
MGANVSLSTTVAMASAIAVLYLSTDSRLCKGPIKVRSSN

SEQ ID NO: 131056 - protein, 103 aa, Heterodera glycines
MDDADLSLVVPAVTFSSVGTAGQRCTSTRRLIIHEKVYDVVLERVLDERTLIGPLHSRESVLKYKTAIAEAIATEAVAVNNEASQGLSSSLFTQNVSLLSEWI

SEQ ID NO: 131057 - protein, 143 aa, Heterodera glycines
MMLSLTIVVSFHGTFVTRSDRAYRCMCFFRNIKTLTNAIDVNLAATTELLDTAKTPSCLYSIHAQSPEGPPVQLGKVGDKIFHVWQCDDPAYEFLVHSCAVDDGRGSKFDLLDIDGCAIDPVIQPDVAYIREKKLVSLVFKKW

SEQ ID NO: 131058 - protein, 239 aa, Heterodera glycines
MTFKLMEKAGINGEEKTFGLQHLEMIQIFWDKEFPDMFRIVAFDMRTGIKPIFKGEGIRKNEVCVIKEGDHWDGIKSVTQFLCVRNYCASCEVTCERPERHRLECKERCKKCCRMGFGFPCADVCAGIYCAECNRNFYNTECFESHKKTACREYKKCEKCGETHNTRNKHTCGEKFCRICKIYHPKRGCFIQKLKIRSTRKYRIVAYDLETTLYNGVHAPNLVCAALTCSRVRGREKEM

SEQ ID NO: 131059 - protein, 104 aa, Heterodera glycines
NGLSKNRNYAQKASQSILALPIPSTIAFIHPIMSAKIIRVPKIACDLSLAKNGVSKNRNYAQKASQTNLALPIPSTIAFIHPIMSAKIIRVPKIAFDLSLEKMV

SEQ ID NO: 131060 - protein, 198 aa, Heterodera glycines
MGMGRPNKQRLAIGQFTFAQKSVGGNARKIGIIATKTGGITSGKESISDRVQAEGRGIPSEMCGERDETADDGRRAEGTGGRIRPDESGVGETEARKRSGGRTKRKVPTEGGGGRPTDSADTADKSDDEQSDAYQQYLLRRRPHPAPFCRPAATAAAKLFRSRVFLPFADAPIGGETRDQSDGIATSFGGEDGDKTGG

SEQ ID NO: 131061 - protein, 493 aa, Heterodera glycines
SKVNQQQQQQRHERKTKSNCKRRNSSVSTLSAPCAHSIPTSSNVLLNLVDRFVTKRQYSDSNLLKHNMNKSTFGENFCRRSFKWNLFWGRKDENSDKCTEKNDLVDELQSSRRKSEEDKDEAMRDYRKKSVQQRKSLRLGTLMEEMGEDRDKKKRQFGNGAQPKAVLSVHEEETHSNTQTVRIRNNNSLGSGQEAERSYPIKSPTVPKIVATQRFSLIGACDLTKLEEAAEGEMATSGGVRRTTSLKEKYRVREEDSLKLDMFLKEKRMSRTVEQQEDGEQSDDVQLHLGNNLDALHFVSITSGEGPQNQQQNLHNLSQNSKKVISSQLNIIKTTSTTLTMPRKKNHCNIPRKSSISFQTNGTLKRKKGIGKAQLARRRSSYVTKAQILMAKSKMQQDGEQKNGNTKDEAKEKGVTKKNGNGKRQSDIAKTETVTLREGAKLLAKQRGASVSSSSLRQLLVGSERKASRGSKVAPKTNDNTDNGPKDANAEKE

SEQ ID NO: 131062 - protein, 298 aa, Heterodera glycines
FLQENRRVSRSSLDHFTEYEQQTLFDLKGRAYTVSGLEEGKESEEREGGEDKMIISTSDAAECQPTKEPTPSDNTSGNSTPRQRRKRRSAAERRESHRRRSSAVVKDAVHLAKVLNGLPQQKQKHENDKSLDPCLVHCQPFSPIPDYSETENDEANLHEPPEPSVHAPGDEDEVDEEFDFISRLNGETAEKFYGRRTEANLDKNALLQNSLEHRRSISADHLLHGIGLRREMLLLDTDQAEFADAIQIKMRSPSPHAVPVDDNTIGQQRHIEVEKVAGEEEWGKKGGRDLPDASHLAK

SEQ ID NO: 131063 - protein, 58 aa, Heterodera glycines
MDSDDESEVMAETENGSMINIYDPCVKSAIGDRDTVTDRFSTDSNSRVVKTVLRVANR

SEQ ID NO: 131064 - protein, 70 aa, Heterodera glycines
IRLILHYKGIPFEDVTFSSTLADESSREKWLKQKQNYLYGQLPNLEWDEGTEHKVLAQSQTICRYLGNKY

SEQ ID NO: 131065 - protein, 48 aa, Heterodera glycines
MEMCSNLLLRVPQFLSTKNKMKSAENGVPNSAGTQVTVLYKALKRHYK

SEQ ID NO: 131066 - protein, 59 aa, Heterodera glycines
VNIDHRPQTQKCLKTVRIDVKRFEMGWKNRIRGALALFQDEKCRKWSAKLSWDSSDRAI

SEQ ID NO: 131067 - protein, 64 aa, Heterodera glycines
ATSTSPSALETRQKAEVEVNEYLRDPKIKSRADPSLYWEVNSQKWPMIGDVVRKFLSPPATSSE

SEQ ID NO: 131068 - protein, 24 aa, Heterodera glycines
ELMCSFQRLSHACVSLTCQTGILR

SEQ ID NO: 131069 - protein, 140 aa, Heterodera glycines
MAYQLTPIIMLRWLFVGLVLSSHQQMAQMGRMEGDQMRGMEMGQMRGMEMGQMRGMEMGQMSGMEMGQMRGMERGQKPGMVMTQKSEMDMAQMRGMDGDDGQMRASWAASQKLLRAEEKEKGPKSQKNETEKVKKTCEMR

SEQ ID NO: 131070 - protein, 94 aa, Heterodera glycines
LYKINNYLLIVDYFQLFSSVFFNFLSFSVCCWPLLIAFFPTYYSKSFRWSSNRQMSQIEAAHRTDWPKTWRREEKRRERQKRRERVALEWRRAL

SEQ ID NO: 131071 - protein, 40 aa, Heterodera glycines
MLRTLGVWRKEQMRTGDAGQEEEGGHVRLRRVRGIPTVIA

SEQ ID NO: 131072 - protein, 28 aa, Heterodera glycines
MANPIATKKQKVKLNSNALYESNQLTIH

SEQ ID NO: 131073 - protein, 106 aa, Heterodera glycines
NCSQINDENVGEAGAYKEKHNESSDIFSKVYGIADQKFKDLFKDNAFPTLEKLFGDAKALFVNTTPLLDYDIGSLPKRVKFIGGIDLMQPDHKDVIPFSSKTVYTD

SEQ ID NO: 131074 - protein, 113 aa, Heterodera glycines
MPLDKFETVIQGLGMCKEKEVKKCHGMYGWPLSTVSYCKSVPPFSGNEKTELVISECDIRIVMDALSSGKALLCLPNSFMCRKSCDAWALRLCLIRAVTVSPRRGFSKVSAKH

SEQ ID NO: 131075 - protein, 87 aa, Heterodera glycines
EPEQNLNCADLMAKFNTQNQKVEPMDVEGAPSQDEVEEILGAARMNSEIFYLVKLKGDSLAQFFSSRIASEKFPKLVIDFYEQRADM

SEQ ID NO: 131076 - protein, 86 aa, Heterodera glycines
MFCSHPTLIYLLGILGVAFWFAESSANMVKIVLISKLFFVESQLLAINRCFETISPNICKMIQFWLFLVCLYSIYWVFFQKPCLFN

SEQ ID NO: 131077 - protein, 70 aa, Heterodera glycines
MAIASFALSIACPGPALTAQQRIVRTHFVHVFRLGNATLCADGLANEAIRALQNYCPFSLFIYNWQTIFS

SEQ ID NO: 131078 - protein, 109 aa, Heterodera glycines
ISQGPAGSDGQPGNPGENGQPGSPGQLSQGPPVVGPPGPSGPPGQPGQPGENGQPGQPGNPGPQGQPGDNGGPGQPGSPGGNGEPGQPGGQGAGGQCDHCPPPRTAPGY

SEQ ID NO: 131079 - protein, 33 aa, Heterodera glycines
FRVPKKNRGPGPGFSGPGKSRSRFCPKFPVPAS

SEQ ID NO: 131080 - protein, 276 aa, Heterodera glycines
FVQHFCFRSRAQNKNGSHGSFLCGNDPSAGSPTETLLRLHLPLNGEVKKSSHEFKSKRVHSPNFSPSHSIGRCDGRCVQRAGTNSSFKIENCNNLPSTMRIQRCVQRAGTNSSFKIENCNNLPSTMRIQKITQTYRSVARVQPRTSKGITDLLLPQLKITQTYRSVARVQPRTSKGITDLLLPQLPLVLPKSPSKKSQNLQKIVSETIYAEVSFVNGINQTNHHQLRTAMHHHPNQERALNLFPVLSQIKPQAPLLLFPVLSQIKPQAPLLNPRSP

SEQ ID NO: 131081 - protein, 135 aa, Heterodera glycines
MPFKTVAEREANTTYNFTNVTLRPFLPRNRTHHDLGALFASFIFGGFSPNLFFGTDVDDGRICVVSLRVDDQMQRLSVRQFFAVNSVKFNQKYLCEIQLLPINALEWDVVKIKIFANSMNKWRGMMSRIERILLR

SEQ ID NO: 131082 - protein, 124 aa, Heterodera glycines
MFEEGRTKIKQVNDESATVCYAFKHFLELPRVDDATARRQRIDRLVKFFIDEALEKKRMEQGKQQQVSVSNNWSTNGQPQNKKSPIKRKLPANSRKALRKLPTMGLNFDDVIEEDQQRLRDMHP

SEQ ID NO: 131083 - protein, 210 aa, Heterodera glycines
MHSKFGVCFILLFVIAWAIAAPKKGSQVENTWRRGVTAKKTSAKSASEMSDRRRAANAPAETSRRPTENDDTASKQRLAGKSASQRAAANSFMSLSEERDEAEQSGHQSQTPSKRQRLVKAVNKQQKQPKKPETPRRKLILYSSDEEDEQMPQRTLSATGSTPNNLSSAANASVPLSSRRMDNSSSAQKEDQQQMGDDHIRLLNMFCGSD

SEQ ID NO: 131084 - protein, 89 aa, Heterodera glycines
MHRDVKPSNILLDWLGNVKLCDFGISGKLIESKGREHFCSSFPAITFLQILSLASTKTGCTGYLAPERVNIYSDSSGQYDVRADVWSVG

SEQ ID NO: 131085 - protein, 18 aa, Heterodera glycines
QLTNVVTFAIGALTPTPG

SEQ ID NO: 131086 - protein, 113 aa, Heterodera glycines
MDTFIGLIDAVASVKRHIENETKQQQQQQQHKQKQSVVTKSNSNASKESSSLSVSSDTSKRDRTQSANSENGWTKKLRFESHNNNENNNKEQKQQQRQSSASSSCSSTEGWEK

SEQ ID NO: 131087 - protein, 102 aa, Heterodera glycines
AALDGRDLKWIKVAETRGCHLLCWGGHGAQLGQHYFACAILKSVMVFQINRKERRHKPLREMAMPGQPQCLKIAGGRLFVGYPSSFRVWDKRDNSQICTLLL

SEQ ID NO: 131088 - protein, 36 aa, Heterodera glycines
FAFRFLARNATFTPLRIGLNSHKIFQNLTYKLTNFQ

SEQ ID NO: 131089 - protein, 328 aa, Heterodera glycines
MLRNQIFWIALLLSLLRVAQLAPSHGGAAYNGYNESETEGDEVFHNDDDDEELKQLKDRTRAEYDQQQIAKAMEKSMEEIGNDPYRQEMEAIKQLSLKEQKKREKELIKLAIQQSIEQKPRQQAIEEKSEHEKLFHDLNAVESEALQLYMLGLVGQAKALLSESAQSRRAKVKERYKLWEMQNAGGGNGGSVGTGNTGAVIGSAGYGGAETDRPYLNSRPESSKAAAQRGKAVDQPNEASAGDEGLNEAEKTVFKNGLNMGTNERELSLFQLSDNESKDKVFNAWLKQDIKEQKYRKLLDKDNDTRRETRRGGPGGAVHAVFAQWDVD

SEQ ID NO: 131090 - protein, 122 aa, Heterodera glycines
MKENKKEIENNSCFAGFHLKILVEEDDDDTVSHIGHNTDEEEDDATVLHTRRNRDREEDVATVLHTGRNRDREEGVATVLNTRHNTDHNAYSDIVSHSEQSDSNSDQYEVQYHDKIDLGNVE

SEQ ID NO: 131091 - protein, 104 aa, Heterodera glycines
  unsure (1)..(104): unsure at all Xaa locations
LRQREARSTAFGGDGRCLRDSASAAGIAGRRTTCGGASRFLRDSASAAGSAGRRTTLSGAGGFLRDSASAAGSAGRRTTLSGAGRCLRDSASAAGSAXRRTTLS

SEQ ID NO: 131092 - protein, 153 aa, Heterodera glycines
ANCFCGPFLIADKVRALPAFYASSPLPHAISTLVKDLLACAAGLGTRGVRELINLLVGADRNSKVPLQMLLKFKYTNRRVRFSVEACERAAQFPGWLRTLLIRLDACPNLLSLEKRDKCPLDCSASLASSLYLCHGGHVNTASAQSSQQQTNK

SEQ ID NO: 131093 - protein, 172 aa, Heterodera glycines
MLMNPVAATSSENSKTAALSKGCKTTKFNADENKCNDKDGEQNNDYGSEAEKGGDTVEENQIETEQQIENDDDKQQQMEAVNGEHIATQSPPPPPPPGVDENTPEPPQIDPSDCAKNYDGISLSEQFGEQNGGQMEKENVQSTSSPTTSSHPQRTNEVDSLTIIDDGQFIAL

SEQ ID NO: 131094 - protein, 72 aa, Heterodera glycines
MTTNLWLCNRDEYTLGPTNNELHIVWPNLTAADLEQCVCIFDNVFRFMVNEHHFKVASDLSPIIRHQRKKVA

SEQ ID NO: 131095 - protein, 310 aa, Heterodera glycines
MADDWAEIGCDFKVVFIHHKPEDIVEDAHTLLQDALTDMQFIVGGAQSVLVSVAQPKSFNSMDNGTDVEELEPRIEFYIGLIEKFKSVGCIFVLDHLMQCLRHYQMQNRRLLYLRYRVEFRPPIGIDLPPFKRHLSAADSAQLGRILLGNVIWHNQLYVRRVVKPNRKKMEEILGKDIRHVQIPNVPLNQQRKGSINSGGRGIDGQVLSGETPLEKSDRIVNSAKSSIESDKFSMENGQSPNDRKRNHEDRKKSLATDRTTTPEENGLTEKAPPQMGQHQGRGLNRNGDSGVELVNGNARDFDEIDGIVP

SEQ ID NO: 131096 - protein, 221 aa, Heterodera glycines
MVEHEFVEPDSAVDNRRKRALDAARKIVCVEKGGVAWKMVDEGKEESEEKEEEKQQQEKDENGWPTENRTWEQQHAVLGKVSIWRDYFRNGTNSTSAFVYGAGQQINQQDGSLRSRMAKFLMRDNQSWGSDGAFDREGRDAHGRRRTHLRRKNVVSTLERRFDKGSWSSNMEKGRRLETLWTSSSNCFAEFLAKSYEEDPVLLQRVLEENEEDEEEAIEGI

SEQ ID NO: 131097 - protein, 33 aa, Heterodera glycines
ESRDDEDELLVDNEETEDEPEKCFCCDLSNNLP

SEQ ID NO: 131098 - protein, 47 aa, Heterodera glycines
MNLATGRCAIGVIVPGWTCTFGEKFVKIVHVGLMNMTYFYQMSKTMA

SEQ ID NO: 131099 - protein, 45 aa, Heterodera glycines
MNRLACSSLVGTIMAKFRKVMNKAVKSEISSNEEKICEQKRGTTV

SEQ ID NO: 131100 - protein, 75 aa, Heterodera glycines
IQSLGLNSSAFQSLGLNSPAFQSLGLNPQAFQSTGLNPPAFNHWDSILLHFNYWDSILRHFNHRNSTSATEYRTI

SEQ ID NO: 131101 - protein, 220 aa, Heterodera glycines
KEHAAVPAESVQLLDGNVVVVLLLVLVSVVSVVLSVVGVVDVLVELVVVDGVVDVLVELVVVVGVVEVVVEVVLVDELLELVVGVVEVLVELVVVGVVVLELVVGVVLVELVMVGVVVLELVVGAVAVLVELVVELDVVGVKVVLVDVLLELDVVGVVDVLLELDVVGVVDVLVEVVVELVLVDVEVVPVGVLVELVVVEVVDVLDDDVDEVLVVSSSDE

SEQ ID NO: 131102 - protein, 94 aa, Heterodera glycines
MDSHHKYSTIFFTMLCDDEMRLTSVTLFRDKVHNVVLCCPIGDWGGVRWDWSFPETIKEQIKLFIHRTIGQITDGEMQLENGNGNANLGSFGAI

SEQ ID NO: 131103 - protein, 70 aa, Heterodera glycines
MAKLRSELDIVQVNLTVLRELVAQMKPTNDGGVTEAPEDFHFVRELHSTCKEMQKRILELIPSVSNEEVT

SEQ ID NO: 131104 - protein, 64 aa, Heterodera glycines
MLCALVPNLVAICRHCRTMPTINPLNLWHSVARTTSSLSWCCSRPSLRQPNFANFSSLEYLFCV

SEQ ID NO: 131105 - protein, 28 aa, Heterodera glycines
MPLGVNFNFNVSQFYQQTENREKTFCNF

SEQ ID NO: 131106 - protein, 110 aa, Heterodera glycines
MYATAHLAPQLLIRHLSFCLCATVASAFVYGSRGGGAYGDGLRGYGGPYRPPVYRRPMYKPVPGPLYGYNKRPPVYGGGSGNNYYYPAPAPKPPTPCPPAEKVRDRKMRQ

SEQ ID NO: 131107 - protein, 217 aa, Heterodera glycines
YIDQIVIGFFHNIRHLLQKVEITVLFCNNRRSYDVLQQIAKHFWPFLSEGIVAIVHLNGNELSQLMKLTSPSVFRECAKLRCIYCSQVFPESPSYDGTGASVGQALSKWLHTPRADGRPKVLKCVGLSHIEKHLEDLKMAFISAESPVSYVICLNFGIGFKYGGQPFEWDNARTRERMTFRYIKYICFGGVWLLRRGPIGWDESEWSESEKRAQRGG

SEQ ID NO: 131108 - protein, 78 aa, Heterodera glycines
MRRCRRRRDSREKLGNNKCIGVWHTPEKRMGMSASSVDSIHFHSDGQLQQFLPKGMAKNALRFVVKHRKTDDCCKKAQ

SEQ ID NO: 131109 - protein, 128 aa, Heterodera glycines
PIKYFFKNLLYFFFEKFRLPTFLGSEFRLPKIFGASEFRLPKIFGASEFRLPKIFGASEFRLPKIFGASEFRLPKIFGASEFRLPKIFGASEFRLPKIFGASEFRLPKIFGASEFRLPKIFSASELHP

SEQ ID NO: 131110 - protein, 121 aa, Heterodera glycines
MSHLCDDVWHNVFDCFVRPELGHKIAIVCARFDALVERHLRTKKWTLRALGFYQKKEEKSTEMRGVWQRKRQKWIEKLMLTDKNGQMGWHGIPSSDFRHFWGRNSDFRKFLGPRNSDFRNF

SEQ ID NO: 131111 - protein, 95 aa, Heterodera glycines
MFYEINDKDSSVYNFSSHLMETPMKLSNILIELSLLPKNNESVSQYKISTSLLFKAYIILSYNIVRPYLVIIDANEILIVVPSFNILISLSILQK

SEQ ID NO: 131112 - protein, 276 aa, Heterodera glycines
MGPKQFLVLSIFIIMATFSTILANKNTNRRQKRMDNSQENNSTVVRKRKTTVTTNSGGENAEFFEPAKAFGKSAATALSAKTVPKRKTQPQQMGTSLNSKRNVEEAGQNQQQSPKYAVTLDGIKEMLMSINWAATSRPLTDDHDQLGAQHMGEQQMDNNVQQNLNDADDQFGLSNIGMQPIDVIGMLMEDEPDKENVEIFVKLLNQCHLILAIATEHIQHKSTNVPNLPMVLWDENWEAMSNFIQQNGGHVVGCALLNNANDLTREVADVIENGKT

SEQ ID NO: 131113 - protein, 87 aa, Heterodera glycines
MRALIASLSTDKLVNLLNIEYAPEGTEKQLTPLMLATVLGDAQMAHIFLEKGADPHRMCLRKINTDDNLISELREEKPKMKKVTFEK

SEQ ID NO: 131114 - protein, 86 aa, Heterodera glycines
MLAAFCSTGSAAGNRILINAPIFRRLNAHCLASTLVLAEHNEQKLSQITLNAVTAAKKLGHQISLLVAGKNAEAVANGAAKIPDVE

SEQ ID NO: 131115 - protein, 75 aa, Heterodera glycines
MNCALASSFSPVGKHFAAVVADKKGMRPDLYVNGEELVERLGSCVKNTQIELQNFFVKVEAPLRDFIRQNWCWAR

SEQ ID NO: 131116 - protein, 105 aa, Heterodera glycines
YPLLPKMDKLGTETNRLCQLYPEKSEDIAAKVDEARGRWEALKLSVEQRKRGLDRSYNRHRFMADYRELVEWTNGQKALIQSSELAKDVAGAEALLEQHQEHKGG

SEQ ID NO: 131117 - protein, 420 aa, Heterodera glycines
MPGFRQLNRNTMQKYTSIKCKGYGTSNIPIRPITKSDVTDYQFPILLYHNNNHFDGIKTISKFFNKNYYCLSCETFFSNKPQHSMNCSSLCHGCREVGVDYPCEPQQGYFKKCLHCNNYFYNNDCYERHLHKDLCTKFQRCEDCGVIYNVKYHGNVGHQCGERFCRLCKQFHLKEEDGENPCKSCFIQPLKPHKLKPYRIIAYDFEATQDKKVGNKFEHEVNFAAATIICTDCINGNWKDSLKGSSCKICGPHRTITFAPFDFSNTIVDQKVTTQQPLREFVQWLLFDHNKKFPTVAFAHFGGRYDMTMIIKEVLAQGIHNPDIIKQGNRHYELKIKDNEHCPLTILHDSYNLMPIKLSGLIKSFGLKIQDKQHFPHMFKKSSNYDNILSHLPPREEYCPDQMKIPDQQKFDNWYNNNYN

SEQ ID NO: 131118 - protein, 80 aa, Heterodera glycines
EAIRDHINILVKLNFLENDKGFKKDAKNMENLNALENQLIANKACLIKEDEIVQTYHNERAELERKMKRNEGNETLDEYD

SEQ ID NO: 131119 - protein, 491 aa, Heterodera glycines
MTIASACVKNFALNHLKPNSLAIVPEKGYTPQQNQSALAIKYLNWYSHINNVNIQTAHSRYGEYVFKREGQVYQVDGYIKGTNGKRDKIIEVNGCLWHGCGECFVDLDDETKMPNGKTLGQLREREVRKHEILRRYVDLEVIWEHEINEQLKKDKQMREFFDNWKDHSPIKIRDAFHGGRTGPMKLLHTAKPGQKISYKDFTSLYPWTNFSTSYPLGHPKIISFRLNEQTVNWRAPSDNPYKGLLKVLLLPPNRNINVTVMPIKFDERLLFPLCEKCAKHITNEHPNGLKDDNYSCPHFTPDDRAFVSTCTHLELNAALEVGYTVRKLFHVLQYDQWSDNIFKSYVSEMMALKIHATGFPSWCSNEEEKKEYIEENRQRFGILLDNEKMKAEPGKRYIAKLCLNSLWGRFSMRNLLSKAIINNDESLIRQYTDDKKIELVDLEMIDDDNDVFMLTYKPKEEFVDENKYSNVVISLFTTSAARLYLYDALKK

SEQ ID NO: 131120 - protein, 147 aa, Heterodera glycines
FMTPYFQRPLELGADVVMHSLTKYINGHTDVLMGAMVTNNDQLDQHLKSQQITAGAAGAVPSPFDVYLVIRGIKTLHLRMRQHMENALAVARWLEKDPRVEKVLYPELESHPQHKIHKKQSSGMSGMVSFYMRADADGARKFLANLK

SEQ ID NO: 131121 - protein, 217 aa, Heterodera glycines
MTITVFIAFSTSPQSSRPLTNVITIVIQLVVGIVEFAMFYQLCQYNSKIYQKIMQKQGYHSLSLRYQLSENIRIGKQLVPPLLLHLLTIVTSTVIISWSYFQWPHYYQMYNLLSTLNAVTGFLIELFIITRDMCQIWNNFGKMFLLCPNNRRIADQTATAVANFDNRIVAASNKNTAAVGIAQRDLISGKALIIDQPKSDEHFAMLLQAWESHIKLR

SEQ ID NO: 131122 - protein, 30 aa, Heterodera glycines
MSFLAGLPPMEQIWSFVFCCAISLKEVPKV

SEQ ID NO: 131123 - protein, 171 aa, Heterodera glycines
MADDQVLAGFSAGIGLRIMFTQLGNIIHFRSNRICAVDLPIKARCFFFRFTIHACQFWLIPLCHLGLLSTIEWASKEKIKLIKCLPSFWECFDAINLNTLAISILLAGFLSRWLNAERLWQLETIKFGNGSFLSQTLLLDAFALALLVHTLHIRAASALARTHKYRFYEKQ

SEQ ID NO: 131124 - protein, 31 aa, Heterodera glycines
DDLASQWRNLKDIFYKRLKEMNRRIQMGEVN

SEQ ID NO: 131125 - protein, 195 aa, Heterodera glycines
VYYPPSPPRLPLPPRAKAKIEPPPRPTAKREPQKPTKLELKPSKFEPDSRPKVALPRSKKEPEFPLDPRPSTSRQAGYLPPPKIIPKPEPTKRPVPYRIPKREPKIVEQQPQPLQQPLPASAVEEEMPTIPPPRRGTKRHYPVNGENGENSGGGARARRQTSGISAAASEPRGRTLGMRYPSDAGAEQRNAQVVC

SEQ ID NO: 131126 - protein, 113 aa, Heterodera glycines
MPNSTRRCSSAMWSLTFLRGKLAQRVGRTEIRYTRTPAEFHELLEDPSLDKLDFVHVSEHMDRCVVRKRAEFAKAPLTNCLPVASFVTSYARLHLYDYIEQVLAIDGAELLYC

SEQ ID NO: 131127 - protein, 127 aa, Heterodera glycines
MTGLIRDRSRYFSSLPPRVESPFSGVEPLSSVTRHHHGSQIHYHRKLIRQTLERHVAGTRPCDQLSCSESTLDARRALGFVANKCAPLWGDWSFGACISSRITTVIQQKQLRSAQACAWAAKETEQV

SEQ ID NO: 131128 - protein, 92 aa, Heterodera glycines
  unsure (1)..(92): unsure at all Xaa locations
NSWTVARRTTAKAFGKNVFINQERKSEVRRRSDTALVLTVNDANXAIRRRIYSPWWGASRKRKSSGSGGSMVAKLKLKGIDGRAPPGVEPAA

SEQ ID NO: 131129 - protein, 172 aa, Heterodera glycines
GCGGGCGAPPPSGGGAIKLTLGCEGPPPQAPAPCGCGGGCGGGCGGGYGGGCGAPPPSGGGAIKLTLGCEGPPPQAPAPCGCGSGCGGGCGGGCGCGGGCGAPPPSGGGAIKLTLGCEGPPPQAPAPSGCGGGCGGGCGGGCGGGCGGGCGGRRKRMALIRRCRALQGSVDN

SEQ ID NO: 131130 - protein, 323 aa, Heterodera glycines
MANNAPAAAGGGGGTEMTYRAGAGSQSQLYFVDGNAPSMDLSSPQAAAGTIQQHHHHHHRTAKSCDFDMLGGGGGGTDATATTTATMLGNSHIMIDGENSAHPQQQQMGTQFFGNYPTITGYFPATQHQQQQYIDPAKQLNSSSSVAYWAGARGKSQSLDPIRFAEQTAQLSPLSSSAQQFTTPHLSSPHVASGASPCDATKYQQQQHQQHVQPQQQQQSQQMPFQQQQQAHQQQNPAKQQQQQQSNIELVDPGDGLGPLPKGWNIQGPYGALPNNETPDNNGSTAVNSSPSSTTIGGMDRRVQQLKHEQQCMQEKREQMVRQ

SEQ ID NO: 131131 - protein, 58 aa, Heterodera glycines
MHHLHHQKKWWGMNVSMAMIKKVVMKKMANNKYGPGVRPRDNDEYEQHNGLDADKGPK

SEQ ID NO: 131132 - protein, 214 aa, Heterodera glycines
TLSIGTFRNVFRAQKRWDFWREGFFKYGKFVRHLPEGVKPTHIVVGAGSAGCVLANRLTENPANRLTENPDNRVLLVEAGPQDNWWNWKIHMIHMPAALMYNLCNDKYNWMYFTMPQEMYFTMPQENMNGRVLYWPRGRVWGGSSSLNAMVYIRGHPKDYDRWEREGAKGWAHKNCLPYFKKAQAHEFAINCLPYFKKAQAHEFAIGPDDPYRG

SEQ ID NO: 131133 - protein, 222 aa, Heterodera glycines
VGNAFLDEVIRNYMPKPHAPIQCIAMEDAHFALNTTPISSNSPSKSPVRTGNDRLLEESIALMMPHPNRKREGKAFARPKDQQKFGQKMDDLLTADEEEEEAVLEQQQKVTAELPADVNAEFAAHWMVVECGTTKSPKTDDEERSRFSLKKTPSQSSIPRPSVAPSDRSPKTATTTADLTDTAATSLLKRPAARSSTLSRTQQKAPPLAPKPNIAKLGKVLA

SEQ ID NO: 131134 - protein, 49 aa, Heterodera glycines
KRARSARYEAAKRPNVLKKRARSARHEAAKRPNVPKKIKKRARSARPEA

SEQ ID NO: 131135 - protein, 93 aa, Heterodera glycines
RFHVLAQLEHLQSKYTGTGHADSSRWDWITNQHRDTFASIIGHPDHLSMMAICENEMMAICENETRARTKYNMLCRMVQPCGPPPEKSALDDL

SEQ ID NO: 131136 - protein, 414 aa, Heterodera glycines
MDKDKDNKDKIEPKGRSDHPNRPCHSAEEDGLNEGQTERDKRLWLIHQKRQLRNMDLDALRRRIVTLEQEMREIGGTRSGLPMPTTFDGTTDLQDYLKSFNLIATAHNWTPARCVQVLPLFLRGSARAIYESIEPDIKDNWRSLIDAMADKLKQMSPSLTARQKLAQRKQQTGESLEEFAQAIRNLVLRAYPDNSLEMDFGNLVLGALENDVKQANEVRLRQFRSEIARDFFRANMAPRLKERVMYMEEPQTLEEAVAQARRVEQVQGNLADDMWKNTQDAKAEVALAEVNADEINENGKIKAILGEETTPKDKINLIFGGAIPNFGQFAEGISRQGDSQDIPGDSTHTEEDLIRAALTQTSHRLATTSKEQTTMEISNRTSTKTKIGQEDVDQQVPTEDAEEVMPIEDGLAGA

SEQ ID NO: 131137 - protein, 103 aa, Heterodera glycines
IESLELWRVSCAGRNCSRRCFGFEEWENPVFCADSIPFCTSGVAWPIWMIASSFGLNFVLIVLVLVHLAVVRVRRDLPFASIGVCDQCQRRVSVLSSRIVSSM

SEQ ID NO: 131138 - protein, 1213 aa, Heterodera glycines
MNGVKTKALFDTGADITYIGHSTAQRCFMMVRKGDYPQARAANSTPIRFIGSALANIKLGDFEGKFPILVSEDDSCPCTAIIGTDLMDFISEQGEEEIGLNFKRGLVRVGNMHLPMIAAVNIEKQPIEAQLIETQTLPPLSDSLVWGKINRSLGPDEVFITAERDHEYFPLRVGKCLISPGSTRIVPLRLLNFGNSVIKVHEGSRLAWLEPIADGTEINAQKEDEKENPEMIMTDEVWMKFKLESDKISPEADWTDQTLEFQKKEEAVAPILERIRLNDTILSRDGIEKLKNIIRQNENAFVKPGEVGLFKGQTIHRIDLIDGARPVQQRPYRYPVALQPEIERQVKELLRQNVIRPSTSAWASPIVLVRKPDASYRFCVEYRKLNQLTKRSTYYLPRIQSILDEVSRKKYFSVADCSSGFFHIKLAKGHEERSAFICHMGLFEWLRCPFGLAGAPTTFQRAMEEVRQMCSATFLVYLDDCIIGSMTEEEHLRDINTFLRTMTEVGFRLKPEKCRFALGEIRYLGHLISANGVRIDPKDLEPIHKLRKPKNITELRSLIGMLSYFRKFVYGFAEILQPIYELTKNESTTEWGPPHEKALEELKTKLMTAPVLAPPKFGQPFVVETDASIKAIAGCLLQENREGEVHPICYFSRVLTKHEKRYSVVELEALAICASLKNFRPYLEGAGKSTVITDNSALTSLFRRKDLEGRLSRYQLAIMAFDVEIIHRPGKRNQFCDHLSRYLDDNDTQINWLKIEPKISQSEMREAQKQETDTQKRRETLKKDQNSEEPNEFTGKWRITEDLLCAMDRGEWKIYVPSSLRQRVMKEYHSDPFQGGHLGEKRTKDKIRRNLYWEGMEKDIQKFVRTCDACQKRKIIGNQMSSEPICPIVPASQPCERLHLDLMGPLKTAKGGFQYILMIIDSFSKYMTALPLREQSATTVTTAFVDKFLCQFGIPKIVVTDCGTQFLSSTFESLAKTWGFKHQTTVPYHQSANGQVERFNRTLADMLVTTTGGKDWAAALPMLCFAYNTSINSQINHSPFFVLHRFDPRLPSKMLLEKDGEEYNDMAIYVQELTKRMEEAKSRIRESLKKCANRMTQQQKGTKEVRWTEGMLVLRRRNDKKNKLEPNYEGPFRVIKIEKPNLQIRELDPDGQPFTVHMDQCKPYFTDEEARQDTETSENEKSKHKNGNKKMGDSKLEESDEEMHDGETIVACI

SEQ ID NO: 131139 - protein, 55 aa, Heterodera glycines
MPKKDKTKAKVINEAIKANDIYSVSSLYGLNKQMYKCVQPNHSEKAKQMPSFCSS

SEQ ID NO: 131140 - protein, 83 aa, Heterodera glycines
MVFESVVADLLNRFLGTYVDNLNASQLNIGIWGGDVKLNHLEIKDTALDELDLPVKLSFGYVQSLVLKIPWKNLYVEPTIVEI

SEQ ID NO: 131141 - protein, 24 aa, Heterodera glycines
MPCQPGKGEKGPGVPIWVPTSQQM

SEQ ID NO: 131142 - protein, 94 aa, Heterodera glycines
FRTLNYTDAFIYKIWDADQLKSVEKFAFEQPISSFHWFVPCDCNSSLISIATSSSNVVLLDPRYPSFRSIHIPLILPKDWVTLHNKFAVCSNAF

SEQ ID NO: 131143 - protein, 24 aa, Heterodera glycines
ITGVSIIAVLFLVFLMPSQNLVRF

SEQ ID NO: 131144 - protein, 151 aa, Heterodera glycines
MNSEKSEKANSILLEAAKKETERAWRDVAALTDEVSDFAKSSRETLNRAIKSREKAPYANGIRELYLKMSDSIWEIFTILDKINLESEKAESTWRDFERCKTFDQATKLEEQSQNSLMEARRLHFESRRVQSQMLNYENRLQTIVWEHMGI

SEQ ID NO: 131145 - protein, 49 aa, Heterodera glycines
MVREKKCASPAYITNMLIVNVKKRTAHAGLLNNVKIKENVESMLWLCAS

SEQ ID NO: 131146 - protein, 193 aa, Heterodera glycines
MDYGSGQSALQLVYRQQDLVQRYDTRILYMDTDSIFYDFKTALGDPLKGGNQLGELADEYPNHTIVEFICAGPKAYALWLRNNATGEDEYKLKLRGITLDSNACTRINFEKMKEMVLEKWGTPGNHVRFDYPTKNFRITKQGDILTVPITKQFNPTVNKGVLRDRGLKVVPFGYSSWEYCKAHNPNECRCKKE

SEQ ID NO: 131147 - protein, 228 aa, Heterodera glycines
MPKLPETLYTDRGLEFVAKPMQEFFAENGIKKYETSSKKKAAVAERAIRTLKTRLYKYFSAKNTSAWVDVLPKFLSAINNSVCRATGLRPNEISDVNAREVWKRVYGEGLVPAEKRPKIKAGETVRIPEPKHIFEKGYIPNYSDHVYTVDEARSTNPQHYLLKDYYGTKLKRKFYLPELTKVQIDENTMYRIEKKYKERMRDGKKEILVKFIGFPEKKYWVTDEDFEK

SEQ ID NO: 131148 - protein, 601 aa, Heterodera glycines
MSSPILDIIQGLVNRLEVELTKEIPINPGQNATPNTIQRHLYRAKNACDELSEILEEIQRKRVEMAESLQKIAVAARENKERVYVDFCTHLDIEAKINRAVIKKNEWQNKKEQLEDIFDINPQNSLNSTILTPRNQPIKRVKIPQIQLKKFDGSVEKWIPFWETFRVHVHEDDSVTKIEKHNLLESNLEGEAKELIEGIPISEDGYQIAIDLLLEKYGKSTKLIRALNQEINLFPPSTSHKEVNHNKYESEATMNFAVKFREEWKKVQNEQKHKNFGSKNDQRRRFSSSPEYSVDHKNSQNSNNQRFSRPQNRWERGKKKGSPYPNKFRSSSNSSNYSNGSNYSNKSPPKFPRHFCEQIHSPVFCKTYQTAEKRKEQAIKKKLCLRCLRRGHFAKECFSKKRNCLFCKSANHHSALCRWSKMNDSSPKRKDFVNASTKEVNDEVLASKIIESINAASCLITQPNKISVLKCRYVTIYNPLNKKLRKRVLAFFDDGSQKTYIEEELARSLKLTVIGRQKLELSGLGGANLGKFESPVVEFGLKARDFNMLMIGRAIKKVLKEIPVLDYQEINNDELKKNNISVPYLLDEPKITIGKRFLQLF

SEQ ID NO: 131149 - protein, 761 aa, Heterodera glycines
MIKNISFNGKRYQSKLLWIEEEAEKLPTNFAMAYSQLKSNLKRLRTNPKLLQLYHNTILEQINDQGSVEITNPLVDPNQKGQKIHYLPHHGVVKETSEHTKLRIVYNASAKSGKNPALNECIEKGTNEYNDLTGIQLRTRLKNILIGSDIAKAFHQIELAPEDRNCVRFLWVEDPFDPNSPLIHYRFKRVTFGVICSPAQLALTIKLHLEKYNHPIIKQLAQNIYVDNLLVGINHKKDFQMVYELIKKVFAKAGMNVREFVSNELSELQKLPKEDRIEKETVKLLGIWWNVKNDEYFIKMPKFEPNNAVTRRKVLSQIAKTFDPCGMTSPIILAAKLFRQEIENGKNLKWDSKLSDSEEQKWKELMLTWENKEIKYPRKLFQNNLSEHTKFQLHAFTDACSKAFGAAIYLRIENDQQIYCNLVFAKSLVVPANMPKGKRTIPNLELHATMLCGKYLNFVKIEFEKEIKIQNCTIWSDSTDVLDFVRSERKFDKFIRNRVQNIKKWHLKHINGKNNPADLASRGTSVEELQKSEIWWKGPNFLSESENSWPKTIREYDPINPPEIKEKQNVIFEINSAIKEKDFCEFEKYFERFSKWDRLKNSIAYALRAFKKEDQKKVSQNMEKISDIKNKKNGNDITKEIIKLIRPLEAKEILKAEKLIFKLIQTNSSPTKSIIRNLDLFKDDDDLWRTKGRILKSGLNYDTINPIFIPNNSYIATLLIRDAHLKTMHGGRELVNSKLRENFWIPKSRRKIYEILKRKNK

SEQ ID NO: 131150 - protein, 237 aa, Heterodera glycines
MLGSNIYMFNSFRRFIKRRRVPKLIISDNGTNFVLASKALKQIALEENKQNRIWSEIYRDPMIQNFSSNLGIDWQFNSPYASWRGGAYERMIGLVKTHLIRSLGKRLLSFEELMTYLIEVERIVNERPLSYITQDEVIEPLRPIDILNPTDGEPFSLKLDPTFDREDINEYFEKKTKREELFEIYKKAIFKSEIFWKEWSEKYLLSLREKHINKNKDGNKYPKIGQVVIVRDQDNYP

SEQ ID NO: 131151 - protein, 1512 aa, Heterodera glycines
MSDSQSSDDELMYSADENFEMKVSVQSSKNNDKISEAKKHSNCQKDPLEDPPNFENLLDNSPNCQKDPLEDQQNFGKDSLEDQQNLLKNPLEDEQNFGKNPLEEKSKKFKIPEDLLVDSQKPKIRNYVPENIPKVVARSILVFIVDNQVEIELRQIMRKKEMKAMVFRPRKWDKNTIGTEIEIGTITQCIVIWRETMDAELLAVLTKVEEICYELLCIWIVPKGVPIHVMKKRFPAIVRVPEEENINNLLTKLEQIGMPIEKRGEQKWHETVATNAQKVNWNQLGNGRREKAAGSHSHNSFVPPHFSSYLPTTTKMFFPTPEMPKKGENFGKIQSENFDPFVVLGVKRKSQSPESNYEYEDIFEGPLCTKRTKFWVNSKCETTKTEPLEVKTFFKNENKEIYQPHWKPIVLSSPSGKKGAFFFGKNFVFSNFHPSSFMMDGFKWDNVEQKYCFEKASYFGYFNLAKKIKFKDGITEPSEFKKITDKEMDQYKSFEENPKFFDQYEWNRVRENVIRPILWAKFTQNEKFGQMLLETGNLPLYEASVNFSWGIGIDIRERQLIFSNMDQGFKGKNMCGRLLEDIREKLNPMNTGNQKGQTNPKNEKDLDQILKKIENDRKICVFKTESILRQCTRIKEVVKENWDMNVFIQGSIYNGLGRKESDLDLVMINSKGIPNDWTKDDSCQFFDKLRKKLRDSGMALTRTLIIPSRNVSILEITINSDDQEINAQISCNNLIGLINSKWWHVVYSWIREPVEYERRKNDFWEKSTQEMKMHLFILEPFGAFNVARSVTQNGFIKIKNAFHVTWEKLKFGIHNPKKLLEAIKGKENDEIIEEKLNLNRILISDQELVQGQEANTPMDSASKSRKWVLNSQKYFFNALMIINIINFCVATQPMICHNRAQTKLVQFKRDTSSCGKISRFLEQPTRALMLDLFRPNPDNFQFEAWRCIKTRQTQKYRTDLFGYKIEEIPDQILLPTTFEDCHQMAIYKKCEFGVLSGEIGQKHTNKKLIIEQSWWKIGFQKTESENCFLSKITLFGTPGSDIIHSPADDTKNCKYSDGQCQLENGVYLLWEIKKNIKNLFDEKTCVYKREEKINGTYVPGIWMSNDNNRALVFDQNSKKVESCGERLRVSAQGFAIIEEQFKELMKNEKNSFDQNIRNKRKRFKRWNTPFSSEIENTPLDGEVRASQLAMQLQAGAFYQNKEIKSSFHKLIEMVCKTLDDNIFNGYSHLNPSLFIRQKTGQTFLEGHWISDEILEFWGCSAINFSFVPSLDGKCYEFIPLNFSLDHTEKLLIGFLDPITMIVKENSKIQTCTEGQFKTILLNNKLIKINQLTGKYTFIGEPTIYNINQKIWGEENLPIFPVQIFKQLILTNLTNKQIDMLEMLHAFRTSRIIDNRPNEDRKIWNSNQFRAFTFQNLITEIDWWKYVIRSVILVVIINWVYKIYKWKQKMLIRKEINKRNSQNFQQQTGAIQIPLAALKQRFVGGVSAPTTDEAEMPENAERIKCQKRKRRRK

SEQ ID NO: 131152 - protein, 140 aa, Heterodera glycines
MSSPILDIIQGLVNRLEVELTKEIPINPGQNATPNTIQRHLYRAKNACDELSEILEEIQRKRVEMAESLQKIAVAARENKERVYVDFCTHLDIEAKINRAVINKNEWQNKKEQLEDIFDINPQNSLNSTILTPRISPSKE

SEQ ID NO: 131153 - protein, 95 aa, Heterodera glycines
MLEMLHAFRTSRIIDNRPNEDRKIWNSNQFRAFTFQNLITEIDWWKYQQTGAIQIPLAALKQRFVGGVSAPTTDEAEMPENAERIKCQKRKRRRK

SEQ ID NO: 131154 - protein, 243 aa, Heterodera glycines
MAESLQKIAVAARENKERVYVDFCTHLDIEAKINRAVIKKNEWQNKKEQLEDIFDINPQNSLNSTILTPRNQPIKRVKIPQIQLKKFDGSVEKWIPFWETFRVHVHEDDSSNLEGEAKELIEGIPISEDGYQIAIDLLLEKYGKSTKLIRALNQEINLFPQSDTVEEDEKLYIKFEKICRQLSSLNQDMDLSPHYLSLEGKLSTLVLDKYFVIKDAEDNQNWNTTKFRNALSRAIEQIKKGKK

SEQ ID NO: 131155 - protein, 58 aa, Heterodera glycines
MGREHRSDRKRDYEKVCFARAQSVGGRIVEWQQKEDKKGEEPKFRHHAEKFRQSAALE

SEQ ID NO: 131156 - protein, 340 aa, Heterodera glycines
MSHNPKEAKKEMEKAIFIAADCWLKVFDLLPRSQLGLGISMISRRFDYFVDEHFKIRKWTFDKLEIRSKIGENGAKEMEIVNSDGKELPIPQNSLPNKFIGFGCILINYIDQNVLIFLRRFHRFFATFETKIHIGTVNVRISKFAMLTIWPMFKDTIRVMYFNSITLRQMRQFAPSMLNDSPSLRVVAFDDGISPEFPPDDSANATDGQAVAKWLFSPRHDNLTKALSLENLAVEQQWLATMEQIKAAFSAASSPVNFVISVGFSSSSPIDSVVPFELTNEFTQEKLTLSPELVNVYRLTRRSIAADDEGKWMKEMNELMRGQKNNKIGIFIGDDGIDNE

SEQ ID NO: 131157 - protein, 286 aa, Heterodera glycines
MGRLEIRGKIGENGAIEMEIVNSDGKELPIPQNPLPKKVIGFGSIEIDFIDQHVLTFLGHFHRFFSVCSTKLYISTGTVRIAEFVVLTILPMFKDTIRLLYLDITDLRHMRQLAPSILFNCPSLQVVTTFFDFLPEFPPDDSANASDGQALTKWLFTPHPDNLPKLFFVHIWEDTGKQWSTIVGQIKAAFSAAASPVSFNITVAFMPFYTLPDVVPFEMTNELTGENLKMTKSIGTEDDEDIFEIIRCSVEEGSEQKLEKALNELVYGRKNNKIDFSIKYRGVDER

SEQ ID NO: 131158 - protein, 248 aa, Heterodera glycines
MSDNPKEAEKEMEKAIFISADCWLEVFDLLPPFQLGLGIALISRRFDYYVDEHFKTRKWTLDKMEIQINGEIGQNGAMEMKIVNANLDSLPIPQHPLPKKVIGFRSITIHFFDQNVITFLGHFHRFFAKCATNLSIETENVRISKFIMLNIWPKFNNTIRLIYFHSIAFGQMRQLAPSMLNDCPSLGIVSFRDGIFPEFPPDDSANASDGQMVAKWLFSPRPDNLPKSLRIMNSLVDQWLAIVEQIRS

SEQ ID NO: 131159 - protein, 211 aa, Heterodera glycines
LAAAAATLLLNQQNNGASTTIAGGQHHLYHHHDSGTSSNSSSSLVAAAHHQHQQQQLLFAALAAGVGGGDQKPSATVLHQLLAASGVTGGDFQQQLATLAALGNGGADAANSLAAVAALQQQQQQQLVQQLLQQQHALLGAAGAHNGGGGGAANAAAQHQQQQQQQLLSALAVAQQQQQHQQQQLSNGYGGGGHGGHSTYGFEYIYRCNQN

SEQ ID NO: 131160 - protein, 63 aa, Heterodera glycines
MGRRSQCEVAAMAFLALPMGVEGLLYFFATSIFLLIVPLVIIGIFIDIVRSSFSMFHFIKEAC

SEQ ID NO: 131161 - protein, 302 aa, Heterodera glycines
MALVSTMLSAVSKEALLPKRQFLSAETTLTTLCDDNYFGAHLDDWPETVRQMLASPDVAIPAPSECHRLCLSSLGAVLWYLKHCLVDVDTVTMRRFSAYIPPYIESKEIVKGAKNGMEDEAFWEGKHIIHTIGLKYRMDSSNGHPDSRANLFEADKYNKRKIKDLLIVLDGLEDTRKLMLLFEEINSQGESNAPPLLNECLSANYKEMVEDLGFFKGAFDRENALERGVILPRRGVDSEYDGTCREIEHCKEQLEAYLGWASKKLKCTPKFVGTGRNSHQLEIPESACHNLTDDFQFTSQRK

SEQ ID NO: 131162 - protein, 133 aa, Heterodera glycines
MDICELIASIAFDTHVQGHSLAACHLYALAKCHEKAIKLANCQLSMCVSNPMAKETCEMVECAKWLAQQFGQPNMNEENASFSTLILLLKLHNFFRLAVEERHGEAIELMKSEKMYGTGRCATQCQPIPRSAN

SEQ ID NO: 131163 - protein, 219 aa, Heterodera glycines
MEISSRHIPTIWFTSPNIAEAHGGASSQLSSTRLPISKIAEKPPSADASDRYEDINTDVLNERFTDAETNKFVQRTIERAQIEAERTFLNQQILERRFAPGESLFGPVNKRAMGSAQPDRTASGGIKRFINLPNAPLSHEQSVFAQKVNETLTSNASALILLAVKESLSNLKSKEADYIWSKAWAMFPSSIGENWHEKRSSHNWMGHIIDNSTKFLQNE

SEQ ID NO: 131164 - protein, 70 aa, Heterodera glycines
MKEKIEEFADPDLYANVVILHTWMFFKKATVITYGYTWTYVRAVQTQQGMNSLVNPPVTDAEAFHTHLFL

SEQ ID NO: 131165 - protein, 24 aa, Heterodera glycines
YNSLFLIVSLCTQFLGMTSDECSS

SEQ ID NO: 131166 - protein, 21 aa, Heterodera glycines
MGGSLYVYAVLRGVMAIRTKA

SEQ ID NO: 131167 - protein, 165 aa, Heterodera glycines
MIQSAPGDIFDEIWDKFQPNKGLSNENHSKEQKPSNLLQIKEEKTELNPNEMIWNKGIEIKTEPKKEDEEIGVKIEPKIEKEKENEEMGPKMRKKKNKAHTTEEKLQILRKFMTRKIECAEIPSENSVYEMEEKIAKELGVCRASINKWKKELGLSAGINDKNIL

SEQ ID NO: 131168 - protein, 116 aa, Heterodera glycines
MNPITFLSAVCCFLFLANHFQSVAAASTNVFVQGKKSYTINLILDDREGGYIQQITTKKVNGKQCLTLNQNLWKTYQDDDVIAFRHGSTDALIGSITVKLLRADTSIDISADNTHL

SEQ ID NO: 131169 - protein, 204 aa, Heterodera glycines
MGFASAIPYVVYFAVINLGGHLSDSLLQRQLLSTLNCRRLAMALALGGQAFFLLLISFCPCGYDKLYSGFVINYLDIAPELAGLLLGLGNTLSCLAGFLGPILMGWLTPTGSKTEWLTVFGITELILVLGALAFAVLASADVQPWAKREQTDDEEEEVISGGTKTDQHMTDQDQMMINNSRKLPEQLLLLEDGTDQQQNAKDKI

SEQ ID NO: 131170 - protein, 119 aa, Heterodera glycines
LLLSKRFSLALICFAGCALCYALRSNLSFAIVCMVKEGSPTVDDNGTTKKGCGAAHATTEQQRQLPINESDMAISRFRRQTNRSALIGHHDADVEQYLPVPLGPGEFDWSKQSRGQVLG

SEQ ID NO: 131171 - protein, 21 aa, Heterodera glycines
MLNISKLVRRKKGICLKSRSL

SEQ ID NO: 131172 - protein, 175 aa, Heterodera glycines
DQMPVVNVYSTSVTSDNISRNDLLSWVNDCLQSSLTKIEEMATGAAYCQSSLTKIEEMATGAAYCQLTDFLFPTQVPLKKVKWNSRSDVDWVHNWRVLQQSWKTIGIDKPVPVQSLIRAKFQDNFEFLQWFKKFFDANYDGHKYDSFKKFFDANYDGHKYDSLAARNFEGVPRRF

SEQ ID NO: 131173 - protein, 124 aa, Heterodera glycines
KNAEKLSIYISQLSAKHGQNANANQQSSAGLSSETSSEEEHDVVSADLVLLLNLMRLPVECVHPGEKNWWKNYWAVIADILSIWTEMPEIVFLSVNMLNIDAEKRMTAQGAVDYLEGKCKQRGI

SEQ ID NO: 131174 - protein, 95 aa, Heterodera glycines; identical to SEQ ID NO: 130684

SEQ ID NO: 131175 - protein, 360 aa, Heterodera glycines
MDEIRAEIGKGGNSVKKTYKMWHKLANLFNKIPISKSQQKIGIIYDKFGQTKTEFLWKAKDQMMEEHAKNVAKLAGDGQNELSRTLANSIGQMRGAKHRLKSFFTSKFKGTEILEKLMGEDANFAAVFRSDLTSNEIKELQIKFYLKFLDSESETDDYLRAKLIVDNLAFYQWFKNRRQKLPKNGQSLLEQHLLQIELRLDSIAEIETSEGTELAHEAKMMALKMSKDKLFPEENPTEVKTFGKSMKNEANNVKKTLLMMEMHCKIIEEFAENEQKFMDGVKMIDLEIVLDSQRLHKMIPRLSKTCQLLKENAKGETNGRKKSNGKNETEKRAEAEKGEANGQRGGECVASDGKGKLMGN

SEQ ID NO: 131176 - protein, 88 aa, Heterodera glycines; identical to SEQ ID NO: 124691

SEQ ID NO: 131177 - protein, 21 aa, Heterodera glycines
ITGVSIIAVLFLVFLMPSQNL

SEQ ID NO: 131178 - protein, 45 aa, Heterodera glycines; identical to SEQ ID NO: 124814

SEQ ID NO: 131179 - protein, 59 aa, Heterodera glycines
MKWMASQWNTLIAGGHWLWLDEVKMEEDEEIEDVSVVVPWAEEAEEEEQFPMAYRIPNL

SEQ ID NO: 131180 - protein, 62 aa, Heterodera glycines
MFTLYISIINISTVICKEIAIKLRSTFKLRISASLSENWPSPELPLSRTNKLAKFLNMTSGN

SEQ ID NO: 131181 - protein, 117 aa, Heterodera glycines
WLNNAVNKNCGLPSKKENKIYERAQQLMEEVESKRSTNNGEDFTMSREYKKCKPNIYSVLGYYFCSIHNDIEQVKKREKRSESEYECFLKKISFRYERRREPLLDHANIIISDVARI

SEQ ID NO: 131182 - protein, 249 aa, Heterodera glycines
MLLCFVFLLTTLSTQKAFGSVKNALSLITAALSRNQQRRYFRSVATASFGHRGGPQYIVKSRSAAEPRLFNRLVHQTSRGIRVSAFEGGGSHQYGAAHQHVPGGGGFRDFNSRRGVGPGGSADPRRYDAGNAEREEMLRLMEQREEEHRKKEEELRLEREREKLKYEREKLERERLEVEHMKLTAQIQASGWLQAAALPAAGGFVAASPAGFGVPAAPQQSSARDSRQQQNYSRHHSEAAVALARNSAK

SEQ ID NO: 131183 - protein, 19 aa, Heterodera glycines
TFAFSSLALPNTHTIFEML

SEQ ID NO: 131184 - protein, 19 aa, Heterodera glycines
TFSFSSLALPNTHTIFEML

SEQ ID NO: 131185 - protein, 19 aa, Heterodera glycines
TFAFSSLALPNTHTIFEML

SEQ ID NO: 131186 - protein, 19 aa, Heterodera glycines
TFSFSSLALPNTHTIFEML

SEQ ID NO: 131187 - protein, 19 aa, Heterodera glycines
TFAFSSLALPNTHTIFEML

SEQ ID NO: 131188 - protein, 29 aa, Heterodera glycines
AEPVDFIKHNLTIQSYYLAGDAPKALTPL

SEQ ID NO: 131189 - protein, 331 aa, Heterodera glycines
MESAGSSSQPILNRDLQILVGEQIFTGICGPGQYISNGFFNLFEAGPTVKSSVVSVLSKMTVFTMNECRAQISSPTDKRKFLCIDFRKSSGYLFLNKLVQIMNESKGKFFEVLHLICLKGVYIERLFDIFLMLNDLTIINLPYEFDSFSRNGETKILDKLIGKNAATLHSIHHLVYPFQLFPNIRNRIVAINSATLRTGTMERECDFFAFYMDPSDCPKELLPPKFGGISMSISINRCKEVFRSIKRALQRDKLRSEITKLRLLSTFDFDEKSAQILLTQIERIRSTLPKVRSLNIELRAVEFNATEPGPLFERRLRRLQSDPILRFRLFT

SEQ ID NO: 131190 - protein, 167 aa, Heterodera glycines
MHSSPFGGSLIAAIGFLISALLPALPVLYLCFGVIGGLGFGLIFLPAIVIVGQYFSERRALATGIAVCGSGIGTAIFGKLNPFLLDLFSDMAGEEESWRLFLLFLSGTSLFCAFFGYFFKPLKPSKSQLEQVNCFKHFQKIIPYFVLDEVIGFSKGCSDHSRTDGNG

SEQ ID NO: 131191 - protein, 100 aa, Heterodera glycines
LSKIGGDELADSVQMRLLRDENARLLSALGSVKADKAVLKKRLDQLQQNDALAEHQQTNVLKQSKLSPTRTEKSQQRHVFTLHDNNNGFTGCTSARQPTT

SEQ ID NO: 131192 - protein, 75 aa, Heterodera glycines
LPPLCLFSTKCLRQFNPPFFCAMPCNCQPIPPPPPFDVPPPPDPSFVFHLLSDDPPEAFEKVKGNLKNGPMVTEK

SEQ ID NO: 131193 - protein, 299 aa, Heterodera glycines
MKSDRTKPNNGMKSDRAKSNNGMKSDRAKPNNGIKSDRTKPNNGMKSDRTKPNNGMKSDRAKSNNGMKSDRAKSNYGVKSDRAKSNNGTKSDRTKPNNGMKSDRAKSNNVTKSDRTKPNNGMKSDRAKSNNGMKSDRAKSNYGTKSDRTKPNNGMKSDRAKSNNGMKSDRAKSNYGVKSDRTKPNNGMKSDRTKPNNGMKSDRAKSNNGMKSDRAKSNNGIKSDRTKSNYGMKSDRAKSNNGMKSDRAKSNNGMKSDRTKPNNGMKSDRAKSNNGMKSDRAKSNYGVKSDRAKSNNGTK

SEQ ID NO: 131194 - protein, 260 aa, Heterodera glycines
MANKLILLPYEHYKGLVAARETKNDDDDDIAERTNLGFVKRQVTAAVQKRKGNVSERNAMYNQHLRRYLKMRKEHKERPVRVQLSNGAQLLNKTVETGVQVRPGPDEPKDKSVMVTDEDEEEEIEVPKFLTPTSQTQGSSRSPRTNKKAAKQQKLIEKKDHLLAIIMSDPQRFGATDRGKIINPKTGREFIDSDLAWSIERLVDPRPENAPSPRGTKELKRKLAQNPLASSLLNRLFVGSGFVGQVKQTRGFVPSKWTRK

SEQ ID NO: 131195 - protein, 198 aa, Heterodera glycines
VRNSCYFPSNVRQVLSDFSVMIAIVCMNLLDVFLGTNTTKVNVQRNFRPSWPGRGWLVHPFIGNSLWIPPLTLILAVLACVLLIFMGQQIHAVIVNRREDQLKRDCGYHLDLLIYWVSSPKVANLGSIAISSVILSFSYWNWLPISENPAPSHSCSNVYRKRYITGIVTVTLIGLSVTMTKLLSRCMHSFTNGIATSK

SEQ ID NO: 131196 - protein, 29 aa, Heterodera glycines
MPASANCRAAKRNSSPFAVHNYTYFSDDF

SEQ ID NO: 131197 - protein, 111 aa, Heterodera glycines
MRENKIGIYNNHLNAYVTTDFTKVFASKKSKKELYKIASGEMAPHFLLNVGDNFYDEGVTKEDVAERFEQNFTKVYNYDSLNVPWYTIAGNDDWKSKDGIKPQIDYPTGKW

SEQ ID NO: 131198 - protein, 16 aa, Heterodera glycines
EAIPEGFGLPINLGAS

SEQ ID NO: 131199 - protein, 165 aa, Heterodera glycines
MVRTKQLFPSELQCSSSSLQNNSSEISENQTGSKLPSKKAVKPVQSSGKKRSRTMFDSFERMHMNEKKNIGNEMNLENVINLDMIDFEEVKESDEIERKRKKIGKDMNLESVINLDMIDLDGVNETTQTQKSQPNTKRIPTGFLFKSAAELNNKKMKLRKILRII

SEQ ID NO: 131200 - protein, 64 aa, Heterodera glycines
MRKKVELPRFTRILYRFPNGTYRMMVGTGLEGSKWVKGSKKNADWQFKPNEPFIGNYWDGSKHE

SEQ ID NO: 131201 - protein, 243 aa, Heterodera glycines
VAMLYALGKHFLSFDTLGSVALTSATEMARATMTFLQLYGWKQVVGLVKASVNFDRLSLHSLKGYLKDAQIEVNVEIELDPFMTPDEIIATGKLKQLRNRARIIIVEMGLDLHTSRSFMVAIYRSQMKNPAEYVYIIPWLAHMHDHYPWEASNIDKLETRVAFDDTIMHDHYPWEASNIDKLETRVAFDDTIVITAHGYDKKFIEEFELGFSKVTGVISSHFVALWDIGFRSHLFLYNMLDTV

SEQ ID NO: 131202 - protein, 1424 aa, Heterodera glycines
IFKNFSLRVRLKSAVCSSLHLAMDAQQLQQLLNALQQMVTNAAPQNAAPANLSNANLASSIDARISSFHYNPEVGTTFECWFKRYGKLIEEDGSTLPEASKVRLLLGKLGEEEYSKYRDTISPTQPDQVNWNETISHLKSLFAETRSLFVRRYECFKIRQQQGQDVSSLIAQINASCENADLSLTKEQLKCIILIIALNDEHHDLRQKALKMLEDAQKNGTNISLKKIEEELRAIQLVKESALSLVNPPIATNAIRTRPRQWADPAQRQSGGSNQRQTPNANSSGKPTRGQPTHPCGSCGKSDHWRSDCTFKDAICLKCNKKGHISTICRQKKAKAAPNNHRAFHTVKVDANCLHVGTTQGRWWKLCILINGRQTSMNGDTGAQATIISLQTWRELGEPNLTPSDIDAKNCNDQPFALLGKFICTVQFSDKPPQTLIAYVSGEVGHNLLGLPWIEALEIIPRQILFPSSKSADQATMIENFSAVKPPNKSINDVSTLKAALQKDFPEVFEEGLGHCSKAKAHLILRSDAKPVFCRARPIPHGAMEAVNAELDRLLQIGAIKPIDFSHWAAPILAVKKKNGKTRVCIDFSTGLNNALELNRHPLPRPDDIYASLNGAKFFSNLDLRDAYLQMEMDEESKQLCAINTHRGLFQCQRLPFGVKSAPAIFQHLMDQICAGIPGVFAYLDDGLIATKTLDQHITALYTLFGRIKEYGLRIQLDKCKFLQPELLFLGHIVSANGIRPDPSRSDAIRKMPAPIDKSTLRSFLGALNYYGRFVKCMRELRAPLDRLLQKDVAWNWTSEQQNAFEKAKEMITSDLLLTHYDPARPIVVSADASKDGIGATLSHTFPDKKEKVVEHAACTLTAAQQNYSQIEKEALAIVFAVQKFHRMVYGRKFILQTDHKPLLAIFGSKKGIPIYAASRLQRWSMILANYDFEIRYVNTTSFGQADVLSRLIANYPRPEEDILIANICADTDCFINSVFENRIDQIPVTTTEISSAMANDQPLQMVLQFLRNGWPTKVTESEISPYFPKRDKIFEVDNCLLYEDRVIVPTSLRSRILKALHIAHPGIVRMKALARRHVYWPGMDSAIEKVVSTCEECQLGQKNPTKAPLSPWPTTDKVFQRVHIDFAGPCSDGHQYLILIDSFSKWPEVYRMNTISAYATVFVLRSIIYRLGIPEEIVSDNGTQFRSAEFATFCKEFGIKHIFTPPFHPQSNGQVERFVDTFKRSMKKMSKGGKDWIEKMLFSYRTTPHVALNGFSPDQLFFGRKLRTKLSLVHPNGEKAENFDQNSFKKGQSKYTDKMAQNFDRKHGSKLINFFPNDHVLLINYRNNKTEWLQGKVVERLHKSPTYRVYVPVLRRLVHRHANQLRRRHLLEEEAEKEAPQIEEPPPVVEPPHPPQQNQPANSPLVIRRSTRVKKPRQFYSPG

SEQ ID NO: 131203 - protein, 74 aa, Heterodera glycines
MDVYMALDSGAIIDCFHDQKNGLASLNEMADFFTTQAVTDVVQPKGCYLVEFLPFVLKIAFTLLPVAMRALLGF

SEQ ID NO: 131204 - protein, 39 aa, Heterodera glycines
MAVVSRMWYIGKETCKFFHGAVKVFFDPNWQIPKTKLDP

SEQ ID NO: 131205 - protein, 118 aa, Heterodera glycines
GSYSGRIRSPHKSGRIGSGGLPRKQKNRFFQVYVWGTQTIMGSKNPTQNYSTGYREAIPEGFGLPINLGASVRGYCPENKKIDFFKCPFGVLKQLWGAKIQRRIKVQTIGKLFPKDSV

SEQ ID NO: 131206 - protein, 60 aa, Heterodera glycines
LEKMPTLVVFKIFRNSDFFINYLFFAKLILKYFLERALKRTKFYLHVSLGTLMLFLSKGR

SEQ ID NO: 131207 - protein, 138 aa, Heterodera glycines
MIKPQMRPVFGVWGSAARQFPAHLDLPETQEHRASPAAPDSPETPEDKDRPVLPEALANPETPGPQEPPGSPAKLDSPATTVPTVLAPLAQAFLLAALASLLKHLKWTRGEEKEQKRETIRNLCWPMHSLIWHRMEKE

SEQ ID NO: 131208 - protein, 58 aa, Heterodera glycines
NLKTEHNSLLLLLNPPQQKSNFRKENARSENYSRNCFPLFAGRDLGTLVVIPQLYTQI

SEQ ID NO: 131209 - protein, 387 aa, Heterodera glycines
PLFSIVFHLFAIISGHIRLPLFNSSADGQGVIILVARGDDPNSSQDKVVIPQEDGLQPPDGLQPPLPCLITGVGIFEHGQTFTKGNFHYECKNGTAEVIACIAEDMSVIQICIAEDMSVIQIGRTFLRNGTRHKCLVSGNTALYEQRSTCFENSIYYDVGSTCFENSIYYDVGDTFKNGSFKVDTFKNGSFKVTCKDTGVAVVGCFLLNSTDDAILLGCFLLNSTDDAILLGESRLIGTKRHSCEVSESGKVRYVIRMLGCQGQNGTEGEFKPGQTLGCQGQNGTEGEFKPGQTWADKHIRYHCTEEGQKKVLGCVCVDDGGLFIELGHDVMMGGTVHRCFKSQNVTYYHRFRCDRQFRCDRQRSLAECISATKVPKLKRKKRVAMR

SEQ ID NO: 131210 - protein, 152 aa, Heterodera glycines
MHFLGNNYLEYPNGRTLAIIGDTEEKVESARDHVDREFILKRWEASDRRTDRPPNILGNFKAWNTGQHDNVEEEATTYEEIYQLSPKFALREDLELVMKQIKFVESISKLKISKTSEEAANNGEAKRKEAQKGAKGTKSGGKTAPGGGKGGK

SEQ ID NO: 131211 - protein, 50 aa, Heterodera glycines
MNILNYKFLAGAQIGPNGDDEPSTSVSKFKRDWEFATSSDVNEQVNNLQR

SEQ ID NO: 131212 - protein, 32 aa, Heterodera glycines
KPKLFGLFKKQLKFLKILFISLLIEKASESLI

SEQ ID NO: 131213 - protein, 58 aa, Heterodera glycines
MNTTIWKIGLLKSQRMAKWRNAEDVKKMKGPSMNLPSLTLPVGQPGTGKNKHWKNWDF

SEQ ID NO: 131214 - protein, 94 aa, Heterodera glycines
DQVPSSDQFESQINIHFSFCLFRVFSLSVLPSLSFCVRLFTLQLSLPFLCYLIPISSDHSLPIHSFFCIFLCCLFVVFFTTIAPTHHHQFNSIE

SEQ ID NO: 131215 - protein, 115 aa, Heterodera glycines
MASSIIFAPLALKIPLKFAKMDNFGKQKICPILLMDDHEFMEGMEQEDEDEFIEEPMSADFDLGNINDPIGVDEPINHGYSLEVQPKPPTVNSAGIDLDSLSNDYTDYALMNRFL

SEQ ID NO: 131216 - protein, 297 aa, Heterodera glycines
LKIIIHILFYFFATAVAVGTSLQIQKDGILSPHSIFLFTVLGSWSISALLHPLEFGCVIPCALYFLAIPSMYMLLPIYSLCNLNTVSWYMLLPIYSLCNLNTVSWGTRENISSTNSGEHHHHNGTHHNVLLAKTAPEDGEVSLGCGNLCRVVCCVRHAFGPAAPTSSHATTAVRRLDEGLQQIERKLASLERRRDGGDCGASELGAEQQRADQSVPEPTAAVGVGLVDQRAPQAQQQERMDSPNWMEEEPFKQFDTVYLDPDEASFWREMINKYLRYLRPINLDSQEVERMQIGLDE

SEQ ID NO: 131217 - protein, 32 aa, Heterodera glycines
MHTVYALIIAQSLLIPQSPIIPQSTRCFEKES

SEQ ID NO: 131218 - protein, 134 aa, Heterodera glycines
RRRWIPSTMANIIPLLRDYRNVVKVNESVTIWYIAYQLVMLFSSVLGPGTIFLMVVGAISISFNIDTRLALLVVTTPVLCFCICCLTCSTDKQLLMAQIIGALFAMLMVPKIIKLNLFFNGRFNKHNRILFKII

SEQ ID NO: 131219 - protein, 209 aa, Heterodera glycines
WICNDVWMDIFPSFDRPQLGLKLALLSPRFNALVDKHFNGKSELTIWRSIEIRRKDKGPEPKLSVWLDDKFVPFPLPDRPLPSKIRFKNLQIEYIDHSVIAFLRSNHQIFDKRGTNLHLWIPSSHSTNGQPILDIFCREIWPIFSTNIRCLGFTNGVDLDNLRRLISPTILTDLNQLNSINSGDLSPAAFGGDFDGPNATISAGQALSK

SEQ ID NO: 131220 - protein, 18 aa, Heterodera glycines
YREATPEGFGLPINLGAS

SEQ ID NO: 131221 - protein, 70 aa, Heterodera glycines
NENANDLNYALNLFDYRIKRDYLRYNYAKVSADGSAEKPYKAMEAEEIEGKMEQLKVGLKSIVTNREGLT

SEQ ID NO: 131222 - protein, 17 aa, Heterodera glycines
MDVPNVGDEHEDFEDDA

SEQ ID NO: 131223 - protein, 91 aa, Heterodera glycines
MSDFEFAAINAAGNVFPNSVKSGCLFHFGQALFRRIQRLPNLYTIYLQDRNFQLSIRSLEALAFVPDHYVYNYFCALMSKSFGKSAPKKSD

SEQ ID NO: 131224 - protein, 25 aa, Heterodera glycines
FSSNFWILLNKKSKFNFVLFSIEIN

SEQ ID NO: 131225 - protein, 64 aa, Heterodera glycines
ALILGPTRELAVQIQKVILALGDYMNVQCHACIGGTNVGEDIRKLDYGQHIVAGTPGRVFGDRQ

SEQ ID NO: 131226 - protein, 75 aa, Heterodera glycines
MKLISDQRKITEQKSDQPARKCGQMGWKCPNFGTKWPQWAGHCKSTNSTWTSGVIGAEKSGHENGIEGWMNGTME

SEQ ID NO: 131227 - protein, 67 aa, Heterodera glycines
MPLLPGRVAFFRATTSASHILLFRLPPSGQIVPFELVNEQTREKLTLEEGRDYPNWLLKRCPIGQIN

SEQ ID NO: 131228 - protein, 280 aa, Heterodera glycines
MRICHRIGENGTKQMRIVNSEGNSLPIPQIPLPNNVVGFRRIQINYIDHNVIEFLRRFHRFFSACTTELEIFTANVRISEFVLLNIFPMLRDSIRVMNLNDIAFPRLLQLEPSLLTDCPSLRYFEMENKVPIIFLPDDDSANASDGQAVTEWLLTPRPDGVPKMLKCTMRALGGDKRWSAMEEQLRAAFSNASSPMTFRLYVNFTITRKKRIVHIEPFEWTNEVTGEQLTLEQHERNYFAISRCPIGWEEQNWANVLNELMDDRQNPIDIVIKDGEFDER

SEQ ID NO: 131229 - protein, 16 aa, Heterodera glycines
EAIPEGFGLPINLGAS

SEQ ID NO: 131230 - protein, 240 aa, Heterodera glycines
MENHIIPGIPFLLDGQIAIKFFTLRYFTSNHHPAPFEMDFDDWGVRHMHSSEQGYFALRAVEFGDRQQFEYVLNLASARDVKNRGKRVRGYNYGHWQTVKREHMLRVVLEKFRQNEPLCEALLRTGFVRLVEASTDRYWAAGLLITDEAIRSSNNWMGRNELGWVLMHVRDQLRPLPQQVHLIHKHYIVCQAAAPDYVVALAAEPHVQPYAVRINNETVNAARQLQIGDTLVIESVEWRE

SEQ ID NO: 131231 - protein, 118 aa, Heterodera glycines
MEIFDEFIVVDEKAINGFSGQNYSRYNWSFRDVTQFAALDFMTSCYPILKIKDIGNASSSKPNSVPLAQIIRWDWDKNGAQRVISTNTLNKGSELSFHICANDYASFVIRILKKQEKK

SEQ ID NO: 131232 - protein, 58 aa, Heterodera glycines
FGPRGRLGPNPKIEKCAFLKIKILKTKPEGSLATWHKLGLINIRSFFTILLIPTPIIF

SEQ ID NO: 131233 - protein, 63 aa, Heterodera glycines
PALELTPFFSINHIFIIHFLSRSHELYYFLYLYRVNLIKDLNNINFLRFYTASETFKSILHAN

SEQ ID NO: 131234 - protein, 87 aa, Heterodera glycines
MFLAGEVFACSAFGGSTVVHTYMDYHLANLGQLSPAVTSAAGNNIAAGGVDFFQPQLAQFNSSAAIGLMAQQHPPKDIKREQQPSNT

SEQ ID NO: 131235 - protein, 2655 aa, Heterodera glycines
MSAGIRSVLGPATARVRTNLNEGLALLHNQNVTAEALIRASEKIGRSVKLVQGYMRDWDRIMAGLDGDARTAEEAVYLGFRPGGEQLGELIVEANEAVTELDLRTDQLRIQVAPMQPQQHQQAVQVQPFVAHRPVVPLPTMGLLDFDGTPSRWSSFWANFRDNVDHRNDLSPAQKLCYLMGQLKGPAKDIVLGYSTTDADYPIVKEALVGRYGDETKRAHELRAELIRLPKANAATPSLRLFSESVERICRQLNSLEAGLDDSPYLITALMEKLPGEIRLKLLEQERDGGAKWTARQWRLGLSGLVQLREAVNMDRENMHRQPPNNGGVGERRQNSHQTFQTQPRRAFPVVKPVRPEIRNPTPPPRKFSPNCSLCESGDHKPTNCPRYFTAKKRQQRLTEQGRCHLCIRSGHSAANCATNFKCSKCGDRHHLIVCPKFRSEQSTTQNRDSRSVHFSGENRGGMRQGLLASAPVSATALSHPGKKRNPSYLMVRTTPVYNYREPANPTRAPVFWDPGSQTSFIATDLTNEIKPPRVSSEEMIVGGFIGNQKETYSRFHSPCYSVMLGREDGGWEQILLNQTDRITPPIECLVEPRNSNEFLSGDDQEGPIPYFLEPKIMIGVREFWRFILDRREIRPGIFEIQTVFGTIYGGEEMAVASNPGNSLTCTIIQSAHIQPESDVGRFWALESIGITDCPKLNDDEKALKKFNESVSADPEGRYEVALPWKEEGEYPAENFRLAFSRLSALIRRLKESPQLFSGCNDIIQEYLEKGIIEKAHRAKSPQHFLPHHTVMGKKLRIVFDASSHEKGAQSLNEMLFSGPNLYPDLAGKLIQFRATKYPIWADIEKAFLMVSLKESDREFSKFLWVKNIFAPLSGENLLVFRFRRITFGIVSCPFLLAATLQHHLEAFPSELAEEIREKSLLYVDNLLLLADSPEEARRKAAEAQKIFAAAQMRLCEFIAADPSSLDEIPENDRLRNEAPTVLGLKWTICEDNLSLTFPTVPSPDGLTRRTVLKTVASFFDPLGLCSPCLVGAKLFFQKLWDGSKGWDDPIPAEETKEWDEIKALWAAKTMHIARFTPRINTGGIQLHVFTDASPNAFACTVYLRAEMPQGILSSLAYARSRLRPKKMAVDQADGLTIPRLELLGILIGSRAVKFVHKHLNYEIEQINLWSDSRIALSWLASTDKMPMFIANRVREIRANRHIIFRYVRSADNPADLATRPVTPDELKLSELWWRGPNWLGKTPENWPDELTVSLPPEESAISEPIVCAPLTTPPAVFDFDRFSSWQKLIRTAMYALKFLSETGKKRKLLPEFREAENFSPDCNKFTHNWIIRIVQGTFSPPKETYLDNDGLIRLKSRLCGTGNPGFEHPIVIPSESWVCALLIRHSHLNLCHAGVDSTLTDFLQNYWCHKARRTVRSVIFSCNMCKRDRARKFGLPPMPPLPKNRTCPSAVFENVGMDFLGPTLYKIPNEQPAKAWVLLITSLACRAVHLELVSSMSAEHFLLAFRRFVARRGLPKSILSDHGSQFVLAKTLFEKNTEVSIKWTLIPAFSPWSGGVYERLNSLIKNCFRRVLGRRLLSWEEINTFLAEAEASINSRPITFVSDESDGPLPLRPIDFIAPRANLEFEGTDMEDESYRPSAAEKLATRWWATAKSIRNFWDRWSSEYLLLLRERNQTAHKGPHLNSNVQPELGHIVLVERDEYPRNTWPMGRIVGLNGPEGHPRSAEIKMPNGHIWTRPVSKLVPLEVNPDNKDLNQALSPRGDSREGNEESNEELTRNQRSEEPVEMGPELINESIRPKAKFRWAKNPPIQIQRASKTPRALTSSPAYLLSMVAIFILLGVPIADAFALSTANQQSNQSSWITCNMKGVKIEAPEGSKNIELCCDGICGTRNYIKPFVFPLLEESLLSGFSCRATYWSPPDNTIQQNIECAPIDVCTLLDCYLCESRILNAHCSPAISAILIGILALLAGFICCALCCLFRWSAWCYKSLRMIVKCIFRCQKHKNLKYTRLRRESYGDNSAEEGYSPRNYYRTTGKPLTKLGYALAISVMVSNVGWTHGDPVSITAKTEECETSPISTECRLNSVTLLNLLPAGQPVDLIVRTTDAAVLGKITFKLKGLVQECIPESVGFIRSYQVKTLASKRCPGMGSCSGKTCENLLPNGTVSELAEGNSFPGNSFCLDSSSFWFHGCGGTNSACLFFRNYATPTLTGEGSVYEMFRCPAWQFRIKTEIKVSFSGGITISEETELYSGRTFHIKGANLSVTPAVFGNPAAPIMSETFFGGSDSAVLVPNIEPALHCRNELDALLMKCALSLDACTKCRPDHSEGIVRCHCKEVDIERWRNDPSKRLPLSVGPLTLNYRKPRQVWAESEYVPVQMALKMEGLTLSIRKDMAKCIITPGGLAGCYGCRMGSRFNFTCKASLGNPLADIICDNGARWVTHCPENSIKMNVSLSLNEGEVKTVCHVSCPGGITNFTMEGLLHYLPIVRGEWKISGNKVERGSQLPDFSILEHFYRVLSWVLGGPQLFIVVCVFCAGIFGLYICLKCNPIFRAYRRLIRVVTLITILLITAPLVTCDEGTKDEETIINQSWSQFKFLLSKFKAELAWGTFLILASANVYAIYIIYKEWTIRHGEPQRNPIRKDRVQPRGDRIMPGFRL

SEQ ID NO: 131236 - protein, 238 aa, Heterodera glycines
MSQQNQPQFTAPPPAPLYPYGYAPHYGYMPPHAPMGYQPVPTAPPPSFVPQQQESVPQAHPQGNATVQATAAQAIPQNSASVPPATAAPIHQVQQNNNGQGVVPQAGRQAQDMHQSGSRSQHGPAPYAFRRKGKFGVAKPVNFGPPPAPIPRVSEVLLQLVTEFTNFTTEYTRNFNAFATSFSCDFNNYATEFAQFSAWVRENAHQFGGKNASGQAANETEDKEEEEEEEEETEANDA

SEQ ID NO: 131237 - protein, 97 aa, Heterodera glycines
MEKQRAEADKMNNRKAFLARKRGEVAANIGKTAAETNGTGGGTVAEEKDEDLVRIRLVFPSSARMEQNFRHSDSLEKIQGMKQIRWQASFWGCTRET

SEQ ID NO: 131238 - protein, 84 aa, Heterodera glycines
MACSAGSTKKTNLSKNQHEKDGLRSLKLTNAAQSGLYILIFHQNDFIFCYLLSLFVLILFDTCIFLKNGVKVDTKNCDTEKRKN

SEQ ID NO: 131239 - protein, 139 aa, Heterodera glycines
MELFIFYHDEYERLYNCTGLNIDSVPLEQRQFVPESIAISILCTIYYIERVLYCLIQYVEILYLPCMYSIWKRLRDNSCYKLLFYIGITDMGILWILGFFRAWLNLHGYVFCSYPTLIYFVGVLVTALWMAESTADLVG

SEQ ID NO: 131240 - protein, 96 aa, Heterodera glycines
AANYGIVLDSLPPLDDYYPGGHFPEELKKPEQWYEENRNTPFDLREVIADYCKADVQILAHGMAKMRQLFAAATSQELTDSITMASVRLHKGQRDH

SEQ ID NO: 131241 - protein, 81 aa, Heterodera glycines
MSGQQKAEGLFPVDECFGTNIGRPIAELVDENGFGRESREELVSFEEFVRGGDKKRGKKEKDEGEKGTMGVEAAKRQLIVE

SEQ ID NO: 131242 - protein, 63 aa, Heterodera glycines
MMARCLPGANAEDTFVVDVENTSHSINLVNYSDTSSNETTFTCTTDRPKRKAAEKAMMLLIKP

SEQ ID NO: 131243 - protein, 100 aa, Heterodera glycines
MGEASRQEPTKLWNRVIVDNLTARRLRREQSNRKEEEKATEERDERHKDEEEGEEEEKRREGEEKQGEEMEEAMGTSRKQKHKRSFSGILSKLMPRKKSY

SEQ ID NO: 131244 - protein, 58 aa, Heterodera glycines
MSAVCWNPILFAWLGARGKKKILLTVSELRPFPQQITGEKQNCNKRKGQGRLFASFRQ

SEQ ID NO: 131245 - protein, 60 aa, Heterodera glycines
AGMCLGFAFRISPFALFAFFGVSHFAFRFLARKATFTPLRIGLNSHKIFQNFTYKLANFQ

SEQ ID NO: 131246 - protein, 185 aa, Heterodera glycines
MILWHLIFVIFFIAFKIDSGKIQTNFDEIFGEGWNKNEREDKVIKMEQNDPNEHNERSAAVDQMGGEMGNDPNDQQKREIIQKFDAIKEKLKERGKYHWENTTNIERKIARLLGANRHKIYKWKKELNLNKKKIFYEKKRKEFIERIDEFKSLYDKGKQKEFVKELGISNVTFRKWKKELMPNCQ

SEQ ID NO: 131247 - protein, 116 aa, Heterodera glycines
MSCELPVNHADAHLPLAAATAEERKKNAKRKWEETVRVKTETVDEPKQNEPEENAKRKREETVRVKTETVDEPKQNEPEENAKRKREETVRVKTETVDEPKQNEPEENAKRKREET

SEQ ID NO: 131248 - protein, 183 aa, Heterodera glycines
MVIRDTEQSEKGAKSTERVCQTFRFAISLLNCLWKEMDEERRKMLAKWLKDGRWTEFVRIVNEKMNHRMRIYLYRKLIINRSWSAGSLATHARIILPLLLEELDTKIYNKNIAKCRIFEELEELLLIIKFEVFRAIESFSSVCWLMYLWQYVEGYDGRTMESTKEMPTRQMIDECTKLNAAMP

SEQ ID NO: 131249 - protein, 54 aa, Heterodera glycines
ILSYFVKKFVSPALDMIIADSHLIMANLDLIMANLDLIMANLDLIMANLDLIMA

SEQ ID NO: 131250 - protein, 211 aa, Heterodera glycines
SLLNWSKLVTLNLFPQFLQLLGAMLIDWLDDSVDFPNGIYFAFLCLTAIEYGKLIPTDALYLPLVIGYICFGLAISTIALDIGSTYVKKLYYLGQKIRNIGSTYVKKLYYLGQKIRNIASIKIWFGAKHLRVRDLLAALGHNIGLEPTVLCDLDLEQLITNAIQVKEGRLHRVPQTHMIMDGIWPPELVPLFLVPLFLKDGTFPVFHHDTA

SEQ ID NO: 131251 - protein, 64 aa, Heterodera glycines
MSEEDTNTEKFPSSETVVPFLFEENEQIAASHFNYDDNQSGKWVLSFQIDDELDTKWKRARQLY

SEQ ID NO: 131252 - protein, 111 aa, Heterodera glycines
MAKFASKVDTDGGAKAFYCQVKQLTQQKPLLVACPLASVPSNDFLSSSNLFDFFLIDESFELADTELIRPLLLADRFTLCTAHKTPARLALSSAFTFSKQLISHSLKGILC

SEQ ID NO: 131253 - protein, 81 aa, Heterodera glycines
MSSNFIGSPNCFFRPTADQAAAEEVDKYEVFSWHGDLSDQLAAQFLVSDQQLLKECREKLASAELRETKLLCKNGELNAEN

SEQ ID NO: 131254 - protein, 98 aa, Heterodera glycines
MMKEVFEKAVEISKNTDCEIPDITMLFDVREGTDLRRYNIPKSNEVCAIIFRDANDDIPAANYFLLILRLFAPYHFKNAPLMRREKKRRTKGRKCENE

SEQ ID NO: 131255 - protein, 144 aa, Heterodera glycines
EENNKIKGTQEFYDCCNYGKNSNLEEMIQEYPMDLRVLFQPEIDQNNYTQIGELHNDFKKKLRYLNSSFSCASLGCMRFKFPDKNVPIFKIQGSIYHSYNSVARPNEEELPTNGQLYFIDTDEAINYRLSAYKDQLTKLSFPVI

SEQ ID NO: 131256 - protein, 32 aa, Heterodera glycines
MHESGAVQAQSYYKNFCVVVKKNVIFGDCFQT

SEQ ID NO: 131257 - protein, 52 aa, Heterodera glycines
MKFGLFFLLICFFFEIFEPGILDQFCAGKWHWGRKWSNWANCQRDGRGRTND

SEQ ID NO: 131258 - protein, 68 aa, Heterodera glycines
MAQQPTNKGTPNKLKRRNERKKRGIKRKREGKRKRKTYRIFFEDIAAAKGKEKKNMISICFDSAKEKL

SEQ ID NO: 131259 - protein, 328 aa, Heterodera glycines
MGIRFNGHLAQNRREWHQRSTNCQFAWEGTANSAKADAKENHRIQMHYNRVNWTFMKNWLTFLVFFFRYFHQNVVSFLHRFRSLFGSSGINLSIGFGSLTDRTAEYLMCKLWPLLRGKVCGMEFWPAEFRCLRQFAPYILRDCPSLRTVCLPYCSHFDESDGQAVSKWLLSPRPDGLPKVFRCEFDLAEMRWVSLIREFKAVIYLLIIILHNLLLLFILSMFQSFANASRHVNFIIVIRFSCADDSAVATFDLINNFTGERSTLKRLNKDNSDDNNNDRFLLIRCPISRDECKWSKWEKEAIGWEFDNQWNRIIFSIKDYGIDHWSAI

SEQ ID NO: 131260 - protein, 98 aa, Heterodera glycines
MAEIWTKKAKMAKYGFIPENPQNMDRRLPGGRRLRLPGWFSLNNVPLLRTPPLSPDLSPIENLWHFVKRKIAGRHFQSKPQLGIWRPGTQFRLTQLSI

SEQ ID NO: 131261 - protein, 24 aa, Heterodera glycines
RTLSTAVRQRSSKIYSMPQILWAG

SEQ ID NO: 131262 - protein, 24 aa, Heterodera glycines
RTLSTAVRQRSSKIYSMPQILWAG

SEQ ID NO: 131263 - protein, 181 aa, Heterodera glycines
MALTLQEVETVLKRVEAEKAHASESQLQSAILERDNLRQLLDNLHDQNAQLVNGLKANLSQASGDRDKALAEVKSLQSNINALDNVYQRLKADHEKLREEMEQIQSTDTNVEACKKEIQKLRNTVAYQEKQIAEWEQKCEELNQTIERKDKQMEEICRLGADMESSIEVKLKKPITKRIYR

SEQ ID NO: 131264 - protein, 280 aa, Heterodera glycines
MRYDELRFSCRRQGGDGSSGTFCQQCRFVFPNADCFEAHRRRVDVAPAPPPGVAAAAAVPHCGEEATGGDGDDAVSLAAAVGAAVAPAFADRRRGRPHRSMCEERRLCEWCNVVVWARSGPHVCRRRPQQQQQQEDRAVLQQQQQQNHHNQQPAPPKCEKCGGPHDPERTPHFIQPKQYARQCQWRRGAARGAHDNADDGAVADAADAAAAVDDDDDDDVSEEEGAEAGAARGGVGDGARGHLRKPKPVRFIFWDVECAQERVGEQQEQLEDGNEFVFKR

SEQ ID NO: 131265 - protein, 140 aa, Heterodera glycines
MDAVQQQQQQLPELLKHVPVLVCAEVICERCIAYGVDIEREPLRRAPQCQCGVPWRGANRRRWCSRIGEELFDDDDTGGPATAQQQQQQQMPPDGLNPRRLRFFCDGEPGTGRGAMAQFVDFLLHTGPKGTRTVMLAHNG

SEQ ID NO: 131266 - protein, 59 aa, Heterodera glycines
MRCQMGICGERTVRCHAAVLAKHRDQSGAATQFAIGQQKSGRSDSDPIGTAASGNSHEA

SEQ ID NO: 131267 - protein, 62 aa, Heterodera glycines
MDIAGLTLQRDYMPNRSTADTLAAPFNAECTTDEPKALRTSLLRGRGCANIVILKYIWRFVI

SEQ ID NO: 131268 - protein, 28 aa, Heterodera glycines
VLSPPPPPASLSSPNTTATPIHSLLTFQ

SEQ ID NO: 131269 - protein, 77 aa, Heterodera glycines
MVVTLMIGMKNGVEKLFKQRPLTIDQLDEQSFGTKLEAQCCVFGAISAHRFGPKFIPGGDPIGDMATDQRNPILCGF

SEQ ID NO: 131270 - protein, 301 aa, Heterodera glycines
MEQKEEEEKRKEGEKREEEEKQKKSREKEEKERKEQEEKMMEEAERKRIEQEKVRKEEETQKKEEEEKKRLEEESRKRMEKKRAEEEKKKQDEEKKKEEEKERKRKEEEEKKKHKEEKKEEEEERKRKATEDKKKEQAEEEKTKSNEEEKKKAMEEEKKTDGFDNALEDKEATEGQIRVELGAKLDKNAKEALMRAKWWELGQTITKLTNHFDINHLKKNEPRKATEVKGSKETEEEKPGTSKIQKREEKRKAPEFVKKPKQSIVKRGRSKVNKSMRLSGSDQWFSRLFGRFVRRQPNAIV

SEQ ID NO: 131271 - protein, 387 aa, Heterodera glycines
MCTWQHLEVEILSGNSVSVRWTTAETVQQQIPQGAHAVIQYRSEGSSVWNEVLEQYSKSPAVIEDELKEGVPYRIRVLMKSADGEEIGKSAESRTVKLSGSNLPILTKTLRDALVPKNNEIRLEVCAVGEPAPTYLWFKNGEEIVPTPENDNVSISNEGYLSKLTIHRMADGDEGVYTCQVSNSHGTIESRAELLLGAIQAHFTKAFAERMDLVEGKDITLECEVSHPDANVRWSRNKRTINEATNRVALDSVGKVRHLTLYGAMKEDSGTYTCETEGGQDRVQTELAVRPPDARIMFSPQGRTVHDYGERVCLFAELSRTTERANWFRNGVGLMSKKCFAYVDELRANLEIYNFDENDVGDYHVTLDSGERSAPAKLKFEVAPKIQ

SEQ ID NO: 131272 - protein, 169 aa, Heterodera glycines
MYLQFSQIVPLDFIMKVQISWYHNGRELTELGTEHVISKEGCLFHGKPSLDQQKGERIVLDSNENLSLNIRLKSLPEPEVDLYLNGELLTPELRTSVTVLEEALLLTRKELTKEDRGTYRVVLFNEYGEDAVEYEVYVRDVPDPPSGLMVTDVGHDYCFLKVGPLRANF

SEQ ID NO: 131273 - protein, 188 aa, Heterodera glycines
MLTFILLVPLVIVIGAFIYLLFMKPKSAASDEEGDEEAKGTADGDVEKGEDDKSDLICLQLKETPPAGEGVTVPAEQVVDEQPKEDDGGDKAEEEKKEEGGSAAEEKQKEGAAETGGGEEKSATTEETTEETTETTDETATTETSESGSGSASSSASGSGSGSGGSTSADATSEDKTSDASSSSSEGS

SEQ ID NO: 131274 - protein, 71 aa, Heterodera glycines
MMHYFAIFWSLNIIFLQQNGQNVASATNPLMGKHQMKIAKLENLLSRGPAQCCPWKSKNSLYFLGRFLKNF

SEQ ID NO: 131275 - protein, 148 aa, Heterodera glycines
SPLPLEAQVFVVVFFLSYLVLKSLVEIDETLAVKRKYGVGRILVKGEVWLFGGVERDSNWERVFLVPVESRTANRLIPLIQQYILPGTTIVSDEWRSYRGIPNLPNYTHWTVNHSQNFVNPANRQAHTQNVESLWKKLKKNFKQHFGI

SEQ ID NO: 131276 - protein, 67 aa, Heterodera glycines
MKEAAAIVDDCCDSQLSTAADIHVLSEFEWFEQWKHLIGLNVVDQKWKDDEWKDDGVEKMFEVFEFI

SEQ ID NO: 131277 - protein, 150 aa, Heterodera glycines
MALNPTIDQLVKMLADQQKMVQDQSQQIAQLIAIGQNAPNAAAQPNQGANSVPILPDISPFEPTDDKSRISEWIERFKFALDCTAPTADDEVKVKCLMNKLSESAFSEYSRSVLPSSVTDFSFKVTTEKLEKLFAKAQSIFIDRYECLKA

SEQ ID NO: 131278 - protein, 872 aa, Heterodera glycines
MSNNLFNPCLSMRHISKCRPICLTVVAVDHRPHQQTPAGPLPVTNVVLRNGDGQRVEASGWQHQASVLASLDIGSAYWFTNCTARARYQQLDCWYRIGVDGKNAIVVPHTAAPQAPHVQTGGGRTFNEARAPPEASPIEEDANNNVTRSIEDCFVIERTTPMRNTLRNTRGELCEIRFLPLEDAERPDLVLETLIQHLLDRVLEGHPPPMLVGLQLHPPGFDRPYVIRLRPPEQNNAAALSAPIERLNEQSAAGIDLLAGTTVTKVLAVWPLEPIRANAQRGGGCDFDAEHHVSNTVRSLVRVVNPNDRHCLARSVLLGLCDRETRQPNGGGRDTFAAYAGRQDQHGAQAVDLLRNAGLPVDKQMYTLEDVEQLQRWIINEHGVGQIRLVVFEKEQEYRIVFKGEGVAAHFNLCLLLERGHFNYIGRIEQLFKIENYCFDCERRATTRYHLAGCKVVCRLCLRFGAGFPCQPEQLPNGGSSSRRCNECGFVFPNDGCYDYHLANMAPAPIDGRGQRQRQPICQWRRFCRACGRVAYFGVHQCAPLRRPAGPIDCRRCHGRHTLDEPCFIQPLLDRPAHQNNNNNNDDDDDDDDDADVLDDDEADDELPLRLCFFDAETSQERPLQLNNQIAQKHVPLLIVAEVICEPCLRAGINVNDGFGRRAPDCVCLCRMVRGQQLRQWSSPPFVNGAGDNTPPPEGAPAFNQRRFYFHSFDNEANDPIEQFLLFLMKHGSKKAHTVCIAHNGGKYDFHLVLEALHRRSIPPKRLCTTGLKIYSMKLRGLNQRRITFKDSINYFFCELDALVKSFDLPQHLATVKPFFPYLYIQRQHLLHRLNGLPAIEHYSPDTMKVEKRTKFSSMARLQQQQRQLSTA

SEQ ID NO: 131279 - protein, 71 aa, Heterodera glycines
MISRLIPHKILFRYEFKDLLGTGAFSKVFLAECRFVPGTFVAIKCIDKKALKGKEESLENEIRVLKRTHQI

SEQ ID NO: 131280 - protein, 150 aa, Heterodera glycines
MPSGLIKNCIVAKRHPMNHHFNRHQRCLDGLCLHLPTSSIGSKVADVGTKFSPKLSIRKKSIHGDCLQPELDVLLNELRECILDGNAVVEELEQFKRKDGDNLHKEFPVNCEEKGKEEEAEEKRRTRTEKVQRFVKMVKRQFELGRRIEK

SEQ ID NO: 131281 - protein, 309 aa, Heterodera glycines
WVKALRVMAWARRFANNARRKAEDMHGTMGGSDPSRRKAAIRGQIVALPTHDEETDAKWAIVRATQRNCQPRDGMRTELDENGVQRLISRIGWCEEAELSRPVILPKRSRAGALIIDDIHVRLHHMGTDGTLSEFLRSWWCPSARQQVRQVLGQCKRCRRLRGMPYPLPTMPQLPMDRVRRRLPFESVGLDYLGPTVTLDDKGQQRKTWVLLITCLTTRAIYVDATRDLSANSFISALRRFIARRGAPSRILSENAPTFTVVGKTLAEFGMPGDNPIDFADSRGIKWRFTPQHTPWAGGIFERAVQLVK

SEQ ID NO: 131282 - protein, 81 aa, Heterodera glycines
VWRERQIYSAKNLDDLSKCLTADEPSTFSVSPNLNSETESPSKSSPVDGGQSPVASEEDTKKIKEEFHAFSTLSSNMIALL

SEQ ID NO: 131283 - protein, 81 aa, Heterodera glycines
MRVAPPKSAIVAAKVEPIRSWVETGGMQYIHQQQAANDLLLMGDDELEQKGKGEGEKDEEGAAEHNEMASNEVKMGNLKQF

SEQ ID NO: 131284 - protein, 109 aa, Heterodera glycines
MANQKEVDQSMAPFQCLQANMHCTDKQPQHIITGGGGGIKLERALSRITRLGHAVNGTNDKFNVYHQQQQQTRSNRRRRGTAAKCAVTEKRASLCSAAAESGTEQQVVK

SEQ ID NO: 131285 - protein, 174 aa, Heterodera glycines
MTERCVLVARSKCQNAPNQNVKFDKCFRQSDGFGLTVNGEYPVKVAVIAFITLYVPYPLASISFPKLREGDRILKVNGMPVTAQNFQEVIKMISGGYNLALTLLGPASVATNSWDDFDKLFPVQHHPSPATALCQKSPPPLTATKRTKTMITEEDKNGHNWEVATNYKRKNNLI

SEQ ID NO: 131286 - protein, 72 aa, Heterodera glycines
MSSRWSVISEENSSNSSSTTTDYPPSIPELSPQCRRFSPPTSAAGTELTKKGGPQTTTADGTQRENTKISPG

SEQ ID NO: 131287 - protein, 157 aa, Heterodera glycines
VTCEKGRKKNRSKASLFRSHASKPWELHYRWTEGVLEEFFRQGDLEASMGLPYSPLCDRASMGLPYSPLCDRHTVHVADSQIGFIDFIVEPTMVVCGEMLVKMVEPLVSLPTTDSLFPPGAHRGGPDDGSASATSLSPLPPDLYASSFPTIPGRTLH

SEQ ID NO: 131288 - protein, 31 aa, Heterodera glycines
MAKEREGTRVGADREGTRTDREQRRPGAVKG

SEQ ID NO: 131289 - protein, 72 aa, Heterodera glycines
KFEVDTINILLLKLCPTWSICLDENRHDSSLSDRSRPPTFPRTATLRASPISSPSRPLHPAEFDANFLSPRH

SEQ ID NO: 131290 - protein, 343 aa, Heterodera glycines
SLNPDHDEPAKIDEVLDNYSKHVLGQQPEKGKQSTDSRSMMNTFFMYFEMNVYAKLKEGKGKERKKKLRLHMLQFVVLNNVFEGIDEQTLLKFDIKGTFAPGSAVQHDQKQKWYTGETGWQKSLYREYDFIGISREGREISAFFPEGIQLHPEAYRQLADGVKNDTSYLTENGVNDYSLLLGVQFMDPYPDSPKDRKDFEGTKKGAKCVEAKCHNCKRWPDAEYEEKATLCLYMGIIDIVTPSNEKAEKHFFEMMYRRKDIADFIHYKRMSEFIPYHNEIVTPVPPQMYGKRFVGTVLGCLFSPESSTSVGGESERQFQLGMRQSICKTFGEKRGIKTNHGIE

SEQ ID NO: 131291 - protein, 24 aa, Heterodera glycines
MLLLYFRISSDYAFFERCTSRIAE

SEQ ID NO: 131292 - protein, 88 aa, Heterodera glycines
MLLQKGQSKHCHPICAICIVSVSIPSHYLLCPRTTDMNKTNIYLKHKYNNKMVKAMGIAMGGINDRMNEGGRKDSAYMREGIVPKGNQ

SEQ ID NO: 131293 - protein, 404 aa, Heterodera glycines
MDAFGLLDGIKAKINSPINLCSAREELRGKTHAPIKSNKVAGKRNKDAEKEINQLKQEYTNVFKTELGLCKKVKAHLELNADARPIYRKARPVPYNAKEAVDRELDRWEKMGVIGKVEHTEWAAPILVVKKADGSARLCIDYSTGLNNALKDHQHPLPLPEDIFATLNGGQYFSQIDLRDAYLQVELDEASKKLCVIATHRGNYEVKRLPFGIKTAPGIFQSIMDQMLADFDFATAYLDDIIIVSKDQKKHSEHLKKMFSRFQEWGIRVKREKCSFFQDEIKYLGQIIDKNGRRPDPSKITAINEMPEPTDVSSLRSYLGMSSKSDQNIKKVMKFIRNGWPQNIGNENVEIRIFHQRKEQLSITKDCLMYAERVVIPTQHRAKILQLLHKGHPGMKRMKQLARE

SEQ ID NO: 131294 - protein, 224 aa, Heterodera glycines
MDMSNAVTTIFPGCQIRFCFFNFVRNLQKEVKQQGLWQRYCSDPVFALNVRMLTSVAFVPLCDVRNAVTALDMEFGNLAAFRPLIDWLLDNYVGRPRPNGTWSQPLFRPEQWNVYQRTLDGNARTNNNAEAEHHRLQGAFNCRHPSLWNFIDVLRREQKIADHKYNSAIAGLSPDKKRGKYLAADRRILNMVRNYIPLNAVNDHDYLPPIPQPNQFHTILEFLR

SEQ ID NO: 131295 - protein, 145 aa, Heterodera glycines
MAKFWAFLCHKSQIFWLSFLVDKNRIDDNDPCDVHYHGIDKFKYLDDFFAHWQADAQIHHIDLFMGKAYLNYFLWHNANETWTSDEKNVLKKFSIQLQKVAKKLNTRSQFAMTVLPELYEFCCPTDLANDDDLENCIGHEVANPT

SEQ ID NO: 131296 - protein, 367 aa, Heterodera glycines
MILRFRLKNYVLIGDLEKAFLRVGLNELDRDTTRFLWVNKSYLNEIRQNYREIEMRDIELRRFTRIPFGVNASPFLLTAVVNLHLSKINEMFEKFKTIQVNKELCLNDKEEEFKNLCIELKQNAYVDNFVMMCDDEKEIKFKHYWSKEIFKLASMNLREFVSNHEQSNKEIQKLEGSEIPKVTKMLGIKWNVDSDELELQIKIPLMSKDTTKRQILTMIAKNFDPMGWISPVILKYKLFFQKLWRSNKDWDDKLDDQEIIEWNNISNTEMIAIPRSPFTSQYLKHSILHIFADASELAYATSAYLHTNDQINLLFAKTRLTPLKGLTIPKLELLGLLIAARAAKFIKRESKLNLENTYIWSDSKCVL

SEQ ID NO: 131297 - protein, 128 aa, Heterodera glycines
MCARLCEALWAQFQQWRASTKVLTGGGGRKESAGSMAAPPPVVELVTGSSSIKQQPAPPLGSSARLRKVSGERRPPPSGESGGGGLVLAASSPLAGKTVGGGGGGGPIVGTIGATKSPMFGDMRPHYV

SEQ ID NO: 131298 - protein, 244 aa, Heterodera glycines
SKKSEDMIEAFDRVFDKSKIIPMKIYSDSGLEFQAGKIKNILRKNFIKNVMYSPDLHAGVVERANRTIKERLYRYFTKTNTLRWVDVIDKIITNINNSVNRTLGVKTSSINLKMPVRSGKKKFKIGDIVRIKKFKIGDIVRITKEKGKFSKGYLPNFTEELFKIVVANPTTPDSYRIEDLEGNLIKGIFYNQELVKTWMIFTLYYLRTHRGRRTLRQNSQYTPRDSGIGHKLVSSSLINYLPLL

SEQ ID NO: 131299 - protein, 37 aa, Heterodera glycines
MVIFELGILMADLKKMKRDIELQLRVSSWSSTSSGLI

SEQ ID NO: 131300 - protein, 184 aa, Heterodera glycines
MTAARSLVNAIIEGEPKEEIRLFVAKKADFVATGQYPTEEDQKKSLECFFKKCLVARRALEESKFEKIGMTAPAGLNHLAESEKKKWEEASKETPWALEQLRAKIVHKASKLMAHPRVIIGDQSAHQLAEILDQTAVIGPKNGTLAETVRTLKPVVLSSKVKAALIIAGRDSLLRGETVEMMME

SEQ ID NO: 131301 - protein, 133 aa, Heterodera glycines
GDQSAHQLAEILDQTAVIGPKNGTLAETVRTLKPVVLSSKVKAALIIAGRDSLLRGETVEMMMEQYEMIANLCRRFAHVKFFWICPPYVHDKHDEYEELVARLGPMRSLNPFIPVWVTEKGRSIHELFRFGNS

SEQ ID NO: 131302 - protein, 374 aa, Heterodera glycines
YPNSRNLFLSLHHQLTNSRRKGQNAIGDFLQHAPHELTDGMLQLSGESSEMLMATTLLGLSEQIKEEEGDGTMLEEKILTDDKHTFGEQCKSIQHFEMLNYPLCHFPNYSCALATLGHKRRHHHGQQSSVGAACSSTQSSAPSSSQSEQADSTLHPEERKRILHLHAEKNRRFALKEGFESLVNAIPVVEQTGVKCTNAVVLNRAAQHIKQLKSEQDQQQMKLRVLREKITNMNERIALIQSNLPSSSTGGSRPCEAQTPSMRIQVEQFFEHYKKERSREDYRFWLMGEVLKPIVHSFAEQIHPDASDHDRVLHSLKKWLDTHWNAAVLRPIASDVLVRLATASAAFTDEAALSNYIMNERNICQSFTIFLING

SEQ ID NO: 131303 - protein, 400 aa, Heterodera glycines
MPSKCPSFGQAEKRLERTHCERPLADDLKTDADQRGHIRGGAGAHSEGARKGGGRAPERTAAHMQNDRTVGTAEGTRYGQRRHAMPFVPNRIRTVGGKKLRCDVLGLPKGANGKSRLNSIRPVQYVCQRNCGVETFDQKRHVEEVGCLVLPRGSAAPRLLTALLRHGRVHRNDGQRRAVLLSAAQPIRTVQPPLGQPNRTNATEALRIWGRERPLQRSRKHSNAFRWRGQSAKDGGQDGTAPAAEEEQQQGTSANPSGTSAKVEKAGGGRSEGTNGNGRLKTTPRPRIIPSWVHEGLQQSSVSVDDDSDGESASSSTSSSLEPAQFRKSLVAAKERALSVKQHAAAHPLGANAGGFASGLRTNKAKPKSKGNATEALGHQQGIQKMQRVALGRVGRMSDT

SEQ ID NO: 131304 - protein, 191 aa, Heterodera glycines
MFEIKTGGKGGEAAAARLANMAIQRRQLEKRDTLGDYWSRRLHDMALRDDPVDERAEGIGGRLGGSGGGATSPQAPTTGGVAKTAATSNASKSGGTSSTRGGSSSSKENAPRAESAGASAKAKSKEKTARDVPQSAYARGARDEFVETPSTGCCTCQRGPPGRTGPPGRDGLRGIDGEPGRRDFKIEKSNV

SEQ ID NO: 131305 - protein, 138 aa, Heterodera glycines
MLLTFPFCLLLIFAKSFNCQMQNFNCFAQNGPNRRLSPAQLADTAFWHEQFQKIELNSADFKLKEFICELSQKQRIFEAVFGTLPRALVPPSMDDEFEFIKSRREMLVHNDPALSEVLNGLFVTAMNAKQKLQLFPGE

SEQ ID NO: 131306 - protein, 217 aa, Heterodera glycines
MFFTGIDRLIGIAFSEIHDFLKTRLYLAMTTVISLSYGFLFSVVSYQEAKQDGDLMVTGSYIDVLRIIPLFVTISNLFTIMTFAIYIFLGITIRIKASGLPSADSFNRRTFRALFCIITVNIGGYLISAITYFLLIPIASPVTLWFFALMAAIPMNIGAVSNGPILYFTSTEYRQAFQKEFPFVFKQTPNQNQVVPRQNGPPIRVISQSRIIDSSKP

SEQ ID NO: 131307 - protein, 16 aa, Heterodera glycines
MATLMKQFKKGTKCQK

SEQ ID NO: 131308 - protein, 356 aa, Heterodera glycines
MLWLITTIVFASAVLVYIFYPRNGQGVSSTPPETESVDDAQNSLDSNKSKDNVFKSIYSSFVRGKSTSLADIPQMLQRRHSTVDDSHIPSQVANVAKRILGFPSNCDINQKDIQVFIIEPNEVIVKPGDPDDAIFVTLEGCLSVFITPPDANDKPIHVRRIEPGDFFFSSLSLIDIFMRLNPPTERSKEKHRGQSLRALNSLTKPKLKRMSTEVEQPKAEQKMALAVSYFSEALRLSESDANDLIRPFLKIIHLEENQSLFEEGSSENQPALAIIVSGVLKLTQQPRFSTFEDSGQEIWTAFIHPKELVGGLQYPQVGFRLVRLLGQYYAGRSHFPLISHPSSDPLTQRVFRLIDQ

SEQ ID NO: 131309 - protein, 93 aa, Heterodera glycines
MTDPANLLDERQQQAQQTLAGLRRDYEELDHTFVVYEKEFETRINRTKTAWEDAVRSRSNENDKRQLLESIRDRLQNVFEGQQYLLKTKIQII

SEQ ID NO: 131310 - protein, 225 aa, Heterodera glycines
DRKKQTHLRCERQRREAINQRREAINSGYNELKDLLPASGYNELKDLLPASASFIGCKTTNAAILFRKTTNAAILFRAADYVKALEAADYVKALETSMEQNAEELAKLQTQYSALEMILQQYENFSLNSQPCSALQLQIVTLQHFLDTCFDSFTSRVDLSNYQLQIVTLQHFLDTCFDSFTSRVDLSNYQALTRSLLSWVECLEYQPKQFWCDLSKFVTIIFGKR

SEQ ID NO: 131311 - protein, 250 aa, Heterodera glycines
FPGLTQFLWEKCGKSGLSLVFQGPGDMYDVGMGHGANFSVNVPLREGMDDESYHSVFKPVIQAVVDNFNPSFKPVIQAVVDNFNPSVIVLQCGADSLGSDRLGCFNLSFDGHGECVRFVKSLGLPLLILGGGGYTLRNVARCWCWANETAILVERDSEISNEIPDNSEYLEYFAPEFTLRPELPKRIENANSKEYLAAIKAEVLENIKLVRGAPSVQLQPVPGDAFDLTSTRGEENGAKMARISVRFDHF

SEQ ID NO: 131312 - protein, 31 aa, Heterodera glycines
GQQTHKNTSCTSMFEKRCFKIKSRDMSLGDY

SEQ ID NO: 131313 - protein, 171 aa, Heterodera glycines
MVISTTTTTMTTNCLTERRYQRNWHDNQRERQKQQRERQRTGKVPTAAALLDSANGRRTFAASAGAAGRIICMQRMHAAHAYAQAKRAKGENSAFRALAALPARRALTDPKDSQALPAWLAQKAISAIWAQKDHVETEDYQGHQAERAFPAWTDCRVCPAIWARPDAMERT

SEQ ID NO: 131314 - protein, 337 aa, Heterodera glycines
MQKKANADQIQGKNIMDFVKSYLNNYLTKSIEKDETGENPMNSNSDLIKMKLNALVDKAGEQCQKVRKNQSKNFLGKFSAKIGKTFQKRELKNSKTIKNEFDEENLSANSPFEMISKLSDKTGKYPKNITSKEITKERNKITKFVKKSIANLNFGEIKKILTLKWFAKIFANFKKANFIIFTDLTKLKDILLIALRNDKSPEESQKKIINLADNILLAISSNHKCQKRINQALNERKYGKNDDKMIKNEPFIYMNKMIEIRKSYRQIGPRVKRQIGTDIVALIGYCNFYFGLAVLFIGAPIVAAVFLSPALLALFFITGWVGVPAAKVFFENCILNI

SEQ ID NO: 131315 - protein, 54 aa, Heterodera glycines
MSYPIFVWREEMVDEARRGASLQQQKFFCQHADYQGLKSVDLRIHFWVILKSIN

SEQ ID NO: 131316 - protein, 146 aa, Heterodera glycines
MPNECSSGSPQGYLSDDFDQQMSPCSDVCGQSSPLFVQQHQFIFNSNRQSTSNDVLNKSSDPQSMIYEAARFDSIMKDLADCGVQRRQQQQQQQNVPNTPPSLSLPNGISVIQYEEPMFWCKVTYYELNQRVGEVFHASKPSLIID

SEQ ID NO: 131317 - protein, 64 aa, Heterodera glycines
MGNHHAANGSPTSGSPSSSTIGTIEGTATAKISGNCNGKGEKKQIIKKKFKLGNKISNERIFGV

SEQ ID NO: 131318 - protein, 86 aa, Heterodera glycines
MKPIRANLMDYIPDKKWLIHVNGNEKLQRNADEKCMPKGRGPKKEGAVPAKKWSSALRVVAAMTRFKNIPRQMVGFPYFLVSFPIY

SEQ ID NO: 131319 - protein, 88 aa, Heterodera glycines
MFLKLSPLSLLLFLSLLLLISFAIGYSPVGNAKSHPLKLRKRISYSDGGVMALNSAARKTRMPTRKMVEKPRMRFKGGERIWGKPEMP

SEQ ID NO: 131320 - protein, 85 aa, Heterodera glycines
LHFFSFQHLIKLGLPYKIKVVARLHKCAIIRYLKKPAQIWYSKWKKDFKMLCMTNTELQHPLISALSLSQMIFPAKRNFKKLPKF

SEQ ID NO: 131321 - protein, 82 aa, Heterodera glycines
MMPKIGHIFTGLLALSSVAPGTVNASQTGGAVQSVQQQWTSPPQMPGQNLMETPISMKNRELSLGGKESFETAVYGQSKVES

SEQ ID NO: 131322 - protein, 235 aa, Heterodera glycines
MGINIINSGRNEEMGEMENNDKQVLDEVENMNKKGRLNESSKLNGVTYESHSFFKTIDHTEMELLTKDEEHVLKSLEKSLQSQMLAVRKSFAESEGSKMPVEDEDQVAPLMDEWGEKEEKKEKKEEKGMKENKKEEKKEKEERKEKREVPRKKAEEEKRSASAVTVGEEVVSIVDSTEEREQEREQELFLNPQRKNASMRRDRPKHEESTCGDGYTPRNSRECARTERPGAKGFP

SEQ ID NO: 131323 - protein, 30 aa, Heterodera glycines; identical to SEQ ID NO: 126607

SEQ ID NO: 131324 - protein, 15 aa, Heterodera glycines
MLALLFIMKNYQMQN

SEQ ID NO: 131325 - protein, 59 aa, Heterodera glycines
MTKISNFFPGGAYGHRRAPQNSYFFLENGPKSQNLANSASGGLSNHTKNVGFGWQRKKL

SEQ ID NO: 131326 - protein, 35 aa, Heterodera glycines
MVIFPKNVGDFGPIDGETDQKSFDQDTKNDRIRNH

SEQ ID NO: 131327 - protein, 32 aa, Heterodera glycines
MVLKGKKSQFYKFLCVLGFHKFSPLCTWKVTC

SEQ ID NO: 131328 - protein, 90 aa, Heterodera glycines
MSVETGADEDDDGDGELLAIPSPSAIAAPLAGAQQKQSVGQFAKFMPIDSEDGGDEANEREGKSEEGQMANGGGQMVEGASLRSQMLKLS

SEQ ID NO: 131329 - protein, 284 aa, Heterodera glycines
LCVFLSPLSSARFHHASVPACALWLFLNFLLLLLIPSDASHSLIPSLITIFVLFAFFPFRPLVIFGTSFAISLAHLGAFGFSDEAKPSTEKLIAALLAHLWTHLVGFYSMANGRKISRAVFLSARNSVESETEWKRERERMCHLCPIPRLGLSVGTTASARLGTSAQRVGLAHWAVGQTARPFAGPIRRRAINRLLNQSVRPPTAVAATTDGIPLPTPFTKRKQFQPAQKVSLFRRRVRLPSDQCHSSLPSPLLGHSPLMTLSLRFADHQIEQLFHAQIDRWYV

SEQ ID NO: 131330 - protein, 192 aa, Heterodera glycines
LMGLIILFDPSIFTVLTVPGLRKGVALADFVIFPPRWSVAEGTFRPPYFHRNCMSEFMGLIVGRYEANCMSEFMGLIVGRYEAKEGGFSAGGASLHSMMTPHGPDAACFEKASTDKLNAGRIGDGTMAFMFESSLSLVVTDWANEESVDGTMAFMFESSLSLVVTDWANEESVDERYHEDWQPLKSHFERSK

SEQ ID NO: 131331 - protein, 79 aa, Heterodera glycines
MKSFEALRKSFCLPELGEKGEGSENRTENGEENEEEEKETEEEKQIIQKYCEQLKNGDETAENAHILFKINIIPLQRDG

SEQ ID NO: 131332 - protein, 111 aa, Heterodera glycines
LNYGAHLDNNHHKEKFQGIFVEMALQNANYAFRHNFDTFLAEMLKRAEEGSLYFPILITDNDGSLMIEQMAFESYFLGPDPGAFLKNYLGQDQGSQENPDKILTCQLPVHP

SEQ ID NO: 131333 - protein, 38 aa, Heterodera glycines
MSSHNTSVIDENRRWSDLRCLTDRASTFANSGFVPGIK

SEQ ID NO: 131334 - protein, 207 aa, Heterodera glycines
MFDGTQVKFIGKGVANFKFRDICIKSEYYVAKRGSLNLLSVQMMDAFGLLNELKAKINAPVNLCRVGDETRGFTKAPKPSQNLTVKAHIDHLKATFPDIFKNELGRCMKFKAHLTLKADAAPVYRKARPVPYNAQEAIDGELERWEKMGVIGKVEYTEWAAPILAVKKADGSARFRKSTSGMHISKSNWMMNRENYARFQPIMAITK

SEQ ID NO: 131335 - protein, 72 aa, Heterodera glycines
MAIKYGPKIAKYGHKWKKCQNMDINFSKLNVKFLQIYWLKLHMRYISKFFDSRKINNKSEIFAFLLIFDIIY

SEQ ID NO: 131336 - protein, 51 aa, Heterodera glycines; identical to SEQ ID NO: 124998

SEQ ID NO: 131337 - protein, 68 aa, Heterodera glycines
MNATLKNRSEDNALIQKNKSDDHGLIALLSSRISSAGSKQIEMKIFGEPLWNYARVIEIDTNDAKGQT

SEQ ID NO: 131338 - protein, 53 aa, Heterodera glycines
MDKGYVRGKRFEKLRLLNNDGIIDCHAAQSVKKNSTVWKGLQLIWTQCCWRNA

SEQ ID NO: 131339 - protein, 80 aa, Heterodera glycines
MQTLFEKARKYCGEQMYPLGEEKNDVQMVVSARKLLDFDTCNLYFADFYLHAASVDEPTQSSVLHYVTVVVCKHNSDTDK

SEQ ID NO: 131340 - protein, 52 aa, Heterodera glycines
MGQFDLGGLLGNVNQFTSQAGVNLGGIFGQMGQQQPNTAQSNDQPPRHFHRG

SEQ ID NO: 131341 - protein, 82 aa, Heterodera glycines
MRGGKGQVAGTRPSDGTRKAIGGGKGGTEASNVVEGSETIGSGKGANGRRNERGAAESGATAGTASRGTAGDGQGHRRKHDS

SEQ ID NO: 131342 - protein, 245 aa, Heterodera glycines
SKNIAILPRRDSDLEAFSHNPSDGSFAPLVYRPSTTKCLNLRFLSYAGLLLATGLGKTNLSHDGLNPAHVPYWWVNNPTLGEFCFAMIGRADIEGSKSDVAMDAWPPQASYPCGNFSDTSCWKLYTLKDRATLSRSVFVLKIRIKAFAFLLYERFPSSLSSLGHLRYALTDVPPQSNSPPDTVIGAGRRARVARLNTKMDTRRTPVLPIKGIDESSGISLAPCGSHLCYTSHDSSQSQTRVKLNR

SEQ ID NO: 131343 - protein, 44 aa, Heterodera glycines
FLIFLGKFGRFAASGRALRARLLIILGTFGRFAASGRALCARFL

SEQ ID NO: 131344 - protein, 32 aa, Heterodera glycines
MRKYLGLSRNKKSRITQGLIDRPELFNNYNSL

SEQ ID NO: 131345 - protein, 204 aa, Heterodera glycines
LIFVFLGNRWDLALVRMTADGRLPPAQRRNYSSVLNALVRVTREEGVLTLWRGCTPTVIRAMVVNAAQLATYSQAKQQLLASGHFRDGIPLHFCASMISGLATTIASMPVDIVKTRIQNMSVVDGRPEFSGVVDVVRRVLANEGIFALWKGFLPYYMRLGPHTVLTFILLEQMNALYKREIRRLKMHEGEETHFSDFNFTFFCC

SEQ ID NO: 131346 - protein, 151 aa, Heterodera glycines
HLPSNRAQILELKRNSQACFLLLHLKLYLLRLYGLKEEKIADYSPSEAKEVYEKPCCRRNIRCFSPDFATTVGESGAAGAAPQRTVTDEWAERRSIAEEFHKFHEMLLSLDERRDDDEERAVGAAANTSNSSATTAPAGGDHSAADDHQNE

SEQ ID NO: 131347 - protein, 18 aa, Heterodera glycines
MPSGWRNCRFHRKIYYKF

SEQ ID NO: 131348 - protein, 118 aa, Heterodera glycines
INLTSDNWSGAHPKISEALLRHCDGGATAYGASVLDRKIERTFNEVFERDVAVFFVGTGTTAANALSMAYVNRAGGIIFAHRHAHLIEDECGAPEYFTGGARLVGVSGAEGRIEPEVI

SEQ ID NO: 131349 - protein, 87 aa, Heterodera glycines; identical to SEQ ID NO: 129152

SEQ ID NO: 131350 - protein, 142 aa, Heterodera glycines
MTPPFRTSVIAVTKRITFPSKPNMVTIHIPTAMWIVTIHIAVGMWMVTILGLLGNVIRFVKTMTGVLKGGVITAADVQDLKRGWTQLELDAKVGALKAKNDRMYQSICARLQGQAATIQRLRATKGLKRSRGDKRKTSVRGN

SEQ ID NO: 131351 - protein, 75 aa, Heterodera glycines
MSACLTPLVAALQAQLSTLQRLREPQGLLRCRRHTTKPSARRNGKKKGLRKDQKTAGRRRVVIDDSSNGGGSRGL

SEQ ID NO: 131352 - protein, 76 aa, Heterodera glycines
MALSAAKPALLQFTRPIDFYASNQKFMCPIKSLCVLISEGFPILWHHANEPEEREMDGHSYSNRAEQDIILDYVKR

SEQ ID NO: 131353 - protein, 21 aa, Heterodera glycines
MNVIIAKARKEHLDLSNDIKD

SEQ ID NO: 131354 - protein, 106 aa, Heterodera glycines
MCSYKNSLARPIGAAKSEQFSSLPQNQNILINKNKWKPWFKGPLGLIHTGANEIGYPTFGDLQLGDPTLGNPTFRDPTFGDFNKTKKILKKPLTDFCSRWPLGKAL

SEQ ID NO: 131355 - protein, 100 aa, Heterodera glycines
MTNAQRQSQGFASPQVKTTANEQIKWLARVHELESTIESAKLVIRIALPPNLIEKWVNNENWAVLKENLKNIDMEDFMAYQDERRWFGCNFSTTVCDNWG

SEQ ID NO: 131356 - protein, 43 aa, Heterodera glycines
VKHPISALLCREPAGNGWLSICKKLDWQYVVVKNFWVWNYFLK

SEQ ID NO: 131357 - protein, 95 aa, Heterodera glycines; identical to SEQ ID NO: 124528

SEQ ID NO: 131358 - protein, 127 aa, Heterodera glycines
MQNTTDVEIAALDADKAVQIEIKYDDKLDEKEAAYFQLAVLFTSCGGQRRLRVHNVKMEISEQTLREKAPKEIRDELTLRCAQMLAAYREKCSEQAPLGQLILPECAKLLPLHVNCIERHDALNGGQ

SEQ ID NO: 131359 - protein, 15 aa, Heterodera glycines
MHFSWFTCATFINFA

SEQ ID NO: 131360 - protein, 61 aa, Heterodera glycines
LIVSLVDLFGTADDLWPKSASTLTILLTIISLILAIAAAMLLVSGVQFRSPYLLVPHILMQ

SEQ ID NO: 131361 - protein, 109 aa, Heterodera glycines
MPKYGNMDINREIWKNMENIDMESHPRSFKPSKHMLFAFLCGRLCERYTLIGKDSKNGEFGDVIDRHNPFILYEHHQWTTNQRTETPILSLLGREIASRWTPLHSDNGP

SEQ ID NO: 131362 - protein, 129 aa, Heterodera glycines
MISNFGCFFLQFLPNFGLFSSVWIVFFVGVDRLISVLLPLRYGLFEQHLFIYILPMLTVTFGYSIYVLVEAAKWPLFVYPDWPVLCTNSDMFSFGMTTMLLRNGLVINGVSIICYLFVGLSLFWSWQKS

SEQ ID NO: 131363 - protein, 104 aa, Heterodera glycines
FTCAALELPDFSDFARLRPLIDALIAELDLNDFLGCTAALEMLAETAATAPKCVPFFGQIGLLDKVYALFIRTKEEPDMGIIHIGINSQPNLDTLLRDFGPSQN

SEQ ID NO: 131364 - protein, 121 aa, Heterodera glycines
MNRKRFIYPREGLKMVPCSLLQQVGCYGKSILCHWLFAKSDAKCDVFISQFTAPNNTKLSKEQIDVFCAKVEEDKVVWTEGSAYLAHIATALYACVEKGLLLCVHRKRIFAVGPRMNHLTK

SEQ ID NO: 131365 - protein, 209 aa, Heterodera glycines
MLLYHWQLQQVEAVRRLLLSAGWCLRSSSVAVGGGQCVRPFATRDGGQKRVSDDEWKTEREQYQKYEQHNQQQQQPRGAATENFCIFQPFFAPKKYIKIENCSQKRYNGIGGCGGFVYARPSAKLSFDRFCGGFTSDRAANAAWKKDDDDEEDEDGQVNEEEQRRRARTVAAEDGENARQTKLAGRHGRDRVSAETGTIIALRHFLAEN

SEQ ID NO: 131366 - protein, 233 aa, Heterodera glycines
QIALKFPKFFPAAPIGTAGLRFPTIFTWFLPYLCVFLYKFTGAGYSKIGWHPQDEEEWEYFRYCYRCLAFKAPRVHHCSKCNRCVLLMDHHLMDHHCPWINNCVGQRNQIYFIKFLVVSIVGSVHAAVVLTSCLYQVIFFVVQFMLQNPDSVQQNPLQSPSQFMLQNPDSVQQNPLQSPSDLSISSFYLFIASIFAVGLSYGVIIAVGILLIVQLRSIYLDRTGIESLKDKLK

SEQ ID NO: 131367 - protein, 55 aa, Heterodera glycines
MALNHPLVHWESWFLIKNIRSTGRESNPRLGMDGGAKVCQWHSVGEQRLAQGDGE

SEQ ID NO: 131368 - protein, 94 aa, Heterodera glycines
MAVTNVKTEKMREKLAPQKLGAISNGKYSMTTDDKGGGNYNTPPYSSTLKNNSNNSDSNNCRKDNGGGASGLKNQQNPGIAARVADGNEGEQSV

SEQ ID NO: 131369 - protein, 84 aa, Heterodera glycines
MAPKKFMPMELIVEIVTFLQFRRRWANVRVSRAFDHFLLEQIGLFLTKTNSSAKQCLTEFGEMIKNLPSKHKRNVFNESARNEG

SEQ ID NO: 131370 - protein, 63 aa, Heterodera glycines
MHVNVKNEKDNVMEMPKQQVLISTMDSFIFAPESVTKPLMKDLKLVQDNQVFKAGRSLGKTGL

SEQ ID NO: 131371 - protein, 37 aa, Heterodera glycines
MIHQIPAKAPTRPELQQSGQCGCCRFVPQRSGTIQGG

SEQ ID NO: 131372 - protein, 97 aa, Heterodera glycines
AMYFVKCHTIPKDNSVIKLNSRSARIHITRYALVIVQEVPPKQRLYLNLEDLSADVECVQNRFAFRALTYPWSTPQSFVFTSDQIPELTAKLQCLLK

SEQ ID NO: 131373 - protein, 36 aa, Heterodera glycines
CKAGTGNGLYPSPPHFISPIGLLPSRGALKRQRITS

SEQ ID NO: 131374 - protein, 281 aa, Heterodera glycines
MKEKRERIFDLEYFYKSKKFEGAKTIKNGQNIELEIDQQHNAKEEGIEKVDLQFYIFIKPFGRDEVPLIGHARVKMAPEGWLLRRYLTMAVIWPNPSKRYVINLGRIDPPGLYWNRKLMVDQKNDHGTYHALLYANTIKIGRTENSEEKMLLGYAKLEKVYDQNEPAIDLKLNEFNEYQLSFPIKHSLFYKSIMEETELIENVELKIYQFENIFANKTNKREIKKKREEEICSICLEAMEYKNEQITEIHNDGKGKITVCTKQDLLSSLYDGSKFSAVINF

SEQ ID NO: 131375 - protein, 95 aa, Heterodera glycines
VNLLFASPLFIFIVIAYPPLIGTWGALFFMPMALISAVLLFLLYRWMPETKGLSVNTIFLRMAKLGLLNSSSEGSTTSINGDDEDEETEALILKN

SEQ ID NO: 131376 - protein, 95 aa, Heterodera glycines
MLLYLFLYLCLHYSVFGDGPPPHIFPAPSKCESGTLFAPSFCSSHFFYLCSNGQPIRMKCPADLVFDQLISVCNYKNACGKRQQPYASCGRITIF

SEQ ID NO: 131377 - protein, 76 aa, Heterodera glycines
VNGKRPLNGQLGHYQNDEAAIHSNGMGEGIFKISAISRIPIGLVGWWMVKSGLDPSNNSNSDVPRVSHYRVASPTS

SEQ ID NO: 131378 - protein, 57 aa, Heterodera glycines
DKIAGDGYSYTDDNVCVFNNVVTSRGPGTAFEFALKLVEMLVSEEKAKEISNSLLVH

SEQ ID NO: 131379 - protein, 24 aa, Heterodera glycines
MTPNCVFPKFCRRNSSLWSTQIRK

SEQ ID NO: 131380 - protein, 34 aa, Heterodera glycines
MNCNQINIRVQRDREIWARPGPGLFWLKTRDFFG

SEQ ID NO: 131381 - protein, 123 aa, Heterodera glycines
MTPIFLPIALCILLHTVSFPHNAHAAGDYASDDEQNFPLLDSEDSSSTASFTDTENYESHTDSSGHSNQTPKKRWQKAGKQIIKNYDWKKVEYYLNKEVLPNIRKEVQYPNANGFCVSANKKK

SEQ ID NO: 131382 - protein, 76 aa, Heterodera glycines
MAAGAHFNPYNAEGVAVVNIQDRLLKLNGLHSVVGRALVVHEKRDDLGLGGNAESLKTGNSGKRVGCGVVGITKEL

SEQ ID NO: 131383 - protein, 46 aa, Heterodera glycines
CKSFIVNFQFPHLQNNLISLIKIPELNSLIKKRILSNIFVPFVPFM

SEQ ID NO: 131384 - protein, 176 aa, Heterodera glycines
MTAAWHRTDPKLKAERRMAETLAEAAVAISITSFTDMLSFGIGCFTTLPVVRLFCLYTFFGIFFTYLYQITYFAAVMAFAGQMEQSGDHSLLFGLRALRPEEADSTFKRWMLAGSSAEAAADEGEEKGGEMKPNGAKDGKRRERDKCQRVEGTEEDNWQTEGQKDQKRDGQKDQEE

SEQ ID NO: 131385 - protein, 139 aa, Heterodera glycines
MRWNSTFQQLPPNQQKEMYNLVKNGPNSASSSRSPQPFQSSNQFPSNQFGSGTVPLGKAYLGQQPLVASGSSSRPLQSSGTFLRPNHSRNPRFNSSGNFQVPQNSSANASASSSSFHSLFGLEDPQKNTFESMFGSKKG

SEQ ID NO: 131386 - protein, 257 aa, Heterodera glycines
MESDLDKNNVCQFQTTFPLHDYLNKINRDLEVEQKFKSERQLKRFINFAKTRSSPPINSDVHPISKISISMKNFPIGPYELFDFQNKSESVMIEAVKQDANETDQSSGIANMIEIIDPLKCSELCGVADELFIEKDEHQSFRTVGGEVITDNYYPWVVFVRVHVHCAYSAPIYIHCTGVLISFKHVMTAAHCMHLNTTMLNECIGWMKFFPAGRSLGVYFSLFCIFLVKNCQKWPKYGPKMLFLSPFLHSICAEKIC

SEQ ID NO: 131387 - protein, 179 aa, Heterodera glycines
TVGGEVITDNYYPWVVFVRVHVHCAYSAPIYIHCTGVLISFKHVMTAAHCMHLNTTMLNECIGWMKFVPAGWKKTELHDVYIHFSSSTMSETKIEKVRRISIVKDFDMSHDNLLRPDDLAILEAFLILYSDTLIVMWGRREHVGSVFVAQFIIIPTTKHFIAKPNIRPKSGQCCSDLLV

SEQ ID NO: 131388 - protein, 161 aa, Heterodera glycines
SNYLNKSQTATLVPIRSAIYCNKIYNNILPWKYNPSKFVCASSRNKGITSGDCGGPLMIERNGLYYLIGIVIAAYHPKAGFYRKYVPDVYTRVNSFDSCGFVELVTNNEATCFQEFLKSDRLETVCATQHAQILEKTLRKSCEYVSVDQMCYIGMMLFSHP

SEQ ID NO: 131389 - protein, 318 aa, Heterodera glycines
MSSSIDHLFEEMLGTDEPKKGEKEEANSESQKKFEKEVEKLKKEMKEEEAKRTQKRLEEEVTKLKKSLAKMKKEKKAEKRKTDEMEEEKAMVMNKIKKVQNLEEKEGIGESNEEIEERKEKQRIRQVLVDDEIYLNLEEEEQMLYEPLKGQETEKFGFFESCLNRAKSKTKMENGSEMIKPKKATNPFRLLKAEINSAEMDIVGRRGEEIPPEGKKLGNGWKSEGNGNEGVIKKLGEIRQMALSINEEVQNVLGLIERKGEIQHWQENGAWNRRGRGRGGNFYQHGSGRGNWQQRGRGHIHRADWTTPCTSRSMMNEW

SEQ ID NO: 131390 - protein, 127 aa, Heterodera glycines
MKRKLRQSQKLIEEKEEINEDTKRELVRKFEEMRKEKIYGFKLENKNIAKIEREIAKDLGISRTKIYKWKKEFAKQKKYTKTEKLESVEKFDRMKKKNPNLSGAQIAKKLEIRMRNVRRWRKQFGTD

SEQ ID NO: 131391 - protein, 158 aa, Heterodera glycines
MDLRIVTHRQPFQHHRPISYATEGIVEYPAQEYGEIHGQIMNTPSGNHKILVQDEERGNGTSCSAALLDAGLDDVFRRSEEIWSRKQSLRPTAVGMGASLKTYQDLVGGTSQLSSTRLPMSKVAEKPPSADASDRYEDINTDVLNERFTDAETNKFVQ

SEQ ID NO: 131392 - protein, 75 aa, Heterodera glycines
MPVVAAVGLAPAVANAVAVAVAGHAVAAAVAAAVADVRSAQLSSARPLKRPKPENLLHQPPKCQCHHSHAHQQKI

SEQ ID NO: 131393 - protein, 235 aa, Heterodera glycines
NSEWGRKMHQDLLDGVDFLVSNNIADRRQVAIMGGSYGGYATLVGMTFTPDIFACGVDIVGPSNLITLLDTIPPYWLGFYNDMITMLGADKNTEEGRRFLKSRSPLYFANRVKNPLLIVHGANDPRVKQAESDQFVAALKRNHIPVTYQFVAALKRNHIPVTYILFPDEGHGPRKPHNTLAMAGFIEEFLHQCLHGDIEPFNLGKTIFGSKLFKKFLISGQYNSTAMVAFVHNYF

SEQ ID NO: 131394 - protein, 88 aa, Heterodera glycines
MKVMADAKTSITGLRSQAKNFNAEERQFHDLKFSHSLHMNPPDASAGVDKKTSPIADREAEGNMRFREIMQQRASKLPLGGEEPFAAL

SEQ ID NO: 131395 - protein, 56 aa, Heterodera glycines
MILFNHNRNHWLFRENKCSVIPGDKKKALPRMRQKDGSRKLIQHSFLSLFIMTVLI

SEQ ID NO: 131396 - protein, 139 aa, Heterodera glycines
RPSGTPVIESMSMDFETWLVSFISDDQPFDIFIYYFFVKIAATTRPELAGRPLSKMIGFDYSARDGLRIQAYLSLPPQTPLLSPAQVRGDKLELARQGMLPRRPQKLIVLVHGGPKSRDFFGFAAINAWLTSRGYAVLQ

SEQ ID NO: 131397 - protein, 285 aa, Heterodera glycines
GTEVSDNLLGYFVRGKNGSEWKREENDQIRAITKHSHITEMFAAKLEVCESFSHRMFSKSFSHRMFSKDYVVLRAANKAKLGHFCALVDRGMIKDHFKFLVMDMLGDNLFKLLGDNLFKLRLQFQQHRFSAPTSLRLALEMLESLEQLHSFGFVHRDVKPTNFALSENGQSGGRVILLDFGLCRHFQTATGGIKPPREKTQFRGSVGSVRYASLAAHRAMELSPKDDLESWFVQQLISGDLPWSHFSAAERDSVKRAKENARTMDGMVHLLKYCPRVHLLKYCPR

SEQ ID NO: 131398 - protein, 46 aa, Heterodera glycines
GQFNGRIFNNKLNNLGFPTFITFAQLMDPSRGFYDKDGDKVTLAVD

SEQ ID NO: 131399 - protein, 351 aa, Heterodera glycines
MSKYSSSFYTPATEPNCHCASIRKLGICASAAFTGAALYINLVEQPSRLQLETAAALKQFKESYTRAIPMQAGLAILSGIVGIGGTIKTGEKAWAFGAALMLANIPYTFLCVFPVNKRLLATNRGTAGVQGWLAYLPKPTLAPLNSRLIAGRRHLNRMLMSDTFFCVALEAQLYFPGIHNDRQWTNTIRTAFATTFNSNHSIVRRMQLIPRWEQDIVCPPRFPISFWNVYTRAQMAIERTNNGMEAAHGQFARDLNHHPSLSDFIAAFMKDINKQLDIGRAEQLQKSTKRRQRYVIKEQNVVRILDEADFESEEGLTNALHLLGIVMQGFAEGLHVRGNSENGEETEADEN

SEQ ID NO: 131400 - protein, 32 aa, Heterodera glycines
KYADPQNVQPTKCPSLEFEFFIIQMGLRLGKG

SEQ ID NO: 131401 - protein, 229 aa, Heterodera glycines
WICNDVWMDIFPSFDRPQLGLKMALLSPRFNSLVDKHFDGKSELTIWRPIEIFPLRDRPLPSKIRFKDLRIEYIDHSVIAFLRSNHQIFDKRGTNLDLWIYYSNTTDGQRIWDVFVREIWPIFSENIRHLGFYDAVNLDNLLRRTSSTILTDLNQLNSINLFGLSPAAFGDDFDVPNSTISAGQALSKWLHSPRKDGQPKRLRCDNYNAQGNTDWINNFKEVTIITTNY

SEQ ID NO: 131402 - protein, 371 aa, Heterodera glycines
WICNDVWMDIFPSFDRTQLGLKLALLSPRFNALVDKHFDGKSELTIWRPIEIRRKDKGPEPKLSVRIDYKFVEFPLPDRPLPSKIRFKNLRIYYIYHSVIAFLRSNHQIFDKRGTNLELWLPYSHTTNGQRIWDVFVREIWPIFSANIRHLCFSHRDHLDNLLRQISPTILIDLNQLTSIKSFGLLPAAFGDDFDGPNSTISAGQALSKWLHSPRKDGQPKRLHCADKQTNFDWINNFKEQFLRANAISSVSYEIHFYVRTPSMPMVPFELVNEWTKEKLTLAKAKGWDNRWIMKRCKIIGETAVVNWEDGNWDNNCNSVFVWLFRTTNCIGPLSPPPAEEAGQNITKGPSSELTMSDGQTKKNSDQPQKE

SEQ ID NO: 131403 - protein, 108 aa, Heterodera glycines
MPMVPFELVNEWTKEKLTLAKAKGWDNRWIMKRCKIIGETAAVNWEDGNWDNNCNSVCVWLFSTTNCIGPLSPPPAEEAGQNITKGPSSELTMSDGQTKKNSDQPQKE

SEQ ID NO: 131404 - protein, 243 aa, Heterodera glycines
MSSTVLQNALRLLFITLIIFNCCHGASTRVKHKKPTDETTSTNEFAGLSVKLWIIIGVSVLLVLVVVCAIVVICCLCRERRFGHDNDELSTAVSSSYYKSRQGPTDSRDWPPTSASGHGHGRGGRSGGGAITAVPSGMMSKMPTMKTKQPFSFRMLMPKSLRSIGPSRPAPSTATMERGGAQTKLKTTTMLGGGDQTKVKTTTMLGGGDQTKVKTTTMLGGGDQTKLKTSSTVPSGGEHYTTW

SEQ ID NO: 131405 - protein, 51 aa, Heterodera glycines
LQIYWLKLHMRYISKFFDSVRRFDKDGFRFAISRSTFGNWSRIFSAITGNH

SEQ ID NO: 131406 - protein, 311 aa, Heterodera glycines
MAILTPIKGQPTEQSHQHHHHQQQQQQQPTQHVPIQREDIATQTDQQADEEAATAPALVAAAVTQAQHQPKQQQPPPQVTTTNANSTTPPTPQVETSNNNNKRDPNVMVDDQQQQQPKQQQMVPPPSPLQNIGQTMRKVKSATTPYEALRCELIDALVVQPKLRQQQNNNGNNDGTGNNDGTGNGHRGGLRRQKFKSICHPPPFSPLFQLFRFAFILLCFYFGMGFMERLAVAMIAACVRWAWPPVHFMLGSSRGTLFYLTDWFAWMEDFLSSWVCDMANRYCHQYGVMCDSQCSFVSRTQRAASFTGRRF

SEQ ID NO: 131407 - protein, 1375 aa, Heterodera glycines
MLVQTGLNSEGNSRPPEARTKTKRKPKRRTNDPAIQSEKRGERSLGTDQRAFTAMGESLPAYLMVCPVVAANDDITRQRPTALLLDPGSQVDWVQTILTEQLELPTAGSAPLVVQVFGGSKKRVPSSRHRLKLKRLDGGWEPLEVSSVPNVCTPIQTKLVGPGTPGLLEPVGATLQPQIVIGIRKFWDFVIGFKKSAEGAFLIDTVFGTVLCGEHFGAHLGQPAPHNHILMAITDEDSGWSRMPAPSAVEQFWSLETIGIRDDPTGDADTEAIIQFEKSVRQNEDGRYSIRLPWRDPIPALPSNFAVAYRRLTSLIGRLQRMPDVLERYRAVIEEQFSTGIIEKAAIGANQREHFIPHQAVITPKKLRIVYDASAHAKGAPSLNDCLLRGPVWLPDLAGMLLRFRACQVPVIADVEKAFLMVEIEETDREVCKFLWVRDPTRPVTTDNLLPLRFRRLAFGLTPSPFCLAAVVRHHLRKFGSDFAEQLIRDTYVDNVLIPADTREEAAEKASLAKRMFTDARMNLREFLSNDQNLNREFPTDDYLGKTTTKMLGLEWDSERDEIRMNYPGIPPDCATTNSRRSVLKMIASLFDPLGTLAPATLAAKRFFQRLWDATHDWDSPLSPADQREWERITASWDGEVTLIPRKVISGTGLSLSLHIFTDASEFAYAAAVYIRSEGPDGIFSRLLMAKSRLKPKKAADTFTIPRMELMGILLGVRLAAFVRAQLHRPVAEQHLWSDSMIALHWGYWTPGARQQARKVIKSCRKCRRMEAAPYALPPMPPLPADRVRRRLPFESVGLDFLGPTAALDESGQRRKAWVLLITCLTTRAIYVDATRDLSADSLITLLRRFIARRGAPSRILSDNAPSFTLVGRTLSSFGVTGNDPVAFTDSRGIKWRFTPSHTPWAGGVFERALQKTLGSWVISYDELITLLAEVEAAVNLRPLTYVSDGAGDPLPIRPIDFIQENGRLGIGPLNPASELPPDRKDPPHVQLEKRWKAAQQRTEHFWRRWHSEYLLQLREKAGWQHRNRRVVAGGTPKVGDVVLVEDKMQPRNVWQMGRIIELRGPPDQIRSVLIRMPNGRIWGRPVNKICPLEESPESERDGTAETCESGDIRGDLIPPGPIMQQTEPQDEDNAEPTQQEAGTIGESVPASAEETTEVVGQSGQDKEGAQIERENNPVALRRSQRDRKIREIRDPEWSMPRKPQKRKFGQSRIGLTLFAVLMWTGTVVGCQPAPRNSRLTALRDSNDLKNPCEMSCAARGVTVYSDESVDKLEICCADGCWATSPKNPETHYELPVEPPAADIFGKTGGLDDILVVFQAGSGRQAHPGLRKAASSPSLLKGRIPSQEGCRGLHPVGRELSRGHSTAEGTIWGHG

SEQ ID NO: 131408 - protein, 19 aa, Heterodera glycines
EPVNSCIGCKCRRCCTPNS

SEQ ID NO: 131409 - protein, 344 aa, Heterodera glycines
MNNQKKSGPMGKGSEPKNGSDFEAEFFTAEENKLFRQLLGRLRTFEAAVCSQFRQMENEISKRTNETSTHLGTMERSINETNASGEIENFEREEKIAKLEGEIDNLGDKWAEYKENAQRELSELSIKMEKNFNETKSSIDGVKLKLESVENELKKSIDVVETRVEFLEMENASDEDMWIDNGHEDANFTDGNVQKNEGEDEEMDESEDKNNGEMEDESGENEGNKDKSCELMMADPFFMNVAPPGVYDGNPAMPFSRWYEKFKDLLLLCPQLNEEQKLSRLRVCLAGQARGELDSMSPAPETLQAAIDHLKRKFENENTKSIARQAMSICKQAPGEKVMNSRTD

SEQ ID NO: 131410 - protein, 65 aa, Heterodera glycines
MNFIFLLNFLFVAIVFCGARKLYYPECENKKMFKGQWNYTYSSYGNDLCHTQAEHFQCIEFKCSI

SEQ ID NO: 131411 - protein, 32 aa, Heterodera glycines
MDRTGLGILRNLGTVNPVLGHKPTKKGKKSGT

SEQ ID NO: 131412 - protein, 654 aa, Heterodera glycines
MVFHGPPVSESEPEPEIIVTEEVSSSELQEENERRVQRAGHTPPSAPHIPEPEELRIECYQQSWPKGEQYVGYNILTECSGERHESCAKCTYRQIASTRKKQLNGFEDCKANSLMNAMLFDLVQRLLNLRSETVVLHEEYVMPSILTPKQLAEKFWKEQFVTKNRQLVKQASLMDLLKQWSTSCDHFGALMQLNQFEPIKLRPISIEGKETSEFENWLENLNKFTANVASRTKAAIANQHYSNHEIICVGDLAAEELANASRTQWFTHYASDRLHLSPGPDVQHIIFCYLANESDLTKGITPYIRELAKTDIQLTIVLAKTDDKSWLKNKNECYQLAKAAKAGFFVYHRRTGEARQLTDMILAREEDEIMEVDPTPSTSAASSSGLMSRNSINTLMVISMFALMFLQPTAAAPLRIHRASLSQNAQRFLQMVSAHYSTLTTAPPSELTITLSTALRPVTSSWYSTITRTEMMTTTKTNPWTTTTWASMTTTKQRWTPMMSNSASTWTTRRTRILYVTKARSQQTDATTPSGTIKSAKRDLGTNRDGADVFWCSDRGSTIWELKGPESSPFCRPPPTLTAQWHNLAIELFAKVIKPEQIAFAWHCSIKRTSERYYTNLLADKFVTIEKEFPPVSKRICNAGIFTIVTEFPENAHL

SEQ ID NO: 131413 - protein, 69 aa, Heterodera glycines
MSIIPGTSPEGVRYAGVTVFSKHRTYTQAQKMAMITMKICPRLYEIQLFGNALGVDHDTASARALAREV

SEQ ID NO: 131414 - protein, 25 aa, Heterodera glycines
MSIIPGTSPEGVRYADGSSPAGQKN

SEQ ID NO: 131415 - protein, 49 aa, Heterodera glycines
MPKYGHKICIKMPKYGNMDINPEIWKIWIWKPILEASNQAKNMFFRPNN

SEQ ID NO: 131416 - protein, 112 aa, Heterodera glycines
MDNLSGGEKTVAALALLFAIHSSNPSPFFVLDEIDAALDNTNIGKVVHYIGERSRTDIQLIVISLKEEMYNKADSLIVDSLSQKGLLEANRQPPISHSTLSFLMERKKDPMS

SEQ ID NO: 131417 - protein, 336 aa, Heterodera glycines
MSDNRKEAEAKMEKAIFISADCWLCAFDLLSPRKLGLGIALISHGFDFYVDEHFKTRKWTFGIIRIGSKIGKNGTKEMDVVNCYQRPMPIPQNPLPKKVVGFKAISLDYIDRNVIAFLHRFRQLFAVCPINLSIQTARDDYRISEFILRNIWPMLGKNIHAIEMSVRIFNHLRQFVPSILNECPPLRVVSFSVDLFIAFPTDDNAAASDGQAVAKWLFTPLQSNVPKVLRSPLDMNDGFLVSDIEDFKAAFASASSPVNFIVVIQFPPSFANSVVPFVMTNELTREHLALKRTKWNTSFLLIRCPIFHLRRLLALCLRIASPASAWLWHCDDQPPF

SEQ ID NO: 131418 - protein, 265 aa, Heterodera glycines
IVPPVELEIHWLVKQLWSLESIGIRDPLDPNDESLALALFSDSVKFKEGRYEVGWPFRGGKDRLSTNFSLAYSRLSALSHKLRDNSEFREKYQATITEQIERGIIEPAVRKGAQEHFITHHAVVSKKLRVVYDASAREKGKASLNDLLLPGPNLVPELAGILLRFRASTCPVLGDIEKAFLAVGLREEDREVAKFLWFRDPSQPLSHQNFVVYRFKRIAFGVNASPFLLALVLRHHLSTRGDPLEMAKNFYLDNLLICSESPEKR

SEQ ID NO: 131419 - protein, 20 aa, Heterodera glycines
MAATAQRMAHKSSLCGKSGR

SEQ ID NO: 131420 - protein, 37 aa, Heterodera glycines; identical to SEQ ID NO: 127515

SEQ ID NO: 131421 - protein, 82 aa, Heterodera glycines
MSLRKCPSANVRPQMSVRKCPSANVRPQMSVRKCPSAKVRPQMSVRKCPSANVRPQMSVRKSPSANVRPQMSVRKCPSANVW

SEQ ID NO: 131422 - protein, 93 aa, Heterodera glycines
MVPFELVNEWTKEKLTLAKANENEWDDIWIMKRCKIIGETAAVNWKDGNWGNNCNNVFIWLDSDTNCIGPLSPPPAEETGQSITKVASSADDE

SEQ ID NO: 131423 - protein, 31 aa, Heterodera glycines
LFNFLFLTASIFYNNLSVWSDVRQTEKIIKI

SEQ ID NO: 131424 - protein, 166 aa, Heterodera glycines
MNRRWICNDVWMDIFPSFDHAQLGLKLALLSPRFNAYIDHFVIAFLRSNHQIFDKRGIDLHLWIPYSNATNGQPIWDIFVREIWPIFAPNIGHLTISNAEHLDNLLRRTSPTILIDLNQLNSIKSFDLLPAAIGDGFDGPNSTTSAGQALSKWLHSPRKDGQPKRL

SEQ ID NO: 131425 - protein, 61 aa, Heterodera glycines
MSSAGVTETLISPSSYIEKHTLSGLLTEDVLHFAIGKNITINVEEKAVPRVRDSARAKWKK

SEQ ID NO: 131426 - protein, 308 aa, Heterodera glycines
MCVIFEQTDRTREIVVNLQAFSAVGYSEATQKNMQNGKYYKIFVPDFILLDVVECKFGIFIKPKEQNENGNEKKGKKKAIIVENQMDKDEQKMWTMHRSVKLNLSDIHTLMKKPIVVNLGKIGGPELFLKRRIFVETNNDLGNYHAFLYAIIEGNEQNANEMNEKKRIFIGHAPFVKFDEEASSSSQANHKKKSLLKNFLSGKSKQMEKALPEGQQLIEYHLSIPIEEKRMFGHKICDLILAIFHDQKGDKIEEVLNVTNFEETENIYFTNHASLIGNLEIISLKHNQKYAAQFAIGNQHLSWSVFDE

SEQ ID NO: 131427 - protein, 18 aa, Heterodera glycines
YREAIPEGFGLPINLGAS

SEQ ID NO: 131428 - protein, 40 aa, Heterodera glycines
KKSIFLFSGQSPPNRCAQIYGETESFGNSFPIACTLFCVG

SEQ ID NO: 131429 - protein, 53 aa, Heterodera glycines
MPDMVRIMGLLAPLSIPSTPIPDNLVRVISVRFECLNNNVLTVMHHFHRLFFT

SEQ ID NO: 131430 - protein, 280 aa, Heterodera glycines
MDDSAFFKLKENYQDAIAAGQDWNIVRQTARDDIACNNVMVALDRLMDVPQKDGEYVHVTVVISGLGPDQQHALTINQFGDLSVSSGNFHSVGKHFSHPGQKHGPPEAVSRHVGDLGNITADPKGVAKSNWSDKVISLYGQNNIIGRSVAVHARKDDFGEGTQDVIRSRESGNAGPILSCGVIGLAFDTNMSTRSEDFQREFLQLTQAYRAAETTKRWNMVVGCASGDDKCGALIKSLQQLMELPVHPQQCDSGPRKAVCWLACPKMKDTKGAITFKQVC

SEQ ID NO: 131431 - protein, 69 aa, Heterodera glycines
MKKIKLNPILDIGANELVTVTKHSLSKAMKRVASHLDGRCHAGQRSHERIGAGKDEKCCQTEQKSAQKR

SEQ ID NO: 131432 - protein, 182 aa, Heterodera glycines
FLSLLCSLMLWFTASVHYQRFYLVLAFLCTFLLCFLCTFLLCLTTLLIFSSTDFMGPLASMATSIQVVLLVYTVIPLPLYLCILICAIYSLLLELLSLLLELLSSPQSPSSSFTALLRPGTKATLHFCVHLLGIHLYILTQVRQRKTFLKVGQSLLARKDLELQTQFKDHMIQSVMPKKVRF

SEQ ID NO: 131433 - protein, 61 aa, Heterodera glycines
SHCRQSQLPPSQPLPLYVPPVITGVNRQEQMEVPAISVAVVTEVPKVEQQGGEDEQELDLR

SEQ ID NO: 131434 - protein, 46 aa, Heterodera glycines
MRPKSAPKMKMEHSPKKVHVELPAVDEYGDDPFEGVSEWPLQEEGQ

SEQ ID NO: 131435 - protein, 127 aa, Heterodera glycines
MLVPLISNELLSRQFRMGIIVKCFLTEMTINCRRFSAVVPRLMAINQSSSRRVWGLFGPKKGDGKAMAMGEIYPSPRGTGKENVILRPKHPKKRSIKNFFAREFPLLYDSYYLPTVCSDKSRTKIDK

SEQ ID NO: 131436 - protein, 87 aa, Heterodera glycines
MWHVTSAVEERTYQQQPLLLFHEISAIKINDYENADNEKRQRPRKKSLNKCRSPQCVKAVGGVGWLMHQTIAHIRSFDNWARMISAN

SEQ ID NO: 131437 - protein, 71 aa, Heterodera glycines
HILSRTVQSICTTGTVGGTFDYDQTWICALCMLNTVQHRHVAIARLSHPTNLGRTMQDLRFIIIVIAPSRA

SEQ ID NO: 131438 - protein, 184 aa, Heterodera glycines
MLGLKIQRHSLGNWLTKVCRPLAKCRSSTHPFYCGLFLGLLFDLAIVWLFLPSLSHAPTKERQSSISEMAKTVKLPKQLMGYEAYFNKNFTYPFDSRGTVAQEIARKVRVFCWIFTYENFHESRARHVKATWAQHCTKFMFFSSKEDSTLPAIDLQIPLGRQFIWRRTKKIAKYIYKEYLVMGK

SEQ ID NO: 131439 - protein, 216 aa, Heterodera glycines
MCQVCRGFPKMSLNVLGVLLINLSDIRQDFDLTTKLANPVFDQTMVEKPKDAANQVLEGPKDSANPVFDGPKDSANPVLEGPKNSTNPALDGPKNSTNPALDGPKDLDGPMDAEHSEFLHTYLERHGPLDETICRAWMRQLTNGVSYLHENRIAHRDLKPENILLFERSVLKITDYGFAKQVTWRHLLCYADQHNAVQQRQCLRCVKFAVVFRRCL

SEQ ID NO: 131440 - protein, 76 aa, Heterodera glycines
MPNDLPGVDAATDQRSVLFARKSNRASGLEAGEHFALRTWRSQNHRLRLRETEGLRCVKFAVFSEDVSERSGKSSD

SEQ ID NO: 131441 - protein, 660 aa, Heterodera glycines
MSLATSSPIDDGSVRQRASIAVDNDDSDDDDDDEELPLRLCFFDAETSQDTPLQLNNRTVQKHVPLLIVAEVICERCLQAGISVSDGLGRRAPGCVCMTGMVRGQLFRQWSSPPFANAPGDNSASPVGAPAFNQRRFFFHSFDNDGNDPVDQFLDFLLQHGPKKAHTVCIAHNGGKYDFHLVLEALHRRNRPPKHLCTTGLKIYSMRLSGRNQRRITFKDSINYFFCALDALVKSFQVPDHLATVKPFFPYLYIRRQHLSQRLNGLPAQEFYAPDTMKAEKRAQFLRWHADNNGNGFQLREQLIMYCVNDVAILRESVIRFRQLIADNTQGLDPFLHASTAAGLALATFRRCFLPANRLVHSPEGGYLRGRRASAESQRYIRFFELEHPEAQVQCASWSVGEAHIEDSGYRVDGLWRREAPLRPLAIEWLGCYYHGCRVCFPDRQQQLAAGRTAEDLYERTERRLFELEHDHGCDLHVVWACQWAERLRHDPDLKRRYDAVFVPCPLDPRNDALRGGRTEPFKLHHVCSDDEEIMCIDIVSLYPYVMKANRFPVGNPRVLTREVLLRPPTVPLPWNAPENNIFRGLLLARVLAPRNIRVPLLGYRTKDGRFTFPLCAWCADRRQQRPCRHDDDKRSWVTAYTHVELNKALQLGYVVTDPI

SEQ ID NO: 131442 - protein, 148 aa, Heterodera glycines
EAGFPGIPGAKGEAGFPGLHGAKGELGFDGLPGQPGLQGPPGLPGFPGEKGEAGTPGYGVPGLPGEKGIPGIPGKSGRSGPPGERGMDGPHGFTGIKGEPGFPGQDGLPGQDGLPGLPGPKGDAGLPGFPGIPGQEGQPGLVRPPGLP

SEQ ID NO: 131443 - protein, 250 aa, Heterodera glycines
MYEDCNTVFARSLDAKKARLFITFTNNREWPEFKENLHKNGQVFTDRFDMWMRVWSSKIAEFQEELYDKKFFGTILGYGESMEFQGRGGPHAHIVAQTDLDAVPYVIQEYIWAHIPSLPDKDDDTPIAKMHREIRETMHMQLHRCSDSWCGPSDPIYGRCKKGFPAPYSKCTILRPDRPAMYFRPSPSDGGAQLEVNGLIYDNSHVVPYNPGPGKIQVAEKWPGPGPGSRKNPGLDPGPGRALITSFSVT

SEQ ID NO: 131444 - protein, 19 aa, Heterodera glycines
EPVNSCIGCKCRRCCTPNS

SEQ ID NO: 131445 - protein, 20 aa, Heterodera glycines
MNRKIIKILIEAKYSIFYKL

SEQ ID NO: 131446 - protein, 33 aa, Heterodera glycines
MGGKHHRSSSKMRADLSNPNKSYPHSFHKSIFS

SEQ ID NO: 131447 - protein, 31 aa, Heterodera glycines
MFTKLEWSDKHSFEDQEEAAAGLANGLADGN

SEQ ID NO: 131448 - protein, 218 aa, Heterodera glycines
QCSQLINGKNAVSQEKNLALSLFFRSHYAPFLLNKFVQSLVLFLFGFYLLISAYLISAYGCLNIEIGLEPLDLLPDNSNGKKALLEAEQYFPDHGGHLHVWMHNLSRVNLGHRRLWLVLEKEIELYEHTEFLYEHTEFTGAADSWLHVFLQFYHAKGQFTSNELHVFLQFYHAKGQFTSNENFVPRLKNFLKMKMHRKYRRAVILRAVILRDHPSDAF

SEQ ID NO: 131449 - protein, 127 aa, Heterodera glycines
MHPNISVLRGIIASSPSDGRQFECCAGQYVPMECVASSAESIREINWRMKEDQRQIQLQLAFSDPDTERTVNIARTEKQCVHLPREADSGKKWTFVVETVKEDARHVVTLKSLVTVGKQSKYKTNHL

SEQ ID NO: 131450 - protein, 198 aa, Heterodera glycines
GNLRDFLRSHRPGAEENKQNRSLPTAEQYFNWAAQIADGMAYLESLRFCHRDLAARNCMVHADESVKIGDFGMARDIYYHEYYKPAGKRLMPVRWMAPEALKDGKFTLKSDVWSYGIVLYEMLTLGQQPYAGLGNDQVFNYTGVQRHVLHRPTDCPDFWYALMLSCWRYDPRERPSFRQIVRHLTTSCSDFIDEEFKV

SEQ ID NO: 131451 - protein, 124 aa, Heterodera glycines
MVDLYQIVMERLLKVLDGCDLLQIDSSQLFTVNFIHGIFSRLDECEQSETAVKLHAVISYILLVPLKEHGMDEQIWKKLASNVVEALNASRQNPFQVDQSFKIDDLFNKNIPMGGQEQQHLYAL

SEQ ID NO: 131452 - protein, 500 aa, Heterodera glycines
MIIQALVEQNDAILDKFEQEALAVFCAVVGGQICWANDAMVAICAIVDAMERFFVGRTAAAIVGTRPKDKDVLSERFDALISKILAQPNPDSLTVVPLSVLAAQKCNYHFRSLRWLEQFAASPKNGTDGDNGNFRHDFYFLLERLYSHLGNSDGVLGTFQMIRNRTMPEPFEQILALKVQGNYVDALPLCQQLVGQENEIVKCLLRSNQPLLAQTFIERTLRHIEQQQHPNHENGEAIGATDGENGAVNAGDDAKMAAGDCSKSRRLREYQMEAVCKLGDWDQLAMLHHNLVEEGRNRNNNNNGGPSQNVESDAQNGGSIEKWGAKMAAIFCNLRQFDLKSFGDGIERARASLVDALERTTLEDSSTIAQAHRNIIKLRSLYEVESVRAVLYSGGDKSALLRKTIADWEGEQFQSINLLEKTIHTNFAELCTELNALKVDIGGGISDGSATAKRLRKCVVLQQNGEQDGGGADIVEVAQPQQQQRRENFVEVTVVNLMFF

SEQ ID NO: 131453 - protein, 52 aa, Heterodera glycines
MLLAEFNERASAKQMDDLLNTYKRLEKFGQLTESFYYRYATFYDVKGESAKE

SEQ ID NO: 131454 - protein, 21 aa, Heterodera glycines
MKLNQKKFFGPWKFGLKFENS

SEQ ID NO: 131455 - protein, 93 aa, Heterodera glycines
PAYHSALADGVKGYPGIKARMNPRTFQYLSDIALGVLNYQIKRARLPNINQCLPQICQRLPSMLDEQANPKLCSKIPQFIPVRKMLEVAISAT

SEQ ID NO: 131456 - protein, 86 aa, Heterodera glycines
MNEVGPPEFSALIGCLSFICFSLSGALPRFALRPHFARPSSLSSDPSPFVAERFGLPNCDSLVTGNERAQNGGCPGKCGRDTWPKN

SEQ ID NO: 131457 - protein, 36 aa, Heterodera glycines
  unsure (1)..(36): unsure at all Xaa locations
RDVQLPKVAQRPSGGVESAETKNLFLRFHKCKXVTC

SEQ ID NO: 131458 - protein, 68 aa, Heterodera glycines
MTNSFYYTTEELFINFWWTPERGQLSWSPDPRTTETPLHDLRGRIWTDRKLELEPEKWSNIFANWQLN

SEQ ID NO: 131459 - protein, 96 aa, Heterodera glycines
MKFPLPEEQSIAVVDLNLETLIDDAIHWAHINGMVTRTKENRLNFVLTSENFKKPKRACGKPFLAHAAILEALTKNFTKILSHLMMLHQFNFAFLE

SEQ ID NO: 131460 - protein, 30 aa, Heterodera glycines
MIHRKFLPYELAALVQKLRVEKALGTVKMA

SEQ ID NO: 131461 - protein, 18 aa, Heterodera glycines
MRAQLRELAEKMTDKDPK

SEQ ID NO: 131462 - protein, 28 aa, Heterodera glycines
MSPPVDQRSKSLFIISLFSQQINVHKCR

SEQ ID NO: 131463 - protein, 26 aa, Heterodera glycines
  unsure (1)..(26): unsure at all Xaa locations
SDRRTNHXGQQTITRIKPLIINNPTN

SEQ ID NO: 131464 - protein, 92 aa, Heterodera glycines
MKQCSHNNLVRLFAVCTNEEPFLIITEFMPNGSLQSYLRAQETDEKGVNIGRPKNLLSMQAMIDICAQVANGMKYLEERKLVHRDLAARNVL

SEQ ID NO: 131465 - protein, 27 aa, Heterodera glycines
HILSHEFGKGSLCNRCDCPGFGHALLA

SEQ ID NO: 131466 - protein, 105 aa, Heterodera glycines
VTWHGNDLIFPIAENPKPIAERSAKYDTEIVYHGSFLCQLDGQVAYQPTPGTNWTHYFILVESPVAETHAVRFSPGQTAVVDAFVKHSMPIPLEGQFEFDAWHRN

SEQ ID NO: 131467 - protein, 115 aa, Heterodera glycines
MPKRKMPTELNVEIVAALPFDIRWANRQRLGQAKRRIKLMSFRLFENRLRNMRDHIASHFRLDNSFGLTEVQFRGELTPEIFGIQFDAIFATIDRNNLQDISWAQQCKKMPINER

SEQ ID NO: 131468 - protein, 64 aa, Heterodera glycines
MRDHIASHFRLDNSFGLTEVQFRGELTPEIFGIQVDAIFATIDRNNLQDISWAQQCKKMPINER

SEQ ID NO: 131469 - protein, 394 aa, Heterodera glycines
MTIIWCRSVVFFYEESAISAVVGGAGDADDGSSSSVGTGGGDGQNCVLNSESGDSAPQFFVDETEALVDYASFDDCYQLGDAADADADDASGVQGTVAAAAATATAGEKRSMAASGTDKMGMDSDAGGRAASNSRADVAESRSRPQKAIALDRKKSASKIAQIASIPEERQQQQLHQQRLLLGHDHDEAVGLKNIGLKWPRRMGGQKIVFPSDKNVQQQQQQRKPIGAGDGQFGTNTANGRGQAPLAAATVASISGKQPPPRAAAIQLTAPVAESATAAAKHQMGKAMAVQHQRGKGGEGGQQQQIVAELSAVYSVEEEEGARKINNDNDNNDGVSGRVAAVTKGGEGGERQRHQQRQQQTMRVEGQTKMAQRQRHRSEKEMPAAGILGEHIYP

SEQ ID NO: 131470 - protein, 66 aa, Heterodera glycines
QIVLPVSARLKISAPSADNFNGTFIKSSKGEEMEAPKSKEEEGQQMEVIRQGIAVEMPINSNSGRG

SEQ ID NO: 131471 - protein, 146 aa, Heterodera glycines
AADFYNINRLINDDYIDNVYEIVKVKWINGKTPQEIRKAFGVKEPYPPGHPEWARVEKENQWEESDEEREARHAKEREEEEERERKEEQKRKEKEAERLRQEQLQQQNQEHQPQQGEQHGEGQGHDEDMNDEWEEEDDEESEEDDE

SEQ ID NO: 131472 - protein, 189 aa, Heterodera glycines
MQFPSYARISDWKKGTLLMDIEKVSEFAREEVESSRHSQKVYINGMPWKILAQIKTKTGYTDNEKSLGIYLSCAVPKEAENWSCKCSATIRIVSQKCGVADLRRKFDGTFISNQNIDCGFYYLISFAELLDPSEGFYSRSKDKVKLAINFIMQEAKREEKTSKGFYDKSEDKVTLAVDVIVEEAKTEDK

SEQ ID NO: 131473 - protein, 31 aa, Heterodera glycines
MEELVALSPESASAAGRSQRSWAPEHSEPST

SEQ ID NO: 131474 - protein, 57 aa, Heterodera glycines
FTDTPFHSKAIKPMLEKNVPNLLAFVKRMKQRFWPDWDTILDSLALNPPVYEEKQTK

SEQ ID NO: 131475 - protein, 93 aa, Heterodera glycines
RHANEIAEWEVRDNGKPISEAKADVLSCADTFEFYAGVNLSGEHIPYGGELSGRFAYTRREPFGVTASWKIAPAIACGNAILYKPSPLAPITS

SEQ ID NO: 131476 - protein, 344 aa, Heterodera glycines
MAFFIFSISKKLLSAPMLWFGLFLSLFAAINLSSGQLGTNDESKKGLFLMANEFLESGKMLLDELQNQTGNKQEENESDDGLKSQKANGKALEEKSDNFQQKAFEFLCGIEMKAKNDEKGNEKTKKDDNLLAFKELEEKRLNFCQNWKNGKSIWKGWKEAGISIVTSVNNLKLNQQIYGESLRTLAKMEIFNSKNKEEFGNFAKFGIDLLMKVTEILKDARISSLALADQSDHNQRKGNNTSRRRKRAFHGIFRREFSLEKCFLYLLLTCMSAGLGTDMVVRLAQHKVRVVSFGNSAPPPPFSTEGHHTTPLEGFEIFVAIFCFLTTLISLPMTIIEGFKIRRH

SEQ ID NO: 131477 - protein, 47 aa, Heterodera glycines
MKLIALFVSACILLLRWLKKRLSNRSSAFFLCFCVGSMSGSASFHLN

SEQ ID NO: 131478 - protein, 58 aa, Heterodera glycines
KIEEKWKFQWESQTKIERKMKEFIERFDEFKRLYKGKQKGFAKELGISKEHYEDGKKN

SEQ ID NO: 131479 - protein, 87 aa, Heterodera glycines
MLKLCLTIILVTIGYKSFSLSEHISEFSECGISDFEPEFPIAPKVEIGTNHIFKGKTIVDDKSLPWMARILSGDPELVGTYLKNKLS

SEQ ID NO: 131480 - protein, 120 aa, Heterodera glycines
MSENGRNFRHLLIATKFWAKTLQKVNSLKNDKFNLGAFLSEPIPFTEKFQNFLVIHCISEQKELADSFCDFVEWRMRLQIIFSIDKKDAGGQSVATHLKPNIHREKCNLTTAKLLGISFR

SEQ ID NO: 131481 - protein, 29 aa, Heterodera glycines
MGEGWMGGDEYGISHFHEHTISFFIDSTN

SEQ ID NO: 131482 - protein, 181 aa, Heterodera glycines
MPQPERAQITHMSREGDKMPEKEKANSNSDTAEQQPKHQHELEIGQFRSPTAEENDGSEGFEVITREENGGHQTEEGEEEQKANEGEKMPKSNGNAENTGQGEGTQSAATTTTPTLASTTTTSGTETAKQMERTTEQPQSSPSEEGAGGGAANGSADTEVDILAARGPPAAGLAETKKGTN

SEQ ID NO: 131483 - protein, 59 aa, Heterodera glycines
MATQSKDEKQSANVGESEKKSQGSNGEGEEKAIVFPTENAENGTTPATPEKAFLALFQD

SEQ ID NO: 131484 - protein, 339 aa, Heterodera glycines
IQPFSFPSDQWIITSISLIVDFQKKQKPSNPSEPLDTNAMAQEFLMQFANTVFTVGQESPMEYVQQKRGTGRGKLPPGKVNLLDNNNTTTTYTLKLVVERMEGAINLNTAPEELSFGPLSPNAVVIFDRPENSQMNLIGRSIGKSSHRALVNPDWDFQHDEACPWHFALRPPGDGQNANRATDRQNVQRTRTKDCQWARNSEQVRPKLLTFVIRPDRFVGESEANMRKLFADAEEEWRRCGPNSGLHIIIFDEIDAICKQRGSMGGSSTGVHDTVVNQLLTKMDGVEQLNNILVIGMTNRKDMIDEALLRPGRMEVQLEISLPDEQGRVQILNIRTAPM

SEQ ID NO: 131485 - protein, 51 aa, Heterodera glycines
MTYLLSICPQQFIEAHGTARNTMFFTFIFPIKCIQLKEIGIENIKCRCCFY

SEQ ID NO: 131486 - protein, 114 aa, Heterodera glycines
MYEISADPTDKGVKNRVIYTDNGQFKWNIRNAVRDFDTNAKITVLLCLGDEYRVYGQFADYDAMEDEMGERFHEVFQVVYNNYPIYEIDETVPIEHDVPIEYEDEGHSTCTIQK

SEQ ID NO: 131487 - protein, 52 aa, Heterodera glycines
MFPFRFLFVFAFALLTLCGFSHMTLAQPGSNGPIGEPNKMLRIRRENERKEN

SEQ ID NO: 131488 - protein, 101 aa, Heterodera glycines
MPKQAEETKMLLERKMRETEMAAQRMAALQHQQQQKQQQQNGITTPGTATVAQQQQQQQQINPSHHPFSFAVHLLPHWSLVINLLILYQNTTLKSNNENGI

SEQ ID NO: 131489 - protein, 46 aa, Heterodera glycines
YILFILIFIYNSVQFSGVQISIGVQFSSVQFSVSNFLVSNLPGATI

SEQ ID NO: 131490 - protein, 103 aa, Heterodera glycines
MVQFCAVAVPLLLRLRALLTLAVQPHLLLLQRKSFITHFSCIIWHIDQSPPIFGAFGVRGKGMKRKQLYIEQDENLREIFATRADRHPLQYLRAIAYRMPDPL

SEQ ID NO: 131491 - protein, 165 aa, Heterodera glycines
MGRMLEWLTEHGKPLRVKRDSLGQHLFDTVCKIIGLREIWYFGLCFTNRKGFTCWLQMDKRAILLASYAVQALYGDIGQQQQQQQPQQQQQADQQQQQQQQQLDLAKLLPVSVLQQYELTAEMWEQKIRNWWANNSGLSKEEAEEEFLCVAEELDMYGTQYYPIR

SEQ ID NO: 131492 - protein, 36 aa, Heterodera glycines
MDQKTIFNQPCNSLSILSLCRNVPRGNEIRIFEALE

SEQ ID NO: 131493 - protein, 79 aa, Heterodera glycines
MYVYQKKNNLQRIYFVEWKEDNETHSCWVLTEDTEALELVAKFIEECSMSSALDAFLGAPVMSHVAKLLQKNDEAISCT

SEQ ID NO: 131494 - protein, 51 aa, Heterodera glycines
MYSIGPFPIGSVIGFSILKSRSRSHGPGLEKAEYPGLARVSYMDSELKLKI

SEQ ID NO: 131495 - protein, 44 aa, Heterodera glycines
MPYVDTVRRISRARSERGAKRVLVQKGAGFGGLFAALLTPVLME

SEQ ID NO: 131496 - protein, 218 aa, Heterodera glycines
MAINICDKKALVNQILGQADITVTTSGITVSGPRLSTPRFIPFDECGRCRACKATEVEVDTMVTKEGITLWCSRVSKSQFVPFDAVYDLPGHCFFRVKNKARVFNVPYGDLPSDTCTTPTPTTTTTTTQGTETDMQQQDLKRKAKVALDLVEAGLMARCHAGRRALEEGQNRNQCTRESTFSGIVGQQSDKQSRGGTELCPGRAQKRRREKQGGPWRH

SEQ ID NO: 131497 - protein, 42 aa, Heterodera glycines
MRECWISVPVIQNIFDEGGRENNFNRERNGKGVHVSSSLILL

SEQ ID NO: 131498 - protein, 33 aa, Heterodera glycines
MTIGSSVITYVIRHDGKAQEKPDDRITRNPSLR

SEQ ID NO: 131499 - protein, 193 aa, Heterodera glycines
MSRGAPFIPKNAVLIQNLKAAMAAGTLAAFGSIPNNALEEIDTLLTGAFKKDFAAIYRNSRKVKTNALKLAELDIENLIAKHHPLSNFTWMAIPFMLPANILATATSAAMIPMEIADAEEKTVENVLRLIRNGILAGPTQAKLEKAKEELAAEEKWKRRNVFRPINMVKEIIKKRNEEKERKTMVRKESRKRK

SEQ ID NO: 131500 - protein, 213 aa, Heterodera glycines
MWSTHTKNESNAELIENVIKEHPEMLTEQKRNEIEMKADKKIETLKKLEKVHQTMEEEQKKLRKAMEFLRPQKVHPFDFLVGTVGIDKKGSKIPIGGLRHKISGRSVNEKKYLEMLDMPRAKEAMESENETCQALAKLVEQTLYIDDNGVVDPQGVELRGRLGAQIVNYVINKKDTVGLLKQLMWSVIGTSAIALFFDLFLWPTIISKDLSLN

SEQ ID NO: 131501 - protein, 557 aa, Heterodera glycines
MANPSVQQLMDMVKQLLEAQQNAPPAGQQPSNVPSLPNVENFEFGEQSTDIEDWLQQFDFALDCAAPNLQDMLKVKLLMTKLSKEAFAEYKKSCIPKNVTDFDFAKTVEQLKSLFARPQSIWIDRYDCLRASKLEDEEFRAFVNRHKRLLRDFNFKKLKEEQFNCLMLLIAMKSPKDADLRKRILAKLAADGDLVRYDNMVEDLQVYLSTIAEAKALEQPVSSRNVYALKKKHKIRKNSDSSKGSSESSASQRSHGSQPKCWRCGKWHSPKRCSHGKSTCRKCNEIGHLERMCEKHKAWLKRNGEKKDGKAVNTFRLGGIFLPDSESRRKLIEIPLKMDGTEVEFVADFGTERTVVTKDAHRQIGSPWLSRCTERAKYHDGSTRPLLGKGQAKFSIGDRSCDGQFYVAKGTKNLLGIDMLHSLGLLDSFRKSLEGNVQVAEANTKSDSTDAQSENPKNKHRGNKPKFALGAKVIASLGLQPWRAGYVVNRQGTMYEIRFPDGTTGKFPEKGVEACVLDSDEEIFDGLDLREAPFDGKTSKGLVGIDCDQRKRENVIA

SEQ ID NO: 131502 - protein, 367 aa, Heterodera glycines
MANPTVQQLMDMVKQLLEAQQNAPQVGQQPSNVPSLPNVENFEFGEQSTDIEDWLQQFDFALDCAAPNLQDVLKVKLLMTKLSKEAFAEYKKSCMPKNVTDFDFAKTVEQLKSLFARPQSIWIDRYDCLRASKLEDEEFRAFVNRHKRLLRDFNFKKLKEEQFNCLMLLIAMKSPKDADLRKRILAKLAADGDLVRYDNMVEDLQVYLSTIAEAKALEQPMSSKNVFALKKKHKTRKNSESSKGSSESSASQKSHRSQPKCWRCEKWHSPKRCSHGKSTCRKCNEIGHLERMCEKHKAWLKRNGEKKDGKAVNTFRLGGIFLPDSESRRKLIEIPLKMDGTEVEFVADFGTERTVVTKDAHRQIGSP

SEQ ID NO: 131503 - protein, 401 aa, Heterodera glycines
KLKEEQFNCLMLLIAMKSPKDADLRKRILAKLAADGDLVRYDNMVEDLQVYLSTIAEAKALEQPMSSKNVYALKKKHKTRKNSESSKGSSESSASQKSHRSQPKCWRCGKWHSPKRCSHGKSTCRKCNEIGHLERMCEKHKAWLKRNGEKKDGKAVNTFRLGGIFLPDSESRRKLIEIPLKMDGTEVEFVADMGTERTVITNDAHRQIGTPWLSRCNERAKYHDGSTRPLLGKGQAKFSIGDRSCTGQFYIAKGTKNLLGIDMLHSLGMLDSFRKSLEGNVQVAEANTKSDSTDAQSENPKKKHRGNKPKFALGAKVIASLGLQPWRAGYVVNRQRTMYEIRFPDGTTGKFPEKGVEACVLDSDEEIFDGLDLREAPSDGKTSKGLVGIDCDQRKRENVIA

SEQ ID NO: 131504 - protein, 50 aa, Heterodera glycines
IPIKFFKILPINWLIFSEKLFINDQNFQFFPRRRLSAPPRPQNSYFFLEN

SEQ ID NO: 131505 - protein, 62 aa, Heterodera glycines
MTKALRILTKILAAQSVIGLANGSSNHPCQSTNVADKKACHNALNLIPSQSNFRTIYSIHYE

SEQ ID NO: 131506 - protein, 114 aa, Heterodera glycines
MSSKPETLVERMKHLLSSGDDADVLFLHVPAHRAILNSASDVFEAMFRFDTTKNATDNESAGGEAKGPVEVTDIDAHVFKVMLNFIYADDLSELNGDNAMAVLYTGQKISFLLC

SEQ ID NO: 131507 - protein, 135 aa, Heterodera glycines
MLGSAGGAASAVASRHRRITTERSLLPLSTDIAKNREFYRTHDVRPPYTYASLIRQAITESKECQLTLNEIYQWFTDTFVYFRRNAATWKNAVRHNLSLHKCKQKRMNDVPFLGLFVLPECLIIPEIRFPNYRKL

SEQ ID NO: 131508 - protein, 85 aa, Heterodera glycines
MPSLIDVLLLVLFFFVLIGPPFPDEPVFERGLQNWMDARIQHLQNTIHAPPPPPPQAEGEEQGEELDENDWANPWPENWDPKIFW

SEQ ID NO: 131509 - protein, 781 aa, Heterodera glycines
INEVVIIHDETPRAMWKTGIIKNVITGKDGIIRGANVELPNKNVINRPLKLLYPLEINKNDGEENETLTNLITDHEQIGTVQKRKQAIKSLNLLHTQANSRIDYRCLGEGNLTIGTQKFCQEHECTDKHGTKFCFYEPHEKTYLVKSDREIIPIKAWGSIERIFYLANDTLMDELKRKKREFDPFENEQISAECIKGGIKINPTHATTELEILVDKYFILKRSPQSEEFISLPTKITMNEYKPVIKFIKGTSSPEYKNLTCSPSPICELIICRFCMEYIRNPQCVGQMHWALILIMIMLTLYVITLCLKIIRILYRFIVFIFLSVYNCCRKRKLKKIKIIKRKQFIYLIMISLLLNSPTIFSCDEVTNMVAGTNDCAIDQNGKIECIYDQTTQISITPEHKTCLKLDNEKMHSTIETIELSVESLTIICAERSEYFMRDYELLSSSQKRCSGAGKCTGQICQTLTMKEKNPEIGDHANKQPGYSYCVPSCGGWHCKCFLVTDGCLFYRTYTEPINRNIYEVVKCPTWTILATIKISLDPKTIHTVELKPGVLTHVKDSNLSLTLTSTSIPPTPLFGSKFIIDRSNAKAVIVDNENLLKNSLRCETKEKATKFSCTFPPEACQCHGGDSVVHCECEKNPLTEMFTRKDNILPLETQGSQVFFDTLLRAKIKLTTSLQVQVTLKGHKVKAIYDKNNCTVKTKSLEGCYSCTNGAEFKFTCTTNFGTALANVKCHSQNFQIPCDTKGNQQQIQLSFNQPSVKEKCEVICPDEKSEITIEATLNY

SEQ ID NO: 131510 - protein, 64 aa, Heterodera glycines; identical to SEQ ID NO: 129150

SEQ ID NO: 131511 - protein, 250 aa, Heterodera glycines
MLLTFLKDRTEFEQLCKKLETQKLLKNIELVAQRRGNGVYDIGGTVEYLAQKYSAYFGAVSMMRDKWQCDEIEQEKRQKECERFKKYLTILYKHLFNVYIEVSDPELAQQIAAVRPNFQIANSKKAATIVDVLDSLCQIWAFYFGTKNGEKNENKLENLFKNSFELKLLNEKELENEKPTFGQKIEEIVDQMNIPEGFKQIIKGTKTNGEKGKSEFEEREGHFGTNESRIKSLREQFEEKMSEMTKDRKI

SEQ ID NO: 131512 - protein, 74 aa, Heterodera glycines
MPLVLLSFVLLPLFPFLIVVAVSRLYFNRRRVSGSFAFFHPFCDASGGGERVLWLAINALQKKLITKAYFSNHI

SEQ ID NO: 131513 - protein, 50 aa, Heterodera glycines
MRNSKNLKFRLFVRNRVHGGFEVAEHGYDIHFDQIRTPNPNYEHVGPQNH

SEQ ID NO: 131514 - protein, 108 aa, Heterodera glycines
MPKYGHKYGPKCQNMEKYGNMDINREIWKNMDIEASNQAKNMFFSQSETLSVEHFAMLTMYISENTFTFVNFIQNTRGAATRVQKLIGAAKIKSNFMETFQKKLRNPL

SEQ ID NO: 131515 - protein, 50 aa, Heterodera glycines
LHIIAEKIRDQFPNVDRLIAKTKAVFVKAPYRVKKFGNVSHMQFQPINLK

SEQ ID NO: 131516 - protein, 478 aa, Heterodera glycines
KRRRFILRQLYSSSTLLSVVIATNVKTKNDSNRTGTKEGDVFSFATICVEMVNRETVWNGTERDDDVDEILYRLKRTNNTIPHRPQLRPREDTNQSLVHLIRDCWVHLIRDCWAEVPAERPRMDMMRTMLKQMVQDGNQNLMDYVFGMLEQYASSLEQVQDGNQNLMDYVFGMLEQYASSLEQEVEEKRKSDILLNRMLPRQVADKLKLGEAVEPESFQMATIFFSDVVSFTTLAGKCTPLQVVNLLNGLYTAFDGIIDTHDCYKIETIGDGYLVCSGIPTIGDGYLVCSGIPKRNGDQHAKEIAELSFAFLRTVSNFRVDHLPSERVNLRIGFHSGPAVAGVVGLTMPRYCLFGDSVNFHSGPAVAGVVGLTMPRYCLFGDSVNTASRMESNGKAGKIHISSSSNRFLGKIHISSSSNRFLTSVIGGYVTEPRGEVIIKGKGVGKGVMETFWLLGRIGEVHLPEGPSVSENAGRKSP

SEQ ID NO: 131517 - protein, 98 aa, Heterodera glycines
MPSRPCVVPRIRNGLVLDLNPIRCAFPPRIASPNLANFPPSDRFVSAILSASIPNNSDISFGTLVAYECANGTVPRGGQSVAQCAANGQWTKVAMACQ

SEQ ID NO: 131518 - protein, 25 aa, Heterodera glycines
MTTLAIFVKLLIFLKNYVKTVHKLT

SEQ ID NO: 131519 - protein, 33 aa, Heterodera glycines
MKEFFTNFFPQFILHISRFFCISFMAIAKKDWG

SEQ ID NO: 131520 - protein, 263 aa, Heterodera glycines
MHLSFSDDIDLDAIRKDFERLNPLPSAANESEVFARLRSTAFRLHTQNAFWCQFDLSEETKAKMEQCRMGNNPMAFVKRCIVLQELKKSTEAMEQNNEQMPSQIQLDFHVFTLPYVLPHYACLSLFDGEIHHGAIATSKQRAKISCAAVLCEVLVKMGWADVKRAKKRKNADGEKALKKKKRKGENGQTEDVEEGNVRLSHQFLLTLHPNESLDPRTHFFLASSAKSPIQLLKEVADRESFEVSYTKGNGRVLSQAHCPRAHN

SEQ ID NO: 131521 - protein, 201 aa, Heterodera glycines
MHLPQQRFKQCHGDQLIGLQLPLRLNVLIDLPDDYSQLIKMTVNFRCPEIKELTNTVATLCLNCGQMLCSQGYCCQKVVNGRNVGACTAHLSKCRGSSGVFLRCVSEERNLLKIIALFSRRRIRECQIVCLLVTNGGELTRGCFKAAPYVDEFGETDPGFRRGNPMHLNRELYWRIQRLWLYQEIAEEIINQYELSSNRNI

SEQ ID NO: 131522 - protein, 384 aa, Heterodera glycines
MLVVRMLMLTRIDYDEVFHNVTDASSTALGGLLLLHDAETRKSQTDHQLARWLIELQNYQVKIVHVAGKANTLADALSRAAEDKPLSEIYNVDELEEIIEFPVCLALAAHSRVVADPFLHTLTIRHEDGNTYEVNLLEEQAGDPEAAAYIAFVRDGEFPADLDEKEKELFGGLIFESLHSSLFTWWSFELQENNCQMQKIFLAQMYSDVLTWVKLCVTCQLRHNPTPAYREEMLMVAGDTLFAKVGLDLAGPFPVTQKGNKHILNIVCWFTKYVISVPVPDTKAQTIAHAFLTNCYLKYGGCVELITDNASAFTSEFFKEFCSMLYIDKKYACPHWSQGNASTERTFRTFHNILAKYISKTQPDFDEFLDAANFCYNTSVHAST

SEQ ID NO: 131523 - protein, 114 aa, Heterodera glycines
MPKEPSSRAFLFKKWVSNYMNDVYTTDSKIIYCQAYPGFDTICDIGKILSGQKINFGMPPNLISLYKYAPLTSCDVERSFSIYKSILTDNRSRLSPENLEMLLICNVNLNNDLA

SEQ ID NO: 131524 - protein, 153 aa, Heterodera glycines
MAKGSDNTDGGKMDEFIKNAKTMRAKIRTDLSRSIYESELTVQNCDEKLKEYFECKGAENPEFFKQFFGLTEMNELLSNLQKGTNWLPNLLAIETSEKMSELKNVAESKKLSFESKNVGIRKKKKWTPKGAIDIRSNPLVVEFVQRDIGVAKR

SEQ ID NO: 131525 - protein, 80 aa, Heterodera glycines
MDFPWHLWPRYVVRVFVRVVRFMKNKNQKETNYYSFSLSVAEGHQIDELVNEINKSELDVNAQIGIQFREVLGRMLISYT

SEQ ID NO: 131526 - protein, 151 aa, Heterodera glycines
MRGLHLDLQTGGAVQWRDAAGGYEYAKQTLLNWQPTDLNKIKRNGMPDGTLMYPDFVLRHSSEQLMHDNNRQFLQEIQLISSNDVFKLKMASKMFLSGSFEVLDKFNSKINTFYGSNFEKINFREGIDAANVKENILHIIKIFLNILCKNL

SEQ ID NO: 131527 - protein, 157 aa, Heterodera glycines
HPTYSFGTQREFFDLETGPGRLINVAADGNCFYNSLSVLLTGSELKENAGIIRRAITEYIESEVELNEMGIPWHGWWEMFHPGQTLYDSSGNENHKEPAKSASERHKWGSNVDFLAAAKLFQINVIVCSPNPQRKEDFGIQYVWNIYTPDMLDTVSI

SEQ ID NO: 131528 - protein, 16 aa, Heterodera glycines
EAIPEGFGLPINLGAS

SEQ ID NO: 131529 - protein, 103 aa, Heterodera glycines
VANVYLCPITAGATPNVETELAEQRNVAECKQYSTNLWYDFYEINGVDKAGEYVLKLTESTKPSLIYVYEQKTVLQEGIRILFINDEAKLPNLEGSYHFRAPF

SEQ ID NO: 131530 - protein, 25 aa, Heterodera glycines
MGSRSNCDSTIIRAHQTMNGTTISK

SEQ ID NO: 131531 - protein, 185 aa, Heterodera glycines
MSANTDGQRLSPSPEDQLQFDEISLNMAPVHPMSYVLTPAEDAILSSSSAEQSPASGTSPTATVPPVAIAERIYHCQQQQRQQPTEATDSVKIEATDSAKGNVTLPETLPNPSRNTQQMPPAQQSPPPIYSAIYPPGTHPAVPSGHIPQLANCTPTYIIDASAIRSGRATDCEVSPTFLVHGTAG

SEQ ID NO: 131532 - protein, 101 aa, Heterodera glycines
TFVLLNVPNYAFRLYEAVFDVQQTHLWQFAFFITYLLYYLHHAVLFYMYIFWSPQMKKQLMPTALKLLECYCFKTVPEFGHRQSQMSFHPAQHSKLVANRS

SEQ ID NO: 131533 - protein, 267 aa, Heterodera glycines
MKFTKKMLMIPEAEYLALRSVMNSGDYLQNEKASLDAKISQNLQDPDINEELKAKRHDWLYKERRTVKGILENRPQKVVIENHVPGPNVAPYLGLNTQSKPQETDEPRKIIIPRKRLKEQTPDPESDTDTLEELTREPQTTHTLKTPIPIKTIIHPTLLNGLFRYVKENKDLFKITAAGKVQSNMNLPIENSNYRDVLLYLAGKKDETPRGAKFLKDRLLKDPTVKDMVDKSKVMWGRGRKKAIKSIKTPGIAREKKPFKPLIWARL

SEQ ID NO: 131534 - protein, 129 aa, Heterodera glycines
ETNDPNAFYFTFTLRKYVNVNEKENHEQNVECVDYAEAKDPKLEQLFLEMKKGLEQLYLEIKKVEQKFDAYIYSKEKMEEELIPKMEDVVPKTEDVVPKIEEVVPKIEEVVPKMEEVVSNRCSTAAHGR

SEQ ID NO: 131535 - protein, 188 aa, Heterodera glycines
MKTNCCWSKRGPSKFSNPCICPEQMITHLDIPFLDRNILQLWRHGDRSPLGTFKNDPNQEDAWPQGWGQLSAKGMAQHVKLGAKLKARYIDGLNFVNRRYLSKEIYVRSTDLNRTLTSAIANLIGFFDRGIAGTDYPSERQAQWWPHGWQFFADLSNLTGEQIDLFNFYLIPDTLFIEVKCTRDRREL

SEQ ID NO: 131536 - protein, 94 aa, Heterodera glycines
MGCYPHYTACVTVELWRNVTNGGEPYVKVLYWPPELAGFKDITHNITGCETNATLNQFVARSRIFKPMPSPDEYCKDTYFPSNTIVDPTFDQQL

SEQ ID NO: 131537 - protein, 195 aa, Heterodera glycines
MKSLYNSTNGLVVMADSFDSTLFKQTFQKVFEKDADGNLKMTFNATLEVKVSNGLKVEGILGCCSSINAKNSMVSDTEVGIGGTTQWKFCSLTPRNTIAVAFEVSGQHGTGIPQGARAMLQFITQYQHSDGHRRVRVTTTCRSWADMEANKQSIGYSFDQDAGTVFMARLASWRAANENDSPDTLRWLDRSLIRL

SEQ ID NO: 131538 - protein, 40 aa, Heterodera glycines
MRWEETDDEEGEEIETLGDDRSIIFGDQDTITFNRLFNAA

SEQ ID NO: 131539 - protein, 30 aa, Heterodera glycines
MGAIRKHLGLPNDINQKIYHSEAPKWQRYG

SEQ ID NO: 131540 - protein, 18 aa, Heterodera glycines
NYQNYSDAYQNFQNCSGL

SEQ ID NO: 131541 - protein, 347 aa, Heterodera glycines
HLIIRDHHQRNLHAGTMTTLAEIRKTYWIPKGRRIVDQIRKQCFYCKRYNAKPYQQPKMPQLPKSRVQITEPFQNVGLDYMGPLQVKSFTEKCWIILFTCFTTRGIHLELVTSLSVQHFLNAFRRFISRKGTPKNIWSDNASQLKLASKVLPEELKEMLKDESIKNYFEKENIKWIFSIELAPWQNGAIERLNQNVKSAMKKAIGRKLIEFDSFQTLICEIEALVNSRPITFIYDEINSYQILRPIDFILPHKNLCIPPILEVNETNDPTYSTYYDQTIELWKKTTKILDDYWKIWIEEYLPSLRERYKTENKNPKNCVKSFPEINEVVIIHDETPRAMWKTGIIKI

SEQ ID NO: 131542 - protein, 635 aa, Heterodera glycines
MNEYKPVIKFIKGTSSPEYKNLTCSPSPICELIICRFCMEYIRNPQCVGQMHWALILIMIMLTLYVITLCLKIIRILYRFIVFIFLSVYNCCRKRKLKKIKIIKRKQFIYLIMISLLLNSPTIFSCDEVTNMVAGTNDCAIDQNGKIECIYDQTTQISITPEHKTCLKLDNEKTHTTMETIELSVESLTIICAERSEYFMRDYQLLSSSQKRCSGAGKCTGQICQTLTMKGKNPEIGDHANNQPGYSYCVPSCGGWHCKCFLATDGCLFYRTYTEPINRNIYEVVKCPTWTILATIKISLDPKTIHTVELKPGVLTHVKDSNLSLTLTSTSIPPTPLFGSKFIIDRSNAKAVIVDNENLLKNSLRCETKEKATKFSCTFPPEACQCHGGDSVVHCECEKNPLTEMFTRKENILPLETHGSQVFFDTLLRAKIKLTTSLQVQVTLKGHKVKAIYDKNNCTVKTKSLEGCYSCTNGAEFKFTCTTNFGTALANVKCHSQNFQIPCDTKGNQQQIQLSFNQPSVKEKCEVICPDGKSEITIEATLNYVSQQDKIINPSNNKKETPVLGTSLEQFSDIFNFIYTLIKTNLFNFLTILFTLIVMITFIICICPMIYPLLFKYFPFRRGNVATTRNRIIYI

SEQ ID NO: 131543 - protein, 125 aa, Heterodera glycines
MDKNIFSSIMLYDNSIHAVKSLNLLHSQADSRIDFRCLGEGNLTIGTKKFCQEHECTDTLGTKFCFYEPHEKTYLVKSDREIIPIKAWGSIERIFYLANDTLMDELKRKKENSIRSKTNKYPLNV

SEQ ID NO: 131544 - protein, 104 aa, Heterodera glycines
MAGTAVGSAATPMINGAVRGELLVEEEMRRREEERRDAQKALEKLKKEAQKAAERGGGEPPQQFPIPWALVILLMWTMLSAALFCIWETEWGYMTSIYFFFIAI

SEQ ID NO: 131545 - protein, 38 aa, Heterodera glycines
MKIERARFDEVLVRQKKSKHLKIYKNFKNENSCEIFWK

SEQ ID NO: 131546 - protein, 38 aa, Heterodera glycines
KRIERTRFDEVLVSQKKSKYLKIYKKFKNENSCEIFWK

SEQ ID NO: 131547 - protein, 117 aa, Heterodera glycines
MANGTFAPQQTPFVLPHFANSDNISVQTVGTDQIHLGTATTRTPRQIGVRLGVDNYPENSGQILFSTPSVVRSSNSSIPTRNWRNSAETVAFHSAGECQRQKPGLMSLVGEWTNDFV

SEQ ID NO: 131548 - protein, 65 aa, Heterodera glycines
IIVDSESDSNLTRCPCCRCAQVNLICANCLNTNVVRIGKVREDKRRLLRSKSAICHLIQNALADE

SEQ ID NO: 131549 - protein, 361 aa, Heterodera glycines
RCFNFDICQNCFSQRTAKSHKLSHPMQEYCTPTSAGDDMTSAGDDMRDFTVIIKNKVRQGKSRIGYLPVEQINEGPPLECNDQTPQNAETEAMHQRMQLIAARLDKRQTEAANFLAHQHEAKSPNQLISQVEQASKEELGQMLQKLQYEHEKEKHTKIRKLSLEQRIEKGNRAEGTESGGNAIPFRNEIHAEFILSTNTEMAVLAEAHHLRQHQKRLEERGIVLEDQNRQLQMQLERLQMLIQTQKRKGENGNWMIKKGRPPNTANNRRATVSQSARLYLLNRRGRHGHGNACAGDANQRDKAIGISSGQLGTEIRRMLRLRETVDELNMLRLRETVDELNRAMENFVVFTQNCAQKEQQQ

SEQ ID NO: 131550 - protein, 136 aa, Heterodera glycines
MLKFCPSFERPMRNVVKCATTGESRGSGTTTSDGGGRNGFAGGVIQPKQSLLKGSTAQQQKRPTQPPIIRRNERKSATTDEKANAKGTENGNAMAIRSFSLHQHETGSSLSNALDSRCTKMAVVTIAAFVAFNWLA

SEQ ID NO: 131551 - protein, 334 aa, Heterodera glycines
LNLALRNRKRATAANVKILNAGAWSRSRDRSHLTLPRELEDLIPEVEDFYKKQHCGRKLNWAHHWSTGTVSFTSKAGRFDVSFTSKAGRFDLEVTTHQMAILFCWNDRPNDKLSFATIRLATELSEGELARSLLTLVNFPKVRMRLILCEIAQQPSLLTLVNFPKVRMRLILCEIAQQPLIPKSFNDSTLFWLNHEFCLIKNEKPQSRGKINLIGRLQLNQDIKNEKPQSRGKINLIGRLQLNQDAGIEQEHEEILQLRTFRVQEAIVKIMKTRKRLNQAQLQTEAQLQTELVDVLRNMFLPSRKLIKEQIEWLIEQKFLKRDDMDMNTFIYVV

SEQ ID NO: 131552 - protein, 57 aa, Heterodera glycines
MFVVVLFCLCIKKENKTLANWSAIVPNTVLSCLLLINEFFQASRPRVVQSASAKNRH

SEQ ID NO: 131553 - protein, 213 aa, Heterodera glycines
MIIIVLICYVISNDKEKDKAHTSIGNSKAHKSDLYSDKSNLQPEDAQINQQHLNANRDSNKFDHNHNNGTNTNCDANQHDQHHHANGVDGDSDDNQLDQLYANHQLVQLHANGNNDHPENDNLYDNNNSDKSKIVDLDDEFRDQFPELTKLPELNGVEFVGNHIKYTNQPKSDTHKDKENYNSTRTYLREFNIYSVFVRWTDTAESFDIERKK

SEQ ID NO: 131554 - protein, 234 aa, Heterodera glycines
MKATEMLEKAQILYNGLITGKIDRNSATVWVEENAMVGILCSIEIADLKIDANFRELLMNLCQQLVQGNHIEANTVTNLDITVTQLLENVDVDHIIDELKQKISKSKFIGDKIKENLNKLLAHFNLALRIFLSSKQKTVTAASNAIASGQPMAGERRQKRMNNNNDNGNDWFRRRLSLTVLNVHDRSAGGSDDVSDWPAWVKCAFRALVCAVLLLAVIYVERRLGAATVSTSVA

SEQ ID NO: 131555 - protein, 25 aa, Heterodera glycines
MEKACKIWRDYIDFSALEKASESLI

SEQ ID NO: 131556 - protein, 88 aa, Heterodera glycines
LFEYPKRTLEKIDFFVFGAVPPNRCAQIYGETESFRNSFPIACTLILRWIFAPHNCLSTPNGHLKKSIYLCFRGCPPEAMPPDLWRDR

SEQ ID NO: 131557 - protein, 253 aa, Heterodera glycines
MPAPNDIPSLRSFLGMVNHYQQYVKNMRFIRKPLDDLLKKEIDWSWSEGCENAFRKIKEILASDLLLTHYDPKMDIIVAADASELGIGAVIYHKFQDGNIKAIAHASKSLAPAEKNYSQIEKEGLALIFAVQKFHKMIYGRHFTLQTDHKPLVSIFGSKKGIRQCSANRLLRWSLILLAYDFTIEYINTKDFGQADALSRLIAKGNETEDEKIIAMINAETDFETNFGQTISKLPLKFSDLVAASERDENIIQ

SEQ ID NO: 131558 - protein, 122 aa, Heterodera glycines
MTHSKFPPNLQLIEELKQKNTEIDELRNQLAESDEVISGLERERDFYFVKFAKFEKEIIISVFHFKAKLRKIEDSENVGSLEVASVLQILYETEEGFAPPTDDGTNGTSNDESGDIGTQLKD

SEQ ID NO: 131559 - protein, 52 aa, Heterodera glycines
MALVTNIPLTSANVEPLSRHEMLTWVNLSLASEFAKLEQETIGHRKSDTRGK

SEQ ID NO: 131560 - protein, 208 aa, Heterodera glycines
KPPKIIEGYLFGDLIGEGSYSKVKEVVHVRSLMRRAVKIIKDKRLRKIPGGEQNVHREIDVLRRLNHRNVVKVFDIFRIEEKQKLYIVIEEKQKLYIVMEFCVCSLQQMEFCVCSLQQMLDNCTEKMLSEFQAHLYFTQLIDGAHLYFTQLIDGLDFLHTKRIIHKDIKPANLLLSLDGILKICDLRDKYLCAKNNNRAHSNSIYISI

SEQ ID NO: 131561 - protein, 95 aa, Heterodera glycines
MTINEAFSISKAHDDENLQPPVAAFSPFAIADTSQELHYSQPAPSSVDYFFWQSDEASSSSVCAEERRQMYEQYGGQKQMRRTENDKNTEQCQRN

SEQ ID NO: 131562 - protein, 50 aa, Heterodera glycines
MPGFCLGQPNSMDLDPGFRSMDASNVGLSMGLDVLSRIKNDKFGCTKRSN

SEQ ID NO: 131563 - protein, 31 aa, Heterodera glycines
LGSSKQEAFRFSLNCSAANNFACFFVFYFVA

SEQ ID NO: 131564 - protein, 19 aa, Heterodera glycines
MKGVRNFFLKNRIFPEILE

SEQ ID NO: 131565 - protein, 124 aa, Heterodera glycines
MRGFSFDLSLASVFIFLLSCLLGVLGQNGTPESAMGRRRTPRWARPGFVTIYVLSDEVVGKTFPKTELSTVSSSANDHNSNHHHHHHNEHSQLSMTNMANQPHLIRIRNEGAGASVIRDNSIGV

SEQ ID NO: 131566 - protein, 120 aa, Heterodera glycines
MGFFPPTIKADAEPPAVKQIYIPMLKKKQTMLSQKANYKSCRIMPIFSIQISEIGYHSKTQLNSGKWPAEILATFLKNRKNQFSIYQFEYIYKFDLGKKEFLNKCIKLNERYENANGKKR

SEQ ID NO: 131567 - protein, 304 aa, Heterodera glycines
ATGLRPSLNSDLTLTVTLENDEFVQSDFDFLVLHFPDEFMRGHGNRLKIKWANLKISQKYFKILLHIIPFFASIFKFSPASLPCTCKSVTLERLPLFIGGRYCKYSRALPQSPWIGASDEEAPPAAVISEKIAGAMVRHFGADGSRFIASGREDIDVRMLGNGRPFAVQLLNARKTACLRSASAATALSALAAQINASEERTRDISVHALAHVSAKQAQQLNVGQEEKRKTYSALCCTRTPLVDDVPAHAARAPIPLQVAQRTVVRVLRRRPLIDRTRFVYTMRAFALDRHHFVLRLETQAGTY

SEQ ID NO: 131568 - protein, 35 aa, Heterodera glycines
MTYFLSAHGGRWFGGANANKSADIALCPICTMPKG

SEQ ID NO: 131569 - protein, 217 aa, Heterodera glycines
MSHSLIKASWTDGKPVDYLSPTEWGAYKRPLTMDNAGGAGYNKENENCVFLGQWPRKVKEYLSLETALDKSGVDVLWMDVVCEKPEEYWAPHGAVCKMRAKEEEKGYGKDKYGAKEEEEEEDEELRKINKYVTIGSGNFIYANKNTYMILLLKDLYGKQLKEESRKKVCELYNGEYVKVKDEPKEAQEYLDKVLAKEKELYSDSSDHMFCRFTGIIG

SEQ ID NO: 131570 - protein, 22 aa, Heterodera glycines
MPFTAAVVQNAGESVEDVESAK

SEQ ID NO: 131571 - protein, 68 aa, Heterodera glycines
RAVSSLPPSYSLPMNSLSPFSSSVPHLPMPFSSSSSPSSASSSFSSSSAAPSDSLLLDYLFSGYDKRI

SEQ ID NO: 131572 - protein, 73 aa, Heterodera glycines
MFERQLEANNTGYLVGDKLTWVDFYVASFADLALTFGRFDILDRFPRVLHHCRAVFSLPQLQQHIKNRPDTLF

SEQ ID NO: 131573 - protein, 276 aa, Heterodera glycines
MRRIFATHGLPEQIVSDNGPQFTSGEWHEYCNSRGIEHTLTPSYHPMSNGEAERFVQTFKHMMQRQKDGGVPCDEALHQVLGLYRVTPHPATNASPAEKLFGRKLRTMLDLARPTDENADQNKPKLSPTYRDRIKRNFDRGTRDRTFEIGQKVFVRNYRDGPKWFRGLIITKNGVIYLVRTLRGVWKRHAYQLKPDLTVEDQPDNESVDSDSDADDQQQEAEDEQNNGPAPPDLRRSQRTKKKPQIFDPSSGSLIRREGCDVFIPLFIYRLFFAVP

SEQ ID NO: 131574 - protein, 112 aa, Heterodera glycines
MDQQQKIKTKRNKVKLEHDGALYVFDQLSTDGLKKFWRCRLHTDLNNVVQKLVGVHSCDMNAAHVECQRLVTGLKRRAAETCEAPATIRAQVLQNTCTPVLAAFPSKSATKK

SEQ ID NO: 131575 - protein, 55 aa, Heterodera glycines
TKLRLFKLYNMDQQQKIKTKRNKVKLEHDGALYVFDQLSTDGLKKFWRCEFHGPS

SEQ ID NO: 131576 - protein, 60 aa, Heterodera glycines
AASRPRTGALRPFFKFCWAYTGASRPFLKFVGLLRQLRGLRRALRAPFLNFVGLIRALRA

SEQ ID NO: 131577 - protein, 153 aa, Heterodera glycines
MSRFLTRLEAPGYHSIVDYPMSFSTIHDKIDNNMYLNLDQFKSDICLVSDNAMLYNNTGSVYFLAAQKLKVLAKYYFSEKYLLFLVYSLPFGKALTEEQLGIRLRRKEEQTPRQLKEKSGRERPLPFLRQSLAFIRVKIMKLILVTVKKLRKY

SEQ ID NO: 131578 - protein, 50 aa, Heterodera glycines
MHKFEVAQIANLCPETAEEAKALIPSLENKMEDEELDELLKELHAKKTFQ

SEQ ID NO: 131579 - protein, 70 aa, Heterodera glycines
MFTGDAYGIISRLIFFSFSKQFFLTKDKEITVVITYHKFDKFLNTFLLLALLKMIRMIFHGKIFQINVFF

SEQ ID NO: 131580 - protein, 244 aa, Heterodera glycines
MIVRSPPLTRQRAQNAGIILNQEGQEIFRENRNNTENGLRQNEDGMSEHSNFSEPMMNTEQIHDALLDVGQRNVRDGEEDKENENEQVDNANGFGGLNFENFENLEERTFNVHNRNVSLTDFDAGRMFENVRLERQQNLLPISFPIASTPVENRVANQMGMDQVRENFSVIARLEKELVINGEPQIVTRQQRNPTSVAQPQRVIHQMNLGRQNVQHQNYQHEYGTPSAPIQQYVQFVEQPNMNT

SEQ ID NO: 131581 - protein, 77 aa, Heterodera glycines
MCQKYLPTFPLLDCADFDGAFDGPPTEVAKLSAEFARQNLSPSERAKAILRLFSDFSRQSAAHSFLFVFHNHFSKCL

SEQ ID NO: 131582 - protein, 160 aa, Heterodera glycines
MNEKRQKKRRKRRRFRRKSQHLSKSAVGQPQAMELIDEIHSSAEEEEKEKEKENGAEEVVFVCTSTTSETEDEADEIEQQRQRQQQTMELVDEIHSTAEELGGEEEEVIFMCTSTASEEKEETQQQKKKERKEIASADCENGGALVKCEAAEEQPKEQRM

SEQ ID NO: 131583 - protein, 51 aa, Heterodera glycines
MPLILCQMLLFAPWANFSRHSEKHGPLTKREKEKVTHRKTTFAINLEIWVF

SEQ ID NO: 131584 - protein, 106 aa, Heterodera glycines
MCRHQRPNRRSDNRRTEKGSGAFGGAAGMEKEANDKGKMGKKKKGKKKKGKKKKGKKKKGKKKKGKKKKGKKKKGKKKKGKKKKGKKKKGKKKKGQIKNKMGRIDH

SEQ ID NO: 131585 - protein, 663 aa, Heterodera glycines
MFRCARVQGLDIMEGLLLFGKDHFYVVDGFTLLKTREIRDLDFLPEQFHDPIIPYIFHDPIIPYIAMGCRSRPLSTKVNRQCNKFAYDDIKEVHKRRYLLQQIALEVFSTDGRNFLLAFPRKVRDHVFQKLVSMAKNASSDVAQFMNEQKKLRPTETSSSLIAQLLTGQQQSITHKWQRGEISNFHYLMYLNTLAGRSYNDLSQYPVVFPWVLADYDSDRIDLTNPSIFRDFSKPMGAQNPDRLAQFLKRFAQNPDRLAQFLKRFREWDDPGGTPPYMYGTHYSSAMIVLSYLVRLEPFTQQFLKLQGGHFDGGHFDLADRMFHSVRDAFWSAARNNMADVKELIPEFFFLPEMFLNENAFDLGIKQNGTRLDDVLLPAWAHGDAYEFVRLHRQALECDFVSEHLHEWIDLIFGYKQTGDAAREANNVFHHLFYETSIDIETIEDPLTRNATLGFINNFGQIPAQLFKKPHPQRKILLPPPVSPVPGPPPVSPVPGLTVPRLFYHCPEALRVSARPVKELRTAVGEIVVGERGNQAVVLEQNKVLVPPCYFLAWGFYDRSVRFGAVGNEKSSCVLETNSSCVLETNDVYEITCMATTDGRQMFAGLSTGNSFVLRPSKCHRIPSLGTVFVWSLSLSPAPSSVSASLSVSKSLPSARLVPKRAL

SEQ ID NO: 131586 - protein, 707 aa, Heterodera glycines
RSVADAIERAQFCPEVIVSLLATIRATIHRQFEAEESGEQNANDWLLQLFNFLYQLLQLFNFLYQNSSQFFAICHTEAILITLMTILIFNLINVKSFVVGQRSADGAFVRRTDRGKFHFQKTPFRLFSHLLLSAFVCFLRMPFFNNLLQYALPLQYMDCNGPTHNRQNLLFTELVNACLDHFMASKMFFLNSLGSAGRSPGGKAEPIVRVHSASVVRFLSRVIDTVWNCLYKGNPIRIFKCFLKALFITFNKAAAQLQCTNKAAAQLQCTDAHIASLFRLILYLLSRPIDNVDTQMCVLDTLAEIVRNNQQLFLTPNPTWTRFYAALVHLVFMLSDRPQFDLQDRRNRELERGTAQVSICAQSVWGILWQHKKVSICAQSVWGILWQHKKAVLEEWLKKGNLVDLFTSRAKCGEAANRAWLQFVDSQTVGAFSQSDSDSSAVRLLNAQKMLPTQLQTKLSRVARSGLRKLRKSTAMSSFANTSADDVESKQGLEVEPETFYMWIRVEPETFYMWIRVHISVHISLVRELIRNRCQRYHEWHSHVRKWSIQEWHNAETELIRERGLWGPNHGSLLDKFQLDITEGPRILWGPNHGSLLDKFQLDITEGPRIRRKLVPNPDFYRHYPYRPYLEGPNAKPLRAKVAISRDAKAYWERMSKTRAETMDERIVDFKAGLMPSPGGAITDQSVEGMGSDQSQNGSDQQPIESV

SEQ ID NO: 131587 - protein, 37 aa, Heterodera glycines
MRAVPKCRRFSADDSVTTIQCEDDSVPTIQCRRFSVR

SEQ ID NO: 131588 - protein, 117 aa, Heterodera glycines
MTKSIMTHAGGGFSSSFIFYKALTKMSPNENSDRPYQQTDNVQPVQLPQQQPDEDTELRAQIEDAEEDLLLNWWRKDPTMIRFLFGHRRAPAIEAALLQRAEREAEILRQYAENQQQ

SEQ ID NO: 131589 - protein, 21 aa, Heterodera glycines
MFHPNFTHSVSNSSTDMPFEN

SEQ ID NO: 131590 - protein, 26 aa, Heterodera glycines
MNGGGDWAINGDWGINGDWGIIRENT

SEQ ID NO: 131591 - protein, 25 aa, Heterodera glycines
MSLASLLIVSFFQLYFSLTNKSLFS

SEQ ID NO: 131592 - protein, 80 aa, Heterodera glycines
SVAGRRKLRTHESFFSWLSLSHMESARTLAQCLSEMARHANNETEPQRNVIKRKTSCSSGDLQQNQPSFASEQMDDNDTA

SEQ ID NO: 131593 - protein, 85 aa, Heterodera glycines
MNRRWICTDIWMDIFPHFDCPQLGLKLALFSPRFDILVDKHFDVKNELTLWRTITICKDIGMPKPKFFVHGKSEGFPLPDRPLPL

SEQ ID NO: 131594 - protein, 330 aa, Heterodera glycines
MISNPIERVIYGYGELNTNILNLQRTGKIGWQCASHCTQWRPSAEQNICNVKKAKIVIREASDDQILCLVEICLNILKGRVPLDPRHLKMLKKHAQVLRHLTRTRCSRSAKKVLLQHGYGLSAIHTKRYLLVPEEIYQSLAAPPPSDGTPIGLVRTRIKQIKNDDRINEEERAVKYEQEIKRLNKLTRDEAERPVGVKLENLSDVVDAVLKPVNIKRPIVVATRRHLKVGRARKETVAELEDDDDDQAPRSSNSNKRQPTQTEILNLIYKNAQSLGVSAEGQVLRAGGRPFITSIVDDIVSHLLNKDKRSQNKEPTAFKNLLKGQGKIHS

SEQ ID NO: 131595 - protein, 79 aa, Heterodera glycines
MTKVNKLSVDGTGNGANVQQCGATSGGGCGTENGYGLTQRQIHRAPAPKWGCRRHWPNVAEPIAGIPPHAVHVANAEFG

SEQ ID NO: 131596 - protein, 21 aa, Heterodera glycines
MNAVATVAEDEHTTEKGKKKN

SEQ ID NO: 131597 - protein, 24 aa, Heterodera glycines
VTGVSIIAVLFLVFLMPLQNLVRF

SEQ ID NO: 131598 - protein, 108 aa, Heterodera glycines
MSELLRISIAPMVVRLKMYIETAQENLGKELADQSVRADLIAERQNLCKTISLLEKYNGKWEAIFLRVKGQALQDEEQNYRDFKPEGKAFMHWVDQAARAWATLLKGL

SEQ ID NO: 131599 - protein, 41 aa, Heterodera glycines
SKGLTLKLTTKNFCHYIDNQKKFFPNQRFFKYVLIIVLIVQ

SEQ ID NO: 131600 - protein, 36 aa, Heterodera glycines
DFFLHIVSDSFVDPRTPSWQKEVLTVGIESKKTISD

SEQ ID NO: 131601 - protein, 38 aa, Heterodera glycines
MISDHLRSCAVGSKMLLLEIGYGPDPYTYFYGSVVRNT

SEQ ID NO: 131602 - protein, 111 aa, Heterodera glycines
MPMFAEQAHNAKMLLEFGIGIGLSKLLHKPKYAQRALKLRHIFLDRPMNALDEANFRLSQIIRRSDGSKGKGEKRREFVGRKGTEKGAMESFHLDWTFILLAVITFLFLDK

SEQ ID NO: 131603 - protein, 37 aa, Heterodera glycines
  unsure (1)..(37): unsure at all Xaa locations
THFVFINFEKFWTFRGFLLFWTFRGLDTLWGCQRNXG

SEQ ID NO: 131604 - protein, 72 aa, Heterodera glycines
MGRVVSAFVKKKTDGQWHRIGKRNPQWPQLFQPREEPGKLVIEKGDFMAGTCRYDSSDKKEIVPMGSMGMNE

SEQ ID NO: 131605 - protein, 67 aa, Heterodera glycines
MLEEEEEEDEEEDEGDTFGNKTPSGERQEEGEERKRTDVEFGGQTMADSPTLSEGSLAQMGNGNDKE

SEQ ID NO: 131606 - protein, 210 aa, Heterodera glycines
MRQASFYAVARGRAVGVFNTWQKCNDSINGFSGAKFKKFPTLEQANDFIGKHRETLNSGGKVISKKGPPVRTMIVKSAATTFAERRLTRNTAMFGVEASNSLAASNLVSVDDGFTTVVYTDGACSRNGFVGAKAGFGVFWSDGHPDNVSAPVNGPATNNRAEYLAVISALEKATARNIRRLVIRTDSALLIQSVQMPCQLNVYDVVKIDD

SEQ ID NO: 131607 - protein, 80 aa, Heterodera glycines
HCLACNFTLEESKGTIFFEFLALNDSVYKIKIGGILQFFQDWKAWLTAKTRDSTWYVILPPPVVTSPFRKKNSKFLWKNL

SEQ ID NO: 131608 - protein, 67 aa, Heterodera glycines
NSPQKKEYFVSQAFDDAIAELDTLNEDSYKDSTLIMQLLRDNLTLWTSDTAGDEQEAGGEAGEAGGN

SEQ ID NO: 131609 - protein, 132 aa, Heterodera glycines
MAPTADPSATRCAPASLASAQLHSANAAQHSADHLCFFLCPIEQGLCRVQVAGVWTKYGQPGPLLNGTVVSMTALPSLLRQTICNVARRKAAELESYQMTHVRRRHAIAEFGRRFPSRLNYTDFVEQLISDN

SEQ ID NO: 131610 - protein, 77 aa, Heterodera glycines
MEQARLTVQQLRQEANLQRKKVSEVAREFGVCFLNLNSFWHFDSLVEYCEGHKEGDCLFTGRMDHNPYQEKKSCVLI

SEQ ID NO: 131611 - protein, 83 aa, Heterodera glycines
MPLIRSPDPQRLIGMEQSKADKRSEVAKLIPIRCQFFAIFGDHFLRLKIVLFLFKIASFLLNEECDFLKEDIIYKKIACKQTN

SEQ ID NO: 131612 - protein, 65 aa, Heterodera glycines
MFLCSFFICFQSLYFWDKFRQSAGQRIATDFVSKGYSTPSYGHHWTNVWPNIYWTRCSSKTMKIW

SEQ ID NO: 131613 - protein, 302 aa, Heterodera glycines
IKLNEMFSLSVSLFKCLIVSLIFQFSNGNEEKFGRKRKLEIQSEEVERKRIHFGQEKHHIGNSLALASADNEQKPQNLQNPLHFLFNPPTESDRREFCEEWHYVYEQGTNFGAEFDFPSEEFGPGGVVPIESDGNCGFRSLSWILTGTEANHRQIRADIMEFLNSELINSEDDPAKSNWWEMFFTTKEEARQYAETKRTAAENVGEQAKWFNEVDAFTASKLYGINVIICKKEKEDNNFTWQYYSPLMTPDNLDAAQERTRMSAFIYNSPAHFEVILEPKERKTFGQQALNMRRKFVIYEED

SEQ ID NO: 131614 - protein, 95 aa, Heterodera glycines
MTQANGNGVGKWTTDSDCPNACVSVEYTADFAVHELTLEKLNTRVDDAIQTKCMAEQLQLVDKFNEHKFPNGGGTDPWARDGRQTKMSEKMMKNN

SEQ ID NO: 131615 - protein, 27 aa, Heterodera glycines
MPIDSQIRKSVDLTMLFRWTKSVKVNI

SEQ ID NO: 131616 - protein, 105 aa, Heterodera glycines
VNLLKKRPAVENKGKLKRVSSLDDLSRRSRTKRAKEIARNLSHLFRPGIPVPEIDKVVRQARHQANFISPKKPPGKWTKKGRTRRQERISPLLDIQVTLVGCVDI

SEQ ID NO: 131617 - protein, 127 aa, Heterodera glycines
MMGTTTISKKNATSSTSNSEKLKREAFVFGLKKGLCHHPALSDFISEVSGSIDRQVDAARSAGNFIHKRHKRYVLQDAVIMRILADAKYDNDAEIHDAMTALGLQVEGYAGKLKDYENMEDSSMDVA

SEQ ID NO: 131618 - protein, 119 aa, Heterodera glycines
MAIKYGPKIAKYGHKMAKISKYGNKWQKCQNMDIHFSKLSAKFLQIYWLKFHMRYISKFFDSKFWRKNDFLKTVSGFGLKKANLAAGGRSNRGFLERCQNMDIKYGQNAKIWTNMEIWT

SEQ ID NO: 131619 - protein, 51 aa, Heterodera glycines
LQIYWLKFHMRYISKFFDSVRRFDKDGFRFAISRSTFGNWSRIFSAITCNH

SEQ ID NO: 131620 - protein, 28 aa, Heterodera glycines
MLLLSLARHLKKILMSQFNFAEMKKKYI

SEQ ID NO: 131621 - protein, 100 aa, Heterodera glycines
MVPLISSHIKQIFQRTVANTSRSVSNWLAKEKEAIESANQQQDESSETETDEQSHEHANTTSNRAAQRARSMQRQTQNAAARQPSRAQRQSADERHGSSS

SEQ ID NO: 131622 - protein, 266 aa, Heterodera glycines
YFFDYLILRVTGGELFKDIVAREYYSEADASDIVAREYYSEADASQCIQQILESQCIQQILESIAYCHDNSVVHRDLKPENLLLASRAKDLKPENLLLASRAKGAAVKLADFGLAIEVQGNSESWDFGLAIEVQGNSESWYGFAGTPGYLSPEVLKKDPYGKPVDIWACGVILYILLVGYPPFWDEDQHRCGVILYILLVGYPPFWDEDQHRLYAQIKNGAYDYPSPEWDTVTPEAKSLIDSMLTLNPQKRITADQALKVPWICVR

SEQ ID NO: 131623 - protein, 162 aa, Heterodera glycines
DRSRVASVMHRQDTVDCLRKFNARRKLKAVISAVAIVNRMSHCMSPQNSRTTVPSPSPSPNSAAQPDIGWSVKGPTNNNGIAACADSSGGTSANNGKGWTSTNSISTTVGLGEGGQGIFKVFNKRMNNLRPSNSTRRNNRRDQTSPPPNPHDHSEPECSPVG

SEQ ID NO: 131624 - protein, 131 aa, Heterodera glycines
MRLTDEPNFQGELESSEMFGENEGKKIAAVKKGQNEFVEFVEPRQHQNNRHKEWMDKRVRSSRIDDPFNEFTRYSPAGPTKDKLKKSGSPIFGQSGDDTLENTGHSVGAGGGQCERQRRRHGRNGPQLQRF

SEQ ID NO: 131625 - protein, 60 aa, Heterodera glycines
IYECYKVQKIVRTKYINQILLKWISTIKRVCLMEFSGMTNNLLGRILAADQYSVCVGFSS

SEQ ID NO: 131626 - protein, 102 aa, Heterodera glycines
  unsure (1)..(102): unsure at all Xaa locations
FYQPFQNVAMLIPLAEKIEKLSAVCRCGQSASFTFRMSEXHELEMIGGQELYRALCRTCVVEYNHVKEQLLNGLKKNGNVSLAKKRKASDATAHPTLRIDTV

SEQ ID NO: 131627 - protein, 354 aa, Heterodera glycines
KEKPKGKEKRRKSQRKRKGKEKRRKAKVKEKEKKRKRKAKKSQSKRKGKAKGEGKAKEKRKEKPKGKEKRRKSQRKRKGKEKRRKAKVKEKEKPKGKEKRRKSQRKRKGKEKRRKAKVKEKEKKRKRKAKKSQSKRKGKAKGEGKAKEKPKEKKRKRKAKKSQSKRKGKAKREGKAKEKPKEKKRKRKAKKSQSKRKGKAKREGKAKEKPKEKKRKRKAKKSQSKRKGKAKREGKAEGKAKREGKAKEKRKEKPKGKEKRRKSQKRRKSQRKRKGKAEREGKAKEKPKGKEKRRKSQRKRKGKAEREGKAKEKPKGKEKRRKSQRKRKGKAEREGKAKEKPKEKPKGKEKRRKN

SEQ ID NO: 131628 - protein, 75 aa, Heterodera glycines
MNQRLFGDGFSGAAMSAGRRVQRLPGKLLHMFGELGKGSNCNRTLKLQNTGNGNTCPVNYECYFDGYVWGCCPTK

SEQ ID NO: 131629 - protein, 164 aa, Heterodera glycines
LFDVSDMGSWNIQRGRDQGIRPCKDYRQICGMARLKSFQDWPDTKREKRKRRKANYYLPNDIDLYVGGLMEEPVDGSLLGPTFSCIIGEQFRRTRDADRFFYLNPLMYSPDQIASLRQITFSSVICATGEDFRAINPSAFLVEDGQNAVPCASIPQLELSPWRD

SEQ ID NO: 131630 - protein, 33 aa, Heterodera glycines
MVFRGRESCQFSGHFPKSVRNDKRPFDQPLGFT

SEQ ID NO: 131631 - protein, 113 aa, Heterodera glycines
MVRFQITEATYPAVGRKVVCHYVLTLENGQKIDSSRDRGKPFEFTIGKGEVIKGWDEGVAKVVIFTFQLKFSFPQMSVGQRAKLTISPDMGYGAKGIPGTIPGNSTLILRRGN

SEQ ID NO: 131632 - protein, 29 aa, Heterodera glycines
TRRSRVPEREALSPRHQNSTEYNKANCAP

SEQ ID NO: 131633 - protein, 288 aa, Heterodera glycines
MVAPIGLLHRRQILLADRMIRIQKMLQLEGQFQAVKHSDSSISAVSMKSDSEKSDGEIKEKMAKNYAEHSFNKNDQMLVQKWEEIERNLREQYEKRGAEHYRKRLEIADPYDAGQLIVREHGMKRIILIPREDEIARTVYRIESRGAGGEIKEKALGKSVEQSWRNAKKCLKFVTSNVKEQQGKNDRQLCKMPILTNERAEAYQQWAAIGREMQRRGIPPLYERNGEIMDENELMLLLEKAFNALVNGESKIPRMPKKVKRTETLTKYHTKIANEKRTNEQRMPEQSN

SEQ ID NO: 131634 - protein, 323 aa, Heterodera glycines
MTQIAAKQAAKKNTTVTEEEASDNDEKYYTLPSSHDDRTRSQKPKFPPTISLTTENEELRKLNDFSARDPDLWLNDQQNTEPPNWHCARLMGSERRLCEEWKAIHRAIVRFIIFFAIKNANAFVPKIVVDDQLLATVAVRPRLWPAHAQIDTIQTGIGTMPNFGRKPPFLNGKPAYEKRGGMALTFAMLRVKDAYKWHGTFVEDALKFTNKAMVEKVEGWANFVGNFLHTPTYVWAYHYKGTDFEVNDVPKVEEILKIARELLVPILQNNLVLDGIVDDDPNFPEPPLPIVVRNTANTKQIKNTLLPKTDDKYVNTLVLSMDI

SEQ ID NO: 131635 - protein, 36 aa, Heterodera glycines
MRLPFLSPVIQTTYNISASHTPDDDMSPPNYSMAHM

SEQ ID NO: 131636 - protein, 31 aa, Heterodera glycines
VLQKFFVIKKHDNLLSGVLKVANHESDMYFD

SEQ ID NO: 131637 - protein, 93 aa, Heterodera glycines
YGARQLRAPKPKFIRFGRSGQKMIPFSRSFSTETQYGDEGINQLDALVDQYGDEGINQLDALVDAVDKLYQSSPEIRAFKTAPKRAQKFIRFG

SEQ ID NO: 131638 - protein, 194 aa, Heterodera glycines
MSSDCGLHKYQIIVIEKSVLGLGWDGFWADNWTAFSLLLTLIDNKNSTATKNKINSFKRPNQTMIWPFVLGLLMSLGHSAPVVNTRTELALHQSIAKGQGTTASTAKSTMTTAIAVIEHHSKENTRALTVFKREEKSWTSILLSLLKGIGGIGTFILDLGKDIIKDVLKTVTEKLIDHALKEGVGQGVIIKNML

SEQ ID NO: 131639 - protein, 126 aa, Heterodera glycines
MDPSNGFYNREADKVTLTIDAITVKDEKMEKFVSESNKSEWTLSLEIEKMSEFLRELKWTERKSETVTYIKGLPWKIFAQIRMKSEGNDNEKWLGIFLLCTAPTEEIDGLGRSPFQQKRGQSDICH

SEQ ID NO: 131640 - protein, 94 aa, Heterodera glycines
MYKVLLYRLLSTSSRANLDTFPMSIINVPNVQIRQCLGNCTGYSKSPEIPQKFGLVWYCSMPTTSSVVKMPNGTENSSFEKSGKRILNNAGPSI

SEQ ID NO: 131641 - protein, 72 aa, Heterodera glycines
MKIDGKNVHINLRNWHLPYFVYKEKEDEFKMEEAEVEVNIRKLNELVNLVKPDDEKVMGNFEIVHYLYICFY

SEQ ID NO: 131642 - protein, 130 aa, Heterodera glycines
MAILLKPTPTEYNRRQCPAISKPVRGAVQPRPVSLSFLSLGLLQPRDLAASPRLLQTRRDNARRDHRQALTLKRSASIIHSPQMGCKSGEERQTVSCTMFIILSFLLFMYYIAFFFLLIVIFSNEMQLIR

SEQ ID NO: 131643 - protein, 178 aa, Heterodera glycines
MIRLLDDSSTQPKSDDSSTQPKSHDSSITRFVLFNDSNTQPIGETIGRDPGIAHPDRIPIYPEDFFSGCRGIFGICSNLFFLHFCAKFLFKYLNLKNGHFLKNYRDFNPAGSRGIGKWSGGIPVRDSDEIPIPINPDEFKKSLGTDPEVGIPNLIPRDPEEIPRDPDPVRSLIFTSFL

SEQ ID NO: 131644 - protein, 68 aa, Heterodera glycines
MNAHRAVNAYSNRVRNFMAELDEADLWNEQNMARVAIHECGHTLVVWFLRHSERLIEVDLRFDLDMIC

SEQ ID NO: 131645 - protein, 199 aa, Heterodera glycines
IRFEFEGLKYKGELHNIIFRFCCLDLEYIQHIALPYAESAFFDYLRSEFNCKGVKISAVPEGSIVFPRVPLIIVEGPLAVCQLLETPLLNLVNYASLVTTNAARFRLVCFVCFSFKCFRLRLLANPSVCSNLAFDVLRGPMALCQRRNIALSEALIAPAICWPANCTAFRPMKPMKRPKFAASKMTKWSTYSHCPKDQT

SEQ ID NO: 131646 - protein, 64 aa, Heterodera glycines
MRGAHGSELFRAAHGGWVTVSSSLWLLKTDCKENKTIQNRLGQPKLYCCWCWYWLLLPLDTNTG

SEQ ID NO: 131647 - protein, 31 aa, Heterodera glycines
MKRRSCKSGVDDQCVGPPIESRPCNDEQCPY

SEQ ID NO: 131648 - protein, 94 aa, Heterodera glycines
MPMMPFECVVNESTKEKLTLTKANENEWDIDWIMKRCKIGETAAVQQHKEGDWNNVFIWLFAGTNCIGPLSPPPPAEEDEAGQSITKGPSSADK

SEQ ID NO: 131649 - protein, 125 aa, Heterodera glycines
CPRFPLIFAELVSRCFSLQIILPQIRSVVAELLLWLDRSDQKRIIILAKALRAYLSALNEWFPNLKPLVTNLSKTNEKYANLEETEGEKDGHGEEERAEKVDGHKKQWEGDPNYPLVKDVVSILN

SEQ ID NO: 131650 - protein, 252 aa, Heterodera glycines
MQFYNLFFILSLSFIISPIDETLLVKSFGFNAKVWPTFDEIFGQGWENEKMDKIQITIKMINELNFADSNNVLNNNQLDDQQKREIVHKFHAIKKGIKKRGKYSQKIWNRIELKIAKKLGISRNKIYKWKKELGIKIKNDQNYYEMKRKEFIQRIDEFKRMSAVNGKQKQFGKELGISERTFRKWKKEFGIKWGGNQYSNGEKARKLKIYYKMKNEKNSSFSDKQISEFLKISERTLRNWKNKNFPLEFKLS

SEQ ID NO: 131651 - protein, 78 aa, Heterodera glycines
FADIQRSPLTVCFPEYKGQQNQTECINYIQWNFEHMNRSRQRETYCHHTCATDTNNANFQIFSCLMNLLRNFSRLRHN

SEQ ID NO: 131652 - protein, 46 aa, Heterodera glycines
MVSKLLPVILCCLFLASFALCSPKAADVLKFKREAAISSCGAVRHI

SEQ ID NO: 131653 - protein, 398 aa, Heterodera glycines
MVNGLLCTSFTEAAIMHGLLEDDKIWDKTLAEAALSRWPDQMRWLFVSILVYGQPSNAIELWNKYKDQMYNPQGIITPAQHKVAEDRALADIDWRLHNFGYSCVHFGLPDPPTSIAKNTDAAIEEFFFGDDDLNLPPGQPNPRPQPNTPPPLNSDQQNVFDAVLLAIQSNPRDSTVPRRFFIYGDGGTGKTFLFGQIIRRLRKAPYTYKVLATASTGCAAILLPYGKTAHSTFRLGREVSLDKLPSIPLESFFARRIREAQLIIIDEITMLHNTVIEVIDRVCKEMAIRQHKDLLFGGKTVIFSADFKQSLPVVPHEGLTAQVTACFQTSPLFGQFTTMKLTINQRLGQGQQAFLQMCRQIGLGETGEHFWIPPQFLVKSKEELIDYVYPNFQQLLGK

SEQ ID NO: 131654 - protein, 417 aa, Heterodera glycines
MEQRRNNPRFTGEKITNEDEFVQGHQLNEQTLEILEQMIQVHHPAAQAYKQAREQLTELLQQQTPEELRFFRMTLLNERRAPAGLKDPKLHPHQIITPSTGEGMFAIHADPTGAPPPKGIWVENKQGQLNEIAPFSPWTDSLTYPLIKPMGDDGYTTGVKYAKPPSRKRKGAQNASGLFDSEAESDNESCETQSIALSDAGSVADSDAESVASVSSQHRRIDKSKQFISLRDYCKYYLAIRDENVELQYHHILSCGGGLGQRWILDQAAKIDWQIATFLHRPDMDLRISTPKNLLQYLVNQYNRQKARQNPNAQQKTVDDIGSVVRLSEHNVNSLQYWKKMYEDCNTVFARCHDAKKARLFITFTNNREWPEFKENIYKNGQVFTDRFDMWMRVWSSKIAEFREELYDKKFFGTIPW

SEQ ID NO: 131655 - protein, 270 aa, Heterodera glycines
YCTINFEIVVISMAGAYRKGKSLLLNFFLDYLYKMQYTQQELELEEWITDDDIVEGFLYKSGQKRCTAGIWIWGFLYKSGQKRCTAGIWIWAEPILIDTPNGERYAVLLMDTQMDTQGCFEQPSGGNACAALLALSTMLSSVQCYTMAEGIPDEALAVLSSFVDYGKLASAEAKEFGKPYQRLAFLIRDFKLTDEMIYGVEGGNRLLVRTIQKSVANSAPLAEVRRHIRQCFKDGISCYLLPHPGPKVAEPNSGFRGQVKGGGKTEGGGG

SEQ ID NO: 131656 - protein, 160 aa, Heterodera glycines
MTTKEIAESDDGRVFKVDLGNLTQVTSLCTKWKAHFTNVRQVMESGGGGEPCVSTRTSAAGGGGFPVWLIVLIVVIVICVLGAGAGIAVFMVRRRSAEAEGGDAPADPIGTFTSKADKTDEMDNIPASKDDDTAPAASMGGMQMSYAAMGASTAPGKSMV

SEQ ID NO: 131657 - protein, 36 aa, Heterodera glycines
CDVCGNFTEQIADQFLRVVSDCLEVDRLPIVDLDQT

SEQ ID NO: 131658 - protein, 133 aa, Heterodera glycines
MPKCLLLFFAYLPPAWSIGHGNYFGHHEGLGVGLAHNYVSKYGIPMNLSDEQLDELKWRPKRHTKLDGTQMINSSGQQNCSDENFILSTLLRDYDKFRIPGGGNVRVEVEKYFCRRSASVATNLEPIRMFCEQ

SEQ ID NO: 131659 - protein, 63 aa, Heterodera glycines
EEFIQRFGRQFGITEEFIRSNSQRMKEFKQQVTEGKQREEYAKLLHEQMEFESARRFREKYGL

SEQ ID NO: 131660 - protein, 57 aa, Heterodera glycines
QRKQLAKHKSEHQRTECQLKFGGSVPFLLFENFLCFPILRTVSLLRVCQHIEASAFI

SEQ ID NO: 131661 - protein, 152 aa, Heterodera glycines
MTANQTHRHSHQKRRFSVRFLGVFLMGKDKWTTTYGGEQIGSQKNAFERKEEEKEERKEDKEAGGRHGAKRQKGNGQIVKLRGQKGDGQIAKLRGERVSLDEEEGHGLAFEREQRNEVPMARRNGGNERPKGKRIRTLSKQHYQMKAEASMC

SEQ ID NO: 131662 - protein, 122 aa, Heterodera glycines
KWRLKRILSLAKTARVLLSLPSFASALSLLSPLSECEISIISLCECEPSAGAAVRKSKAFFIPLGQFRRSFGKGKSPSPSVGISLRKSERSGAFGKGKVSRRSLILHKFGRDQIQKDCARLL

SEQ ID NO: 131663 - protein, 137 aa, Heterodera glycines
MAKRNSRMVNALSTILNKRKELGTNDAFRVRIRSLDQMGNTNCYFSPVQCYFFEERQIFKMENIEITHEWSGQQWDWPLQHNDGVVKVHNTPEKWEVGLDVAFFTPNEIEHEARSDVHGSVSREINRSYKLPNDVNT

SEQ ID NO: 131664 - protein, 30 aa, Heterodera glycines
MCRLLPLFLTLFAVLVALCVSVEGQQPSAE

SEQ ID NO: 131665 - protein, 75 aa, Heterodera glycines
MQLLEIIVSEKTSKEALAVAAKLGLDQKKLIVVVKISKFRLRLPQNFVLGMPPLVRIFYMVGDHEYGIQPDNSIP

SEQ ID NO: 131666 - protein, 33 aa, Heterodera glycines
MRINITGSDKIGDGLLNGLLGLSEWKLRNGRSV

SEQ ID NO: 131667 - protein, 138 aa, Heterodera glycines
LFAVVEANFYYFVECAIALCCSFFINLFVVAVFAHGLFGKTNADIVRNFQNLRESAAGARQATVPNNTDLVEADIYKGGIFLGCQFGMFALYVWGVGIMAAGQSSTMTGQSINQFWLSVFLMLRIPTMIKLVINSTTA

SEQ ID NO: 131668 - protein, 83 aa, Heterodera glycines
MTKIIKDFSVYLMTINFERMISDQNLGSFYMELLNWNIQFLFVLFHYRGAAVRAAEHNFRMKHNLTRLQLLFNSGHIMSSNIT

SEQ ID NO: 131669 - protein, 77 aa, Heterodera glycines
MSAFFVVALPVLLAVLTEAQNFGGQGGALNAPLPFGGPINPEQLPHMLHHPNLKSGEDIEAAFQNGGGQVAGVQHQQ

SEQ ID NO: 131670 - protein, 114 aa, Heterodera glycines
MFSDVWMGIFPLFDRPQLGLKLALISPRFDVLVDKHFDGQTRIFSNFVGFAMMFGWKFCPVLAMLNSASNRALFLPRFDLLVDKHFNGKREFFQISISFFVFTFFVKVIDFLVT

SEQ ID NO: 131671 - protein, 43 aa, Heterodera glycines
MTFGWTFSLFWPCSTRPQIRTDFASFQCVGGQTFSMAKADAAQ

SEQ ID NO: 131672 - protein, 102 aa, Heterodera glycines
MFGWTLSLFDRHQLGLKLALLSPHFELLVDKHFNGISNLGNTCAMTFGWTFSLFWPCSTRPQIGIAFATFQCVCGQTFSMAKADAAQVLNFFKLTGQMFYKL

SEQ ID NO: 131673 - protein, 33 aa, Heterodera glycines; identical to SEQ ID NO: 126595

SEQ ID NO: 131674 - protein, 325 aa, Heterodera glycines
MPSKQRNLRKNEQERYQRRTEKSVSRDTSPVSVGSADGNGEASASLRGTTTPSLSALQISTPASSIGSKKRGRPLKAGAKPILATQETVSSIDTPRTAVTQSDQGSPCKKRGKVSECDQPTFANEAIALTPVSTQSRGGRPAKKIRGPGRGRLSDSMSKSSEMDINLENAPIPATSHTVSEKIDFSTVQINFATSRNFACKIWKWAAIGLYERDGETPIAPRSGPRYIETCWNDMTQFLNDGFAATYLAYLATISQRKVVVVDPMVWSNGLDRVMPYKNMTFGYDPNVPAEVILLPVHFPGHWTLIVHDVQFGTHFADSLPTTYG

SEQ ID NO: 131675 - protein, 107 aa, Heterodera glycines
MNETMPNQIPESKFCFLSLNIIVYFCQLTLDRLGHRNEIMVEMSQKFGNAKQQLENALSEEKAEKQLNEAAQKGFEEAQRRFEIAKQEKETAEAALKKAEEKRKQLE

SEQ ID NO: 131676 - protein, 210 aa, Heterodera glycines
MEQVSAIDGAELLYCDTDSIYYVNKMGGPCVAEGEALGQMKREHTDRRIVEFVAGGPKNYGIRHTARDGTDERANLKIRSFRLSYTAQQLLTFEAMKDLTLATYNIDGPIDDALDNATFTCTEAANIVPYASTSRKLIAMCTPISTRMRPTKTTGPSMPRGAFGLGCRRVPLAIWRMMDSRTKDNGRTDEREILWSKIPHSPDTLGGSDV

SEQ ID NO: 131677 - protein, 67 aa, Heterodera glycines
  unsure (1)..(67): unsure at all Xaa locations
SITLCIHQLRVVNIVGVQTLXQRISVERLQNTLGGIYDPTIFPALRCKLSNGVTCLVYISGKVIVTG

SEQ ID NO: 131678 - protein, 173 aa, Heterodera glycines
LEPKRQTHRELKGHSFMGSAQCLECIQCDRQTLWYSPEENERHIGRCQRGLIPPSQCANSSHTHCIFSYFKQGGDSVITITERRCGTADQISGCTLYKSMRAKRHLIAGPPSHRRRETNPLPPSHRRRETNPLVVEVCTGGCKENGCVNGVGGGGEAKWTMAWIVVIGWVAWW

SEQ ID NO: 131679 - protein, 49 aa, Heterodera glycines
KFLKICRLIAFFECFRIIPRMFNLVEKEKSYGRKIRSTTFRLTTFCPTP

SEQ ID NO: 131680 - protein, 146 aa, Heterodera glycines
MRQFGRQLQMRMRGKINLKFYAFLIILSLVTPATCARHGSVIVMMNNRVKTEAFVTTNWATTNADANLDFLAKIASFNMKKARTNANWTVRMGPPAKMLRQNSANVRQNLAAFCAKSKSPTPANLNRAPRGQFAHRQMTISNFLDN

SEQ ID NO: 131681 - protein, 192 aa, Heterodera glycines
NDSGVGLTDRSGKGDSKNESTSTEETANLSSGGGDEFSFSGGTSLASATASGEDSKFVPFRPFIRSVSIHGVQQYHDLELIKYSDTPARLALLGNTSKYPITLAEIVRRVSPPECLNTSFLSGILRRAKNKDGGKRFRTELQQFNCGVDLQTGRRKTGAITTFTALCERESVQLAKDFDKLAKDECHGFPEK

SEQ ID NO: 131682 - protein, 73 aa, Heterodera glycines
LISSQKSCQFKTAKKTEFSKFFISIFFYSSKFSVIFSRLIEPVKSFRMISRLFDSVNNFKSYIDSKLAQTELA

SEQ ID NO: 131683 - protein, 74 aa, Heterodera glycines
MLMLICYSPCEFDDDLPSPDELSARVEFINLKNAQIRQQLKNRANEIKKVAEQPKPAQIRAFLCPSMAEIGNCD

SEQ ID NO: 131684 - protein, 188 aa, Heterodera glycines
MAMSAAVLGGLVGAAGGYGDAALCGTARERTTHLALKQPQQQQQEMAQAAAAQLTADEQRRQQQQQQSSSPTRPLGLGRPSVAGGVGGNGTRHFQRSQQQQMHQQQTNMDQCCAGDNTSPMAHAQQQHQMNSFNGLLRAVQSNDSAAVDGLLGLRGSMAMKQQQQQHGHSGMELNEQLQLVSAQLMNR

SEQ ID NO: 131685 - protein, 19 aa, Heterodera glycines
PVPGFFAVPVEKLGPGPDF

SEQ ID NO: 131686 - protein, 94 aa, Heterodera glycines
LNDFERKERAKAEHALALNLLESAVYDYSAKLEEEAFNSFGTDEELVLIREQTAKLKDWLDDMPDDVGVDELKQKRREFVAPIRKLKNRQRQKE

SEQ ID NO: 131687 - protein, 142 aa, Heterodera glycines
MAEAHAKMHLRNFVNDDDVSVAMKILLQCFISTQKASVMRQMKKVMAKFNIEKQKQIKKFWKQLSYKRDNNDLLLFLLKQLVNEHIVYERVRHGGGISESADIDTIAIPESEFLEKLKFLPHLLFIRDLNGNRMDGTPAIFY

SEQ ID NO: 131688 - protein, 221 aa, Heterodera glycines
MLITKPDIEETIGQIMAMAYLYPSHPRMTAFWIGPTPTIMIYSATLLESITGNTDHLNKGFSYEFLRPWLGNGLLTSCAEQWRPRRKLLTPTFHYDILKLFLHIFNHQSSILVQKLHKISQENKGLVADVSPLVSLCALDIICETSMGQSVNAQFESDSEYVRAVLRINDIIQRRQCNPLMWLDTLFNWFGDGKEHSWALEVLHSFTHKVQSNRQFAKSNE

SEQ ID NO: 131689 - protein, 96 aa, Heterodera glycines
MNRRWICNDVWMDIFPSFDRPQLGLKLALLSPRFDALVDKHFDGKSELTIWRTIEIRKDKGPEPKLSVQMDDKCVPFPLPDRPLPSKICFKWLRIE

SEQ ID NO: 131690 - protein, 320 aa, Heterodera glycines
MNRRWICNDVWMDIFPSFDHAQLGLKLALLSPRFNALVDKHFDGKSELTIWRPIEISKDIGTKPKLSVRMDDKFVPFPLPDRPLPSKIRFKNLRIEYIDHSVIAFLRSNHQIFDKRGINLHLWLPLSNTTNGQPIWDVFVREIWPIFSENIRHLGVCNGILFDKLRRLTSHSILTDLDQLNSIYSGDLLPEASKWLHSPRKDGQPKRFRFGRNLNAQADFDWVNSFKEHFLRANAISSISYEIHFPVRVPSMQIVPFELVNEWTKEKLTLAKENEWGIGWIMKRSKIIGETAAVHWKDGNWDNNCNNVIIWLDSDTNCIG

SEQ ID NO: 131691 - protein, 161 aa, Heterodera glycines
MTKEMAKFFVDNFLLKVIGNKKAVVLLDSWPQWKTAIGGAAPTGPSSSTDFARDNICLETIPPGCTGFVQPCDLYLFRVGELNFRRRKKYGRHNHQATDAHIGFTFFENDIEKAKRKSFISRPEASFSKNKKKFIIQRGGNLPTLKVSFGSPMVTWVPLLC

SEQ ID NO: 131692 - protein, 51 aa, Heterodera glycines
LQIYWLKLHMRYISKFFDSVRRFDKDGFRFAISQSTFGNWSRIFSAITCNH

SEQ ID NO: 131693 - protein, 92 aa, Heterodera glycines
KKNKIIIYRVGELNFRRRKKYGRHNHQATDAHIGFTFFENDIEKAKRKSFISRPEASFSKNKKKFIIQRGGNLPTLKVSFGSPMVTWVPLLC

SEQ ID NO: 131694 - protein, 94 aa, Heterodera glycines
KKNKIIIYRVGELNFRRRKKYGKHNHQATDAHIGFTFFENDIEKAKRKSFISRPEASFSKNKKKFIIQRGGGGNLPTLKVSFGSPMVTWVPLLC

SEQ ID NO: 131695 - protein, 57 aa, Heterodera glycines
AIITESAVFCRDEENHRTMEKRTDDRTSKALSIRHYEEAVQRNRGYAKRKDILFGHW

SEQ ID NO: 131696 - protein, 156 aa, Heterodera glycines
MENPRQKPSKVLAEIRANTKDETFVSMGTDLALVAVMRRQKRKIYGNMDRVNPLSVVLPDALLIKDGESTLLYDSRAHRQGESDLLDVLKRARKISVDGTFKVSPAAWTQCFVIGAFVNRRLALCVHALLPGKQRKYYEEALNAVKAVMAPNTPAH

SEQ ID NO: 131697 - protein, 332 aa, Heterodera glycines
IKYINTSSFRQADVLSRLIANYPRPEEDILIANICTETDCYINVILQTATDQLPITEAEISETPKDEVLRKISDYTKNGWPQKCTEPDLSPYFPKRKEILEIDGVLLYGKRVIVPSQLRERIIKALMAHPGIVRMKALARQHVYWPGLDLEIERMVRQCEDCQSAQKSPPKAPLAPWTSCSRPFQRIHIDFAGPCSDGHSYLILIDSFSKWPELYRMDRISTPATLHVLRSIVYRLGFPEEIVSDNGTQFHAAEFKEFCDEFGIKHTFTPPYHPQSNGQAERFVDTQRAMKKCAKDGKFWAEKMLLAYRTTLNSALNGLSPDQLFFGRRLRT

SEQ ID NO: 131698 - protein, 210 aa, Heterodera glycines
IHEKCGRVRAVGFAPDMQIVSIQQEDSVIEFVLLQEGKVVGTFRHNCTAKGAVVLGVHWLSNSQVAFVTDLGCEFFCVYAYKRTLKMTQRNVRFVHCQNVQSTLIFDLKLCTDRPICSTKLCLPSVPNALSSDSVNADDGNENKSAGDLPHNQQHANRVLSIGDAFLYNSAWKMCMPDVVVDLQYELFTRVQLQLESAEHALTGEGGHDL

SEQ ID NO: 131699 - protein, 121 aa, Heterodera glycines
NAGPWRSAADQLGLCTEQSPGVGTVVHGTARDQQTNDRRVPRHIALTIPYRRAKAFAQHYVACNRNRLCALDTPDSMYILAFAVIMLNTDLHTPSLKDSRRMKLDEFVQNLYRLEEARHMD

SEQ ID NO: 131700 - protein, 162 aa, Heterodera glycines
MSKTARHCRCRKRRRRRHHYGAHFARYFRADGKRLVYCSAVGHNHPLICHNGAAQLRKKKDFTPQPPIKLERSEFDEENEISPFNRQQQLAPEAFASVARPCHNTLRVRHALADARALECAGMSHKKAEVWVSVHAFKRMMRKAEKNLKVKKEETNAKQFAK

SEQ ID NO: 131701 - protein, 90 aa, Heterodera glycines
MTQPQSIPTPILLSLLLNKYIDVNLLGYPREVTQGERFEQEANDETLVKRLMGRGRSDDNVETIKNRLHTFVESTKPVVDHYGKQGKLVK

SEQ ID NO: 131702 - protein, 97 aa, Heterodera glycines
MIITLKIRMLSDQRRVDDHLPIKQCPLCSAKLDQPYEQELEKHIAEEHKIPANIVQRLIKTEIDDQHNQAIIDQEEHQQQQKSPSVGHPNSFLSLSI

SEQ ID NO: 131703 - protein, 263 aa, Heterodera glycines
PSGDDGMLNNIIAALANNPTTPPSSSTAPATAVDDPTASSSSNNFGAQLLPIFPHQCRHCSIAFRTAEHLQAHALAHSPAKFRLWHRCDAPPCATGGTDSDAAGTSADNIADQQTTTASALFPTKRALERHQRTTAHAGGDDGTAGGGGHFCDICADGQRFASDTALMAHFNTEQHLVKARGGSGGGAQNGPSNAPGSVPSCSSASSASPCSSSFTSKAVKRPSSSSSSSGKHLPYTCNVCAQSFGQPGTLDTHLRWAAVEIN

SEQ ID NO: 131704 - protein, 111 aa, Heterodera glycines
MAATAGGAVVASGVCRCPLMPLQGPFCGEKCRCRRRLLVRDVVGTCASRVGICAAGGAWRRIAAVPKAKFGRRMGQCVGLEKIDQFWHCDKSPEAYDPTSRLVVSIAEIWL

SEQ ID NO: 131705 - protein, 103 aa, Heterodera glycines
ISLEYLLLPPRSALVEAPAGPTPKAFNATTTTLLHVMARLRDKHVYKPMTVEYSYPGGNFGGNQLLDGSISLSPLYPSQTIDLHVRIASDFHQSFLWLHPAQE

SEQ ID NO: 131706 - protein, 43 aa, Heterodera glycines
ESADGHTKAFMDLIRFILPMEEPEGSEEREGAKAETEEGAEEA

SEQ ID NO: 131707 - protein, 152 aa, Heterodera glycines
MALLSDRFDVLVDKHFDGKSELTIWRTITIRKDEGPKAKLSVLIDDKCVAFPFPDRPLPTKIRFNSLWINYIDHSVLTFLRSNKQIIWPLFAKSIRHLSFLYGDDLDKLRRRISPTILTDLDQLNSIDSVGLFPDGIADDGPLFRHFAVPPL

SEQ ID NO: 131708 - protein, 20 aa, Heterodera glycines
YRICSNYGPVSINTAVSNYP

SEQ ID NO: 131709 - protein, 109 aa, Heterodera glycines
MEQLSEIYAIRALLRHYWKKGTNAEETVRKICAVEGPNVVDIETAHNWFSRFESGHLTLEPKKTIILGKCQIFWQPISGFHVGPGPRFPGQKPWKRQVQEKSRLFEAWT

SEQ ID NO: 131710 - protein, 27 aa, Heterodera glycines
MSTSPGLGLRVAQQEYYVSLRCYDGTE

SEQ ID NO: 131711 - protein, 62 aa, Heterodera glycines
MHAFQSTLDLYVLSMFWPSKCTVMMKKSLQYVPFFNIGATLSNCIFVDRFTRENAKQALDKS

SEQ ID NO: 131712 - protein, 130 aa, Heterodera glycines
KGLDGVAEELSMEMHRIGARNFGRDDRIGTVNGKSLLAPFLEEPLVCWLNTLPTALKTGFGLPTNDGTANKFLLRNALRSLGVPECFVQRPKRAMQFGQFFVMHTDGQNGERGEWRPKVKRAQICEKLML

SEQ ID NO: 131713 - protein, 24 aa, Heterodera glycines
MSRCLRMLGSGVYEMIKCCDGACE

SEQ ID NO: 131714 - protein, 44 aa, Heterodera glycines
MTLTRIFRRILTFTSIYRTILTLTRIFQNYSELFWCLPEFSEQF

SEQ ID NO: 131715 - protein, 44 aa, Heterodera glycines
MTLTRIFRTILTFTRIYRTILTLTRIFQNYSELFWCLPEISEPF

SEQ ID NO: 131716 - protein, 95 aa, Heterodera glycines; identical to SEQ ID NO: 130684

SEQ ID NO: 131717 - protein, 68 aa, Heterodera glycines
NKKIDFSSVRWGTQQLMGSKNPTQNKVQAIGSYSEGFGLPINLGASVRGDCPENKKIDFFKCPFGVLK

SEQ ID NO: 131718 - protein, 100 aa, Heterodera glycines
MAKESGGRNWMRKRRRGRSGRRRRSRGMYSTYQSLENWRKLLQKCLISAVNNLIKTLEIPFNATKQFAFRVRVYGDEYFDNKYTASLKMCSIKTFKALNP

SEQ ID NO: 131719 - protein, 109 aa, Heterodera glycines
MSDNPCKVEKQMAKAIFISGDGWLAVFHLLPPSQLGLGIALISPRFDHFVDEHFKTRKWALGNIRIRSKIGQNGTKEMEIINSDLKLLPIAQNPPPKKVIGFNRISIRT

SEQ ID NO: 131720 - protein, 74 aa, Heterodera glycines
MLVAAAKHSNGLNNDDKEKPPPPIHSTESHQNVLLMPTNSSCSLNGRLLADMDMDGGTLLSVEEVPIFEFENGK

SEQ ID NO: 131721 - protein, 36 aa, Heterodera glycines
MIRPIPGSKRSPNHDHGLCVMISRFDWASRLIGGCS

SEQ ID NO: 131722 - protein, 181 aa, Heterodera glycines
MKLTINQRLGQGQQAYLQMCRQIGLGETGEHFWIPPQFLVKSKEELIDYVYPNFQQLLGNDKELLNRLILAPHIDTCDEVNEIMMANVPGQVREYLSTDKPLDDRPLDIDEIESEVAALNRRTDSGMPPHSLRLKVGCVVVLLINKSDKEGLINGTRIVLEELGDDRLIGRVINSNAIGGQ

SEQ ID NO: 131723 - protein, 64 aa, Heterodera glycines
MKKSLIYCYSNGNRFATLELKIILVHVFRRLRFSTTIPFEKNRPALEAVSRLELGCLLHVHAAS

SEQ ID NO: 131724 - protein, 236 aa, Heterodera glycines
MGHCAASLDHADLVLTELENIAKWEHTKKGISGGVGGAAGSGSSSSGGGIFSYIRETIVREAHLETLNLIALSVHPSRIRDYKFEPRYECLTYVKLDALCVFGFPHFTPLRQGEWTFQPAFVGHLYSFAGQRLPSVGHSKNGQPTDGECQGWPKAIAMANAFKNGPTSAKSGGSGGEHQQQRQRAANRRQMGKRGADNGDGNGKADGKACQLNIFCCIKKGLPGFCPVSAIWLKCD

SEQ ID NO: 131725 - protein, 61 aa, Heterodera glycines
MTNKTLKKVPYIRIRPTKDKTPTVLSPLRSRQIEKMFKMRELANSTNSLSLSGGSNRLKVF

SEQ ID NO: 131726 - protein, 88 aa, Heterodera glycines; identical to SEQ ID NO: 124691

SEQ ID NO: 131727 - protein, 88 aa, Heterodera glycines; identical to SEQ ID NO: 124691

SEQ ID NO: 131728 - protein, 279 aa, Heterodera glycines
LTIEIRLWELRFHLLSVNFLLSFIKLCCFNPKSSIKNDINYINFSPIFFPGKANTDNLSVDELWRAKHLYDSAFHPQTGEKLLLIGRMSAQVPANTIITGGMLSFYKTGGMLSFYKSTPAVVGWQFSTPAVVGWQFINQTYNATVNYSNRSGDALSGAQLLQAYLMATGGKIKKNFSKKISIQKMPPIWGRLVPFAAVAFANCVNIPMMRRKEFVDGVQVVDSNGVPLGQSRKRKEFVDGVQVVDSNGVPLGQSRKLAWWAIPQVVVSRIGMATPGMGE

SEQ ID NO: 131729 - protein, 119 aa, Heterodera glycines
MVHQISDPNTVKFDDFIILEQIGMGENFNHFHGVPPYQRGYGRQRGGGVGDVLRYLWRAILPKIKSIGTLLGKEALATGSRVLDTSKNGESPKSALISQVKKGIHNLTENGGIEGNMEL

SEQ ID NO: 131730 - protein, 54 aa, Heterodera glycines
EKGEIKISKMKRVEEQLLEYRRTRKAALEQQRVDGDGKSDMPMSLNGQEGFWDI

SEQ ID NO: 131731 - protein, 484 aa, Heterodera glycines
MPNLGHYRIVGGSRVLENSNGSPGFLRQNLLLILTVSAVGIGVLLGVGLRQVEPNYRMIKLIGFPGELLMRMLKCVVVPLIVASLVTGLAQLNIRDSGRIGGIAVLYYLVTTTIAVMTGIFLVLTIRPGDLGHDTNGNGYLGNGSNTKPTDTMDTMLDLIRNMLPDNLLGTALRQQQTAYYCVIDGRKTTSRALCEKHTVHLPEAQRDRFIRTELQNIDGSSNILGIIVCSIIVGIVLSQMGDKARTMIDFFSVLDQVSMRIIGWLMWYSPIGIASLIAAKVLEVERLGDTLSRLGLAMAVAFGTASSAATLPTTIRCLEQHLSIDRRVCRFVLPVGATINMDGSAMYEAVATVFIAQMVGRTLNIGQVMVIRDRFRTSINVLGDAYGAAIVHHHCREHLSPAADQKLMNGFVVANNELKLMLKNDGIGLITFPGNGVAIGTNNHLLLVEKENADKNDEGSSRSSAASEGSADGRRPLVNADYS

SEQ ID NO: 131732 - protein, 89 aa, Heterodera glycines
AFLIIEINRKKALSTWVGASSMLDVYFLYLFKVFIFGNFQKILYKKYLYNKTRTSPMNRLKKQTKYKFKKKLNFAFGILCFTSLSFLNI

SEQ ID NO: 131733 - protein, 36 aa, Heterodera glycines
KSGMGLGIRPGCDLKSNFWSGKIHTSYPIRALLLII

SEQ ID NO: 131734 - protein, 90 aa, Heterodera glycines
MNTINNRQIAPIPQTLSEARQKLRQRPRVKFNEEEEVINPAPPPSVDRRFARRCAFLPLRHSHWFTCARFADSQRGARLGIVGEGAFFVF

SEQ ID NO: 131735 - protein, 68 aa, Heterodera glycines
MLLSPALLIMQYNAFKPRREAGQFQNFVPHFTVESPSTLLDNYVSMSTVAFGQLWNGKMGISDGGALF

SEQ ID NO: 131736 - protein, 62 aa, Heterodera glycines
LLIMQYNAFKPRREAGQFQNFVPHFTVESPSTLLDNYVSMSTVAFGQLWNGKMGISDGGALF

SEQ ID NO: 131737 - protein, 148 aa, Heterodera glycines
MEHQQSLLPKYFAFFGIKDNSYGVPGEERFFLLTKNLFPEKYKDEKNSGKNEQQQQFALDFTYKFDVKGSLDHQKLSAKKRNASKHPMFRYLDLYDENEQQMSADERKKIEVTKEGCFFRNGIMLEDETYEKFIGILGRDTVVRGECH

SEQ ID NO: 131738 - protein, 202 aa, Heterodera glycines
MTFYDYYNAFPMPSSFIRVLLFLIGIFLVTILATPSPQIDVGVSVTNRTEAIRQGLIHALSTITSTIDFGKVFHDNVPSIKQDRNSRRSIEYKMPMPTLLELGQKFTLGADGKRQFEFTAYGMQAFSKLADLWNLPMQQLITSLRMGKLHQISNPNGRLSNMDIFIKTVDQQFFIKDVKTGMETLKNKQRKALKKTRPKGGD

SEQ ID NO: 131739 - protein, 87 aa, Heterodera glycines; identical to SEQ ID NO: 129152

SEQ ID NO: 131740 - protein, 315 aa, Heterodera glycines
LESTLKSYIDSLSELTVELRIEANDGLTELNKLRNRACCQPLDKHQSSLDIVARYYDQLCYYDQLCAMETKLPITPTQNPVSFKWKDAFDKGSLFFSRASLTLNDSSFLNDSSFERACVLFNCGALMSAIASNQQTNTDEELKTVAHLFQQSAGVFSKLKDTVLASVHQEPTSDLLPDVHQEPTSDLLPDTLTALLTLMVAQAQEAIYIKAAKDKLKSTSLLKIAAQCADFYQDAQKAAKDKLKSTSLLKIAAQCADFYQDAQKLMNRETVKRIWEKEWVQTVTGKEWVQTVTGKGLVFASLAQFHAAEAALDEQ

SEQ ID NO: 131741 - protein, 73 aa, Heterodera glycines
MFQVVFEMKKKQLEEEKKKQEEQENTLNAEREAKNNGGGANGQHSNGKAGGDIYLSASKTENGTGGGGGSCGG

SEQ ID NO: 131742 - protein, 312 aa, Heterodera glycines
PQCRPPPPHLSHHRSLQLFLLLSRVGQDREFLAKPGPGPEKQGPGPRCPTHSGVIQSPPVYSDGLNMAFAPVFAFHFPDRTQMNFRCQIQTCNKLDNECQGLTPPNCQQNIVGLGASSGEGYSAPPTGPVVPYTINPPPTPNFVMPTLASSVGVGAYLQQPMLQHPPFIGAGGNPSQVLQGLQRPWPRSSSSKKGAKHRAETRRDTDNEQQNGGEQQAGTGTKAVAPTAQGRREQMELEHRILMATQQLKHNEDGSWPPSLVIFGTGNKSAGSAAARRFFRPIPAEERELRQRQRRAEEHTQVPFGDMNPFW

SEQ ID NO: 131743 - protein, 165 aa, Heterodera glycines
FPAAIGQFLLRGAKLKNCRWVFGVVVYTGHDSRLLMNSTSAPLKTSRIDVMTNQRIVILFLMLVLITIVSVIGAEVYNKWFLDGHWYIGAIGHWSFWWNMLTFFILYNNLIPISLQVTLEIVRFFQASYINQDIFMYDEASDVSATARTSNLNEELGQVQFLMTE

SEQ ID NO: 131744 - protein, 53 aa, Heterodera glycines
MLLCSKISHFLLLLLGALLLLSFISMGNVSKNPQNGFAKNGQIVSKIQIKGVF

SEQ ID NO: 131745 - protein, 137 aa, Heterodera glycines
MLGNSQVQTVQCIRLAKEFPDAQFLVHIDEEHSEEQMQWRGAREHVGVEQRKMTLAKDTVKCTVEHLVGVIGHQKIGVMHLQKSKTTIIKWKKQFGISKKRITEEEKKEKMKIYSQIKRENAKMCDNEIAKIVNTII

SEQ ID NO: 131746 - protein, 210 aa, Heterodera glycines
MKLFPLLLLIILFLIVKIGSEKKKLQQQKSFGEIFGEKWEEKEEEKRNELKKREIIGKFNKIKEKIKQKGRKYSTKEWHKIDGKIAKKLGTNRNKIYKWIKELCLYKYKTKTDDDKLEIIQKYITMTNEYKQIRKYSPNEWNKNYAEICKKIGVGYGTICRWKKQFGIRKTEKEKMEKMKIYPKMSDETIAKTMKINRNNFLKWKKQFEE

SEQ ID NO: 131747 - protein, 103 aa, Heterodera glycines
MFPECRLVTADPAAEINANLTRQIGGTFVQAAVGGETATGQPVNFWGKATLNYISTNYRQIIRLEIGNEKDLTMKSGRRLCTEFSQPNSINLSIQNPKNFFLN

SEQ ID NO: 131748 - protein, 65 aa, Heterodera glycines
MKTLRRQQAAAVGQSPIVVHSVGTGLPRNQPIHQRQQVCTVPSHEVIYDVPCTGEDQQEGSEDSF

SEQ ID NO: 131749 - protein, 93 aa, Heterodera glycines
MVKKTIPHFTINNLSPSVPDEVDCEMPDERVLHLECFESGDYGMMELYGPDRAKEMLIDLRDYAEANGMPCQHVKMLLYKLDKGLIKWKGTKP

SEQ ID NO: 131750 - protein, 234 aa, Heterodera glycines
MAINISDKKSLCNQILGQTDITVTSSGITISGPRLSTPRFIPFDEAGRCRCCKGTESEIDTVITKEGITLWCTRIEKAQFIPFDVVYDLPGHCFFRLKNKSRVFNIPYGDIPSSDTHTTKRRTNDQQHELKRKAKVALDLVEAGLMADAMQDGARWKKAKTAINVLGNLLLAESLDNTSANVKNDVADIKKEEEATVAEEHKEDDDDQQKEDLGDIDKTLDDFFNSIKASTANM

SEQ ID NO: 131751 - protein, 227 aa, Heterodera glycines
DVNSLESGPVEDDEEEEEEEEVGRVTSGGCSRIEFSRVSRSWAKNWTRVEGSKAKAETESIRSRQIISDEENSLESGPVEDDEEEEEEEVKIPRRKRTKKKKKKKRLHYDDDYGNYDDEDYDDYDDDEDDIYEDSDYGTYEDDYDSYEDDYDDEPADMEPDYDSEEEEYDYVDEGGGGNNGIGTGVSRPKRCRDTTRETKQMRLYCSDEDYEEDMHQRCPVTCRFCK

SEQ ID NO: 131752 - protein, 120 aa, Heterodera glycines
MATTRPFPDTAHGPHSRDIVPETASTLPTRHFLRSGNDRPSRRKIVPTDPPPHPSIPNKRTSGISNNFFGGLKIFSLFVKANRACEELRMIPTMFDLDDKEKSCSGKACWGQIVTAELNA

SEQ ID NO: 131753 - protein, 49 aa, Heterodera glycines
MKLSGQFLCLRPISSLIRNSSGLRFTLLKKLLSTTNASKSSKDYSERIT

SEQ ID NO: 131754 - protein, 96 aa, Heterodera glycines
MGNIDVGLYASKDAFAKDIQLIRNNAIEYNPDTDMDSKQIRHAANALVDMTEALFSMEMDDDFPTKLEEARKLVEEAKRWTEKMESAEKDDGTRNG

SEQ ID NO: 131755 - protein, 43 aa, Heterodera glycines
MRFWLSRKNKGDDAVNDTDLELEFSNKLDDLENDNKAEGIIGD

SEQ ID NO: 131756 - protein, 31 aa, Heterodera glycines
LVMGLHTCTCGVVVKLSTFHNFSPGFNSPLG

SEQ ID NO: 131757 - protein, 43 aa, Heterodera glycines
YGTERLPISDIFGVGIPTSEIFDEKSEIFLIFFFKKLVSFVQF

SEQ ID NO: 131758 - protein, 268 aa, Heterodera glycines
MSGQIRAKIPLLNRVLIKEIQKIKSKLEEGNFEYDKNNFDDCSRIFNKTKEIIQRIEPNFEKLKILHQKWQNLMRRMNKTEWNSEWKLQKIFREKHNYLKTIKEIDEILDTIKDINLEVKRRLKALKPNSSSESDQENESIDEEQENDDEEAGEEEDEDEKEYDSDQEDESQEMHSSDQTHRNRIPFVHQRSRIKLPAQTLTHFSGKFSQWPSFWDDYKSSVHNDSNMENIQKLKYLRGLLHDEPYRIVSPYPLTSKNYPIIIKLLKS

SEQ ID NO: 131759 - protein, 122 aa, Heterodera glycines
MQVTLKGHKVKAIYDKNICNIVTISLEGCYSCTSGANWTLSCKTNFGTALANVKCPSQKVQVNCDKEGKEQQIQLTYNKQNIIENCEVICPDEIEIVKGKNGKTTINGKNGKIQRDKHKNKF

SEQ ID NO: 131760 - protein, 125 aa, Heterodera glycines
MRKVIGKRFIEFDSFQTLTCEIEALILRPIDFILPHKNLCIPPILENEETKDPTYYPKKTSYDQTIELWKKTTKLLDDYWKIWTDEYIPSLREQLNEIVIIHDQTPRAMWKTGIVKNVITGSDGI

SEQ ID NO: 131761 - protein, 82 aa, Heterodera glycines
VDVSGFRPEEINVEVIGNEIIVNGEHREQNDIIMLFFDDSLPPPTQANRSTVSSRAVCSSRRASKRRASSASWTAVACASAE

SEQ ID NO: 131762 - protein, 287 aa, Heterodera glycines
MIAGLGCAAASGVTNSSSSSSPYYGGVGGDEQPTADSGGVVRMDLGWTTTRHNNRNANNGQHKKQNGEATKTTEQEEREQYSNNEFILLVNLIASRVFYDFCRDNYWCGAVRNKIQTKLATIHSMVFVQIVKVAVALFHRDAGAVQVGPGHHHGPKLCGCTRPTVNEWGIWCDFDIKYDGMIRLVLETRVNLMKLKSVSESSSTATTPSSSCPIISGAGGAIDPTATLTIKNGAVDEQQQQRQRHSCGGCCATSAGGGTAPQTMPTSTTTPLLPRSSCSTYRIAPNR

SEQ ID NO: 131763 - protein, 128 aa, Heterodera glycines
MESFLKVLKESEETLRDLLAQIELDHLVPNSAEKLVELKDGKLIESPSLENIQKQTEQFVNNGQHSQEAIDMAKDALSSMNTIKNGQLFFHLSIENLKIITVEKKQKKMPKILALLSRIKISGKKKKT

SEQ ID NO: 131764 - protein, 442 aa, Heterodera glycines
MSSELNELQSPPRVYLEGLVDAVDERVREAFLNNMMAFNNLFAFASTHGEKAPPEQMGGRLDTCKYNGEFSFLFSDLIAPGVRRPSFAQVYTLTPEDALNVREGALHTAVAPHIRRTIIQRLEALMRANPFGQTFQTIALLTDRHLKGVPLQGRTDITVIERADAPTAKQVAVIWVEEDGLPPQISAFWVSDKAGKMRELKSGMPQIDPCCFPLLHPLGTLGWRWFMKKRGSENAHHEMQQQEEPDLDQISDDELGDEVPIDDIVGTQKNDEEIDEMPELELELDNDVAEEQEEPDMNAVGSSTAQPNPGRNENEDVIFDHEVETRGGRTNISERQFYRYRMALRGSGKNTFHWLWFARRLAEYFTISVLNRIERNDLEHLKAIQVKKNYRQLLAREYIAAMEKGVRQQGPNAKLGRVFLMPQTFAGSRQYYQGKYADLMTM

SEQ ID NO: 131765 - protein, 87 aa, Heterodera glycines
SSTLLLSFCQVDELRGPTAAAIVAVEPNEQQLNTPAQAMVNTARLTFEEAIFPEVPLTALQLLAFVIKARHNCGTFVHCSTNFSKFT

SEQ ID NO: 131766 - protein, 64 aa, Heterodera glycines
SRSASAICLAWNGANGGHSNGSMRTVRNVCPMSAHKGSKEEEKRRRIPLPTSTDSLIWKGLSKN

SEQ ID NO: 131767 - protein, 86 aa, Heterodera glycines
FPSSSASNGLNPLLQERFVFHVRHPELSLLRFHVEDGDFVGPKTDPFIGQAVFPLDSVRCGFRSVPLRNQFSEPLELSALLVHVEM

SEQ ID NO: 131768 - protein, 115 aa, Heterodera glycines
MSAIENDETKSRIWQQLKTKLHSTMVAFGSGSVQLPKLMDTFRHDWGSELTSYAVQLGFGCNDAAVYKMLLTMPDEIESGFISATGTFAFKVIPKAETSENLTKIDQSNQYQEFV

SEQ ID NO: 131769 - protein, 83 aa, Heterodera glycines
HKQIENILRSSRGRLPPNGHPPIVRKISIRSQVQQVVQKEQQVQVVQEDEQSHDLQKPKQSSNAKDESEDIIGQLIEQFKRLK

SEQ ID NO: 131770 - protein, 170 aa, Heterodera glycines
VFVFVPSEQTYRNLLDFALVYGSFDGGDQGLLNAYFSTWRESDATHRLPFTYNVTTVAIYGYAAALKRFAPNIKIIHFLGKQKPWALLYGDGAAGMAFVSDYHKQWYQLYANIVQQLLPPSSSSHGATAIPGRAPAGGGYEAWEAGSPDYLGADSFANIQKAIEKALKGE

SEQ ID NO: 131771 - protein, 82 aa, Heterodera glycines
MKDETVQRIVDLHVGVDMLKILDNYAEGFSGVLKDLSAKNGQATTFNAMFTTAYLNILSSLSNKCYVSIEEGPFGRIGSIII

SEQ ID NO: 131772 - protein, 56 aa, Heterodera glycines
MSELKDAPTHWSGMDENREEEMMREIMTNGPIQISVNAYDDIYNYGESSNRINVYV

SEQ ID NO: 131773 - protein, 100 aa, Heterodera glycines
VGFVCTDVEAALEARLSSAKDNLIRFGDEIYIKLSGDHGQSCTKITVSFSQAARSNSPSNNFVCAVFPTKDSRENLERYGITLWEQIDGIGTLAGKRVKW

SEQ ID NO: 131774 - protein, 238 aa, Heterodera glycines
MMGITKPPLLLSIGFDRIIPAPFHVFQGIGNALIRELEQQEGCVEIAQHFFRRFGARREQFRKRDMTGNSIRKILVHASEMEHLFSTDWPITICRTLAEPLSPNDLDELEERVNDFKSFLSAQERMRGFLSKKPKAHLLLSHFVPFAREHKFLGLLDEQGDEALHSVWRRLEQLWKCMPDADQILQQLEHHFVNNWLLDTGKIDEMKQRQSDQREEHDELDQSEEEIDEISLIISLID

SEQ ID NO: 131775 - protein, 521 aa, Heterodera glycines
MWMRVWSSKIAEFREELYDKKFFGTILGYGESMEFQGRGGPHAHIVAQTDLDAVPYVIQEYIWAHIPSLPDKDDDTPIAKMHREIRETMHMQLHRCSDSWCGPSDPIYGRCKKGFPAPYSKCTILRPDRPAMYFRPSPTDGGAQLEVNGLIYDNSHVVPYNPYILLRYRVHHNVLFAYGNKANIKYALKYPFKGPGHCYVECKEESGNKIKIDEPAQYAKMNFRGATEAYAIVHSMPFARLSHHVVKLAIHLPNQQPIVYRAFQLVSKAQQIQQGELPETQCSAYWKQWQNEWKNDPKFKDILFEKVPERFRWAKDKWVLYKRQQIKRPPIGRIVPVPPSDPERFALYSLMRHFPGDPDHLKMVNGLLCTSFTEAAIMHGLLEDDKIWDKTLAEAALSRWPDQMRWLFVSILVYGQPSNAIELWNKYKDQMYNPQGIITLAQHKVAELEALADIDWRLHSCFNLSCVHFSLPDPPTSIAKNTDAAIEKFFFGDDDLNLPPGQPNPRPQPNTPPPLNSDQQK

SEQ ID NO: 131776 - protein, 36 aa, Heterodera glycines
HPISFVHVVQPKVLFYGGHQLCAAKVGPHSVPVLSS

SEQ ID NO: 131777 - protein, 123 aa, Heterodera glycines
MAELNSVCELEWRIFDFSQTVEGRVRHPKSFAWKILAMAEVLSEYDTVGWVDTSVLFSSDNLEPILTQIQNGKIGPVQLLTRKEDPPQFESKFVILHKTESTRQMMKWLVFILIGAVTNIYWH

SEQ ID NO: 131778 - protein, 245 aa, Heterodera glycines
AKKGRAVPSARFFSVLLLLFFGRTGAKTNAKSIAVGRNFGQFATFTGPTTDGSRTKCTGTDQSKHLMGDSIERGGGSEDNAKESAPPADQSNGIKMENDNSREENGGDEVGDGEEEDNFGETLGQIFMLSKQIAENGVGCAPAKNNGKSHQNAIGTEQQMTENDLPIRFLLNEWMLKGGPSMMTNGEGTAEANAANNAIGIGTDGNAFRHHPSPPAPKRMRWTEENGTATAASQQNGGGDQFDIF

SEQ ID NO: 131779 - protein, 104 aa, Heterodera glycines
MCPVRLELFCSEGPLLMEPFRVDCFHRDELDPLLAEHFWEHGKPLPYLREIQTLRQFKTDYYAVLVAGRTQSQMHYMLDLSSSNNVNIEGELKVNQTVPANTLR

SEQ ID NO: 131780 - protein, 21 aa, Heterodera glycines
MGVVEETRAGRNIGHCENGKE

SEQ ID NO: 131781 - protein, 82 aa, Heterodera glycines
TVCARQKRTLIKWFPAGTDTQSVVHFCDQPTVTIFIILMMLPSTHSVFLSPRHRVDARVRLQFGGHENAEDGVVEAAQRVID

SEQ ID NO: 131782 - protein, 80 aa, Heterodera glycines
MSEFGISIEQILRFWANTMNVFIDDNNLTAVDRMESQNVIDPLFGAWLDQLRVKEIMGLFWERNYGSCCGNKDVLSSEIT

SEQ ID NO: 131783 - protein, 449 aa, Heterodera glycines
MDNCALQYAVENISRYVYDKLGERCAMVSIVLPTVVIYGLILLLGILGNLCTCLVILRNKCMQNPTNYYLFSLAISDLLLLVLGLPMELHGVFGAVYPYKFGEFICKGRAFLIEFTSYAFTSYASILTITCFSVERWLAICFPLRIKIFSTLDRAVKVIVAVWLCAFLAASPVLSIVVVNKLPVPDWATDQPWLPLVSHFLLLANSCQVSSDGQLLIGTETCAMDFMRPFAQAQRNFIFIAFTIFFLLPALLITLVYFHIVYRLCASGDRSLTASAKQKTRSRKSLLKILVPVVVMFFLCWLPFHVQRLLPVVVMFFLCWLPFHVQRLLSVYLNESSNEQYNSAIHTLFSIVFYISGYCYYSYCYYSNSACNPILYNILSAKYRIAFCKTILGERFAHKILSGRNRARILGERFAHKILSGRNRARDSAIAGGNGLNSNLNSKVSTGGS

SEQ ID NO: 131784 - protein, 78 aa, Heterodera glycines
MPDWLRSFGLENILGSMNGTKGTKTAGADDGVAGEDTGNALAQLFGRSGGGSGSSANGGEAGGTENALKRTKFYLYVN

SEQ ID NO: 131785 - protein, 208 aa, Heterodera glycines
GTSKSQYYPILFGLSVNLMIIITTTLKVGKKIGCGNFGELRLGKNLYNNEHVAIKLEPMKSKAPQLHLEYRFYKLLGQTEGLPQVHYFGPCGKYNALVMELLGHSLEDLFDLCDRKFTLKTVCMTAMQLLRRIEYVHLRRIEYVHSKHLIYRDVKPENFLIGRSSTRKQHILHIIDFGLAKEYIDCDTGSHGCYGNPLDYWSRKFFLK

SEQ ID NO: 131786 - protein, 88 aa, Heterodera glycines
GNGQQFLFRKISLFIQRLATVSAQCRADVSHLFCSLTRLVQSLKTECPGADEGMAQCAECRRKTDILYRENKWVLTWIDSLGKMPSGI

SEQ ID NO: 131787 - protein, 88 aa, Heterodera glycines
MAWTSSASAKRPFRSAAMGTPNAFQRTRKYFVARRDTKRRMKYPELFDSDPTTTASDQLSLSQSSHQRSAEEKQRERSGEEAAESAEE

SEQ ID NO: 131788 - protein, 85 aa, Heterodera glycines
  unsure (1)..(85): unsure at all Xaa locations
KVXLKKLRKQKCLDELKKAIIAEGKYVKCVVYKIPEKQQTPYGGQMKSFPHFICCKICRFPDLLTHHQLRPVAQCLHPFNKAQKM

SEQ ID NO: 131789 - protein, 31 aa, Heterodera glycines
MGSKNPTQNLSTGYREAIPEGFGLHINLGAS

SEQ ID NO: 131790 - protein, 86 aa, Heterodera glycines
  unsure (1)..(86): unsure at all Xaa locations
GSYSRRIRSPHKSGRIXSGGLPRKKKIDFFKCPFGVLKQLLGSKNPNAGIKVQGYSESYSRKGFGLPINLGASGSGGLPPKTKKRF

SEQ ID NO: 131791 - protein, 249 aa, Heterodera glycines
MLRKKLTNHKIFIPHSNYLCILQTEGSSVPKAFTFDGVYFIDSTAEQLYNDIVYPLVESVIEGYNGTVFAYGQTGSGKTFSMQGDQQLDAAQRGVIPRAFEHIFEAIATTEHTKFLVHVSYLEIYNEEIRDLLGDKCQKLDVKEHPEQVDLGGGGVYVAGLSLHVCHDVSDCERLMTTGFNNRHVGATLMNKDSSRSHSIFSMYVEALDENGNIRMGKLNLVDLAGSERQAKTGATGERFKGGKPKQIM

SEQ ID NO: 131792 - protein, 454 aa, Heterodera glycines
MITWSVADGFEPMSEFVDWILGFKRFETVAFAHYGGRFDSHFVLKELTERGVETELMMADLKIYQMKARGEQLKVYCENDVEILMEAILKFRQLFLEITDGMDVLKDSVTIAGVVMRIFRTKFLRENHLPIIPEGGYERAENQSKIAVKYFEWLAQSKRECDVKENLKKNREMKRFFDAVPDKGPINPRDAYAGGRTMPFCLYAKATEEVEISMFDIISLYPFVNYDTPYPVGVPKIVVSREFDVNWTVPDDVPYDGLLKVKVIPPKELLYPLLPMHIDNMLLFPNCYTCAKKTKKEFVLAKDVKKCNHRPERRALIGTFTSIELRKSLALGYRVIGFYRAYHFEQFDSQLFKGYVRMFLKIKVEASGWPSEVRNEEEKRAFIEMYKAKYNIWLEYDKMVFNPGLRMIAKLGLNSLWGKFSMRNTLSVTEIVNNLERWTELIKDDTIEFKDRLR

SEQ ID NO: 131793 - protein, 62 aa, Heterodera glycines
MQRSRRDPTPPTSPKRMRAPTPRPIVGLPIPVVEGASNCQSVGAKSTANDPLAKTTMDWETN

SEQ ID NO: 131794 - protein, 157 aa, Heterodera glycines
MDVTLPVSNSAGEWIGEERRDGVVLYAPWTDEWHVQQQQQQQQHQQQQHQQQQQQNEVQQQQQQLVRRTGTGWTRFPAWNEPLVANDWREKEENLIQRKRLQRENPEYWAQILEEEKRAVCCWGREDSGWKFWRRALVNDVGMGLKVLRLTMIGDGI

SEQ ID NO: 131795 - protein, 62 aa, Heterodera glycines
MGATPGEVLEEETEGLEEEDVCKKGKPESADAGPEVEQLKKMLRDSGQMPMDNAPLPLPRWK

SEQ ID NO: 131796 - protein, 76 aa, Heterodera glycines
AAKQSWEDYRKRNDSIIVDLLHGQQNQHQVRAVLLPVRAGADQGAQGPIDDRFYAGREMGKDASMPTRTKKGQLAQ

SEQ ID NO: 131797 - protein, 197 aa, Heterodera glycines
MNSEENFENCQSQEHQQTATTTTPPPSSPVYNNNNNDDGGIDDNGGTTTAAGTVGGNSSELLADTSDIGDDNGTTMATVGSSSGSSNEMVSNHGGGGDDEFSRDSGGGAGGGGDDFVGAPLDEEGNMYGPWPKEAYEGEENRLSFDGGKRVKTYDRENVYMRMEDNNNAAAGMASSSSTSRNSAPRPYSTRYSQAML

SEQ ID NO: 131798 - protein, 97 aa, Heterodera glycines
TVEAGVNKTGQFRMGYILFIPSNSCTELICWPHTLLFKFELGIKADDDRRQCCKVQRRSWPRPPISSCAWRRAWMTFGNAFAPHPFAHNQRQQVRQH

SEQ ID NO: 131799 - protein, 20 aa, Heterodera glycines
ENIDHSPQTQKCLKTVRIDV

SEQ ID NO: 131800 - protein, 31 aa, Heterodera glycines
FLLHINQQIMTSSNLRNSLKSACETRWCQGY

SEQ ID NO: 131801 - protein, 329 aa, Heterodera glycines
LINDRWQVKISYFGLRWLKNVQKIETKDFLWLSPEFLWLSPEQLRKMGDNTNNNNNDQQIDGSKQPDIYTLALIFTEMVNMCPCWEENGANEHGENVRRAADEHAAAAAAVFNRRRETAQQHAARQPRERNAEEIAYLVKRGGTVPLRPTIRPALDELKPELLHLIRDCWVEAPNERPTIEKVRQKLRQMNAGRSINLMDHVFGMLEQYANKLEEDVHERTRELEEEKRKSEILLYRMMPRQVADRLKLGQSVEPEHFECVTVFFSDIVKFAELSNQMRPLQVVNLMNELYTIFDAIIDEHDMYKVESIGENFFKIKNRQMKCLNFGAR

SEQ ID NO: 131802 - protein, 87 aa, Heterodera glycines
QIDNLSIKKRHGNMLIDCKKNKIPNFQKQIPNFQWFIVSSLFSQMVAAPLSKWNSLRRFFLWLMKPTITMIMSRTVGTAKRMSTKRR

SEQ ID NO: 131803 - protein, 61 aa, Heterodera glycines
MGQKSRNMDIKLHKYGHKFFQIKGDFVRFLASLLLPGDRSDAQCGDEGEAAAIGHFERIGH

SEQ ID NO: 131804 - protein, 76 aa, Heterodera glycines
RRGTAWEHKKPEMDEIQEFNEKLMKKFRLNTREKLAIPHQIQKPPKCFPLKLHFCLFLYAPRILGKILQRKAAKNR

SEQ ID NO: 131805 - protein, 74 aa, Heterodera glycines
MAKTDDGTKHSETKKILTANFYTKWSENEAKDRKFHWKLLITCSKMPTPTTKPKFGSAVSEFKRWPMQMPSTRR

SEQ ID NO: 131806 - protein, 128 aa, Heterodera glycines
MVKALVQMKEDISIVMKQWIGAMKRQMLANGGAKYDISVDNLLNIVESLVDIIEAKHKNVSRHRHISNLTFSVAFFRQVIGHCSPPLTLENIPIRSKRLQIICEAIRNFCNSAIYELSQFLCLYGRRK

SEQ ID NO: 131807 - protein, 41 aa, Heterodera glycines
MRKGLWKNSHRQLMKEWHRKEEGEEAEGEDEQKAGRPARVG

SEQ ID NO: 131808 - protein, 44 aa, Heterodera glycines
MLNQQNKEVKVAMVLFSLIHLFAAAFDSPQCNLGLKLFSIEGGK

SEQ ID NO: 131809 - protein, 100 aa, Heterodera glycines
PISSLFAGAALFCRGLSYRNRAFFSNAALRDEKETKCHWSEEIETVVDRPNMRFERVLGKTEYYRNLGAVRNGRSSIKLRVEVCRYTSERTFCERNVCQN

SEQ ID NO: 131810 - protein, 67 aa, Heterodera glycines
MGKSDAKTSEKEDKREGGEGEQSAKKMKQTEPIQPTLNHEATIGPQHLAIRRIRYPQMMEQRTGKFN

SEQ ID NO: 131811 - protein, 54 aa, Heterodera glycines
MANLDNFENNTFYLTFKDAHPSLSLIGCATIFGITASFGILFHFSVIFVTIKTK

SEQ ID NO: 131812 - protein, 249 aa, Heterodera glycines
MSDDDDDMRAQKGTLIIDPKSPSPIATPPVPAVKPLTTTTTTTPTPPAVKPVTTTTPAPQSSAKPSAQQQKPTPVLPKPSAPQTSEPKIATTTTPGPPKTAITKPTTLPPPSSPPTVPLQRKPTTTTTPQTSTPTTTATPTPTQPITTVHTPKNTKTTTTTPIPQTTTKTTTQVSPTPKIPSPKPPAVKLPPPTSTTHPPQPEPTTTTTAPTKTFTSSPTTGAVIGLPSKEKQIPTVDEPVSAALTLER

SEQ ID NO: 131813 - protein, 138 aa, Heterodera glycines
MAKGKRKWHASDEQLAGNYFVPSPQSLHLSPPRPSAAVTVEEQAIIIPSNNIQPSAKAAHYTIFNLYFPKNPKFNVFRSDKELGASSAAEEIDTISDLLEMSKANRPAEKSEKASAGGGKDLVVDEIADLLIDAIKDL

SEQ ID NO: 131814 - protein, 120 aa, Heterodera glycines
MAWKAGMPDCRRLLPLPIAKMNRRWICGDVWMDILPSFDHAQLGLKMALLSDRFDILVDKHFDGKTTKLTIRRTIELKRRKGQKRKYMPMVIVCNFRSTTVRCPTKSALITFGLSNSNIL

SEQ ID NO: 131815 - protein, 122 aa, Heterodera glycines
MCRVQEWERLNAISEQSVDTELASRFKRSAKIDQYQAQKDGLIEIDLHITSNEESENKCLRACMENDGCATFKRNENSEIVEEWNKLRNLVLTICVNKMLIPVLRRESHENLIEEAKEFVIM

SEQ ID NO: 131816 - protein, 132 aa, Heterodera glycines
MGLIMSRSRSRYRSRPSAPLAKPAIEMPLAIPPLPKKDHKTSTEAGNSAGFIEDSWMAEVVTNCEQRAADGQFKANATIEKEVVDDLPVTPNDNGKYLDKEVVDDLPVKPKDNGKSHYVLTTIPEEEEKEKE

SEQ ID NO: 131817 - protein, 139 aa, Heterodera glycines
MPPNNRRFKGIPKKRHQIGGVAHWSAAHHRSDSRTFFIKHHQKQHQKRQIMLLQQQQQIHKKEMEIMQQKQIESLQKVKHLGKLYIEALHQHLRVCAEHQQKQQQFHEHSFTTTEELGEAFSQMAVNADGGLMWYFVVF

SEQ ID NO: 131818 - protein, 92 aa, Heterodera glycines
MSEQFVQHQRPEDGVKEAKKPRVDDRFLWKITRGQFMLAIRLCSDDWDKLFHNKEKVRRLDIGRVGVGFKMCEKWCKINWITNERCQKTKEG

SEQ ID NO: 131819 - protein, 176 aa, Heterodera glycines
MVLVIEFCAQILGCSPKSLRDKLNHPEDRVKALKELIGKKVRTTYKDRNGMQKTFFIDGISDQGAALTPTYGRLRQPYNINIAAHFYARHRIKLHLPYVPCVVEKFSGSGEDRYYPMELIEIVDDDYKERWLGKLFTEIEDDSIHVKRFGRIEEAEEIDDNNDGRDECSQSAYIYW

SEQ ID NO: 131820 - protein, 102 aa, Heterodera glycines
MGFKLRRNGQEEFVLKLRGITLNYDVMQNQSLCYDTFKEEVLRYAETGEYEPINVIYPNFLRPDIRGGGHVTSGPLQKCYRRYVGKGIVGPNYNVLNFGHTL

SEQ ID NO: 131821 - protein, 49 aa, Heterodera glycines
MTQARKSIAIGNLFGLLLDFATSSPTPWVMKRPICCGIFYRQHMPLSAI

SEQ ID NO: 131822 - protein, 23 aa, Heterodera glycines
MDIKPTTGQFQRSKPTFETDHFE

SEQ ID NO: 131823 - protein, 67 aa, Heterodera glycines
MLILVLFFIILICVLFQQVDYNNLQYSFLKHNNRICELVASAAGSPYNFRALHLVLFEVKQLSPEFR

SEQ ID NO: 131824 - protein, 78 aa, Heterodera glycines
MRIDKQFLIIRIRQEQCHKNIKEQRNNEKQKLNGEWSIGISETKKERSTKHQRTQQHFDRSNINHKSADFLSQISPSV

SEQ ID NO: 131825 - protein, 139 aa, Heterodera glycines
MNELSTLAWYPAAEFLEFERINKAYSFNVPAFSVDTSTTDGPKYTQIMNALSEQLQQHVAKANLLISLNEKIPQFDVEVEKPIPGQKVTKLNDLHALWVLIDMQLDDIRSIFNSIEQFRLRCWAVAEPKAAATAASSGN

SEQ ID NO: 131826 - protein, 34 aa, Heterodera glycines
MMRGRREGKGRARHSGGNGGGRAEQANVEGGGGG

SEQ ID NO: 131827 - protein, 93 aa, Heterodera glycines
MAMALVAMALVAMALVAMALVAMALVAMALVAMALVAMALVAMALVAMALVAMALVAMALVAMALVVMALVAMALVAMALVAMDMVAMATAVE

SEQ ID NO: 131828 - protein, 104 aa, Heterodera glycines
MSNKQQKNANFGQRWQLESNTSGSDSKTFLWGQPPDFGFTAKTRNDLVGPLPPSQGVSPSKKKPSSKSRVDAFRPPWEDSSEEEKEGTATEGKGTEEKRWDMEE

SEQ ID NO: 131829 - protein, 118 aa, Heterodera glycines
DHPDLAAAFRIASETYSHGYNTANASKALDRFVKRKLLCVEQMQCLAKEAPTAWNSTVQICRKFITVPSIGVQNTKFEGHGATLKEAVDNCDLAILYELFDFDVIKEANVEINNMQRK

SEQ ID NO: 131830 - protein, 125 aa, Heterodera glycines
FVQLHLIFGEYQKVIGHPIEQAIQQQFSGDTRDGYLAVVECVHNRHAFFAKVLQNSTKSFLGIGRRDSDLIRLIVTRAECDMVEIKEQFMQEQFMQMFNTPLEKAIESNCSGPYKDGLLTLVKGN

SEQ ID NO: 131831 - protein, 547 aa, Heterodera glycines
MDKTLADILEKLTQAIKQQKAPSTTQTAQNITLPDIQTFSPNSAEEFEEWLERFQFALDCAASNLDDEQKVKLLMTKLSPTAFSEYKRFCLPDEITKFNFADTKSRLLKLFSHPPSLAIDRYECLKACRDDGEEFGAFVNRLKALLRKFRYSELNEEQFKCLVLLTSLKSSSDAKLRQHILARLTVEDAKVNKTAKLFDSVVDDLNTVLKTEAEAKFLEQPKLKINAVQHTKSSPTKQQNQTNFSRSHKISSTSKRKNPPNNCFRCGELHWAQNCPKKNNVCRKCQRSGHIERQCDKIQAYHKNKRSQNPKVNIVMLPDTFINSVQSAGLMNAPILMNDKSIDFVLDSGTEIIVVTNQTYNDIGRPPIQACQEEGRFFDGTRCKFLGRGVANFQFNGIRTELPYYVAKSGTINLLGLTALDRFGFLEEMKRLIGTKNINQIWSTDSTKIRDTIANFENKYKQIFSEGLGLCTKMKGQLMLKSGANPIFKRARPVPYATLPTINAEMDRLEKLKVITPVDHTDWSAPILVVKKANENSKIMRRFFHRA

SEQ ID NO: 131832 - protein, 43 aa, Heterodera glycines
MWKTFLITYLCDQFDYGFLCSHTYMCMYSHKIERKKENRKAEN

SEQ ID NO: 131833 - protein, 46 aa, Heterodera glycines
MTRQKQRKKGPTNARINNGTNQRKAKGKADITERRTDKRTKIGRRT

SEQ ID NO: 131834 - protein, 109 aa, Heterodera glycines
MPKVVLVVDEGYFHAVHHNQLRPLTELEIGTDGQGRGWSAEVQHFVSESLRKVAMRSDCRVELLLQKGGSWQYAEGGKIPTCTAKLLIDGADFAAQMALMGIGHSKAME

SEQ ID NO: 131835 - protein, 95 aa, Heterodera glycines
LFEYPKRTLEKIDFFVFGAVPPNRCAQIYGETESFGNSFPIACTLILRWIFAPHKCLSTPNGHLKKSIFLFSGQSPRTDAPRFMGRPNPSGIASL

SEQ ID NO: 131836 - protein, 322 aa, Heterodera glycines
MEFIVKAMPIVTLNSMDEAELSKKKLSLPSRPRQPDILLGMDVRHDLKIRDETEKLPSGFTLSTSRVGRMISGYGQVQGPMDMSVQVTYTGALISALQCANSRRDADEEIEEQIKTFFGLNIIGLSDNPEEEDKGEVMRTFRKGLTFKEGRYECGLPWNERVKDLPTNFQQARARLCGTVKKLRELNLVEEYQKIFNEWERNGIIERVPDPTQTTGPVHYLPHRPVIKMDKATTKIRIVMDASAKPANRKGAPSLNECLHTGPLLLNELTGILLRWRRMKDLILADIEKAFLQLSVREEDRDATRFLWLEDPQKTEISSPTY

SEQ ID NO: 131837 - protein, 223 aa, Heterodera glycines
MITGAAQMEGTILVVAITDGPMPQTREHLLLARQCGIPQENICVFLNKVDEVSDAETRELVEMEVRELLNEFGYPGDTAPIIAGSALCALEGTKPELGEESVKQLLDTIDNFSIPKRTKEDEPWMPAEKVYTIKGLETFRKTVDQAEPGDQLVACGVFLEALPESEGEIRDKKWRKMQMRGVMERVGFNPFGNRSFERACKPDYTNSPKDNPAEALFKAEAKA

SEQ ID NO: 131838 - protein, 85 aa, Heterodera glycines
MKLLIFDDYEAMSAFGAQLVARRINNALEQRKVTAGAANVPNGRSLYSVGLPTGGTPLGLYCKLTEMHKAGQVSFANVVTFNMDE

SEQ ID NO: 131839 - protein, 109 aa, Heterodera glycines
MCWSTNICLDKALWRVIVAKNINPHTDGPAFYPLISTISLGSHTVLDFYDQGLLFETFYRLERHFYLFRIALVPLRLFSSVIKQSDDSVPVENGHFSMRLFTAKWQARA

SEQ ID NO: 131840 - protein, 37 aa, Heterodera glycines
MAAKAPLFCYLFAWFCAIIVAAPYGAAVSVEDATILD

SEQ ID NO: 131841 - protein, 224 aa, Heterodera glycines
LYRHLISEIWRHGVDVSESEVRALCMLSRDLLLSQPTMLELSAPLKIVGDIHGQFSDLLRLFHACGFPPKSNYLFLGDYVDRGPRSLETIILLLCYKIKYPVNFFLLRGLETIILLLCYKIKYPVNFFLLRGNHEVASLNRIYGFYNECKTRMNIKTRMNIRVWKAFQDVFNCLPVAALINGKIFCRVWKAFQDVFNCLPVAALINGKIFCCHGGLSPHLRTLE

SEQ ID NO: 131842 - protein, 146 aa, Heterodera glycines
AIGRQLITDFHPAVKNVASASQNLLRSFQSLSHHFYEYTAALYALGFSGINSDEFEVREQSKTLQTVTEVLKKVHSEQIDWMDYFTAMALTINQNSKTEKERLKALISGFSERERQLSKAIHRGKQMPDTRSNFYETELEAMRDQQ

SEQ ID NO: 131843 - protein, 405 aa, Heterodera glycines
MMDVPNSFNTSPGFFENLAQSLLDLKIQDNRNYKNEEPRSGAMNALTHIKPKTTAMDCQVENELAKGSSSESPACGPETKTNIPKTSNWERPSVRSKVASLMFITLMLVGMILPFTTANMPHLPMHPLVCQTQNGGKIWQLPAVTGCSKLSIDHSKAPVVRTFDVFSPNLFEHSADAWACRKVRKSVRKYTSITNVPIQETLEPLMLQMTPSECKQMAENGKCSLGLLINDSGLSHTDKKLDFSPRMWLIGSFSWSTVSTENCYLFKTKIMSQHGSTVMQSPLGLVNNCEFKAGQCEMEDKTLLMWDTNTTRACEFSKIGTWKGLQLDNIWISDEVSFRLTFLNNTKKVNSCGLNLIKSEEGFAVQDLPSDDSNESSKRSRKTRSLESWVTESEMNSKLGYLDEQ

SEQ ID NO: 131844 - protein, 204 aa, Heterodera glycines
MLQMTPSECKQMAENGKCSLGLLINDSGLSHTDKKLDFSPRMWLIGSFSWSTVSTENCYLFKTKIMSQHGSTVMQSPLGLVNNCEFKAGQCEMEDKTLLMWDTNTTRACEFSKIGTWKGLQLDNIWISDEVSFRLTFLNNTKKVNSCGLNLIKSEEGFAVQDLPSDDSNESSKRSRKTRSLESWVTESEMNSKLGYLDEQVREM

SEQ ID NO: 131845 - protein, 45 aa, Heterodera glycines
MPMVVNFGRTGDAQRTGQVGGRRSMPPSVVPANLGGVPPYQETTK

SEQ ID NO: 131846 - protein, 152 aa, Heterodera glycines
PTGVLTIEEVNSVYQHYSHPKLSDATGLIKLKFPTHQRYKNEGTIEMEIEKVSEFAVEEVGSGRFSDAMDIGRFPWKIMAQIETKNESNEKWLGFYLSNDGLENGSFKIFFIYFVYRKSNSSLIRYWISKFLAGTYSTDGKIIFKNNLSKKD

SEQ ID NO: 131847 - protein, 75 aa, Heterodera glycines
MIGRAVRNRPFIFEGIFKFILYPRKMAISFFEKFYTSQKRLRMRRRAVHNRHFISQRIFIFRGYPRKMAISFFEK

SEQ ID NO: 131848 - protein, 108 aa, Heterodera glycines
CIGQFAKLLTRIDGMEAQINGLKEKDEEGSLSSSVPAAVEDDDIGEHSDSTRQQTEGHNQNFEFGQRQFVDYTGYASPTSAASSVKSSPKKTAEEEGQQQSSSSSKRH

SEQ ID NO: 131849 - protein, 41 aa, Heterodera glycines
MKFLLFYEFSFYHKEFMDNKGVFIYAEWLVCMIMDTHLENL

SEQ ID NO: 131850 - protein, 114 aa, Heterodera glycines
MPTPFRLLLRHLALCVSEWEEVLYMAFLAIQGMFIDLNSGRRRPITKEKQRRRLRHGFCPSSASLSDEAATENQQKEVGHGTEAAEEEHVEEEEETEHQLFMISSSSSSEEEDF

SEQ ID NO: 131851 - protein, 116 aa, Heterodera glycines; identical to SEQ ID NO: 127487

SEQ ID NO: 131852 - protein, 94 aa, Heterodera glycines
IDFFKCPFGVLKQLWGAKIQGKNKVEVYRSYSRRIRTPYKSGRIGSGGLPRKPKKIDFFKCPFGVLKHLWGAKLQRRIKVQTIGKLFPKDSVSP

SEQ ID NO: 131853 - protein, 156 aa, Heterodera glycines
MNFKKRFLLQHFLTILCHLFWHLNLAQHFAQKTACLSQTLVAPKTKAPFVGPTKFHRTTPRAVPKTTFGIVPKTEETFGFVPFARNVDHFGTNCTNIFFPAEVDKFLLNITARPYEIACNDYEKRAKIDEPIPSDYWSGGRLVNACMAVPSEKCEK

SEQ ID NO: 131854 - protein, 304 aa, Heterodera glycines
PCDIYGADCVPIRNFMSVVAGHELMHALGFVHEQSRSDTRNYVILRKNIIFHLLIIKYSKIDQYTQNFGFPYDFGLRKNIIFHLLIIKYSKIDQYTQNFGFPYDFGSVMHYESGGNHKKYERYDLITLPRFYYDLITLPRFYQQTIGQRERISFKDAAIINQIYCKDSCKGHEDKCQNGGYLNPNDCTIYCKDSCKGHEDKCQNGGYLNPNDCTKCHCPDGYGGKYCKELEESEQLMNSTIKAIINKFEDLNCEDLSGIPRELVANQSAVLLKTKAKCVGTIFIQFLYIKCTEILKKFSRRRLS

SEQ ID NO: 131855 - protein, 199 aa, Heterodera glycines
MDRIYQGSHGITTISDRHSWGNAKLINSNKCVNTDNLYAEKRNPGTSGLKCYDGVKHQFYDCSCHGDKKCLAEEKWAHDAFLCPIIKVNGIQIQGSRQQVFTDPKDFRYDWTRIEIDCYKAEASTVSFWGYSKPYTKEIIRVDEIHCLTYKAAGVTPPSQKRFKSLQVEEQLSMKLNPSTLLDNASSLIHVFVPFVGHP

SEQ ID NO: 131856 - protein, 333 aa, Heterodera glycines
LKIFKNFIHLPFFVVGLRPRWALILSNYEFDIRYINTTAFGQVDMLSRLIANYPRPEEDILIAKICTESFIGTILQARINHLPVTATEIAEMTEKDEILQKVAKFSKEGWSQKCNPDLAPFFPKRNEILQIENCLLYQNRVIIPTILRDRTLKALHMAHPGIVRMKALARQHVYWPGMDSAIEKLVKSCEECQIAQKAAPKAPLSPWNATKRPFERVHIDFAGPCQDGHVYLLLVDSFSKWPEVYQMNTMTSKATISVLRLIIHRLGIPEEIVSDNGRQFRSSEFSEFCKEFGIRHMFTPPFHPQNQVERFVDTFKRAMQNEKDKNGLRNAPV

SEQ ID NO: 131857 - protein, 101 aa, Heterodera glycines
MMEEALSEMETMLNEYREENSALKGQLVERREGTEKNLLARKVQEIQRGIGEGAEQIEEMSGESDMEEQMGRKVSELEQELRVAKEVSLKMHNELEVAEEK

SEQ ID NO: 131858 - protein, 29 aa, Heterodera glycines
MDPEKARQHIPEPAIFTYASKDAILYALG

SEQ ID NO: 131859 - protein, 464 aa, Heterodera glycines
MIAEVERLLTRKRSAPVHASFGNIDDDDEEEGEILDVSFVEEEEDNMGEAPLNPLSYLTKQSAAQQETLRHEKWAQEERKRREEEQRKQRENERRRREEEEMRRKTEKDRRKTAEKAAKEKKAKEEKEASEKKAREEKLAREKKEEQRIAKEKKGEKETKDKKAEEERVAKERKAEEERVAKAEAERVAMVTKAEEERAAKAEAERAENETKKKQAEEKQLEELKRQQQLHETDDYHFVNAVHKYRVRHSELPWEAPEFNPSAHIQQNIGEFRELFEQEVYDENYAVKTREEKEELIELVKGFRFYFTEQIGRFELKVFNGKISHITLTDQLAYVLGYEQEQQIRNEELAKYAVDLGGGVSHLCIYLNSGVIESMIVGNTFANLLQVIAVEGKSGSVVEKDFQAPLFHKIIAREVDVLDVEIRTLTGRLGSSAGQLFLITYLREVPFEFGQVVLTLQFKKVLTF

SEQ ID NO: 131860 - protein, 41 aa, Heterodera glycines
MKKAKAMEAEVDESPKKQPTNVFEYPTIFWKLARPKVLANI

SEQ ID NO: 131861 - protein, 355 aa, Heterodera glycines
MDKKINKIYTDPANPGGYAGASALYAAVKEKHPKLKRAEFEDFLQRNTTYTLFKPKREKFQRLRTVPTGFMTDVQADLADFQALSRKNSGYRYLLLAVDVLSRRMFGAPVKSKRPADMKRAFEELFEQMPRVPDTLYTDRGLEFVAKPLKEFYAEKGIQKFETSSKKKADVAERAIRTLKTRLYKYFSANNTSVWVDVVPKFLSAINNSVCRATVLRPNEISDANAREVWKRVYGEGLAQLDKTPKIRAGETVRIPEPKHIFEKGYIPNYSDHVYTVDVARSTNPQHYLLKDYYGTKFKRKFYLPELTKVQVDENTMYRIEKKYKERVRDGKSEILVKFIGFPEKYWVTNEEINE

SEQ ID NO: 131862 - protein, 432 aa, Heterodera glycines
MDHPRINESELAFPIPSGIIVSGPSSSGKTQLVLRLLRHANVMFDPPPKAIGMCKGRFCAVGCCYLVWAYGEYSTQIPDLERQGVAPHAGAPSDEMLKKLPKPCLIVYDDLMGDIEAKKLADLYTKKSHHNNFSVIFLTQNLFDKSMRVPRSNAQYIFLMRAPNDMLSIRNLASQMFPREQGFLMDAYRQACALPYGYLLTTRRESFLPPKMVKREQKIGERVVHNYDYLKKLGKTTSEKKRRHLLNSAGCEELLTLVEICLNVLNGSFCLSRKQKQRLAPFAKDIRQLARVRSESAKETKNDDDDDIAERTNLGFVKRQVTAAVQKRKENVSERNAMYNQYLRRYLKMRKEHKERPVRVQLSNGAQLLNKTVETGVQVRPGPDEPKDKSVMVTDEDEEEEIEVPKFLTPTSQTQGSSRSPRTNKKAANSKN

SEQ ID NO: 131863 - protein, 208 aa, Heterodera glycines
MNKKGRLIESKEKSGKIYKSHSFFKMELLSKEEEESLKRLKRKLEHQLLRVQQSVTESEKWKSGTSDDDPVRPQEWEENEEETTKKGEEMKKKEEEEKKGREGKEKETEKKKEEMKQKDETETKRSLSVGTTKDDEISIVDSEERERDAFEKPPKPTNERMAFWESTLNNEAKKDLREDKEKALKNTGQGIVVSSRKRTVNEAANFVK

SEQ ID NO: 131864 - protein, 92 aa, Heterodera glycines
MWHKTALAQQRVVYNGEMGDRQQQQQQQRRNGERDETTTHRKERKATEEFSPLINFSQFEANPKKKSAEETKSRTDEEEEGTAQRAGWGNDE

SEQ ID NO: 131865 - protein, 60 aa, Heterodera glycines
MTTELPRTTTIPMLCDSPVLKQDILKCFPTVLKWTKRINSWARFSDQKGFYPNACQKIGY

SEQ ID NO: 131866 - protein, 26 aa, Heterodera glycines
TGESQSIGMVVVRGNSVVIMEPMERI

SEQ ID NO: 131867 - protein, 104 aa, Heterodera glycines
MSHNPKEAKKEMEKAIFISADCWLEVFRLLPPFQLGLGIAMISRRFDYFVDEHFKTRKWTLGKFKIGPNGTKEMKIVNSDEKELPIPQIPLPKKVIGFGFIEIT

SEQ ID NO: 131868 - protein, 57 aa, Heterodera glycines
MEHILSASRRVGGPRKTGFARDESLGSSLQKLWWSINGDFLIEAFLGAQYYRMLLYT

SEQ ID NO: 131869 - protein, 399 aa, Heterodera glycines
MSGPIQKGIINALKALDNAKSATSLLLHPDPDLSNWENAVNLEAQFDRVVKEIRTMEMQMDSLRDSSNAWIELLAHLTGDDKDNGEKEYIKFDKNEKIAERYDAASTKLRDLRDLEATLSAAAKLHRGRADREAKADQLANPQQQPPMPPAMAAPMTMPTFTAPLYQFQPIQLEKFFGQKRKWPEFYESFKSAIGSQSISKAQKLNLLRNLLGGEARELIAGFRLEDANYETVLQLLKDTYGAPEEHIRSLHFELANLKPCRSLRETKDFLLQLERLTRELNNAGEDIEGPQVFLMLEKKLTPAFLRSILNKKGEDPANWTTTKFRDVLNEAVRKEVQIQEVMGEYGHHYVQPKAEVVSAAPVQAPRTPNQRSRRPNQPMALRDMTFIASSLDEGHRHQ

SEQ ID NO: 131870 - protein, 502 aa, Heterodera glycines
YIHPRTGEAIDLASAANQGLVDVTLAETLPNGVVHPGTGEKVSVRRAVEAGIVDSRTGEVRHPFTGERLSWVDLTRKVYSAITQNGVYDPRKGYAVSVASAFADGLIDTRAVAYLNPITQEQLSLEEAHQRGIIDAQTFNSLTTPALLDHRTHRRLNLVQAVDARLIDPRAKTVQLSPDRVVPVKQAVDEGALPRDVGEQLQRVDKLTFVEAVSRGLIDAAQGTFTDAESGRQMSIADAVSHGLIDTGSISGPDTDGAEAATNLARIIQSEEFDERSGRVQDPQTRLYLPFGAAVNQRLVDPDSLLHDLDSSKTMTLREALSMDLIDSHGRYVPKHAKGAVGAQTVPLKEAVQRGLIALIGSPMQAALAVSEALKRRDVEGYKFRLEPLDDSTLQRMSSAGYDTLSGTSGATGRPRGYEETVVRTRRAPEPSLSVRVRSSDGSDSLLRGSRARSDVDPLALVDFQTDFLKLLQAQGFDVDEKCVENPSTMRLMSIREAVESG

SEQ ID NO: 131871 - protein, 96 aa, Heterodera glycines
MGFSDCVLPSHFSHTIENFNVHLIVHIQLSSASSTQFDVSKNQLMQTSPNASPGYNAINNNPANQNDHNYHANVNVNPDNINHLLVGVSRNYEMCP

SEQ ID NO: 131872 - protein, 122 aa, Heterodera glycines
MPVLQNGNEREEAKFAYELDKTFLDDKNAEKVAKMLNGQTLKVGGRMGEENSGQSSRHMPRDMAHFDDHLGSGGIAVEEQMNNYYPSDYSFAHLWEYLNSNNLSQQMPRGRRKKRVIKKAIN

SEQ ID NO: 131873 - protein, 43 aa, Heterodera glycines
MEEDGLKLELNKLGMKRVRQTEPTLRMEMVEMHFAHRNCFKKW

SEQ ID NO: 131874 - protein, 69 aa, Heterodera glycines
MNRKKIEILQKCRKRKFLNNNDGENATTSEQCEHNDNNNDRDEDFGEEHAIIKFELGKTQKGGNCLWSE

SEQ ID NO: 131875 - protein, 184 aa, Heterodera glycines
MRAFSSPSWPISCPIFLLLIVLQNSLLINAFFGWGGCEDETQIGVAQIIGQKQQQKENQEKQQQEQEEKQNQEKQQQEKQQKEQQEKQNQEKQNQEKQQKEQQEKQNQEKQNQEKQNQEKQNQEKQQKEQQEKQNQEKQQQEQEEKQNQEKQQQEQQQQQQEHTDTQYFGNSDSQHRNTTNTSA

SEQ ID NO: 131876 - protein, 133 aa, Heterodera glycines
DLNYNMRTLTDLYMIIFILSIALPIFTRGNGPVNALGNGIIDVRANTDQNAPANALGNGPANALGNGIIDVRGNDGMPIEMAHDNVTIIKLSANTDQNAPANALGNGPANALGNGIIDARGNGWMPVEMTMLQ

SEQ ID NO: 131877 - protein, 276 aa, Heterodera glycines
MSTFDEKHERSEPTVLLDALQTGGTDSTVDLMDAAAQGIVSREKRAETSQIPLREKMDDKDTYQNKLDNYFSTLKGEDLELLDELGRNKLNDEIANMFDEDRTILDATKELGLEAWIQAYKKVDWSTLSPSSAELVQFGGFNIFRGVPYQRGAGVGAVFRSLMRYLLPIGKQIGTALGRQGLESGNRVLTNVLDGKDLKESLVNESKSGLKNLLEKAANNIEAQKGQGFDFKRYKSEQMPKIARARHKPINKMHSSISPPMLGKKKRVRVDSLGPY

SEQ ID NO: 131878 - protein, 643 aa, Heterodera glycines
MHHTKRYVLVPEEIYQSLTATSGASQDGSPMGLVRARMDQLKNDDTINEEEKSIRYEQEFKRLNKLKRDEEERPVDVRLQNLREIADAAAPALPTTTASLAGPVVQMTQQQQQQQQKQQQAKRKPTSAFRRTMVGRHLQQQQRQRRRLIVNKRGGGGDDDDESAGDEQPKTRVDDDDDDDDDEFWEDASPRVLRSAQQTASASTTKSHANYTLTKQGVMALIRRNADALGVSGEGKIKRADGRPLKTSNVERIVAHLLNRDSRSEYKDPPVGLREFTERAQQNAQLSKYLFTKHQFGKGKKHKKSTALKFKPKLCRKDVQNFLSTQRTYTLHRQAKRRYRHLPTLAPGLHTEWQADLAIFDRLGKQNAGFRYLLVCIDTLSRQLFVEPVKSKTSASMIKAFDAVLKRAKYVPWKLLTDQGREFTARAVQEYFRAKAIEHFCMFTSPQFHAGMAERANRSIKERLYRYFTERDTYKWVDVVQDFVRAINHSYNSSLGARPVDVNFKNAESFRQMLYDKAKKMVKGVQKFKVGDRVRIEKYKHVFQKGYLPRFTNELFTVAEVHADRSPIVYRLRDDHNETLKGWFYANDLCKTLKNKERMYDIERVLRRKKGKDGVEYGFVKWRGYSTRFNSWIPLNSITSKNI

SEQ ID NO: 131879 - protein, 112 aa, Heterodera glycines
MDIIRATDWICCNANANANSTLATNTTEMDQQDDNNKPSTPPPETAAMATAVVVDPKGDEEEEEEINWLRLIDEVEQQEQQQEPNKEEEEEQHNGEEKAAQSTGGGGDGYFF

SEQ ID NO: 131880 - protein, 135 aa, Heterodera glycines
MKELTLATYNIDGPIDDLIDNDDLYVYGSGGGGEHRAIRVTFPQIGRSVHADLYTHEAHKDYRPFYAKGRVRPGMQTRPFGYQEEQQQQQQQQAPQQQQTQAQPMMMMEELEMMTMMIPKQNPDPTQPGHSGWFR

SEQ ID NO: 131881 - protein, 329 aa, Heterodera glycines
MAPNPGLRLIAKTLANSLWGKLAQRVGGTEVRYTRTPAEFHRLLEDPSLDKLDFVHVSDRMDRCVVRKRPEFAKAPPTNCLPVAIYVTSYARLHLYGYMEQVLALDGSELLYCDTDSIYYVNRMGGGQCVREGEALGQMKRERTDRRIVEFVAGGPKNYGIRHTARDGSDERANLKVRSFRLSYSAEQLLNFDAMKELTLATYNIDGPIDDLIDNDDLYVYGSVGGGEHRAIRVTFPQIGRSVHADLYTHEAHKDYRPFYAKGRVRPGMQTRPFGYQEEQQQQQQQQAPQQQQTQAQPMMMMEELEMMTMMIPRQNPDPTQPGHSGWFR

SEQ ID NO: 131882 - protein, 63 aa, Heterodera glycines
MGAPKCATVIVTAHPLDGHRAKGRLPTPKAVHPIPAVLNVRLSNGPARTLHLRHPDALAQRKR

SEQ ID NO: 131883 - protein, 179 aa, Heterodera glycines
MKEEANDQKKRETIQKFEAIKEKLKQKGKYEWKNSVKIECKIAKLLGVNRDKIYKWKKELNLNKTKKKSFYEAKKQEFIERIDELKSLYGQRKQKEFAKELGISKDTFFKWKKELMANYHKSHMKNKYSNEDKQKKMKQYFEIKGKYPKTKDKIIAKKLSIAYETLKMWKKKFSSLNDF

SEQ ID NO: 131884 - protein, 140 aa, Heterodera glycines
DGVSGLIGIKGEKGYGLAGAKGDAGIPGFPGTKGDSGMPGLPGSPGLTGEKNRGKLQKKKLLLQGPPGLPGFPGINGDNGLPGIGLPGLPGEKGISGVPGKPGRQGTPGERGLDGVPGVPGMKGDEALPNISSKFGRILL

SEQ ID NO: 131885 - protein, 78 aa, Heterodera glycines
EAGAPGQPGQPGAPGQPGAPGQPGPKGPPGAPGQPGNAGGNGQPGQPGQPGNPGERGICPKYCAIDGGVFFEDGTRRR

SEQ ID NO: 131886 - protein, 96 aa, Heterodera glycines
MLDRPRFRTVGAAGNYRAIPEGPGCKSVVCAEGYKCTVGASVEKIGDRPFAQSVSLPQCVVNGGSLKDVRTKIRGGPGVINAIIKKWIYYTYGSNQ

SEQ ID NO: 131887 - protein, 116 aa, Heterodera glycines
GKVMLTTVMNNGFVTVEEGPAGGSRIRFFVTVEEGPAGGSRIRFKLVDIGRISFSRDLPVHDVREWTQLDHNHFEARLDMETLTHGMQEHTVIVYTKVMLTHGMQEHTVIVYTKVM

SEQ ID NO: 131888 - protein, 44 aa, Heterodera glycines
MSKLYYPPPNWKPKPSKKSAGHSTVMATTRAATCELINWSFKSN

SEQ ID NO: 131889 - protein, 17 aa, Heterodera glycines
HKHLFDLFYHIHNLIKI

SEQ ID NO: 131890 - protein, 84 aa, Heterodera glycines
MHWQNPKSPQSPQCQDPLNSAILRWELPRQKDTTWSVLFERAQALADQFPVKLEKETDGLPQIVDFSLTQNSLEQVFMSLTNVD

SEQ ID NO: 131891 - protein, 562 aa, Heterodera glycines
TRNTDLLNKLVPVLIMCILITLMPSFLLKLMVEERSSRFKHQLLLTRLHPIIYWASFLLLHLNIYALFCFCISLPIFVYGILEGGRLRVLFALFFWIYHPWLCCASFLFKTVQSVTRALLVLIVLSLVGIGIVLLFESLFPVMDWVPTTLNVVFFLLLPPYDFSKCLPYEISFTVFCPSSALVIQQKGGGKGVIEAEYGICSSKILFQFLINNHLSPVNGLYRLVYRNFDPGIFPLKKTKMSPEEREFVKQEGVENFVLYINELSKYYGNVPAIDGITFGVQRDDCFGLLGNGAGKTTTFDILSGIKFATSGTAAISGVCVSKHPPIGYCPQFDALPMELTGREVLHLIAQLNGFSEVSQKTETILKCIQMDKQADKRIKHNSGGQRRRISLGVALLTCANFVLLDEPTAGIDPGTRRDVWHLIRAIRQGTAVLLASHSMEECEALCSRIAVLNRGRLAGIGTAQHLKSRNMTDKYIDKIRNPRSRRSAKTRNSAILRWELPRQKDTTWSVLFERAQALADQFPVLDFSLTQNSLEQVFMSLTNVDVLFRLGFKRFSVSLRL

SEQ ID NO: 131892 - protein, 35 aa, Heterodera glycines
MHNHYIKRILLSMLEGLWRMASRNALVVQLQRFWP

SEQ ID NO: 131893 - protein, 103 aa, Heterodera glycines
MGCLSNTKTAGPIDSYLGKPVKNSIFTFYGAGGRGACGLDAGVPKMSAAGSGQLFKSDGQWKDACRADKQYMLDDPICKNICIKVDYNGKTCHAHLHEMPVER

SEQ ID NO: 131894 - protein, 80 aa, Heterodera glycines
NERNIIDKNKYKLDFKKFESLSATSLLLSSLQYDSFHNRLEHWLVAEPQVKDGSPGVNPLIGLGDIRRMNHPPPVVSRQL

SEQ ID NO: 131895 - protein, 293 aa, Heterodera glycines
MTPPPPPTESAEHINGLQPPPPPRENVGPVPPPPPPAESAESVSELPPPPPPPSLQPSLPLSLPPGANVATFLHSPPPPPPPPPPPPRPFHPPSLPPQGNRNFLRSPPCLLPPSPSGTVAFLHTPPPPPPHPRPAIPPLMMPITTATTPTPMRHFASPHPPSLYPLRVTSPAMFARSIGSPLPPRMTLPDSMMHFGPPHTSPLPPRMAPPVTMMHFGTSRPSPMPFRMAARQMFPSAAAPPQRMTAPTSFLPTMASPPPLICAPSSSAAAPPRLPQSQPMAATTDATTPQSSK

SEQ ID NO: 131896 - protein, 38 aa, Heterodera glycines; identical to SEQ ID NO: 130624

SEQ ID NO: 131897 - protein, 194 aa, Heterodera glycines
MESFCCVCKAIYGGTHSCSVCKLPCHTFYGDSGGVENEGFGGKVVCHNCVNEEGNATIAEGSENDEQEPQNNKENEGTPTKDKKRHRNNDVMKKLEAVEWAQKNSINAAAKKFKVYRKTIRDWIAHEDKLRKQIMSPNGGKRMRLDGAGRPVHRPDIDTELAEWISEKQKNKQPVSRSIIRQKAAALFMDTDIK

SEQ ID NO: 131898 - protein, 97 aa, Heterodera glycines
MTTAPQAAAATALSALQNPLSLARLPPAHGSGLKTAPAGSAQSLADRYRITKKCLFFPVSGCPLGPGPELFKFRNRDRDLKGPGIPGPVPLHSNLHP

SEQ ID NO: 131899 - protein, 323 aa, Heterodera glycines
SDPIVRLNKIHDGLHGGIYVHEKGKGLIEENEIYHEKGKGLIEENEIYGNTLAGIWVTTGSSPILRKNRISSPILRKNRIHSGKQVGVYFYDNGHGLLEENDIVGVYFYDNGHGLLEENDIFNHLYSGVQIRTGSNPKITRNKIWGTGSNPKITRNKIWGGQNGGVLVYNSGNGVLEDNEIFDDNEIFDNAMAGVWIKTDSNPTLRRNKIYDGRDGGVCIFNRGRGLLEDNDIYDGRDGGVCIFNRGRGLLEDNDIYRNAQAGVLISTESSPILRRNRIFEGRAAGIEITNGATATLEYNWLYMNRYGLLATDVRPSLRDNRI

SEQ ID NO: 131900 - protein, 109 aa, Heterodera glycines
MDNEAAGTDGEAVEDEEVMTDADFERAMEQLREEGGEDVNELLTDAAHGAGQRHGRGLVRTTADEQRPETSGDKPEQHESACHGVERDRVFFDHYRLIDYQIIYRSLLY

SEQ ID NO: 131901 - protein, 24 aa, Heterodera glycines
RTLSTAVRQRSSKIYSMPQILWAG

SEQ ID NO: 131902 - protein, 24 aa, Heterodera glycines
RTLSTAVRQRSSKIYSMPQILWAG

SEQ ID NO: 131903 - protein, 28 aa, Heterodera glycines
IFYRFLNVWIFFWLTKTSSNLALSILIQ

SEQ ID NO: 131904 - protein, 134 aa, Heterodera glycines
FEYPKRTLEKIDFFVFGAVPPNRCAQIYGETESFGNSFPIACTLILRWIFAPHNRLSTPNGHLKKSIFSFSGQSPRTDAPRFIGETESFGNSFPIACTLILRWIFAPHNCLSTPNGHLKKSIFLFHKYFFQKEL

SEQ ID NO: 131905 - protein, 101 aa, Heterodera glycines
MFRYDEKFPASVTQSPADEKASQKEGNSPVEIPDVFLTYIIKKFFWQTLRWPLDNVSRKEWTVRRRITDKCLAKHWSKFDFQSLIWIFWLILVCNFTCALQ

SEQ ID NO: 131906 - protein, 152 aa, Heterodera glycines
MEQEIKQKKLAVVHAGRSIDSALISIELSLLPFAADLSAQLEQFYGAINVNEMKQIATQIAEQMICALIEPIDMADFTSGAESSVQSSAQRLINLNFKLYNGLYKKVPGIGIFLQKTKAFVRIIIELMRGFVEKAREIGLNRAKIEKCEDGQ

SEQ ID NO: 131907 - protein, 45 aa, Heterodera glycines
MRKALLCLLLDIHGGHFVEQLTKGHFVEHFVLFQIGLIIFSRKIF

SEQ ID NO: 131908 - protein, 183 aa, Heterodera glycines
MSFLFGHCPFSLSLFCFFLFLCFSLLVLADEFAENGQNGALKSQSQPKERRLRNRPRDFLSECVTGYRERIEFHCQFPNMDKPCLRENAEDSVHQLDVLAAECCASPRLCSVDDIESFCCRTMDCLGLCYGDSFLAQIQSRFRYADILLKRHSSKGAAEKRGRRTTEEEEEEEKRDEDDDDDE

SEQ ID NO: 131909 - protein, 20 aa, Heterodera glycines
SESKIFNAEMRFLSTFLQNN

SEQ ID NO: 131910 - protein, 185 aa, Heterodera glycines
MEPGAKKSRKRKNAENTDGEAMEVDEEEDAVDEDAENNWMLGYEEAGEKPESVTTYAYAHAGSRYDHVLVYGEMLRMGVRPELIRQGNHLLEMKARKTGVYTPTVFRDSYKLIPIKLANFVKTFGLEIEGVENKKYFPHKFNKGGKLRHSLGNLPPMEDYYPSGLFPAERAKFEQWYDETRENWF

SEQ ID NO: 131911 - protein, 37 aa, Heterodera glycines
MTFSKRAQDLAEEGGLAEMMDIFRTTTAAERTEAAER

SEQ ID NO: 131912 - protein, 205 aa, Heterodera glycines
MQKFYCDNYAKKFRHIKKSRRGEEFALCIVCNDDINLLSIGKAAISQHQNTGKHQKAAKAANRFLNSIPKDELQKLNTEQKWMKLFEADLPHLYKLVSIVLSVPVSNAFVERVFSLCGSQWTDVRNSLKVETVKALVQTQINFDLTCPEMYQMLISNHKLLDQIGGWDKFCGTGSRGINPANPAFKICGIPCGIAGFWKIRKNFN

SEQ ID NO: 131913 - protein, 102 aa, Heterodera glycines
LSVCLIEAESLNVHICHPIIPSLSPAQIQLNLQSTVLNFAIAFRIENVNIDFENFVIIDDIEVAGGDQCGDLAAKLENKLLDQFLPAPMLSSLLSRPIHSAQ

SEQ ID NO: 131914 - protein, 82 aa, Heterodera glycines
MKNGQMCRLGTVAFVDYYQFLCASLARNGREMKTEKEKIEEIGRENRESKKAKEIKEKKKRKRSDTERKDREDVCGVQCEKR

SEQ ID NO: 131915 - protein, 129 aa, Heterodera glycines
MSKTEMLLKEENGKISELEMKMKDEKETFEAKLEKMKKEGEKEAQKGEEILRRAEKEKREMNLEMEAIKKERDGRKEEVEKLREQIIAFEEEKGHLKLELKSVKRELKGLKQIEAQMKGGEEKGKSPRK

SEQ ID NO: 131916 - protein, 95 aa, Heterodera glycines; identical to SEQ ID NO: 125597

SEQ ID NO: 131917 - protein, 51 aa, Heterodera glycines
MSISTNSINYKDDFTPAENGEVNGGAISLDNDGQFDGKNSEQSVTDQQQFK

SEQ ID NO: 131918 - protein, 51 aa, Heterodera glycines
AVPAPVSLSGYGVELAIKSTEYKAIDDSNDQKTGGDEPAQNLHGFNFSLLR

SEQ ID NO: 131919 - protein, 78 aa, Heterodera glycines
DGKWLENEHRNATITFKNISVLELFFGITNGNDVIKLNGVQMFEEYSNSAPYCDMKKIEVMGDVILLDEPELNVPPPK

SEQ ID NO: 131920 - protein, 1299 aa, Heterodera glycines
MAFDQMDCDDEKLLDFEEETPVNESVKSLTKEEEEKVLKELGIVSEKPKICRSFSSPNNFCADRVSVLKTALIERSIVGSERGNVKVLIHNKGPEPLILEKGMKVAYAEKLDEIFNPNVELFPLEFDRMFVSQKFIRSTAKFERNLRNKELISILNNKIGALSDSEKDKMQQFWLGFSDVFALNEFELTQTDLFPHEIKTENATPIKTAPRPIPFGVRTKVTEMINDYLKREIIRPSNSPWASPIVLVAKKDGSIRFCLDYRKLNSVTIKDSYPIPNIDQILMYLGNKHYFTVLDLMSGYWQVRVKEEDIEKTAFTVPGGLYEFLVLPFGLGNAPATFQRLMNKILSEYINEFVFVYLDDILIASETFEDHMLHLRKVFEKLNENGMKVKAEKCGFALDQTPYLGHILTREGLAKDPEKYKPIKEFPMPKTIKELQRFLGMHFIAWLPTIVYTDHKALPQMFKSKNSVGNSKVDRWIMELGAPFQLEVIYKPGKENHVADALSRAFNSKTLTLEEKGSENCAYISAVLTPEIPKLPISVSKEEWVEEIKNSELAFIWNFLVKKELPHELKTHQKLLESLGKFTVDEKILYYLNSDKVIPIPNKKAETVSQEFVEKWVLKFGAPEAIHSDLGGEFVNSILKEITEKLLVSRSTTSGYDPNANGLAERLNRTIIEMVRKTSTSPWEWDLRIPYVTFSHNITPNESTGFSPSTLFFGRALNFPTNVTAPKRPNPLYTIDLDEYLQFFRENYELLVKEASKNIAKAQFIQKKQFDSKPNVQPGKYKLGDRVMVFFRPSAQIKHSKLSWNYFGPYKIKALSPTAAWVVPVNKEESEQIKVPIEHLVHTPIELPNETFLPKQRRGKIFKNMPPSENGKETSQKKINSVLTKCIFSENVAPAKLALSAHCSGIEQHSNCSCILLEEVFPNLPAMDPLRRVQLSSLGELIPISIAKQKGILLGHIRSWANSDEESASLLRHIPNFSPDIQNFIPPILMWVDRCAVAFQTLKNTGMKVVQQEICSKNPLHRFGELISEAFEEVKAKNIIGFSSMESEKFLCYGDSSVREFASKLETKTIIFKNTLEMAEAFKNTYFTTKVQEILILIGNDDLDQGLVLNDVEEAIRKIIVHANKFSIKTIFIPPPFHYSKRILHGKLLNLLAKMLPNDGKIVLAMKRGNRSLAEVTRFGNLENRRTVNENGKLKPPGIHFTISFLTDVFGMTTPVKMSSESGSSGIRTPATSNSRAPSLLNVQIPSPIIPHPRQEQNAYRRFNPLAFSLHQIRCLSVDVKTRKRSSFADPGEVCGDQT

SEQ ID NO: 131921 - protein, 20 aa, Heterodera glycines
TDQKRTKLCRDTERKRNNLF

SEQ ID NO: 131922 - protein, 91 aa, Heterodera glycines
LFEYPKQTLEKIDFFVFGAVPPNRCAQIYGETESFGNSFPIACTLILRWIFAPHNCLSTPNGHLKNRFFCFRGSPPEPMRPDLWGDRILRD

SEQ ID NO: 131923 - protein, 191 aa, Heterodera glycines
KKGKTMVMDSDRDKILVSELMTFKGGLDKVISDCFNSNEKFLHALKDSFDFFINTRANKIAELIGQPKFMDSKLRTGNKECSEEELDEVMDRVIVLFRFVQGKDIFEAFYKKDLAKRLLLGRSASVDAEKAMLSKLRTECGAGLTQKLEGMFKDMDLSRDFCKTFKQVAIKWILGICLLFFSISRQTTLEM

SEQ ID NO: 131924 - protein, 155 aa, Heterodera glycines
HEGIQRVTELKDQLLEAEHEQSAAIEQRHRAVIQRWQQLLANSLERRRKLTEAQAHFKQIEDLYLTFAKKASAFNSWFENAEEDLTDPVRCNSLEEIRALREAHTEFQKSLVGAEDDFRQLQELDRQIKSYNVGPNPYTWFTIEALSETWQNLQK

SEQ ID NO: 131925 - protein, 73 aa, Heterodera glycines
MHPIRLTVALNFAILQFEVQKSPADACQTAQRAYDDATSDAQTTGESICAESVTIMGLLQDNISYWSGNTSKT

SEQ ID NO: 131926 - protein, 91 aa, Heterodera glycines
MQYNAFKPRREAGQFQNFVPHFTVESPSTLLDNYVSMSTVAFGQLWNGKMGISDGLLIMLYNAFKPRRAAAPLLCTILVFKIGSGLFGFLK

SEQ ID NO: 131927 - protein, 76 aa, Heterodera glycines
GGTVPKFCTTFYCGKSKYLIGQLRVNEHSRLWPVVERKNGNIRWGALFSKNSSFRLTIPPFCALFRFKIESFFFVF

SEQ ID NO: 131928 - protein, 66 aa, Heterodera glycines
FVNLLVDRSVNFDADAMQLKYALICRLVEAAPSALNDGQMEMLRDYCTKGPFWGAPVVEVATEEAA

SEQ ID NO: 131929 - protein, 169 aa, Heterodera glycines
MSYTTNFPHSRKRTVYVGGFGEEVNEKVLTLAFIPFGDIVGISIPLDNETGKHRSFGFVEFELPEDAAAAIDNMNDSEIYGKTIRVNFARPPKVNERSQRPIWADDEWLKQYGQGSGQGEPGENGGEKLNETERMAGEEGDEEEEGRDSSQQKLPKVYLGIKIGIRLAF

SEQ ID NO: 131930 - protein, 426 aa, Heterodera glycines
ENSEGCESSDDDERVTDRDSSEDENSEGCESSDDDERVTDRDSSEDENSEGCESSDDDERVTDRDSSEDENSEGCESSDDDERVTDRDSSEDENSEGCESSDDDERVTDRDSSEDENSEGCESSDDDERVTDRDSSEDENSEGCESSDDDERVTDRDSSEDENSEGCESSDDDERVTDRDSSEDENSEGCESSDDDERVTDRDSSEDENSEGCESSDDDERVTDRDSSEDENSEGCESSDDDERVTDRDSSEDENSEGCESSDDDERVTDRDSSEDENSEGCESSDDDERVTDRDSSEDENSEGCESSDDDERVTDRDSSEDEKGFAQVDIEKANSPEDLWSRVIAASQSFKKVAFREQVADEEGCSSARKPSSDQPCYDQPSFRGGGDQHRWDSSGWSSCRGEAKEDQQWIDDDKSDEKRLSNRN

SEQ ID NO: 131931 - protein, 365 aa, Heterodera glycines
MSTCAKPFSSSDESRSVTRSSSSDDSHPSLFSSSDESRSVTRSSSSDDSHPSLFSSSDESRSVTRSSSSDDSHPSLFSSSDESRSVTRSSSSDDSHPSLFSSSDESRSVTRSSSSDDSHPSLFSSSDESRSVTRSSSSDDSHPSLFSSSDESRSVTRSSSSDDSHPSLFSSSDESRSVTRSSSSDDSHPSLFSSSDESRSVTRSSSSDDSHPSLFSSSDESRSVTRSSSSDDSHPSLFSSSDESRSVTRSSSSDDSHPSLFSSSDESRSVTRSSSSDDSHPSLFSSSDESRSVTRSSSSDDSHPSLFSSSDESRSVTRSSSSDDSHPSLFSSMIRMNRDQSLVRRRRMIRILHCFRLRDDRDQSL

SEQ ID NO: 131932 - protein, 153 aa, Heterodera glycines
EGCESSDDDERVTDRDSSEDENSEGCESSDNDERVTDRDSSEDENSEGCESSDDDERVTDRDSSEDENSEGCESSDDDERVTDRDSSEDENSEGCESSDDDERVTDRDSSEDENSEGCESSDDDERVTDRDSSEDEKGFAQVDIEKGGNAFKI

SEQ ID NO: 131933 - protein, 228 aa, Heterodera glycines
LHICDISRSFSMSTCAKPFSSSDESRSVTRSSSSDDSHPSLFSSSDESRSVTRSSSSDDSHPSLFSSSDESRSVTRSSSSDDSHPSLFSSSDESRSVTRSSSSDDSHPSLFSSSDESRSVTRSSLSDDSHPSLFSSSDESRSVTRSSSSDDSHPSLFSSDESRSVTRSSSSDDSHPSLFSSSDESRSVTRSSSSDDSHPSLFSSSDESRSVTRSSSSDDSHPSLFSSS

SEQ ID NO: 131934 - protein, 96 aa, Heterodera glycines
MAFGESICWAMAKRKKARIGRGTERPMAVQGTSAPWNSATKQRTSGNSHAHASLSSLRSTYGSMAMDDETAAAMDMPNHTGRSHSRDRRGEEAGSE

SEQ ID NO: 131935 - protein, 77 aa, Heterodera glycines
MCHCLAYIAVIDSVVEPKALQIGTNGYNLVNVEVQRPYLKKRVHVGVCFSPLFYMEHWQLVVLAKERERLATIELGE

SEQ ID NO: 131936 - protein, 34 aa, Heterodera glycines
MAPGHLDSGHLDSGHFDSGHLDNEVIWTEPDNWT

SEQ ID NO: 131937 - protein, 18 aa, Heterodera glycines
PYRDRDLSFSKPGTGNRD

SEQ ID NO: 131938 - protein, 89 aa, Heterodera glycines
MACNICFDDIKIDQLCFCEDPSCKTDKPDNDRTEDTLKKRLTKDKTSIKSINGLMNLSERCIAKFGGGHIERSNLLFLKIFVKIEFSKL

SEQ ID NO: 131939 - protein, 157 aa, Heterodera glycines
MIGSTARVAPNAFRNRRGCGGGGGGGCGGGCGAPPPSGGGAIKLTLGCEGPPPQAPAPCGCGGGCGGGCGGGYGGGCGAPPPSGGGAIKLTLGCEGPPPQAPAPCGCGSGCGCGCGGGCGAPPPSGGGAIKLTLGCEGPPPQAPAPCGCGGGCGGGC

SEQ ID NO: 131940 - protein, 733 aa, Heterodera glycines
MIVLDSGRQATMYEGLDLFLDQMRRDNNKEEEEDEAALAIGEEAARNQRNWSSNPRCHYCDRAGHFAYNCHQRRANFRGNSNQSFRQGRWSNQQPRQSQGQWQNRQNPVNVMDATSSSNASPGIFENLAQSLLDLKIQDNRNYKNEEPRSGAMNALTHIKPETTAMDCQVENELAKGSSSESPACGPETKINIPKTSNWERPSVRSKLASLMFITLMLVGMTLPFTTGNMPHLPMHPLVCQTQNGGKIWQLPAVTGCSKLSIDHSKAPVVRTFDVFSPNLFEHSADAWACRKVRKSVRKYNSITNVPIQETLEPLLLQITPSECKEMAENGKCSLGLLINDSGLLHTDKKLDLSPRMWLIGSFSWSTVSTENCYLFKTKIMSQHGSTVMQSPLGSVNNCQFKAGQCEMEDKTLLMWDTNTTRACDFSKIVTWKGLQLDNIWISEETIKSICDYMLETRRWAATALLSDPTTFARKLFQSGKLVAKVAGPELIKVWPCIELQAHDYEFAKIGNSVDSEFECFDKIPIKFRVKDNKRMAFIDPRTMILSSDARLAPCSEYRKQLIFVRGSLYEVDQIDAQVKQVNANRIDGFSLNLSLAPTYARHSFLHLALVNVSDFIGQFYDANFARESELTFQLKSEDTVITKTLSEQWEQVNFLIRFGLMIRDEYVGRGTTRRMTFGGNKTQKIVKSPAHLNMMDLNASVEFGNEIELSPVKLIEPAQTQTHKIAGKRKRP

SEQ ID NO: 131941 - protein, 32 aa, Heterodera glycines
MGLQKLLKQLFKVVYSYFYLFATYNKVLIPLL

SEQ ID NO: 131942 - protein, 95 aa, Heterodera glycines; identical to SEQ ID NO: 125597

SEQ ID NO: 131943 - protein, 71 aa, Heterodera glycines
MGSRKVGMTMVGENNERWQMDDEQRKPKALSNVDEKRMVSLIESTKSANIGRKERARTMPTKSVSFWDDKI

SEQ ID NO: 131944 - protein, 36 aa, Heterodera glycines
MAVPPAGLGPGTAGAAVMEWLRKKTMDQEFALQVFS

SEQ ID NO: 131945 - protein, 127 aa, Heterodera glycines
ARTPPPPPWDLPCFPPSISLKLPLPSICKLRPLIVQFCANDPQTLLSACRLVEGKCDGVDLNLGCPQLIAKKGRYGAFLQESPELIESMISAVHRHCHLPISAKIRVLHNLSSTIEYARRIEAAGAR

SEQ ID NO: 131946 - protein, 267 aa, Heterodera glycines
MDGSTSTTKRTQTEIDTNRPSARIKAKITKTQRNETGEIQGARRIDASVSNEGSQAEVDGPANSRNGNPNQKPASQATKMEKSIENVLERLYNDPKSPAAFAGVDRLWLEAKKELGNKIRKNDVKHYLEGHRTYTLMRPRRVNFLRARTTAAGFMTDCQVDLADFQSLSRHNSGNRYLMVVIDVLSKRIFVTPLRTKKSDDMVEGFKRVFSTMPMKPHRIFSDKGTEFRNQQLKKLFDEEEVEKYESTHSEKKAALAERAIRQIRNR

SEQ ID NO: 131947 - protein, 40 aa, Heterodera glycines
MCEFFAYIALNKILSVVEEHRIEELVNETNKSVLDVNEQS

SEQ ID NO: 131948 - protein, 731 aa, Heterodera glycines
MRADCVNAVLKCRICAHTRNPRANAPELRPVITAEPFELICMDILSIGMSERGNRYVLVMVDHFTKYLITAAIPDKSVESVAKAFVEQLVLVFGKPKRIHSDKGAEFVNKTMEEISQILGVEKSTTAGYDPNANGQAERANQTILNMLKRSTDSNWSWDDRLPFVTFAFNITPSETTGFSPYNLLFGRPVNFPSSDNVNFTVNPSYTIDEESYLQLFRENLLKILENAKNNSDKSRERMEKWFNSQPKVTLQKYQKGERVMVIFPGANKRSTHKKLKWNIFGPYQILEISKSSAKVTPADKKNADPICVPLERLIRAPDGLPNISTTPRGKNAYKNVLNVMTILIFEEKSMEFEQENFLGKTKTSSGTMNFSEEEEKMDIAEAEIKWTMTCEGGGHVLCKKLLAGDLDPVLSKTQGIGAMVVQTPLQGLITLFILRSNVSMSASKDLLKVANQLEKLGGIAKLQAILTSDPDFELLKYVEERGDAVRSGRCPGIEEVEIIWKNWVSSCASAHEALKRTGFGQICLEAPISLSELPEADRIGWEKVFNAGTWALEKVRATVVFGKTTLVHQPRVIIGDSSAAQLCGEANNQIVAHFIGTVQGTLGDVIRALDKSVLTSKVTSALIILGRDALIKGQTVAQIMEECERIKSICGQFEHVRFVWIPPPYVREKHAQYNELIPGLERIAAEWFIALTENGRSLIEMWRFGDTFDMTRLLNMKYVHSLQITMNTEF

SEQ ID NO: 131949 - protein, 106 aa, Heterodera glycines
MLFDALNISIGLDIKGVGNGKHICIYTLLEGDSPLDLFTKDGKRLCGEDYSEIEEEKELMEQKNDEMGGTSKKNEKGEEEAESKKGKNAKIGETNGKEKKKTDTTA

SEQ ID NO: 131950 - protein, 77 aa, Heterodera glycines
MKRRNRRGEREGEAEERRRERKEKEEGEDKKEERKRKEQEEERREEEKEWRGKEEGEDKKEERKINEQEEERRKRKE

SEQ ID NO: 131951 - protein, 148 aa, Heterodera glycines
YLERIAYDVVVSYPFLPPNDVWGEAKNPATGKCIDTMGQAVPGTMGATPCHGYGGNQLIKLNTEGQMTQGEWCIRPTDGWGGRLRTGHCTKGTVDGPFKYDRETKQIRNKQSGKCLVVEKDPSSSVLTFSECDASNELQKWQWAEKFA

SEQ ID NO: 131952 - protein, 224 aa, Heterodera glycines
MLGIFFLFALFAFSDGVLKAQKCEDCSNLNRFWTNLCKNAVPMFKNAVNGVQKFVCRLSQLDELLDIILQVDFEKSVRNRASFFVNTYFSWILHGLNNPLGDEQQYDTVHCSVIESANYLEHRFGIHLVELWHNPTEFGEINSKIVPLINLARNHLIGDGQKQQQQKKKKRTEDSGKERKKEGGRKDEQKRTVPTEEGTNSTGTNGILDNWSNLAGRKGLRNKN

SEQ ID NO: 131953 - protein, 203 aa, Heterodera glycines
MYELLRQAWPTFSPTSFAIDFETAARNRTVNAFPGCAINFCFFHFVRNLQKKIKEQSLWQVAQQLQPRPNGTWSQPLFPPEQWNVYTRTLNGEARTNNYAEAEHHSLQGAFNCRHPSIWHFIDVLRREQKGTDGKYASFIAGLEPPQKAKKYQVADERIFNLVQNYNPVNPNYDNDHNYHINQNHHIILEFLRGISRNYHMNP

SEQ ID NO: 131954 - protein, 173 aa, Heterodera glycines
MTVGGVPEAIKDHCERICLLAIGMIWEARSVIDPISKKGLKVRCGLHSGNIVAGVVGVRMPRSGGNPAHLSGREIDESTNSIDGYEELTAQMELKGTKQGEGVAKMIEGLFDDRRMDRRSTTNGKPQKFVSTHVVAMEARRTQTLARHRVTAGTVLTMARLGTLQAELTRRAF

SEQ ID NO: 131955 - protein, 724 aa, Heterodera glycines
CPCEWSRISTLKPTQSDALNSFLLLLPLSIFECPLGLFGPNCLSHCLCANGGQCDASRGVCRCAAGWAGESCEFLCPFCPFGLFGLNCSEKCECSNGANCNRTDGKCQCLPGWQGKRCDQPCPCDQPCPEGTFGLNCSEQCQCQNGAKCHHISGHCQCSAGWRGRKCSRACSKGFFGQNCAQICQCPSKGSCDHACSKGFFGQNCAQICQCPSKGSCDHISGQCECPKGLTGSACSEVCLTGSACSEVCPPGTPPGTFGVGSSQKCTCGPNEQCDPETGKCFCKAGQMGKNCEIGCPTGKFGVGCEECQCENGAQCHSETGECACPPGFLGCACPPGFLGTRCEVPCPANRYGPSCACANLCDCQNGARCDPRSGECRCAPGFTGPHCTQMCRAGRFGQNCKEKCQCEDPTNCDPKTGQCKCGSGWIGPTSGWIGPTCQQQCPQGKYGFNCSMECDCHGSAGCDPTSGCCHCPKGRYGFRCQFECPPGQFGLQCAESCHCCPPGQFGLQCAESCHCQNGASCDPVTGQCLCPPGFQLKIIKRNANYTFLNILPKCEQLCPLLKIIKRNANYTFLNILPKCEQLCPLGSFGAHCLLRCECGHLPCDSVSGACDCPPGCDSVSGACDCPPGRIGRNCEEVCPEGFFGKECQRCPEGFFGKECQRQCECYNGARCDAENGKCQCTPGYLGATCQNELKDPDRVAKRGDPDRVAKRGDLPDYERRKRR

SEQ ID NO: 131956 - protein, 97 aa, Heterodera glycines
MTRIAQTSTSAARAAPIANSHAKMPTADFVACAPRECNWPRTDEAANRRRTCQMLVIMAASACRANSLANIAKMAADATGRRAVAYVRRDGMVSLKQ

SEQ ID NO: 131957 - protein, 88 aa, Heterodera glycines; identical to SEQ ID NO: 124691

SEQ ID NO: 131958 - protein, 70 aa, Heterodera glycines
MCTRSIGTGGGIECAENGDAAIAPRTKRRQQTDDDEVPQGTVTRRTTGDRIRDRDGFRRRARRRIFLIVK

SEQ ID NO: 131959 - protein, 105 aa, Heterodera glycines
ELILDGACKDPPIAIVEPNTANVHSIEALEDGAAFFDLLVPGYNDSRSCNYYTLSDDKVYCNAVNGKIGIGDFVWLEGSEEVPREFTMQQLRFDPFLMSNTNRFD

SEQ ID NO: 131960 - protein, 86 aa, Heterodera glycines
KCYEHKDTVVPMIGREVPKLGGGGTADDVRCQSAAIDSGDQQQQHLGDRIALDGTSIGFPVKMLAPLLVAKGSNGNGTPFEIKVLF

SEQ ID NO: 131961 - protein, 129 aa, Heterodera glycines
MSKKARHCRCRKRRRRRHHYGAHFARYFRADGKRLLERSEFDEENEISPFNRQQQLAPEALASVARPCHNTSLRVRHALADARALECAGMSHKRAEVWVSVHAFKRMMRKAEKNLKVKKEEKNAKQFAK

SEQ ID NO: 131962 - protein, 632 aa, Heterodera glycines
MDDFYIVIPSNTPGPGNTASNFTVRLPHTLELDSKWSVALSAIIYPYSFPSISVDEDDSISVKLVNPNYREDAGNSDVESQKFINLSVKIPNVQFQSVQSLQKTLNQIIQNAYDKKFGGSSLNDGTPTKRAKRQTELSESGAGVIEVENFFTRNPFDYWQQIGELRKKHYQLRERVEKMTKEYNSTADDERKTLLSTELGVFQGRETFLKEHLHLIEEEAKRRDGEQQEANEQRLIDRFFARYPDNYREQLDEWRSSYLRDVLDLQTKMGEYEGVKDLKKLEELNSQTERMRNSIHVFGRKMEILNNAALQRDQKKSQEDFERLSHEQNLTFVQEFFQANPVNYWQAIQKNYEALQLEYTKKRELREKLEFETDATERDSLQRQIESIQRLIDYRRKRFAALEYEAKKRDAQTGKANSGLSAVAEGSNRTSSTRTDSFSPDEPSNPDEAINSKNNHQNTTTTATAILSSETPAEQNLADQDNSIADKNELGTPPLSGLEQSGDAATSVTQAEDGGNLPQAAALSSNNPKFVVKQSTVATERRKEKIIEKLIDEQVDRMVDGTHAQQKMLQEEGKDNDSQHRISTYKLIEEVLHGEHGQLMVQQRESKMAAEFAYNEITQRFGIRMGPRSNAR

SEQ ID NO: 131963 - protein, 95 aa, Heterodera glycines
MNRRWICNDVWMDIFPSFDRPQLGLKLALLSPRFNALVDKHFNGKSELTIWRPIEISKDKGPEPKLFVWFDYKCVPFPLPDRPLPSKILFKSLEI

SEQ ID NO: 131964 - protein, 129 aa, Heterodera glycines
MKIALGKEERRKRKRGKGKIRRKKEGEKEEEKDENSIGEGGETEEKERKRKNSKQEGGEKEEEKDENSIGEGGETEEKERKRKNSKQEGGEKEEEKDENSSGEGGETEEKERKRKNSKQEGGGERGGKG

SEQ ID NO: 131965 - protein, 45 aa, Heterodera glycines
MELNLRHSPMKFPTKTLAAVNETLLRNALKLATNFEYCYAKFVDI

SEQ ID NO: 131966 - protein, 73 aa, Heterodera glycines
MSQNSASPASMPCTSWKWRKKRGRHSSEAALPMAMWRSNGKFPRTTRIFVIPVIKWHYNDKMSDSHAFLAMIE

SEQ ID NO: 131967 - protein, 99 aa, Heterodera glycines
MAPGDNGIIYDVPMVGVSVGLSRTGSNGGIVFFEVVLADPFYTNSSKGTTFVTAGGGYLDIHATDSLKNAYGAAKVIMREQRNNYLDKAHLHLNVVAAA

SEQ ID NO: 131968 - protein, 60 aa, Heterodera glycines
MCSIAFTLSVGSLLNIPPTISHKHSGPILGSKYNYAGFFVLVVSYNLVNTRTNKIILCSF

SEQ ID NO: 131969 - protein, 48 aa, Heterodera glycines
MLEPKREGPTDGVRLDKELLFPSPGLCHFKIKVSDLILLGIFKKTLLE

SEQ ID NO: 131970 - protein, 95 aa, Heterodera glycines; identical to SEQ ID NO: 130684

SEQ ID NO: 131971 - protein, 215 aa, Heterodera glycines
MHMTKLCMKTAMGEKTIEPEITTRVLREMAHVEFTDLYDSDFEATQLQPTQTESLQPLVLIGTDYFADFDIKTEKRLPSGFWVANSKVGRLIFGKGNLSKPKMAKKVTSTAISQEAVEVQLQNDDDGLNSMVKQFFDLEAAGMADAAHPTENEQWLDHFNKELHFNMEEKRYEVALPWNNRAEELQPNYGLARGRLDNNLKKLDKEKFQLYDQII

SEQ ID NO: 131972 - protein, 156 aa, Heterodera glycines
MARTALSGSATRQRSITDNSNSNCFAVDAAILGTEQQCSARQRMNASAMAKISLQKQCFPPECCYTQCSTDAPQKCHDDNDAQKAVDAVHLRSLNCFFSSFCPPFRHFLPPKVLLRLCLLFLFAVGGCPIVPGGVSATARSRRTLVPLGMDKQMFP

SEQ ID NO: 131973 - protein, 52 aa, Heterodera glycines
MSNSVCMVAKVRMGLMATSGRRKSGSKHRNIVGLRGSELIIFEKSRSHTIGI

SEQ ID NO: 131974 - protein, 188 aa, Heterodera glycines
MDNFIKKSEGVCMNNQFQHEDKIPKQHQQQQQQDQQHQTDVIEHDHCYARPTNQLWKLKRQKYMLTFKLCKMCAQELYNRKDDITECNDGGVDLNFHLCKHCTMLNMRLSDMNSVQFMAYHPRNNNYNNTNNSNKNRNNKNNDNDENDSQNNFWYDNYGPTYCRGGPRNNYMQGKRKCLERIDMDDMN

SEQ ID NO: 131975 - protein, 46 aa, Heterodera glycines; identical to SEQ ID NO: 124738

SEQ ID NO: 131976 - protein, 37 aa, Heterodera glycines
MCRKVLAEREIADIVNYAELLKKKLKQKMGRKLKEFG

SEQ ID NO: 131977 - protein, 173 aa, Heterodera glycines
MKLHLLFVLFIFLITQINQIGTEKKKLEQKSFDEIFGEKWEEKEEEKRNELKKREIIGKFYKIKEKIKQKGRKFSKKEWNKIEIKIAKKLGTNCQYIYKWIKEFGLYKYKSKTNEEKFKIVQEFIELTNDYKQKRKYSPKEWQQNYAEICKKIGVNRDIIYKWKKQFGIRVKE

SEQ ID NO: 131978 - protein, 32 aa, Heterodera glycines
HLVMELHTCTCGVVVKLSTFHNFSPGFNSPLG

SEQ ID NO: 131979 - protein, 229 aa, Heterodera glycines
MKFCILLFLFLIALIIPIESANEKLQQKSFGEIFGEKWQEKEEEERNELKKREIIGKYYKIKEKIKQKGRKCTAKEWNKINAKIAKKLGTNQTYIQKWIKELGLNQRMQKSYKSKTDEQKIEIVQKFIAMKNEFKQKRKYSRKEWQQNHKEICKEIGVNERTINRWKKQFGISKKRITEEEKIEKMKIYSQIKRENAKMSDNEIAKIVNTSNANNCNWKKQFGEEMFEN

SEQ ID NO: 131980 - protein, 72 aa, Heterodera glycines
MPTNQPMSRWSDDRFGTKCHHNCCQKRWTEAAIRAAAVVGADIVGTFAGIAAVGALAEQSYRHSKKQNKLKN

SEQ ID NO: 131981 - protein, 89 aa, Heterodera glycines
MRSFNSKSHQYDSSKNFQELLSPRLFQRRQQNGGTIVQRVLQQQQFQQMFQQYQLQQQQQRESPPPSTVFGNSCDGTLCQSDRLTSDSS

SEQ ID NO: 131982 - protein, 291 aa, Heterodera glycines
MFMICCAILLKYWDRFKKPPKQQRGHRKIEKVPETVITICLDEIPDNQNEAEEKMAKAIFISADCWLGVFDLLPTSQLGLGIAMISHRFDYYVDEHFKTRKWTLKFIRIRYKIEENGTKQMEIVNYDWKPMPIPQNQLPRKVIGFERIIITFIDRNVIAFLRHFRSLFASFCPISLAISTTNERISEFIFHIWPMLGKNCRVMELPAPIFRRLRHFVPSILKDCISLRVINTYSYGFFTEFPADDSATATDGQAVAKWLFTPRPDNVPKVFKCYLDKDDANLTSKVEAFKT

SEQ ID NO: 131983 - protein, 33 aa, Heterodera glycines
MVSPPSGSSALFPVGTAVCAAAIRADFIAATVC

SEQ ID NO: 131984 - protein, 18 aa, Heterodera glycines
YREAIPEGFGLPINLGAS

SEQ ID NO: 131985 - protein, 241 aa, Heterodera glycines
AKGCETKWSCPRLRPRALQADFSDVFGPGLGRCTKKAHLILKPDAHPTCKARPVPHGALNAVNEELDRLLQIGAIKRIEFSHWAAPILAVMKKNGKTRVSIGFSTGLNNLLELNHLLPRPEDIYTAISCYVYFSNLDLDAYIVTGIPGTFAYLDDGIIASKLEEHISLLYKLFKQIQEFCLIQLERCKFIQPGCFFSAHFISVKGTRPDPGRSEAIRQMPPPHDLSNLRTLGALNYYGRFI

SEQ ID NO: 131986 - protein, 316 aa, Heterodera glycines
MPRLKPRKTQKRRLKRMPRLKPRKTLKRRLKRMPRLKTRKTQKRRLKRRTRLKPSKEAEEKAKKDAEAKAKKDAEEKAKKDAEAKAKKDAEEKANAEAKAKKDAEEKAKKDAEAKAKKDAEEKAKKDAEAKAKKDAEAKKKDEEMKKQKAKPEEKPEAPAEAVAVVPEAMKAEETKEKLKQEEKPVEVPPSPAEKKRKEAEEKKAQKDAEAKAKKDAEEKAQKDAEAKAKKDAEEKAKKDAEAKAKKDAEEKAKKDAEAKAKKDAEAKKKEEEMKKQKAKPEEKPEAPAESVAVVPEAKKAEETKEKLKQEEKPVE

SEQ ID NO: 131987 - protein, 242 aa, Heterodera glycines
DAGAIAGLNVLRIINEPTAAALAYGLDKKLTGDKNILIFDLGGGTFDVSILSIAEGSLFEVRSTAGDTHLGGEDFDALLVDHLKAEFKRKNGGRDIGANPRAIRRLRTAAERAKRTLSSSTEATIEVDSLFDGMDFHTKISRARFEELCMPLFRKTLEPVEQALKEMIANCCIFRDAKLDKRSINEIVMVGGSTRIPKVQKLLKEFFNDRELNLSINPDEAVAYGAAVQAAILSGVKDETTK

SEQ ID NO: 131988 - protein, 215 aa, Heterodera glycines
MSKITIDYASNNIKVFNSFADASIQNSIMHGLKKEIDEAIKSLAFHWQISLNEIVPNKKEPKELLKELKTEEKQHESHYEKRLLKLMADYSVCLNGFDKPKSGKKRRRRRDDGSGWSKKTIFGLLLGALFVIFLIFVLAKMNHCLCDPRGDDNDHKGHDNSDSDGDQSRDIEIGSPSAGEHRPAAARHGGAGANSGSESDHSVEQVFNGSQKMRQ

SEQ ID NO: 131989 - protein, 139 aa, Heterodera glycines
MDFDGRIKAYRFVAYSTVSFSIISLLSVCFTLPMLKSYVSNVGLKMDSELSSCQSNAKDIWSEVSQLKGLPLIVSGNRTARQVYGGSGGYGSCQDCCSGGGPGPAGPPGQPGRPGNPGAPGSPGQPGHSVQTPCEAVHP

SEQ ID NO: 131990 - protein, 418 aa, Heterodera glycines
FRIAFSRLFHISTKISRGTQYFNGCNEILQDYLNRGIIRKYPDKCPHFLPHHTVVGKRLRIVFDASSHERDSRSLNDTLFAGPNLQDLAGKLIQFRATIYPVWADIEKAFLMISLKESDREFSKFLRTRDPNSPLSGNNLVIYRFRRITFGIVSCPFLLAATLQHHLETTPGTLAKEIQQHSLLYVDNLLLLAECPEEAREKAIEAQKIFSSAKMRLRDFVAADSRILSVVPSEDHLSETEPLVLGQKWILSSDTLFFSFPIVPSPEKLTRRIILKTIASFFDPLGLCSPCLVGAKLFFQSMWEKSRGWDEPIPDKEQIPWQELRNDWHGQTITIPRHTFRTKNSTLQLHVFSDASPNAFARATDGNFSSSLVYSISSKPRKMGKDQPDGLTIPRLDLLGVLLGVRAAKFVKTHFSYE

SEQ ID NO: 131991 - protein, 202 aa, Heterodera glycines
MALPDGWPCSGPLLDLAEKFAQRLLPAFSTNTGMPYGTTLVGRVEDAVRIMASYGQILRHLGVPPEFYNLPNREPVKSFVFISIGCIYSPLPPKVIGRAAYPLRPEIPESLLYLHRATNDPAYLTMAASIVDTIDQIAKTNCGFGTVRDVGTGSVEDRMESFFLAETAKYLYLIFDEHNFMHSVGSAKAKLVETTGGPCVIE

SEQ ID NO: 131992 - protein, 381 aa, Heterodera glycines
SALSLLSTPASTNAIRTRPQQWRESKTKAKSANAVQQNHPAQQKPATGGKAIRGQPTQPCGSCVGTDHWRSDFRFREATCHTCQKQGHIANVCRKGAFTTKNQRRSFHTVQVKATCLQIGTTQGRWWKILVEINGTKIEMNVDTGAQTTVLTIEKWTKLGQPKLLPTDIENRNCNDVTFNTIGKFTCLDSIKGQPTKKLTAYVTEELNYDLFGLPWIEATEMIPKEIMFPETHTSVGIRASSAAPFQEIADVKSLTTALKENFPDVFGKELRQCTKIKAQLILKSDGRSVFCKARPLPHGSLEAVNTELDRLLQIGAINPIEFSHWAAPILAVKKKNGKIRVCIDFSTGLNNALELNRHPLPRPDDIYAAISGAAFSQIWT

SEQ ID NO: 131993 - protein, 227 aa, Heterodera glycines
IKAQLNPENLCPKGLDFYNHNIDCSKDFYHKIITTRRFDERISTIEKVRSAGIKVCVRSAGIKVCCGGIIGMGENNEERVKMLVTLANFALVTLANFAPPPESVPINKLMPFPGTPLANAPAPDPFDFVRTIATARVLMPMAYIRLSAGREQMADELQALCFLAGANSLFFGEKLLALCFLAGANSLFFGEKLLTASNPMPEKDKELFQRLGLKREQIEEKKAERND

SEQ ID NO: 131994 - protein, 66 aa, Heterodera glycines
MAVPTADDTPPKSSSDAFKRLASKRRKYRSKCSTKRCLTTLNSMTDDGRTNTQNTFGFEMTIFFDM

SEQ ID NO: 131995 - protein, 143 aa, Heterodera glycines
MLYVLFRSVMLVQKFTIDDPFAPSDVNLQSIIICNSLFRHLLGHVLIIDRFLATVRTNSYEKFSKFGFTLAWSSTTVSDNVKTAKQLSPTFLCLFLSNLFINFLYSAIAFNMVTENYQISLMRAFGIWADAVFGAAIELTMMT

SEQ ID NO: 131996 - protein, 828 aa, Heterodera glycines
VNDKPVSLVADTAARKTIIQLATWESLGNPKFKTGKTYGKLTGHNFSLMGSFDCLVEFMGIKLSLECFVAPKGELNLFGLPWIRAFEYALNCPWPQPCRSFVLNQFLAITHSTDLANELKSKFPSVFSPELGHCTKMLAHLYLKSDSRPIFCRARPVPHGAVETVNAELDRLLTIGAIKPVDFSRWAAPIVAVKKKSGDIRVCIDFSTRLNECLELNRHPLPRPDDIFNAVRGTSVFSQIDFKDAYLQIVLDEESKQLVGLNTHRGLFQYQRLPFGIKSAPSIFQKLMDELTAGLQGMFVYLDDFIVATDTAENHHKILSKSFKRLHEWGLRVKLNKCKFLCNELKFLGHIITSDGIRPDPERSRTIKDMPAPTDDQTLRSFLGAINYYSRFVSQMREIRAPLDELLKKDVQWHWDEQQMAFEKAKQIINSDLLLTHYDPTRPIIVAADASNKGLGATISHTFDNGTEKVVEHASRALTSAERNYSQIEKEGLAIIFAVQKFHQRWALTLSNYDFNIKYISTKNFGQVDVLSRLISQHRESQQNEDKVIAQMDMEESSNSKWPSICSKQHLINCRSLPKRAIDLDIDRWVRNCEECALAAKAPPKVPLQPWPASTQVYERLHMDFAGPCADGNKYLVVVDSFSKWPEIIKMKSTTAHLLIEQFVWLFSRYGYPKEIVTDNGPPFKSHEIFTFCSSHGIQQTFAPPFHPQSNGRAERFVDTLKRQMKKCARDPHWVQNSLLAYRTTPNASLNGRTPAELFLGRPVRTVLSLIKPTQKQKQGPVLNEQNSKMAKQFNKHHGARNRNFSIGDIVQFINYRGPSKTWLRGTI

SEQ ID NO: 131997 - protein, 42 aa, Heterodera glycines
MSENRRSHERNWRKREEMKKINDHRKRERKWKRNEREIKLCF

SEQ ID NO: 131998 - protein, 48 aa, Heterodera glycines
MVEGKMEQLKAETEAVEEILQELFNSNLTKCNDEYKSQSMNKYLVECE

SEQ ID NO: 131999 - protein, 54 aa, Heterodera glycines
IEKRREAVRKRICPCFLRLKSAIDDQYNEKKKVVKREQNNNENNTTKNHRLMKP

SEQ ID NO: 132000 - protein, 255 aa, Heterodera glycines
LYLTCIGLIVFIILFAIRQWIKGAQFREKVSARGAVAIVTGANSGIGKQLVRELNLRYVKVYMACRSVSQGQATARELFSRGCDMTRMIVRHCDLADFGCDMTRMIVRHCDLADFSSIHQFVKEFNRDEPKLDILINNEPKLDILINNAGIMFYPRFTKTVDGHELTWQSNFLGHFLLTELLLPKLERSEEGGRIQSNFLGHFLLTELLLPKLERSEEGGRIVNVSSSVHLRADSVDPEVVESPRRFGIIATYAR

SEQ ID NO: 132001 - protein, 160 aa, Heterodera glycines
MELSEEMDNLGTNLEDKSDKLDQENENIKWENWKEIVGKLHFRKFGIAIVKGRIENWEKLGQKQKTLALSNIVEKREKILEEFERNLEQIEKAEKQRKLDKNIFCQYQSDTNLSEFIEKKDKINFSEKNSQLFPSEKWQEINSVKEFERTNLEEKEKVEI

SEQ ID NO: 132002 - protein, 20 aa, Heterodera glycines
MCKRKELRKKTYEEKEANGY

SEQ ID NO: 132003 - protein, 96 aa, Heterodera glycines
MNRRWICNDVWMDIFPSFDRAQLGLKLALLSPRFDALVDKHFNGKSELTIWRTIAIHRKDKGTEPKLFVKMGYKFVEFPLPDRPLPNKIRFNHLRI

SEQ ID NO: 132004 - protein, 47 aa, Heterodera glycines
MPPSADGHRSFELTCGRCPTLRGSCLTSHAFGVLPYVGAVVYRSVLH

SEQ ID NO: 132005 - protein, 65 aa, Heterodera glycines
MSSFGNDSQNTTSFSPNWSTADTNSTVITVAYFLVSDGAYLHRRTPLFLVFEKIAPKKAFLKSKK

SEQ ID NO: 132006 - protein, 63 aa, Heterodera glycines
MMEFEVAPILRHHAVRISFKCAECGDTTFKTFDFNSRGRWGMFGRYGEHKSILDKKTFICHTK

SEQ ID NO: 132007 - protein, 165 aa, Heterodera glycines
MWALLPLNFLLNQFGLCSVVKLNMIDTALCPCPLTNMKVQNVEHIEVIKDHEEEKLNECPRNCVVLSIRCKCNAEMRRTYELTKYGTRKNIGRPERERSVHSLKTGIGMELVKVEIIFATMPAKFDEIHFNQRHWARRFFYASKQFWKCFALRGIIPWASWSHRK

SEQ ID NO: 132008 - protein, 67 aa, Heterodera glycines
MSVFGNKDEQLNFKTICIWQRNAAENGGQWWTNEGTFCWNQLKLKWQFKSEVAFLLIFLFFSLSITF

SEQ ID NO: 132009 - protein, 39 aa, Heterodera glycines
MSMCWAEPWNSAPIWPTLVQSFPSPLSTMTIKWTENIRS

SEQ ID NO: 132010 - protein, 28 aa, Heterodera glycines
MYAARARAAKAEKRQAQLRKAARARAGN

SEQ ID NO: 132011 - protein, 18 aa, Heterodera glycines
YREAIPEGFGLPINLGAS

SEQ ID NO: 132012 - protein, 115 aa, Heterodera glycines
MTKDYPTSLFEEDRQYFGILDNEVMQQKDITEQALLFRSMIKALHHHILVEKEAAAAGIYREIDVLVRNHRVVPANEIANAMSEFCIWFNTTQENNDTDAATFAANSHNRFERPH

SEQ ID NO: 132013 - protein, 70 aa, Heterodera glycines
MRDSARNRSALCPDWIKAFKIGINHQFVCHLPNKQQSFLFPSTFSNFSFASIGKMSLYWTRLIRNGKGGT

SEQ ID NO: 132014 - protein, 84 aa, Heterodera glycines
MFIKPVLYSSIYFGWFFYPFVGYSNDDHHQYEHWLHVVHNIAVAFLSPAIYLFFASKLFFNVQSNRRQFAVVASELNSMQKRVW

SEQ ID NO: 132015 - protein, 91 aa, Heterodera glycines
KYSRRLFNVTRLICLSNVHSILNWVMRIMPVVTTGRRGSLQPFGLFTPRPIKETITWLTFALLDCKRTNCNKRRHCPICPQLTFCNGDYCF

SEQ ID NO: 132016 - protein, 339 aa, Heterodera glycines
MILRYVKAKADWWTNSAHYNRERVRRGATVDKTVCKKNLGRLTRLYLKAEQERQHNYLKDGPYVSAEEAVAIYTTTVHWLESRRFSPIPFPPLSYKHDTKLLILALERLKEAYSVKNRLNQSQREELALIEQAYDNPHEALSRIKRHMLTMRSFKEVGIEFMDLYSHLIPVYDIEPLEKVTDAYLDQYLWYEADKRRLFPSWVKPADTEPPPLLVYKWCQGINNLQSVWDTSEGECNVLLEAKVEKMYEKMDLTLLNRLLRLIVDHNIADYMTAKNNVTINYKDMNHTNSFGIIRGLQFASLIVQYYGLVLDLLVLGLRRASEITGPPQVEHYSFCVTL

SEQ ID NO: 132017 - protein, 76 aa, Heterodera glycines
MPAPPNASDLNVEANGLSEDFMFDMTKAEIPAETFKKIVAWMEEHKGQPVPEFEEDPNTFERKWLPQNDFQQNFFK

SEQ ID NO: 132018 - protein, 324 aa, Heterodera glycines
GNIIFSHGDEHFYDKVMSACSLYQDMEILPQGDQTEIGEKGINLSGGQKARISLARAVYQNCDIYLLDDPLSAVDSHVGAQLFNQVIGPSGMLRNKTRVLVTNEPSCLKYSDFIVILADGRVISEGTYAELGRVISEGTYAELTKSGILARLMEDVESDRVKSVSVPTEKGVKKHNKEGEEDNKKHNKEGEEDNISDDTDETFMDNAADVENLLGTSAMSTVSGIARRKYSTSSTMFRRQRLVRADSVISSYNYPSVQRHLTGIEKVETGRVKPVIYLRYFQAMGFSVKPVIYLRYFQAMGFSLSILFLLRLTLSTAASMSRNL

SEQ ID NO: 132019 - protein, 50 aa, Heterodera glycines
MRNAKKFEYAKGEMRKAKPRHIPATEKNFPKSLEIFSCILEYPDQHEEVI

SEQ ID NO: 132020 - protein, 82 aa, Heterodera glycines
FEFPFQASAVRLLICEWSVRIGANLIVPFLRLRSHNVDFWTFDILADEQVRQGLKSYSDWPTYPQVYLDGELLGGLDVIREE

SEQ ID NO: 132021 - protein, 129 aa, Heterodera glycines
FPFPKKDPNSRLKRLINTARLTLFMKGTPEGPKCGFSRQIVDLLRSHNVDFWTFDILADEQVRQDLLRSHNVDFWTFDILADEQVRQGLKSYSDWPTYPQVYLDGELLGGLDVIREELNEQNFVDKLPK

SEQ ID NO: 132022 - protein, 111 aa, Heterodera glycines
MIFLARKPFKFVRKNDDRAKKEAKDSSKKTHKNHFFSNLLMAASSSAAYPVLFFTQKRAGDDKLWVFYWLSDESKFGIASFPDTVYEMDADRNTRRAFLGTLPRVWWESTG

SEQ ID NO: 132023 - protein, 52 aa, Heterodera glycines
MYIATSQSYNGISGEPMIPMTDKNRNLPPVHFSVNSGADFTWFNASNTDDCR

SEQ ID NO: 132024 - protein, 153 aa, Heterodera glycines
MAVPLPFSVNVSTIGSVEESEARTTYTYGNVTVRPFILRNRRHHNFNFIVEDLVDPNLFLRSDQNNGRIGLVSIRVGNAAQAWDVVQVRFLSDNLETWTEVMERFERAVTAIEDGRPPTPVNSPSPVQEVVSANNSGEKLPSLNGSNEEEEAN

SEQ ID NO: 132025 - protein, 99 aa, Heterodera glycines
MFEEGRTKIKQVNDESATVCYAFKHFLEFPRVDDATARRQRIDRLVKFFIDEALEKKRMEQGKQQQVSVSNNWSTNGLPQNKKSPIKKNGNMVFIGRGI

SEQ ID NO: 132026 - protein, 124 aa, Heterodera glycines
VPYLRSSIRRFPVDEQRVPWNVPLVDYSPCDYTADSVHGKPWADPSEPSKCKFNSMDDGVNRVSFHGSYNLDTDGRPLNPFGRTGLRGRGLFGRWGPNHAADAIVSRRLANGQLQFVAIERRDT

SEQ ID NO: 132027 - protein, 59 aa, Heterodera glycines
ENIDHRPQTQKCLKTVRIDVKRFEMGWKNRIRGALALFQDEKCRKWSAKLNWDSSDRAI

SEQ ID NO: 132028 - protein, 46 aa, Heterodera glycines
MSIFENSEIPALQAKNIAPIDIYRPFKRKWGLIFPKCPKKSVPIGI

SEQ ID NO: 132029 - protein, 216 aa, Heterodera glycines
MYSFTTASILLVCFMGLIGLAELGDDFFDELWKMNKVITNKKQNSIQKEVKVEEVDYEKIENESFEDEKRTNLTQKVKKEMEFGDEKVDLEKYAKKEPIFDEEEEEKIPRECAEENIVPTYSTEEEMENKIGKFKSLNFQNWKRADKIAIINQFISMRNEYKQRSDYRQQDCGRIEQKIANELEIPRKRIYRWRRALGLGPEFLGFHLFFFCGYHM

SEQ ID NO: 132030 - protein, 26 aa, Heterodera glycines
MGQDQGSRIFAGDLRVYQKNRDLFAN

SEQ ID NO: 132031 - protein, 27 aa, Heterodera glycines
IFSRFAISRGPHNVRLRNRRHSQEALP

SEQ ID NO: 132032 - protein, 120 aa, Heterodera glycines
MGKVKVRQTEERTKETEERTKETEERTKGNGRTDKGNGRTDKGNGRTDKRKRKNGQRKRKNGQKETEERTKETEERTKGNGRTDNKLTSMSNDRMFKSRRERSKMFQWQEWFLLVIGGFG

SEQ ID NO: 132033 - protein, 394 aa, Heterodera glycines
FSELKQTEPAKGSEAPEGKGATSGFKCGGELVPRWTANTLRNPTPTWACGYRNNERCKWTLRRPMFETIVMNVTAIELEQHPNCQYDFLSLSIKNLETEDELSSRFYRGFSLNYSLVCGSTEMARPKRSMDSVLSSPGYPNPPMTNKNHSCHWNILLLSRRDLNIRSLDMDVSLLSPRDWQSNECSTDSLDFSHFPFFRESATAKTSNSFCGQEQFNLTISGGYVFIRFRSTFSRGRGFKLALVESVHDCASSLIRGFKLALVESVHDCASSLIRLDQLTPLRLLSSPEFPHLSPNSLDCQWILSAPPGRRLKFTVDPKTFLLMGTRDDCAGDFLEVRDGPSEASPLVGRYCKNEAPSSIFSTGEHLHVRYVTGSWGRDGHMLSLISDHYLAGN

SEQ ID NO: 132034 - protein, 305 aa, Heterodera glycines
MFNHSPSINPLDLLFIYFSACEKDLTALNGTISPPNFPNPSPRPFKCTYRIIAGPRQAIRINFDQIGISTDFNTCNYHRERHAQMEDYVEFSGGHPSNEVANRRYVCARYPFIAPDGEMVVSSGIRPFSITYSTSGAASNKGFLLSYELINIGCGGVLSIGSDEVAGEAPQLTSPNYPDSYMAFMFCVYFLQVPTGRAVRLSFDVFDVENVAHRDNCEFDSVTVYDEFFEDEQNHGKVLGNDRSLSGAGFAARFQAVDLASHCDRTFTAPEAQFDFDASEFAQSDNCVYRIVVLFYLNIYSFALF

SEQ ID NO: 132035 - protein, 54 aa, Heterodera glycines
MPPSGTVPAKGEAPQTFDPCVEQSRLGAKLGYEEMAPNSVQGNSDHRFPRVHSA

SEQ ID NO: 132036 - protein, 106 aa, Heterodera glycines
MVILDYIIRNTDRGNDNWLICYTPPTTKAKEGNGKQRRRTDKGFDKKTFNKQLSVVYGQIFNLREALRERKTPAQLVQMTPLYIIEMKKNVFKQKVHTRSPLFSCC

SEQ ID NO: 132037 - protein, 207 aa, Heterodera glycines
MLSITQPILYTYLFPLNSHTETAKAAESRIGIPFIIRHINSYLAAKNKEPTADAKVNKAFARKAQEIFTEAYKGLAKHGTFFGGDGMGRSVCILMAFKRLIEGILPLCMTDKNCSNLEQLKKWSANKNCATDECKMNAFNEQRNFMASIHLEMLRLYIGEQSEFAEFIRKTPGAKNRMRKLLVKEANYEELMESYSATVQNEEGFYF

SEQ ID NO: 132038 - protein, 41 aa, Heterodera glycines
MDPIMGIERMVALVDSIVISPPTDSLQIFNSPDIQAMTRKQ

SEQ ID NO: 132039 - protein, 29 aa, Heterodera glycines
MVNGFLKWCLYINYHKVIWSICGLMWPNG

SEQ ID NO: 132040 - protein, 128 aa, Heterodera glycines; identical to SEQ ID NO: 125618

SEQ ID NO: 132041 - protein, 366 aa, Heterodera glycines
ANSLSDVFHCFVISLSFADLFCSLLIIPFSLFSSLRPGWHFAGDNSALCKCTVYVLCKCTVYVHVMLICSTVYIFAWISVDRYVYIFAWISVDRYSAFMKPSRYEVAHTATRCKCWIFFSWATSLLIACPILIAKMESKYSPQLELCLLNWTSTMAYSVTMESKYSPQLELCLLNWTSTMAYSVTLAVLVLVPSLCTMAFTSAAIIAAVNKPDELEDLQRTILDTDPNFVLEDLQRTILDTDPNFVISLFIFVSFLLSWLPIIVFQLCPIRISLFIFVSFLLSWLPIIVFQLCPIRWWASDLSMMQFAFSWLAAFSWLAIGGGSSKLLIYRHFSIIRYYLSTSASPVLSSGGSSAVFREISSNSFP

SEQ ID NO: 132042 - protein, 80 aa, Heterodera glycines
MKGKEKGTKGEKEREIDEENGNEAVTGGSMKIGQEGAREQKIVLSKHWHNQIGAKSKSLKREKGKECRSEKEKGKGSPFR

SEQ ID NO: 132043 - protein, 44 aa, Heterodera glycines
MNNHNKGGGGRSAFTCRCRPQFPFRRMNLPPPLPPPPPTIQRPP

SEQ ID NO: 132044 - protein, 386 aa, Heterodera glycines
MFATRFNGFAQQDSHEFIAFLLDGLHEDLNRRINHRQISNNRMDETEKREDNEEEGQCAEDGKSEEQNAIEEKRRKEPKVSEEADTSKQQTAEEAWEEYKRVNDSIVTDLLHGQLKSSLTCNVCGKVSVKFDPFCFLSVPIPPRPLKESSSIMPMPTNGQILKTAVKSRKSSDNLMQLTAREEERHRNAVENLTLTQRSLRSNYYGLEYLLACLHCALLISLSVMLPFQWFLIIAREWLIRPWTGWATELYRHFFSGPISLEQCLGSFFSVDYLHGDDMYKCEQCKRLRNGTKLCSLTRLPQVLVIHLKRFRNEGMYNVKLGSKVAFPLTNLDLRPFIHSEAQFDPPECPNPTKYDLCGLITHKGQNLECKFTLNKMDYETMTEFL

SEQ ID NO: 132045 - protein, 156 aa, Heterodera glycines
MENSRRYMTRQELRRLLDNGVAVEIEDNEINVAHQQGLRTNWTDYAAENFEASRNFQPAAVFLENHQREIAFSSLRVPIRTSSPNNQNRDPVAPPAQNFVLQNMLPRRLDNDTLSLAGEEVELDQHNENELLGLPLDGRGRTDSMLEHQVSAIHPR

SEQ ID NO: 132046 - protein, 66 aa, Heterodera glycines
MALYCHPFFVEVHSFNSKKKWCKMQRPTSMQTEMIVDEKLQNFSKAKSHDPFFMNKKHGQFYVYFL

SEQ ID NO: 132047 - protein, 16 aa, Heterodera glycines
HAKTATRKWPRENVLA

SEQ ID NO: 132048 - protein, 46 aa, Heterodera glycines
QKNSVWAIHKKLSVGDPQKISVWAIHKKSQGGRSTKNLSVGDPQKI

SEQ ID NO: 132049 - protein, 503 aa, Heterodera glycines
MPKSAEESPLKSAEEMTKSIDAEEMRKSAEETQKNAEEMPKSEGDMRKSAEETQKNAEEMRKSAEETQKNAEEMPKSEGDMRKSAEESPLKSTGELPLSFSEMPKGSLQKMKSLPKDMSASIGEMPKDVLQKMRSLPVNMPGNIEEMPKHALPKVPSINALPPHDEEMRKSAEEVEESPLKSTEESPLKSTEEMRKSAEEVEESPLKSTEESPLKSTEESPLKSTEETPKSAEEMPKSAGKLPPNFSEMPNGSLQKVKSLPKDMPANTDEVPKDVLQKMRSLPLNMHGHADEMPKIPPINAVPASVEKIFNEEQEKLSAKPEITAKNDKTVQESREEPGQKNENQENELNANDRDKIQSPNFLTPNSTFRDVSDSMDDEFFSAETELRRMSRESSENMAKMLKKNSLGDDNAKEISMERTENTEEIPQDTPTKLPSLNAIPSIAEEMPKTDDAMQKSAEETQSDISEGVLPKVPSINTLPSKDEEMPKSAEESPLKSAEEMTK

SEQ ID NO: 132050 - protein, 62 aa, Heterodera glycines
MSISNNSINDGDDLTPAENEEVNGDAISLDNDGQFDGKNSKLSLIDNSLRNFVKRLPKWKWN

SEQ ID NO: 132051 - protein, 28 aa, Heterodera glycines
MCCVGSILCVLKGCGQSVRGLSVSNGQS

SEQ ID NO: 132052 - protein, 246 aa, Heterodera glycines
SDRALQGASLSDCREALINAVVDPTVCYQRSHGQVGSMLRMPPEGGLQYMPIYILGLLKNRAFSDSLQRVTIDERVATFLLFKNAPLEVLLLELCPALYAFHQILYCEPNQDGQVPFPDRLPPTYEHISQNGIYLLDIGTFVYVYVGSALNVCILRSLFGTDSFAKLDSDSTVIEIDTSQSKHLHAFLRHLQEQRGNMYAPAKIIKDDSPRREAFTRRLIQDRSDSSHSYNEFMQFLQREVSKASK

SEQ ID NO: 132053 - protein, 159 aa, Heterodera glycines
MLGRFTKSVDKSKSESLEERSQPALSVEKKERPKTAAKECFFNGVHAPPQLSLSDVELYGFSEYWFSVDDVLSLGGKYEHDKFEQKAKEFCGQPWAVIKRKVKAHFYQKADSERLETQCFKSAWIHAVLHNGFHVDEIQHHFQSAFRINGQEVQWVLII

SEQ ID NO: 132054 - protein, 126 aa, Heterodera glycines
MVFNRRIALPAHRAIGFCKHLSKGTDQFGLKGNSEKQLDEMPKIRGIILGLREEFNTFVIEIMLTRIENEKGANENGTNKSLEKMNEILKFLEEKNGSAFCDQSIIESAKRNSTIGGEKHNTFLIE

SEQ ID NO: 132055 - protein, 78 aa, Heterodera glycines
MSAYMGSGPAEPAPSSGAAETSPSSGVASAYMGASPAHEPPAHEKSRNRAPTCEKMQQRPADGWTKPEERATCQKMQR

SEQ ID NO: 132056 - protein, 58 aa, Heterodera glycines
TSIDNDMIRFAFILSLQNDSPSSSRIDKAANCKHHTDENDEKLEELLLILNDNTIKRD

SEQ ID NO: 132057 - protein, 208 aa, Heterodera glycines
MASDIQMMHLKRAFDWYEEMKSQLEIIRFKKQALENESVEVNSRLANEESRAIELQKERKRTEAECESLRKNITDMDVGMRKLEAEKQAKDNQLRTLADELHKQELTESKLAKERKQQQELAAKLQNDLQMEAERNAAEKAHRQKLQQTLESVENEMDRERRARAEQEKARRKFEGEVRIARENLDEMGKQRQDMETSLKRKEADLFA

SEQ ID NO: 132058 - protein, 105 aa, Heterodera glycines
PGLKCPAEAKNFFYFWKKIENFPKKLPIDRAQKTMFWKWSSFFWENSLKNPKIQKPENRFLGLARKILKIFEILKFGKIGLLKLYNKSAGHPALRSKPNELLAWY

SEQ ID NO: 132059 - protein, 80 aa, Heterodera glycines
LSLLSLFSVSYVSFIFWQLFGGPRSPEDICDWERLWGFFHCLWVWVRLTLLAIGWAWIAMQYFIGALCCRVALNFVKNRY

SEQ ID NO: 132060 - protein, 291 aa, Heterodera glycines
MAREEQPVSLEQAENVLKRHQDFMTTMDANDEKMRAVVQMGDQLCADGHYAADKVHKKARNIEERRAANREKAQAMLDKLREAVQVQQFLSDCEELREWIEEKMIRAQDETYRDAKTISSKFMRHQAFQAELAANKRRLEEAKPKAPGGGRIKVPIPTVCCSDSPRGGTTRGGKARIPRDDRPGSAATVAAVGTIGTDDGGKGTAIVRHQPTTALCAIHRRSWHEVPCTSNHWHFVTGQRLGPANRATDRRAALGAARFDHRRLGHATAATVGAGNGTQSDALGVVAGHGA

SEQ ID NO: 132061 - protein, 140 aa, Heterodera glycines
MIISKLLLLLLSEVFYLIPLGSSDRSDKTKQMHIDHPNKSESMGSSDHSDRTKQMHIDHPNKSVSMNSSDHSDKLKQMHIDHPNKTESMDSSDHSDKLKQMHLDHPNKSESMGSSDHSDRTQNKCILITKQIRSMGSLIL

SEQ ID NO: 132062 - protein, 2400 aa, Heterodera glycines
MPHVHICLILDWEAMRVGGRIRTPEDYIGEYICAEIPPKPDENARDEHLQRHLYTTVTTKNIHTCAEHRCLVDGKCVKKFPKPYEYDNVYSENAYPRYRRRPPPPSGEEAQQNPEQFGRVFEYKDRYGKLIKKDNAHVVAYNPFLSSKYKTHINVEFVAGDGCVKYLCKYVMKGADMAFIKISGQEGTLAYDEYHQLRLARYITSMEAVMSMWGTPLVKRSHIVDELDVHGPEGHRIAVDQAFDDEEERAGALVEAAEKEEERRKTGEERNTQLTAYFAFNKQRSSTDGPLHLTYATAYKKLRYDKKNRRWQPYVIGALEGLKLCRLKTVSPTNMDLLAIRLLLLVVEDPTGWEDLRRHNGTVHRTFVEAAQARGLLNDNELWMRTIREAFATKKRPKQCIRWLAVFFATANLSKPMDLFDYVMEISNTWLTVWSLNNATPEAKRQYVLRALEWFLLANGVHPDSDKREDGTFQTACEKIGLPRPDGVQLTKDDYIQLVFFRDDLVNARLPEEMRADNANTSMRKRYADIYTADPKPNNEQQMLVDAVFDGVKAANELRKGDFDDKDLNMPRLFMVTGEGGAGKTFTYNKIIAKVKAAGFNFLPMATTGIAAELLYEGQTVHKRLCRQRHIDASTSLNVDLESNFAEMLRKIDGMLIDEISMQNRDVLEYVDRLLRFVVPTDLLKSLPFGGKAVVIGGDWKQLTPVVPGGGHLDQYNASVKNSALFKHFTTHRLVTNHRLQSGQQQYRDFLRRVGTGVINDIQQRVKLPKQIVEPDRDALLQFVFPQELLDKPIENWQKLSERAILCPLNKETFELNNKIMDMMNAGNNNDNIDRIYTAITVPIVDDVDALQLENIAANINQENLIRQTPPGIPQHQLRVKVGAVMMVTNNISVEEGLCNGTRVQVLKLYENIIRCKILTGTHRGDEHDLHKARFQFGGDPKALHEGPIRCERIQFPLRPGSVMTINKSQGQTLSHVGVLLDKSQCFSHGQLYTALSRVREDTNIRVCTKNTGRRVKNIVMLELLDKEDLDTATMGPPDDPNDPVKIDTINYFNNSLVKYPRGPPPDHDSDDDDDDGKGPPKPPTSAFRTPTTRSRRPSSPDEPLADDITLDNLRKIKIVMGDITKQRADMLVSDKRGNTDNAILRACEPNSEGLQQQLKTIRQTIQGRVPDGYVAVTPTYGNLTEKAKFIAHVATPNCKGRDHTADDIQSLKQCYTKSLQELINELKKNGEQQTQIIIKRKISERKGTKGSRASSAASSCRSLSPVSSLAATTPPKTAAKTPQITPTTKDTHAKKHLAIDSKPGPSNRSSGESVAVVPPPVPKVQQKKSTAQNDQHAEATTSSTTASKAFLMRAQPDGNCFFNAICLTLFGSENHADQLRKRMCTFLRTILADQRLFLRQNPNYNTRESFLRRIDRMLLHGTDEGITTLEEYAGRREQERDWAQVNDSMLLAMLLQRPIVIIMTTLTQREIEQQRPQWNDNRQHLYVYFPDGEMRAPRSSAERAGNEVVYDDNYVPAALTPAAAMGSPAQPQPTTTAQPSREVLDSGPLKMAKQQPASQQPAAAPSVEVNRRGNKLEIHSESPRKTLLLAAKYAVAMNTETLKENISEAEKAKKQHLLQQCTASIHRLSEHIRAATDAEFQAKQQQAMFESIRQTPVSSDSAALQKSFDKLRKPLAELYNAIRNYLMLWQALRQIDSAKSSLASLKDWQDDFEFCSDRLQTLGEQWKEADDKFEDKFSKVYNDCENFNSPKKKGSSFFSPLKSLPKFMKSKKDSQDQQHLDALLSALRRILSEKKDEIEVEMKKKRTVRTSQTATRRRQLDEPTRRRTSASPSKIRASDVNVERAKKAAAAAESRFSTPAKMTSAEKSQLQREQQQQRRNEEAKKQMDARLAIVQQHLHKQIDRQNNLAVRNLQWDREAKMEQRIIQRYHAFRAMVDEEFRAAVQQGATIDFEQFLNSDAAIRSLCEEILEMAGQDADADVEELMAQHQAVIERQQRALAEQQYWRKFAGDASAEQPLRPTELELEIQRYNREHQEQERRLAEERIQKEQREAEMLERKMRRIKLEQPKSQQHLAKDSTRKRTQQQAQISTPTKAETKKSGKNGTLPSPGNARKQPQHAVSRLYFSEANAEPEHVESASSMLTTEQPIAIIQPDPEAIRAREIIDQRLNIQEADYVEDVHCGSDDKAPGPHPNFNVVHMEIVSSKKEGQWRDNNETCGVCTEPLLRGDLVTQLPCDTNVKHIFHTICLRRSLTTNRTCPKCRRPVNIPDNIWPTKDSHSQSYKDYFAEQSQSATSARPPDDDFVIRAWSVYEDLRNGQRDAYGSVIRQPIAPRRAFQLVIDQIREGSSDLGDRQLEWDITDPRNDEEQGLHMCETLLRERMEEDEKEEKEKKEKKYLEF

SEQ ID NO: 132063 - protein, 53 aa, Heterodera glycines
MSNSLARSCVISSNAFCSYKSSEAMEDRFDLIRPLEDRGVSLSDELGGPIITN

SEQ ID NO: 132064 - protein, 128 aa, Heterodera glycines
MPTKTHFLPAKESSTAFFYARRGTQRERSPSPCGGVRVTPSPERLARPSGVEVPPNTDLTVFKKPIPGRNWDEDRRKRNELLSAYSFAQDRGIAAQLRRLITEMKVFAEEAKKNVAHSRGVGIEVQGK

SEQ ID NO: 132065 - protein, 229 aa, Heterodera glycines
ETGKERERERERERERERERERERERERERDRERERERERERVRVREREREREKEWYFRSLENYEKEREKERDFRFWEIIREREKELEKERDLEREKEREKERDFEIWENYENEREKERDFRLEREKEREKERDFKIEREKEREKERDFKIWENYENEREKEREKEREKERDFRIWENYEKEREKERDFGFWENYEKEREKERDLNYREREKEREKEREREREKEREKE

SEQ ID NO: 132066 - protein, 109 aa, Heterodera glycines
MQSFFPVGTHFTKKNQSQFIFRNALKYSELVRLCVIIGNMLFKCSMLFQMLVIATKVMIGVTQNIFCKTRLVTCFSNVQCFFRCWLIATKVLVGVTQNIFFTQKLVTCF

SEQ ID NO: 132067 - protein, 289 aa, Heterodera glycines
GILEFEKNLKVKGKGNEREKERDFRIWENYEKEQKERDFRFWEIKREREKEREKERDFIWESYEKRKRNRIFDFGKLEKEREKERDFRIWENYEKEREKERDFGIWENYEKEREKEREREKEREKERDFKIWENYENEREKERDFRFWEKREREKERDFRIWENYEKERDFEREKEREKERDFRIWEREKEREKERDFRIWENYEKEREKERDFRFWEKREREKEREKERDFIWESYENEREKERDLNYEKEREKERDFRIWENYEKEREKERDFRFWEIIKGKGKRNG

SEQ ID NO: 132068 - protein, 235 aa, Heterodera glycines
MLDTTAESFLKVLRRFISRRGKPDLIWSDNATSFKLSQKTIEQLTTPKGVGQYHEEFLAHNKMKWKFIAQISPWAGGVYERLVQLCKNCFKRTLGRRILKYDELNTFVAEVEATLNHRPITVVSDGEDGIQPLRPIDLLQPDLQINWEITAEEAHPNDKQISSSERFAALFKATREAHESFWHKWHNDYLLLLREREKWDHKGPHLQDKGEPKKGMIADRLSCAPARLGPGGFWI

SEQ ID NO: 132069 - protein, 60 aa, Heterodera glycines
  unsure (1)..(60): unsure at all Xaa locations
GTRREKRRERERKEIDRXEMKQREREKKKDKRGEXEERERERRERVERDERKRIERKKRG

SEQ ID NO: 132070 - protein, 158 aa, Heterodera glycines
MFRKNVFYAKIENKKMASYRIVAYDLEYTTNTIFDEKSLRKETIHKPNFISARFICSLCLGEIKDCEICGTGPRHLNWCSKDGIDPLNCFVKWIINLEKYDTYAYAHFGGRYDSHFVLRELANLGYKQPEFLTKFFKIVQANRAHLGLSNDTKNVGFG

SEQ ID NO: 132071 - protein, 70 aa, Heterodera glycines
MDGKNYGLKHLQIVQDFWDSKFPGKFELLLFQGMLDFVRFLRGMAPVNIMCAFFMKKIIGMIKNIAENVT

SEQ ID NO: 132072 - protein, 84 aa, Heterodera glycines
MNVRLKSIAIHNFVGNGKFIFKEMLSAFHGKKVNVRCVPLLSVKKRRPTPHPFGLFTGENLYKISLIIIDEDNRKQKIKDNLGE

SEQ ID NO: 132073 - protein, 18 aa, Heterodera glycines
MECIFVQILRFVCIPYML

SEQ ID NO: 132074 - protein, 84 aa, Heterodera glycines
MAISTHLTRQVPMERLNFGDRFNTEPIFAESAKMLISIAFIPIADLTEAVNVLDVAFRNFPHMQPMLDFMLIEVINSQHLPRSG

SEQ ID NO: 132075 - protein, 112 aa, Heterodera glycines
MKVGRCSLLQCTAWPWKFVGETKGEAESLDSFNHFHLILHLRIGTILREGGSYTEAVKDMADEFSALTSSTWDIVNQLRFVSENAVKFVRVAGPVGAIIATAIDIAFSVKNI

SEQ ID NO: 132076 - protein, 94 aa, Heterodera glycines
MLKGCLYVILVLIAVSLIRCWIQKIADGNERKREPLVHFAKVVWLDLMRAPFFAKQLLFFAILISIFQKYGKMWVRRCRQALPGKFFENFNAIC

SEQ ID NO: 132077 - protein, 118 aa, Heterodera glycines
EITWPTISRTRAKSAIGVSDIAESKEAYQSVAEKIKDEVDQLGAEKYDYAVIVFPNWTDPEAMAIISEANSYFELIDVKQINVIVVRIEDNETNFELACKANEWFTPRIETKMKYTIK

SEQ ID NO: 132078 - protein, 81 aa, Heterodera glycines
MWWDHKRHLKLSDLADMLKEWLQFYRNLVLVHNWKFFSSAATITLGVTPTFVRSARAEKGFRHKIVPALFDAEIFHVHMLL

SEQ ID NO: 132079 - protein, 54 aa, Heterodera glycines
MPSIISKSSILLLYPLLLTTMVFISTSTSFPLLVTYNFNQPIQLLKLLKIDPRL

SEQ ID NO: 132080 - protein, 204 aa, Heterodera glycines
MPDGKAPHFPQQPVARQNDDGSLELECFLEANPVPEIKWFYENNELKPTERFSFRLDNRGSEAFSAILQIKDLADSDAGAYRCAIVNPFGKGNANFNLKLTGFSSPTFIEKPQISSRDDGRVMIMEFKAKSILKPTFVWQKGDEIVAESDRYKIILKETGNHEYYAALEIVEPKKEKDAGQFVCTAKNESGKLTATFSVKFEGH

SEQ ID NO: 132081 - protein, 107 aa, Heterodera glycines
MISRESLMLLRSVGERPFMRLDMLNPQIYAHCQLLRKVRCPNCASVFHKECAKKAGLDDCIAGLSSEQQQQQNKCPKCLRRAKYASTTTGSNSNNALAQLQNNTNIK

SEQ ID NO: 132082 - protein, 74 aa, Heterodera glycines
MIAHVTGLKGGEFVHTLGDAHIYLNHVESLKEQMGRTPKPFPRIVFKRPDGNPITSIDDFTPESVLLEGKILAK

SEQ ID NO: 132083 - protein, 151 aa, Heterodera glycines
RLQQLSLDADSSIQESGEQERTNSLSSSSSDSFIEYLEQFGLTDPVEEQPAPNLNSPNENHEGSSNSNESGHNNNNNINNDGIQQNNANGINNNNGTQTNAATSDDPSSSSTGAQNNDDATSAENCPICLESLTNTAIEEMKQLSSCRVFY

SEQ ID NO: 132084 - protein, 355 aa, Heterodera glycines
MRFYSLYKRGIISEKRWRWMNNNQTTVLRQKVLLLLRDAGIPTTEPEYDAEIYIHQVQGLWSTKYPGEYKIFIFNDYQTRPITRSDVNEYQFSIILYHHDKHFDGIKTLSKFFNKNYYCLSCESVYERKSQHSMNCSSLCHGCREVGVDYPCEPQQGYFKKCDQCNNNFYNKICYERHLHKDLCTKFQRCEDCGVIYNVKYHGKTGHQCGEKFCRLCKQFHVKEDDEDNPCSSCFIQPLKPHKLKPYRIIAYDFEATQDKKVGNKFEHEVNFAAATIICTDCINGNWKDSLKGSSCKICGPHRTITFAPFDFSNTIVDQKVTTMHPLRDFVQWLLFDHNKKFQQLPLHILRAATT

SEQ ID NO: 132085 - protein, 32 aa, Heterodera glycines
MPSFLVVALLLLLLMPKIMLLMLYANYCYCFN

SEQ ID NO: 132086 - protein, 76 aa, Heterodera glycines
MVIWSFLAMVGPVNGFCEKDENYGNQNHDDQNEDAKSANNRSCDGEVLVCEDSRLAVAKRRPTKAKGWQPTQFIDQ

SEQ ID NO: 132087 - protein, 18 aa, Heterodera glycines
YYLPNSASEMFLYPMEIQ

SEQ ID NO: 132088 - protein, 899 aa, Heterodera glycines
MNVGEIAFFLLSVLVHWQLTDAIRVISNGLAPPEIVHSPMDVKPRCLIRRCLIRAAPLDLVFILDSSGSLRNQFQDEIDVIRRIVRHVTIGDTATRVMLIQFSGVQHLEFDFNKFTHGVQHLEFDFNKFTHRDELLSALDVLRHVSGITRVGGAFEFAISALENASHGIRPSAVPKIVFLLSDGRTHDFPTDSEMAEKLRKKVSNSDIWAYGTGEYVALAELMKITKNESKIITNNESKIITNKNLDKIEPMFAPWHGVEVCEQRPVVCEQRPVCVKGSDKPLDLALLVDSSEPLDLALLVDSSESINQVFQEQVQFIINRIISNVHVHAEAVRLALITFSGQAFVHFGFNDPKVGNNSEVIRYLNTVHFGFNDPKVGNNSEVIRYLNTLRPIKGTTSAHLALASALRLFNDPIQNSSKRPNATKLVVLFSDKRPNATKLVVLFSDGRISEPVENVAEMLRSIGVETMAVSLNHPTNSNERELLAIAGRKEHVFTQKNLQEFEKSFLKFVGFGCDGFELGVNATPRIRGATDITCGPDSVTLTVRTTKPMQGMIYAQRFHDDPQCVLRSNGANRENSLTFRVGQCGVQKTPNSAESGYVFNVTVNSAESGYVFNVTVILQFHPIIVTRADQGLDVSGLDVSCVHHQPVSERELELTSQRSLVTSRCSYRLHRFGPDNCIALDAKVGESLFHKWECETGDEHRDEHRFLVHDCYATSERNNVQILDENGCEIDPHFIETPDYSQMNGCEIDPHFIETPDYSQMNSLPNDKGMAAFKFPDDDKLVFRCLISLCDLSSSDECAQMIPPKCDSKRPMAPPKCDSKRPMASAGERRILWAETFRCSDLMRRTLRGRKRQRRRRDVGTRKGFARTVAVETRTLNVIESEGIRPPTAEALRYCDVR

SEQ ID NO: 132089 - protein, 181 aa, Heterodera glycines
MLGVKITEKTVPSSAVPSTRNGPTPPLAKQRPFGREANRLMSEWTMPNGVRAFASGRYEPPAQRPPMLPRMPSHQPDDDSFGVSAHKKQSSPQLSFRSPTGQYAPLWSPAGAAFAVPSPAHLGGIAYYAPNSGDGMHGTTAAEAAVHPIADGGQATKPPVLLIGAFPPSAKVRPVSGEGME

SEQ ID NO: 132090 - protein, 20 aa, Heterodera glycines
MASSSNWKPTKPALTSPLER

SEQ ID NO: 132091 - protein, 33 aa, Heterodera glycines
MISCSKAQPKNKPLPINKKCQIIIKSDMGHPYF

SEQ ID NO: 132092 - protein, 92 aa, Heterodera glycines; identical to SEQ ID NO: 125147

SEQ ID NO: 132093 - protein, 151 aa, Heterodera glycines
MSQNRDENSQPPVLDGPYPLAQERNEFVEDEAPVLLEMLDRLSQGGICQAMGLFSFALADCLATFHTFAILFDCETPVPFDEQHKRYVFEHRDKPRLIYVSEDGSAIQVDGVVKQGEFVMSIETMYLDKRNGVDHFCTFLRTFGICFLMCH

SEQ ID NO: 132094 - protein, 52 aa, Heterodera glycines
HANVPPLLNDTVHFRPPANPIGCPQLAVSPNVVAPIHPFTTQPTKLNPSRTP

SEQ ID NO: 132095 - protein, 18 aa, Heterodera glycines
YREAIPEGFGLPINLGAS

SEQ ID NO: 132096 - protein, 95 aa, Heterodera glycines; identical to SEQ ID NO: 124528

SEQ ID NO: 132097 - protein, 89 aa, Heterodera glycines
MPLFGLLPPFLALILVSGSKDDRMNSGHSSISTTTIRPQLLATDEDEERLGIDMFRGYNPLIRPSPCRNSSVVHVDFGMAMASAKLGKF

SEQ ID NO: 132098 - protein, 358 aa, Heterodera glycines
MRGSSQQRRSTTRKFIYIKCKGYGTSNIPIRPITKSDVTDYQFPILLYHNNNHFDGIKTLSKFFNKKNYCLSCESPYYKKIEHSLKCSSLCHGCREVGVDYPCDPQQGYSKKCDHCNNTFYNNSCYERHLHKDLCTKFQRCEDCGVIYNIKVHGSVGHKCGEQFCKLCKQFHIKEDDDDGMNPCTKCFIQPLKQQRIKSYRIIAYDFEATQDKKVENRFEHEVNFAAATIICTDCIINGDWNKSLQGKKCQICGPHRSITFSPFDYTETTVDQKVVTQQPLCEFVQWLLFDHNKKFPTVAFAHFGGRYDMTMIIKEVLAQGIHNPDIIKQGNRLYELKSGKRAWPPHHLSRQLQPNAH

SEQ ID NO: 132099 - protein, 40 aa, Heterodera glycines
MDKFPNILFIWKLTEGIEGQIQFKWDNVITQSWINQKELL

SEQ ID NO: 132100 - protein, 130 aa, Heterodera glycines
MDGLRAEKFDVGMAEAYCLTEYSLALFHFLQIAVTIATQSQPMSPFQLHLMGHLSKMKKSEGTPTEFIGISTLNMFGAERMKLLNMGTKEQMAEELKWRRDEVWRNCVEQTLAKIKEHINMVENNHNIKY

SEQ ID NO: 132101 - protein, 90 aa, Heterodera glycines
MTVFGEHFYGVPIVCVPFIGDQFYNAELMAFRHIGLAVDRENDQQTVQNDLIGALSEALGRQQRKKIILFSARLSYASQSELSFFDSKIN

SEQ ID NO: 132102 - protein, 133 aa, Heterodera glycines
MNGAIVGGYSIRIQRFDLSSSAGVTKSADANNEKASDEQMHHISGTECRFNMQHLRPAQLYRLAVTAQSDAGPSPKSDILEYRSPPGVPEKPRNVHIEQKTLVEPPEPPQIFLAQATANSLKLKWSDGGGTDI

SEQ ID NO: 132103 - protein, 102 aa, Heterodera glycines
MPDLVHSGAEVISIQSTSEVCERQSNGSVCRVSGTTELTILPAGQKVSLALKDDKGKIMGSLELILQFLRLHCNQQTLKWLRSYKINVISKRRYPTMGSCTK

SEQ ID NO: 132104 - protein, 61 aa, Heterodera glycines
MIALDFQPFSVVEDEGFTRLLNFLAPGYKQKILWNSLALSSTKSTYLCAMLKVQCRQPRVV

SEQ ID NO: 132105 - protein, 428 aa, Heterodera glycines
ESEKIWDLETIGIKDNPMEKDDEVALKMFKDTIYRKDGRYVVSWPWKGPKEELPTNFTLAYRRMISIIEKLKKSEEHLKQYNEIFKEQLKEGIVEESEIKGYDEHFLPHHCVLVAGKKPRVVYDASSKIRGKKCLNDLLFRGPIYMPELPGLLMRSRLSKIALWGDIQRAFWTLELQENDRDTVKYLWLKDVNKPITKANLCAFRFKRVPFGVISSPFLLGATVRHHLENEKSELANEVKQNTFVDNIFVGCNNSAEAIRNYKNLKILFENAQMNIREFISNSEEVNNQIPEKDRLLKENPKVLGINWCIKRDTYIINFPKMHENEKLSRRLVLKELNSIFDPCGWLAPCLLPAKIIFSLWEEERKWDDNLNIDKINAWKAGMGARKFKSLVKPSSSTTENGKSSAIISEIFCSNNASFSLPDSHFSK

SEQ ID NO: 132106 - protein, 27 aa, Heterodera glycines
MYFSFPVAITTPAPTAPVFKYVFEAFF

SEQ ID NO: 132107 - protein, 123 aa, Heterodera glycines
MSGPIRMRINPSLRKLTERLVEIRPVIDAQQRDPEGIDLLRNSLVKIKRSVTFIDERIEQWRTYMTEIEVDERAAEEALFVNMNANQRHVTEWLEDAREAIDEIEIILVNEADDGSDTLSFEL

SEQ ID NO: 132108 - protein, 182 aa, Heterodera glycines
MIRRGFRDFSIDYTILIIIVIALLFLLVVTCVVYQKFKDRNNRVVNVDMNQRLVQQQQQQQQKESDRGVGGGRNLMGGKPNENIQWQKEPTDSRQWHAPNEEQPTEANKRQSPRIRLSPNQPQEGEEEEQEGKRDNGDEEGEERRNLGYEPKLGRGGGGDGSGPGAGAGREAADGEEEHGGH

SEQ ID NO: 132109 - protein, 200 aa, Heterodera glycines
MDYPRINESELAFPIPSGIIVSGPSSSGKTQLVLRLLRHANVMFDPPPKAIGMCKGGFCAVGCCYLVWAYGEYSTQIPDLERQGVVPHAGAPSDEMLKKLPKPCLIVYDDLMGDIEAKKLADLYTKKSHHNNFSVIFLTQNLFDKSMRVPRSNAQYIFLMRAPNDMLSIRNLANQMFPREQGFLMDAYRQACALPYGYLL

SEQ ID NO: 132110 - protein, 86 aa, Heterodera glycines; identical to SEQ ID NO: 130750

SEQ ID NO: 132111 - protein, 90 aa, Heterodera glycines
DKPEIELTCKTHLHVDQMFKDVLDKKYDAVVMPGGSPGSNKLAEDPRVGDVLRKHQEANAVVGAICGSPLALVAHNVARGATLTSHPSIK

SEQ ID NO: 132112 - protein, 269 aa, Heterodera glycines
MEEDNAGDIIKWLYKDSTKLDCSSEKVKVTSEHLHSKLCQVKLRGNLLGFKPLDFASEPFLISHNFPSRQIKCQEVMYESKLSMVVPREILRLSHKWATELRDELLDKLWGVKNAAILETLHNAIRHLNSNIEMHEQIIDFVNAFPNIFNLVDSLCEGGLAQLQHKGADSVPKDSLRNQMDNLNAQFESLSSKMVAVERIATANDRSQNLAECEQSARAAVHSTLDALHNLTCSLSSGQFLALVQSLRKASDCQTFFHLQLRSDALLSL

SEQ ID NO: 132113 - protein, 192 aa, Heterodera glycines
MGGEERKGREEEEQEEEGREEVKIKEEGEKKKRKEIKSEENGWRGGGKKREVTGREGMGGEERKGREEEEQEEEGREEVKIKEEGEKKKRKEIKSEENGWRGGGKKREVTGREGMGGEERKGREEEEQEEEGREEVKIKEEGEKKKRKEIKSEENGWRGGGKKREVTGREGMGGEERKGREEEEQEEEGREE

SEQ ID NO: 132114 - protein, 60 aa, Heterodera glycines
MISLNEASGLRGRLKVCDGNLSLLREKLATDPDSYAEEFNEQFEHFKRLLKLLELQPVLH

SEQ ID NO: 132115 - protein, 74 aa, Heterodera glycines
ELEDLDPENSGWKYWEKWEERRQQQMLRHDELKYLVPHYSRDDAGRLFEAYASTASQTAGVEVVGRVGANDEGK

SEQ ID NO: 132116 - protein, 70 aa, Heterodera glycines
MWLNAGRKCLLLSDSSMVLASSDPSGSQSVANMAATSAPVVHLSNAEPELFAELLSRGFVQKSVKIRNQN

SEQ ID NO: 132117 - protein, 94 aa, Heterodera glycines
MGNFWEKDRTIFSFYVSAKHSEFPVPSARSLLDGRFSPRRSHVVTTPAEDSASYDQQFFDNPLHLKWADRTQQNNDYADDDNNQMTSVRKMTLS

SEQ ID NO: 132118 - protein, 152 aa, Heterodera glycines
MSINVIRNGIAVKRGGRISEEVEEKARTSTLRVQQSLTESEKWKSGTSDDDPVGPQEWEENEEETMKKGEEMKKKEEEEKKGREGKEKETEKKKEEMKQKDETETKRSLSVGTTKDDEISIVDSEERERDAFENPPKPTNERMAFLGVDFEQ

SEQ ID NO: 132119 - protein, 85 aa, Heterodera glycines
MRLIGRTQTFQVDEEAEEGEDEAKESVEMSYRLNGFTNSTKFEVRVECEPGKVNEEMVGKRSDRNFQWHGPKGSAKTKKDAIGMD

SEQ ID NO: 132120 - protein, 513 aa, Heterodera glycines
KEIVSQLCTKLTSASADEIEALPGLGTAPNFKHYSGYLKSADKHFLHYWFVTSQNDPCRDPLVFWFVFWFNGGPGCSSLGGLLEELGPYLVNSDGRTLRLNPHSWNKNASVVFIESVVFIESPVGVGFSYSADEERVMSGDETAQGNYEAVTAQGNYEAVKQFFLKFPLFRTNRVFITGESYAGIYVPTLVAKIVDGQADFPINLEGMAIGNGFMNEAIDTDTLAGMAIGNGFMNEAIDTDTLARFAYFHGFVGETEWNAIEKHCCGGCADNCNLGEQFGECRAMNCNLGEQFGECRAMVRDIILFCWVRDIILFCWTGGINVYDIYRDCFPQHSKMAAIPQHSKMAAIRRGILRAKISFKRHESLGGNFLTSLIRLLKQPLEEIIRGGAPCLDDHAITNYLNTPRVHAITNYLNTPRVRETLHIPRETLHIPPNVPNWESCKKMSGHKPKILADMSPFVRKAINANLRVLLYSGDTDMACNFLSGQHFSAQLGLAVAWFFLAFNHFLLTDNR

SEQ ID NO: 132121 - protein, 247 aa, Heterodera glycines
TAQGNYEAVKQFFLKFPLFRTNRVFITGESYAGIYVPTLVAKIVDGQADFPINLEGMAIGNGHMHTSMNFDTMARFAYSHGLLAESSWKELENECCRGCVGGKSVSYKWITKKGRLQILAIWVYCTENATERYGNHLLKWQPNALKVLNIMRFVWRGGLNVYDIYRDCDHQPNSKRMKAIRNGIFKSANKTDRWNIIGEELDAKAGKVGSLSKSDNLKENEIARESLREIKPCANDEESAQYLNTPK

SEQ ID NO: 132122 - protein, 515 aa, Heterodera glycines
MKIINSYIIPAKIMVRKKQIFSKERVESSREKSRYDGFQAPEKSGNNGFQAPDKSGTDIQTQTMKIFEKKDYDIGIEETIEIINIDDDELSDYSDIQSSSQINNTTLRKMKQRKKMNIDQKESEKQKNRERMALNRKFFLEESQAEKQKNRERMALKRKIFLEESQAEKQKNRERMASKRKKGLNEKIESYICADSLSVRKHKLGPMNNECVHCHSLNFSEEIVAGKKSEFKNCCHYGKVLISDFPEKNFPVGLKNLFIRNDVKCRMFFENIRYLNSTLSMASINPLRYKFKHNRGPYCFRISGQIFHKMNIALLPDEKEEPTNGQLFIVDTGDAVNLMKQSNSKIDNDLLNYLYNLIKSENPFAKAFVMMKEEEDAEKERAKQEGREPIEMKLLFGLAPNMDKNRYKLPRANEVAVVFVPGADGEIPESKIVVRERGKELKILDSLDKNVTPLCYPLFFPRGTPGWHPEMKQTNGYKSLTRLQYAGCCMAVRCEFNPMLFGGRLFQQWGADEYV

SEQ ID NO: 132123 - protein, 135 aa, Heterodera glycines
KLGQSVEPEQFECVTVFFSDIVQFAALSNQMRPLHVVNLMNELYTTFDAIVDEHDVYKVESIGDGYLCVSGLPNRNGNLHAKQCADMALKFALKFLNSLQSFRISEHSDQRIRLRIGLHSGPCVAGVVGLKSRFA

SEQ ID NO: 132124 - protein, 35 aa, Heterodera glycines
NKDEFLSKLPFAKVPVFVHDNLVLSESMAIIEYLD

SEQ ID NO: 132125 - protein, 334 aa, Heterodera glycines
PWLSSTRPPTPPPGPSSSSTYARARHNTQQQQQQPRSSPPPIRACSITAQRSMAAIVRQMNTNDAAVARDERRSRERRRLRQLNAQPRQGRRLSTPRSSRGRNTLSPRPPHNVITIDESDAEEEALGVAQQQPLADEDQHFYDDEMLTIEDQIAQGLVEGAANEVVMMGNHPLAAADRVWMIGTAFEMSTLPSSVKGIVEHDEAGRRNLMCCICHEWIIGGGQRVCNAWRQIGRGRPSFTDQSDHDSSSTNGSDHQQHVSGAPPMRDSRDPAVSNLGSSSSSGSAAESANVAPSDDEADAGEADGQRLNRFCKVIGAWERTECRSRNTRCEAVE

SEQ ID NO: 132126 - protein, 241 aa, Heterodera glycines
MAFSKQFAVFIFLLLQHSIRSQQQQQQQQNVIEQQSPSATAAEQTLPLSELHNTLNQFLYQLKQTGEKVVAQTPQIASPLLFNAAAAAAAMGQQQQRHSAGDGGAATAGGGQTPEQQNTVSDDPPTTVSELENTVHDDGHATVAATDVNANTRQQQQQVVAAAVVPPLAVPIEIETTNDTSPNVTALTAVDLEAFLRSANVARILSTWVSDQSLTDPLTVQKFGHQFLADRSDLAIFSNGF

SEQ ID NO: 132127 - protein, 68 aa, Heterodera glycines
MTSSQDTKLFLALVERVLEQEVARRLAEQQPNNNNNNGDSNNSEYGDNSTQRMSPPQHNHAAAVNTAV

SEQ ID NO: 132128 - protein, 73 aa, Heterodera glycines
MAASDVFEAMFRFDSANATTSTSKPPSDLASSSNPVVVSDVDADVFRAMLGFIYADDLSGMNGDNLFDVLYAG

SEQ ID NO: 132129 - protein, 36 aa, Heterodera glycines
MWILIEKSKILFENHLLRHSFSMSLLPHLIFVGLSH

SEQ ID NO: 132130 - protein, 18 aa, Heterodera glycines
PVNSCIGCKCRRCCTPNS

SEQ ID NO: 132131 - protein, 52 aa, Heterodera glycines; identical to SEQ ID NO: 128760

SEQ ID NO: 132132 - protein, 164 aa, Heterodera glycines
MASVDENEQLVQEIVGNVLSESAKDHQQEEGTEHQLMDEVVKMDSTDAEAEDHGGIGHEVAISVSDVKQEGYAVESPVGEEEEKETEGQNDGAMRQIADKVGGLSLDEDKTANTDAVVEPPMATEEKAADVGNDKPSGENLNEENNESKVGTNGVHLTLKPFFV

SEQ ID NO: 132133 - protein, 150 aa, Heterodera glycines
MLRIRSANSYFSQEINCFPFIKMILFLPLLVFIYYALRYLWELIPLQNASKRAVFVTGCDSGFGYLLALKLAQYGMLTYAGCLTKQGRDELIEEAKKRGIAAKLKTVPLDITQDQSVNDAADFVRKDLNSVGNIGELLFCPGLILIFFLI

SEQ ID NO: 132134 - protein, 52 aa, Heterodera glycines
MSQIRRRRSSLMGWAAAATGAMLLMSFTSITLLIERVQAKPSTPVGGPYSEH

SEQ ID NO: 132135 - protein, 176 aa, Heterodera glycines
MLFLPRLGTNCRLCPLALGKIVIVLLHFVCFIKVVDGEDEHQQQQLQIDHGGAEQSSCQPFIYKGCAGNLNRFISATECRKTCSKLSKKTQEWVLAERCNASHLIPDGHYIECVAGKCPEGHKCHPADGICCPRKEYVCSLQDNSGTFADGVPDKPRFAWSADIKVLLAFLVLSTA

SEQ ID NO: 132136 - protein, 21 aa, Heterodera glycines
  unsure (1)..(21): unsure at all Xaa locations
IFFXLFIXLNYVKILNRLFQE

SEQ ID NO: 132137 - protein, 343 aa, Heterodera glycines
MLNRNKAKSVQTGPNPEFPERSKAKFVQMETNPQLTDGSEGNSISQKSTNLRRLKSESNTDKRRFLESKKENLRMADSSRDYGPRHRQFPGHEISPNRSQRYHDHYHTHSTRYAPEISSSRSQRYYDHYHTHSTRPSYRRNSSPDRQSSAIQQGSQHSENYSTTDADRNGRDSSQQHHQHYSHPSSSKSQRSYSSPDQKRASSSESRRTNYSSSLDQYIDPQSAQAQIIQNPTQDDQTSEHSSKETNQQKQPVYEQNLENQLYDPLQPSSLTTNAQAYNQPKLLQTSHASHGQPMFLPMNYHQPLLQAQAVNVSTQPAGFPLHAYPLQNPTQTNFIYQSGMLT

SEQ ID NO: 132138 - protein, 305 aa, Heterodera glycines
MPCLLVPVCVGSARLLPRGEGMGARVGHGVRSHRRGAIWRTARHGHFLCGGNGRCIHCQMRKYLSPKSRERFTEVEAVAELLGIRANALTFTILDSLITSVQPSIRVGDALIRRSQPLRKTLCAAQSLAKCVYERLFSWVLSKCNSAIRRGRTGSGQSDETDGGREANGMVGVLDMAGFEIMPCNSFEQLWFGCASSNPKQFFNEFMFIREQEEYLREGISWEFVKPLGILSLLQEECIVPNGSDQSLLDKPNNPIGNQQLFFPMCTEQISPHQTECQPPITSQSPIMPAPSVIPWTDGWRRTET

SEQ ID NO: 132139 - protein, 394 aa, Heterodera glycines
LIFSFFEYCNGGEMFDYIVKKERLTEPEARHFFRQLVQAIAYIHSMGFAHRDLKPENLLLTFAHRDLKPENLLLTNEQQLKVIDFGLCARPLKGLDAVLETCCGSPAYAAPELLQNSYYFGNEADIWSMGVLLYTLLCGCLPNSYYFGNEADIWSMGVLLYTLLCGCLPFDDASYPRLYQKIRRGVYLEPDYLRGVYLEPDYLTSETKEFLRCMLTVDPKQRANIRFLRCMLTVDPKQRANIRQILTHPWLNKSYRQQIKWQSIYNVLFLDADVCQELAYFYGDADVCQELAYFYGSEKEEVIAQVKQWKYDSKTANYLIWKYDSKTANYLILLQKSKLSNRFSDLFVYFSRGAETEHCVALPQKSSVSFNLLVLIVLFLKSFQLVKRPSSLTI

SEQ ID NO: 132140 - protein, 56 aa, Heterodera glycines
MAFALFWLSGMCTGKTMRKNVAKITIRRNERRKINLITRTMIDERSRMILFCCCCC

SEQ ID NO: 132141 - protein, 25 aa, Heterodera glycines
MTQMANRQPKRLIVIKSNINTTPAK

SEQ ID NO: 132142 - protein, 78 aa, Heterodera glycines
MSPLLTVHFQCEVCGQILSIHFLYNALLHLSLTIFYVAPLFQRLLFGIYSFRRIANIFTTFRLIMEKIMHIKGIKKCY

SEQ ID NO: 132143 - protein, 131 aa, Heterodera glycines
MSLLKSVDSKLGDEILATIVETTDIRLDDIEGNAMAKLALEESKSRGEKIAAMTDNYSYSDLKALCRAAALFPVQSARMENRDLRRCTAEQLRPVNVADLENAIRSVRPSINAESRKKLIGFAENHANQQT

SEQ ID NO: 132144 - protein, 175 aa, Heterodera glycines
MARRYMIMFDSLKEQQEGEVRSTEAMSELVGFGASELKMEHNLLKLQGIASFTKSVQQTLNSYEVRKLGDKVQGYVMNFTETEQKVREATNEDPWEVMGMLWKRMFQENKLAWRRVYKSLVLLNYLIKNGSERVIRTARDHVFEMRSLENYKCVDERGKDEGMNGLSEFGWPFVG

SEQ ID NO: 132145 - protein, 215 aa, Heterodera glycines
MLFGVLFAHKRYGLRKYFYVLLIVTGMAIFLYKPQKGSVGFQLGSGELFLCLSLAMDGFTGAVQDRIRHYHTTDKWTMMFSMNAFSSAFLTLILLASGELFQFFRFVAAYPFILQQMLLFSLSGACFIFKTVTDFGPLTCSIITTLRKLFSLVFSIIIFSHPYTNRHVLGIIFVFAALILDAIDSRKSHGKAKGDEKPPAKDGLLQEATAQEKEN

SEQ ID NO: 132146 - protein, 108 aa, Heterodera glycines
MDPSKGFYNREEEKLTLAIDVTVKDEKMDKFILEQSNSNGTIWMDIEKVSEFAQEVTWSERKSEAVHINGFSLRILAQISPKNGSTGNEKLLGIYLLCASPTEGVIKG

SEQ ID NO: 132147 - protein, 86 aa, Heterodera glycines
MEIFDEFTISDENSISFFTDSKFLMESSFAAIEALLDSFWLKFKDVGNVLEQNVPLAQIILWAWDDNGAQVIKEVITDQNAVSQNS

SEQ ID NO: 132148 - protein, 46 aa, Heterodera glycines
ISKNIMVNKFLPLIIFVFLLIDTAICRHHHRHSHHHHQQNEQPEMI

SEQ ID NO: 132149 - protein, 324 aa, Heterodera glycines
MQHEPADPHFPKRKKHQVNFVTAKVACPDCISTGKWKESLIGKFCKICGYHPTITFSQMPFRETTVDRQTIDRHPLVAFVKWLLYKLPNQYETIAYSHFGGRFDMVLVFRELFMEGLNPSMIRKGNRLFEMRVKSRKNLNPNVTFRDSWNLIPGLLASMVPMFGLDVQDKPFFPHMANKPDNYGCKILPAKADYLADGMIPEKRKQFDQWYQQNKNIPFLLDEALASYCKNDVDILMAGLIAFRGEFLEMTKRPAGLDGKADRAAYKTAHNGIDPVRHCVTIASACMRHFRTNHLKPGHLALVPEKGYDSCGDNQSELALNFMQ

SEQ ID NO: 132150 - protein, 646 aa, Heterodera glycines
MNEDNAKDRLEEFIGAEKTEKAQLLLRLNGEEYKGFVKEMKEKEKLEKSEEEKERNKKKREEADEIMRKLIEEERKKEELKKRMEEMQREKKERRLKQRELQRMKEKETEMDNGDGREQQNEDREASEGSQSEENSSSLAESFVITPKSVPKERKNGIFENKEQNGEKEKKENELLFGREEWQNELDKTKLIDFTSDQFLHEKIDAFLQNPSETKKHMLDIGVFVNELRHRMEMIRQLSKFEGNLEMEQAEIAVKIERMAKIDEKWTQLKRELMRDNLIRDRTQFEGVISKMYRLLKQMISIGEAKELQEEKEERKMVANQLATVGRESNAEWEEDTVEDREKAAIKSVKIQLHKNKLAKAIFSKEKRANENAEKNTFWEMDREQKSEILMELFEYERRKTKMISRFEEHLEGWQKLEEQQEIDRNLRGQKNAQQIYFDFARPHLEVNFPEISQQIRNDQLENIQQKNMFTDFIKEIPKSDANSVGAAFDTLKSIIEKWSNGAARLIVSGSHFLGTRTADSDIDAICVVPQKESLRGEREKFLGFFNCVLTIQREQRICSDNSLHCQFCKHANVEYLTKFPSVHIQLIKLKLLGVEFDLSLVSVPDMELLPDEPLEAVDVELMMEMIANQRVPSEVMLKTMAGKRI

SEQ ID NO: 132151 - protein, 87 aa, Heterodera glycines
MPVKLTQQIGTTFDAFAWNTSADGQKGALMPIITPGKLAQNCAINVNESTIKILQDEMREAHLYLTKRTAANFGQLFSQRNFVEKVG

SEQ ID NO: 132152 - protein, 90 aa, Heterodera glycines
MAPTTRLMQHKVVCMCHGSVPNWRPKVAKGCCTSDANRSALCRSVSNGRFLIGTVRQDNCWQLEVTEEEKRTIWTRFVDLQPNFRVIEKS

SEQ ID NO: 132153 - protein, 41 aa, Heterodera glycines
YDPTGITHVRLSPMEKLQDQMLEAAKERGTRDSKGYWVGKQ

SEQ ID NO: 132154 - protein, 244 aa, Heterodera glycines
MAGPDSRFILEFFNREAKEIGVTQELLDNSQPSDQLIQAYYFLCDLIFENVGTTKENEYEMATELTRARPQMIIRTQQHCNLVYNKLFDGSNEFLYSDLFQPDPCRTKMQIAQLIRLYTTKCDIAKELSAVDNHIDECKKLFAQEEENRKRLDNNIVNSPERIIEELSNMEVEVEDIRRKNDQAVQNDRKLEREYGEQLVTSKCVESLINSMQQLEMMQEQMVEMRAKEEERRKVVPFGDLIPV

SEQ ID NO: 132155 - protein, 73 aa, Heterodera glycines
MGQIKKLMCLCTSTNSWLSNDPGLFGSGPGKCPKKGGQATSTLVAISELVQVANELDNEEDTLTLEADIQITN

SEQ ID NO: 132156 - protein, 56 aa, Heterodera glycines
MGQSEKLMCLCTSTNSWLSNDPGLLGPGPGKCPNKGGQATSTVVAISPKKKENFFH

SEQ ID NO: 132157 - protein, 78 aa, Heterodera glycines
KFTEFSQFALDKKRWPLANNTFTKICSRFLISFSFLSRHMDIHSSPSCFVLFSAKSAGQKECHHNAKPMNGNWLILKT

SEQ ID NO: 132158 - protein, 370 aa, Heterodera glycines
KETEEQFDQMPWHLLAHHAALGWSQWSEWSACTRKCGGEGMQFQLRRCLDMYCSGPSSRHRICAEKVCLLHKRLIPYTNCGGLYCISVVEGYYRIAIVEAYTVHQLWGIILCSSGGKVFFLSGRCRSVGCDGIVGSSAREDQCGVCAGDGSSCADELFQWRDTGHFSPCDKSCDRTVRQKGGGEGGQSIRVSVSVCVNIHTERVVPEIRVSVSVCVNIHTERVVPERMCADRVRPRPQIRRCEHIVCPAKWFAGEWADCSVTCGTGQQRREVFCVERVDANVDRRVNVQHCLPSQKPVDVRKCSSEACPEWWAGEWGACSANCGRGVRRRTVGRAGGGKMPNKNLNCKSNANKAIRMPKILIFGGVYGGN

SEQ ID NO: 132159 - protein, 114 aa, Heterodera glycines
MPENLKFSTQNLHRFHSSVSSSLLSSLYGAAATTESDSTKTEDSKRNNEANCKLQYGDDGNIMPKRAENQGENGQERTEQNGVGPRTLVLATAWLNPIDRELPKMPELKGTKVI

SEQ ID NO: 132160 - protein, 53 aa, Heterodera glycines
MPRHCTITGSAARAAVRFMRAMFISGRNNRILSSMPRLYAFSKFQISNFHFNI

SEQ ID NO: 132161 - protein, 113 aa, Heterodera glycines
MDTENWGGNGTKITKTPSKTPTQPQRTRNKSSSNETSDSEVQTTAARPSTATPGKAELKRRTTEDTSDSEAETPAKSKVLARATPKKQQKEAETAKKPAPKPTEGTSSEDSSG

SEQ ID NO: 132162 - protein, 55 aa, Heterodera glycines
SVEALKTNWPKSKWSYDSTRGGSDCLRTNWRMPTWPMLMEYENGWPYKRNDPPKG

SEQ ID NO: 132163 - protein, 152 aa, Heterodera glycines
MSANCAGVKPQRAIFTKDGRVFSTGFTKRSERLYALRHPDNLSQPIMQDELDTSNGVLFPLYDEDSGLCYLMGKGDCAIRYYEINEDPPYVHYINTHTTSEPQRGFAFMPKRGMNSLENEINRKRDSIKPTRTSARTADAKAGAPSAAASRA

SEQ ID NO: 132164 - protein, 25 aa, Heterodera glycines
TCTCGVVVKLSTFHNFSPGFNSPLG

SEQ ID NO: 132165 - protein, 264 aa, Heterodera glycines
MATAKTNARTRTQNAESECGNVGHWAVICKTKQGSNWPRRQGKPVNQVNTECQKAHDIGTLAKSEEVKSISVPPAMIKLQLSKKATDFELDCGADVTLITKNDWMSIGRPKLGQTSGLMAYGKKPIKVLGSFKTDVVYNGKEVNAEIYVVDGEGKNLCGRDLIGELQIDLNKAFGIRSVNEVNSKAVNRELGAVLLKYGEVFNDGLGRCTRQISLKFKPEVQSKKCKPRPVPFALRPEVEKVIDKWVKDGVLEQVTTSERATPL

SEQ ID NO: 132166 - protein, 241 aa, Heterodera glycines
IASMPALFYTILVMMDQQITAVIINRKDNKLKKGCGYHLDLLKGCGYHLDLLIISLLVLICSFLGLPFYVAALLVLICSFLGLPFYVAATVLSVMHVESLKENGDCTVPGSLKENGDCTVPGERQKLLGVKEQRLSAIEQRLSAILSHIFIGCSVFLTPLVKVVPLPVLVVPLPVLTGIFLYMGVVSLIGQQFVQRIALLFMPVKYQPDYVWLRNVPTKRPDYVWLRNVPTKRIHTFTMVL

SEQ ID NO: 132167 - protein, 45 aa, Heterodera glycines; identical to SEQ ID NO: 124814

SEQ ID NO: 132168 - protein, 190 aa, Heterodera glycines
MAGKIFVVTGANKGIGYGIARGLAQQVNGATIYMTARTPSLGEKALDDLEKELGTKRISKLAFHQLDITDEKSCADFAAFLKKTHGGLDVLINNAGFAYKQNATESAAIQADVTIGVNYYGTKLISDQLGPLIRDGGRIVNVCSQAGVMGSQIGVMGNLYKQSLIDQFKRADLTSDDINTFVEEYKKWEH

SEQ ID NO: 132169 - protein, 76 aa, Heterodera glycines
MGMGDTLLCKAIEPFRRLKLSTEEFVLIRAIIYSNMVSPGLSDQAQKLLLSEAEKYSSQLMSIVQVAFFLFCNWFS

SEQ ID NO: 132170 - protein, 68 aa, Heterodera glycines
MHAFCARAIYHRACQSKAKQQRCCFERIKGIESVHRLLEKYICNLSTILRSELEMINFTIQTNFRCSN

SEQ ID NO: 132171 - protein, 77 aa, Heterodera glycines
MHTFCARAIYHRACQSKAKQQRCCFERIKGIESVHRLLEKYICNLSTILRSELEMINFTIQPIFVALINRDKNIRIN

SEQ ID NO: 132172 - protein, 64 aa, Heterodera glycines
MSRNELVGFLLRQIKFHPIFANNFFSSSDSGLIHWDASALAQGANLNPPTNGREMTGHESAAGW

SEQ ID NO: 132173 - protein, 42 aa, Heterodera glycines
MTTENEIFHRQKLGCNAFWKTQLTLHKRQGSVVTGTYILLFL

SEQ ID NO: 132174 - protein, 95 aa, Heterodera glycines
MAVRRRVAHHEAGHIMANHLNKHGTECLASDVVPEGINDGYTWIYFREKYTLAQVMATLQYFLELLGTLNDRNVHSTDRDGARLKKVNIIILTKH

SEQ ID NO: 132175 - protein, 154 aa, Heterodera glycines
MRKLIILALLSLFFILVASEGKEGGDGAEGEEGPGQGGGGKEGEGGGEGGGEGGKGGHGTGGKGGRGGGGPGGGHGVGGGARGEEEGGKGGQGGGHGGGGEEDGGGGRGAGHGRGRGGARGGGHGGGGEEHGEGGGGGRAGGNGRGGRGGGIRE

SEQ ID NO: 132176 - protein, 64 aa, Heterodera glycines
MPRFSGYFCLILSRFRRFELINQITQMNYTLICFSILLQFTLFWASICAADNGPPLTIKQLIYI

SEQ ID NO: 132177 - protein, 291 aa, Heterodera glycines
MKWLENAVMDESNGLNMKGIYEKILEEFDNRRHNQYSAERSFGMACSAEFFKLHSLNYLSQFVLRQIVQSALTSQANFMYKIFQTEMKHLYEELHIFLREHFGTVVGQIGISSREKGNDEIEDGETDGDGEDTTGESDEDSDGDEQQKQQQNQAVPAQAPRHRDQHERNDDGHGHGGRGKAEESAVAEEQPREQCQDELKHPKQIGEAALSEQQVEAVTEPTEAAAADKGGNGGWWVAEKLANLCNMATINKKGETREELRTLPTRTKCTMTWTKTNFEEEEKEGGGGNCG

SEQ ID NO: 132178 - protein, 129 aa, Heterodera glycines
MAEVALFQMAMACMANRMDFQMADLAAPVSIQIAAGRIAFQMVDLAAPVAFHRWDITRADFTALGPAHLLEATDTEAVLVEENEKMTERFIFVPIDRLFISPLLLKMPTEPCQAYAKAIEQNKRGDTSA

SEQ ID NO: 132179 - protein, 32 aa, Heterodera glycines
MQIGDQLVEIDGESCIGMSHERAIGMIKERQC

SEQ ID NO: 132180 - protein, 25 aa, Heterodera glycines
KCHGTRKVLLGRVKCDGTRKMSWDA

SEQ ID NO: 132181 - protein, 120 aa, Heterodera glycines
MRKFRQQILSLFHFVVLHILIAINSRIINALLKLQQQIAGNGQNNNAGEQIPFGELVRQGVTLGFALAGQNTTGWDEKTMRLVSPRFLSVVAEEEMASDNETVEKMENNRMKKVGTMPTE

SEQ ID NO: 132182 - protein, 62 aa, Heterodera glycines
EAAGINEEAKKIADETEKEEKEVKTVPTIGTAADNGTRLNLTEIWKKSRGMYEKEVPKLAFN

SEQ ID NO: 132183 - protein, 68 aa, Heterodera glycines
MAGLPMAPMQMHQMMAQRPPPPPQMGQMFAPPPPPMSRPSTAASVRLTDDDKFGACCWLMFCERMRTI

SEQ ID NO: 132184 - protein, 42 aa, Heterodera glycines
MKLRKNYFCSNKNSLKTPGILKKSIPYIVQFILNKFSIKFLV

SEQ ID NO: 132185 - protein, 93 aa, Heterodera glycines
MASCKSPISLLCMLLIMLLIDPCFNISLFNPASDDCVVAIRNRTQIPPGVSHSLLKINTILAFCLRFTNKNAIKTENTPLIIDSKIFKKYTPL

SEQ ID NO: 132186 - protein, 112 aa, Heterodera glycines
MSGGTSFFPQPNHFLVVQRNGATWPPAAFGNGRPLGLVGRRPIRIFAGEIRKNTSKTIKSNLMFMVLLKFSKQNKIFESSLGNKKKEFVAAFRQKNDISPVLNSASGFNLQS

SEQ ID NO: 132187 - protein, 191 aa, Heterodera glycines
MQRELALYEQRSNELTAKADQLQETLLDRERELDTLRDQFKKSLSDQTSRLNELEAELRARERLANVYKANSEAANAEIAELNDTEVRLQAQLKEAEQIVHSYTAEMERAAEEQKKTITEKDAEIKRLNDEVVKSTELLNAGFRLNRADEDLIQLSPAAAVASSLLKSGMSLTSIYAEHWSRGGRIGQEKR

SEQ ID NO: 132188 - protein, 241 aa, Heterodera glycines
MPPSNIHHHIGLTDPIVLPIRPPEQNTADTLMGELEKLGQSDGDEDVHGGGMSKRSLLLSEPVQIVITCIAPPVGAAPRFHHYQHWGYNERQLIRIRNVGDHFCLFHALIAARSYTDHDLTKMIAPQQQQCHQGDDRLYPGMYRIVLFEDRPEELPRPIWKGPMGRCFVVALFMSGGHFDAIKKVNCFFKLGRKYCIDCECVYTTDAKHTISCKSRCAQCTRGYFVGRVRKILFIVVVVVQ

SEQ ID NO: 132189 - protein, 82 aa, Heterodera glycines
ICQLVSKTIGLFQWWGFPISHRYEENKTTTPFYLPDELQSYCQNDTEILLKAIVQFRKILMRDITGGYDVLPISSTICQVKH

SEQ ID NO: 132190 - protein, 161 aa, Heterodera glycines
MPCKKKLTEALYCESCDHHAVSPLNNLYLRIDLRDCEDIETSKQITAFSSTAVKYLGLKIDEFSRLAEQRPKKLASLLQSKIEETIALKLIVKAKGETLDWVISSIRVPEQVTAVDDSVDAQKGGSKDGNGNDGDDDDDIYTIDDAECTRMPPPKRPRKTE

SEQ ID NO: 132191 - protein, 360 aa, Heterodera glycines
HWGLNYPSFQFPRFNPTSIPVTGTLFSCIPITGTQLSDIPVTGTQFSSIPITGTQLTIIPIAGTTSPDSSVSQPPRLNSPVTGTQFSCISITGTQLTSIPITGTQFSMSSITGTLFSSITGTLFSCVSITGTQPSSISITGTQPSSISITGTQPSSIPVTGTQHTSISITGTQFSRISITGTLFSCVSITRTQFLCIPITGTHSPASITGTQPSSISITGTQFSCISITGTQPSSISITGIAFQSLGPNLTWSFGIPITGTQFSCISITGTQPSSISITGTQFSCISITGTQHTSISITGTQFSRTSITGTQFLCISITGTQFSCISITGTQPSSISITGTQFSCISITGTQPSISISGT

SEQ ID NO: 132192 - protein, 22 aa, Heterodera glycines
MIGKIETAIPAILGNPINIFPL

SEQ ID NO: 132193 - protein, 277 aa, Heterodera glycines
MKEETKLSPEEELQKQQDLNSKKAVINAYAEKLKGLIQTDKDSTAKLNNALTDMNIASKNRNYRQISLRQRSASTSSTSSTSSTVSSTSTTSSDSSSTTSSSSSSSSTSTDSQEKNDNTQRTTGRSSPKGVEPPKQPIMLKRMIGANRTVKNGQHVPTVQVENRVPQKVTKILPLESAQAKKGRFVAAFKIAPTAAHLPIANYGTKSAAVAKAFVNSDGGEDGEEETLPKNAHNKMEENPNQKLQKQLTDDKIEEHSFPTTMAHPSKVEEMKMPSED

SEQ ID NO: 132194 - protein, 122 aa, Heterodera glycines
MYFFLFCLPIGLCASSAQITTSLMMMVFVVVPEWLADSQNDAKRFNQTRHIKVIPPKMLAHADELNTVLDFGGYLQYSYLFYGFYSSETVLKGVVIPYNVPVAYFCVNLFLLVFSIFIILKK

SEQ ID NO: 132195 - protein, 38 aa, Heterodera glycines
LKITILAFCHYFFTISRFFGKFLNKNAIKSKNTPLRID

SEQ ID NO: 132196 - protein, 189 aa, Heterodera glycines
MWQRIKDRVLIYDRMGRGTVHGETSIKYEFKTDEDGKTQRAGWCSMRSLNDKKAFDRKNFFSDWSHYTHLLIKCRGDGRTYKVMLHIPQFMDITWGNSYTYLLHTHGGPHWQFEMIPFSRFVFTVEGRAIDVQYPLDPRAASSIGITLMDRIEGPFRLEIDFIGATHDISHLEKHAYEKYNIPLGNPML

SEQ ID NO: 132197 - protein, 44 aa, Heterodera glycines
SVINFQFKCFVYSVPLIRLPSDFGRRVVSDRQQLCQYMRFVLMG

SEQ ID NO: 132198 - protein, 86 aa, Heterodera glycines
MPRKLLHQLPISSNKRRISSNCRPPYPPLPTPSANTAPPNNRRDSSNPDRIAQVSKIVLWAIIRISENEGQGENTCLWTKDFSYIF

SEQ ID NO: 132199 - protein, 35 aa, Heterodera glycines
MEKNEPYENSVVEDDEFHVLQPHNFVVKIYRSQAP

SEQ ID NO: 132200 - protein, 76 aa, Heterodera glycines
MVQFQSSALKPRSGPIWYQLVTFRLQSTKFYSISVSFICPNSAASSRVRCAARTDQRNCVAAAHEIHRLRRHCSHK

SEQ ID NO: 132201 - protein, 68 aa, Heterodera glycines
MPVVFDSESSDEEGIDPFAWLTKVPGNKTAAKIRRNGMAQMAPTKRLRLKIIQSTCPCGKILHYWSKS

SEQ ID NO: 132202 - protein, 42 aa, Heterodera glycines
MGLNSEQRGKAKAKKGLLEDYGIIFLFGEFGLNSEERGNAKI

SEQ ID NO: 132203 - protein, 132 aa, Heterodera glycines
MMLLPPMIFLALSLAFLLNNNGTFGGSCTSKDGVMVSNGQMKQEQLKKKRQGTTPKARDLSRRNSSTSTSIGSEIDINDTINFIKETTRDGYTSPMQSSRFSDSQMPFPPLSPNVTHFAVDKSSREFFQVRV

SEQ ID NO: 132204 - protein, 201 aa, Heterodera glycines
MADEIWRDLTHLRKKSSNGWQMHDRERRELQMSHGESRGFLDRLERKSYKGRQRMKQREGEPTKEKHSKQQKGQGKRKEKPPNWELYIKRIPLEEGMAKSKKVPKPNPTEAWTKRNGTALTERGEIEGPTERKAMAKAQGVPTYGEKAAQRSQTDNEQRVEPIECPKGPPGFAGKAGHDGIPGVPGVHGKKVKGKRNECND

SEQ ID NO: 132205 - protein, 255 aa, Heterodera glycines
MNRRYIDHSVIAFIRANQQMFDKGTNLEFFYVSWNETFFVQPIWNALIRHILPIFVPNIRQLKFPSADHLYCLLRFTSPKVLSDLNIHSIDADRLFPNAIDSGDQLLDEICGDSDQPLAYSAGQILSEWLHIPAKDGQLKKLICWSDSSEIADLVNNFKKKFIRATTSSASYQIQFTVHVPTEIVPFQLVNERTNEKLTLEKAENNDESMDEEDDDEWDERWIMKRCQIGETTAALNQNSGNLNNVSFTFYVNCI

SEQ ID NO: 132206 - protein, 216 aa, Heterodera glycines
MDAILATDWLHNAFPERKTTTTTTTTTISSVEEELDDAVKAEEQISWLKIIEEEEERGNELQTGEMEVERAKEIEPPKRQHLQSKCSCNEKQKSVPLIDFLCQHYKCSVKELHVLLQTLNKRREISEMLRSQLQLRTNHLRPAWKNFRVHCNELTIHPAQTAYAMRGYLGITVRIYYYVKHGVKLVYPQLPCVLQFGGGDHCSLFPLECLSVIKDA

SEQ ID NO: 132207 - protein, 128 aa, Heterodera glycines
MNDVAILRESVLQFRKIIAENTNGLDPFKVASTAAGLALATLRRCFLPMNKLVNAPEGGYLRGRRASAESARYIRYYEMTHPGVHVQSAQWSIGEANVEDTGYRLDGLVTRDPPERDLAIEYMGCFYH

SEQ ID NO: 132208 - protein, 743 aa, Heterodera glycines
MNRFDQNDFTITSVHQMRNRPRNTIGEIAEVSFAPLEEVERPDRVLERLVRRLFDRVLDGRSAPMLIGLQLHPPTFENPFTIPLRPPEQNNPAAIADLIQRLNDQSAAGIDLTAGTTVTKVLAVWPMQADQSDAGRSGACSLEDEHRLVNTVRSLIRIKNPNDRLCLARAVLLGLHDWRARTPGGGGIPAFKSYANRQHTHGPEARNLLRRAGIPRNKHMYTIDDVQKLQAWIDQRYGHGEIRIAVFEKEREYRIVFKAASGEAAKFNLCLLLENQHFNYVGRIEQLFRVQGYCIDCERRVTRWYHPQECKVVCRLCLRFGVGYPCKQHSRADGTASNRLCSECLFVFPNDDCYAYHLSNRAPSAMHSQEGGGRGGRTFRPICEWRRACRQCGAITYANYPHKCPALISQTGWMRCPRCSGPHPIGYPCFIQPLKDKPTSGRRRRERRMRQPNHHNGNNNNDDDSGNDRGHDDDGNEVEEEEEEDDDDANSPKKAVRLCFFDAETSQDLPLQLRTKVVQKHVPLLIIAEIICEACINEGISVHSGVGQYANGCVCSPPVGPRGRRWCSPPFLNVPGDDSALPACVNYNPRRLFFHSFDNANNDPVDDFINFLTGTGPHGVKTICLSHNGGKYDIHLILETLHRRNLPQKRICTIGLKIFSMTLKGNHQRDVVFKDSLNFFFCELDALPRTFGLNTEVATTKPFFPYLFIRRENLHQRLRGLPPKEFYQPDHMKAQKRDAFFHW

SEQ ID NO: 132209 - protein, 73 aa, Heterodera glycines
MASAERQPFFYRFGIFYPQGMEKREAEFSICENPEDHNCRSLPLAVDANDHLNYFGVNSEEYLKAGCPRDMLL

SEQ ID NO: 132210 - protein, 276 aa, Heterodera glycines
MKKHQKKLKTTPKVSTPPPVSSPAKPTTVKPSAPPPSVTTPAPPTIAKPPVTTPPTTTKPTTPVPPPAVQPTTPVPPPSVQTTTPVPPPAVQPTTTPQPTKTPVTVPTPTTTPVPPPPKTTTEVKSPSAKPTIPAPPAQLKSSALSPKAPISTVKPPPPVSLSAKSKSPPSPPEESPPHYDEEKDITVKPTSPVKPTITAPPAQLKSPAATQVIKPPQQPTKPLAPPPGAPPRFPAAAVSPPPPTSAAQIDPSRLIHTLDPPKIYFKTPPANVESV

SEQ ID NO: 132211 - protein, 42 aa, Heterodera glycines
GTGNFGQNRDRDLPGPEKPGPGPRFFFGTGTNREILKIQKNF

SEQ ID NO: 132212 - protein, 200 aa, Heterodera glycines
MKDSSVPEQMLIEHAQIVQRNSHSPYSKFAVGAAILNNDGQIFRGANVENASYGANVENASYGATICAERSAICSAIAAIGPTKFICSAIAAIGPTKFCPKAICVVTDLTEPGAPCGICRQTDLTEPGAPCGICRQTLVEFGDMAVLLYSRPSKKLLKTRVQNLIPMAFTPNALNTFKSDASMAINRMNGRAFEQLIKPI

SEQ ID NO: 132213 - protein, 121 aa, Heterodera glycines
FQEAFESFERVNIFKNLFKSMRTPAVLFASMIALYCCQEFFQLLGLDTMASIFSLFLTLIIVALGIWTYSRYSGQFRHAQVFIDERVHLLWHNILVPAFVNTAGGVALNMTVISQIFFDGF

SEQ ID NO: 132214 - protein, 89 aa, Heterodera glycines
MDPEQGAGGFVGYAYVINVDYCWKALDKKEELEKKEEQLEKKEEKLEKKEEQLEKKEEKLEKKEEQLEKKEKGNDAAAAKKEERKRKKG

SEQ ID NO: 132215 - protein, 170 aa, Heterodera glycines
MSSFAKLDAKKVLIVVTGASRGIGRELALQMAKFFATNECFFVLLARGKEALEAVGDQIRKENPSAVVELVFADLATQPFALGSINSRIKAWRGSHWTKVIPCAYSAFTNSETVPFDLCLLFHNAGTVGEMAKKSSELSDEAQWHEFLQANLVSAILLNNGVYAALNNAE

SEQ ID NO: 132216 - protein, 46 aa, Heterodera glycines
FFPPFILWQLCKTKQREHVLNERLKLIATGHKMTVYRESITGTDKA

SEQ ID NO: 132217 - protein, 2326 aa, Heterodera glycines
MSGFLRTKIAIELKALEKAKTATELHVEPDQTLTTLENAILLESAAERIKSEVEAVNAKIEQIWTSASKWHDLIQKMDKDERKSEQTVYDQFQTTEKLNTKMETANTKLTELKDLAMKVEAGAKLQRSKADRDARVEQREHAKAMSKSNAEADKGNNRARGNEMTAALYQLPTLRIKPFGGDKREWPMFEEAFKVAVDQKPGSKTEKLNLLKSLVEREAALLIGGLRLEEKNYEIAMKLLKDTYGDKGEYVRRLHTELSNLKRCFSVEDTKHFCMELERLARELEAAEEDIEGPPIYLMLEKKLYKPFLREILEEKAKNPDFWDTSSLRKALGSALSKELAIKEVMREYGFEGKEANPEHGFKRQLRRNRFGGSVNVATTHFGKPNGERRKIPEQKMPNPRQGQRSFQQTPRNSAFRDRKGQGRSPKIQRNPTAVNTQGELLLCVFCGGKHRHDSCEKARTVQQRFAVLQEKGLCYKCLKSNHIGRNCPCPMKCFKCQQAHPTALCHQANPQRVTEWKNMANRVMNVREEEKPDKRDEFKEVSFTPSQCNSVQGNSRVLLRTAEVTIFNPSNPKRSMVASVFVDDGSERSFIRANVAKQLGLPVIETEECHLTGFGEKEAKRYVSNVVRVGFLGVNGDPYICALNEMEFIVKAMPIVTLNSMDEAELNKKKLSLPSRPRQPDILLGMDVRHDLKIRDETEKLPSGFTLSTSRVGRMISGYGQVQGPMDMSVQVTYTGALISALQCASSRRDADEEIEEQIKTFFGLNIIGMSDNPEENDKEEVMRTFRKSLTFKEGRYECGLPWNERVKDLPTNFQQARARLCGTVKKLRELNLVDEYQKIFNEWERNGIIERVPDPTQTTGPVHYLPHRPVIKMDKATTKIRIVMDASAKPANRKGAPSLNECLHTGPLLLNELTGILLRWRRMKDLILADIEKAFLQLSVREEDRDATRFLWLEDPQKTEISSPTYVKTVVFRFCRVSFGLTTSPFLLNATIREHLSFYDTVLPQTIMENLYVDNILINVKKNEDMAQICHESIELFRQGGMKLQEFFCSKPIAIRSLPVELLAKNQKEIKVLGIPWTNEDDEICFRFKKFAGKHTKRNILAHIAKIYDPLGLVAPAVLPAKHFLQKRFEAKNGWDEGLEEELIHEWNQIMETWQTKEGTEVQIRFARRVDNEDEVDKEMHCFADASGKGLGVAIYIRESTEKMSANLVFAKSLVKPSNISDVAATIPKMELQSITLGVKLLKYVLQHLKLKPTQTTIWTDSLCSVERIKEHKKCDRFVSNRLAKIRGQFEVKHLVSADNPADVASRGTTPRELSRNLLWKHGPKWLSEEKALWPKPAKVYHPDEEKLRASAEDEEVKTAAVMNEVPFQPTIDVNRYSSWKKAKTVGAYVLRWIHSVAKNGYNGNLLPILSKMGPKKHGNQDKGVLSVPELCASEHLLIWEAQQQFPTEEKTKENLRLFKDKEIWRCRGRIGEATVKEETKFPIFLPPEAWTTKLIVLEAHWKMKHPTHSTLLGYMREKYWIPKGRRFIRNTILSDRHGCLNCRKERLKPYAYPQMPNLPSERVAMIRPFEKTGVDYFGPLTIKGGVKVYIALYTCLVIRAVHLEVADDCTATEFLRTFRRFSSRRGLPSLMWSDNGTNFIAGAECIKEEWRREILVETSHSGVSWKFNVPRAPWQGGAWERLVGITRSALQRTVGKSLMERQEFDTLVCEIEAVVNTRPLTFQSEEEFTQPLRPVDFLLPYKRVETSLPLSDEDPRDPDYAYQPRKKGELHQLMRVAIKRIDRFWKQWKTEYLLSLRERDRTNRAEGSLPREGDIVLIEEEEDPRSIWTMGKVEKLLKGRDGLVRTARVHTKGKTLVRAINLLYPLEINTSAEDEVSQIQVTAIMDSPSAVMEGGDPQTVTTESSLPPGTVMQDSQIVTTESSPVRGRNERQAVKERIRKRQPTEEVRGKGKLKKNGPYDPLRPGNYRIPRRNPFFPSQVAYNEQTRTYRRRRGRTIDLSGLRKLFAGLGGTEFVRRELQEKANPALREERLRKDKVKFMEDDARRVAERERKAAEEKLEKSMKDSQRQTNVESSSGGTTRNPFESMEVLPGDPEPEVPLEELARQEKFDREMALEQRKMYEKRRAERNAEKDRMRWGLPRGVVRRKGHYAPHRGINKRRKWHRGRHLNEIQTGRKYRRPRGHDISPLRQPNGATTELLAPSLEMERQIRNDKRARDESQSKEPVRSQRRLKGRDPLDEQLKRGQKGQQAEENPDRIKLAPASPGYRRTINYSLFTRCEPGVKGHEGCLRNCTMGSLSHGRLTKIPQAESKRSAWPKPSHSIG

SEQ ID NO: 132218 - protein, 136 aa, Heterodera glycines
VPLLITVLPLLITIVPLLITDVPLLITVLPLLITIVPLLITVVPLLITVLPLLITIVPLLIRDVPLLITVLPLLITIVPLLITVVPLLITVLPLLITIVPLLITVVPLLITVVPLLTLLYLFSSLLYLFSSLLYLF

SEQ ID NO: 132219 - protein, 65 aa, Heterodera glycines
MAKEKPKEIEQNKTRNIEKSIKERPLVRGKPMEGTENGEEGTKEHMEERKTEERIPITKKLCRVE

SEQ ID NO: 132220 - protein, 205 aa, Heterodera glycines
ENVIIDQTFGCKLIDLVSAAFFGEGIVSYFYGTMEYCSPEVLSGNKYLGLSGNKYLGPEVEMWSVGILLYTLVFFENPFRSSHEIVDAEIELPWEISEGLYQVLSWLLQPGPKLRATISEIVLSWLLQPGPKLRATISEIKRHWWLTQRVDPRNYNFLHLLLCSTSDLNLEGSSVSNLCSNLAAISLSSAINSDRETDANGQKKE

SEQ ID NO: 132221 - protein, 74 aa, Heterodera glycines
MNPSLRHSFSIENILTKGVNFGAFSEPLLPHHFLGRCFDKVPTFVLEPPPKAFPTEFSSAFFERNNGERKGVRS

SEQ ID NO: 132222 - protein, 150 aa, Heterodera glycines
SEVWKGRGSPNKMKWSICHGTLAWLGDFKQPHGTLAWLGDFKQPHFQAGVKAIKKVYGVEPDFTRYGVEPDFTREGGSEGGSIPVTLTFQNLTGKSVMLLPMGASDDMAHSQNEKLNVTNYVNGMKNEKLNVTNYVNGMKMFAAYIFECA

SEQ ID NO: 132223 - protein, 260 aa, Heterodera glycines
MINGGSHAGNKLAMQEFMVIKERYGLDATSVGDEGGFAPNIQNNREGLDLLKEAFAASGHQDKVNTLFEVYNLSFKVIIGMDVAASEFYKEGKYDLDFKKWNCFFFCVVKFILSPNTDKAQWLTGEQLADMYKSFINDYPVVSIEDAFDQDDWENWSKLQAAIDIQLVGDDLTVTNPKRIQKAVQKKACNCLLLKVSHRSGETEDTFIADLVVGLATGQIKTGAPCRSERLAKYNRIMRIEEELGTDAVYTGKRFRKPQN

SEQ ID NO: 132224 - protein, 19 aa, Heterodera glycines
FRPLRGLERALRARFLNFV

SEQ ID NO: 132225 - protein, 74 aa, Heterodera glycines
MLGQALTPAHFARDAPIRPNKKFLKLFYRVSLTFTTITMLMKARKKTDAWRKFIIVCAVVDFGTTNIADQNHDV

SEQ ID NO: 132226 - protein, 175 aa, Heterodera glycines
QKTWLFFLILKIRIRPQSGKEKEEPICLSVTPGEPQLTISRDKTFTYDFVFDQMTLQKTVYDKCVFVFDQMTLQKTVYDKCVRELVDGAFEGYNATVFAYGQTGSGKTGSGKTFTMGTSLEDPAKRGIIPNAAQQIFDEIEERREQARRSGKVIPSFEVSAQFIELPGGKIENIF

SEQ ID NO: 132227 - protein, 150 aa, Heterodera glycines
MGTSLEGDPAKRGIIPNAAQQIFDEIEERREQARRSGKVIPSFEVSAQFIELYNEELIDLLSPDRDSSSIKIKEDPKNHEILLMGASSRNVTSQEAILSALAIGAQNRTTAATNMNKQSSRSHAIFTLNIKQTRVVPVDVLDFFGRGRHW

SEQ ID NO: 132228 - protein, 187 aa, Heterodera glycines
MGTGAEVETLHAKFHFIDLAGSERLSRTGATGDRAKESISINSGLVVANQNKSSTLITDLRIKIQLLEAELHEWKTGKRRRSGHIAVTEPEDKNSTEQVFGCLARLDEEEEAEDADNEEEPGEMEHERICTDLDKLQENISSKERLMANYEKELEKIKQEINRLEETKKENKQEINRLEETKKENSG

SEQ ID NO: 132229 - protein, 89 aa, Heterodera glycines
MEEMQKLKKKERRKTMFETNNPRKPLTPINEQLTPESKHLERLNTTYIVDTPSEEQKKGRLLGELPEEKDSNYQIPPLLSGCCPKGPSV

SEQ ID NO: 132230 - protein, 200 aa, Heterodera glycines
MQSVQSSATGAVTAASTVPLSIQNEILWIKQDALQVRNAVILLEQEKDSLRKAIRKLKLENGRLKTKVKTLNEKVAKISNEEMDDEEGKLAPESELDYDELNRGDFYLIGGVHDPISLRFEAAIRDQNAVEHKSAERYYWYKMAEFFGDEEAMKSILHAQNVQQAEEAMKNIKGFDVAEWDKVSWNEKHWWKGKGFSGQT

SEQ ID NO: 132231 - protein, 49 aa, Heterodera glycines
VGVNSVWPTPSQQCSKSYNFFLCWPNFTIMVSFESPRCLEDIYKLFLSD

SEQ ID NO: 132232 - protein, 87 aa, Heterodera glycines
FEYPKRTLEKIDFFVFGAVPPSRCAQIYGETESFRNSFPIACTLILRWIFAPHNCLSTPNGHLKNRFFCFRGSPPERCARFMGRRIL

SEQ ID NO: 132233 - protein, 68 aa, Heterodera glycines
MATPTQIELYFNVALSLVKKAGNLAKNAYAQPLGVVKTKSSPTDFVTETDQAVEKLLISGLSERFPDH

SEQ ID NO: 132234 - protein, 105 aa, Heterodera glycines
MVPNTAKKDVLLRLFQLELQTAKKRDPVNGKIRNTMVFVNTKRDADVVSTYLNQFDFNTTTINGVFKKRLSRCQTGSTNWLLESPSLVLAKSLTRSCLAFCETTL

SEQ ID NO: 132235 - protein, 89 aa, Heterodera glycines
MGIPWHGWWEMFHPGQTLYDSSGNENHKEPAKSASERHKWGSNVDFLAAAKLFQINVIVCSPNPQRKEDFGIQYVWNIYTPDMLDTVSI

SEQ ID NO: 132236 - protein, 57 aa, Heterodera glycines
MHFLGRPYLSARFVPFIIVGATSFRDKCKKGTSRQCKNWALREKCKNWALRDSAKMV

SEQ ID NO: 132237 - protein, 36 aa, Heterodera glycines
MDFCKILLVESFICSICCLQPLTKAMDPTATVSFDN

SEQ ID NO: 132238 - protein, 57 aa, Heterodera glycines
MFGGIMVGTVADRLGRRKSLLYNNILAIIAAALITLAKYVNIYYLIIIGQFIIGSNV

SEQ ID NO: 132239 - protein, 108 aa, Heterodera glycines
MSHQPFANFEIVRLEAMIIGLEIDKDQLQRDVYHLKNRKTQIHNKKIELLQQKEQLIREISVLRETKATLVNEMKDLREEILELRDMDGSNDDDPLCAVCYTRKVVSV

SEQ ID NO: 132240 - protein, 148 aa, Heterodera glycines
LFNASEHFFEGAEKLFEIWFDNDQQKRENGHKSTLRTIPENELRQLLNTAGCHILQATKKQRMAIKIISESSMFISDRRLILKTCGQTRPLLVIEKLLELARKHCQMDTVTNVYYSRKNFVYYSRKNFFRPHLQPQLHATFDEEVDYL

SEQ ID NO: 132241 - protein, 46 aa, Heterodera glycines
MDNADGECAEDGCVSDVEAGSGAEDGDELLDDDGVNQQQHLRSDES

SEQ ID NO: 132242 - protein, 77 aa, Heterodera glycines
MQYCSCVFFGFSLKRESFITGPLTRIAYGYSSNGKLWANSANLETARSYGENDVVGCGVNLATRQIFFTKNGKRMGW

SEQ ID NO: 132243 - protein, 76 aa, Heterodera glycines
MLISNILTFCLNLSPGLRIQKVSHKILLLYYNAGGLYILANASSLSDYFPFVMLFNNEDMIYANFEQEFIFNLATL

SEQ ID NO: 132244 - protein, 182 aa, Heterodera glycines
GAEKVLSVSGQIHSPSIEPDRMEVHDLGNVTAGSSSTGRSLHTLCTFASVGAANDYVPAGVVTAPLALSGSKINCIGRSLVVFQEGRSALGSGVIGYAKDTRIFSDEFDEIFRNLITQYRNVNVSDCWLVLRDGTSSNPDCRAFFDMLDEILATEEVQEYTGPRKAICSLVNVENQAVNGSI

SEQ ID NO: 132245 - protein, 57 aa, Heterodera glycines
MVIVYGHSTIIQFKMLKTNQKSKSLDPNSVPDSAETVIMSDFAFAISAIFGTKFINF

SEQ ID NO: 132246 - protein, 87 aa, Heterodera glycines
MTAKTKGILSTTNKTPKMMDATIILKKNAPSSTSNSEKQKRGICLWSEEFGHLSKNSATWHLDGTIMPKFTMLLRILVCRSKDTQKN

SEQ ID NO: 132247 - protein, 249 aa, Heterodera glycines
MAKEEETGGGGRKALENAGEHSFVREEARRPLRDGLDGAERGALSAISAFITEHYVEMIHEFVLVNAPSFISTIWTIAKPLLPERTRNKVQILGKSTWRSEILQMACAEALPSFWNTEGEEKHFLANLKRSPPIDVSNYHKNGQLPPGFYTSLTIGAGKCGTIEVEATKGQTLRWQIESDGHFSFAVHFKSDETSPRLVYPRLNQIPGPTFVPVDDHLQCDATGVYQIWISNEHAWIHSLKMRYRISKE

SEQ ID NO: 132248 - protein, 97 aa, Heterodera glycines
MAGAGFQHFDAYTQLTDRSEVEELDTLFRQWRKTRSNLQFFKFFFEENGYECEQVKKAAEFYSQNAIKSEQLFQSCYYGKREIPCCDLFKPNCKCGD

SEQ ID NO: 132249 - protein, 84 aa, Heterodera glycines
MARPQRNGTEPIAYKESAKDELRPAMGLSGSAIREQQQKKKKTNIEGREKMEEIGGEGKEGKKEEGGGGGGGATGREGSGCTLM

SEQ ID NO: 132250 - protein, 103 aa, Heterodera glycines
ITAYSRDVKLEVDKQSDTFKPGLPYSVVVALKQMDDTPAKSSLPRRVQLTTFYRGAQAQQQQPLQQQQEDKEVKVLELDAHGTAMLQLLPPLNSTSARVEASY

SEQ ID NO: 132251 - protein, 47 aa, Heterodera glycines
MFPRCFSLMGLALVHLWHWAHTTNITTIQALTVCCVNSGTSVFAGIT

SEQ ID NO: 132252 - protein, 54 aa, Heterodera glycines
QSQADSDNDDAAPKGRRGPGGGPGKRQRVTKSPANPKLYAKLNACLNTLLNYKT

SEQ ID NO: 132253 - protein, 61 aa, Heterodera glycines
MADWNDFFGSLRKYLNYFRAHHSQGLSYNALTASSNTQTISDAELAGLLSWTRFASAVAKK

SEQ ID NO: 132254 - protein, 163 aa, Heterodera glycines
FLLNLIDKTHAGDNVKFSAKIEAFPAPEVQWTFNGEPYFEFSNIRISNEGNLHMLEINNVQLEQAGELACTVKNSAGSKRQNAHLTVKESGGAPAFERSIEDRLVEENETLIMEAQLAPGAKPAAEVQWLKDGQQLQKTDEHFKQSEEANRVHKLTIIRVAQA

SEQ ID NO: 132255 - protein, 92 aa, Heterodera glycines; identical to SEQ ID NO: 125147

SEQ ID NO: 132256 - protein, 33 aa, Heterodera glycines; identical to SEQ ID NO: 127153

SEQ ID NO: 132257 - protein, 174 aa, Heterodera glycines
MLLAICVSARQLAVIHLQQILRAFKVAQQPTVSCTNIANIEQCHIAVVSNSEHHRDKRFVYIATIDEIVVLQYVAKLGFFSPVAQIKTEEPCTCICSASFGFVFGADNFHFARFDDNFAMPSPLVVENCPFDFPVAAVEISDNEFLLAFHSNSKLIDNEFARLINAHFRLWTVR

SEQ ID NO: 132258 - protein, 1714 aa, Heterodera glycines
MDGGDVLVIGVDTSRPPKATPFEKFMLRKKGVEGLTSEDPLIVGICANYLKNPYKFCGDYYFQPCTQDVLEPTMLSYKMSWILDKVKKNRSKPPSTIFIIRDGVSEGMVPNNIHDEFPSYVKACKKYDPTWEPKFVYCIVDKNHNKRFFVKGQQQVENTAPGAVIDSKVVRVDIHEFWMQSHVPLKGTSKMPQYIFPVNDPKANNNELQGFLLALCCSWQIVTLAPALPNSRAHQRAAVARDRRNIPPPAACNRYVEGFSSVYVFETRPSSHGGAFAFRYDVEMVQLSRNKSLTSGGGDDGKNGLLRTVCFDLIKFVHDSTQGFGQAAHFVYDNRKILFTNKRIEQFALEIDTEKIQGIVRDFLRGSSVKIEIKPCQTDKHELDLNDVFSSISRRPDEQSDRSLRTFLEMLTSQPFLNAGTHDIIGAGRLFKRQICKELEDGIVTREGIAKGVRVIDNNGEPKAALVADVKTCAFFASRNLEEIVMEMVQKRRFNINNASQMDRFWSDFNHLFRGVSGYLTYAPSRVIVIDAISQRKMAEISFDVDGRPMSMVDFFRTKKNIPINGQLPAVRQQQDRETLFPMSCVIILPGQRVPIDKMSEFISRELLSANTTNSSKRYADIEAEVRKIGTGTSSAFMSHFGVKLIGGKNDVKIGMHEMPQVNPGVRFLETSTLMKAWVVGFTRQVGEGDVRNFIQQVVVMGRKRGMHLPDPQYECIELENISERMQQLSDRRIQFLLYIDKKFVKSHAILKLNEKKYGLLTQHVTFEVASKARAMTLSNVLNKMNMKLFGFNYMPMFPQASKSKFNMDGGDVLVIGVDTSRPPKATPFEKFMLRKKGVEGLTSEDPLIVGICANYLKNPYKFCGDYYFQPCTQDVLEPTMLSYKMSWILDKVKKNRSKPPSTKKVEMELLQETMKGQTESFHREILELKAEKRVKEAEIAEMREKLRTNEANGQKREYLDQLNQKLGSLDTKNESLRDEVGTLKKGNKEMEQRYKQCEEEKAALQQEINSLLKQISASSGSSDIVSSRLMDEIERLKQQKAQLRCEHVQLKRKYTELETETAKFGGLAKEMKLLNSTVGELRSKIESAEAEKKAIENENELLKERQKKMETEMKEKAWHWPIIDKMQRLCRENEECENSRLKLLQSELDLQRRKCDGMKRSMGELDMQCEKLMTQLRLTDAEKRKAQNENELLKREIEKLSGQLTEKIKMENENASLKDRSKWLKDKIVFLESELKETSTDHRTVPMRISIHKISKMFKELANLADQLGATSAGTSKGKESENSGEVPKMEARLRQQEAELRSLQRKVEQYERENNSQREEMEKMREEATKTKQENIILRQNFDVCLKKAETFKSELDAFKEANDQLKSENEREKNSTSDQLYELRADLEQKEKLIAYLQSVVQPKQMQKLPRHRSSLLSDGSDLSEIEMEYKQCLQLEKERNQLKNNLENRRRGEIPFIDKQITKMINRALLISLINALALVLDEKQNEMTPTRPMLREETVRFHDALSPARNSQSKLKQAFAFDFLSFGFALQEQINAKSAWTVSPTFDSSSDAATVPLRCTRTVVATWSTRAVFRKNGGHFYLDTHSISFQPMTRWGKLWPFSSASAALPSPDQSTHWLNAWAVIDDNRLSFYDSDQLAVSEGALPFLSIDLDRDHWRIYNQTTDKPLDGIRGTEMSMLIELKLPDYILFMLAPTVQAKQRWVYSLQMAT

SEQ ID NO: 132259 - protein, 50 aa, Heterodera glycines
LNEKKYGLLTQHLPFEVASKARAMTLSNVLNKMNMKLFGFNYMPMFPQAS

SEQ ID NO: 132260 - protein, 28 aa, Heterodera glycines
TRKFIQCFLDLARQELSDDTKFIKIRSF

SEQ ID NO: 132261 - protein, 138 aa, Heterodera glycines
AKKFCGTYCGTSLLDSCLIAPVIWFCNFQKSNKLRISNFIFENFAVDNCCYNHDVCYIKKYQKRYDCDIKFCNCLNEYPNCFLTKVCSPTHILNILFFRIYYAGQFIFLENVLKKDKNNYFILPSIDMHMYFKFFIVM

SEQ ID NO: 132262 - protein, 60 aa, Heterodera glycines
MPTELYRTDLLQRVRQHNAVGLPAGGAVPWQSKSSFALQQLDGGGTGANAEECRHDLPNW

SEQ ID NO: 132263 - protein, 43 aa, Heterodera glycines
MASQRFILYGKSYFYYNIDDYDKAAQMINQFMRVSCDAKNQFQ

SEQ ID NO: 132264 - protein, 51 aa, Heterodera glycines
MELQKELVSICRSAWTCEARGPAWDFAGPSLQSRIFGTCKKEGLIQRSPGR

SEQ ID NO: 132265 - protein, 87 aa, Heterodera glycines
MLPNCSTNDERIFYLSLKVDLLRYACKHETLESFKTQAEAAYNLAKTEAVAKLRPENPIRIGIALNFGIFYESILKSNALAYKIGKE

SEQ ID NO: 132266 - protein, 197 aa, Heterodera glycines
MFSTNFTPTVSINAKPIAQQQEEQDGHRQVEQQADEHQQLEQQEGQQQEQPRQVEHQVDEIQEGQQEHQEGQQELGQQLDQQRQVEQQEGHKGDWQEETEQEVEQQGDRQEEQNVQQEEEGHVEQRKEQNEQQGEQLQGERQQMEKEEIQTEKQEIEEGEEEEKHQMEQKSGDNEEEGEGGQQKKSSNDYEDNNNKE

SEQ ID NO: 132267 - protein, 111 aa, Heterodera glycines
MPENEALIVFVRGKSNFDKFCMENKERLHEICDKLPKESTDAQRKEYLTQKYEAHLGVLYLMRENWHCAKIVDENAGQNRADCEIFRKYFEIFYEYLFTVNAEGFLAYYLK

SEQ ID NO: 132268 - protein, 90 aa, Heterodera glycines
MPLKDCQRFIRKLVINGYLDERLVTTAHQTVIGYISVASKGRQFLIDYKRNPGAVERVNLYMGEPKKQDKRRSSTASNASNLTRQKSMEE

SEQ ID NO: 132269 - protein, 229 aa, Heterodera glycines
ISCALLRGSMDSVEVESIYSDLSSVEPTIKLLYVTPEMISASRRLNDAFISLFRRNLLARFVVDEAHCVSQWGHDFRLDYTRLSTVLEPYRSGKDKVPVMALTATATQRIIDDVKQQLNIANCKMFTSSFVRPNLVYDVVDKSQANFKKVVDHIRKMYPNGSGIIYCLSNVWHGYRQAGRALHHPSHNPTDIGVLLPGDWPSWTRQPSCALYSHVQFQRPFADQKANRK

SEQ ID NO: 132270 - protein, 202 aa, Heterodera glycines
MMPGTLPQVTRYNFVPIDETIKFPVFHCCNGSHQESFHQSFGQKAPNEPLKKRDSSVELLNDNNSFFKIRDSSAEFHNDVKLLGVGGQSHQGPFHEFIDDDFLFEKAEQHPPIVVANPSAPNGPFKIRDSSAEFHNDGRVWLFLFPLQAKAGGGRRSFGARLFYCDANGVWEEFVLPTASCAPSRRYNRHFSASFPDAGSNY

SEQ ID NO: 132271 - protein, 159 aa, Heterodera glycines
MSENVRGRKAKNVVFQEKPPPNFFCCLREIVNNFAHTRITETALGPTIQAGLDALRSADRAGKLFIFHTSLPVLDGAPGQLKNREERKLLGTDKEKTMLTPSIDFYAKLGEECVKWGCAVDLFLFPNAFVDVANIAPAVTTTGGIIYKYQYFDVRFCNI

SEQ ID NO: 132272 - protein, 58 aa, Heterodera glycines
NYFLNLTGPDGAEKEEKPRWQLLYTAKTEYGMEQLNAEAWNAVAQRIEREPAMARKFN

SEQ ID NO: 132273 - protein, 413 aa, Heterodera glycines
WWYWKGQRDAKSRFVQKHYPNGTTYADFAKSFTAVDFDANNFAEFTAVDFDANNFAEIVKSSGARYFVLTYFVLTSKHHEGFTLWPSATSWNWNAVDLWPSATSWNWNAVDIGPHRDLIGPHRDLVKALSDSIRAQNIRFGLYFSLFDWFHPLFLNDVKFGTSFFFTVSYPQLLEIVNGYHPEVIWSDGDWEQPDDWEQPDTYWRSKEFLAWLYNESPVKEKVVPVKEKVVVNDRWGSGIAGKHGGFLTYQDHYDPGHLLARKWENCLTDHYDPGHLLARKWENCLTLDKRSWGYLDKRSWGYRRYLKASDVLSLAELINQLVRTISCGSDVLSLAELINQLVRTISCGGNMLLNVGPDHTGRIVPIFEQRLREFGEWMNVNSEAIYGSKAWIHQKAWIHQSDGPTSCYWYFH

SEQ ID NO: 132274 - protein, 56 aa, Heterodera glycines
MDLVTSLEMMDAIYEGGSVDRRMMDSAIEKALELQQERHCKVISEFANKRLIYSIM

SEQ ID NO: 132275 - protein, 50 aa, Heterodera glycines
CQFEFCFDIYGMSINQRNGGYLIQEIRYMPVEPGKKMKMPIFVLFPSANA

SEQ ID NO: 132276 - protein, 132 aa, Heterodera glycines
MKPNLAVYNYAAGSATAVPSDQWTNNETGEELLGKGQMLATLPDLSPPSIVPPRQPTSVAPATATGEQSEEAEEEEEEENSQQLATMSSTSKREEDEQGKKRNGAGTGEQQKERECTEKQSEGEGGEKEEDE

SEQ ID NO: 132277 - protein, 123 aa, Heterodera glycines
HKEKLVAAYSEAGQKIEALERKLRLQCLIEDHQQPTDESHVQEADIDRNEEAEEEEEEPRRRKGAEDDEGEEEEDGQDEDEDEQDEDEDEQEEEEQEDEEELDEDECKDSPAYIPKQGFDKFA

SEQ ID NO: 132278 - protein, 90 aa, Heterodera glycines
LFEYPKRTLEKIDFFVFGQSPNRCAQIYGETESFGNSFPIACTLILRWIFAPHNCLSTPNGHLKKSIFLFSGSPPEPMRPDLWGDRILRE

SEQ ID NO: 132279 - protein, 116 aa, Heterodera glycines
KNRFFCFRAVPPNRCAQIYGETESFGNSFPIACTLILRWIFAPHNCLSTPNGHLKKSIFLFSGSPPKPMRPDLWETESFGNSFPIACTLILRWIFAPHNCLSTPNGHLKKSIFLFS

SEQ ID NO: 132280 - protein, 52 aa, Heterodera glycines
HFKWYKMSIIDIDAEQNNHSFAVDSQSNNYFLVGRGGDKSILLNETSGNSYA

SEQ ID NO: 132281 - protein, 18 aa, Heterodera glycines
INYEFMWPKNRHNFTETV

SEQ ID NO: 132282 - protein, 100 aa, Heterodera glycines
MYLTVLFRFIFDDYPHVLLYKLINIRSEKAVYMFEQLEKEFDEDGLTEIIKHKLYGFISDGASVMRGTRGGLFAHLEKFINHDKKLTGIHCFAHRFSVMS

SEQ ID NO: 132283 - protein, 90 aa, Heterodera glycines
MSYSDSSRHLKAPFILLLNKYAGSGARLARPVAAVGPWQTTNRVTGVEPQLAKQGGTKPGADAGTAAGSGLCTNPTMHYILHIYYIALRF

SEQ ID NO: 132284 - protein, 240 aa, Heterodera glycines
SKINTSTFFDVKENGRIVVKNSDKYCLFYSVVLSQLYQTIGTEISYSMFRRILSNAKRQRIYVDDLIRNAKIEPNKKNYGIDELRQIQEYLNQEFPGKFLIAAFTKEWGIKPIYKGDGPKKYIVCVFHENDHWDGLNFPCEKEGREPIECLKCNRLFFSDFCFQNHLKLACKLYRRCTLCDSEYNTRNKHICGIKFCNVCKVKHAKSESCYIKKINIPKNLPRYRIVSYDIECSVSIEKS

SEQ ID NO: 132285 - protein, 198 aa, Heterodera glycines
FKNFFFKFYNIHILLVQEVRQIVSPWISQVVRLVAGKPYIEFDFTVGPLPKNLRWTNINEFDIELNSELNSEGIFWTDSNGRQMMKRRDRNDSSFFEGTEPVAANYYPVNSRIYVRIYVHDDKTRMVILTDRSQGGASLADGQIELMLHRRAFWDDGFGVEEALDEPGEDGNVRGRHWLLLGDASSAAHRHSLSLALS

SEQ ID NO: 132286 - protein, 136 aa, Heterodera glycines
MSRLQQRFHSSPGKREGIEPLNLSECCNTKDYTNSSASASARSLPRAKSAVFTENGVVDEKQRDKDGQRQTSASTDENKDLHPLTDRRRRSSIILNKRMPMRKTESGELGDRTASKLTLDEELYDILHAFLYVFDL

SEQ ID NO: 132287 - protein, 371 aa, Heterodera glycines
MPFPACLTLIFTVPSGILIAEEVVGIEQYRSQSKMCGTSEGLLYGPLQFPSHWRNLTFGKIILDIEKVSEFVGEKVGSRRFSETVQIRGLPWNILAKINGKTDEKCLGFYLKCAAAEEDENWCCECSATFRIVSQKFDVENSTGKFFGQIFDHTADQAGFHGFISFAVSGCLLIDPLWLIKELLDPNNEFYSNNEDKVTLTVDFILKDAKMGQFSAPKTADKTIFMEIEKASEFFCEIIGSERKSETVLIKGLPWKIVAKINRSADDEKCLGFYLLCAVPKETPNWSRKCSATFRIVSGVPREWFERRIVINETPIHGFDYFVTFSYLLWNLTHRLEIALSRIYNSLEAWHIICRDLLDLLPIFTMHRKIV

SEQ ID NO: 132288 - protein, 78 aa, Heterodera glycines
MTHKSVSKVYRESAADADRSSDYLGVIKREFRDVLGELLPIRTLISRDRTLSIRDRTGSGSRGIKFGIPTSGSVPSDI

SEQ ID NO: 132289 - protein, 130 aa, Heterodera glycines
YFVLLLILAMIEFVTVLALYTNRAELVDSVHNAFIASAKTADGRRNLKPIQTALHCCGATIETQKLYLDEQLCPQELAKAEDCFSVLKYKMDSNAVLASALMLLVAQFFAMVFSCILCRAIRERSPVYYA

SEQ ID NO: 132290 - protein, 95 aa, Heterodera glycines; identical to SEQ ID NO: 125597

SEQ ID NO: 132291 - protein, 129 aa, Heterodera glycines
MNTYWHFEMYLCNFKLIKIKKLILLLNHEDGINWASADCADPKLAAKFMESIRKIPNWADRVHFDALSKLIPKFAYFQGIFCYGTPTADFFHIKAKLNVIVQTNVLHAIERTFPEILHFGFTKNFLKPY

SEQ ID NO: 132292 - protein, 54 aa, Heterodera glycines
MRNKTKRVEEDFLDQMVAFSDQRRTAEAIALFLLLFSNKFGMGQQFEEGVTTFR

SEQ ID NO: 132293 - protein, 239 aa, Heterodera glycines
MPAGGQQPAAAVTQAIAQVPAIPVAINAAAGANIQQPAAANHAYQPPPVPVANALNMPMPPAAAPHATARLPQLSLPIFSGEPMEWPSFWQSFESAVDRATLEPVDKLNYLHGCLRGEAARAVTAYRGGENYVHAIAALRRLFGDPRKIAEALQSELINLRSVDDSVGSLQHFLETLERVCRQLSNLNMPDDSPFMYQIIRSKLPSTGTRQNGTCGRHPMGYSSAQSWTRQSSRSQRRG

SEQ ID NO: 132294 - protein, 221 aa, Heterodera glycines
MTDIYYKIASFDHSYLNKINQSELFSMIDEIVEKFQLCNVEETRSLSRWVYCMLLVLLWIAIVMTGIFLYFNSLIRNMCKLMHICRDENDTTTINRILAGNTKTREHYLGCFPCDKLPNKINQYPSTLVANNDPSNKEGTHWIAMFIVDDRTVYYFDSFGRTPNRCISHFLRNYEKVISNKPTIQSVFSENCGYYCIYFVHFMCSFGGRNYESNFEKMTKK

SEQ ID NO: 132295 - protein, 178 aa, Heterodera glycines
FFPTIKNCVAVIDIKTRLNLEKIYIISPSTKYTPKRMNAVIMNVYNPNATAIIFGTGKFVCTGAANEKECRQAAEQVTERIRCGYYDAQIQEFKVQNLVATADVGFHIRLGPLSDFLGEYCSFTPELFPGLVYRNQNPKISIIVFSSGKLNLTGSRSKEEIDFVFNQFYQIICNFKYS

SEQ ID NO: 132296 - protein, 200 aa, Heterodera glycines
MDRLDTVIASLLNCPARNLCDCLNHLDEIQKVEKYLKGKTLQTTYKNQLGEYKGFEYGGITKECARKQMAYNGFKNVTVDQHFYVRHRICLRYANNPCVIEKHRNGHERFYPLELVKVKHGDKSDIYLGQNFPKSIPLLDENNSKIMTIIMILVVYANNLSQSGSQIAPAGAQVVAYLHSIEFELPLTNSWCFPLSPAGS

SEQ ID NO: 132297 - protein, 159 aa, Heterodera glycines
MRLRQQAASQNPLPTRQAIANVRENMPFEAIIAGPSSSSLARNYRNYVVQERGERGDDQLDLADTAQIQIPENLRVNFVFDGFVDNLRMLVFATESGRNLLARFGQHAAIDGTFKCAPAHFTQIYTISVLVDKVAVPCIYGLLRSKSENTYSTVSQFVN

SEQ ID NO: 132298 - protein, 70 aa, Heterodera glycines
MFVMQNADQQQLPDLAILRSSTSHVPLFVSSGWAIEFDLAANIALECIDQNPIRLSDLRSRTKLNELFER

SEQ ID NO: 132299 - protein, 72 aa, Heterodera glycines
MPSLESVPERINFDEEEEKTLQKWRDENTFQTSLEDHQRHCHALGSSERLLCRTAFWLGHPRTSRGVRSGQN

SEQ ID NO: 132300 - protein, 76 aa, Heterodera glycines
MEREAMKPKETNTAEKVLLSQRLRETGVESGVAARRAKFGDKAAEPAGEKRGEKAVKTAPDREEKKAQHTTDETAE

SEQ ID NO: 132301 - protein, 194 aa, Heterodera glycines
YEALCPYCQRFIANNLGALLNRFGSRIKLDLVPWGNSILLRNGQISCNHGPKECDCNHGPKECDANRLMSCVLDEVSADQAVHFVICFERSLSVGSGVEQSLLQCSSFVRNSYKRIKLCYMGERGFLLLCYMGERGFLLQRQAAQRTMTAKENPIVEVPYILVNGYSPNTDANSVNIVALSHLIQKWLNLRERR

SEQ ID NO: 132302 - protein, 87 aa, Heterodera glycines
MLPSMSKKQRKPEQNNRQLRIIEVQLFTPTARRYPHFDYEEMCKELGLEISKQKETAESNSFHDQDAEEIVRRLEAKYVCLRNCKIR

SEQ ID NO: 132303 - protein, 31 aa, Heterodera glycines
MPNLALLRNAQSGTFYETTPKARYFSTNAQT

SEQ ID NO: 132304 - protein, 99 aa, Heterodera glycines
FFDKNRLIDHYVSVLLNANIVPDSVDRMRRDIKSDDLIVWAQWLQSLIEQQHKGPSRHSLHRDYVWMYLRIAYDMYELGTEKSEFEHTFTKMETLMKSN

SEQ ID NO: 132305 - protein, 304 aa, Heterodera glycines
MATSDENNSGAYAKFADKVTILAKLTMHLRECLQLHEKPGIDTVNTLLKLLEGMVTKNGAEFGAMGARSYLLPSFSYDPRSFQYYDDDDLTLSRATFEEMGRPATNIDPPIASTPREDQNAHQENHAAIPNEHGDVEQLDESMGEPGHLRGDIIDSMLDTTQEENEDGGDSEEESPHDSEEEDMDTGEELTQQRPAVHEGAMEDDHISEAADANEQVLQSHLVADDDFEEMDDDDDGEEDEEDETEVEGGGELADFDDTLLDYVTDFNALAQQMHDIRRRINLNIDTNALTIRPQQVQKRNDEY

SEQ ID NO: 132306 - protein, 453 aa, Heterodera glycines
MASPECSTYDRMFNLFEARINGNCCEKLTSKLLTPMLLFFNMYEQERSADIRQDLLQEALDGTQFQWFYWTADDHYTGAGEWREFTPLSVAQLNKAVREKKTSVRLTVAQRVYFIDLNEMTKRLLPDQQQQGFHPLHSSVPIYAKANLRGDFNMEKLVKLESELRKGTERHRLLVKGILKLVKSSSTQPLDNELAHNALTLLLRLVSLDGMAQEFLNEDGVKALLEMKRNPISAQMVPNGTSTPPTLNTLATLILRQCIDSDAALLQSVFEQMITATCNGQPISMQEITSRRHAMRTKRYQKDVKRVLRMLVPLAARSPPLYMDAAKKCMAIKQNEILVKEQRGDVTGNGSAAAASDQFIQALLSQIVTDLAQFDTLADADKNTRLMQPPNLLKLIAEVLRSYPKVAVRQVSASPIMSWATSNHFSSKVATWTMRWQLPMRATAVHMRNLRTK

SEQ ID NO: 132307 - protein, 67 aa, Heterodera glycines
MCKTVRGTTKRRHTWDSELKKGDEGDDKENIPPSDYHNLTTFNGHGNEEEEEEGEHNTFEYTNMPFI

SEQ ID NO: 132308 - protein, 23 aa, Heterodera glycines
ESVHPIYNVHIDAYSKAQRYFKA

SEQ ID NO: 132309 - protein, 126 aa, Heterodera glycines
MELINQFWRDDSEKQFEDYQIPESPPYWSSGFLSIQYAIEKAFIELVRINIYIFENGLIVSLSFFTAKGDDALANVSLRLHRLPIPSYMNKQMATITVPLFLTMLLFVFAFSMLKDIAVERESGIM

SEQ ID NO: 132310 - protein, 110 aa, Heterodera glycines
KFAKPSTSVSFIVVIWFPAFFAYSFEPFNENNELTREQLTFKKTNNSRCFLLVRCPIAREESKWIEWEEEAIGWEFLHQPNRINIQIDDEENIGDGLLDATPGPSDQQQK

SEQ ID NO: 132311 - protein, 129 aa, Heterodera glycines
MPQKEVIQVESDYEIRRKPNISEALKLFKRHPTKIDTGKRKRKSQLNRPLLIVGAFALIPPTTAFNRICEAVKALFESLNNQLASTNLIVSFTNLVIRRTKNRLDELKRQRISITENVECCICRKRIMN

SEQ ID NO: 132312 - protein, 472 aa, Heterodera glycines
PNPTKGRLIRPSPPLIRLTHQRVGTFGHQSPTSSSCPTRGKTHSAITADPSLTQQRETQPATSSRIFESSIGPCAARTKAYIEAATVNLGKDTTDVSIQADLTAERRGLRRAIRLLEDCNDKWQSLLLKFNGADRQQEEQRYDDFKPSGKHFMEWADKARGEVDTIDGVIGPEDDDEITGSIISQPANPPQIQHVQPPPPRHEVYLPPISLPKFTGEPREWPMFWRLFRSSVDNLPIDDFKKHIYLLGCLPHNSPARRAVDLYPPSDENYPRVVDILKKRFGDSKTITESLQAELLHLSKPGESVLSLRNFAESVERICFQLMDFVESEENMFMASTIKSKLPFSILTHVVEKELSSGRTFSCLDIRKALQAIVEVKEEVQRCAHVLRGDERPRSSTFNSPPQQRGAWDQRGDNRHSNNRQSQPPRPFNRGVTHQPEYRAFSAINKNPERAKTTARKWGRPCSLCSGTDHLP

SEQ ID NO: 132313 - protein, 49 aa, Heterodera glycines; identical to SEQ ID NO: 130195

SEQ ID NO: 132314 - protein, 302 aa, Heterodera glycines
GEWVKEERKSNPYKKGDDIDLRIRAHDSKFTVYADQKELKIRAHDSKFTVYADQKELKEFEHRVPLSHVTHFSIDGDVLITQHVTHFSIDGDVLITQIHWGGKYYPVPYESGITGDGFAPGPVPYESGITGDGFAPGKTLLIFGTPEKKGKRFHINLLKKNGDIALHLNPRFDEKLKKNGDIALHLNPRFDEKAIIRNSLIAAIIRNSLIANEWGNNEWGNEEREGKIPLEKGIGFDLKVINEEYAFQIFINDERYCTYAHRVEPIFINDERYCTYAHRVEPHDLHGLQIGGDVEITGIQIF

SEQ ID NO: 132315 - protein, 80 aa, Heterodera glycines
FWRRIHRLGKLPIKSFVASSPNLSGSNSKSLSTDPSQFGGVCHGFRRGILSRQTARTAESKRTLSMHLTGTETKGIWIDL

SEQ ID NO: 132316 - protein, 388 aa, Heterodera glycines
MSSNFIGSPNCFFRPTADQAAAEEVDKYEVFSWHGDLSDQLAAQFLVSDQQLLKECREKLASAELRETKLLCKNGELNAENKALKAELEKQKLMSENSELKAKVEKMEQEKQQQLDKKYVSVDVFNSLVERIKQLENRQNKEEGRKAEEKQQKESVGQQNKNTEQKLDGKYAVVDKNNVLVALVTSSGDHSPPAVVSAKVAKEVPNSQQQNGWDAKVCHKDIEIIGEKQLTINCKGNRFVLLRLEVPLDGSIGQILNSYGYRSDGSFGCNGINRPCKMPMSLFGSSFSPVAMQSADVEMAYKSSEFSTGDVVGCGIFLDTRLIFLTKNGQRMEGTPIKVEAEGNECTAGEIEAENGKMKTNKKTNFADQFLRKISILRVVFFFLLHFC

SEQ ID NO: 132317 - protein, 121 aa, Heterodera glycines
MRWKEFKFYKCNYLFLFYFPLEQKLNANAEFANSIQTKCTKFEEQQNKLKNCVDILNYRFGNALIEQILELQNEQKEILGRMSEMEKKQQNDEEKETEKYGKLNAILGRIIIVYESKLDIC

SEQ ID NO: 132318 - protein, 29 aa, Heterodera glycines
MARNKRINNLLLYHFSSSLDVEEGLTRHN

SEQ ID NO: 132319 - protein, 102 aa, Heterodera glycines
FLNIFSERVLKRTKFYLHVSLGTLMLFLSKREMNKIFKNFYFFLNRPKSLGLLFFQKLIRSAPNFAGILKGREITYFKYYLVSSFKLFLSKKFFFWISGQSP

SEQ ID NO: 132320 - protein, 32 aa, Heterodera glycines
KVYNTFDSQDVSVPSTKKAQRCLTCQIGRDGV

SEQ ID NO: 132321 - protein, 30 aa, Heterodera glycines; identical to SEQ ID NO: 126994

SEQ ID NO: 132322 - protein, 169 aa, Heterodera glycines
MPKHNGNEKQMTEIAHFVVNVVFYRLPIFAPTCPWFGTSPSALYTIGTFLVYFFEYLIYVLHIAITLNRCSCVWAPIRHKEVKQTHKQFTPLHFLSFGAVLVSRQLRLLLLFLWHFLPTVWSLLPSWSNSTKRTRPRAQFRSLSPTNFILYVQIFANSFEIFVALRIAL

SEQ ID NO: 132323 - protein, 111 aa, Heterodera glycines
MNNNLVVWLNVDLFPRLFFIGLLLPNLRTLALAKTIKSKDKMTADRIDNHNIITNDDVEIIYPIQNQHLKQQLLGLNHQNLCNFVAKKIMMDNPSEEGLNEKNIADMEMDD

SEQ ID NO: 132324 - protein, 83 aa, Heterodera glycines
MSNFCYFAIFACISQIFGTANGMNTEMGFQPHFQQNTSTFLRKLEFANEPKLLIPIENVIAFLKMFSQLSSSLNSNDFSTVCF

SEQ ID NO: 132325 - protein, 180 aa, Heterodera glycines
MLDQIYNLSLSHRQLFNYFGICIDIPSTIVYILEMITIIKHKQFSKSPFYKLFFIRGVFDILSLVPNSLGNLLPAFFGQQLLSIYSTVPNWAIVLLTFFTKTLVFQVSNIVTVFILLNRFTAIAFPLRHKMLWKKHFRHLMVFLLIVPMLITFPIMRMRTTIIFYDSNSFLLDDKDPVKT

SEQ ID NO: 132326 - protein, 90 aa, Heterodera glycines
MAAAAATFAVAIRWAPSQARRLIKSSSRSSVQQCGWPMATFVQPVAVFSGPQQWKGGESQAIKAIGQEKNIEVTDVHIGNPSKGKKKLII

SEQ ID NO: 132327 - protein, 91 aa, Heterodera glycines
MFEYPKRTLEKIDFFVFGAVPPNRCAQIYGETESFGNSFPIACTLILRWIFAPHKCLSTPNGHLKKSIFLFSGQSPRTDAPRFMGRPNPSE

SEQ ID NO: 132328 - protein, 55 aa, Heterodera glycines
MNSDNSLTYEEMNNTNRRAHSSSNIKIWAFELLEEKSRNLHDNGELEDDDDEHDG

SEQ ID NO: 132329 - protein, 327 aa, Heterodera glycines
MPPYGPAHNQQQQMMPPSAMGSVQPGAAAMNNWMDWNSAAAMPPRGNYPVAPTNAMKAGTPTGAYIPPQSGGMMPPPAGQVPYYAVGMPTSTAAAHGQPMEPAAYHQQQQQHYQAVQQQYTNYHQQQPNMTYNTQQQQQMLFHQQQQQQLQQQMMMQQRQQQQHRQMVAAATAPPAAGTTQHKAELGGVQAGQPAVQLGSYASSAAGGGGMAPAAGGPSAVNSAAQQQHQWPGSVTPVEDLYSSMDDLLPVPSEQRETAGHFGGAVTSSANTAVMSSGGGIGKVTVNILHLPEMVRGELNSVEQRFQFDPTVELNTDANAFIVKCIL

SEQ ID NO: 132330 - protein, 314 aa, Heterodera glycines
MPDRSAVEDYVFQKCSSKDEYMRTIAKVPPDPQPTHQQQQQQQRMAAAVQHQQQQIGAADAFHQPMGQPPPAMSSAPSMAMAASGTTAAAVMVGATSHAGTVVDTRDVAGVISSSNFQPAHQQQQYPYSTAPSVGQPITMATSSASAAAYPVATPQLMMGTAGAGGGGKMPNAVLTAQQMQQQRHWQRQQQQEQMQHHHPPANMPTTTLHQQQFSAGGPFMGPPHQQQQHAIVPGAAAAMAQQYGGSAAGFDYPPTLAPEIVQQLKALGEEERPYYEKVCQLQQFVAFLHNSLNKYAADPAMVGHCDQNFKWSC

SEQ ID NO: 132331 - protein, 105 aa, Heterodera glycines
MGPIEEKEAIELNFKDPWNTIQIAINEEEIGDGFYLEPGAGPDPAQDFAGSQSAILHFLEKTGFAGFAGLIRPDPVLQTFLNSNPATGSANLNVCAGLCGILLIF

SEQ ID NO: 132332 - protein, 143 aa, Heterodera glycines
MCAQKALHSATVGRATFSDSGRFGGAARAQNQAQIGRRLGRVIHFLGDNSRPADGLGFISLAFWIFLGPGSRFFKKKCLEIDTETEILSNFHCYYGIIQGLKVIQKANLIFHQVPVHIAFYYCSPVFVLLLLFVITRYCFATL

SEQ ID NO: 132333 - protein, 101 aa, Heterodera glycines
MIIFHNFEKRNQKIRVRSSLSLAILGRLFDAKNVGIDQVRKKYKVMAKKLKIVIIKVEFILKFKSSNQFLIKMLSRFSYDPFYRRSLLPMTTVGNGRHQGC

SEQ ID NO: 132334 - protein, 19 aa, Heterodera glycines
TFAFSSLALPNTHTIFEML

SEQ ID NO: 132335 - protein, 19 aa, Heterodera glycines
TFSFSSLALPNTHTIFEML

SEQ ID NO: 132336 - protein, 19 aa, Heterodera glycines
TFSFSSLALPNTHTIFEML

SEQ ID NO: 132337 - protein, 19 aa, Heterodera glycines
TFAFSSLALPNTHTIFEML

SEQ ID NO: 132338 - protein, 111 aa, Heterodera glycines
MQYNAFKPRREAGQLQNFVPHFTVESPSTLLDNYVSMSTVAFGQLWNGKMGISDGLLIMQYNAFKPRREAGQFQNFVPHFTVQSPSTLIGQLRVNEHSRLWPVVETKKWEY

SEQ ID NO: 132339 - protein, 74 aa, Heterodera glycines
FSYIFHNLFQKAKKNYSILKRNSAQKGGMVRRKEEFLEKSAPHLIFPFFRSTTGQRRLCSLTRSCPIRYLDFPQ

SEQ ID NO: 132340 - protein, 473 aa, Heterodera glycines
MSSSSAKLDEFQNALPFGVFLNDFDGAALGIVAFEIHCAIGTNDVNTCKTMATEEKSRKLTTRGIRTSTTTRATPPKTKLKIVTPFKTETPRVPNLFTPRDSTVKHFGTNCVQIDFPAEIAQFSLNISASLFGIACKQYLRKYKIGQLPKNYDEKMEMKDKMEACGKVPTETNCKKSYELIGCSESKSQQKIANEEIAEVCRKHLANAKFSDGFRIRNCASRKPGTKNETIGHFLGSIAEQSIDEGWAKSIHFIPPSDRFLDVFFQISNPPFSRLISNETNLMPYENDPNKVRVGKENRKRLNITRRFRRDAICWEMIVRRHAKFCGKLGKFWSAAPPLMLLVHVFVNFRSPTWDKTCVTFTTDLSHGPDEGIEIYDKKDGYCGLSWVGHIKEWQRVSINCTNSDTVAHEFLHALALKHEQDRDDANKYIKWNPTPRNQKEPSKTENYGFPYDFHSILHYAAVKTSGSVILKV

SEQ ID NO: 132341 - protein, 83 aa, Heterodera glycines
MIKLNGQYREIRGVNESKVFFFECFRREGETKSFWGYWKDKSKDPIRIDEMQCLSYEQAGIVKPPNKTVIDYPLRFKSANTNE

SEQ ID NO: 132342 - protein, 125 aa, Heterodera glycines
MEISKSVNNTNQTFANASSSPAQFIIVLYFRISHFDLFVPPLPFNLINNLTRERLTLALIDQGTFLLVRCPLVRDEPKWANWEREAKEWPIDGQMNRIVIGEHEQEQEEESEDDGLYLVNLLNTG

SEQ ID NO: 132343 - protein, 157 aa, Heterodera glycines
RIRPQSGKEKEEPICLSVIPGEPQLTIGRDKSFTYDFVFDQLTPQKFVFDQLTPQKTVYDKCVRELVDGAFEGYNATVFAYGQTGSGKTFMGTSLEGDTGSGKTFMGTSLEGDPARGIIPNAAQQIYDEIEERREQARRSGKVIPSFEVSAQFIEVH

SEQ ID NO: 132344 - protein, 37 aa, Heterodera glycines
MHSAAAFNQLMCCPAAAAMSFLPAALQSSATIASGNA

SEQ ID NO: 132345 - protein, 59 aa, Heterodera glycines
MVCDNVFNERQRLKNRVTAHAKMLATLLSPLDCNDLELVALADRFTACRYIPREEYGKV

SEQ ID NO: 132346 - protein, 65 aa, Heterodera glycines
MQFSVVIIILFTLAMFFHSFPLSEADGIQNAIDVYGSANSFADSDGPQILAIPRKIKSAFHEMVI

SEQ ID NO: 132347 - protein, 79 aa, Heterodera glycines
MSSTTTAAAAATANQNVLELRRLIKKFFAARSLYLSEQALTYLVDQLNSFGRAQCQTVMARVVQLVERKGGRSPFLLLN

SEQ ID NO: 132348 - protein, 181 aa, Heterodera glycines
MADAGQLVALTGDGGVDKTALLNTLLDHNLKTLSVEGQVLINAHSLGRFITYVIGYVQQDDLFMGTPTVKEHLMAPAQLWMVGHTQRTMRRRVNELEEAISDGPSFEVTRTDAKGCPAPDDRQPTAHHRQPTAHHRQPTAHHRQPTTYYNKPTTAEHNQPPAAKHPTTPKLIGFVQNLLEI

SEQ ID NO: 132349 - protein, 181 aa, Heterodera glycines
MVTVPLQGEDKYTFVEECKSPKSVTLLLKGPNKHSITQLKDAIYDGQRAVANALKDGAVLPGAGAFEIAGYCALKKAFAEALLVIPKTLAVNAGFDAQEAIVKLVETFSAAGELVGLDLESGEPCVPQRLGQCVREAGESERLSEHRLQSAGGGRGDACRHARLEGGTVKMNGTEMKEQHQ

SEQ ID NO: 132350 - protein, 54 aa, Heterodera glycines
MTLKCSSAEHLSTITPCLAQIGQKGANMSKEEFDFREFNDKMSVLRMFRPCLTV

SEQ ID NO: 132351 - protein, 169 aa, Heterodera glycines
LTCKAGYANHLSGENATNEICESKAHHCFSVMCMEQNYTSTALITWGCSGDADKKGCEQFFVNAANSALHSTKQRCECQFGDEGKDMANEQAKLPEKEKPGPIPTLSPEALEKISEMFTFWGCSLDNDCEEVSKFLAFGQKCQCQFGAKGENMGNLNFDSPFYLPMKGK

SEQ ID NO: 132352 - protein, 167 aa, Heterodera glycines
MDTKRTTTGTAPTPTHLREMPMPSSEQQMTPSASGTSSVTDEIVSQQAQMPWHHQMSEAEFGQMPTDDYPFYQNWEQSFVLPNVEQEFEGLDHFYQNDFQMPVENEWHQSEREQPIDNNEPSWDGWQRQDREENEEVNQSDQKAQPLQMTKNVGKFDAAKLDNQLSP

SEQ ID NO: 132353 - protein, 453 aa, Heterodera glycines
MVINCTELPQNLSSHFSAGKVLARKKAAKFEPGQSSTQSAGQQQQKTVVVGVGHGEHMQQKGQGHQGIQGQEHQVIQRQGIYNKGAIAGFLLYCVRHIVLMSLRSLQIASPDSFLDGTIQQIRNGHPLEMALGPPKMALAQKLSQMNAMEVAKGIKMHLLNDGEIKNYKIFAEIMDQTMENCVAVLGQTALTNGDNVNVNANSNDGDDISPSVVLFFFSRLFRKLAGFLNAPFMEEMAFSAELKGTSRVAMFILIREIRTLFVSQFDASFKFIVHKGQKIQQAMELNKLDAFETAIEHFSLAHLAICSTISAFTDKKICQMDLKIFFILLAKFLHRNFACLLLSKENISNFVQMFTHYMTIEFGSQFLPKNAKDSLADNQFMAHGWDEMGHFLSTAGKQLTELVQHLDNWRAAESAKLGENDYKNEAEQSAKKDFWHKNCTNFASSSGTKQQN

SEQ ID NO: 132354 - protein, 100 aa, Heterodera glycines
MTQTVQRILLISDSNKKNSGANVAQRIVPLDPQEDIAEKAFCRHSHFVHVLLNFHPFGQFGVRMWLLFFASALQNSKDADRHALVWDIRTGQCSAELRGA

SEQ ID NO: 132355 - protein, 47 aa, Heterodera glycines
MATKCLPLELLYEIVPLIPAENATPNALSSCRLLHKLLLSRVIKWKE

SEQ ID NO: 132356 - protein, 81 aa, Heterodera glycines
MSTVPFVQLWNGKMEISDGLLIMQYNAFKPRREAGQFQNFVPHFTVESPSTLLDNYVSMSTVAFGQLWNGKMGISDGGALF

SEQ ID NO: 132357 - protein, 62 aa, Heterodera glycines; identical to SEQ ID NO: 131736

SEQ ID NO: 132358 - protein, 43 aa, Heterodera glycines
RLIEPVKSFRMISRLFDSVNNFKSYIDSKLAQTELARRNWPVP

SEQ ID NO: 132359 - protein, 107 aa, Heterodera glycines
MLYSFFIIYFLLIIHRFLIHISNAIQFGDDKMLIAFVSNGQKTQISEYSKQKYETHLGIVYYMRKNWHCDKTRRDLMNMNEKNVKNIVNCWTLFTNICSENTSEFQQ

SEQ ID NO: 132360 - protein, 108 aa, Heterodera glycines
MSDNPKEAEREMEKAIFIAADCWLEVFGLLPRSQLGLGIALISHRFDYYVDEHFKICKWTFDKLKIRSKIGENGAKEMEIVNSDGKELSIPQNSLPNKFIRFGCILIK

SEQ ID NO: 132361 - protein, 91 aa, Heterodera glycines
GENATLEEIDNFIEQRRDAASTGQRSQRRPCVLETPEAPPKPLNFPCTNTNCDRSFPSKKALSNHKRACSAPARVTPPPAAQMTPRRRVLN

SEQ ID NO: 132362 - protein, 165 aa, Heterodera glycines
FDESDAEDPAEEVPPCTVEIGLRSLDTPKAQRTRSATVQRKSRRLAAVNNAASAGQSADKAHAQSRDGIFRGNIIGEVRCADEPLLAKAPFNVPGRPYPPEPLYTTDKSIMLKWERPSLDRGTPITDYELEIRERGTKLWEKATTTNASLWEKEAFGNVPDTRIK

SEQ ID NO: 132363 - protein, 418 aa, Heterodera glycines
MGPLACDMTVLVGEQAKLLVPYAANSSRPKFVWSKNGKPMDPRDDPRVKEEKSDILIQLCYPKCEQSDTGTYSIRIVNDLGSDSVDLRLKVVDRPAPPEGSLKERTASSSGRRRVGSTAADRSAQAAAAACAADEEAKDEVYNNEEERQDMAVVTKRMAILDLETSGTPARIVEIPENVTVVEGELAIIKCVVEGNPAPTIVWKKGGRKMPLTDDRVRCQTDGDTGHSNLDFRAKQKKRGTGISNSEQEKQRQRSDAEPKSKAERRKRQVYVVEEPRDTFVVPLNSQHANEKENATFECEVNDKEIDVKWFHDGAEIGMDGRHFKERAGCRRRLLIINVLIEDHGEYKCTAKDDETMAQLIVHPKFVKKSGAQAEKRNLIAGKMGSGGTFLRRDLVKNEKELSRQRDCGNANVKMPMI

SEQ ID NO: 132364 - protein, 97 aa, Heterodera glycines
MCPLCRAEITDDFKNLLSGKDQAKAGPSNSKREQTDMDEQFARALMYVDYDDDDDTITHGNNPTANDAAMAQRMQKQLQEQQEEADAELARRLADQL

SEQ ID NO: 132365 - protein, 129 aa, Heterodera glycines
MALNNLFAFASTHGEKAPADQMGGRLDTCKYNGQFSFLFSDLIAPGVRRPSFAQVYTLAPEDALNVREEALDTAVSPHVRRTILERLEALMRQNPFGQTFQTVGTKIAAARAATGEMPHFRVYHTNNHI

SEQ ID NO: 132366 - protein, 238 aa, Heterodera glycines
MIGKAERAFDAAMKHRPKNFNKICRGMEGILSEWDCTEMRAFNELWEGVKRRPEETLDEFAERIYGIVDRAHPEAEKKLNDLRLSNQPPAQQTNVEAGPKRKASNRQRNSSSSSCSVKAAKIKENSPEIPKWFLNAMIAALALLASTFSNEKSKIGRIWKGKSPTNGSDDEKRRKADGKLRTIFSPKAGEEMANDIADNLENLSIANTELNTPLSTPNALPMSPKRRGHRFVEGEDVI

SEQ ID NO: 132367 - protein, 87 aa, Heterodera glycines
MALSTKLLPGLFLRSSAFFAPISCSRMAKSDVPALSTTNQPYPYKEQTPKGIFEKMGLQKTPDGASIGEFAVMRMDDMMNLIGRGSL

SEQ ID NO: 132368 - protein, 140 aa, Heterodera glycines
MGRKWPGATAAAGVRVVLLVLLPHRPLRPTAVVLLSRTPCPRRRRPSTPTAVPLQQRSSDEEDDYGKKYKYDDDEDDGEEEEEPVMMTCDDDEEDEEDGDNSWVPWAVTTSRHQNRHPKAAPKEHKARSNNHKRHKKSSR

SEQ ID NO: 132369 - protein, 37 aa, Heterodera glycines
YQKIAFATAIGFAIMGFIGFFVKLIHIPINNIIVGGG

SEQ ID NO: 132370 - protein, 78 aa, Heterodera glycines
MDLLLFQRDKYALAYNCTNFDANLVPIGQRIHTVHGIILIIMFFVFELPPKLRHKNDPFHLSHGHEYFFSISCCTFPA

SEQ ID NO: 132371 - protein, 252 aa, Heterodera glycines
DSIHRIQSLGLNPPTFQSLGLNPPTFQSTGLNPPAFQSLGLNPPTFQSLGLNPPTFQSVGLNPPTFQSTGLNPPAFNHWDSTHQHSNQQDSTLQHSITGTQPTNIPINRTQPSSISISGTQSTNIPINGTQSTNIPSNGTQPTNISISGTQFFCISITGTLFSCVSIKRTQSTAFNHWDSTHQHSNHWDSTHQHSNQQDSTLQHFNHWDSIHQNFNHWDSILPNSNHWTQSHQSFSNTITGTQFSDISITGT

SEQ ID NO: 132372 - protein, 63 aa, Heterodera glycines
MDETQIGDSAKENEAIRLKIQKDQQQSKESQSTQQKLSQRRSSTFGSSARQHRIYYQSKKQFV

SEQ ID NO: 132373 - protein, 141 aa, Heterodera glycines
MTSYIEQEADLSEGHDSDSEVSEPVAKKAKKNKEKKRRHQISSDEEEEEDEGDEEEMRDFIVNEGDEEGGDEGVEAEADGESEKGSDVSDDLLDDDLDLLNENYQNTRGRVEISDDEEDVRERIKDRIFGPSNSPFFIFLC

SEQ ID NO: 132374 - protein, 134 aa, Heterodera glycines
MGLWSTTTCPLWDCGQQRPAPYGIVVNNDLPLMGLWSTTTCPLWDCGQQRPAPYGIVVNNDLPLMGLWSTTTCPLWDCGQQRPAPYGIVVNNDLPLMGLWSTTTCPLWDCGQQRPAPYGIVVNNDLPLMGLWST

SEQ ID NO: 132375 - protein, 76 aa, Heterodera glycines
FSLIVPPSFSNNSNNNNDSGTTKASTTNDDDDDANNLLILHQNCATNVGEKECFFEPTVSPLSFLLYMDLSEIYGE

SEQ ID NO: 132376 - protein, 108 aa, Heterodera glycines
MPKYVLHPIQLFTSLNNTENVENAQNSPRFARARFHVQFNATARAFAPPLVLLAHVVYASPPTAQRDNDSDVEFGLAQDAAGAAELVEMAPATGIIVPRVKEKNNFET

SEQ ID NO: 132377 - protein, 335 aa, Heterodera glycines
MTDREKHLHFVRLAEEAARYDEMVQGMKQVIELDAKLNENERKLLGVAYRKSVTGQRFAWRVIASVLARGKGTKRQLEMVKQLLNKLEREVEERCREILDLLDRVLIKEAADDEAKVFYLKLKADHFRYLAETRAVKNGVAEKAKQAYQEAFDLAKNKLRPMHPIRLTVALNFAILQFEVQKSPADACQTAQRAYDDATSDAQTTGESICAESVTIMGLLQDNISYWSGNTSKTDSICFGIINGQIAHFDNGINAVVHLLLNISVYIEVQAVQQILMGKEMKMDNSKNGETRQEEENSIRLGGETEEKERKRKNSAEGRGENEAEKRKEQQQIGT

SEQ ID NO: 132378 - protein, 300 aa, Heterodera glycines
WICNDVWMDIFPSFDRAQLGLKLALLSPRFDALVDKHFDGKSELTIWRTIEIRRKDKGPEPKLYIDHSVIAFLRSNHQIFDKRGTNLHLWIPLSYTMDVFVREIWPIFSANIRHLGFPHGDHLDNLLRRISPTILTDLNQLTSIHSGALLPAAFGDDFDGPNSTISSGQALSKWLHSPRKDGQPKRLHCANYNKQTNFDWVNSFKEHFLRANAISSVSYEIHFYVRATSMQIVPFELVNECTKEKLTLAKEDENEFEDNSWIMKRCKIGETAAVYWKDGNWDNNYNTVLIWLYDGTNCIG

SEQ ID NO: 132379 - protein, 98 aa, Heterodera glycines
MNRRWICNDVWMDILPSFDHPQLGLKLAILSPRFNALVDKHFDAKSELTIWRMIVIRRKDKGPEPKLFVQMDDKFVPFPLPDDRPLPIKIRFKHLQIE

SEQ ID NO: 132380 - protein, 49 aa, Heterodera glycines
LQIYWLKLHMRYISKFFDSVRRFDKDGFRFAISRSTFGNWSRIFSAITC

SEQ ID NO: 132381 - protein, 39 aa, Heterodera glycines
MSPAVIRRGATVMRRGTTVIRREYLLKLKGINFSKIQIK

SEQ ID NO: 132382 - protein, 95 aa, Heterodera glycines; identical to SEQ ID NO: 124528

SEQ ID NO: 132383 - protein, 97 aa, Heterodera glycines
MNRRWICNDVWMDIFPSFDRPQLGLKLALLSPRFNALVDKHFNGKSELTIWRTIKIHRKDKGPETKLSVRMDDKFVEFPLPDRPLPSKIRFKHLRIM

SEQ ID NO: 132384 - protein, 27 aa, Heterodera glycines
MRNNGGMIITKVVIRQECISFLNQIKA

SEQ ID NO: 132385 - protein, 148 aa, Heterodera glycines
EQTSNVLISETTTIPQMAAAPSIRIIATSKAPAATGYRWSKQWMTIEKAQLYLLFCSQAVLVNNQTLYVSGQTGMMPGKTDVVSGGARAEAKQAMTNIGELLTYAGSSFKHVINCNIMVANMSDFQDVNETFKNFFTADTYPARSFFQ

SEQ ID NO: 132386 - protein, 66 aa, Heterodera glycines
MTDQICQYLNISLFTKYETANLASKSAALYLDKNMTTVGEWIFSPIIHQFVVAKCTFQHQYKLIEK

SEQ ID NO: 132387 - protein, 82 aa, Heterodera glycines
MKRTNATNITPPRAKRSMAPALDPITAALAEQERQRTLVFIGLPESNAVRPSERVQEDREATTKILDHLEVEAEPTAVFRLG

SEQ ID NO: 132388 - protein, 149 aa, Heterodera glycines
MDEFDEDAAAMAQRPMPKWEKAGLRIERNCAENQIFLNIVQEIVDKFGWDNSAHDYDMWKKAFGPNFSMFFVLDQNRVPMGCISMALYPQVAHWSMFYVRDPYHGHQLGRALARRALEFAGDRPVFGYAGQKTYGSFANAFLPIDCSVE

SEQ ID NO: 132389 - protein, 157 aa, Heterodera glycines
MVEKKNVRKITGRNSTANKESGSGGKGEGNSVGNAQQKGKRQNEFEGGSGANGNNSSNIGNGNNEINTNSNNSGGGGWGIVGEDEGEPPPPQTPQQLEIISNNSSGVRAQNDALAIASQLEKSASAGATGGATAQQLLQQFGFGGAGAQNALQMNQL

SEQ ID NO: 132390 - protein, 100 aa, Heterodera glycines
MAKATHARWAKNFQAMVSALLTPFVRKRMLVERGTLFGNDCLMSECDGTLGQNNSRVGRYSHLGTQEKIVEKLVKHTTMLNALHDRGVENNKENDKYPDF

SEQ ID NO: 132391 - protein, 29 aa, Heterodera glycines
MPPSLSLLLALSMAFCLITLVLKCPDEEC

SEQ ID NO: 132392 - protein, 16 aa, Heterodera glycines
EAIPEGFGLPINLGAS

SEQ ID NO: 132393 - protein, 77 aa, Heterodera glycines
MPLNQQMKNYNSNHLTKYLEKNGKKKKKKNKMKRKSSKKEENIQEKNGRKIMPKFVRKFELAIMTQLRNGRNNLALT

SEQ ID NO: 132394 - protein, 135 aa, Heterodera glycines
  unsure (1)..(135): unsure at all Xaa locations
FRGQSPRTXCAQIYGETESFGNSFPIACTLILRWIFAPHNCLSTPNGHLKKSIFLFSGQSPRTDDAQIYGETESFGNSFPIACTLILRWIFAPHNCLSTPNGHLKKSIFLFSGQSPRTDAPRFMGRPNPSGIASL

SEQ ID NO: 132395 - protein, 151 aa, Heterodera glycines
MRRKRQLERGGAKGEKTRKSPQGKKFVRKEYRMMNDSERAHLHNALNMLKEKRVDNISIWDLHILLHYPNSAPAAHWGLHYPNSAPAAHWGPPAFLPWHREFLRQFEAAMHSEVPVGVIPYWDSTLGVIPYWDSTLDPGGVLMSTVFYDFF

SEQ ID NO: 132396 - protein, 51 aa, Heterodera glycines
MLMPQRQLRLVSKSLLLVHGAGAKQFLQGLTTKDMDSLNNVPLVYSFLIQC

SEQ ID NO: 132397 - protein, 82 aa, Heterodera glycines
MTRNFEAAERFLYFFLKIISVNATMRDAFRELLILETFLHIMQQHSSEATVQPHVRRVVQLSLDLLINATKGNVLNAQFITG

SEQ ID NO: 132398 - protein, 713 aa, Heterodera glycines
GINDDQTEIRDGGEGMIALIKEAQRCKVKVYDRSMVKLFTRLIFAPSNSFSKIQLFDKVRPAIINSVLLNFGCFGKCTKVDSEAPVWATVTLANCGPKLAAIHQCFRMGTDLYRADNKSEVPKGTEVPKGTFNALFLMRLLFDLAFDNFDKYLFNSQWLQNAENFETWLQNAENFETAVLTWSNSMLTHPSALLSIVDLLPAICFPSNEWCALAQLYIALVLKAVLRSEAVLRSERNQQTMCQFDLPAKLLAVGENLFKTERHPLLSSFHYLFERLAYQSLRPKQLRRFLRLDMPLKQLRRFLRLDMPLCCTNLDDNEKGRSDAAMKPGGPIPTHRIKAFVSMLTPRNHSLLLAPSFVEFDLAIEGFAALVIPSIVPVFNNSRSCRIVRVFDGSPSTTMLPDENTSNSSRDSRPVSRVLWPSTGGKHEPPELSACCFSEWTAAVGLVVSGAEHSVADELRKDFSRGAEQCLQVPLSEQYSPKQWAHLAIGWSSLLLKSSNVYNCEVFVNGHSLSSLLLKSSNVYNCEVFVNGHSLASQKLQLWWHSADSGGQQGLNAYIGTLPFFRRGSKLRWRLASLCLVEEALGADVLRKMVALGVAYTGNYQASSRSALISEERVLLSLNASASAETTALSLRSMFPCRTDAEMIAALVGISPNDQSTPLCILCITSCPTPCRALPLGAVLIGYLGIRTFCPCPVSSLLDSVGGIAPLLG

SEQ ID NO: 132399 - protein, 132 aa, Heterodera glycines
MPKQNEIVLKYSFLDLTWFLDIEAVFYAISKTKKCLVVKTIFHISLHNFVSSARIETGIRPLERAARALQEVKKLFEFLQFCFHNFRKLFGIIMPKQNEIVLKYSFLDLTWFLDIEAVFYAISKTVIPNPRF

SEQ ID NO: 132400 - protein, 446 aa, Heterodera glycines
MPNGKTLGQLREREVRKHDILSRYVDLEVVWEHEINEQLKNDTAMREFFDNWKDRSPIKIRDAFHGGRTGQMKLLHTAKPGQKISYKDFTSLYPFTNFTTDYPLGHPKIISFPVNEQTVNWRSPSDNPYKGLLKVLLLPPNNNIKVTVMPIKFDQRLLFPLCEKCAKHITAKYPNGLKVNDYSCPHFNPIYRAFVSTCTHLELNASLEAGYTARKLFHVLQYDQWSNNVFKSYVSEMMALKIHATGFPSWCESEEQKSEYIEECWKKFAIKLDKEKMNSEPGKRYIAKLCLNSLWGRFSMRNLLSKSIIDNDESLIHQYAEDKKIDLIDLEMMDEDNDVFMLTYKPKEEFVDENKYSNVVISLFTTSMARLYLYEALKKVADTPGCEILYFYTDSIIYVHPVDNDPLPTGKGHLGELTDEKPDHYILGFISAGCKTTGLNFHGRQW

SEQ ID NO: 132401 - protein, 122 aa, Heterodera glycines
MPYGVASAPAIFQQVMEEILCGIDGVAVYLDDIVVTAANDAEHLKRLDAVLQRLQKAGLRVKKEKCSFMQESIVYLGHIIDRQGIRTSPEKVEAIQKMPAPENLKELQVFSSELSTQSQTNS

SEQ ID NO: 132402 - protein, 43 aa, Heterodera glycines
MANVWRKNGPSLPDKDIPNRCFSGHLQCQFGAPSVKEQFHGLI

SEQ ID NO: 132403 - protein, 175 aa, Heterodera glycines
MDQFELVNETTQEKLTLQKEVGCGKNKCKECEKMNGWLLKKRCLSSNVVVFGEAVQHQQQRNHNILNNSQNVRIELRGPICIGWICNDVWMDIFPSFDHAQLGLKLALLSPRFDALVDKHFNGKSELTIWRPIEIRRKDKGPEPKLSVQMDDEFVPFPLPDRPLPSKIRFKNLRT

SEQ ID NO: 132404 - protein, 74 aa, Heterodera glycines
MTKGKADIAKTKGWDNRWIMKRCKIIGETATVQQQKKNENLDNSCNNVSIWLYNSANNCIGNSLTKATIFFIDA

SEQ ID NO: 132405 - protein, 114 aa, Heterodera glycines
MVRLVFRPYTQVRRSICTSESLRTSTRVSSGFILLRNSSPSFGSQRIRSVSAPSHAIETGLWITHQLRKKPSLSLITHQLRKKPSLSLRLWVLNTPMTCAYAKLLGPCFKTGRT

SEQ ID NO: 132406 - protein, 91 aa, Heterodera glycines
IHPIMNAKIIRVPKIACDLSLAKNGVSKNRNYAQKASQTILTLPIPSTIAFIHPIMSAKIIRVPKIACDLSLAKNGVSKNRNYAQKAPQKF

SEQ ID NO: 132407 - protein, 32 aa, Heterodera glycines
KPKLFGLFKKELKIFKNLFISLLIEKASESLI

SEQ ID NO: 132408 - protein, 110 aa, Heterodera glycines
MGPTIKKSIKDSRRIIDFSRNRFEPFWSLFRDDFLADPSLYWEVNSQKWPMIGAVVRKFLSPPATSSESERLFSTAGLISDDLRKSLQAENLAKLLFLHHNLLLTGFSIE

SEQ ID NO: 132409 - protein, 238 aa, Heterodera glycines
TIPVTKAKPPTVSESSSSGDDDEVPAKKPAQKAQPAKTIPVTKAKPPTVSESSSSGDDDEVPAKKPAQKAQPAKTIPVTKAKPPVESESSSSGDDDEVPAKKPAQKAQPAKTIPVTKGKPPTVSESSSSGDDDEVPAKKPAQKAQPAKTIPVTKGKPPTVSESSSSGDDDEVPAKKPAQKAQPAKTIPVTKAKPPVESESSSSGDDDEVPAKKPAPKAQPAKTIPVTKAKPPTESESS

SEQ ID NO: 132410 - protein, 47 aa, Heterodera glycines
FFYLCFSLDHSCDQGQTSDGVRVEQFGRRRRSAGQKTGPEGTAGQSA

SEQ ID NO: 132411 - protein, 49 aa, Heterodera glycines
SEALWPAVPSGPVFWPALRRRLPNCSTRTPSEVCPWSQEWSKEKHKLKK

SEQ ID NO: 132412 - protein, 29 aa, Heterodera glycines
FFYLCFSLDHSCDQGQTSDGVRVEQFGRR

SEQ ID NO: 132413 - protein, 271 aa, Heterodera glycines
TIPVTKAKPPVESESSSSGDDDEVPAKKPAQKAQPAKTIPVTKAKPPAESESSSSGDDDEVPAKKPAQKAQPAKTIPVTKAKPPVESESSSSGDDDEVPAKKPAQKAQPAKTIPVTKAKPPVESESSSSGDDDEVPAKKPAQKAQPAKTIPVTKAIPPTESESSCSGDDDEVPAKKPAQKAQPAKASANPVSIQNGKANPVNGNETESNSSDGAPPAKAPRMDLDSWGKKAAADFNGVKGKRFRHEKTKKKRGSYNGGKINTSANSMKFDH

SEQ ID NO: 132414 - protein, 47 aa, Heterodera glycines
FFNLCFSLDHSCDQGQTTGGVRVEQFGRRRRSAGQKTGPEGTAGQSA

SEQ ID NO: 132415 - protein, 54 aa, Heterodera glycines
LTIACPYISGRFGRLCLLGRFFGRHFIVVSRTARLGLRRRYGLGHRNGLKKNTN

SEQ ID NO: 132416 - protein, 68 aa, Heterodera glycines
MRSEVGKIALDTVFKEREQLNVAIAGGSDAASLLVAEKYVKAFGELAKENNTVLLPTDMGSVGSFVSQ

SEQ ID NO: 132417 - protein, 44 aa, Heterodera glycines
MADLAFLFGLYGFAYQTYQSLKKEFANDQAWQKGESAGFIAIIR

SEQ ID NO: 132418 - protein, 25 aa, Heterodera glycines
MGLEFIALSVPNLLSPKNSESFILK

SEQ ID NO: 132419 - protein, 138 aa, Heterodera glycines
MNYFGLFPAGIFAVQTMLMLSILLSFTNGMEIKVISDMHRHAKLLTIEVQKTDTVATLKANITEKLKEIFKNKDGIPQEELSLRYSEELKEILKNQTDPKKQTDHKQQKTPKKQTDISSPEEQSLAYYKKGNGHILED

SEQ ID NO: 132420 - protein, 243 aa, Heterodera glycines
FFAERINTHTTRICMASRDGIGSDGCALIGNTPMVYLNKVSKGCAAKIAVKLEWLNPSGSVKDRIGVAMIDAAEKEGRIKPGISTIIEQTAGNTGIALASVAAIRGYRFIAVISSSQTIERRTVLRARTVLRALGAELVLLDPKLGFNGAVERTKQLARAIPNSFNPMQFCNEFCNEANPEIHYRTTGPEIWHQTQGKVDICVFGIGTGGTMTGVGRYLRMTGVGRYLREKNPNKQIINLLSK

SEQ ID NO: 132421 - protein, 87 aa, Heterodera glycines
MVGVSVGLARSGSAGGMMYFEVAEADPLNSHSERGTCFFTGGGGSLDTYALCSQQNAYGAGSKIRTFCKIASNIFTFYSIKNVFYYY

SEQ ID NO: 132422 - protein, 73 aa, Heterodera glycines
MSHNPKEAESEMEKAIFISADCWLGVFDLLEPLQLGLGIALISHRFDYYVNGGREYNLLPLLPTLACLYVSFS

SEQ ID NO: 132423 - protein, 95 aa, Heterodera glycines
MLPMVFGVADHESCIQFDQFRQLYVSSIIYARGLLDSGHLDSGHYDSGHLDSGHLDSEVIWTEVDIWTVDITTVNANFLLITNFCKHMLIPITDH

SEQ ID NO: 132424 - protein, 40 aa, Heterodera glycines
MCKISTSADFQFVSVYSNRANNREIFGLSSYINKIKFGSF

SEQ ID NO: 132425 - protein, 147 aa, Heterodera glycines
MAATDAQKAGGCYGNGPCEGTKKTFNAFFFVIRHAFQLFYVFCAFVICWLVMGPGNQFLCNLIDDDTQWLIYWCSFALFILFDFVVNTLLISNMIPLYLLLKTAALLYLALPQTYGAHNVYVSYVDPLVDWIDENGTKLYRAETTAQ

SEQ ID NO: 132426 - protein, 123 aa, Heterodera glycines
MALIITPLFLVLVEYDLILENTITLNKMRSHQFNLRQLRKPFRNVASTNSEGLRHRNSIVGPPVVPWTSLALLATAPPIVAPEDDILNSLFAQTTQSCSTAKTATLSSAVLLRMTRRPRNSTF

SEQ ID NO: 132427 - protein, 43 aa, Heterodera glycines
PGLDPGPEEPGFFLDLDFCPGNQGPGPTWNLGPGPGFFQNVDL

SEQ ID NO: 132428 - protein, 51 aa, Heterodera glycines
MTRRRGTDGPTGEDAKCQKCPTVVTNARWNFRNCGISNGITVHILTSKHSR

SEQ ID NO: 132429 - protein, 1025 aa, Heterodera glycines
DETKQQQKVETDAEEGREIQSPSPAKPKYYRPLDATDLDQLQNVYPKIVSEICELISQLKHSKIEWSKFKSEEKRIMVMLCSVKQLIKVKNSIFLLREMFALRSSLLLVPFFSLYSIKSFEMRKSLVKCLYRIHVFNVLLSDEPSCKILSHQFIAKLRECAEHLEVEQFRTLWNRIPITYLIRISEISTIKCLSFLEIAKRTQKLLGKMCMEPNEFRFVTDFLFGRKRISMLQDNCSPQNWLFISGQYLFESLSCTANDKSQKASTTFNENAKQNNRIGDSASLLQKWLFIVGQFAHYCAVNRMKTPIGKTPLETFTKFEAQLRALASSSTSQLIASRSKNLASNEKGIISYSNSNDDDHLSMNQSSGNCGKEQRNLYPEEEWFRVRMLLHCIDMVEKMMCYAVRGSMLKIYDELPLNARQFFSVNFKTCMDWLFRTALPLMSTAYANGHYAQIVRFGGFLFAELERKHPSNASNDTKIRLDPSIQFAITWVIRALVRLGAPQAIRGVQRFSETMFGPAVDFSWCHYAELLASARVEEALDGCLNFLNCAKQSKENVPKVRDHVLNAIDELALMAAGILRLPQAETKLIVLRILLYCLIKEFAKQSSTEKKLKTTKAERADELSDLAQFLLCGGHENSDGLAHSKLAILHAICTGIQHLNVPNQQYHVQPAQIQQHFPPKGQQSAKQMMRSPPKYSVSTPILLEVDFADLLHNCNSNALHSLEIGQMYCGWMHRLYGAQKEHSFVLKRMHGQIAQLAQKLGNPNLANTHFRLSVQNGGTQNSWPIDDLYGNQMHRQLDILPEYQLPMGISNLYIQQQTQPQFQSIPPGFESLLGNQPFQTEDAHNHFTVNNISFTAPATPQATKSLLSEDFDGDSLRLLPNELAIMQQSSEKSYVQTAEVILRFLKMLSRQPEWFQRIVTFPDDKTATSAGNNSGKKLAWMDRIPVNVWTGMIPQLFACLNHSNSIVVDAIHMLLEQIGQNLPHVVCYPAIVIAGAADEKANTMPLLSEFSKENSERLIVISIHP

SEQ ID NO: 132430 - protein, 91 aa, Heterodera glycines
VSHDSSIAVIDKSNSQPQERPIQHKTAFLPFTSVRWVNETHIVTADVPPESKNGSNVSSAFAMFRSIDKKALSADSPLGSTALKTLHQNSI

SEQ ID NO: 132431 - protein, 100 aa, Heterodera glycines
MDKNVAWWCCNCWDSGKSVDEDVVGVQQQHLQLPQQQMLLSGAKLGQKRSLQIQIEFKKLILIRSQIYSKGTTEFTRFKTMPYLMTKTNNSCITAECKNF

SEQ ID NO: 132432 - protein, 25 aa, Heterodera glycines
DHSQRNVPGTDSVISMPGLTGSHKQ

SEQ ID NO: 132433 - protein, 15 aa, Heterodera glycines
MTVYEYKLCPDKEIN

SEQ ID NO: 132434 - protein, 37 aa, Heterodera glycines
KFAGPVAGLEFKIFYRTGSGRINPANPVNPVFSKICR

SEQ ID NO: 132435 - protein, 69 aa, Heterodera glycines
MNKAFVKAALCSKSTNVCLFKRLVRPVVQIGSRPITGAGFGHPMTRQKMQMYSPEMRAVNYQQKRTHMH

SEQ ID NO: 132436 - protein, 120 aa, Heterodera glycines
RAEFAGLPGVKGPPGQTGKQGERGKRNFVIGMPGPDGRVGKQGLDGLEGKPGQRGEKGPPGEDGADAKFCPCPSELNSVGGEAKANKRPLRQSLTSDQQKNAFLSQSLPFFCPIPKSTSS

SEQ ID NO: 132437 - protein, 251 aa, Heterodera glycines
AGPPVQRPSEKNAIKRAEFAGLPGVKGPPGQGKQGERGKRNFVIGMPGPDGRVGKQGLDGLEGKPGQRGEKGPPGEDGADAKFCPCPSELNSVGGEAKANKRPSQKGAKTTTVYETTAKRTTNYALGEGTTNGTTSEDIVTTKTTTTPTIQNTKPNEGNGQQNSNLKIGHLKAGERPNGRENRREKGQSEQNSKKGKDKAHQLRRGGHLPKLRKSERRKGKERREEAGEYDEETTNGEEEEREREGERERE

SEQ ID NO: 132438 - protein, 338 aa, Heterodera glycines
MAIPQYKDLPFGGKTVIFSGDFKQSLPVVPHEGITAQVTACFQTSPLFRQFTTMKLTINQRLGQGQQAYLQMCRQIGLGETGEHFWIPPQFIVKSREELINFVYPNFQQLLGNEKELLNRLILAPHIDTCDEVNEMMMANVPGQVREYLSTDKPLDDRPLDIDEIESEVAALNGRTDSGMPPHCLRLKVGSVVVLLINKSDREGLINGTRIVLEELGDDRLVGRVINSNAIGGQVRFFLERSRNVFEDKTPGGLKYERLQFPIKPAFAMTIQKGQGQTIRTVGIDLEREVFTHGQLYTAFSRATDGNNVRVHAPKREIDAQGQAKVLNIVAKNMLKLQ

SEQ ID NO: 132439 - protein, 206 aa, Heterodera glycines
MEPTDDEQDHGNDGNERIGGSPTTQIGAGQKSAKRGKDKQKGVEASTTQSCSGTQPGGTRNLRSNGIAIRAIRDQLERASGPLADRIAEARDLLDPDLNGDRPQTAVCLSAMERGLRELVDIFKGHFDRGLATIGDEAPELHDYLYDAFTRPLPAATRCLGLRSHPPPAELLQIAMEHLGDLRTVRRTLEDGKSYPSCHPGPDREP

SEQ ID NO: 132440 - protein, 808 aa, Heterodera glycines
MRSVAKVAQYPVLNAGGNGANTWVNQASDRRERTPSPHIRQAGNQPRPLIPELPIAGNPNPCGHFRIPEQVRGRDPSVLRTTRRDEETTVFETVRLQPPTFSGQPEDWTTFWSYFKRAVDDKPIPGFEKQLLLLRCLKEGSPARRAVEVYPPSDGNYPVVIQLLKERFGDTDDLQRAIRAQLLHLPPATDNAQSLTTVVDEFERGVCQLEQLGANVEDASFMPLLESKLPVRILTELRIRESTSGTKWSVREFRRAVGAQVRCMRAAESALAAMREPERRTESRPEQSRHAEGTQNRDQFPRVFMVRSNPSSQRPITPGASALRTGTHAPHRKVADRNRNRLAQSRGPAPTDNGCSLCQNWGHRPSNCPTYPTFQERRQRFFEQRRCIRCLSSDHIASCCPRPKACRWCLRNDHHSLVCWVGPGKPIAIREPAGPETREHIGSKPVESVVEPRTHSGLLKPTDATVQPQIVIGIRKFWDLVIGFKISAEGAFLVDTVFGTVLCGEHFGAPLGQSVPRDTILMAISGEENRWNRMPASSGVEAADKSKPSIYENDRLGIGPLNPTPKNPRDRKDPPHVQPEKRCRVEQQRTKCELPESDQDGTTEPCERGLSQCLLGASLLWKVMTWVTRHPIRVFNRLTGGDIPEPTADQVKSQERVQLARRARAAARAWRNAERGRASRPGAAMALLPLLCFVALFSSSEPMSVMLRSEDCASTPSGFKCSGSAAMIIGPEVGELRDSVNGITPKGIGPLCLFLQWDGGISTVARPWPASPPPPMSRKRREKKDGLWMAGIVPGGLKEAGGPMPNSD

SEQ ID NO: 132441 - protein, 206 aa, Heterodera glycines
MIRNKLECLQKSRKKLYLLDISNPTEDADLFHTSLRKSLESRRQKIKESVGLEHLYGEKTEYVEAVRNIFRAVLSLPLLPSAISEELSQLSWPSSPLGMPVFFLYFSRTYIGLTQRPFCTLDNNFDHNSEHSYAATLIQFGIGSPAPSTLTWPTTDAVIMRILADASYNSNGEISDLMSALGLQVEGYAGKLRDFEIYDHSIVHVP

SEQ ID NO: 132442 - protein, 749 aa, Heterodera glycines
PFVDHADWELTAKNFWDLQLIGIKDNPKENDDDTAMEIFEKKAKRLADGRYSSGWPWKEFPSDLPSNYNMAYRRLVNLLEKLRKTPELLDKYHESISREFNLGFFELGERREGFPEHFLPHHGVVTHKLRIVFDASAHPRGEKSLNECMFRGPVMIPDLVGILLRFRLPIIALWADLEKAFNAISLDNEDREFVKFLWEKLSTDNLQIFRWARIPFGVISSPFILAAVVQKHLKEKASPLALEFAGNAFVDNLMTSCKDAGEVLKKYREGKALFAEAQMNLREFICNSMKAMEQIPEEDRLNKPGTKVPGIPWDIQKDELSIGFPPTNEAGKISKRIVLKTLASIFDPLGMVAPCLLQAKLFLQRLWDRTLGWDEILPADETAEWFAVIRLCSGTFIRSQKGEETNVQLLYAKSRLKPRKAEVTIPRMELLAMLIGARMLKFAENQLRIPINEKFIWGDSKPVLSWIESKDSQPRFVENRLREIRRISENARFLHIRTHENPADVASRGCTPEELRSHHLWWNGPTWLSPQQEPMMDSPQQEPMMDKKVQNWTMLQCQQQRVKTIHIDPCRFSSWTKLRRTVVWFLRAINKMRKTRIYYQYAEILLVKMAQKCYQYAEILLVKMAQKCWPMCKKQPQELVKTSRKDGLVRLSTRLAMSKIPFLPENSITRLIAQSVHESLAHSGVESTLTEFMGKYWTPRARLTIKKVIRACGRCRRNAPYKLPTMPPLFDRVRRTAPFESIGIDYLGP

SEQ ID NO: 132443 - protein, 31 aa, Heterodera glycines
ASATDWASGCSQVSLMRSTSKLLRVRTNERI

SEQ ID NO: 132444 - protein, 101 aa, Heterodera glycines
MAELITKLCTTKLAILKWLQMEIGFNALAAFVCLAFAVLLTIDSVRMFGDDFSHHRFLVGNLEKWQQNDLPKIKGFNKKRNALATSEHWQGRVAQSDFGGG

SEQ ID NO: 132445 - protein, 51 aa, Heterodera glycines
MSADNGCRFHPKSSTVPTTTTKSPPPPKKEKETGVFKLLPMWATIVIAVLI

SEQ ID NO: 132446 - protein, 95 aa, Heterodera glycines; identical to SEQ ID NO: 124528

SEQ ID NO: 132447 - protein, 76 aa, Heterodera glycines
YHTSIIFLKLFFSFITQRSRLIRSSPNFAGKLLRTLQMLINFLRIFCLEEHSSSHLPHQHYFFLIIFFILSPNVLD

SEQ ID NO: 132448 - protein, 91 aa, Heterodera glycines
LFEYPKRTLEKIDFFVFGAVPPNRCAQIYGETESFGNSFPIACTLILRWIFAPHNCLSTPNGHLKKSIFCFRGSPPEPMRPDLWGDRILRE

SEQ ID NO: 132449 - protein, 81 aa, Heterodera glycines
MAKNPLPEGCTARPLDQRNMTSWTKSLICFSVFTVVLSIIVLLNDPNPDNSPVNAQAASLYRTDRAEFNRRAREMTLAYAR

SEQ ID NO: 132450 - protein, 96 aa, Heterodera glycines
ANIICDGDKLGCTNVPPRRIFSKKELFARLLGLSGAGVFEQFFLRKPAVLNVTDKIVARKVAFKLGGGDSSSNSSEGEEEEANEEEEKGQSREGDE

SEQ ID NO: 132451 - protein, 143 aa, Heterodera glycines
MPNLLQVLFGPVVYRPYQPNLLESGGNKLFSIGAGAYNTCVVLSPILVPECPTVALFSSLSLFSVYAAPADFKASPGRTAKWHPPRERLPDLNPPLNFLRQAIAWTAANTFGRRMLFPGSMALFNSMLNSQLVDGRRKLLTEM

SEQ ID NO: 132452 - protein, 395 aa, Heterodera glycines
LLSSSLLFLYFGWKRKVIETEDGGKVDSVFIDKRGKGKHGNILIICCEGNAGYYEMGIMLIICCEGNAGYYEMGIMSTPVNLGYSALGWNLPGFAESTGTPLPHTILFAESTGTPLPHTILNSMEAVMQFAVKNLGFQPQQIVLFGWSIGGFAATWAAANFAATWAAANYPQIKALILDASFDDVVPLASARMPAVLEGLVRFAVRTHLDLPVAKQLQRYEGPVLLIRRWNDLQRYEGPVLLIRRWNDEIIATDTLAKTMPPDASNRINHLLVSLLRSRHPGLLKTKGTKSVCSNGKSYAHERFNSIFSYWLEPQTLNDSEMKSEQLEPQTLNDSEMKSEQSRHRELKWAIGYEMGGRFRRLEHWATHQHKFHFGAGATHNVALDPQHFKIPTAL

SEQ ID NO: 132453 - protein, 28 aa, Heterodera glycines
NPWVLYAPTKFHSETPRTPPDLPLLVSS

SEQ ID NO: 132454 - protein, 55 aa, Heterodera glycines
MANRGPVAAAFTPAQMMQGAHFGSPFYHSSAAAQNSSANNTPPQSQRVPTIAVQQ

SEQ ID NO: 132455 - protein, 212 aa, Heterodera glycines
MQETHIVLGIGTVCSLLAIIATVVTLPSLYSEMNEMSTKVHAGVEAFRVNTDSAWTDLMDVQVAVSPPSKPRANPFSSIFRAKRQLPGHCQCGPLQQPSCPPGPPGPAGAPGQPGQPGGAGQPGQPGAPGQPAAPCAPQHIPCPRCPAGPPGRPGGQGPPGQQGAPGQPGSPAPGGGQGPPGAPGPQGPSGQPGRSGAPGQPGQPGANGVVS

SEQ ID NO: 132456 - protein, 33 aa, Heterodera glycines
MKDWYMNPVGFKFLDQGRSADMKGRNMVKKKEG

SEQ ID NO: 132457 - protein, 117 aa, Heterodera glycines
MKTENRKHKVNENTTEPGPFYKPESCELSPSSPSSNCSIFVLTNLFNTSHATITDLLSSSLSFSSVAWFTPNLKNSAKFLKNNLYILASESNLSSSGWRCATTKLINALIRGTIGNL

SEQ ID NO: 132458 - protein, 173 aa, Heterodera glycines
MAFTVILACLFPLPVKGGTETNAYPTNQCNECKLLCFNKGVKAKIPKEINKVELCCAENCYIHENVKQLTYELPKEILLNDFQCEGHFWMDSKHMFKKDILCPAVDECELIECYFCIEQILYGHLADNSIYQANNLLSWPKSASEREEAKGNSFSKLDITPCLQNNGVCCPYG

SEQ ID NO: 132459 - protein, 217 aa, Heterodera glycines
MPIPIREGPYFSARRVVIPENSEVFNDRLYGLGDPRSEEEERVPRWQEPPIPRQIESLSSWIERSYGPHWYETARERRAVEARLRGELREGANLLGEHFGRIAEIHFDGFTCYGPEGLFISPGITLFDHFVRLGLQVDPVKPCIQEYIGFSPREQGMLLVDIYPIELVNIRTRIGVAWRAPAVLEEPRPPPRDQAQLPDGRLENRPPRVARRLPNRR

SEQ ID NO: 132460 - protein, 120 aa, Heterodera glycines
MALTREPLTIDFNCKSRQEAIDFNCSLGVQACTDCIPDHSSGLVNCNCRSHNLEKLMESPERRLPLNIKNYQLRNTGRKVIALTGFSPVQLNLQIEGLQMALELHQSLCTILPLNISGCY

SEQ ID NO: 132461 - protein, 115 aa, Heterodera glycines
LLGRPIAYFVCESNGNAENFQISLLKHFLLQIEPPLPKEEENVYFVEVQCHGFKPHTFKTITRAKTDVVLHQLSCKTYDISVRKVPLEWIRRLKYHGVSRRPLGKRRGAIRERNF

SEQ ID NO: 132462 - protein, 153 aa, Heterodera glycines
MHLRPKRVALQIGFASTFKQWSDSLTVHKQIARDEFVVLRCDFTSVFANDGNGHEAKVEKSAIPFGTESERERRGWVITTDRLGMRRRTWPGGVGAAEVLMLTESGTFDRKLITSVGSGLTPKSAQICYLCAVFRAPSGFGIEYQCQIALSKR

SEQ ID NO: 132463 - protein, 143 aa, Heterodera glycines
MSFDVIARVALGQRESRQFETEMAHLAIESMQKYNNTPFDYVGFAFPWFGIHFLEPFISWSGILRKDPLIILRKQLMDELKARKKLRESGEQQQQQRAKVDFIDLFLETEQNEQQQLTEQCQNEGEAMLSKTALQMEIHEKKT

SEQ ID NO: 132464 - protein, 52 aa, Heterodera glycines
MLELRVVISVISNVQILVFVVHLAHGVTLPMLVVAWGELQLHEKQDTYKRDE

SEQ ID NO: 132465 - protein, 102 aa, Heterodera glycines
MYLFPIGPTVFCSMYNNYFNYFFPFFLEFLSVLENEEDMPELTTTFIENELKNAITKFLKQMIGIEQLETMEKEIPKAFRIRREDTSLIKKPENMASSAENV

SEQ ID NO: 132466 - protein, 93 aa, Heterodera glycines
MTKDNYCAFADLLLLHQSESTFRRWIGQSSPASHRNLSLRIELKWENWGRIKRRLEKAAEGMRHIRRRKERGEGHGKVSKNGTKYLRQKWVGG

SEQ ID NO: 132467 - protein, 17 aa, Heterodera glycines
HKHLFDLFYHIHNLIKI

SEQ ID NO: 132468 - protein, 560 aa, Heterodera glycines
RLLGLKNIFAVDDSEDSASPIVIVPKKDGSLRFCVDYRGLNAITRKDCFPLPNIERTLLMLGGRKFFSTLDFLSGYWQIKMANDSIEKTAFATEFGLHEFTVMPFGLCNAVATFQRFMSHLLGDKLNNFVFVYVDDVLVASESFDQHLEHLKFVFQQINEAGLKLKISKCHFCAEQLPFLGHILTREGIKMDEEKVKPILEMPIPVSKKELHSFLGFMTYYRKFIYSFGSIAAPLFQLLKKDIPFRMGKTEIAAISKLKEKVLSEVILYFPDFKAAMENPSRKFLIMTDACKTGISAVLFQPDLKNRIRPIYFASRQCNRYESRYCPTELEALAVRFGVKKFAQYITMIPTRVLTDHKALISMFRSKNETGNARVDKWINIQFILEIEYNPGKTNVIADVLSRSGALKQNQSAENAILIGEILPGTQCEIEPQAEMNEWILSTKESEFRQTYEFLEKRKLPQNIRESQRILDTIQKFTLLNGLLYFCDSTFENLRLFVPRAKIIEERHQGKCAGHLSGKKIFEQISEKFYGHWRPVCTRCILRCFIVSVLATLLSSWSEA

SEQ ID NO: 132469 - protein, 234 aa, Heterodera glycines
MSSDSEMLEFFKKFWAKCENEEESKAETSTIGKIVAIIVEIFGQTTPSMLDSGAQVSLIKAEFLREILKRLGLKGKSINICPKSRNVVDVNGKLVECYGTVSLPVLRKGCEEMEIDFHITYAPIGLPILFGTNALGPLGFKLFGAPNGELIEFECSNNKSDSVRVVYNTVVEPFSTKFVELSVPPIFNDTNVLIIANDEDNSVRVEPALSTGRNAKIMAAITNFSEKAVILKEN

SEQ ID NO: 132470 - protein, 207 aa, Heterodera glycines
MTKIFARNILQIKIKDQNLKNYSRLIKAHFKSYELTKLCRHLNKQCLWHKKSFQNDRTTNQSDQICRRVVNIKTEFVQCIVLTRAEKREKLIMELRKADFNGVKIWSKMDTKPKEEQEKNSAKRADGRLKLTVKANANQNRVLAIKGVVKFSAFIAIFLLCQNLVCGMEEQKKMLNESILDESDDDVCVKSTKRRKSEQRQKAKNRL

SEQ ID NO: 132471 - protein, 220 aa, Heterodera glycines
MQDPMLRECKKFKEYLLVLYEFLFRKYLEVNCPSFQFATTVQPIFVLGNSKTNATIIDVLDSLGIIWAFFFDYAYGQKYENYLEKLFKEKAAAEPKWLNEETIGHKIVNNLQQITKYGADFKQIFGREKPDKIDDELKQSLLIDDATNQHSSKANSDKAIQSFREAFDGIIKSMAETAKTMEESEEGFGKTKKICVIYSFEIISRIISFSMLSNREWKTC

SEQ ID NO: 132472 - protein, 379 aa, Heterodera glycines
VIKRVRHDEDVPPAAPLSLEALELPPAYRMYNRTEIDEENFLLADTGVFQIQGQAGPQRILIFARASTSEWAGIMKNVYADGTFSLAPPLFSQIYVLLAKRDKWGFPIAYCLLTSKCEVIYTRMLQLIVQRWPNFAPDTISLDFEQAMVATVRTVFPLCRVQFCFFHLVRSMKKRIASEGLTQTYNNDAVFAEKSKMITSMAFLPVHHLPAVLNALEAQLPQQLIGVFDWFTDNYTGRPRFNGGLTAPRFAPDEWSVHQRTLDGGDRTNNYAEAYHRKLQRAFDCTHPTVFRFINTIRCEQKSIDADIARCIAGELPPQKAPKYRAADARILRLLQSYNAINNNQAHQNDHNYHALINVNPYNIINFLLGISRNYEMRP

SEQ ID NO: 132473 - protein, 175 aa, Heterodera glycines
MARHIWPLLKNGLIILVNMKRTHLARMHKYVSPIVLFDCPELVQISSTVLPESPTTYSTSPDFSTRCLYNWLYTPRPDGRPLVFKLTKWEAGWENFVNDLFASFSRAIVPVKYMVLASFDVNYTRSEQMVNTLTEEKLTLSSDVHPTPDDRCLRTEEPIGLRTEKDNCGSTTDEP

SEQ ID NO: 132474 - protein, 88 aa, Heterodera glycines
MLVQDCLIADTFFKCQRITSSLYFGIKNYFQLNSAVRSLQRCWIGANRNCHQWHYCCHLFFRHHSQHVACLCHRQIKVKCPQIFDAIT

SEQ ID NO: 132475 - protein, 133 aa, Heterodera glycines
MPMEVDDVEEENFVRLRETNQIKMDTLNKEIAETVSQENITKLEKVIWQIFALTFQIVGIELNPTDQITRILQQTLNFDQLALALCNSNSELVLNSIKTHLVNNEHLKKKAIFANIFSRINSQAKDIFGQPLG

SEQ ID NO: 132476 - protein, 144 aa, Heterodera glycines
MSKKMKIAPYKNIRCEQTGNGANEELENFMDTISDIVVGENITIDSANTNGEHQESEMDHAWRPNQNIVLHDEFQNALALNMDVENNNLEEENSESMGDHHSFANSVQNGQQGAFRLPPIEIFVDGSLPEKTVKMRENISSLVA

SEQ ID NO: 132477 - protein, 87 aa, Heterodera glycines
IIFIQKIFFWVFGAVPLNRCAQIYGETESFRNSFPIACTLILRWIFAPHNCLSTPNGHLKKSIYFCFRGSPPEPMRPDLWGDRILRE

SEQ ID NO: 132478 - protein, 95 aa, Heterodera glycines
MKENTRQMKENAKKLKLEEKGERLEENAKKLEEDGERLVENANKIEENGERLVENANKIEEDGKRLIEIKITEKFKETAERLIENNKKLLEIREK

SEQ ID NO: 132479 - protein, 19 aa, Heterodera glycines
SHSAPAPYLGNVRATDVAD

SEQ ID NO: 132480 - protein, 144 aa, Heterodera glycines
MRERTERNEKNTEEMQQKQSGRNEKKRKWKKQRMNCRKRPKRSARMREGGNDGMILRRDLYLDKWEKERMAFTRRDTGENKGTVRGKTIHTDETNDGKEKMKRRWGRDRQKQKGREEKRSVGWMSKSRGREGREKRTKVKRMGA

SEQ ID NO: 132481 - protein, 25 aa, Heterodera glycines
MVTAGQLQDLCSRIPRLADKHQNHK

SEQ ID NO: 132482 - protein, 105 aa, Heterodera glycines
MPKAMPKACQGNAKSNAKGTAKSNAKSNAKGNACRLCILAGAVHFAFVPSSRVRSLSLRSCRRRLGTFRASLRHCRLHGLQICSFVAAPAASQCAGPGRGAYATT

SEQ ID NO: 132483 - protein, 110 aa, Heterodera glycines
MALYSVFCWCCSAWASSYLLLYWTPYWSCMNFRADDTNVPLVTFVFDIVMVCSFVFEMFFNNSLVKKRPENASVAAANRKLRNDVATECANVAIHRQQQQKNGSAIIMQT

SEQ ID NO: 132484 - protein, 331 aa, Heterodera glycines
MDLFGEPIWNYARMIGIDSNKCIAVKEFGEALRKIIHAKLNSVEMNKRQQKRIESPIQMNEFQILKKILEKIKDNENYGKMENYGQKFNSILLDKQGIAALKELLAILNQIIGHYSGTDESCPMEKRRSIYLESFREKIKFSKILFETLSKYSENVNYDEKRQLLTFPLSTGEHIIARLSALIELIGQQRRTVRNDHISSQIDVVKTIQNIASMEPIQFYERKFTLYWREWVHFDLFFSMAIRLSAQIERNDHLNALLLSASPNYHSYCIFFDYKIQIKNGNLVEINTPTWHAPYYVYWGNDKDQMVTQSQHRRSKEALVQREAMGKKTIN

SEQ ID NO: 132485 - protein, 164 aa, Heterodera glycines
MPSQNGAENSAVVDAPQLEEELLLTGSSPSVEEEQQQQLQQEEEEKEVEMLHIHGMEQPPHQQQIVAGTASTFAAHAAGAASVDDMGPAAASNRQNRPASGSTLPRSRAQSQDADAGPPYASTPTLCPTDENPTFLRHLWLPEEPEGTERTANFVRKMDSLEGI

SEQ ID NO: 132486 - protein, 77 aa, Heterodera glycines
MELRMDEAEDGPIVGGVGGMEQQQQSEPGLQYGTDESCVSLIFRPFSGDDNEQRNGTGAVPGATSMCRLFPFGKMDN

SEQ ID NO: 132487 - protein, 140 aa, Heterodera glycines
MTTTQAKEKQQQQVDTAAGEKGKTEQGQMDTVVANDRIRQQMFCKNVAQFAVGAGPHAEVGAASATPPQRDGRVALRAVVRRRGRCAAIVGHQRVVVVVHMSSIRVQRPVARMSALVHTNQRRSSGSRRVGAVQPGGPGL

SEQ ID NO: 132488 - protein, 229 aa, Heterodera glycines
YIDHSVLAFLRANNQIWDKGTNLYLYVCTHGNAIHIWNVFVGEIWPIFATNICRLAFMDGDQLDNLIRFISPTILFDLNIDSVHSGELLPDGIADFDGPNATPTAGQALSKWLHTPRKDGQPKRLSCDLMSGTIEWVNNFKEAFLRATTSSASYKIRLELFEPTEIVPFELVNERTSEILKLEKGEVDGWVFPWIMKRCQIGGPAVQWEDENLDNLNDVHFMLQADCIG

SEQ ID NO: 132489 - protein, 233 aa, Heterodera glycines
MLSKKLIAFCSDTFSGKGLSSRRLISFDLSDQHKAIRDGALKFAKEVVAPKAAEYDKTMAFPWDIIKQAHQLGLMNPTIPEKYGECVEATALIVEALSYGCSAIQLAIMGPSLALAPLLLAGNETQKQKYAGMLAAEPLIAAYCVTEPGAGSDVSGVKTTAVLKGDKWVLNGSKAWITGGGYAKWFFVLARSDSDPKTPAGKAFTAFVVDGDTPGITRGKKVMGSNWINWDSP

SEQ ID NO: 132490 - protein, 103 aa, Heterodera glycines
MAINVELARLMTFKSAQEVDSGRPGAYWASIAKCFAADTANQTASNAVQIFGGNGFNTEFPAEKLMRDAKIFQIYEGTSQIQRLVISRQLLQRVAQTGTSYVT

SEQ ID NO: 132491 - protein, 125 aa, Heterodera glycines
MLDWAMDKMACGYKQAILIPNQNRPILKYGFFAGSQQSDPSSFLLQQTTVEEGVSNGDICHNAQRHQLQFSTMNGQNGGMCFPSNLPSAMSMLANAPQRRTFLFNSDMANTAAKSMQQHLTEDMA

SEQ ID NO: 132492 - protein, 142 aa, Heterodera glycines
MNALTAAIFFLRFICAFGLKCFLEFEGNGKLAKNQLDDFECPLEGQLCLFAQCVDVALCQLLSAVVNGRMTTARNFLRNANRCKPMDAATLAAQIGATVAGLVATCTVQIPYWKGGIFVTIFFQIPGVQSLPPPRVLRRQVR

SEQ ID NO: 132493 - protein, 29 aa, Heterodera glycines
MSTDAEKSREFPITINYWKLSLPYQNDLL

SEQ ID NO: 132494 - protein, 77 aa, Heterodera glycines
LICIQKMSIIFCHFYKNSDLSNFVFHFHSKNFHYRKLEELVFEIFHMNVYSNLNRHLMPNPKDIFEYEVFLNWPFNI

SEQ ID NO: 132495 - protein, 95 aa, Heterodera glycines
MSTGPSDVNDTEVRWNSMFQMLNRFLQCKAAVQVFMTSDEAKRNNKGKGIPIISNIEWNQIEQIVDVLKIINDASNELQSRTATIGMIMPYYFGI

SEQ ID NO: 132496 - protein, 195 aa, Heterodera glycines
MVFIFNLDTFDIRIAIIGKLDQIMDKEKTENNKLLKKSLIIATVLDPRFKLKLFEQMKEQIREWMRADLQKMFSGFLNTTLSSSGSSNLSITDDQSKSQNEFYDALHQMDKYLREPRVKYNVDPFQWWKKNEAEFPSLGRLMRKYHSAPPGSVESERLFSCAGFILNDLRKSLSHENLERLIFLHHNIILYNFDY

SEQ ID NO: 132497 - protein, 59 aa, Heterodera glycines
MPTVREILESLQKPIKRPRIPTNEDSVLNAERTDAEQQMEDTSTRNDLDVAASDDEENS

SEQ ID NO: 132498 - protein, 179 aa, Heterodera glycines
MLLRDLVVRPPMLLHLQIIVRPPVLLLRELMVVGPPLTPMLLLDEMALVVGLPKPWVLCQLPVVGLPKPWVLCQLPVVGLPKPWVLCQLPVVGLPKLLLELVMRPPVLLQLLLLLLAVVTAVQANASFATTNNFAPFFKVLQRTERRARKWHRRRMPTTTIRPDMGMRPAAPQAATVTE

SEQ ID NO: 132499 - protein, 64 aa, Heterodera glycines
MYVKVNKLFNKSWSTPFHQKKGKARFCEKWLPIKSPDINHITSNRRNLAISEKKRTKPRNRFIL

SEQ ID NO: 132500 - protein, 83 aa, Heterodera glycines
RTVCGLVNGTRMRQKIKGGRETKKGCQNKRKKSKEKTNKQKMGVVKLSSLHRDPSAQGSAKVTHSTRQKSGRFAARRFVRVSP

SEQ ID NO: 132501 - protein, 170 aa, Heterodera glycines
INDEKVKRLIIQLNVDIAMADLFVEVNDPAKKRANLCLMDSLLTHLVANGTLYTEVQEWQTHMLYEHFINHNEIPRSSDADLRWAKPECHKAEVAQAAVSKLLSQMHLVVQSHSFVLCQVAQDCAEFVSFVNQYAIRNFEKLYCCNQCAIGRRIVIVPVCKIFKQNSSHF

SEQ ID NO: 132502 - protein, 92 aa, Heterodera glycines; identical to SEQ ID NO: 125147

SEQ ID NO: 132503 - protein, 474 aa, Heterodera glycines
MIIAFDRIFKRSKYIPWKVLTDQGKEFTARAVQQFFRTKDVEHFCMLTSPQFHAGMAERANRSIKERLYRYFTERNTYKWIDVVQDIVCAINHSTNSCIGMRPVDVNFKNAEALRQKLHDAAENVVRRKPKYRVGDRVRIEKYKHVFQKGHLPRFTNELFTVAEVHSERSPVVYRLRDDNNEIISGWFYANDLCKTLEDKQQKMFDIENILKKKRQNGVEYIEWQTGNTVRIEVPPSNVTNPHELSKNLYRLLGEGSDPLAKKVRSTQNSFMLTINKARRWAREEYIKRKTKEKRGVRDEELLLQAMLADTGTLVDLNNVAQGLLSREKSAATSNLQLRTSADDNDSYQKKLDDYFSKLSDKNLTVLDELGMTKLTAEIKNLTEEERTILEATKEMGTEAWIQAYREIRLVCQFNYDVHRNRFVLNTDPRYVKKVEVSPQLAYILGFNNTEFMQPAKEARFSPDIIPRLHAGSY

SEQ ID NO: 132504 - protein, 89 aa, Heterodera glycines
MSPNECSDRPFQQPDNVQQPHQQPDEDAELRAQIEDAEEDLLLNWWREDPTIIRFLFGHGRAPAIEAALLQRAEREAEILREYAENQQQ

SEQ ID NO: 132505 - protein, 154 aa, Heterodera glycines
ARSHGQKPPFHATARLTRPLEPILFPKLRIFADFPYLHYSRLEAVHLGDLLRISVRSGRRFKLPSHFQGPCGAHETPQEPRCFTGATSLSQAEPLPGTHTLNEKRTLARTPHDVCEFICVTAQNSSCEPSFLAWRGNEPTSLSATGWTNCASTE

SEQ ID NO: 132506 - protein, 136 aa, Heterodera glycines
PRFGRPPAILRFAPPSLRLPNSQKSFSAIWALSFSIFSINSFFAFRIFPSNSFLACSLRFCCLVLNEFRSSSNFLSIFAFSSSGSFLLPRPVFVREHSPDSWRLFSSFSFSSPGKGRQSLNIKKEMKNIRKYFIIQ

SEQ ID NO: 132507 - protein, 103 aa, Heterodera glycines
MEPMPPYTVICPGVYCITEQQIRRHFLKKKKLPLGTQRRRRRVKSAKRVTVKNFAKCRHINLKQTVLLTCIGCSHFADEQFISQTFEEFNKINDVEYIGELLN

SEQ ID NO: 132508 - protein, 83 aa, Heterodera glycines
MFVYVPISHVFGPMLVRIRLMITRDLVNFLLLILLVLVGNALAIKAVLFPDLSANRETVATSVHWTFQQLFTTDLSVLAQSDE

SEQ ID NO: 132509 - protein, 73 aa, Heterodera glycines
MTIMPLPSLSLPLKCCTNASTHLTQNKTPGQMAVIPALAFSSYRLTRVFVLPKCCCPALWPFRRLLEPLGNST

SEQ ID NO: 132510 - protein, 24 aa, Heterodera glycines
TPSEKTRCVPINRECQRKTLSFFS

SEQ ID NO: 132511 - protein, 29 aa, Heterodera glycines
MQLASVMARALLVSAFFAMDTSHRSTMTK

SEQ ID NO: 132512 - protein, 220 aa, Heterodera glycines
MKLCLIFFSIVLFLIAQIEIGAEKKKLQQKTFKEIFGEKWEEKENEQKKREIVEKFNKIKAKIKQKGRKYSTKEWNKINDKIAKTLGTNRKYIYKWIKELGIYKWHNKSKTDEQKIEIVQKFNAMKNEYKQKGRKYSTKEWDKNYAEICKKIGVGQGVIGQWKKQFGMGERMTEKEKMEKMKMYWQMKGENPKMSDEKISKILKISQWTIFNWKKQFEKN

SEQ ID NO: 132513 - protein, 75 aa, Heterodera glycines
MAEQGDSLSPFRCRPFIASRFIAVVVSLPRWVSLPICLTTAYFSLFLIIFINFVIARAEKHQSSNTYDIAEEACA

SEQ ID NO: 132514 - protein, 214 aa, Heterodera glycines
MTDVFVDGTFIIAPPLFYQVYAVLARWSVEIDESFLLHMHYLRTKRYQIDPIFASQSSWITSMAFMSIGDLTHALSHWKCICYLSFDQFFVIDLSKQIYRTINGEDRTNNFAEAAHRRLQRDFNCSHPSIWRFIETLQKQQKLRDSEMSKCVAGFDPPQKAKRYREADRRILTLTRNYHPVNIGDPAHVNVDNFNPQTIIDFLAGVSYNCSMDP

SEQ ID NO: 132515 - protein, 30 aa, Heterodera glycines
MAEQAIHCRRFIARIFIASRLIAGVVSLPK

SEQ ID NO: 132516 - protein, 410 aa, Heterodera glycines
MVNVRFQIGADRRVAEPPRPPRIRAYLALEEAPNDQEGPNRGPPSRRLFEAIGFRRDNPNIGDRAENNARQAPIQRGERAIDNGRPNSPDGSFENRPRRAVPNRPMRRWQNGLFIVALALCLGSLAEGKEFPSTRTCHQPLEAADMARENQWGFSRILFPWPFSHDQKANLIRGLRPFNGSGTYIRAGIRHIPPSLALPKMPKPIKMPSSSSSAYSSSSSSSPDRQSPPPPRKKAVELFNIAAATPERDAKSGRKFSVRDFIDAEAKEEPSSKRLPTCSACQLSGHRRGAKACPLYVAPQRERSAAASRPGTSNARRDSPEEGEITADKADRNRPPDDAGIVAKAQPPPRQPWTSWLFTENSPLAVGGWKAQGEERAPTPPRRNSMIAAGGSSVANSDRFYRSPAVFSHA

SEQ ID NO: 132517 - protein, 79 aa, Heterodera glycines
MASLQNLERCKLCNFAVEMEVDKTVNKVFDCLNCGAKFCRLCERRWDEDHFGISCDELGTKTKKDKKERELWAFDKQTE

SEQ ID NO: 132518 - protein, 37 aa, Heterodera glycines
MPITKPYIKTLDFLEGIDITKGKDEENDMFQVIKFKL

SEQ ID NO: 132519 - protein, 73 aa, Heterodera glycines
MKTEPIENYDEKTSGRGAAKAENFVLKQEPYEVKIGEIIEERCQINGSASFSRGEANSATEGLSNDAKNVGFG

SEQ ID NO: 132520 - protein, 76 aa, Heterodera glycines
MPPSNAEVVVEPNATTSTTTVKVAARQKAKTSSTTTAASRRQPKCRLLYIIHRIDNGHAQCTTTCSGGGSGSGTCN

SEQ ID NO: 132521 - protein, 243 aa, Heterodera glycines
MPFAIKQEQCSKLVNGVDLKTAKFIFNELFITKQLTELSEDTGSDFVTPSFTQLRMRKIVKVLKHNSSFRLGCFPPKLLKAWDAFKKAKPELSENERPDIYADEDLHFVIIGLSYGGKDLEAFKIKNGPECYSIFHQVALSLAIAEAVLEFEHRDLHAGNILVERCPDNEKIRENWSSFWPQTNVYWMGYAAKKLFNKNRFIRAKRKETIDNLFSNFEKKFGSISDFIDHPDFLSVFAEFTSG

SEQ ID NO: 132522 - protein, 197 aa, Heterodera glycines
MPIQVHAQSIGRDGTPKIIFLIFYKNSGPNCVTLTWQPPAEDGGCKLEGYLVQKREWGHEQWEMATPDMVRKEVSVQKPSVVPLKSQRANEKEKDATQIRTPKTAQPSSVHGIGPSLDSSDQPLSSTARRRQPRRSARKDATDIQCCSKNLTPPRSKNTCTAKDDKTMAQLFELVVKGKPKTPKRLLDTMNATSDSC

SEQ ID NO: 132523 - protein, 805 aa, Heterodera glycines
MGTSVLMLIISTIKCDIFRRNTVLFVDTEIEVPIPHRLLEQRGHKRGTSDSSAQRYLRRQQLKEEKQAELDKPAELPYKCKECPDAFARPLYLASHSRNHGYNGRYKCQHCNYGCDLKDTFDKHRACHVNVTPIRIDFDDEVFAGSPDPDEFRVCAENAFGRSDPLNTDVDRPGPPEGPITYPATTNKCQVSVVEEPRDFVETLKSQSANENENATSECEVDDNDIDVEDDEQLRDEIAANVALLRANAEQFELEASDVEEDEWVDSSEEEQENKQLRDEIAANVHQQCRPFVSPPGAPEKPRVGNVTKHTVDLSWIRPLHDGGARIDGYVVEQRKMGDNHWSRANIGIPRAKTVRDTHCTVECLPEKEQFEFRVRAVNKAGEGEPSKSSDLVFTTDQPGRPVFDLSNLKDITVRADETITFTLPYSSGGLKPNVDVLNNGKTIFDERTTIEVEDDKIVFTMRDTKHSDAGPYKVVAQNRHGKDSAKLNVNVLDVPGKPGGPIRFSELAADACTLHWSQPKDDGGSPLTNYVVERKSARGGDWERVGAPAGMSLRVRRLTSGERYKFRVRAENQFGVGEPLDVDEPLLAKAPNAPWEKTPFGNVPDTRFKVLPEPVVKYSVPSQPDKPVVRNFGRTWAELEWELPASNGGAKIRGYELQHKDQHSNEWVTCKKSATWSTNFKVQNLSDRGEYVFRVAAKNAAGWSKPSPQSDRIKLRQRYGPPGMPIQVHAQSIGRGGTPKIIFLIFYKNSGPNCVTLTWQPPAEDGGCKLEGYLVQKREWGHEQWEMATPDMGPNSESLMPKSP

SEQ ID NO: 132524 - protein, 69 aa, Heterodera glycines
MAFILEKCASILCCAVLLAVIICFSNKNLYNICINAMILPYKHSNFSTKAQFGDVPNKIGVERSPYYRM

SEQ ID NO: 132525 - protein, 49 aa, Heterodera glycines
MDPDAAIPDVGSRVPDVANDPDVERDNGHAAESYSVDRKAMSIQKENSK

SEQ ID NO: 132526 - protein, 85 aa, Heterodera glycines
MFAVRKSQKHIETAFTAEMIAYHPTDGTDSEYVEKGQIMFEINWLKRKETAPKEEKGEEAKRREPKKATESAENGHRKQQQSQEA

SEQ ID NO: 132527 - protein, 120 aa, Heterodera glycines
  unsure (1)..(120): unsure at all Xaa locations
MLLGFAAAFDDHFQHFPWLFSALFAWLLLLFLLLELFPSFSANLSLQLVSPRRALIALFRAPNPTEHYLAFLDIFRIGAICWVISNHLGSEGGLDVLLXLPHGEHFKQSVHSLPIFGPIF

SEQ ID NO: 132528 - protein, 202 aa, Heterodera glycines
DIQFWTDTKNTGEGKRPMEDLEDPSEGNDQGQFPLTISHKFPTSSSPTAEVVVKAAKVLNKLDRNKEKASYLVLWPDEAGVRSNESPNRSWDQRISLGNVEAILEFEEAVRKRKAWAENAVMYEVEKVMGRRKNSGKEAPQYLIKWKGYDEISWATMESLQIGFKHLLVAYALERPRTLEKRRQLSIISPMPQANSVRKDAV

SEQ ID NO: 132529 - protein, 55 aa, Heterodera glycines
MNAIFGPKTPRHAVKILKKIDYEDRASCYLVQWNCGSAEEKGPSTTWEWANKLSP

SEQ ID NO: 132530 - protein, 241 aa, Heterodera glycines
MINSIFIVNSSHDVILEKHYKDVILEKHYKVIHRSICDYFFDVQKQSPNAENIPPVIAAPHHYLYIVHHNSLYFIAICVTETPPLMVIEVLHRIIAIPPLMVIEVLHRIIAIFTEYFDECSDSAIKENIVIVFELLDEILDYGYPLCTELNVLQDFELLDEILDYGYPLCTELNVLQDMIKPPNFLRSLKNQVTGRTNISEILPTGQLSNVPWRRAAVKYANNNVPWRRAAVKYANNEGEF

SEQ ID NO: 132531 - protein, 257 aa, Heterodera glycines
MSFDEFVALASRAEATQMAAKRQSSEHRPNQERKYMHPNNREVETSSKNQLRPYQVVCYNCNEPGHVSRNCNKTMSRQNRNEFPSSFPQQNQQQTPNTVATGANRVFLNSKNGIPSAGRSQNFLKQNCIRMEEEVKTDATVAGVKLEREVVEFLRNELDKAKTKSDKTGESPVIGKMVTVELKVFETPATAMLDGGAQISLMGGKFFYELITNGKLELHKNGFNRVSARISDVNGKELECFGVISLPVDRDGCKTTN

SEQ ID NO: 132532 - protein, 116 aa, Heterodera glycines
MSQSPSSMSSSSSSAESSHSAGNKGGQPNVCALVAKTGFQKTGHVESHGDHVGKMLGNVSDDSEEGEEEEAAQQQHAEVAVAAMDDASSDSPATSSDEEMPMEQRQQKQRDAEGTE

SEQ ID NO: 132533 - protein, 54 aa, Heterodera glycines
  unsure (1)..(54): unsure at all Xaa locations
PFLLNSYLCXLVVRDRKQGSCLFSTDSGSEINFFRYSRPTKKVYRLIFIKQSLS

SEQ ID NO: 132534 - protein, 111 aa, Heterodera glycines
YSGRLVAAVLQRLLHARAAHIYGLGWFALRHGELLLANGLHLEVRELRVHSLFNWWWTTTAPTVDSAANDGGGQRMALNVRVSVGTIRVGKQLADEEGSRNATSSICDGQK

SEQ ID NO: 132535 - protein, 283 aa, Heterodera glycines
MEEEEIRQRIANCSELMAYFELNKTNVLAKTLFYHQIPEKFCFKKGKWTERKTYFNTIGRMVKVSPAEPERYHLRLLLLNVKGACSYDDLKTVIDINGNAKLCETFSAACLERGLIRNDEEWKRALEEAESFEMPCKLREFFALILVHCNPAKPEELWNMFKDSLSEDFCRSFRKELAYAKAYKEIALSIMKAGKTLPIFQPWNINVDDEVEQLFDLAEELDLGQRNYALMYDEQRNVCDAILHRICNPVNEPAFYFLSGPGGTGKTHVNKTIVHMLRGQKKK

SEQ ID NO: 132536 - protein, 104 aa, Heterodera glycines
MILEIRLYEEWTQNFFYKEENQNKSKKTGNVSEEKHFVKDNLRLKFFHNLGDYWIFYASNFWKREKIVRKVTHQMAKDSKNKVAKMKEMITELKEGKDFFLFVS

SEQ ID NO: 132537 - protein, 17 aa, Heterodera glycines
NGQGLGPEIHVFRDSRS

SEQ ID NO: 132538 - protein, 81 aa, Heterodera glycines
  unsure (1)..(81): unsure at all Xaa locations
FFAYQIFAINAHLXKKYSILLKCSVFCYILRIAVHLKASVIEQISQISRKVPAVAVKIVYIKTMAIRISALGPFSKLMCFY

SEQ ID NO: 132539 - protein, 81 aa, Heterodera glycines
FFAYQIFAINAHLFKKYSILLKCSVFCYILRIALHLKASVIEQISQISRKVQAVAVKIVYIKTMAIRISALGPFSKLMCFY

SEQ ID NO: 132540 - protein, 81 aa, Heterodera glycines
FFTYQIFAINAHLFKKYSILLKCSVFCYILRIAVHLKASVIEQISQISRKVQAVAVKIVYIKTMAIRISALGPFSKLMCFY

SEQ ID NO: 132541 - protein, 81 aa, Heterodera glycines; identical to SEQ ID NO: 128717

SEQ ID NO: 132542 - protein, 45 aa, Heterodera glycines
KYSILLKCSVFCYILRIAVHLKASVIEQISQISRKVQAVAVKIVI

SEQ ID NO: 132543 - protein, 19 aa, Heterodera glycines
EPVNSCIGCKCRRCCTPNS

SEQ ID NO: 132544 - protein, 357 aa, Heterodera glycines
VEKILSKIYYNLKSPASFAGIQKILIEAKKIDPKITTDDVNKFLEKQRTYTIHKPIRKRFPRLKTIPSGFHTDWQCDLCIFDQLKKHNDGYKYLLVCIDVLSRMIFSAPAKSKKSEDMIEAFDRVFEKSKIIPMKIYSDSGLEFQAGKIKNILRKNFIKNVMYSPDLHAGVVERANRTIKERLYRYFTKKDTLRWVDVIDKIITNINNSVNRTLGAKPSSINLKMPVRSGKKKFKIGDIVRITKEKKFKIGDIVRITKEKGKFSKGYLPNFTEELFKIVVANSTTPDSYRIEDLEGNLIKGIFYNQEVKTWMIFTLYYLRTHRGRRTLRQNSQYTPRDFGIGHKLVSSSLINYLPLL

SEQ ID NO: 132545 - protein, 64 aa, Heterodera glycines
MAQFKANTLPMLKHLDDQGKLRVVRLERAAHIGAVSEMAPMGKKYFMIRHTAVPESAVGRFLGF

SEQ ID NO: 132546 - protein, 66 aa, Heterodera glycines
MQTDSNEKFFILDCAEENNEYDGKQKIIEHIHQIQSDVHWTCDIKFGDRDQPVPFPLPEGAILPKK

SEQ ID NO: 132547 - protein, 75 aa, Heterodera glycines
MVLLRAPRPLLRPRPQPLPPQPPRQPLPRHCRHISASEKLFPRTKMKNLLTPVLRGKMRAICLTVLRVGSIIELP

SEQ ID NO: 132548 - protein, 27 aa, Heterodera glycines
MHRIIAAVKKLVVGSVLAVRCTLCVLL

SEQ ID NO: 132549 - protein, 371 aa, Heterodera glycines
MKILLIFLLLCALIFKKAINQIEAGKIIQEKSFAEIFGQRWDDGAEENICQNDQIIHGEIADQNNQFGQNVRQFDQIFDENVEVKEEESEEMSTDYDELGDQLPMPTNNEQIYDQIRILNDKQKRGIVEKFHKIKEKIKQMGKKYPRKEWVKIERKIAKKLGVSQEKIYKWKREFGMMKNKNYSVEEKRIMLKQFDQIYGKLKTKFNEKLEGKRTKCQKIIAKHLGTNIRSMNRWKKEIKNGKTMKNQRIFEQKIEIVEKYFKLKKEFMQNGKHSRKEWKEFRAKIKQKFGVIFQTIEKWDKKIGLNQILSKGQKHYTFAEKTEKIKQYYQLKNQNPKLNDRQIAEILNITKRSLERYKSEFKRKSEGVTD

SEQ ID NO: 132550 - protein, 63 aa, Heterodera glycines
KSCQFKTAKKAEFSTFFIFIFFYSSKFSVIFSRLIEPVKNFRMISRLFDSVNNFKSYIDSKLA

SEQ ID NO: 132551 - protein, 83 aa, Heterodera glycines
MANVDLALDEIISKSRPPPPPPAPQQRNFGGKRPFRMNATNRPGFGRRNSLGGGQRFMRSGSDNAVWINIVNLHDTVLTQDLQ

SEQ ID NO: 132552 - protein, 372 aa, Heterodera glycines
MKILLIFLLLCALIFKKAINQIEAGKIIQEKSFAEIFGQTWDDGAEEENICQNDQIIHGEIADQNNQFGQNVRQFDQIFDENVEVKEEESEEMSTDYDELGDQLPMPTNNGQSCDRFSNETNKNKRETVEKFHKIKEKVKQMGKKYSTKEWVKIETKIAKKLGVNQRKIYKWKREFGMMKNKNYSVEEKRIMLKQFDQIYGKLKMKLNGKLHKKSTKCQKIIAKHLGINIRSMNRWKKEIKNGKTMKNQRIFEQKIEIVEKYFKLKKEFMQNGKHSRKEWKEFRAKIKQKFGVIFQTIEKWDKKIGLNQILSKGQKHYTFAEKTEKIKQYYQLKNQNPKLNDRQIAEILNITKRSLERYKSEFKRKSEGVTD

SEQ ID NO: 132553 - protein, 73 aa, Heterodera glycines
MKSSFLILSLLFLIIFENVIEQINSGKINQEQNFDEIFGQGWDERTELRIDQLIHGQNADQNSQFGQNDRTFG

SEQ ID NO: 132554 - protein, 271 aa, Heterodera glycines
HFNHWDSTHQHFNHCGLNPPAFQSLGLNPPAFQSLGLNPPAFQSLGLNPPAFQSLGLNPPAFQSLGLNPPAFQSLGLNPPAFQSLGLNPPAFQSLGLNPPAFQSLGLKPPAFQSLGLNPPAFQSLGLNPPAFQSLGLNPPAFQSLGLNPPAFQSLGLNPPAFQSLGLNPTAFQSLGLNPTAFQSLGLNPPAFQSLGLNPPAFQSLALNPPTFQSLGLNPPAFQSLGLNPPAFQSLGLNPPAFQSLGLNPWDSTHKHFNHSRIQSHQFFETQ

SEQ ID NO: 132555 - protein, 30 aa, Heterodera glycines
MAYKGASAFVKNCHPYAFVKTASAFVKTAN

SEQ ID NO: 132556 - protein, 77 aa, Heterodera glycines
MFFRKLDPGKEFLKNWKTINGIHSNKTIMIYHFEVLFFYLDLNLTSIADRSLKSVVVMADKIWWSLRFQCDNMGTIS

SEQ ID NO: 132557 - protein, 51 aa, Heterodera glycines
MKRRLSPRSNSTQPVGPISRTAIQQQQQWGGEKQQQVDRKEEEAVLINNST

SEQ ID NO: 132558 - protein, 436 aa, Heterodera glycines
KAKLTDIRTSRSPSLESDQIQILFRLRCSKDEANEQAEALRRENKTLMQELKEVTEQLNDGGRGTHELGKAKRKLEQEKEELQLALEDAESALEAEESKVLRAQVEISQIRSEIEKRIAEKEVEISQIRSEIEKRIAEKEEEFENTRKMHQRALESLQVTLESESRAKTELAKTRKKLESDIGELELALDQANKANVEAQKHLKRCQEDIGELELALDQANKANVEAQKHLKRCQEQIRELQHQVDEEQQLREQVQEQWQVTEKRVQVGQQEKEEALMEAEQAERARRHAESEAQEAERARRHAESEAQEMRETMGGLENANAAMNTLRRRLENELGQTKMELAETTAELRGMEETARRAATDAARLAEELRHEQEHAQGVERQRNALEQQVKETQLRMDEMDTLTLKSGKKAETQLRMDEMDTLTLKSGKKAMAK

SEQ ID NO: 132559 - protein, 119 aa, Heterodera glycines
MIRRGTTVIKRGTTVIRRGTTVIRRGTTVIKRGTTVIRRGTTVIKSGTTVIRRGTTVIRRGTKVIRRGTTVIRRGTTVIRRGTTVIRRGTKVIRRGTTVIRRGTTVIRRGTKVIRRGTK

SEQ ID NO: 132560 - protein, 150 aa, Heterodera glycines
MIVPFLTIVVQFQQFLYLSNNYCTFSTVVVPLLITVAPLLITVVPLLITVVPLLITVVPLLITVVPLLITVAPLLITVVPLLITVVPLLITVVPLQITVVPFPSVVAPLLITVVPLLITFVSLFYCCTSSNHWCTSSNHFCITFSMSYLF

SEQ ID NO: 132561 - protein, 51 aa, Heterodera glycines
AQTGDSRPFFKSCFALTGASRPFFKFVELRRAIRARFLNLLRSDGRFAPVF

SEQ ID NO: 132562 - protein, 123 aa, Heterodera glycines
MGKGVAALTLDEDYQRRRMQARQQPTSIGEGMFRGVRGVGTSVVEGVTGVVSKPVEGVKQGGLLGGIKGIGIELRLKKEKKGFSFFSSKDANVKGKIVQFGAEHVAQRVFEHILRAWEYGVAD

SEQ ID NO: 132563 - protein, 408 aa, Heterodera glycines
RNYGGIRVSLKLRTHRFEKTYQDRKSALKRINESLFEMFLEKGESTLQKDMDLRRWAHNRIKIPNFKASRRWLKNFKSAKRIVVRRITKFVNKKYAVEKITKFVNKKYAVEKEKLLETSNNFVQGVINMVEELSPDLVLNSDQSGFELELHSQHTLEISWTKRVESRAQNISATTHSYTICPIVSVHGVLYSPLLIIIAEKNGQFPQKGIFKAPNITAIAGRSHIMTKEMAKFFVENAPNITAIAGRSHIMTKEMAKFFVENFLLKVIGDKKAIVLLDSWPQWKTAIGGTFGQECSSSNKECGRDNICIQTIQPGCTGFVQPCDLYLFRTWKELVRKISDRIVLDELPTWKELVRKISDRIVLDELPVNIYQDEIIKLQSLIHYQLCAPKFKQFLRYAWYKGGYLRKH

SEQ ID NO: 132564 - protein, 74 aa, Heterodera glycines
MNRRWICGDVWMDILPSFDHAQLGLKMALLSDRFDVLVDKHFDAKSELTIWRRNRIRKDKGPKAKLSVLIDDKW

SEQ ID NO: 132565 - protein, 135 aa, Heterodera glycines
MLFKFSILFCTIFLCFCVDDGPKNDGKKQILTNWEENNQLTEFELDDEYSHYLYDLMGNENDEDKWAKIETKIDKAIGGGQWPKEGHKSGNGENGDENGQNECRNGQNGGKNAQNKCRNGQNGDKNGQNGDKKVK

SEQ ID NO: 132566 - protein, 55 aa, Heterodera glycines
NDGQINQSIRSLLTELCLCHVQSAIGRQKILPISRIIVCLHAGHHNVAVVTILLH

SEQ ID NO: 132567 - protein, 103 aa, Heterodera glycines
MLLSPTNLLFFSILSQMCSVIWATTCWPIGHVTNWRSLTCACGCPVVMKLAQHVRRLALTVPMMGMSKAEGVSALFIYMQMGIINWKICTTKKINSTINCCFK

SEQ ID NO: 132568 - protein, 168 aa, Heterodera glycines
MVQFIRLKLNLTELVRRMNLIGYGRDETMLVTLHSADQLNAPGGYTQTCFNQKKAGPTKYLTRETLWAPDTSCPSGHFRHGICNFGVEDLARLAKFPHFFFNKFWPAFDFGALLCVYERLFNMTHLYTGAEQLAKMTPVVNKSFVQQLPNVRWFGVGKKIKSEKLAKY

SEQ ID NO: 132569 - protein, 224 aa, Heterodera glycines
MIKRRIRREEDPAENDLDMSCTAIQSRNRFWHGAKDDEQGEKDEKEHANYPMAQIRTVYKARNGEIGINIGCEYSNSLKPIRPLDYVVVELEFAATFSPLNWYCFVVDAASPALFKRRVRALAKCFPNVIMGDERPMKSDGEGMMEAVLDCFERLDTPKRKWEYVTLLQNHDTAIKTRVQMAQIFAWMDGANDVQVLVPPPGRVDKITGMDWSFEALNLFKNGT

SEQ ID NO: 132570 - protein, 122 aa, Heterodera glycines
MHFSTINLIYFIIALNVSHGNLSPCLPIRLTNGTDGGVRVIKLCTSAEKCPENNGTDGATKKAYGIEFRLSQNSGNCDDGLLICYPALLQRGNHLDIAANFKVKRTFTIGDQKANYSKNMNA

SEQ ID NO: 132571 - protein, 222 aa, Heterodera glycines
SLVARSSPFKQWLFRLAYAQKLALLRKGIVTNRSIWDRLVFSKIQQQLGGKVRLIVTGSAPIAPEVLQDLRIAFGTTIIEGYGQTECTAMVTVTWPGDVDGGHCGAPAACSLVKLADVPELNYFTSDRKGEVLVKGPSVTKGYYRDAEKTAELFDENGFLHTGDIGQLLPDGRLKIIDRKKHIFKLAQGEYVAPEKIESVYVQCPLVQQVYVDGDSLERNLV

SEQ ID NO: 132572 - protein, 253 aa, Heterodera glycines
FKMRKRQKMPMSPKLNASFFSRLFYSWFGPILQIGRKRPLTEHDLFELDTDNKCHFLTAQWEKLWLPAAESINNAKRFISSHQQNTAAPSQILHLADQQTWFDAETQLRQRSAVPMPSIVFTLFKLFKYLFKYDLLVAAFVKLFYDILLFANPLLLNLLVNFISDPNAHLWQGICYSLAIFLCSEIRSICVNYHYNVICVNYHYNVMFQMGAKVQSLLTMAIYKKAFKLSNGTRRDRTVGEVNLMAIDVERFQ

SEQ ID NO: 132573 - protein, 77 aa, Heterodera glycines
WIKTLKVSELRGKKKLYFPKNRQSYEITVFHNEQFIVRKLAIYERSKLKNYLEIEPEQWEQKQSGDVFTFQRSDDGQ

SEQ ID NO: 132574 - protein, 139 aa, Heterodera glycines
MHQIFLKNCFTLRIHPSLSSNNTTNDDGHIYFVAVKCNGIEGGQLYRTITEEIAQIVLHEQNECEAYDIKVYKISNEISKKDMPLNGDQFKDGRQILGVQIPNGHTYQFSFVTFEAQQPSTPSSSWNTKAVTIERAFGI

SEQ ID NO: 132575 - protein, 88 aa, Heterodera glycines
NDPPLLITTHSHFCHFDSPLAFLMDPPDLSETQPTIPKRGHHHRRRVEISASRLPRAVLVRIFGHLSVAELGAVSLVCCSWKFIVDSN

SEQ ID NO: 132576 - protein, 44 aa, Heterodera glycines
MFHAHQFVLVVILALSINEVNCMPKRKEKTTVIVNEGESPIKHV

SEQ ID NO: 132577 - protein, 169 aa, Heterodera glycines
MEPFYRIGWISDPPDLALTFGEDLTFITSCLRRLVVSQQGFAIEEREFVKFNRQLDRTRRNVNFDEPLDGEVRTEWISQNILEIWPCSPVYEYGFAQTKDKCYKKIPVKVTLVRKDKPILAYLDPKTLIISAEARKVDCQTDRYKHIVLEGRLYEIDQVLGIKSPVKEI

SEQ ID NO: 132578 - protein, 17 aa, Heterodera glycines
MLFYTASETFKSILHAN

SEQ ID NO: 132579 - protein, 190 aa, Heterodera glycines
ESLGIKEDPNEVDDQTAMQLFDKSIRRENDGRYSVKWPWKEDIPNLPSNYRMAFSRLMSTLNKLRHSPELLQQYNSTIHDQLSKGIIEEAREAHGTLEHYIPHQGVLAKGKKLRVVYDASAHTRGTNSLNDCLYRGPVLLPDLIGMLLRFRCPAFPLLADIQAAFLQISLEPEDREVTKFLWLKTPKRRH

SEQ ID NO: 132580 - protein, 56 aa, Heterodera glycines
MLRPAHANNEQQQSLCAQLPTNVWCTPSAIGRMATILRQMHAVVSEEMGRELMGRQ

SEQ ID NO: 132581 - protein, 101 aa, Heterodera glycines
MANFEEYEAPTFESEPNYGTLAGLDKEIFAKEQQAKATDPNYWTLNNLDADIFTKNAPAKPAAAPKAGPAPHGGGGQALTPTTDPNYGTLQNLDAEIFVKK

SEQ ID NO: 132582 - protein, 105 aa, Heterodera glycines
NTIDSIHKAVKDGQLELVKNKRTAMHYAAAARDGGHYLKILGKAGADPMAVDNEGRAPDYYRRNTVFDLKLLKERDVEEGQPVLIIFYSLRHSRPEPGPGFCEIP

SEQ ID NO: 132583 - protein, 18 aa, Heterodera glycines
YREAIPEGFGLPINLGAS

SEQ ID NO: 132584 - protein, 35 aa, Heterodera glycines
MDGGKAKFNGGGKAKFNGGGKAKFNGGGKAKFNGG

SEQ ID NO: 132585 - protein, 87 aa, Heterodera glycines; identical to SEQ ID NO: 129152

SEQ ID NO: 132586 - protein, 212 aa, Heterodera glycines
MCASGNPSVKQSVGYGQSVSGQSVNKFFFFNSLTKCPLTERQSTDELFFTDELRNQNIQLAPLLVVDYQCRRQTIGRKHQINNNSKKETTNWEEKEEKMGGKERKREEKKEQQRKQRKRKIAAEHHQKQQQQKQEVQAVQQQQQKQILVGMEMKMDNSKNGETREEVETEGNSTGEGGETEEKERKRKKSRVKIPKINVTIFKQREIHTLDR

SEQ ID NO: 132587 - protein, 72 aa, Heterodera glycines
ILCLPCTPFVVSPARAFIFRSPFWRTPEERMGVRSFFAFCFGFPIFSFHFSFSPNSFVIFVIFMVILEHLIN

SEQ ID NO: 132588 - protein, 42 aa, Heterodera glycines
NCTKLTSFLKKKLKKFPTFHQKFRKSEFRPQKCRKSEVFPCH

SEQ ID NO: 132589 - protein, 58 aa, Heterodera glycines
MQKQRIPLRNLQKMRFLRLYGRDTFVHRDNTNDHHNVKSFETYPLGMARNFNSDFRSY

SEQ ID NO: 132590 - protein, 32 aa, Heterodera glycines
MVLMMLGFLLVLWSSFSYSRPLLAEERLCKRV

SEQ ID NO: 132591 - protein, 129 aa, Heterodera glycines
LYQLFFDFPPFLPLFTSESLNFPFAGHLNWWCQHDSNQRLWPLVTTGDGNCLLHAASLGIWGVHDRQLNWRNTLHDVLKFGSRKHAIYRRWRWHESKNNLASGLVLSEEEWRREWNAVLELASPTPRPN

SEQ ID NO: 132592 - protein, 34 aa, Heterodera glycines
MASTPLLGYLVVHEQYLPGCILFVLIAFTDIPFT

SEQ ID NO: 132593 - protein, 186 aa, Heterodera glycines
MTKLTAEIKNLTEEERTIFEATKEMEREAWIQAYREIRLVCQFNYDVHRNRFVLNTDPRYVKKVEVSPQLAYILGFNNTEFMQPAKEARFSPDMSGGVSSFHVYTPDLIEPMMIGDVTAPVLRIVTIRGNPDQVVEEQFFAIQYHKLLSKEVSEILIEIRTNSGILMPFQYGTCTLTLHFRKMSYF

SEQ ID NO: 132594 - protein, 693 aa, Heterodera glycines
ANGIIRMIKLLFVLILALFSLTNAQKNCASAPTSAFRILCEQLHRWDTNARVKKRNAKFCAKFKMGPTLAAEIAPVAATPYQCMDLQCLSSYLGGKNNVRSCFTGRQLNKAIRKEYRMLSDMERSRFHAAMKTIKQNGEYDKIARIHADPTIGGGAHGGPAFLPWHREYVDPSVALPYWDSTIEDRLPTPKDSHMFTTDFMGETDAAGNLVFMGETDAAGNLVKGDFAGWRTTTGKANVLRKLGADGHGFRDTEINWFLQQTSPEMIFGYSAPQQGCTVTTNYNLIEGCTVTTNYNLIEYTHGNIHLFIGGDMAEQSTAANDPIFFLLHSFVDFIWEMKRQQQAPFEREQMYPMDNTQCASASHFGSASMRPFQQCASASHFGSASMRPFQPWTNRDGLSNRYLDLYEYAPRPNCMMGPNCGSKYLFCDRSHGAPHCAAQVKPGYLFCDRSHGAPHCAAQVKPGGNCTGFRSGEDVCLNGECRAGKCVQTEKPTPKPPKSTTGSPIPTPKPPKSTTGSPITPVHVKIILTKIKLIFWVSCYNEHECCGTWATKGECRRNPTYMNLWCKASCAQCQPNYNLAAECQDRHKNCGQWSRQGECNKNQFFMTENCRKSCSKCGVSRAQVCGTENCRKSCSKCGVSRAQVCGGGAGSKANHSKKLMPVTQAPPKQAKCTSPMCFNENLCCPRHFQRLQ

SEQ ID NO: 132595 - protein, 21 aa, Heterodera glycines
MDWRYRGASRRFWWFWLYGTD

SEQ ID NO: 132596 - protein, 120 aa, Heterodera glycines
MENTEQAKVAALRILEMGPRVAIVTLGPRGAIVARREHNNGHVKIGEVSAPKVTAVDTTGAGDCFCGALAHFLVAQPSAELLEDHVRRAVQIAALSVQKKGTQASYPTRDELITMGILQD

SEQ ID NO: 132597 - protein, 31 aa, Heterodera glycines
DYFSKHLVDCGIIGDCGINRDWAIIRAYTVI

SEQ ID NO: 132598 - protein, 18 aa, Heterodera glycines
YREAIPEGFGLPINLGAS

SEQ ID NO: 132599 - protein, 49 aa, Heterodera glycines
LFEYPKRTLEKIDFFVFGAVPPNRCAQIYGETESFRNSFPIACTLILRW

SEQ ID NO: 132600 - protein, 351 aa, Heterodera glycines
ESVRGTESGRGKESGRGTERGRETERGRESVRGTESVSGTESGRGTESGREEEEQKVEEEQKVEEKVKRNRKRKRRRGTESGRETESGRETESGRETESGRGTESGRESGRGTESGRESGRGTERGRETERGRESVRGTESVRGTESGRESGRGTESGRETERGRESVRGTESVRGTESGRESGRGTESVRGTESGRESGRGTERGRETERGRETVRGTESVRGTESGRESGRETERGRGTESGRESGRGTESGRESGRGTERGRETERGRESVRGTESVRGTESGRESGRGTESEEKVEEEQNVEEEQKAEEKVEEEQNVEEEQKAEEKVEEEQKAEEKVEEEQKVEEKV

SEQ ID NO: 132601 - protein, 84 aa, Heterodera glycines
MADGTPSAKRPYIRLTVPPSNATRPIGGEMVKELCAGGKESADSNSAQGNVIEIGNGRVGRARPRLLPMHRYQRGWQCQRHCGA

SEQ ID NO: 132602 - protein, 95 aa, Heterodera glycines
MEWPAFWQSFESAVDRAALEPVDKLNYLHGCLRGKSARAVTAYRGGENYAHAVAALRRLFGDPRKIAEALQSELINLRSVDDNVGSLQHFLETLE

SEQ ID NO: 132603 - protein, 78 aa, Heterodera glycines
MEEEQKEEKKQEEKEEETEKQKEQQRQRGRERKWEMEEKDKEEQKEEEKVKVEEEEKKQQRERGRNKKRREQEKARVM

SEQ ID NO: 132604 - protein, 115 aa, Heterodera glycines
MSFDSFVALAVRAEEVQKATKSAESGNKHRPKFQQKSTFQPQKIFAPKTNRIVCYNCNKTGHISRHCLTLQRDSMPNRSTADTLAAPFNAECTTDEPKALSTSLLRGRGCDIIVI

SEQ ID NO: 132605 - protein, 31 aa, Heterodera glycines
LCHTKVIEQTLMFYQRHDTHNCVTLNSNNKH

SEQ ID NO: 132606 - protein, 54 aa, Heterodera glycines
MKGNPSKVRSANVGSAVDELLAKKFTRKAFIFLIVLVAARESILFKSRTNSKKN

SEQ ID NO: 132607 - protein, 62 aa, Heterodera glycines
MIPTMLDLVGKKVIESYSGKTYWGRTNMLEESNLKEGQRTANHQAGYAAGCAMNPHCTRITF

SEQ ID NO: 132608 - protein, 350 aa, Heterodera glycines
GKWLATKHSVDRYGPKYSTKREIAKRFRIFKKNLAIARRIQSAEKGTAEFGETKYSDLSVTEFQKIYLPYKWPLNSHGKMIDGGKIAEGILPESFDWRQKGAVTTVKNQGTCGSCWAFSVTGNIEGQWKLKKGELVELSEQELLDCDKLDMACQGGLPDCDKLDMACQGGLPLQAYKEIEREIERIGGLERENDYPYDAHKEKCHLKSDRISAYINDSLQLPKDEAKMAQWLVQNGPISIGLNAMPMQFYLNAMPMQFYRRGISHPPKWLCNPSWLNHGVLIVGFGEEARKPFWIIKNKNSWGTNWGEKGYYRMYRGGNTCGVREKGYYRMYRGGNTCGVREMATSAIIE

SEQ ID NO: 132609 - protein, 503 aa, Heterodera glycines
MNGTAITTTINSSTSKRTKTTLAFFKEKGTKRDTVQPNGHTVTPRGTVEPVMERQRNETQQKGRETTAEKAGELVMPLKEDGNGEKETEEYGKGKAKGKEEAMGGERRRGSEREEKQDKGTIANGSENGAEKETEKRKEEEKETDGKDGKEERKREEQREKTEKRKEEEKETDGKDGKEERKREEQRVTEKQNREKKEPENEGEERNEGQREEQNTVKKVGKEEKKEEKGKEEKKVGKEEKKEEKGKEEKKVGKEEKKEEKGKEEKKVEKEEKKEEKGKEEKKVGKEEKKEEKGKEEKKVEKEEIEEEEGKEEKKVGKEEKKEEKGKEEKKVEKEEIEEEEEQEEEEDEEDEEDEEEEGKEETNLTSVEKFFATSAKAEETTERNDGGEKTTTILVTERDGEGSGTEEEGKEEEEERKEEGEEAEVEGKEEEEERKEEGEEAEVEGKEEEEERKEEGEEAEVEGKEEGTDEIGIPTTSKSVVTLPTIALPTESVERKCADTHD

SEQ ID NO: 132610 - protein, 269 aa, Heterodera glycines
MQQLVEKLHDNPRRIFGLPEQPDTYIEVEMNEVWTIPESGGWSKAGWTPFAGLQARGRVCTVVIRGQRVYDEGQFLVGPGFGHNVRLLPGAMAATASNLPSPSPAAELTAAAKKTDGAGGGGKKRGVAAVTAGTGGGTTKRHDTLRQHQQQRISPELSPDRTSVVGPSRLYGQNILCVEQFDKETVEQVLKLAKHFEEVAVKMAGADGVERLHPSAFGFPLRDFSVSLLFFEPSTRTMCSFDDAMRLLGGTVSVFNAEHSSVKKGETLE

SEQ ID NO: 132611 - protein, 20 aa, Heterodera glycines
MPDPVVKGNHLSAGRRTFRQ

SEQ ID NO: 132612 - protein, 17 aa, Heterodera glycines
IIRLRTHGCHISEAFVL

SEQ ID NO: 132613 - protein, 72 aa, Heterodera glycines
MDMKLRSARQNVERTVAGVELAWEQKRDADAELAAADAAFKLAQQRLNAAKNAAANANTALDAADAERIRVI

SEQ ID NO: 132614 - protein, 49 aa, Heterodera glycines
MRTFRAGDRDRDLDKFLKVREDKEQWKTPWPAPKPEDESLRELDRLRQV

SEQ ID NO: 132615 - protein, 49 aa, Heterodera glycines
MCPFGPKIPQASMRRSKSLNELRPVKASATKPEQFTLPPLLPSRHKILE

SEQ ID NO: 132616 - protein, 133 aa, Heterodera glycines
MHAENIVWLEKYPRYFRINWNGWFDNPRIARYEAFVKQLSGVDDWARIGSLPVVSFKILSFKGVEPAMGRIELDRHFEKSLDLDLDLDSMLDLDFLDKNPGKSRSRKNPGSSRPGSRPGPGFFEIYFKNQKNV

SEQ ID NO: 132617 - protein, 55 aa, Heterodera glycines
NRKTSNSCPIVHPGQLLNKCLITGNSWIVKPSVPVYAKVTRVFFEPNDIFSVHFY

SEQ ID NO: 132618 - protein, 105 aa, Heterodera glycines
MSKSCSLSLFSLSLFSLSPLFLSPIRLILHFAKIRRLPAVLYADSRKSDSRQLEVLLRDGYGLPLVTFYADKIGRLAAVEANLAKLTAHREMPFLFICGTFIGSQ

SEQ ID NO: 132619 - protein, 65 aa, Heterodera glycines
SCHFKTRGSKSLCSSQQDESAFGVAFSAGMRGTISNKSSSGRHLGAIVGRSIVLLFGVISEQLAD

SEQ ID NO: 132620 - protein, 159 aa, Heterodera glycines
LIHLNDPCPSIAFHLSFNGAVSGYDGGPFSVGGGTSAAADGGRPWRQHQKPTPPLMVAQQNAVVQQQGNADHWQMPTTNGGEEKRRRTVTGGKILLIVQKSFNFGKKPVQKDGQQQPAAAVAGAVAASRAISHSATNDGGDTHQQNANTANANDDDGNN

SEQ ID NO: 132621 - protein, 186 aa, Heterodera glycines
MKPELKQLFCPPVNLFKEFSMQLKKVVDFQQNNRMRLKERQTMEKMQSAARYIQILKVELRKSSDNERIALKERNQMKAEMERYKEQAQNLKTKLADREKQLHLHACKLQLQPRNPNRAFASLNGNTPLLGLSFDCVKSTPNLNDTTMFQANRKDVGNNVLETPVFNESEIAGPLRMPDTPAMLRN

SEQ ID NO: 132622 - protein, 27 aa, Heterodera glycines
TQTQGGIELETPFLVTNSQTTKTKKPT

SEQ ID NO: 132623 - protein, 110 aa, Heterodera glycines
MSTIGSLARSVTGTQSGSGSEPRERTLYEREAEKALKLRNVEVGRAVMAEKPSAGHEGDLEVHTNVYAISMGPLDIYRYDVSIVGERGGERSGVLFTKNIRDESGVFIVH

SEQ ID NO: 132624 - protein, 92 aa, Heterodera glycines; identical to SEQ ID NO: 127421

SEQ ID NO: 132625 - protein, 58 aa, Heterodera glycines
MAFPALAEHSRRRRKNSVGPLRFGAEVRLARGRLFAEAETAGETDQSGSAVNRCTIAA

SEQ ID NO: 132626 - protein, 39 aa, Heterodera glycines
MSESENSWDKKACHADLALIGPDNLVVKTKETKNRSSSN

SEQ ID NO: 132627 - protein, 87 aa, Heterodera glycines
MRFQQNHIAAKVQIGQLENEVHDLKHRIDQLEMLNILKLSQRSNEVAESSTSTKTNPKKKKELMKSKSAGDLLVNNLGKGHGKGTQL

SEQ ID NO: 132628 - protein, 108 aa, Heterodera glycines
MITALAFVPIQHLTAAITALNYIVGEELDPILGCCRYPSIWRFIDVLRKDQRSRDADYVRCVNGEEPAMKKKKFRKADKRILNIIENFDAQNIIEFLRGISSNCVMDP

SEQ ID NO: 132629 - protein, 326 aa, Heterodera glycines
MCGRLLEDIREKLYPNGYRKPKRANKPKNEKDLDQILKKIENDRKICVFKTENILRQCTRIKEVVKENWDMNVFIQGSIYNGLGRKESDLDLVMINSKGIPNDWTKDDSCQFFDKLRKRLRESGMALTRTLIIPSRNVSILEITINSDDQEINAQISCNNLIGLINSKWLACCVQLDVRFKTLYFAILEWADFFEIHQSANGGGTLNSYGWTSLLIFYLMKIPNPVLPNLIKILPEIFEIRNVTYTKKQIFEVLKQKLIWETTNSQSISSLLIGFFEFYTKINLEESRLNMKEGKIDFWEKSAQEMKMHLFILEPFGAFNVARSVT

SEQ ID NO: 132630 - protein, 50 aa, Heterodera glycines
MAYAEELPKMANANDPSEISHLDDDDDDDGSDSGRLDDPNREHLRDYILL

SEQ ID NO: 132631 - protein, 68 aa, Heterodera glycines
MNIDSYLDGIQFGNQNAKLSATRPNIVEKFKGKCQINERTQNCHQKIVHGVKPMLVLKLFINSFFLFG

SEQ ID NO: 132632 - protein, 87 aa, Heterodera glycines
MILCRCIVLLQLFLVLLALLPPSSNCSCYCGCCDCCGCCGGGCFCCGGSRNRNNGAAATAAAIGSGIIANTAQQAAAVAPPINVADE

SEQ ID NO: 132633 - protein, 144 aa, Heterodera glycines
MVVEAKKENVTASVPTWRRRRKSTTPTDWGSEKLLTPQQLEGKFQQIRLLQQRPLAPLQPELPPIQPPDFPPLSASAGDSPSFAYANEETAGKFRPQVTSGIGQFIHVKPTVNGIGDAMGQRADAAAEFEDPTLKHPFEEPFWI

SEQ ID NO: 132634 - protein, 64 aa, Heterodera glycines
MQTQLLQQQQKLKSHQILAAAAAKLPPAATMANQQRALINNGARQQHQQQQQQMKPQTNQTKNR

SEQ ID NO: 132635 - protein, 158 aa, Heterodera glycines
MRDTDKKKKKEEIIAAGTNNVVSEQQQDGVPGDEHSDSDNSTEERAQNGVPGDEHSDNATEERAQNGVPGDEHSDNATEERAQNGVPGDEHSDSDNSTEERAQNGVPGDEHSDNATEERAQNGVPGDEHADSDNSTEERAQNGVPGDEHSDSDNSTEE

SEQ ID NO: 132636 - protein, 73 aa, Heterodera glycines
MSNYYGRIGHLVGFNPPSNRNEAEEMIIEEDARLLLEQSLDENGLLVDQYFEEMGLNEVQDENSPDVNSEDGE

SEQ ID NO: 132637 - protein, 44 aa, Heterodera glycines
PNYLARSLQLTRHLITHSPWKTLQQGALSEVLDYCNNTWINNRI

SEQ ID NO: 132638 - protein, 189 aa, Heterodera glycines
MDVRIGFSGGLDFPGPVFSWIFVQEIQVQVEHGIQVQAFFKIPSSNNDIAPGWICNDVWMDIFPTFDHAQLGLKLALLSPRFDALVDKHFDGKSELTIWRPIEISKRIGTKPKLSVRMDDKYVPFPLPDDRPLPSKIRFKSLQINYFDHSVIAFLRSNHQIFDKRGTNLQLRIQSSHTTEGQRIWDIFG

SEQ ID NO: 132639 - protein, 245 aa, Heterodera glycines
LGAAAILAFASADFVFVGGNQMEFDPTAVIPDSQFIDLISRDIESFSGPMAFGHKFMSGGAGEGDQQGAGEGDQQLGPDGPFEHRQQVKSDSVLPAYCEPPNPCPVGYSEKDGCMEQFDNTAEFSRSYQGQQQCLCDQEHMFNCPSCPSKENAEEYAQGLEQLLADNGLHKSMIAKKFHLTRAEMIAKKFHLTRAERKEPRRRKRSRKEPRRRKRSVALTHSRYNPYLEGIPLKSVAKKDGRNLK

SEQ ID NO: 132640 - protein, 103 aa, Heterodera glycines
RFVLPLKFLSPLNIKFMGAMSSSSSAAPSDPQQKSIYEFSAKDIDGNETSFGKYRGKVLLVVNVASNCGFTDSNYSQLKQLLDKYKSKGLEIAAFPCNQFNNQ

SEQ ID NO: 132641 - protein, 122 aa, Heterodera glycines
MPNGKGKAKGMPNGKGKAKGMPNGKGKAKGMPNGKGKAKGMPNGKGKAKGMPNGKGKAKGMPNGKGKAKGMPNGKGKAKGKPLIRIIGSTAAVQMERLSALFWLCPRRCEGPKAVERVQNGH

SEQ ID NO: 132642 - protein, 63 aa, Heterodera glycines
MSRILAGGGAANGDETLLRKRIGPGTAVAVDKSRIAAQTEAMKNGAGITTGVAADDDELLDGV

SEQ ID NO: 132643 - protein, 115 aa, Heterodera glycines
MTNSNTEYTPMAQLNDDRFEHRIIFQSKSSKWLGLFMKCILMMLIAAFVYALIRTVDSSKNISKKLECPKVNDTNFLAALAKQQRGLVDVRLKDGSIDVNGTWTQIQPHFNVRDN

SEQ ID NO: 132644 - protein, 105 aa, Heterodera glycines
PGLKCPAEVKNFFYFWKKIENFPKKLPIDRARKTMFWKWSPFFWENSLKNHKIKKPENRFLGLTRKILKIFEILKSGKIELIELYNKSAGHPALRSNPNELFGWY

SEQ ID NO: 132645 - protein, 601 aa, Heterodera glycines
MDLRISTPKNLLQYLVNQYNRQQARQNPNAQQKTVDDIGSVVRLSEHNVNSLQYWKKMYEDCNTVFARCHDAKKARLFITFTNNREWPEFKENIYKNGQVFTDRFDMWMRVWTSNIAEFREELYEKKFFGTILGYGESMEFQGRGGPHAHIVAQTDLDAVPHVIQEYIWAHIPSLPDKDDDTPIAKMHREIRETMHMQLHRCSDSWCGPSDPIYGRCKKGFPAPYSKCTVLRPDRPAMYFRPSPSDGGAQLEVNGLIYDNSHVVPYNPYVLLRYRVHHNVLFAYGNKANIKYALKYPFKGPGHCYVECKEESGNKIGIDEPAQYAKMNFRGATEAYAIVHSMPFARLSHHVVKLAIHLPNQQPIVYRAFQLVSKAQQIQQGELPETHCSAYWKQWQNEWKNDPKFKDILFEKVPEQFRWAKDKWVLYKRQQIKRPPIGRIVPVPPSDPERFALYSLMRHFPGDPDHLKMVNGLLCTSFTDAAIMHGLLEDGKIWDKTLAEAALSRWPDQMRWLFVSIMVYGQPSNAIELWNKYKDQMYNPQGIITPAQHKAAELEALADLDWRLHSCFNLSCVHFGLPDPPNCICKILTAQLKSFSLAMMI

SEQ ID NO: 132646 - protein, 58 aa, Heterodera glycines
MVPFWVGVILGGAVLGGDVMEGTIWDLKKWLYLIELIWHSKKQCGSCWIPNKKAQTFV

SEQ ID NO: 132647 - protein, 86 aa, Heterodera glycines
MKRLNKSIMDLQELISQLTLANTEFAACRRKMSHYELQAYILVHIDRQMKRLNKSIMDLQELISQLTLANTEFAACRRKMSHYELQ

SEQ ID NO: 132648 - protein, 255 aa, Heterodera glycines
MSQPQEVQIMEAFDEVNTQQWHDLDNLKCKAYEHCGADKAAAADPVPIQLRGRSDRTRAVPPGRGGVVEKCQKSGVEDHPVEPEAKQCTGLASKRRFACRTVSTGGDGPEQIVQNPRGDCHFSRGLLISPPTFAQITLEGACQTMYTINKAQRIGQQQQHQFNVTKTINFKKCQKIADVANGFQADQPQAQCAQCQQYWAQQQSDQQNSPTDQQKTNAWQMGESDQHPCAKCDPKEVKENEVINRSDSVGSDADG

SEQ ID NO: 132649 - protein, 123 aa, Heterodera glycines
MAETDQSVSDWLIGELLVKKTIQIIGRSNYRPNYLIDQSLNGYSQLVSFCLLSILLQFVRFFVVRHLSVGADARFDGLGIGTGRNGKEQKRREEKAGQTERADERGRGGKDNGRRREWQRARE

SEQ ID NO: 132650 - protein, 143 aa, Heterodera glycines
MFILYQFVRLLYCNETMRRDNKKWTAQFTNAPFINFLVEEFEKGICDDHQQLGHWDIPKFNKKEAMQIYESLMAQRERAKTINLYCIGMLIERFIKMRIFFCKMNADRLLQSKKKLITLIGETGLVQLELMYPEVMKFCGFNG

SEQ ID NO: 132651 - protein, 92 aa, Heterodera glycines
MYRGISMVRMMPWSPPVVNAYLMWLEVVYRKASLPASQAPLFTRVDSCTVPSTWRKKIERRDQRVQRHLQSLGDEGNVILNTQFCVTTPLLP

SEQ ID NO: 132652 - protein, 85 aa, Heterodera glycines
MAGWNCRLRNGPPFGFVRSAGGAGERQKDGAHTVDAKSVSEKSEDRQQIVSLLEQFVPLIIEALKQKYDKVKHEQCFDLFFNLFR

SEQ ID NO: 132653 - protein, 573 aa, Heterodera glycines
GRQLRWALTQMALSVGKNRHFPLAARNLIDLLEALESWDTRRIEEPDADRRCEALVRLHDWYEHRDRHILLDDGAARTLPLLAHSHVHSMLQVRKINLLQRNGIPLRQKSDISLRGTAANTFRQLIHFVSTTANDSNLDAVQMLRAHFIPLILRGLRTSVDDESARHEFIQCFAFLVHCFPNEPQFAALRHLTDTTPTSTTASASVDFEIDPDVDFFECATHIQLHRRQRAFHKLAERLNNKELSIGHSSLVRFIVPIVEPYLMDTASNRSALSDQALHLFSSILRRTPWPKYCQMLEYFLRLLDTAGEESTKGAIRVIGAVLNAFHFDLRHLKIKGTHSNEKGNCDEKKEGKTEEDEGNEFGEGSETPVDAQKETEDMARDKKEEEKRRILEVVRGRLLPRLRECLHRWNGVNKPGNHWDEEEQKLLRAPLTLSIVKLLEWLPPEMSGHHLHGLVLFLDHLLMSRCSPSVYLILNKFCGDRSPNTRQNARKLLEQMVRLLGPAKLPFVVREVKQSLNKGYQMHVMAVTVHALIGAMEGHLTNGDIEPILKEVVDVCRWETFGGHAKANSAKA

SEQ ID NO: 132654 - protein, 24 aa, Heterodera glycines
FSIHRDKEIVRQNERCFFLCTLLF

SEQ ID NO: 132655 - protein, 41 aa, Heterodera glycines; identical to SEQ ID NO: 129572

SEQ ID NO: 132656 - protein, 69 aa, Heterodera glycines
RWGEKAGICSGLAKIEDKFAHLGSNFQKTMLYLAYRSVGPSADLIVPAVAIYLVALVGIVLNGTVLVVL

SEQ ID NO: 132657 - protein, 58 aa, Heterodera glycines
MCPFMEEGAFGWHKSAENGRPIAKAEGEGRLLSGQSAEEQPKRPQNEIPNGTANNANC

SEQ ID NO: 132658 - protein, 207 aa, Heterodera glycines
MHIFKNLKAYQRLQDVDKRVMCFDQKFNGLRQRMDLARQITETPSIYMTAVPEVIRREALKREFSSWINLHIGKTMEFITEENKIRQQFFGKLEKHFLRQLFPGMDEMMPQFSPQIAPKIDQLLPKVPFSHLHELRSRFPEMKELLFVGTPRLFSRLAISDPTSPIASAPIRSIRRDESFYERDKTSNIDVMNRNLPSTNWLRHYFD

SEQ ID NO: 132659 - protein, 140 aa, Heterodera glycines
MNGIISRESRGLNHGLPLDTVPFHNGMVNLKNKTHSTANGRKCANGFRPSATFCRNSWVEINSFFHKFYPLSIMNARVEQRRRNRNADGVRRHSSAECLCRVGDDAKSAKQKGQQMLGRDGQSGDNSKNGNEMYYLQLGF

SEQ ID NO: 132660 - protein, 82 aa, Heterodera glycines
IVTALPVPSQHLLALLFGTFRVITDSAQTFGTRMTPDAIGISVAPSLFHTCIHDGQRAKLEDIMRFKLASQVISKIIQSFGA

SEQ ID NO: 132661 - protein, 225 aa, Heterodera glycines
MDELGAQLKKCLILRLLQIDANFGQRPFVFDIFAEMNAAEQATKNAIAAIELPPEKVLWMNSLIAKWMTYEGYSRALEALNRSTANPKSSISEQAKEDRQQQQQQQQSPPPTTAAETVANSVMQSIIVFGGGGGSAADGGTDAAAPATTTSAGSMANKRRTVVRSVQEALDEEMEHHDKMDQRRSILRMVKRGQLDDAISHIEHHYPTLMETNRQLALLLKIQPN

SEQ ID NO: 132662 - protein, 21 aa, Heterodera glycines
KDVIHLPFDRKSIREPYLTFN

SEQ ID NO: 132663 - protein, 965 aa, Heterodera glycines
MNQHKSLNDVNVVENSSRATALPNNSEIEYEANCPASGRSSPWEGVRMMPRITPLLPFIVFLIVIILDLNGAKAAPPSLPLICQTDIQPTIWGLPKQVQCPLPAEVATHVPLIQTRELFVINDFEHNTQAWACRKIKKKARKFTTLSGVPVVEPLDPELLEMSVDECKRMVEHKTCDFGILTERDGLWGTDHTLDLTPRLWLLGSFSWSDTEKQGFATRIIVRKRKRTKRSYGSVEHLGLATSPEMNAKLTYLDDEWVDSLMYALRHSFKTQCDFFSVMTKMLTNTHLIDPTSLARSLFNNTKVYAVRAGSSLLKIWPCVQLKKGEFRFKPTRLDNKCFDKLPIEFVTQSENRLAFLDPFTMIIVPDSAKVACAQHRKIVVQIEGQPLEVDQVTGETKILKIKDFDIEPRLPGILEIERHSFHQMALFNVSDLNTHAFLSGMVKVSELTYRINELHKKVRVTVSDQWRELTDELEKKVVGDYKLTWLCVLSFTIFSSSDPTAASMTTNVVNKSPRKRLRPSSVMQVGTSTTMAIMMLMISLLVVPLNAEKASQSDLKAGTGQKIFGEIKLIQDEVMSDRRDYQVILGCDLMAKLPPITFDFVQGLISISGKSVTMGERGDLLYSNVKVVARHHVDIQPGSYIMLTGKLDSQIQLDQVVTHSLDGGRLSKMHVGMISTVAKPVEGCIKMILTNPTDAPINICAGMHVALANELKQSADGPWLEEQSQVKEANVNPEITTNDPSFKINFAKSSATGENLNKLKKLCAEFADVFSKSQYDLGSCLVGEHDIITTTEDPITAKPRSTPFRFREEVRDHMQKWIKAGVMVNSDTPWISNIVLVQKKDGGLRPCIDFRKLNEITVPDHFPLPRLEVVLEKIGNCHWYTSLDLSSGYLQIRLTERASRKCGIITEDDVYQMTHMPFGLRNATSAFARVMDHVFSGLEDSVIAYVDDFLIYSKSPDFICIYWH

SEQ ID NO: 132664 - protein, 746 aa, Heterodera glycines
MPSSTSGSVLSSGATAQPNFSDDESILKVVNKTLFQGKQQNSTVRFEDTFTAEISKVAGKVKSLENLNLANKNIQQATAVTQPPVPHHAHPPVQQLGHQTGQRPNQSQQSSSSDDEDDDQQRNALSFQSVNMITNAYPMALEGYKDDCVVTFDRWAKRFREYMDAFGRKLDEKDKLVRLVIYLDGVPKRILEKMDPNRKATIDLALANLRTDLDSPQSKGLSKQALIACRQMDSEPVKDFLNRFIPLAEASVSDVKDDSQKEAQLRELFLERLRPNISLVMKMLDMSRGKKFEHLCWEAREVEIMLSAQAGGLPFVQKFKSVQAMDNQNLQSNSMTPPGNFRTLAPTQQNRYPPRQNNWRNQPRQSNRNESRNGGRQSRDRDMGHGPTNDRRWNNRPYCNYCRRVGHVANACRTRLRDYQNEQRGSYGNTRSQPQRRTPATGANAIQHDRSIELLNEIASDLRNLSLDMNQHKSLNDVNVVENSSRATALPNNSEIEYEANCPASGRSSPWEGVRMMPRITPLLPFIVFLIAIILDLNGAKAASPSLPLICQTDIQPTIWGLPKQVHCLLPAEVASHVPLIQTRELFVINDFEHNTQAWVCRKIKKKARKFTTLSGVPIVEPIDSELLEISVDECKRMVEHKTCDFGILTERDGLWGTGHSLDLTPRLWLLGSFSWTDTQKQGFATRIIANKRKRTKRSYGSVEHLGLATSPELNAKLTYLDDEWVDSLMYALRHSFKTNATSFSR

SEQ ID NO: 132665 - protein, 371 aa, Heterodera glycines
MKILLIFLLLCALIFKKAINQIEAGKISQEKSFAEIFGQRWDERTEENIYRIGPIIYGQNADQNNQFGQNIRQFDQNFDENVEVKEEESEEMSTDCDELGDQLPMPTNNGQIYDQIRILNDKQKREIVEKFHKIKEKVKQMGKKFTRKEWTKIEIKIAKKLGINQKKIYKWKREFGMMKNKNYSVEEKRIMLKQFDQIYAKLKMKFNEKLEGKREKCKKIIAKHLDTNIRTIFYWKKQLKSGKMVKKQKTDDEKREIVEKYFKLKNEFMQNEKHSRKEWKEFNAKIKQKFGVIFQTIEKWDKKIGLNQILSKGQKHYTFAEKTEKIKQYYQLKNQNPKLNDRQIAEILNITKRSLERYKSEFKRKSEGVTD

SEQ ID NO: 132666 - protein, 65 aa, Heterodera glycines
NRKKGRISKFFISIFFYSSKFSVIFSRLIEPMKSFRMISRLFDSVNNFKSYIDSKLAQTELARQS

SEQ ID NO: 132667 - protein, 76 aa, Heterodera glycines
MDKKPKERIKRGQSVQIAIVVTDEDAEEGQKTEEKKIAFSANQNNVKPKSNKKHGRSKSGGVLLVKSAGVHWEETK

SEQ ID NO: 132668 - protein, 74 aa, Heterodera glycines
MVAAPDEAQFHISFYTDEEECKNLLPAESINVPASSHSDQLNVLINQIGSMNDGTLSLMILQMFYATLANAFFT

SEQ ID NO: 132669 - protein, 411 aa, Heterodera glycines
MANAFDMDLEVKFEVLKTKVNDLEEKLANKISTNLPSGVRVPKFDATGDFHSFLRDFNILATVSNWHPPDCVRMLPLFLDGEAKELFLHIPPDKKKTWRELTDALAEQTKKIDGPMWPKKMLARVKMGNESITEFANKVRELVEQASPSPKYTKEAREDESVHFFLSGLPTALKRKLFFMDKPKSLVEAISQAKKVVQVREELANDARGDELKQQISELSEKVSAITVRNNGNNERNGREFFNSNWRGNNNNYTQMRGYANNNWRGNQNMVRGRNMGNFNNFNPRNANFTPIGQNRNWNRNFGNRTNFENSRFQRGNFNNNRGMRGRGNERQKYRINAIGNNEEIPSSSTRKSPTPTMTFLTISMVIFSLFGLINGQYQLCSERVPTTPIWLPQYNRMFRGESTRKWQKPK

SEQ ID NO: 132670 - protein, 50 aa, Heterodera glycines
  unsure (1)..(50): unsure at all Xaa locations
LPLDPLHRLTGKCGEIIFFFKIAPLSQPFAHPLGLLLQCAVLLLXCRHCS

SEQ ID NO: 132671 - protein, 39 aa, Heterodera glycines
VRLGYSNNYGEQKSNAELKSGYREAIPEGFGLPINLGAS

SEQ ID NO: 132672 - protein, 95 aa, Heterodera glycines
MAEARNIAALSFTVTHDGISVSYDQEVLRDIWHAFSRSYKKRIAKFENDFFAGIFPANIRSLAIVIFLVAALNVSFGNDKTPFNLADKLNYYVFS

SEQ ID NO: 132673 - protein, 205 aa, Heterodera glycines
MVVLNGTRKRIPSPNQPQLQEDDRDRLAPLKSATDGRHCFTPAVGYSARPSTAAVDSSQCHSTSGGRHCADFSNGFYRTTTVVANGGGLLSLGSPGSGTLIGAEQKSRSTGNLDKNGSLRNCALISSSSSSGGQHQLRHQFSTTVPPGDELCGEAATAEQQQHLGFILDRLNDGQHQNQRHKDIDENGTDGMPRPKQTAEECVSC

SEQ ID NO: 132674 - protein, 40 aa, Heterodera glycines
MSGDYSKDELMAYMGEANRIFVGFRQALVEPTLLALSMNG

SEQ ID NO: 132675 - protein, 27 aa, Heterodera glycines
  unsure (1)..(27): unsure at all Xaa locations
KGRSPGVRGISKXKFGGWIEHPWFLRK

SEQ ID NO: 132676 - protein, 166 aa, Heterodera glycines
MDPGKGLYDKNVDKLTLAIDVTVPNERKERIYEPNGTIEMEIENLSEFAREAFGSGRFSESILFIKELPWKIMAQINSKNGNTDQKWLGFYLWCAAAEKVLLILRTKRSHFFERVELRFSLGCKCSATLRIVSQKGDVTDFSRDFSGQIFNQTSYSSGFPYFITFE

SEQ ID NO: 132677 - protein, 65 aa, Heterodera glycines
MAIFVGHSLHGRLVHWWHFGSCLHICHGTDFARPTDGAVIPWKNRFHKSLSVKKIKPKQMRKDVS

SEQ ID NO: 132678 - protein, 78 aa, Heterodera glycines
MALLKICLPQKIGTNSRVIVPCSPLSRRSAALEQPIPFHSTALQFGWLCGADAYKRALYSQEKCQNTLKIIGSKKGTI

SEQ ID NO: 132679 - protein, 41 aa, Heterodera glycines
MAIRNFLRFSNAFPENVYFFKESIILKNDLFFSFLKIGFLK

SEQ ID NO: 132680 - protein, 215 aa, Heterodera glycines
MPTVREILESLQNPIKRPRIPTNEDSVLNAERTDAEQQMEGTSTRNDLDVAESDDEENCAPVHFQRGKTIRGALCIWHQGLNSFLGFHLFIFRLPISQNTKRWKLVQKGIYFFGQRELNHHPSFSDFIAAFTKDIDKQLDIGRAEQLQKSTKRRQRYIIKEQNVVRILDEADFESEEGLTNSLHLLGLVMQGFVEGLHVRGNEESGEETDDADGN

SEQ ID NO: 132681 - protein, 344 aa, Heterodera glycines
IATTETQFSCIPITRDSILYIDFNIIETQKLLKKLPNKNGTSPDNISYKILKNCHSSLATVITDLFRISLDSGSLPDIWKESIVFPLFKKGDKFNPENYRPISITCSLCRVMERILSQNIYNFLLKNNKISEYQFGFVRNRSTTSQLITVVEDWYEAIINGKVDCIYIDFQKAFDSVPHNLLLYKLEKIGIKGKLLMWIKGFLSNRTFRVKIGDSLSSSKKVTSGVPQGSVLGPLLFLIYINDLPDALPSGVKIKLYADDVKLYICYKARTDTEIMHKALHNLFEWANKWQIRVSMQKTFVLYLGSKNPKETYKFDGNRINAVDTIRDLGVKGDNKLQFSDHIN

SEQ ID NO: 132682 - protein, 204 aa, Heterodera glycines
MPQQDEAGPSTSAASTEEAMEPSPSTPGPVPTPEMDEEILEFGFSLPSTSVTPVGDLVPFSTTPTAPMDTGETIPPPLAIDERSERIEQLEKQLKDRDDTIQFLREQVRNREALISDLRRQLEQCAAPPTATPTTSKTTPNRGRPRKAIDELQRSSRKRLTEQILDAIDRDRSRSCCIHPPNFIRKSHGHLGNFLCETKIQIFL

SEQ ID NO: 132683 - protein, 24 aa, Heterodera glycines
TPFHKTRCVPINRECQRKTLSFFS

SEQ ID NO: 132684 - protein, 92 aa, Heterodera glycines
MPAEGCKLSVGYLKETVSNSFLFTKGFEEEEEDTKKGSDQANASAEQTTAEPSTSKNRRKKSQFLYDPHDEEDTVQDSDVDDDDDDDESADE

SEQ ID NO: 132685 - protein, 93 aa, Heterodera glycines
MSVCRVGECAAKAIITFCFLGQMDPANARLNSQYHMENYEEDNKIATKCKMAQQTKWAKHFEQDKVLHGFQIVMSETDEEKAMDLYTSTHQEK

SEQ ID NO: 132686 - protein, 95 aa, Heterodera glycines
MPMVPFELVNEWTKEKLTLAKENENDLENWIMKRCKIGEAADVQLQKDENWGNNFNNVSIWLFSTNCIGPLSPPSAEEQQEAGQSSEKGASSADK

SEQ ID NO: 132687 - protein, 67 aa, Heterodera glycines
MPAEEIWQEFLDKDEANVIREFFGGKAAMEVEKSLREYAKKKEKRDEILMRKRKEYQQKMENNKDEN

SEQ ID NO: 132688 - protein, 28 aa, Heterodera glycines
LGCPVGYGVHTWLGNIWPSFVILKHTKH

SEQ ID NO: 132689 - protein, 190 aa, Heterodera glycines
MAGKIFVVTGANKGIGYGIARGLAQQVNGATIYMTARTPSLGEKALDDLEKELGTKRISKLAFHQLDITDEKSCADFAAFLKKTHGGLDVLINNAGFAYKHNATESAAIQADVTIGVNYYGTKLISDQLGPLIRDGGRIVNVCSQMGVMGSQIGVMGNLYKQALIDQFKHADVTSDDINTFVEEYKKWEH

SEQ ID NO: 132690 - protein, 70 aa, Heterodera glycines
MKAFGKLKDYPQGSRWFHERLKNAFARNANVQEEAKVRELIKRGEYVVKELEALYRLRKYRAMKNRYYND

SEQ ID NO: 132691 - protein, 66 aa, Heterodera glycines
IFVRVRVRGSKWAEMISASNSTAHIKQFYFETFFENFLFQKRGVQSTLLPSLGIIQKWSNRAVRAQ

SEQ ID NO: 132692 - protein, 43 aa, Heterodera glycines
MSIVGGHSLRAEVIQLYKTVQKKNCFCYCQIIMFVHLAVPLGQ

SEQ ID NO: 132693 - protein, 38 aa, Heterodera glycines
QGSEIDIRIEFYDPENPLFRKKIFFKRQILRVLTKASW

SEQ ID NO: 132694 - protein, 92 aa, Heterodera glycines
MKSQIFGNNLGFRFFFGAQTSTGHLGSEKIIVQFSKIILNIDIYCMEFSRGHHCGQLVSGTVPQIGHTNTVEEQLVEGRVEQVLLRRAFLKK

SEQ ID NO: 132695 - protein, 29 aa, Heterodera glycines
DYFSKHLVAWGIIGDCGINRDWAIIRAYT

SEQ ID NO: 132696 - protein, 64 aa, Heterodera glycines
MQCFFHVISASINERLDGLHSPLPIAFVKDEVNPIRRLIGHIARAWPSVALMEALVSMLKFNVQ

SEQ ID NO: 132697 - protein, 233 aa, Heterodera glycines
MINGGDCAKELAENDALLKDHSVSPLIHNGTVKERVTAIEVALALRDDVAELEKEGINCIQMDEPAFREGLPLDPAQHNEYLKITVQAFKISTGCVADSTQIYSHMCYSDFGDIFTHIAELDADVLCIECSRSDLSLLSCFDRFGYPLMVGPGIYDIHSPRVPSVDELKARLRAMLKYIPAGRLFANPDCGLKTRDWPETEAALRAMVGAFRRPQKKTRPCNILTNFMHHNFL

SEQ ID NO: 132698 - protein, 65 aa, Heterodera glycines
MRFFSTKTFRASTRPSVCPNFTSVPTTVPATIEPNQVGPLIDRLLSMFNVDYYAMALYTGDKYGQ

SEQ ID NO: 132699 - protein, 42 aa, Heterodera glycines
DYFQKISHEFSFLNFLQIFKYLDIFLAYQNFIEPGSFYSHSN

SEQ ID NO: 132700 - protein, 42 aa, Heterodera glycines
MNRRWMCTDVWLNILPFFDHAQLGLNLALLSFRFDVLVDKSF

SEQ ID NO: 132701 - protein, 262 aa, Heterodera glycines
TCNILIALECFFGLILDIGYYASPFVAVSGQKFIRYEHCFWALIIPCVCGDLAQFTMVTIAIDRLIAVAFPLWFKQRANNRYLAIVFSFIFGYGIYDLTLRFFDYTYTKEIMVSCATNEMAQSFLGKIFKINGLVLSGLLMSAYSLYVEEWNRKLIKALSFIIVLNLIGVFVRISVELIFQAFAIADVFIRTPYSIVSSFFTIIVYSADGPLLYIVSTEYRTRLNQQFPWLTKIFGPNERNIIHVTPSSMNLQQQQRRERSV

SEQ ID NO: 132702 - protein, 145 aa, Heterodera glycines
MATYLFIAAAAFGAGIYCWKAYLGPMLDQPKSDDEEKPKPEGGEEATTAGDKEEKKAGSKGDKHKKKDKKGEGAAAAPAADKKEEKRKDKHRSKEAGKSDDSKAGKKDKHGKKDKKGKKKDTADASTVDEALGEQSTAETSQAEE

SEQ ID NO: 132703 - protein, 69 aa, Heterodera glycines
  unsure (1)..(69): unsure at all Xaa locations
SDKTKQTVQSMGNCHALFPFDPTPFNFRNVFVLRAFFHFFRFFIIRXKVKRIVDIVIERVVTWLGNHFI

SEQ ID NO: 132704 - protein, 394 aa, Heterodera glycines
MTAAASENFGPLSAHYEEDDELLTPTKRLRELRLNSDEKCAMSDSIPRAVELFMEKKRARISKFLYTYNGNLQLNLPQLHAFACSTGGLIDDEFRERIWPILAKNLPQAKRCKDTQWDALRSEEYNDQTNHSSDELQQQQQTLFLSDSDFESALSTFTPSISGCDDQLMDAEDDAEGVDDQRMAPQNATNELTPLIVRILCENEDFRYYQGFHDVCLTFLLVLGADSALQVTRDICARGAFHNYLCCSLEESAMRELQDLYVLLFLHDQEVEKRLRSAELGTLFALSWPLTWFSHALQNYSQVVLFFDLFLSSHPLMPIYVSAALVSERREEVLGCEVDMPSLHQLLNHIPSTINCHRVADAARALMDRYPPTVICEFREEYLRICDRHKRLIA

SEQ ID NO: 132705 - protein, 25 aa, Heterodera glycines
MEGTETARIVNGRIALEGAAAVRPQ

SEQ ID NO: 132706 - protein, 457 aa, Heterodera glycines
MNLRDERAKLLCEIFNGIKVIKLYAWEIPMLKAVGSIRRLELHCMFKSGVIRSLVDMLNFTSPFLVAVGSFTTFILLDPAGGRSLTPQIAFVSLTLFNQIRSPMTIIGMLINLVVQTTVSNKRIREFLLEDELEKNTIEQRKTPNVTSPLIRVINADFCWDNNGKNGKSKEGHRQNVHRRTSSVWNQQKATERPTLTDIGMEIRREKLIAVVGKVGAGKSSLLAALLGEMKRTKGELKMLEGMELAIASVPQLPWIQNLSLRNNILFGQPFEGEWYERVLDACALRADLAMLPQGDATEIGEKGINLSGGQKARVSLVIGPGSILDGKSRVFVTHGLHFLHHVDLILLIQDGRIVERGTFDELSSLLGGKFAQFVAESKKNGEKIGNGTNGQRTAVNYDIEPGVSNNDPDAEPLSGRVTTATPSNATGELTLPNGNTPLPKRLIQKERVETGRVNEH

SEQ ID NO: 132707 - protein, 237 aa, Heterodera glycines
MVQQQRHDNKNNSAGGAILIECSSSQMPTEIGPRLIMSNNGTRNGAAENGTARAATTSQQQQVQQQRCSSTDSNGFPVKDPDAIKLFVGQIPRNLEERDLRHVFEAYGKIYEFSILKDKTTGVHKVGMLSKQYGEEDVRAMFQPFGHIEEITVLRAADGASKGCAFVKFGQAHEAQRAILTLHGSQTMRGASGALTVKLADTEKERQMRRMQQMATQIGMLNPLMGNQLGAATEFGW

SEQ ID NO: 132708 - protein, 36 aa, Heterodera glycines
MPPKPSGKGAKKAVKSTKAVRTGDKKRRKARKESYS

SEQ ID NO: 132709 - protein, 23 aa, Heterodera glycines
MSGRGKGGKGLGKGGANRHRIAS

SEQ ID NO: 132710 - protein, 91 aa, Heterodera glycines
VELGKSQQFVLKKIWNRNEDAEEGVLGLGELNAETLEGLDLVIESLTVIMMKPPTAFRLPAMNNDSLPELGALHKLCEESRATNQPKVLYD

SEQ ID NO: 132711 - protein, 33 aa, Heterodera glycines
PGLNPGLEEPGFFLDLDFCPGNPGPGFFQNVDL

SEQ ID NO: 132712 - protein, 165 aa, Heterodera glycines
MPNIFKILLIVLLAVISFRFSASTDGKKTDNDRNGNDSSAGIGTKIKRIVTAGLLFTSLATGGTGAIGRSNAQGGIAAGAMDTNATQFHQAPPPPPADTNATQFHQAPPPPPANFEKATPVEKISTHLHELSERMLLNKAPRVVPGGPNPLHHRVVPGGPNPLHH

SEQ ID NO: 132713 - protein, 145 aa, Heterodera glycines
DLNSAFYRKVQDERMRAAGVMPNDELLNPLLPYGGGGGDTLDRHIPTAPFGPPQTMFELKHSQQQLHHAQQQPYRFWESGATSADTMHSAGVGWHPPYYVQQQPQKQSYGSASANTEPTQAEPYQIASIQQEQVGDDELEGRNFT

SEQ ID NO: 132714 - protein, 36 aa, Heterodera glycines
MLLKFCPDLVSAYGCAAKAKPKTNMGLSELKPSEIC

SEQ ID NO: 132715 - protein, 186 aa, Heterodera glycines
MDEAKAEVEEIVDYLRDPRRYTSLGARLPKGVLLVGPPGTGKTLLARAIAGEADCPFFHAVGSEFDEILVGQGAKRVRELFRLAKENQPCVVFIDEIDSVGSKRTNSAIHPHANQTINQLLAEMDGFEQNQGVIVIGATNRVDNLDKALLRPGRFDVQVTVSRPDLPSRKDIFRLTKSKNGLKIVF

SEQ ID NO: 132716 - protein, 373 aa, Heterodera glycines
KKFKLYSIVMAEQQQQNLLGSMPPFGQVAQLVEPMLVNAAQQYFAQPFCTDGTHNIQFLNGCVSQLGQPLPPLCLIVVSIEHRASQQTPAGPLPMTNCVLRTGDGHRVEAAGWQAHAGALADLCVGSAYWFTNCVARARYQRLDCWYRVSVGGPNALVMPHVSTAPMLSAHPMPPVQTGAGVLEVTVPVQLGPPRSRDTDAGDIDINANEVVERGQTSRERLPQRRAAQRAGRPIEECFVIERTTAMRNAPRNTRGEICELRFLPLEDAERPDLLMEALIQHLLDRVLEGQPRPSLIGLQVHPPGFDRPYVIRLRPPEQNNAATLAAAIERLNEQSAAGIDLLAGRTITKVLAVWPLEAIRADPQSGGELSVY

SEQ ID NO: 132717 - protein, 95 aa, Heterodera glycines
GEELRENGTKRKHSKKVIIHEPAVLIEGVLFRARYLGSTQMSSDGRPSKSSRMAQAQEAVARVKAPDGELQPSTEIDLFISTEKIMVLNTDLQVI

SEQ ID NO: 132718 - protein, 216 aa, Heterodera glycines
IQKLAGKLFIQSFSAYYVSKLSPGFNSSPLSGNQLFRIIRDKSGNQLFRIIRDKIRTSGPITVAEYMQICATSQLGYYAAGDFVTSPELTQIFGELIGSWVVHIGSWVVHELEMTSWKDRWQLVELGPGSGELMADVLNVLRQFDVPSVLIPFLILLLKVLQNVEVYLVESSERLVSANEKLRRNLAKIYLDIRWYDSLDDVPQGVVAFFGPHFLF

SEQ ID NO: 132719 - protein, 81 aa, Heterodera glycines
MPELPNLKMASLQMPCCPPSTSASASSANTTTSTSSMEPGGGGGGGGTDAESEQSQQNNGLLAKKDQACSRTFQGQDHSMD

SEQ ID NO: 132720 - protein, 103 aa, Heterodera glycines
MRTRLEDIKEIVRTELPDQPNHLHLLEKQLDYYFANHSAEALEASGKLNLGIAERAAAAALAPSVSLSASGSSTNSNWSKREEEDRSRRHAGGGGMEWEENEE

SEQ ID NO: 132721 - protein, 232 aa, Heterodera glycines
MGDSCLISDSTRGHTISPPSYDFVAVLRRPINTTILIKRQLKNKRTLTKMLSKPRTETAIVLPERRMDTNFLSPKDRELIYLCWHNNIVTSRSDLFHKAMHYCIHASPKMNEIIACGHYCYRDLTKWPKLNRICQAIFKFFDKLINEYKMDEDKMYDACVHLGEMHANYAQYGLKQHFMDLFQQQLLAIIARLEMDNKVETCIAFTHLITFVVDIMIQAYSKKTSEIRATTK

SEQ ID NO: 132722 - protein, 106 aa, Heterodera glycines
MMAIDGSPPHTTTMASQNNAAALAFAGMNGNRSSPPYNNRLSQQQQQQYGIIMETVPEEVLLHTPDSTDADNGTFFTSAGIMMQLADEQQLQQQQQRTISRNSTHV

SEQ ID NO: 132723 - protein, 58 aa, Heterodera glycines
MVVFREDKTFEDELRTWMLWHKRQHSHKQRIIEKQMFKFKFPNIRVVKLIIFTIKFNN

SEQ ID NO: 132724 - protein, 77 aa, Heterodera glycines
MENERNGNGGAVLVTGAAGFIGSHTILELLDAGFDVVAVDNFSNSIPDAKNNALSLQRVSELSGGKSIRQVNGNLLI

SEQ ID NO: 132725 - protein, 230 aa, Heterodera glycines
PFSEESVAKPIDYYTNNIVGSLNLIKCCKKFGVKQFIFSSSATVYGQPEHLPLTETGRVGVGITNPYGQSKHMVEQILMDLKRAEQDWQISILRYFNPVGAHPSGRIGEDPQGIPNNLMPYIANVAIGKLPHLNIYGTKMPYIANVAIGKLPHLNIYGTKYDTPDGTGVRDYIHIVDLAKVHLGKHTPSAADGKELCEVYNLGTGKGHSVREMVAGFERAAGKTVGEKTL

SEQ ID NO: 132726 - protein, 54 aa, Heterodera glycines
MPAVDCLNGYRSYTDRCGEFFMGDPLDPNMETDFDFAGNLALFDKAYKKYAGSF

SEQ ID NO: 132727 - protein, 61 aa, Heterodera glycines; identical to SEQ ID NO: 127089

SEQ ID NO: 132728 - protein, 265 aa, Heterodera glycines
MADFEGRVKAYRFVAYTTVSFSIISLLSHNAKDIWSEVSQLKGLPLLVSGNRTARSAYGSCQECCSGGAQGQPGQPGQPGRPGNPGAPGSPGQPGQTPQTPCEQVHPPPCTPCPGGQPGNNGPPGPPGAPGSPGQPGTGGGQPQPGEPGPPGPNGQPGQPGQPGAPGQPGQPASPPQTEPPPPGPPGEAGAPGQPGQPGAPGQPGASGQPGPKGPPGGPGQPGNGGAPGQPGQPGQPGNPGERGICPKYCAVDGGVFFEDGTRRR

SEQ ID NO: 132729 - protein, 106 aa, Heterodera glycines
MAPRMPLTAVGGIPKSSKNASLFKAITYALINSDAIGLCLICKELSFGKHYVLLCTTRTLCAKSQAFVSSKCRLVDFVVRVDFVGPRWTMNFVVYILIIIGVSRWE

SEQ ID NO: 132730 - protein, 126 aa, Heterodera glycines
MSFNSPLLSFKENEHHLSASADNGGKREQLDNCLAELEILMNGAMEAIPMEEIDRNEHRLLSDLFEKKNELFSEKIAPKYLKNPCAREKHLQFLFNLHEIAMNKLMEGKDAFTKRLEAYESRHHFL

SEQ ID NO: 132731 - protein, 75 aa, Heterodera glycines
PGLKCPAQAKNFFYFREKIEIFPKKIPVDRARKTMFWKWSPFLWEKSLKNPKIQKPENRFLGLTRKILKIFEILK

SEQ ID NO: 132732 - protein, 442 aa, Heterodera glycines
NVAPAKLALSAHCSGIEQHSNCSCILLEEVFPNLPAMDPLRRVQLSSLGELIPISIAKQKGILLGHIRSWANLDEESASLLCHIPNFSPDIQNFIPPILMWVDRCAVAFQTLKNTGMKVVQQEICSKNPLHRFGELISEAFEEVKAKNIIGFSSMESEKFLFYGDSSVREFASKMETKTIIFKNTLEMAEAFKNTYFTTKVQEILILIGNDDLDQGLVLNDVEEAIRKIIVHANKFSIKTIFIPPPFHYSKRILHGKLINLLAKMLPNDGKIVLAMKRGKRSLAEVTRFGNLENRRTVNENGKLKPPGIHFTISFLTDVFWMTTPVKMSSESGSSGIRTPATSNSRAPSLLNVQIPPPIIPHPRQEQNAYRRFNRGRMINVEADGNCFYNSLSVLLTGTELKENARIIRRIITQFIDSEVELHDLGIPWHGWWEMLHPGQTI

SEQ ID NO: 132733 - protein, 140 aa, Heterodera glycines
MNRGRNNQNYLIHGISKYWQVVGALGLCVVMVCITYQLFLHVDEKHKSFKLMISGHFNDIKQINNDFTAWSKNFTSHLNERFEQQQARSRARFKQQLAKSRERFDEQHTNFVKIRLDFDKQFQKTMYRFAEVELETVLNK

SEQ ID NO: 132734 - protein, 25 aa, Heterodera glycines
MFPNFFWLVQPRLLDVLHGKGTRMN

SEQ ID NO: 132735 - protein, 54 aa, Heterodera glycines
GPSEDPRAGLATDPSQAVAFVARTWMNRAMSRKRRKPKPVPKLFSKWTGEDLDR

SEQ ID NO: 132736 - protein, 80 aa, Heterodera glycines
MDNAGKYNVTFDTGGKVTECHYENPEMPPWTVQYIAVILKNDPQQLIKPEISCIPQNRCMKMKEVDDLLEKQTNGMKKKL

SEQ ID NO: 132737 - protein, 296 aa, Heterodera glycines
MHHCSEYNRYAESVLPSKPTDFTLAQTIDKLKAMFCATKSIFTRRLECFQLTKSISQSPLDFASQVNAMCERSQMDLTKDEIKAMIFLTGLSDTDQELRERCLRLLEEAKKKTPPEAISYEKLTEEYRPFLSLRNTSNALAHSTHVANSVTIKPQKLRDHKQRKRDGSRSSSKTTSTTSNNQRSSQFQRKPQQPPSPCRFCNQMHWVSDCPKAPICSNCNRRGHHHSKCRLPSPSSKSNSQRNHATKVTHLIDSDGHFGIASRARDRLRVASVQLGPGDHCFMGPSVDALGPPIGR

SEQ ID NO: 132738 - protein, 32 aa, Heterodera glycines
RTSHILTVLSKLAETNKCWSVECQQTSDTTPT

SEQ ID NO: 132739 - protein, 46 aa, Heterodera glycines
LDSAEPYLQRFGGLDGESVLTWDRRKYLIVYRDIICCFIIVKISVQ

SEQ ID NO: 132740 - protein, 117 aa, Heterodera glycines
VSACCCCESEDSMSTKVLRSKPPKSKSGQWATNRSRRELIRVQTVRTTPTAREENNGQYKVNRNAKTAKIAAVPHTLKNCFSRSHFASLSASALSKVLTNELRQRCNSSRCASPPDE

SEQ ID NO: 132741 - protein, 42 aa, Heterodera glycines
EDKISKFFDSVRRFDKDGFRFAISRSTFGNWSRIFSAITCNH

SEQ ID NO: 132742 - protein, 70 aa, Heterodera glycines
MGYEKFIGGKKKQEQVISFLRQQIRNIDALITALRRQLEEKMAPPMETPTTRKTIPTGRPKMNVDHLAEF

SEQ ID NO: 132743 - protein, 103 aa, Heterodera glycines
MDIWSAGIVIFMIATNIELASELYRSAALNLEADITDDLLIKLHLINTSARPGAKEWWERYFVVIIQILSTWYQMPDIAFLLGISRVINTAIVQNKFLHFYRY

SEQ ID NO: 132744 - protein, 56 aa, Heterodera glycines
MMEEVKLENLEDEGDSRNGWLIKTRTKSFVVYAATQIEKEQWMSHIRRCVEELIDS

SEQ ID NO: 132745 - protein, 57 aa, Heterodera glycines
SVISARHHQAQSRNALKPRAPNNTTSFLMSDLEKRQQDEEDDPQQHTDALKEVAGTR

SEQ ID NO: 132746 - protein, 262 aa, Heterodera glycines
MTAETSSKSSFCCVAATTAAAEDTNLIKQSENKTEEEGEEDEEAEEGVGDASLPPPLCSSPSSSSFCALPKESELSERKRPAAIQELLEKKRARLAHNESGSKSERRSMTPTTDGGAETKLARGEGTNGGGWRRREREKKGGTTDGQCQCHRREKMTAREGTAATVIGQRNTVSSCGSSSAFGAYNGGIFCNSSSKSPFASSAIGELNLGQLLKRAFGESSRILADPQMFAAIQARQEMKMAPINWAINNNLSGDNVAKICR

SEQ ID NO: 132747 - protein, 33 aa, Heterodera glycines
MHQILQESDLKRTKFYFQVNKPSDAFTIKKGDE

SEQ ID NO: 132748 - protein, 105 aa, Heterodera glycines
MGLYFGLTLLTVFELIIFFLFHKKSTATSSGSGSQPRQNARTVPAVYSIPRPKTVANAPLSVAKDRRQPIIIKRGKTNNFAVSRGIIKQLGNIYKVNAELSLRAL

SEQ ID NO: 132749 - protein, 112 aa, Heterodera glycines
MNDRMPFQYPRGLNREMFVREKNRQSRMLAERVRRLNNDAFQPYLWAEVFKMKKPIKVSSILKFKNDLIELVNRNWQFDWGRHNEDVTDITFFEAVKYRIPPSPIPVFLAFV

SEQ ID NO: 132750 - protein, 178 aa, Heterodera glycines
MTFCLSLFFLSAFFGAPAISSQSATFSATIAWRAVTITRRPRAMLASPAAATTVAIHSTPLLVRMGAKIALRTGRADARRIQQPISSRSSTKFTMTVGYDNSSLSHLESAAKKRGEFGKIDVDKSGGISSKEAIAHLVKTKNGTSADDLAKNMSWFAHMDSNGNNRIEPGEFDRSLTE

SEQ ID NO: 132751 - protein, 149 aa, Heterodera glycines
NAFNRPQNCWDVTTCQIGLELIDTGFLTVRCKENGNRSAVFAKYPVQNGIHSSATFFYYELSILQMKQKWLIAFFECFRIIPRMFNLVEKEKIAFTLDSPSSKVTKVSALRQGPSFIKVMAIFGLGMNGCQENQFSRLVIPSVVGSIWY

SEQ ID NO: 132752 - protein, 54 aa, Heterodera glycines
ELLVLFDSSMCLLLICKISKILVKFQKSYGQKELKNPVFRTFFALIFLCINKIF

SEQ ID NO: 132753 - protein, 225 aa, Heterodera glycines
MVAQSSDRPMEEIGKERGEAICDKQQMADHGGEAIDSKTQQQTEKGARETTTSTDRSDLAGKGRTNGGAQKDGRSGGGVMGKWNCNNRSREGIFNKMATNRMPSTSHGSKSTPTTPSKEICETNICKKHREEIASETIDKRRVTDGEGQNEEDGAKRNAIGKCQNGKKKAQKHRKVSALSSDILTWTNSQQSVAYPTETIAQMARHFFTRRDGFKGTKISAILVQ

SEQ ID NO: 132754 - protein, 45 aa, Heterodera glycines
LANIYKESRNLIKCIYNIQNITFLNLYKVPILSLTLLFFPFISIG

SEQ ID NO: 132755 - protein, 22 aa, Heterodera glycines
LANIYKESRNLIKCIYNIQNIT

SEQ ID NO: 132756 - protein, 87 aa, Heterodera glycines
MKALAARAVDKINRQTNNAFLFIPVKVLSAKAIPVAGVRYELRILVGKSKCLKKVFEVSVFQQSWKNVEDITFVPEEHMGNSTKNCE

SEQ ID NO: 132757 - protein, 25 aa, Heterodera glycines
MVVVIWEYTAWALRNLLDFAEFINF

SEQ ID NO: 132758 - protein, 270 aa, Heterodera glycines
MPTRILTENGTQFVLASKVSAALEAGRVPTSALDRFMAREAIHWRFIPQLSPWQGGVYERLVALVKSCFKRELGRAMLSWEELVTYTAEVEAVLNQRPLCHVSEEPDGILPLRPINFLLPRAKLGIVFTAETDHDEFRISSTNQRDALIQRWHSVSSSIDHFWNRWQKQYLLMLRQRLQWKFKKQRNQIAREPTEGEVVLISEEKLPRNCWPMGRIVELQRSHGEIRNAKLRLATGKVLSRPLNRLYPLEVASSAEQNESHQQLTDPPLE

SEQ ID NO: 132759 - protein, 505 aa, Heterodera glycines
MSNSNQHSPILRSAYQFSSKTCLSEMKSETFSPKSPTHRFSCPFNLRGFESPRKKTSQNAMPCPRVFSGAIHATLDLISICNATPTLVQHLCYVRCSDGTEFTALCHKTPEVLNVSLSFNRAEVDINCTIECSGGRNPFVIGGHLRYVPKHFQAPNEGSSFISKAKPSNSCLIWCPDWNFDFSDVFWYFFGLQNALRTIRIITLALFIVYILLRCNPALRSWRAINRIVLLFLALWPVTCHSAAGGLSRPLSIQNAPKRQFEDHCPIVEHSSLQRPKIAHNYPIKAVPKSLNPPFVQILEFAFHFRNQSQFSSFPMATLLSFLANSMNIDVERFGLAVTTSLSRWNEAQAIVQGLHDRGYELKTRHLHPFERNVRLHGTELSRIAANRLGAYNGQARGPTVSEFYRSRHGIVLRCPSAPCLMEPGGNGHRDFFPIELIRVVSPDRISAPRRLATHPLPGPRPSHSDCSTDFPIPPCPVIFSLTSAPTTCQLESREWSADFHVDKQ

SEQ ID NO: 132760 - protein, 328 aa, Heterodera glycines
PKRCKPRPVPFALRSEVEKVINQWEKEGVLEPVATSEWATPLVIVPKPGNKIRLCCDYKVTVNPCLDIHQYPLPRPEELFSALNNGNKFSKLDLKEAYLQLPLDDQAKECLTICTHKGLYRFSRMPYGVASAPAIFQQVMEEILCGIDGVAVYLDDIVVTAANDAEHLKRLDAVLQRLKKAGLRVKKEKCSFMHESIVYLGHIIDRQGIRTSPEKVEAIQKMPAPENLKELQSFLGMVGYYGKFIPSLATVSETLNELRRTEKKWHWGKEQQKAFGEIKEMLASNDILVHFDPEKPHFLATDASDYGIGEVLFHKDAKTGKVGVIAYA

SEQ ID NO: 132761 - protein, 84 aa, Heterodera glycines
MSDDRKEAEEKMAKAIFISGDGWLAVFDLLAPSQLGLGIALISHRFDFYVDEHFKTRKWALGIIRIGSKIGENGTKEMEIANYH

SEQ ID NO: 132762 - protein, 21 aa, Heterodera glycines
MALRLNLFYDILCPRSWVFYQ

SEQ ID NO: 132763 - protein, 91 aa, Heterodera glycines
MPMPQLRVPKAKGTVPTPGEGMLCLEKRTERTERGERGFASVFPMEEFLAAFSFLSGANNCPLFQHSMKCIFLLNSFFLAIFCDSNQNIYG

SEQ ID NO: 132764 - protein, 106 aa, Heterodera glycines
MTRIIRHFRRRDQFELPTEYDGENELEKGGENGNDYYNYYQQRMQMDNEFIASLLNEDNANGNGGNANFLYRPQDETFHQQQQQQYNISNNGIDGVEFVLPQNGGE

SEQ ID NO: 132765 - protein, 44 aa, Heterodera glycines
LIKMPMLLHQREKEREREIEIRERIKKEEEKKKGGWERKGMRRL

SEQ ID NO: 132766 - protein, 91 aa, Heterodera glycines
MQARREEAEKQAANMGMEGGQMPPAMMMMMMSAATAAGGEGAAANSFTFAAPPSPAVPLDPHLERMFIQQPKHVAGEEQRPQHEDEENYDI

SEQ ID NO: 132767 - protein, 255 aa, Heterodera glycines
LSLKLSAYSKTEVSTVPYSDGRHQSGYTVSTVPSEWGTGRDRHSRVVEVADTFVDRHSRVVEVADTFVDRQLAEAAPLAHRYGGRITLEEALDAIFQSTKPLEEKKSYSRTSKKSYSRTSRLSEQQNQLRNMDGPGIFSPDLALMERLAEQPHLAENLLKNEPLLVRCAFCACVRPLRDARSHFRWCRHCYTYYCSRQCRLSDWHRHRDRCSFARINSLCKEVIMKVRNKKQLVHILCKEVIMKVRNKKQLVHIT

SEQ ID NO: 132768 - protein, 31 aa, Heterodera glycines
MKQLNREIIRVPKQMIRMQKALGKVMMNWKY

SEQ ID NO: 132769 - protein, 86 aa, Heterodera glycines; identical to SEQ ID NO: 130750

SEQ ID NO: 132770 - protein, 37 aa, Heterodera glycines
LLPRNLKSIIPLDETLYFTNLSYFSSLAKSAFLCCVN

SEQ ID NO: 132771 - protein, 179 aa, Heterodera glycines
MALLSDRFDVLVDTHFDGKTTELTIWRSVIIRKDKGPKAKIYADSKPVQFPFPDRPLPNKIRFKNLRIGYIDHSVLTFLRSNKQIWDRSGTNLELSIWPNKTEDDQPIWDVFVREIWPIFATNIRHLVFCNTDALDNLRRRISPTFLTDLDQLNSINSGNLFPDGIADDGPNGNAAGPL

SEQ ID NO: 132772 - protein, 124 aa, Heterodera glycines
MANSEGNDRFSHGQALHAFANIRRKMEQAERAVKRSLATMEVPLLMDKLFGETFFEVGFNGFGEKQSIENVRNELETIVQLNFTQNMMDKAKETLKLINGTRAEAESEATAALETIQMIGEEAQ

SEQ ID NO: 132773 - protein, 63 aa, Heterodera glycines
MNTEIYLLSNLCQFPIKPINWPPAPNCDQNGQTQTNGDEHLLKCEQRMESANAQQKGQRTFKD

SEQ ID NO: 132774 - protein, 201 aa, Heterodera glycines
MYHIKHDLTLINPDKSGQRMVLLGQFEKVFCQNSWEVKALEQDFVEDGDEPSALEVPVEPICAGGDGTSSLTTTNGRQSTNGVDAMIGAGADHDKDNFLEFQLRKTAVGGFAIREANHCTLMMPPETIRHHSDGGDGGTSTAPQTTEEPKDEQTQQNEDKHAEPKPSSCSLLNPSPTIASVELDALKVQLEKVGREMRTLF

SEQ ID NO: 132775 - protein, 108 aa, Heterodera glycines
MEQNEPQQQQGQEQQQQGQQQGQEPQGQGQGQEPQGQQQGQRPEMGKTPSRVRTYIDHLERQLETVRAAHAQEMATVRAAHAQVVDERDFLRRIIENFSNHAVAPTGQ

SEQ ID NO: 132776 - protein, 75 aa, Heterodera glycines
MHNDIHLGNGGGNHWWQNAPGHGVPFGGAVANNGGQGGYGQNIVPGLNGGQGGYGQNIVPAQGDLLKTIQFIIFI

SEQ ID NO: 132777 - protein, 98 aa, Heterodera glycines
KNRFFCFRGSTLNRCAQIYGETESFGNSFPIACTLILRWIFAPHNCLSTPNGHLKKSIFLFSGQSPRTDAPRFMGRPNPSGIASIYLYFIFTLDFCSP

SEQ ID NO: 132778 - protein, 45 aa, Heterodera glycines; identical to SEQ ID NO: 124527

SEQ ID NO: 132779 - protein, 95 aa, Heterodera glycines; identical to SEQ ID NO: 125597

SEQ ID NO: 132780 - protein, 68 aa, Heterodera glycines
MDNRQFGATDQFEKFLATGRQRLQRECAELKRQKLVSARFERKRKRDNEMALLADEVDQLKFELVIKG

SEQ ID NO: 132781 - protein, 204 aa, Heterodera glycines
NAIQLAWLPPHPETSPVVAYRLRYGPAAGTYRPQEVILQGDELSCADYESRILTGEHLCTSATGLKPATMYRFAVQAQSSSGNWGPFTSDSFGTTEPELKAVEGGQLRLIGAGHDFLRVRWTAPPVIVAHIEQYEVDKAEDEIRNCTYLFKVAHPTDRTTCPSATTARSAGQSDGLPIQRVGAGDSVQRNGTRTGTAGEEPVED

SEQ ID NO: 132782 - protein, 301 aa, Heterodera glycines
LKEKLVTEFTHLRNNSLEPLATFLDYITYSYMIDNYSYMIDNIILLITGTLHQRPINELISKCHPLGSFEQMEAIHIASNPAELYNAVLVDTPLAPYPYFVDCISEQDLDELNVEIIRNTLYKAYIEDFYNLCKKMGGKTAEVMCEILAFEADRRAIIITINSFEADRRAIIITINSFDTELNKEDRANLYPRCGKLFPEGLAGLAKADDYEQVKQVCEYYSDYKQLFENSGLNPGEKTLEDKFFEHEVKLNVQAYLHQFHFGVFYAFIKLKEQEMRNIIWIAECIAQRHRTKIDNYIPIL

SEQ ID NO: 132783 - protein, 325 aa, Heterodera glycines
KSMRGSSKTNGTTSKPNMKQSNITAPPNATGENAEQSTLENANKTATNAEQNKIVAPNKTVTNAEQSNIVTPNKTATNVEQSNIVAPNKTATNVEQNNIVAPNKTQTNAEQNNIVAPNKTATNVEQNNIVAPNKTQTNAEQNNIVAPNKTATNVEQNNIVAPNKTQTNAEQNNIVAPNKTATNAEQNNIVAPNKTATNAEQSNIVAPKKTATNVEQSNIVAPKKTATNAEQSNIVAPNKTATNVEQSNIVAPNKTATNAEQSNIVAPNKTATNAEQNNIVAPNKTETNAEQNNIVAPNKTETNAEQNNVVASPNPPPNFVILITS

SEQ ID NO: 132784 - protein, 44 aa, Heterodera glycines
MPIRPRRYDEAGLYFKELVAGRFANDRFANDRFDNTFSTMPFRQ

SEQ ID NO: 132785 - protein, 441 aa, Heterodera glycines
MSKFFRGAISSSESSESEESADEQIVQTRTIARDFAYPSDSEDEGPKRIVRTQKDKTYAELKEQIRSSRNARNIKDIAKLQTVFEAQLKLWEKAKTFIVRENLSIPRFYIRYLAELEDFINEQWEDKEGRKVWTIFNQFNREIEQIMSKANSKALASLRQKLKKYNKDFEEDLGTYRTEPDPMGYSSGAAEDDEDEEIPTAPAIATNDVNLKKRFMGAESESEGEESEWGTESDESSSASDLEPLEGKEMEELRRYFLKKDKTDRGKTKEKKEKAAQREKIALEKKKLEEADGQNEESWQKITYKHDVAKPLFDGQAEVTGDLVVKKLLELGANRGRRATNRKVYVRYLQELYKAADEHNLGVGLLAKVLTAIIAALFELNTRISDAMEFNSWMKSVFNCHFVSFAFLRTVETVDGLFSLLSEHPNVIISISTNEDEENIL

SEQ ID NO: 132786 - protein, 57 aa, Heterodera glycines
MSTESVQLGQQQQEREQSPDLAGLNSDSGSEKRRLRVAKRGVPQFSNGIEEGETETD

SEQ ID NO: 132787 - protein, 72 aa, Heterodera glycines
MPKGGGTFMTAFDLNLHMGTHTGFTYDCKDCGKCFPCRKTLAEHNRSHRMILSGGGGGSASPELSKKANHSF

SEQ ID NO: 132788 - protein, 213 aa, Heterodera glycines
MKLDNLLEQMMMMQQQQQHHQQQNQQGENEHGEGNVQQQKEQSQTQQKQQQKHRQQQQQQQWEEMPQNNVGTATNGNDVQSPNGDHQSFAELSASTDNAKRQKTNAFLAISNGTRNAAQCKDPFQSQNHQQMLTVGGFGENNGRESLPQHLESFSAFLRANLSLLSAFSPPLLPPQQNSVLPPILPSPIPQQIVPLSKEIASQGLLAVGGCRP

SEQ ID NO: 132789 - protein, 65 aa, Heterodera glycines
KAKCRGDRLFSTSSLGIRSKRTARGCSADGCCPSTETQSATRTAKSVRNNGRRRTPLDKAEPKKE

SEQ ID NO: 132790 - protein, 98 aa, Heterodera glycines
LLSKHKLELERAKRKFGDNQRSLVDAKHSLDVIRQKHQATVDELGKIDLRLGKLHDELAEKHKNDQKKCFAELANEIVTKNKEDLKQLEAKEKAEAED

SEQ ID NO: 132791 - protein, 42 aa, Heterodera glycines; identical to SEQ ID NO: 125015

SEQ ID NO: 132792 - protein, 217 aa, Heterodera glycines
MGTNVRGEKRSKEKAKGKANGEGKRRKASPEGEKCRINRQRKRQSDTKNTRIATTFGFCGRPKAIGRRSFGQFGREDSEQNIPGIKRIDFADSSSTSDSEECPNSIPSTSSDCRNRSISNEPKNPTKTKSNSLKEKHNRNKREKELEEGELISEEEMEKGEEKGGEDGSEPPPAAERATFEDDTGSQSDDDEEDGRLARRQKTEPQFVISRNKQLVF

SEQ ID NO: 132793 - protein, 146 aa, Heterodera glycines
MSNSSNEQQQLGNGQSQNGSNRSSLNNAQANSSNSISPEVEDEVQGQPPEHNRILVDHNTLRTEHERILVDHNTLRTEHERILQRQLDDFHYWCLLFQIMTTIEENLLDGPPAGYCSSSEEDEEEFAVSRGAMPCSSAVRGDKSNR

SEQ ID NO: 132794 - protein, 134 aa, Heterodera glycines
MAELKSRLENATDCTSIDAPSTICPSPPLRQVKHRHHTSALGRAVSLWTRWNKRRRKWLVDGPDSAMNSSIDSLLTPCTGSIPLFMGPSFPRFLRRLSHAENAHFRPNPSQQDDHRDDNDDKCQFCETIFAFVR

SEQ ID NO: 132795 - protein, 106 aa, Heterodera glycines
MSRKVFKFMLEKNDGWLKKKLDEYLEENDYEFIDELINPPKDMMSNDHWTLRGRTREKSVLYQIVSEPTAGLDVAHKDPQAFCRLDNNVISLVENRPFFKFQQTNC

SEQ ID NO: 132796 - protein, 317 aa, Heterodera glycines
MDISRLRRICAIYASDGINGYPFSLAVIKKALESKLNVCSLLFLHLRRDLPDTLKNNPKFVALECFGFDSLEAIRKRLAKEDISRESLVFIDSLPVLIEQFSLPSTSWFLTQIAELSACVLALVHSSESEDDQNSEDWRRIESIASTVFELRARDKHTLCRTKTKKRNGTAEEKAMAIEKCTIKNRHLEVTRLFYFQLEQFSIEEDYSITFSPFDYSSDRTDDKFVENSISAGGTVGNGTATHLSTLPFDLGLNLSEEERKAKARVPLPYLDAQTEKGLVGLNISFNKKVRVGGRILYVPDKEDDFDESDPDDDLTI

SEQ ID NO: 132797 - protein, 181 aa, Heterodera glycines
MFKSARGKGLRRVNPTTLLYSTKRDGNERWEEEVAIWEGIGDENENANGGEMLLTPIFAMPPNQSDGAAQMDEHLHQLVRICTIVHRQAYAVTQKLGRAVDAVNATDGESPRKACELLRIYEVEMENAIDSEIGICKEIERILRIRARGEVRGLRIKGETVAKVNAITNEIANKTMKIIEK

SEQ ID NO: 132798 - protein, 45 aa, Heterodera glycines
  unsure (1)..(45): unsure at all Xaa locations
YFVKLIIKIGLESXKEAFRQFERFYTCENERRDRRRIGIKHRKTI

SEQ ID NO: 132799 - protein, 60 aa, Heterodera glycines
MEKERSERLINEMCVKMGGEFTDNQNENDLVTKKAKERMEKGGEFNKLEKQFKLKEHFKI

SEQ ID NO: 132800 - protein, 186 aa, Heterodera glycines
NSVSNSSESASSDQHQQKPSLVLHSSTAANRPPMFPHSLLQGFTASASSSSSSAASGGGAVPNGAGGGAVSGASPATPSSLLQTDSKPSPTEMLLSTSATVPRTLMIASATAAQLAVAAQMSAMTPNQQQGSNREPKPFKCGHCPKAFANNSYLSQHMRIHLGIRAFGPCQFCGKKVAQTNFEEDK

SEQ ID NO: 132801 - protein, 310 aa, Heterodera glycines
TRQKFDLPSLSVDQLVSEQNQQIIGPDFELHQNVSVTVRGGKSNNGDQYLISSFQEANLSQQILQNLAQIRFIRPTVVQSRIIPLIMRTNEDLLCLASTGTGKTGAFLIPLLNILHMFCSIKELGNLLFPVNRHFPKAIIVAHTKELVLQIDKMARILADGTGVGIVLMMGELSYASINSRINRDGCDVLVATPGRLKEFLLKNRIELDCLQFLVIDEMDKFFSDFEFLQLFHELNEKKRQCKSTVWPFRTFLFSATSDSLDGVVPFLRPDFFHVIAGPVNQSVAHVRQRIISTNIFMRIHQLELILQRE

SEQ ID NO: 132802 - protein, 88 aa, Heterodera glycines
MVNGCSILKQKKTTTGYCIRILTQDDWTGLDDNASIDFVDKNGTIKTIEVRQLRVKKENIDPKQWLQRNPNDMITFKRNGPYGIQTDR

SEQ ID NO: 132803 - protein, 26 aa, Heterodera glycines
MNIINEEMNIVNLFNLYVHDNDENLS

SEQ ID NO: 132804 - protein, 119 aa, Heterodera glycines
MSTFSDFIALSQRCDELTARIINREVSDGVIAPDFDDAALSMLAKKKNGNYVVLKVACVAVKYAQSNAVCFAHRGQVNDQSNKSNLKGREKNGIGKVPLVKMPENAFIIELAVDQFHVQ

SEQ ID NO: 132805 - protein, 222 aa, Heterodera glycines
MSSESLHIKPQASGQTIYQNPNLQLIGQPNYQNPNPQLIGQTNYQNPNPQLIGQTNYQNPNPQLIGQTNYQNPNPQLIAQTNYQIPINPQPIGQTKLTHNLPTEVLSLDMLSLGDTSQNQAQQMAIAPANLANSTETVRPNDKTTTSKPRKKKNSHDPFADNAGNQMPTQYPKVPISKWTNHRLPVHPKELIAKGQFDVKKKFPAETNGLDKIAEFMDDTGE

SEQ ID NO: 132806 - protein, 205 aa, Heterodera glycines
MSRQNFLLYHQGIALLSDKLAPIHVKFSSETPWTLGMKAPGLDPGLEEPGFFLDLDFPGFLSRKSRNCSPMELLPFFLFCASFFCVPLSQVKAASKNGPIFDASPPRDRPNQKPSLTDLSSIGQNKKGAANAWHLPERAAETASAEAANVTSSSSTQADSSHSSRRQTVDITKSRRTRRPSIAENEPITKQLNDLAIQERIHWVS

SEQ ID NO: 132807 - protein, 113 aa, Heterodera glycines
MTWTWIQEKSRPGSRSRSSSINMYYNVFIFTRFSFYEFLSEKINKINNKIDEQQKQLEGMTNDEEDKEEFDNEEEEELEENEGRQFWWPMMREKRGRRRRRRKNFTMRRRRNW

SEQ ID NO: 132808 - protein, 97 aa, Heterodera glycines
EEYVKLCFELSNCAAQSLGADWLKSSDKQFLRLLASLSSGRLRILLDKPEEIDMAQLIACLQLQEYFCGCVEDEQIWMSDDEQVFLSFMKRVDKTVE

SEQ ID NO: 132809 - protein, 27 aa, Heterodera glycines
TKAPEQGGQVAGQAKSAARAKPSRLFG

SEQ ID NO: 132810 - protein, 22 aa, Heterodera glycines
MNISLCILQNQQSFELFCFFVF

SEQ ID NO: 132811 - protein, 52 aa, Heterodera glycines
MLPNDHKKENKLRKLKQYYEIKESNPKMSDEIIAKKLGIGSATLKKWKKEFV

SEQ ID NO: 132812 - protein, 127 aa, Heterodera glycines
MASSGASPLSYSNPDESLTPSSTNASTPTATNGATTIVGGQPHNGTSSNMGNGTAMLQGNFEVIGSAGGIAHFASSAGGESNCSSSSSSVVVHKGKKSKKDKSVRKGREGIHGKGIPRGQNRNAISE

SEQ ID NO: 132813 - protein, 16 aa, Heterodera glycines
EAIPEGFGLPINLGAS

SEQ ID NO: 132814 - protein, 45 aa, Heterodera glycines
MSITQNKVHIHDQRPKLRITFFILIVEKCKNNDKILPIFLHFLII

SEQ ID NO: 132815 - protein, 482 aa, Heterodera glycines
GSHQSRYPGRVGDFGERLEEMSRNDSEKDKMQQFWLGFSDVFALNEFELTQTDLFPHEIKTENATPIKTAPSPIPFGVRTKVTEMINDYLKREIIRPSNSPWASPIVLVAKKDGSRFCVDYRKPNSVTIKDSYPIPNIDQILMYLGNKHYFTVLDLMSGYWQVRVKEEDIEKTAFTVPGGLYEFLVLPFGLCNAPATFHRFMNKILGEFVNDFVFVYLDDILIASKTFEDHMVHLRKVFEKLNENGMKVKAEKCGFALDQTPYLGHILTREGLAKDPEKYKPIKEFPMPKTIKELQRFLGMVNWHRKFIMNFAKIAAPLTKMLKKQDAKVLIWSDEAKKSFESLKSLIVQEVVLKYPDFNLEFHIFSDASKDGLGAVLCQRDQSGKMRPICYASRRCKQTESNYGPTVLECLGIKFAVQKFKHFIAWLPTIVYTDHKALPQMFKSKNSVGNSKVDRWIMELALATKSFCAKRFQHTQSNAFS

SEQ ID NO: 132816 - protein, 82 aa, Heterodera glycines
MPLHVPASFPRPPLQTFFPRPPPPLPCPQPFSTSNQQFSNNAGAAELIEAYAGMNDDRTNSTTEFWLTEMGAVLNTEHPQDA

SEQ ID NO: 132817 - protein, 45 aa, Heterodera glycines
MPRKDRSSSWSAPHFPSAQLQTADGVPTLQKAAEGTDPARTPMPR

SEQ ID NO: 132818 - protein, 122 aa, Heterodera glycines
MSQYSIAQVCNHGASIILDPLSNIIRFVHCALGVAILIGVAALIRQCQRSRFIFHGNLMLLIANVLCLYIVYTIALIGMAGRSLALYLFWPVAQFVQQPYNNSSGGNISNSSDGTEMAADKK

SEQ ID NO: 132819 - protein, 48 aa, Heterodera glycines
FEYPKRTLEKIDFFVFGAVPPNRCAQIYGETESFGNSFPIACTLILRW

SEQ ID NO: 132820 - protein, 90 aa, Heterodera glycines
LYESNKLIKACVSQPVLPNLNFVGSKVKSEFCSIKMKNDRLDCNTGNVFVFIIRYAEGTTDHELIWSGKAVHFFHADFAGTFHQCPVQYL

SEQ ID NO: 132821 - protein, 644 aa, Heterodera glycines
WCSENRNILLQGGNAVDAALSVGFCVGALNPHSAGLGGGFLMTYYQRFYGKCTTIDFYGKCTTIDARETAPARTAKDTFGNGPKEDNSGYKSVATPGLLHGFWTSSGYKSVATPGLLHGFWTSFKRFGSGKIAWMDLLMPTVHLLTDGFPVSKLMEKTLLLTDGFPVSKLMEKTLGLKALRKQTFPKNHFINPATSDLYKEGEQMRDGILAETLKRLALSHEPLQLFYSANGEIARIIAEEFANNGGFITRKDLHTYRTVVDEQPLLVTSAAEPKLVFCGAKPSSSFAITQLILAVMLKFYPPGSNASIPWHSADYYHRLLKFYPPGSNASIPWHSADYYHRLIESQKRAFAIRHKLGDVKFDKDVKFDKISEEIALNMSKSEMVDEIASEIQRRARPNGHFAESTKEANSGGTTQVIVVDADGNAVSITNSGGTTQVIVVDADGNAVSITSSINKAFGSLIRFGSLIRSPQLGIIWNDHMDDFSQPNRTNYYGLAPSKTNFIEPGKRPMSSMSPLIVYHKENKKKLAIGASGGTMIPTALSQVLVQLLAFNHSVKEAIDTPRVHNQFTPFVTDFEEEFPQSILQSLRARGHSILQSLRARGHNMTTNSRDFSASVQAVLTDDEGNLVANNDFRKRVHSCPVGY

SEQ ID NO: 132822 - protein, 67 aa, Heterodera glycines
MARNGTNTNNNNNNSHHNNNNQRTANILMRKKTSQLSVCIKTGSMAQIRRETWTRRSGRRLAYDPYA

SEQ ID NO: 132823 - protein, 188 aa, Heterodera glycines
MLFLLFIFVFLIINNSTDKTLSVNLCKKCRPTFAEIFGEEWQNEIIIGGDENENETDQNANFHQNDQNELTDQTDQLDVQQKNEIIHKFHAIREGIKKKGKYSAKFWVKTEQKIAKKLGINRPKIYEWKKEFGIYYYKKKKQEFIERIEEIKRMSKYGKQKQFAKELGINRATLSKWKKEFGIEIGKK

SEQ ID NO: 132824 - protein, 77 aa, Heterodera glycines
MRGTSSRGTSQNAKENGSRRRRSMPFIHSLNVIGKVVVVAAFTENCTRGGFRSSLDLIFFLNGGNGKLERKSLKTFK

SEQ ID NO: 132825 - protein, 216 aa, Heterodera glycines
MILFNKKIGVGFSESEITSKVNEYRKLLFTEFENGRLDMDTELDLRNTHSRAKVAKDNRDKWRSALRIDAAFVDGSSLEKLKKASESVVEMAKNVDKKALDKEMEKSLMEKLMEKIKKEKEQKKERKKMKRAMRKESSSDSSDSTSSSDTSSSSSESDDSSSTSSSSESSADEKAKRKRKADEKEKRKRKSNRRRSEETKVKREPIESPVGKRSRK

SEQ ID NO: 132826 - protein, 115 aa, Heterodera glycines
MDPGPAELCLFVSHENQKINHNRNNRRSKVYFYNKISIFLKFGFQQIGNPWHKQLNGQGQRSSIFLLNDVNEGHGQEDAELLNEDSADSRYLGEYFIDPLKLPRDIAYSLNELIG

SEQ ID NO: 132827 - protein, 106 aa, Heterodera glycines
MTPSAVLGFQGFGIGTALLNEAQKYAQRQWHVAEMQLEVHGVRRPIGQGEIGPMTAQMNFYAKRSYRRTGKVRWFNKPSDANFVVVPSHLAYLELMVKHLSEFGDY

SEQ ID NO: 132828 - protein, 46 aa, Heterodera glycines; identical to SEQ ID NO: 131652

SEQ ID NO: 132829 - protein, 90 aa, Heterodera glycines
MTPSAVLGFQGFGIGTALLNEAQKYAQRQWHVAEMQLEVHGVRRPIGQGEIGPMTAQMNFYAKRSYRRTGKRKMFSLNFLHFLFYFSQLF

SEQ ID NO: 132830 - protein, 76 aa, Heterodera glycines
PINANASSSIEQQNKKEIDQMGSKLPVKSGLNKIEWVLSSQKKRSVNLDNTEIYNELSTSNESIERLNLKECIKKR

SEQ ID NO: 132831 - protein, 139 aa, Heterodera glycines
FFQKCLQSIELEKRLLESGLRFPGKNLQKIIKFKNEKILEGAMLEKSPHSSGVKLGLGDFIFYSVLVGKASSFGDWNVTIACYVSVLVGLAFTLMLLALYRKALPALPISIFTGIIFFFATHWLITPFLAQVSVRQILL

SEQ ID NO: 132832 - protein, 65 aa, Heterodera glycines
MTWTWIQEKSRPGSSTECPPPIVTDQAVISQVRSAHDKVGLAFLFLAILTNIGPIRKNDFMQFEM

SEQ ID NO: 132833 - protein, 20 aa, Heterodera glycines
EEAKVRELIKRGEYVVKELE

SEQ ID NO: 132834 - protein, 90 aa, Heterodera glycines
MRPVHGQRELMHHECMQRNPTLHRRDQFKKGGSRPAGGGAAQQAVTPPPAAGTALGGLGKYFTALPQGVKVKHTKTHAQTTNDNTQLHPF

SEQ ID NO: 132835 - protein, 77 aa, Heterodera glycines
MSTIFPPLPFVAIFLFALFANSANAWKKEANSVESADGHTKAFMDLIRFILPMEEPEGSEEREGAKAETEEGAEEAG

SEQ ID NO: 132836 - protein, 89 aa, Heterodera glycines
MTVRLVNAVHLLLRLIKVDQLIKAVAHFAVDQLVTMATVKQIPTRFPAECVEHCRALFLIISCASINAENHYLEAIGNLTFKYYHTIYN

SEQ ID NO: 132837 - protein, 128 aa, Heterodera glycines
MPHDWDAIGWSPSEDEASDDGGTEGQEAAAKSAVVQPKTTSGRTKKEAPKEGSVTAAKSAVVQPKTTSGRTKKEAPKEGSVTAAKSVVVQQKATSGRTKKEAPKNASVPAAKSAVVQPKPTMGGTKKE

SEQ ID NO: 132838 - protein, 236 aa, Heterodera glycines
MNNKYFFYLLHGTGEPSCSHAEYFIHSFIREKNAFTVLASGTIGYRINNDDTTVSVSSCGSSSTADVIIFHENFDTKSFLSLVIMKPNMNLNKMSQKHGFSDFWVQDSELANIGFIFMPKTAAGPGGLPAYIPTPIAQLEKEQKERERRREERRARKEDGQPKKEKEHGAEKQSDDAKAARQREQMEQQNDRGRRESVGEGESVLGGGAGSSRETVKEREGGQRNEIKKNKLIIFY

SEQ ID NO: 132839 - protein, 40 aa, Heterodera glycines
ELLVLFDRSMCLLLICKISKILVKFQKSYGQKELKNPVIR

SEQ ID NO: 132840 - protein, 207 aa, Heterodera glycines
MPVKLESLKATFNLDCEDKPFFPYYYNKKENYGIRLEHLPPMEDYSPGSMNKDKFIKFEKWYNENKETPFYLDDELKNYCRNDTEILFLSIIEFRRILINDITKGFDPLPRSCTNAGVAMNIFKAMFLLTEQLSIVPEKGYERCDRASVMAIKYLEWRSQRDGIEIRRGRGTDERSKLENINWMDLLRITELGTNASRLWDVTYTDV

SEQ ID NO: 132841 - protein, 56 aa, Heterodera glycines
MYVRLNQQILFPLNWPACPENSACRLYTGQDNGFICCRVQLQSSPFSSRRVHRFLH

SEQ ID NO: 132842 - protein, 48 aa, Heterodera glycines
MPAVPSGYQVVQQGRQGPSCMDKLKLGFAMGVLIGGSTGVLIGTFTSL

SEQ ID NO: 132843 - protein, 206 aa, Heterodera glycines
MGYEFPFSSAELTWAKVKLGEKVMAAAVAAQAFDVKADLRKHTLFVEPVVINEISTRSVVIQFVMPVTSIEELTELCKIWEIDLAVGCKVNPAAKAKPCAHGYVLSIKKRALCRGYEIDVKVILSYQEAKDQDAQEEFDQMRCGELDGCVELIPQTSVRALQERMFTLRSNDCSKVATDEGKVGRIMSILLGRPVKPESPKANNPL

SEQ ID NO: 132844 - protein, 111 aa, Heterodera glycines
MRSVKHGGKKGMRFRYKLSAVKRQNKKQKKKQRNIAGCSLIKKAWQTQLSSRQNLSAMGLVYDPNEALKKNPEFAMEMDQSEIEVIGLPEAKALGSVKEQKKATKSKKAFP

SEQ ID NO: 132845 - protein, 60 aa, Heterodera glycines
MPSGGDDEQQFEEAVKPALESLLADLQKTTEVLRQGKHGKGRRQQKEDESAALLDLKKLR

SEQ ID NO: 132846 - protein, 38 aa, Heterodera glycines
FRFSHSVTGDASFVYANLSLNLSWSVLPNIQRITRHAL

SEQ ID NO: 132847 - protein, 473 aa, Heterodera glycines
MENYKLMDYQTTTCQKFGFTKNITEFRVNPDVERPDEAMKDAIDNMIKVALKTTEERMKRKVRMFGVAITGAGLAFPVWVPYRAYPQNNADVIMQEINKLGQSGDGDENKKMLLLSEPVTMKITCVTMPSGEGPRNVHKFDFGFKEHQRIGITNVDKLCLFYALVASKFYLELHVDSFRRFMKNIVRQRDAAIELLRNCGIDGNEISYGVEQLPTVQNYWDEIYPGKYRIVAFEKSADPRKSIRVLWKGPMGRESVVPIFLENGHWDGLKNYVCFFNRGKKFCVDCECFYYQDVKHTMECRARCYYCNKVGGVPCQKESGVKIECPKCHRYFYNWECYNYHQGHQTCKLWRRCVICDKTYLFNTKKGHECGETYCQLCSVSHDPKRGCYIIPIEEKEEKDVYRIVVWDSETSQDSIYKGDQKEHIINYISARVTCTECCDDKNRTNCNICREVILFLITSAVPGRTRYRSSMD

SEQ ID NO: 132848 - protein, 37 aa, Heterodera glycines
MAEEAVVVPEMESLALTSSSPCSPVLSLLSEEMLQKE

SEQ ID NO: 132849 - protein, 253 aa, Heterodera glycines
PSTSTASAATTPSVSTAPTGGAAPNLAGTPPSLGGIGDLFNNPELVQGILNSPFMERSAIMFVYKFINHFSMLANPDIIRTMLSQNPQFQQIIQNNPELGHIMNDPGTMRQAMEMIRNPTALNELMRNHDQAIRNLQGIPGGEAALQRLYERVQEPLMNLTQPGADNVAGSGAQNTTDASMAASRSQHAGVENAQPLPNPWSSIVNQQNRQAAGSAGNAPAQGAASTGLPFASKVNEYRIVYGLDKGLQILIV

SEQ ID NO: 132850 - protein, 125 aa, Heterodera glycines
MRRSRFSYGTAGFFMDIKVGPNSRVYYGRFRFAEAEFRRVVVKVPSKDAFRVQSIIAETRINAQLRHPRVVEYVGFYRDAFDDVRIVSEFMAGGDLHTFLVDKRNVRRGISFLYDSASNSHRLRH

SEQ ID NO: 132851 - protein, 765 aa, Heterodera glycines
MVQNQQQQKAHEVGEVNAESQKRQTTTREDETAEGQKQITEQQQINSNNSSNTTPTTTTVKVGFYEVDRTIGKGNYAVVKLARHRITKTEVMETNNMLYLVTEYAPNGEIYDLISKQKKLSEEMAKQKFWQIISAVDYLHNLNIVHRDLKAENLLLDANLQIKLADFGFSNFFSYDGTLDTFCGSPPYAAPEVFEGKRYAGPEIDVWSLGVILYVMVCGVLPFEGLNLQLLRDRVLSGRIRIPYFMSSDCENLVRRMLTVDSRRRPTIEQIKHHRWMRYEEFAPKYELNEQERHAATEQHVAEPHPQILRLMNNIGIESEKIKNAIQADAYDNFHAIYLLLLERLRGHPLSRSHSASSHANHPLVNSPSATSLPSPTAPHAQAVLASPTTKAAPAVVLTESAGGGDSGEQRPPIIRGVTIRRQSDGIAIVGGAVPCHCYCCSAARAHPMLQSIQPQYAPLGIMTRFAQHQQTRRDSDGIAMQFAYQMQQQKQQQQEELARGVQNTQQKQQQQNNVVVGHVAAQPQQKTGRQQNGTQLGTMCCPDDSAATPSCSHAAGGGPGGLSLFGGVALPPLHHQPPIGATAFCGADQLPPFDSQLSQDPLFSSQSSNKSATAFRPISGSRSTNNSENGCCYGVAPAGIVVGPSGGSSNLLIKNAQAQPPPMFPNNHANTHLHHRLHPHLLQPYQQQQLPPFLQQHYCQQQQQQLTTLSARAHGTTTNETTNEDGAGGDAAMQRQHQQQQQQQQNSLCPQQHMGMMCENGWRA

SEQ ID NO: 132852 - protein, 439 aa, Heterodera glycines
APDSLIMEKPIWSTWATFWVAVNQTQVESYVDEINSYGMPISQLELDDMWTTAYGDYQIDSAKFPNFAGMVNYIRNKTVFVEAWVFVEAWVHPFVNDDSKNGHLSLRNTIFMKSSQGDVPLTWWGLSGILDLTNSDTRDWWRTQLKNMQKALGIYTFKFDAGETNWFPKNFALNYGQNPNSSFGRDYAHFAAEFGPFGRDYAHFAAEFGPAVENRYGSNSQDANIFMRTMDRSSYWLNTELKKHIFQALQASLHGYYWNLPDMVGGNGIDHSPTNIKGTPEEELYIRWTQANAFLANAFLLAMQFSYPPWHELQSEVVEQVKNVLELRAKWPYILESVEDAVKNGEPVIRPMWWSSDNATFAYGCKDQYMVGWKLVVAPVLQKGKTVVAPVLQKGKTKRDIFLPRGEWKDGKGEAAIIVGETLLKDYEVMLFKIKRIIF

SEQ ID NO: 132853 - protein, 18 aa, Heterodera glycines
MNQGAQRPLEKPKKRQVK

SEQ ID NO: 132854 - protein, 268 aa, Heterodera glycines
IYPLLYLVGTRGWNFDINQDGKRISYCDFTKFKLFFRQNYFLPHHYSKKLFQQWVVDQAARVEWGRLNFIRTHQKELRACSYKGLEDFLYKAEQTGSIIRKQVILPSSFLGGPRNKDQHFIDSMAIVGENGKPDLFLTYTINPEDPDIKKCLLKNQKTEDRPDIVARVFKLKYDKLIEEVVKGEIFGKVIAYCWVVEFQKRGLPHLHFLITLHPKDKFKNTNDIDRFIHANLPNKEKEPFLRSLVKFMLHGPCGINKTAPCMRNGNMR

SEQ ID NO: 132855 - protein, 18 aa, Heterodera glycines
YREAIPEGFGLPINLGAS

SEQ ID NO: 132856 - protein, 69 aa, Heterodera glycines
MEMNCEGLKGPKQWQRRRPPLTVEKVAAKAEQQQPTRRRRRRAVQAAAKNCWWWMKMQKRVVVLALVLM

SEQ ID NO: 132857 - protein, 65 aa, Heterodera glycines
MLSFTKFDSQCYKQRKAETTAPYNFHGVPTVHVGGGVHRLSVPGRTNAGAFGGQIKIARRTRGST

SEQ ID NO: 132858 - protein, 40 aa, Heterodera glycines
MHPLVQAASAEAGPKIRRNRAKRLSHRNCEGIDRKLFIVR

SEQ ID NO: 132859 - protein, 696 aa, Heterodera glycines
MKAGTLYVSQYARIEEEMLEYRSRLNTLPLATLRTIQRPNITEVIKLIKAEANETLGVVFGNTGWIEMMKNIPEKARNIVNYVKGISVVLIAVGIIILTVIVIYVIVKYRFIIMAGLRAGTIMARVIRAIFGVKRRTRVAAVPTAPDLDSVDQEAYILDYLPPRVAAITNDPRKLPSIRVYLNGLPTSALVDSCASVSYCRQRTAIKAGLEIKDLGSENPNLTAANNSSIQIIGKANAKLRVGDTETGKCAEWEVTLLVSIDKDCPGPLLLGLPLLSDLKGVIAFGEQKVRIGEIWTNIVSVLEADKPNQIKVSLDQTETFEPRTENIITARVNECFSANQNFLVKGIKHQYPSIIIGRTLVTPGDSNCVTIQILNAGKMPVKVYKGSNIAELEMVKINALPGDEIPPKDYIPPETKWHEKLPYLPTEGKKRLPSERINLTGTRLSTKSQTELKNIVDKHDEAFVGDDGKIGLYKGPIVHKIDLVPGSLPFHFRPYRYPPETQKEIERQIKIMLDQNIIRESESEFASPIVMVPKADKKSWRFAIDYRSLNKMTKKRVFHLPNIQELLDLMGSKKYYTSMDMQSGFMQIPMSTEDIDKTAFISHLGIYEFITMPFGLTAAPDTFQRVMNSLRRRLTAAMLIYLDDIIIGSETEEMHLIDIENFLKLLKEVGFKLKMDKCHWGMAEIRYLGFLLSER

SEQ ID NO: 132860 - protein, 56 aa, Heterodera glycines
MDKKLIHENCSNNCIVSSIFDIIKELTKFSGRIAKIEKETKVMAKSKKLLTLTLKF

SEQ ID NO: 132861 - protein, 60 aa, Heterodera glycines
TVTEHNCSYKGAATSANGPPLKRADGEAKKRAIGDEAQRMPWQEQDGDQTLAFVVGTYAA

SEQ ID NO: 132862 - protein, 34 aa, Heterodera glycines
MIQIPAIIINNMLPLFWQEINTNGKVFRELVLKT

SEQ ID NO: 132863 - protein, 32 aa, Heterodera glycines
MASSKFRKLLNRELSLFAGSSKAGPQISKFLL

SEQ ID NO: 132864 - protein, 115 aa, Heterodera glycines
MKMGTETQREEEDEREEEERAKSQSEEDDDCETFEDEQPIDAFASQLAAADKVQKSLPKKPKKYLREDTNYLWKNHCKKEFGKELTKLREEFGSDEEEAEEDDETDEIAWRKRYK

SEQ ID NO: 132865 - protein, 157 aa, Heterodera glycines
SGSDDDCETFEDEQPIDAFASQLAAADKVQKSLPKKPKKVSMPSAESIQNSLLDSLKNPSNFGPSIGKFLNLVKWKQLMNANLLLAQPQPNNQQISMPTDLNINMFKAPKEKKRVYAGRRKTTGDVQIVPYLFDICMRFLLNNIDGICQFGVGNGNF

SEQ ID NO: 132866 - protein, 1330 aa, Heterodera glycines
MAAVVKAGKGPGPYTSETSWTIWEERFEFFIKLRGITDAETKKLLFFSEIGPIYEELRQMALPDDVRDMSIDEIKALMEERFGETKTIAAKRFELFSAKQSSGLSIRDYSIQLRTLISKAEWHKDSVDMCLSALFINGLKKDSIRAELIKKGVNEMKFKDAVETAVLLEQSDLDAEQIGGHKKAEVAKVFAPKGGRKISAPTQQMQCHRCGRNGHRNNECPNKDSKCRKCGNVGHWAVMCKTKQGSNWPRRQGKPVHQVNTESQKAHDIGTLAKSEEVKSISVPPAMIKLQLSKKATDFELDCGADVTLITKNDWMSIGRPKLGQTSGLMAYGKKPIKVLGSFKTDVVYNGKEVNTEIYVVDGEGKNLCGRDLIGELQIDLNKAFGMRSINEVKCKAVDRELGAVLLKYDEVFNDGLGRCTRQISLKFKPEVQSKKCKPRPVPFALRPEVEKVIDNWVKDGVLEQVTTSEWATPLVIVPKAGNKIRLCCDYKVTVNQWLDIHQYPLPRPEELFSVLNGGEKFSKLDLKEAYLQLMLDDKAKECLTICTHKGLYQFTRMPYGVASAPAIFQQVMEDVPRGIDGVAVYLDDIVVTAPNDAEHLKRLEMTLQRIQKFGLRVKKEKCSFMQKQIAYLGHIIDKEGIRMSPDKVEAIQKMPAPKNLKELQSFLGMVGYYGKFIPSMATISEPLNELRRSETKWHWGQQQQKSFEQIKIMLSSNELLAHFDPKKPLYLATDASDYGVGAILFHKDGNTGEFGVIAYASRTLSPAERNYAQIEKEGRAVIFGVKKFNQYLYGRKFILQTDHEPLKRIFGPKGELPVVAARRLHRWSLKLMNYDFEIEYCSTKNFGYADGLSRLPSPEIDQVCKESLELNKIQQESQNALPITAKDIAKEIGNDPVFAKVKGFVLNGWPTRIEDEKIRPFFLVKDELELNNECLMLGCRTVIPSKFRENLLKLIHETHPGIVRMKALARQKVWWPGIDKDIESMKKKCKICQTNAPEMRKVPLHPWEVPEKPWQRLHIDFCGPFFGKMWLITVDAKTKWPEVAIMKSTTTEATIEALRKLIWTHGLPEQIVSDNGPQFASKEFEEFCSKRGIERTLTAPYHPQSNGEAERFVQTFKKGMLLVKKETNWDNELAMNQFLLKYRVTPHSATGRSPAEMMFGRKLRTLLDLVRPSESTEIEGGEEKAKENAEKHGQKYLARAKKNFDRRTWKRSFKTGQRVFARNYRDGSKWMAGQIMSQISPSLFLVRTARGVWKRHLDQLKSDETKPDLESNTDVDSTSSIGDQTEDEKDGGQQTDVEEEPNDPPNLHDPPLRRSVRERTPRQIFDPSA

SEQ ID NO: 132867 - protein, 39 aa, Heterodera glycines
TKMLQTLGSTIIEMAKVKQTEWHETDIKKFCFAEMSVDG

SEQ ID NO: 132868 - protein, 80 aa, Heterodera glycines
SPHRLTRGQIPIIGCGGISSGADAYEKIKAGASAVQLYTAIVFQGFPVVGRVKRELAELLQKDGYAHVAEAVGAQHRKKS

SEQ ID NO: 132869 - protein, 204 aa, Heterodera glycines
VLLKYDEVFNDGLGRCTRQISLKFKPEVQSKKCKPRPVPFALRPEVEKVIDNWVKDGVLEQVTTSEWATPLVIVPKAGNKIRLCCDYKVTVNQWLDIHQYPLPRPEELFSVLNGGEKFSKLDLKEAYLQLMLDDKAKECLTICTHKGLYQFTRMPYGVASAPAIFQQVMEDVPRGIDGVAVYLDDIVVTAPNDAEHLKRLEMTL

SEQ ID NO: 132870 - protein, 76 aa, Heterodera glycines
MARMETMLALLNAFSNSNNGTNGVVPQQLQLVEDIVKQQMNPFDAVGPPALPTPAATVSALPNPRPINPMDLERCQ

SEQ ID NO: 132871 - protein, 108 aa, Heterodera glycines
VSDEQSHLGRPIQTKVTTKDVSGMLAMSTDFPISLNLALDILSVMEPVNPTVAKLREFCTAKLPEGFPARVIFQQFRWCGEGASPAFPDAMFRTPDDYREDPKRFKRM

SEQ ID NO: 132872 - protein, 77 aa, Heterodera glycines
MSIRRLPFVVASFFALAFMHNFCDALECAQGSIGVVDPEEEPFIVKECPADAKYMFCHKTNCSSGKNAFQQIVLSST

SEQ ID NO: 132873 - protein, 116 aa, Heterodera glycines
MSPAVIRRGTTVIRRGTTVIRRGTTVIRRGTTVIRRGTTVVRRGTTVIRRGTTVIRRGVTVIRRGTTVIRRGTTVIRRGTPVIRRGTTVIRRGTPVIRREYLLKLKGINFSKIQIK

SEQ ID NO: 132874 - protein, 272 aa, Heterodera glycines
ENCSSSNHSSSSDHCCTSSNHFCTSSNHCCTSSNHSCTSSNHSCTSSNHCCTSSNHFCTSSNNCTSSNHFCTSDNNFTSSNHFCTSSNHCCTSSNHSCTSSNHSCTSSNHCCTSSNHFCTSSNNCTSSMTVTSSNHCCTSSNHCCTSSNHFCTSSNNFVPLLCCCTSSNHCCTSSNHCCTSSNRCSSSNHSCTSSNHWCTSSNHSCTSSNYCCTSSNHCYTSSNHCCTSSNHSCTSSNHSCTSSNHCCTSSNHSCTSSNYCCTSSNHCCTSS

SEQ ID NO: 132875 - protein, 554 aa, Heterodera glycines
MYIHRAHQCAIRQAREQEALADIDWRLHFFNSSCVHCGLPDPPNSKAKNINLAVEEAFFGDDDLNMSPGQQNPRQQQNAPPPLNSDQQTVFDAVVKAIKSDPRDQTVPRRFFIFGDGGTGKTFLFGQIIRRLRKPPYTYKVLATASTGCAAILLPYGKTAHSTFRLGRDVSLDKLPSIPLESFFARRIREAQLIIIDEITMLHNTVIEVINRVCKEMAISQYKNLPFGGKTVIVSGDFKQSLPVVPHEGLTAQVTACFQTSPLFGEFTTMKLTINQRLGQGQQAYLQMCRQIGLGETGEHFWIPPQFLVKSREELIDFVYPDFQKLLGNDKELLNRLILAPHIDTCDEINEIMMANVPGQVREYLSSDKPLDERPLDIDEIESEVAALNRRTDSGMPPHRLRLKVGSVVVLLINKSDKEGLINGTRIVLEELGDDRLVGRVINSNAVGGQVKFFIERTRNVYEDKTPGGLKYERLQFPIKPAFAMTILKGQGQTINTVGIDLERDVFSHGQLYTAFSRATDGNNVRVYAPRRETDAQGQTKVLNIVAKNMLKLQ

SEQ ID NO: 132876 - protein, 1421 aa, Heterodera glycines
MVWENGLDGVMQYKNMTFGCGTHFADSLPTPYGRLDWQLTEKIGKIISDILPSTVLTGIFNAVNLTVQHDGNSCGYFVCLYAESWLMNNRTFVLPDLSINYEKRRILWHINELYNSDNVPYHPREGVPTPCPIVYRHADEAPSTSKAAEPVEVDDHDDIMIIEPQTSGQAVVAIPTQAQVAGENQADTLGLVSETCVPQEPIAQTDDSIFVRPKTPPRRSSRIGRRQSASISRSPSPAPRRRSSTNAAEQVTAFTRRCYLVHKGWCCAAAAAKHYPEYSDSGKLGDKKCSHCGALHFPHEDSSICCRQGRVVLPKLNPHPKELEELIVEEKQSRKGKEFVRQMSRYNNLLQFASVSAGHKPSPAGGPMAVILNGEFHRRISSMQAGTTQIPGFGQLYILDPVEAMEQRRKNPTFTGEKITNEEEFVQGHQLNEETLEILEQMIQENHPAASAYKQAREQLQELLRQQRTEELRFFRMTLLNERSAPGGMKDPKLHPHQIITPSTGEGMFAIHADPTGAPAPKGIWVENKQGQLNEIAPFSPWTDSLTYPLIKPKGDDGYQIGIPYAKPAQKKRRSDQCVDQMFDTDAMSDDGSCETESIAASDAESVESTESLIDRIDKTRKFISLRDYCKYHLAIRDENLEWQYHHILSCGGGLGQRWVLDQAAKIDWQIASFLRRPDMDLRISTPKNLLHYLVNQYNKQQARQNPNARQKTVDDIGSVVRLSEKNINSLQYWKKRYEDCNTIFARCHDAKKARLFITFTNNREWPEFKQNIYKNGQMFTDRFDMWMRVWCGKIAVFHQELYEKGFFGTILGSGESMEFQGRGGPHAHIVAQTDLDAVPEVIQEYIWAHIPSLPCKDDDSPIAQMHREVRELMHMQLHRCSDSWCGPRDPNFGRCKKGFPAPYSKCTILHPDRPALYYRPSPTDGGAQIEVNGLIYDNSQVVPYNPYILLRYRVHHNVLFAYGNKANIKYALKYPFKGPGHCYVECKEESGSKIGIDEPAQYAKMNFRGATEAFAVVHSMPFAKLSHHVVHLSIHLPNQQPVVYRAFQLVSKAEEIQRGELPETPCSAYWKQWQNEWQHVPSLKDMLFEKVPEQFRWAKDRWVLYKKKPSKRPPIGRVVPVPPTDRERFALYALMRHFPGDPDHLKLVNGQQYNTFTEAALQHGLLEDDQIWHKTLGEAALHRWPDQMRWLFVSILVFGQPSNALELWNKYKDQMYNPQGITSAAIRQAREQEALADIDWRLHFFNSSCVHCGLPDPPNSKAKNINLAVEEAFFGDDDLNMSPGQQNPRQQQNAPLPLNSDQQTVFDAVVKAIQSDPRDATVPRRFFIFGDGGTGKTFLFGQIIRRLRKVPYTYKVLATASTGCAAILLPYGKTAHSTFRLGREVSLDKLPSIPLESFFAPTIREAQLIIIDEITMLQHT

SEQ ID NO: 132877 - protein, 100 aa, Heterodera glycines
MIELIRKFDQLRKEKIHGFKYDDKKRKILNIITENLGICRHKIYEWKKQFAFLTKRLISALFYFHWKTSVKCSIFWCKICQFTRANKAQKWLLALLKEML

SEQ ID NO: 132878 - protein, 165 aa, Heterodera glycines
MEKYTAIDSIPKSFKNQKYTENQSIKETIIGNNENYKQQNAKEIIIKSENYIEKENEDLKPIIKQEIKTEPLEEQKNYLKTTLKVPKIEFDQLSERSFENEINDIDEQFDQNAPYSDQSIFEIDEDYNDTVEKRKGKEKMGADRNTICKLKKKLGQNRSALYLRT

SEQ ID NO: 132879 - protein, 144 aa, Heterodera glycines
MENVKDPRERTLSPEQRAKKQMIWLKNVLFMSPDQIKDNRSTTLVKDLVWFVGLLLYRMLFNNKHPMDNWEPKRRLDMEFMAKMGFSGSDYFYMYKRDDFVPGDFRIFPLKPKSRWIWMPENGRDETGEMALVEERIGMEQVAN

SEQ ID NO: 132880 - protein, 110 aa, Heterodera glycines
MGKKMEKIWINKMLKRKSIMTGQKCAKLFPRDFDKYLFATWGGLCGGIGNQMWRFASLYGIGKPYGRKPIFKEDQKCEKAHGAHETEGENEIEKLFPVYASQIKYIVKTN

SEQ ID NO: 132881 - protein, 122 aa, Heterodera glycines
MHEGLANVCLIGSSMTVVKSKIDMQIARKRKGLSSQHDKSLVAFMNAICAAFVRHVNIEAQAEVKALNTFMELMCTDPQKAIYWYRHVVHAREQQSIDTLMVSDSLFRQANEFGMEIIGRNI

SEQ ID NO: 132882 - protein, 128 aa, Heterodera glycines; identical to SEQ ID NO: 125618

SEQ ID NO: 132883 - protein, 269 aa, Heterodera glycines
MEERFGVFQHYFDLKLSDAPGLFPSKFPTHRRNKNEGTIEMEIEKVSEFAVEEVGSRRFSDAMDIGGMPWKIMAEIETKNESNEKWLGFYLSDDGLENEYWTCKSSAKLRIVSQKNGTEDLIGRIGDYIFNKEGSSYGGFPNFISFAELLDPGKGFYIKDEDKVTLAIDVIVDEPKTEKSISDPNKSNGTLSTEIEKLSEFAREIVWSERKSETVYIKRMPWKILAKIRKKNESTEKWLGFLLLCDASKKGLVIKLLIEIKIIFSIKLV

SEQ ID NO: 132884 - protein, 120 aa, Heterodera glycines
MNTTKKSEFLHIFTYNFFICRYILVVFGKPIELIKSFRMIQLLLDLVNKEKSYDALNLVQNKPARLNCPSPALRWSDEQCRQKGIECSAENRGKILDPILSNIRFPLIPKEDFTKSVGNK

SEQ ID NO: 132885 - protein, 183 aa, Heterodera glycines
MDSNKSFYNKAEDKLALAIDVITVDEPKMEKFISDPNKSNGTLSMEIEKVSEFAREIFWSERKSETVHIKGFPWKVWARKRGEIGSTDTAKWLSIYLLCDATEKAENWSCKCSGNVRIVSQKNGVLDEFVDLIFDNKTMLQCVAIISFAELLDSSKGLYDKKEDKVTLAIDVTVKEAKTEDET

SEQ ID NO: 132886 - protein, 221 aa, Heterodera glycines
MADEIQQKIVQGIGPDFFSVTSDGWSQITKSPALLSVTVHHINQQFVHADFVLDVIPMTNHTGVDIAEEIGNALRTNGLNPEKIICLFSNEKSSASTVISTIKRLRDFLQEKTFSNRILGVSRVIVESLNERVRELCSNPLLRVAMLLDPRFAYTELFSQQNWRVVEQQLIEFAKENDIWAQPKSPCGISIPSTISGDHDSDFLSKIEAELACYKAGQRME

SEQ ID NO: 132887 - protein, 75 aa, Heterodera glycines
PQRVLLLLLLVRFAKQIRGRFASSFRVSPRFVPSVAPSPLFRPRAKIALLSAPNCFCRIQSRIATCVQCPQFVLA

SEQ ID NO: 132888 - protein, 82 aa, Heterodera glycines
MVAIIAFSSIFGFTRAMGTMEGRRREVTKQSQNSAAEEALERDRWLTHFFIVLLIGEILLMLTIACIRCNLKFLKQCFRLDP

SEQ ID NO: 132889 - protein, 77 aa, Heterodera glycines
MPGSGPGCIFKNDRVPGPASQNPVNPDFPKNRRAGLPGPGKPGKKVAKTIKKREKKELKKLENLKMKEMKKKQKRRP

SEQ ID NO: 132890 - protein, 47 aa, Heterodera glycines
MDNPSVDNPSVVNPSVDNPAVKDNPSVMDNPSVDNSFLTFLVTSCFN

SEQ ID NO: 132891 - protein, 32 aa, Heterodera glycines
PDNPSVDNPSVVNPSVDNPSVMDNPSVDNPSV

SEQ ID NO: 132892 - protein, 24 aa, Heterodera glycines
MYKKLFTGAASEFLGSICVILLEF

SEQ ID NO: 132893 - protein, 95 aa, Heterodera glycines; identical to SEQ ID NO: 125597

SEQ ID NO: 132894 - protein, 83 aa, Heterodera glycines
STGYREAIPEGFGLPINLGASVRGDCPENKKIDFFKCPFGVLKQLWGAKIQRRIKVQAIGKLFPKGFGLPINLGASGSGGTAP

SEQ ID NO: 132895 - protein, 266 aa, Heterodera glycines
MRHGTTFFQQLLLCAISVVGIFRAQSMDFRHQQQQQPQMRNQQPSAGGIVGVGTLPAADPAAQRQQQQHRQPNLKNPYDPMLLPLYGHQQNQQQQNAHGIINNRNNGTWSAIGSGTFGQMAPADASQNVTTMAFGQQQQQRMFGAGGSAETGGGGVGHGHGSVQVQVQLRSYANPGFRLPDSRLCTCPAGNERCLHASPQRNGYNCLTSLAVFVLSADDTIHFEETPYFPLNPAGQLGQQQEFGTPLRFHLNSGTGGQHVFKTFST

SEQ ID NO: 132896 - protein, 241 aa, Heterodera glycines
LDRESRSEFILTVLAEDGGEPPKNASLRIKIHVKDINDNSPFFPQMLYRIELEEDTGAVLSLAREFSPKDEEFLLEILATDEDGLSGQCNVSIKVKDVNRPPQFVPHQFLLRIAENAPIGAPVTKMEATDEDRGENAQLKYTMNSTEFGIDPLNGMVTVRAQLDRERKAVYAVEVRAEDAGNPPLSVGTTLEIELDDGANGQIDHLLDSDDPSVRLGLFRLDRTSGTLRVNQPLDRENVSK

SEQ ID NO: 132897 - protein, 217 aa, Heterodera glycines
MRQSKKKNFKFAIVFWAILFFLALIEKSNGGKAKKVAKQKQQNVKKSERSAEGKAAADSETVAENRKCPEKGEMAENFMVTSAADEDSIELIGQFKKFIIGEYRGTLSAQFELKFQENSLIWHFTQKISELLSADTSQFSGNSVDELEAKIEHFRNKWAQLKKYQKNADRMFVFCILYKYSTEMIRETADLKINDWDQFLKGNRLREQILVSDLRRV

SEQ ID NO: 132898 - protein, 105 aa, Heterodera glycines
MLKAWIFSQTKFPGDQDLKIRTVNSAVVSTSNRADSRMNPTVVVAPNVTARDRVDPCRIGPFPPQNRRGTSTRHHPYAGQWRNTNRYGPPMNRRSDPSDSRPFRR

SEQ ID NO: 132899 - protein, 16 aa, Heterodera glycines
EAIPEGFGLPINLGAS

SEQ ID NO: 132900 - protein, 46 aa, Heterodera glycines
METAEDGCTKRAQNEKKLLFYDLISKSSESGEPPANGAEVAQIRKK

SEQ ID NO: 132901 - protein, 105 aa, Heterodera glycines
MVQLPCHVRVHFIKNMNKQILFGPFLSTEKALLKNLMNLVGHEDDSCWVHSEWMDAQEMMANFIEQHSVGSVLSAFAGHHVPQHIANLLNENEESTQGQIFKINI

SEQ ID NO: 132902 - protein, 49 aa, Heterodera glycines; identical to SEQ ID NO: 132231

SEQ ID NO: 132903 - protein, 16 aa, Heterodera glycines
EAIPEGFGLPINLGAS

SEQ ID NO: 132904 - protein, 341 aa, Heterodera glycines
LSRAEDGSESSSTKSGGDSSLPSPPALDHETTIGCTLCQHKQQQHQSVAGQGRASSEETLKRGDSRLTVPRGSASSSQPSPSPTTARYTETIIHRQTATAAVQQQFVEVNRQLNTVVATTKGGGTCCQCEECVLACRREQQQLQHEQQQQLAGPSGSGAGRSSGTGVASGALSIALANAQLGTASSGPTTSSSAGSGGTTQQQHHHHQQQQAQHMMMYCNSTGAGPSPLISTNAQTIEEQIKQIDRISKECDNSRKTLEHINRRLDDLNDEVRRYREFLGHEKARRDPTLYKTSTAEPLSSYNDGICRLIDSLTTQLTMEWTEKLRSIQNQTIAKSVAEKG

SEQ ID NO: 132905 - protein, 103 aa, Heterodera glycines
MNVEGPTKDTECSRKCAKASFAIGTSIKKQLRDLRRMGCAAAKTQFAALEDCLKGPAQYFNDISQRSSSRSANDDDEQDEEMAKMRALKKGGGAAAGKMTKIL

SEQ ID NO: 132906 - protein, 73 aa, Heterodera glycines
MLPNKSAPRGVICPTLPPICCAMTLDWRQCEQHRIGEGGVYVPFPGGEQSTCSDRQNQSVFTNCFGNRRTGKF

SEQ ID NO: 132907 - protein, 31 aa, Heterodera glycines
MGRKKKKPQKPWCWYCNREFEDEKILIQHQK

SEQ ID NO: 132908 - protein, 18 aa, Heterodera glycines
MERESEKCPFGGQNETPK

SEQ ID NO: 132909 - protein, 34 aa, Heterodera glycines
MTASGGVAKLGGRSAMTIMSQRELEKVEFVPFTS

SEQ ID NO: 132910 - protein, 111 aa, Heterodera glycines
MKWINGQRDKRPKCNGSTGNGTKGQNAMDHRPMGQNTMETANGTKGQNEMDQRPIGQKAKMQWINGQWDKRPKWNWSTANGTKGQNAMDQRQMGQKAKNNMAKANVTKGQK

SEQ ID NO: 132911 - protein, 108 aa, Heterodera glycines
MQWINGQWDKRPKSNGSTANGTKGRKAMDQRPTGQKAKKQWINGQWDKRPKSNGSTANGTKGQNAMDQRPMGQKAKKQWINGQWDKRPKCNGSKANKEYQEDFEIFIN

SEQ ID NO: 132912 - protein, 178 aa, Heterodera glycines
MPRRLPKAEKFAQEAATAGTTARLRLNRMPTAFPFGKPTEWRHFGGGGGRGILRDGVRHHQPVPAGPVHGMFSRRPGSFEKVKSLNAHMKSHAMKARAEAEVQMQHKQQQQSTSLPFPVPTKKEAADSACWGRWAAPLGPVASLNLTSSQAAVAAALNNLNRQFQHSRAKRCKKQWVA

SEQ ID NO: 132913 - protein, 532 aa, Heterodera glycines
MWTDSQCSVERLRENKRQDRFVVNRLQKIREANFQVRHVRTDSNPADMASRGADLQCLRSSLLWHFGPVWLSKADKWPKSNVIYRPGDEFKEVEEPPIIELTTPVHVEEQFKPSIHFERFLNWNRLKATAAHAMRFIKKLRTIENGTISEPHQNNKPLTMAQLQQAENWILREAQRLHSPSNDQIRELQLFQQEGIWRCGGRLEEAPDLPYDSKHPIFLPPHAWITKLIIRHYDKQLKHCGPRILLSTLREKFWIPRGRKTVQQLLNSPQHGCLECRRERVKPYTYPEASDLPKGRVSEARPFDKTGVDYFGPLKVKQSNDVVKIYVALFTCLAIRALHLEVAEDYSAEAFLRAFRRFTARRGIPSLIMSDQGTNFVAGAKVIKENWTDTLMPEDMQQQMAQSGIRWIFNTAHAPWKGGIWERLVGITKNALRRTVGRNLLTLDEFGTMLCEIEAIINNRPLTFESDQEPIKVLRPINFLIPYSKADNNFPIIDDDTNDPTYEPNPTNRDKMVATLSHVNARLNNSCELSEK

SEQ ID NO: 132914 - protein, 89 aa, Heterodera glycines
MVMATLKFVKLLTRRFDGRRLYGRKGTLSAGGIRNGNKRHRLEVNIYHIPDNYITEEKRSPQKIFDIGKLNLEGKFSGQHRDCINRTFC

SEQ ID NO: 132915 - protein, 46 aa, Heterodera glycines
MEEALTVSLSQGLKVLALQAFGVLTGLSVMFFMAFYGESIKNVVEF

SEQ ID NO: 132916 - protein, 163 aa, Heterodera glycines
MQPFALLYVASIFAQFPLFFTPFECFLKWAFTLWHFAFCQFLANFVWCIRLAEFAQFTVAKFALFQMVSAQFYADFCHRLIFGSNFAFLPMMVPSVACALFVFFAYFHFILIVFAESVQIHFFKFRCRRKEVIFKNLLKQAREYLLSVYLFLNLKLLFFVEFY

SEQ ID NO: 132917 - protein, 125 aa, Heterodera glycines
ASFLAKNSESQTDYLANLKNSAFLGEFSGLWLLGLDMVPMTGQQTVHLHVNRSCNCAMDAWFIQPMDSNKPIDPKVPTFGSEACPPLSTDQTFALTGRISLFNFSFTALTDANLSNITVILLGTV

SEQ ID NO: 132918 - protein, 361 aa, Heterodera glycines
DNEFLHFGHRPPLPSFGSCFNSIFSLHTETGNILTHMYGAIAFIGIFIWFLVQAEAIAFIGIFIWFLVQAEDVVSWPDKLIFSSFFVGAILCMGMSFAFHTVQCHSEDIGRLFSKLDYAGISLLILDYAGISLLIIGSFVPWLYYAFFCRVLPMTIYISMIFLLGIAALVVSLFDKFSQPKYRPLRAIVFMAMGLSSPLRAIVFMAMGLSSVVPALHVVPALHLLVTDGIVWMFEKASLHWLILMGILYLSGATIYMVRFPERCFPGKCDIYMVRFPERCFPGKCDILCQSHQLFHLFVIFAAAVHYHGVLELAMKRLQDGSCSEQLISHSGSDRQPFSGRICILFMYTAIKFWVPSTISW

SEQ ID NO: 132919 - protein, 76 aa, Heterodera glycines
LISSQKSCQLKTAKKAEFLKFFISIFFYSSKFSVIFSRLIEPVKSFRMISRLFDSVNNFKSYIDSKLAQTELARSV

SEQ ID NO: 132920 - protein, 443 aa, Heterodera glycines
LIFQVFQVRKVTGKDSGKIFAMKVLKKATVIRNQKDTAHTKAERNILEAVKSPFICDLQYAFQTGGKLYLILEYLSGGELFMHLEREGTFMEDTAAFYLAEIVIALEHLHRQLAEIVIALEHLHRQGIIYRDLKPENILLDCKGHVKLTDFGLCKECKGHVKLTDFGLCKEAIEGDQKTHTFCGTIAIEGDQKTHTFCGTIEYMAPEILMRTGHGKAVDWWSLGALTGHGKAVDWWSLGALTFDMLTGGPPFSAENRKRTTIDKILKGRLTLPPYLSFEAKDLIKRLLKRHVDTRLGAGPGDAEDLIKRLLKRHVDTRLGAGPGDAEEIKKHAFFTHHDWTNVYRREIEAPYKPNITSEEDASLFDSKREIEAPYKPNITSEEDASLFDSKFTKMTPVDSPTELPPMSVNPFEGFTYIAPSVLEQVSQPTIAPSVLEQVSQPT

SEQ ID NO: 132921 - protein, 28 aa, Heterodera glycines
MKFPLCHPLLRICFQFESDWEDSGKSSP

SEQ ID NO: 132922 - protein, 74 aa, Heterodera glycines
MYLKWYIWVCGLKKLTGNVITDHTPTYETIHRFLMSILKRSLLYPVKLGEINTNMVNGSEAEFRTEGFCKSNRN

SEQ ID NO: 132923 - protein, 257 aa, Heterodera glycines
TNGYDVQCFISGTLMTSIDAHGFSVSILRIVDQKWLHVLTEYDSAVSSFWVASRLNKEPIVGQDSVRSIEDERPCQLSLGPQLPKIQESLLRSCIENACQALINAEHDLNRLDSSVGDGDCGTSMKIGASVENGELALDHPKGLFLQLSKLVESSVGGTSGALYALMLNAAANAFESPLCSNVIKKALKLALKSVEYYAGAKPGHRTLVDPLHAAVSFRGENWEDIVKIEPDPGAMAFSTWFKAVFESYEKNRVTNR

SEQ ID NO: 132924 - protein, 43 aa, Heterodera glycines
MNKTYCINPANEWYAVSDGDDELTADSHPALLQQAKAALITDA

SEQ ID NO: 132925 - protein, 75 aa, Heterodera glycines
MSDFREKQTVGNGRNGSDVSDDEEQTFDRVLNARLKVVPKRKGPLSNGGASTSTGNGNGQKTDEAEMVKGLKLTV

SEQ ID NO: 132926 - protein, 130 aa, Heterodera glycines
MVEQFETRNSHPSSHSDSASTSKDVRFAEPTRLKPLIIARSEAQKRVFGLGYPSVPTVTVDEWYNEMQKSGTFGKGPMPSSFKIDQRKTQEYDETEEGEEEEERKRQAQIQRDEWKDVNRRGCGNTYNKG

SEQ ID NO: 132927 - protein, 34 aa, Heterodera glycines
MWLEFIAKLAQKENPEKLGSSLLFRKCGWNSKEC

SEQ ID NO: 132928 - protein, 99 aa, Heterodera glycines
MPGIDLNNPADKLGPKCDTLVFQSKKSHLFGPTLGPFRPAMATVESQTRPERKSRKIRVVAIIPKMWLEFIAKLAQKENPEKLGSSLLFRKCGWSSFEC

SEQ ID NO: 132929 - protein, 16 aa, Heterodera glycines
MKWARSARPEAAKRPN

SEQ ID NO: 132930 - protein, 42 aa, Heterodera glycines
LQISILASISKGIEFFYNKLIESKKHDCIIFKKFIYAFVERF

SEQ ID NO: 132931 - protein, 65 aa, Heterodera glycines
MRDIQKGFYVSSQVSFFLRFVLYLSRPPYFVLILGFENKITKTNNCFELFMYHFLWKQIFELIRF

SEQ ID NO: 132932 - protein, 62 aa, Heterodera glycines
MSMDRMKHLLSTVSGNCPDVVEIPDVEAAAFKVMLSFIYTEELSDLNGDNAMVVLYAGGFNF

SEQ ID NO: 132933 - protein, 249 aa, Heterodera glycines
MLLFEFGFVEFETCRNCVRFMIQVKAIFKDFSIKCLRYICQNAADLFGSDDFLQIDQKILCNLLESDRLLLNDEFEIWKIALRWADEKCRQNGIECSSGNRRSVLGPALFKIRFPNIHEEDFAKCVVPFGVLSKDEVIAVYQFNSHPFLYLRGVPGLYSLKFPSHGRIFNWNKARGNRRGTLSMEIEKMSEFAGESVGRSRFSDAVYINGFPWKIEAQIMNCIDEKKYLGFYLWCDAKKGPILITILKI

SEQ ID NO: 132934 - protein, 106 aa, Heterodera glycines
MDPSNGFYNREEDKVTLAIDVTVKDEKIEKFVSDPDKSNGTISMEIENLSGFARDTNQSERKSETVHIKGFPWKVWTRIKTKIGSTDNEKCLGIFLLSDAPEEGAN

SEQ ID NO: 132935 - protein, 39 aa, Heterodera glycines
MPYRGFPNFISFAELMDPSKGFYDKNEDKVTLAIDVSVK

SEQ ID NO: 132936 - protein, 76 aa, Heterodera glycines
METKSKERTNGKRQHKMNEHRYFFCFCSCLSIGRLFRIDGIAKTKSHNYAEHFTMRTEATKLKQKIQIDVVRRIGI

SEQ ID NO: 132937 - protein, 314 aa, Heterodera glycines
ALRWADEKCRQNGIECSSGNRRSVLGPALFKIRFPNIHEKDFAKCVVPSGVLTVEEVLGVYQFNSHPFLYLRGVPGLYSLKFPSHGRIFNWNKARGNRRGTLSMEIEKMSEFAGESVGRSRFSDAVYINGFPWKIKAKITKGIDEKKYLGFYLWCDAKEGPILITILKIYATEKDSNWRCYVRSATFRIISQKNGTENSIGTLHDHVFDNELNGWGFGFFITFAELMDSNKSFYNKAEDKLALAIDVITVDEPKMEKFISDPNRSNGTLSMEIEKVSEFAREIIGSQRKSETVHIKGLPWKIVAKSSNCFAKER

SEQ ID NO: 132938 - protein, 397 aa, Heterodera glycines
MVHEHFLLTITARDIEGKTFAIDVRKEQNDDSEIRKLIEFVNFGSFPEGTTEVEKEDIASRAENLSLSSGILYQHLPDQNARMYIPLSLRPLIFEAFHTSQINGGHMNIKKTLGKCRKFYWPMMHRDITNWTRQCITCQLRHSPNPSYRAEMQMPPKNTLFAQIALDLAGPLPLTQKGCTSLLTDNATAFTSDFFKSFCSLLYINKCYAIPHWSQGNAVVERSFRTFHNILAKYISSEEPDFDEFLECANFCYNTSIHSSTKETPFFLVFGRDPIFCIEQILNPNTEPENTSEVDNVKQKLVKSLRKAWESAAAVIKEAQLRSKVQYDKLVRNQTVQIGDRVLLRNYAGKVKTSKKFQLPWKGLYRVIEINDVLITIVSCTSPQRRKSAPPEPRRGR

SEQ ID NO: 132939 - protein, 162 aa, Heterodera glycines
FKHCYLKFGGCTSLLTDNATAFTSDFFKSFCSLLYINKCYAIPHWSQGNAVVERSFRTFHNILAKYISSEEPDFDEFLECANFCYNTSIHSSTKETPFFLVFGRDPIFCIEQILNPNTEPENTSEVDNVKQKLVKSLRKAWESAAAVIKEAQLRSKVQYDKL

SEQ ID NO: 132940 - protein, 45 aa, Heterodera glycines
STGYSEAIPEGFGLPINLGASVQGDCPENPKKNFLDKNYLNELTR

SEQ ID NO: 132941 - protein, 110 aa, Heterodera glycines
MLIISIGIGLFGKSLYMYGDNGFIFGHNVNGFWGYPSFEEGDTIGCGANLTSMEIIYTKNGQKLNTSNLFVTDTDLLPVVFLYLPGDIIEANFGPRFAYNFNASESFLDD

SEQ ID NO: 132942 - protein, 38 aa, Heterodera glycines
MEEFINGSNPWGNKRRSGGRGLMDPVDFVSQLKQFVAF

SEQ ID NO: 132943 - protein, 403 aa, Heterodera glycines
MVLVFRELFRRGFNPSMLRKGNKLYEMKVGKQKKRNPNVVFRDSYNLMPCSLAELVTSFGLDVEDKPFFPHMANQPDNYGKQIYPTPEDYLADGMMPDKRQKFNVWYEQHQHKPFLLDEALASYCTNDVEILTAALVAFRMEFFDVSRREEGIVAERAHEGIDVLRECMTIAGACMKHFRINHLPAEHLAIVPERGYDNAQNQSRLARRFLQWYTEEHNVEVRMANSPGGEKKFGQYSVDGWVEAERKAIEVNGCVWHACSECYPDDNMMMPNGKTAGKVRERNAKRLEFIRSQVGQLEVYWECEIEKMLTKDKEMREKFEDYMDDGPLTIRTSFMGGRTGPLKLLHKAGPNEQISYFDFTSLYPFVNFTTRYPIGHPTVHVLNEEVEWKCPEDSRYPLAILK

SEQ ID NO: 132944 - protein, 28 aa, Heterodera glycines
KTITDAGYAYSDQHKVCVHKNVVTSRGP

SEQ ID NO: 132945 - protein, 21 aa, Heterodera glycines
MIPNLSELSVLNENRNSVFTS

SEQ ID NO: 132946 - protein, 65 aa, Heterodera glycines
MATNFQTSSFSVTFARRRTDWEEHKKGTSSSPVFTKLFSLGAKNLLLAVQCSAIPTKTVAIRPKV

SEQ ID NO: 132947 - protein, 56 aa, Heterodera glycines
MQSFRALLFILAGTARVWSILSTARRRERQKRFAIPCTKAWKGWERKICEIAIIQF

SEQ ID NO: 132948 - protein, 44 aa, Heterodera glycines
MTKPLNCTNLYGFGFATRAFFSSILAPQAAIFVRNEHLLSETKM

SEQ ID NO: 132949 - protein, 75 aa, Heterodera glycines; identical to SEQ ID NO: 132731

SEQ ID NO: 132950 - protein, 118 aa, Heterodera glycines
LFEYPKRTLEKIDFFVFGAVPPSRCAQIYGETESFRNSFPIACTLILRWIFAPHNCLSTPNGHLKKSIFFVFGAVPPNRCAQIYGETESFGSSFPIACTLILRWIFAPHKCLSTPTDT

SEQ ID NO: 132951 - protein, 43 aa, Heterodera glycines
MSGVWSFLTIPVANGQVLGASTQQKPFISTAWSPFAFPSVDKV

SEQ ID NO: 132952 - protein, 99 aa, Heterodera glycines
MYKLMRNIFVVIGEAFSLDDCGQKEESAEQVGDEKLRKEAKSKQQDDDDDDDDGILKALQAELKQQRLIEENIELKVKIYRMEKEKEQMEKDGEKENKL

SEQ ID NO: 132953 - protein, 63 aa, Heterodera glycines
MANWKTTSFAETEFIAVTSYQNNLASDGGKGEKRDKKSRERENEKEKKSKMGEEQKGKKKREK

SEQ ID NO: 132954 - protein, 18 aa, Heterodera glycines
MCWCCSNCPTTFRITFCI

SEQ ID NO: 132955 - protein, 53 aa, Heterodera glycines
FFEFFEFLKFPVGPGSRSRRKIEVPVPVPASQVPASPGPGFAQNSRSRSTLVK

SEQ ID NO: 132956 - protein, 540 aa, Heterodera glycines
MLRLTLSSACRSDAFMILQETSNRDKYTLEIVDCRLIVKTVDLMDGLILDIAKKLELEPARYGIRKTLMKSLFINGGRYDFSANLFTEEVPRRVIIGLVPTQIYIGRNEQHPFCFNHENGILPASVNEVESDDSSEEKGRDFSSISDPESHSSKQTVPLSTFNMNKWSALVLLIALISALDSAVVRQQRATNADASKPEPNNQKPGTVDSDKGNADKSQGADTDGKNPEKPKESQEVEEDGPNPKEPTKSQKLEEDGPNPKGATKSQEVEEDGPNPKEPTKSQEVEEDGPNPKEPTKSQEVEEDGPNPKEPTKSQEVEEDGPNPKEPTESQEVEEDGTNSDEDELTERQEAEVDRMRVRAGATSMHGLDKLAPTPPPSATSTNAIAIREKRVPWLALAGLAIPIGEIVIPFVTNKLCEHRTQYCPCGRGRCVPVTTYKADECCESNFEWKCCPDEKCVPVRYYWDWICMGFYGHNEILASSPKCKKWYEQSFTCMCDFKSVDWFPEIEGICRKDCKTATPGAIAEGLCDCGYGNHCAVIE

SEQ ID NO: 132957 - protein, 412 aa, Heterodera glycines
MIDNFSAVKPPNKSINDVSTLKAALQNDFPEVFEEGLGHCSKAKAHLILRSDAKPVFCRARPIPHGAMEAVNAELDRLLQIGAIKPIDFSHWAAPILAVKKKNGKTRVCIDFSTGLNNALELNRHPLPRPDDIYASLNGAKFFSNLDLRDAYLQMEMDEESKQLCAINTHRGLFQCQRLPFGVKSAPAIFQHLMDQICAGIPGVFAYLDDGLIATKTLEQHITAFYTLFGRIKEYGLRIQLDKCKFLQPELLFLGHIVSANGIRPDPSRSDAIRKMPAPIDKSTLRSFLGALNYYGRFVKCMRELRAPLDKLLQKDVAWEWTSEQQNAFEKAKQIMTSDLLLTHYDPARPIVVSADASKDGIGATLSHTFPDKKEKVVEHAACTLTAAQQNYSQIEKEALAIVFAVQKFHRM

SEQ ID NO: 132958 - protein, 25 aa, Heterodera glycines
MSQKIFDDACSWWYYFIRTDETHVK

SEQ ID NO: 132959 - protein, 106 aa, Heterodera glycines
MKIFFNFPESRHPAERLAKQRTNLDDIDRLNVVHITGTKGKGSTAAFLESILRSLGYKTGFYSSPHLVHVRERIRINGRPISKQIFTQQFFHIYNTLFEHKKEVAN

SEQ ID NO: 132960 - protein, 100 aa, Heterodera glycines
VEALDDKLGTLLAKVAHERRNTLYCAIILLSSKFRVPTKFGLCLEKPNLTEAASENYNIGKFRAHLAEIRAHIVTSGDTQLIQKASVCLQKLIVFLDEQD

SEQ ID NO: 132961 - protein, 325 aa, Heterodera glycines
LQRIGGRTSSAPQVQQQLQTRLSDSEADRSRAAAHPRQIPSTHFQVDQHCSIPADGQQHKVDIAHIELTPTLWHECVPSRLCSAFVSAQLVNSSQLPLLPGPLSVFFNNTFTAQLVNSSQLPLLPGPLSVFFNNTFTSTTHLNLVLPGEEFRCLLGVDPALKSTTHLNLVLPGEEFRCLLGVDPALKVEYKRAQLSNQQVGFMSRSCLCTHEVGFMSRSCLCTHEQVISLRNAKASQSCRVTVREPIPKAADEKIKVKLRNLIAFNFRFLCCIDLKAQRAEARLLAKESQLEWTVKLGPGEQRELSVKWTAEYPAQEVKRRQKQS

SEQ ID NO: 132962 - protein, 19 aa, Heterodera glycines
MQNVNFFFSHIAGEQKQEL

SEQ ID NO: 132963 - protein, 964 aa, Heterodera glycines
PQVEFRSCVHNAVEDAIHDAQNTIGGANKVGVIISSELLDQGDIIMPITPITSNVVDAVFNQFCKVEQSKAKHVNFYGAPFFITVTVLNTDCLPRRRTTKGSAPPIHSSQSHIFKINNNDNYCLFLCTGTDALLLIIYQGSEYKIFIFNDYQTRPITKSDVIDYQFPILLYHHDKHFDGIKTLPKFWNKRYYCLSCESAFSNKPQHSMNCTSLCHGCREVGVDYPCEPQQGYFKKCDQCNNNFYNKDCYERHLHKDLCTKFQRCEDCGVIYNVKYHGKTGHQCGEKFCRLCKQFHVKEDDEDNPCSEQDKKVGNKFEHEVNFVSAIIICTDCINGNWKDSLKGSSCKIRGPHRTITFAPFDFSNTIVDQKVTTQNPLRDFVQWLLFDHNKKFPTVAFAHFGGRYDMTMVIKEVVSQGIHNPDIIKQGNRLYELRINQNEHGPLTILRDSYNLMPIKLSGLIKSFGLKIQDKQYFPHMFNKASNYDNFLSHLPPCEYYCPDQMKVPDQQKFNDWYNNNYNQPFNLKEKLPEYCCNDVQILTHALVELRREFKQLTQRNGKHGGIDILWQAMTIASACVKNFALNHLKPNSLAIVPEKGYTPQQNQSALAIKYLDWYAHINNINIQTAHSRYGEYVFKREGQVYQVDGYIKGTNGKRDKIIEVNGCLWHGCEECFEDLDEETRMPNGKTLREIREREVRKHEILRRYVDLEIVWEHEINEQLKKDAAMKDYFDNWKDRSPIKIRDAFHGGRTGPMKLLHTAKPGQKISYKDFTSLYPWTNFSTSYPLGHPKIINFRLNEQTVNWRAPSDNPYKGLLKVLLLPPNRNINVTVMPVKFDERLLFPLYEKCAKHITNEHPNGLKDDNYSCPHFNPNDRAFVSTCTHLELSAALEVGYTVRKLFHVLQYDQWSDNIFKSYVSEMMALKIHATGFPSWCSNEEEKKEYIEENRQRFGILLDNEKMKAEPGK

SEQ ID NO: 132964 - protein, 389 aa, Heterodera glycines
MPVKFDERLLFPLCEKCAKNITNEHPNGLKDDNYSCPHFNPNDRAFVSTCTHLELNAALEAGYTVRKVFHVLQYDQWSDNIFKSYVSEMMALKIHATGFPSWCSSEEEKKEYIEENRQRFGILLDKEKMKAEPGKRYIAKLCLNSLWGRFSMRNLLSKAIINNDESLIRQYTDDKKIELVDLEMMDEDNDVFMLTYRPKEEFVDENKYSNVVISLFTTSAARLYLYEALKKVADTPDCEILYYDTDSVIYVHPEENDPLPTGKGHLGELTDENPDHNILEFISAGCKNYGMKLQRKDTGEIEHELKIRGFTLDAQTVQRIHYDTVKDQILRYGSDDPADPIIVTYPHFIRPNLIQGKVYTHSLTKHYQPIFTKGIINDSFQVLEFGYRK

SEQ ID NO: 132965 - protein, 358 aa, Heterodera glycines
MEMINTTLDKLYNDPSSPAAFAGVSALWKEARKKLKNLRKKDVQHYLEGHRTYTLMRPRRVRFPRAKTVAAGFMTDVQVDLADFQALSRHNRSHRYLLVAVDVLSKRLFVVPLKNKKAEEMLDAFKELVKQMPMVPHRIFSDKGTEFKNKLLKEFFEEQEIEKHEPVHSSVKASVAERAIRNVKQRLYRYFAERETLNWVDVVQQIVDGINSTPSRVHGMRPIDVNFENAQKVWKRIYESPQKRKKPRFRKDEFVRMSREKGQFEKGYLPNYGDEILEIDEVLKAVRPNRYKLRDDRGEKFRGTFYEQELARVRKDADTSYRIEKVYRKRRKPDGTTEMLVKFIGYPEREWIDESQIV

SEQ ID NO: 132966 - protein, 228 aa, Heterodera glycines
IRFWQEYMEPIESMHHSTATLAESNATIVAGGGGGMNGTANDLDSSPLLLPPEKGILEENCGVILIAAINKSDMHTDLSAEQLDRLQYHVRKFCLQHGAALGWDSEQKLSIIKEALVGSDLLDVPMLAQQSSDASPFSNYRATGEKEVKAEDEQSFLARLYTIALDGSVSGQSSTGGGQQSPRRPGGDVGKGHGDNTMLANFFSSLLKDKDHHQRSQASSVKSGHSGT

SEQ ID NO: 132967 - protein, 132 aa, Heterodera glycines
MDAAARGRLLHKLADLMERDAVHLASLETLDNGKPYKDAFLADVPLSIAVYRYYAGWADKCHGKTIPIAGDYFCYTRHEPVGVVGQIIPWNFPLLMQAWKLAPALALGNTCVLKPAEQTPLTALYVAELIRE

SEQ ID NO: 132968 - protein, 100 aa, Heterodera glycines
MIGMMNNACMDGPAEFFAGRRDLCELLVPASSLAAVDGQAQPHAPPPKVFEPTQQKKLSYTGSGRRLVDGKPEVNETPEEMWRKAMLRATCTRAVKGGGE

SEQ ID NO: 132969 - protein, 259 aa, Heterodera glycines
MNRRWICADVWMDILPSFDHAQLGLKMALLSDRFDVLVDTHFDGKSEFTIWRAIEIEKEEGPKPKMFIRIDGSFVDFPLSVRQMPNKICFKNLWIESVLTFVYAKAFLSFFSYIDHSVIKFLRSKKRFFDKSGTKLEVFVDAFDTDVQPIWDIFFREIWPIFATNIRHLAFHGADALDNLRRRTSPTLLTDLVQLYSITSYELCPDGISDDGPKATAGQALSKWLHTKSKNGKANELYCCAYFCEITWINTFNEVIETT

SEQ ID NO: 132970 - protein, 47 aa, Heterodera glycines
LQIYWLKLHMRYISKFFDSVRRFDKDGFRFAISRSTFGNWSRIFSAI

SEQ ID NO: 132971 - protein, 162 aa, Heterodera glycines
MKLIRDSILSGNFAVNEMGNNNMIVWTVPVPRNAGPQWVAPPRPLAPSCPPPPPQLPVFPPPPPQLPFLPPPPQIGMAPFCPRPPQMGPVLAPLALPPLAPAPLPLPSCSTFANPFGVRAPPNKCAVCGRRFLAPRRRATTEKLPSAKKARVHGPEEPMDEE

SEQ ID NO: 132972 - protein, 491 aa, Heterodera glycines
MKRGVSASATATDSADLRTPNDASAAAATAFIGENLNKKRAKRSRRQQRRWDFRTVAFFEQRSSSSSEFDDADQDSKSSAKVDHCMQIGYGRAPAAAAAAGNSQRNNNNNNVDSGGGGGGGGGGSGNDRRSEAENNASNPEADDDDDDEKGGATADQLYEEKQHSVHRLERFALQRHVTEFVLNGQHERPDEALRDAFERIIKRAIRNAEQQQQQQQNEQQSGNQEEEQPQDGGGAAQQSPRRRVTKIGIFLDGNGTSFFCLFWQMSPSNIHHHHIGLTDPIVLPIRPPEQNTADTLMGELEKLGQSDGDEDVHGGGMSKRSLLLSEPVQIVITCIAPPVGAAPRFHHYQHWGYNERQLIRIRNVGDHFCLFHALIAARSYTDHDLTKMIAPQQQQCHQGDVSSSSSNSDHLINVPSAAATAVMRRPDFCANHEVLNRLLSSPGRMQETVRGLMLHAGIDPEGQAYGVEHVPHVQQHWVSAILKMLSAAAT

SEQ ID NO: 132973 - protein, 100 aa, Heterodera glycines
MPVRLDQLPKTFNLDCAEKPFFPYAFNRRENYDVRLPHLPPIEDYCAGSMKREKYDKFVSWYEENKTTTPFYLPDELQSYCQNDTERRVKAIVQFRKILM

SEQ ID NO: 132974 - protein, 714 aa, Heterodera glycines
HSRQNSLLIWRDSCLLMPVRLDQLPKTFNLDCAEKPFFPYAFNRRENYDVRLPHLPPIEDYCAGSMKREKYDKFVSCICMSIFRAQFLCENQLAIVPERGYERNDRASVFAIKYLDWRAKTDAVKIQHAGNGMEKRWRQFKLDGWIEEQNRCIEVLGCYWHGCERCFDPGDKLVDAKSCRELNEETNLRLMQLREGDVDGQGLQVEAVWECEINAQLACNAEMRAFFSDLGMDRGPIEPRGAYFGGRTGPLKLFAEPKEDEKISVFDIISLYPFVNYTCEYPVGIPTIIRPMADEMCVNWTRPEQLPYRGILRVRVVPPRGLRVPVLPVKIDERLLFCCCHHCATMFRKKSTRRPHKCPHTDAQRSFTGSYTHIELERALEHGYKIDRLWRAWHYDEWSDQIFKDYVRLLIKLKIESSGFPEGVSSADQKQRYADEYRRIYEVNIELENVKKNPGLRFIAKLMLNSLWGKFSMRNELGANKVITRPQEFFSLLFDHKIEVSAIVPFSDQALRVLYKPKKNFVSEHTTSNIVISLWTTSCARLKLHDYMVQVDQREDSDLLYTDTDSVIVLHKRDTTPLETGEFLGQMSEEYLDYDIKTFICGGAKQYAFRMRHRRTNELEFVQKIRGITFDVNNSKALQFDNFVEKVLNYGKVDDKDNDDDHDSSVSPAVFSYQKIMPTRDSKIITRKQLKKYLPVCQKGIINNSYEVFPFGYE

SEQ ID NO: 132975 - protein, 118 aa, Heterodera glycines
MPVRLDQLPKTFNLDCAEKPFFPYAFNRRENYDVRLPHLPPIEDYCAGSMKREKYDKFVSWYEENKTTTPFYLPDELQSYCQNDTEILLKAIVQFRKILMRDITGGYDVLPISCTIAR

SEQ ID NO: 132976 - protein, 73 aa, Heterodera glycines
MEEKYAKMEEEMSSEDSDDAIDFFQDTIEDIVENSGVVNGEIDDMDDQQDDDDAPTSTVYLNLGKDERTAENY

SEQ ID NO: 132977 - protein, 189 aa, Heterodera glycines
MLSQEEDRGRSVERTSVCGTEGSDDLSGRLAGMSLTLRTSEQQQQLLPASSGRVGSAQRKQQRRRQRERRDLVRVLCRFNRCSPTWLHKMLQKRKEENVKFLNKLSLATHHLKRNVAVSADALSRHGANMMFAYRGFMGITVQQHLYVRHRIMLKYPQLPCVVQFGGNSHQDNFPIELLHVVSEEQKTD

SEQ ID NO: 132978 - protein, 766 aa, Heterodera glycines
MDEFYVVLPSNSPGPGNTTSKFTVRLPHTLELDANWMVALSSIIYPYSFPSVGIDDDDFISIKLVNPNFKFADDKRFVDIELKIPSMQFSSVGHLRQTLNDIINDAYKQRFGLSSQKAAKVKRQIDVTELFFYDHPVDYWEKIEELEKRLVELREEIDTKEREHGAEGTEQKRKNELEGELKILRLRLKRKDDELEELKRAAKRRDDDTPENQQKKIREFFHHHPDDHEKKLNESRLIFTKYLSGLQEKMSEYIGERDGAKIVQLNEQTGKLREKIKYLLRNLNLFESAVLQRANSDDPSRKTREEYEKSSHEQNSVYVQEFFQRHPTNYWQIIHNNYDGLREQFDKIEELQQKTAQKQLKDDEHSSFQQQIDRAKQLLEYRRKRFAALEFEAKKRDGQQQQSSPFSSPISSALTAGEALKERLGAVQVKQTEKSDQDNNNSMEKPKTHAEVLKEKIQQQQDIATSTPNELQNDGKAVAEPKTHAEVLKEKLEQKKGTSASAERDGDHDSDAVDLLSRGHKLVSMIAKKRDGAQSLTGSAITIEQTHGELLKKMLSLADKEPIRDVTQNSGEGHTRGQILKELLENIVKEDKLRPPPHGSSDSDRQLTRGEALKELIEKKKDEKQHQYYSSAKTRGEIFKLILEHHKYTGEAEASFKRLVEEQRKGKTAAEFHFNELAQRFVLKTGSGVVQIDVSKHLAYVLGFNSIRLYDGEQAQYMPDLSGGVKQLYVYAPKLVDESIIGDKMAPLLRVVNVSATPGGTDVPEA

SEQ ID NO: 132979 - protein, 931 aa, Heterodera glycines
MCEQTHENVPDSEVFPDMEGLSITTNVMASVVAKKPHAYLMTRKILVRTKNNRRVWMKVPFLFDPASQATYISDPLIEKLKPPKVSSEELEVYGFGGERTGPIRFHSPVYSIQIKRTDGKWEDILLNRTERISTPFKMAEWNSEEFPLVGKDAAHALSFSREEPEILIGARHFWQFFQAKEEVSPGLFVIQTTLGPLVNGESDFGPEIPNPELSMMVIDESNQGQMPTVKEIEYFFNLESLGIKDDPNENDDQTAMGLFNKSIRREKDGRYSVKWPWKEEVPDLPSNYRMAFSKLMSTFGKLRNSPDLMEQYDATIRDQLQKGIIEEARKAPGTLEHYIPHQGVLAKGKKLRVVYDASAHTRGTNSLNACLYRGPVILPDLVGMLMRFRCPKFPLLSDIQAAFLQIALEPEDREVTKFLWVKDASKPLAPTNLSTYRFCRVAFGVISSPFILAATLQHHLKGYESPVAKELAQSLYVDNTLLECESAEEALHKYAESKAILKEGFFNLREFVTNSPEVMKAIPEEDRLNKPKVKVLGLIWDTDKDEIVFEFPTNGLEKVATRRLVLSFLASLFDPLGLMGPCIQPLKLFFQTLWEEKKGWDDVLSEKEQTQWESFQENWKDQTIRIPRRSMLQGNPSLQLHAFVDASIHTFAAAIYLRAAEGNQISVWLIFSKNRLKPKNASKALTIPRMELMAILIGIRGLKFIADQIRRPISNLHLWGDSQIALNWVASKEAQPKFIERRVKEIRTLNECAFHFVRTAENPADIATRGAKPGELRDKSLWWNGPSWLKEGHNQWPKEIEFKIKDPPENLEEVSLDNEEKVFFVNTRTKELIESPLIDPKRFSSWTKIVQVTLYVLRFLRLKLIQRGNPHQLFESHRKEIVKVSEKGPFSAEDVHLAENLLIRIDQIKNAEDFLSYPSLKDSEGILRLKT

SEQ ID NO: 132980 - protein, 1510 aa, Heterodera glycines
MLMRFRCPKFPLLSDIQAAFLQIALEPEDREVTKFLWVKDVSKPLTPANLITYRFCRVAFGVISSPFILAATLQHHLKGYESPVAKELAQSLYVDNTLLECESAEEALHKYAESKAILKEGFFNLREFVTNSPEVMKAIPEEDRLNKPKVKVLGLIWDTDKDEIVFEFPTNGLEKVATRRLVLSFLASLFDPLGLMGPCIQPLKLFFQTLWEEKKGWDDVLSEKEQTQWESFQENWKDQTIIIPRRSMLQGNPSLQLHAFVDASIHTFAAAIYLRAAEGNQISVWLIFSKNRLKPKNTSKALTIPRMELMAILIGIRGLKFIADQIRRPISNLHLWGDSQIALNWVASKEAQPKFIERRVQWPKEMEFKIKDPPENLEEVSLDNEEKVFFVNTRTKELIESPLIDPKRFSSWTKIVQVTLYVLRFLRLKLIQRGNPHQLFESHRKEIVKVSEKGPFSAEDVHLAENLLIRIDQIKNAEDFLSYPSLKDSEGILRLKTRLGRCDQPFGFSHPIILGGQSSIRDLIILKCHQKRHHFGVEGTLTEFLLGYWTPRARTKVKKALKGCLRCKRMQAYQFALPKMPPLPDERVCRQAPFKTIGIDFLGPTETRLAGEKVKAWILLMTCLVTRAVHLEAMLDTTAESFLNVLRRFISRRGKPDLIWSDNATSFKLAQKTIEHLTTPGVDQNTQEFFALNKIKWRFIPQISPWAGGVYERLVQLCKNCFKRTLGRKVLSYDQLITFVAEVEATLNHRPITSVSEGMDEFLPLRPVDFLQPEVRIHWDTNGEEFDPSDRNLSSHQKLVALFQATKESHEFFWEMWQKEYLLLLRERGKWDHKSPRLQDRTEPKEGMIVLIHEEFTPRNQWSLGKIIELNGRPGAIRSVQLELPIHGIKSKRYGTMPRKIIITRPVNKIFPLEVGLDNPTENEEKFEESSNGTPQITNEKEISHLEAPMDEKETETLQLVDQPIDQNRHGMITRSKAKMGTVLNCLSILFAMFALVGAYPTNHCNECKLLCFNKGVKAKIPKEINKVELCCAENCYIHANVKKLTYELPKEILLNDFKCEGHFWMDSKHMFKKDILCPAVDECELIECYFCIEQLANPTCYPLISSMLAGGLCLSFISISFVAFSILKVLFSGLYMVIWLIIQFIRPIIYLAGPNRPPKDRRPRATASQNWTSRRVYRTMAFVVLMANSLQNLTGAETIAVMAKSEKCIKNATSMRCIVENSAMLTLLPVGQTNTLLLKTEEGVLLGSINVVLKALALECQSFTKAWQRSYAINVLAGKRCPKMGSCEGKYCSEVRHNTSIPELKDANDLPGNSFCLDSTAFWGNKCLLGGSACLFYRWYAQEKSKTVYEIMGCNSWEFIVYTIIRLETLGEKPKSTQVFLYPGRTLKWNNISITPIGVTFPPAPVLNSDFVFDGSNMALTREPLAIDFNCKNRQEAIDFNCSLGVQACTDCIPDHSSGLVNCNCRSHNLEKLMESPERRLPLNIKNYQLRNTGRKMFNGSTIPLCVLD

SEQ ID NO: 132981 - protein, 211 aa, Heterodera glycines
CLLGGSACLFYRWYAQEKSKTVYEIMGCNSWEFIVYTIIRLETLGEKPKSTQVFLYPGRTLKWNNISITPIGVTFPPAPVLNSDFVFDGSNMALTREPLAIDFNCKNRQEAIDFNCSLGVQACTDCIPDHSSGLVNCNCRSHNLEKLMESPERRLPLNIKNYQLRNTGRKVIALTGFSPVQLNLQIEGLQMALELHQSLCTILPLNISGCY

SEQ ID NO: 132982 - protein, 66 aa, Heterodera glycines
MLSTKFRQQLLALNSIVQFVSIQFRVAQHIFHEDCLSTWYFLKTQLDYIFILLNFDDSNERMIHIF

SEQ ID NO: 132983 - protein, 175 aa, Heterodera glycines
SSSAGSRNNESSKRNGTSHSASQKNVGTPPNVPIVLVIGAPGSSKSKFAQNIAKKYDGFVFISMGELLRRKVQQNGENELWAKIGKKMDAGEMIPMRICRELIYASVHERCPNSWGFVVEGFPRTLAQAEDIEAQLGHIDLALLIDCTEQFCKDALRKYTRDKEEGAERAGNGGK

SEQ ID NO: 132984 - protein, 56 aa, Heterodera glycines
RQNAHLKLRKYKLIFAIRTDYLVNRKQINHKIRTKNDFILECKLKMHNKLIYSNLF

SEQ ID NO: 132985 - protein, 118 aa, Heterodera glycines
PIKLLLEIVHNRYTNHFEFIRSQILQKCQPASLRLVDNQQFQMGQAMRVESASLWYTFERQLARLYVTRWKGFRIDQMVAVTCVFEGTAEEVERQQKALIKLADLFGGMDAGEENGLY

SEQ ID NO: 132986 - protein, 68 aa, Heterodera glycines
MPIKICSQFAPIGRPPPPTAPPAPHSRSIAQQQAQPWRIAPEHLSPKEWKVPREEETEKTSIRHKDKV

SEQ ID NO: 132987 - protein, 18 aa, Heterodera glycines
MAARKLSGNARKGNGKSR

SEQ ID NO: 132988 - protein, 47 aa, Heterodera glycines
MSSQQQQLDVLIVIDGIWCFNCQSFNDRLRESDFRQILEMISCSYNI

SEQ ID NO: 132989 - protein, 44 aa, Heterodera glycines
MAVSITQSTESGTLYSLAQIRRIANIAHSHGIPLHMDGARFANA

SEQ ID NO: 132990 - protein, 147 aa, Heterodera glycines
MIQADLLSSLDGKIKIIVKISTSDYKVPAVFKKFYYIKMFAPNQESIKSTEKKRINTHCVSKEEFLGDIEILLAGAIGEEVIYNRRFNGSETDIKKATSLAAAMVKEYGFYPEEIGYQNFLVINYLKEKIYNIVLKRWKNRQKKQAP

SEQ ID NO: 132991 - protein, 248 aa, Heterodera glycines
MNFRGATEAYAIVHSMPFAKLSHQVVKLSIHMPNQQPIVYRAFQLVSKAQQIQQGELPETQCSAYWKQWQNEWKHDPKLKDMLFEKVPEHFIWAKDKWNKRKYNLTKRPPIGRIVPVPPSDPERFALYSLMRHFPGDPDHLKMVNGLLCTSFTEAAIMHGLLEDDKIWDKTLAEAALSRWPDQMRWLFMSILVYGRPSNAVELWNKYKDQMYFPQGITTPAQRQAAELEALADIDWRLHSCFNLSCAF

SEQ ID NO: 132992 - protein, 48 aa, Heterodera glycines
RLALFSRKRSMLFVGPGELCPIPGPASTKSGHMAKGRKAKSAQNQPSN

SEQ ID NO: 132993 - protein, 109 aa, Heterodera glycines
  unsure (1)..(109): unsure at all Xaa locations
ASTGGWFGGEADQNGQFASSGXHAKSFLTRLDSAHSPGSPNSRNSFMQMMVLDRSRQPSADVIETVCLQNGVCTCAETTCTLRCSSCARLTFREICLNIYSPHGQMQKF

SEQ ID NO: 132994 - protein, 37 aa, Heterodera glycines
IFKCLDFFWLTKTSSNLVLSILFQIAPNFFYSLTRPY

SEQ ID NO: 132995 - protein, 75 aa, Heterodera glycines
PGLKCPAQAKNFFYFLEKIEIFPEKIPVDRARKTMFWKWSPFSREKSLKNLKIQKPENRFLGLARKILKIFEILK

SEQ ID NO: 132996 - protein, 70 aa, Heterodera glycines
MEGNEQWEEEEDEKEEEEKGMEEEMGEDEKGEDECIGGKAFVFVGVVQIYADAREGITAAEFTAMLRWTI

SEQ ID NO: 132997 - protein, 55 aa, Heterodera glycines
MTQFSASFLAGQNEQKLKENEKTNSTRKRKREEKEGEEEREGQKGDEEFEREEEE

SEQ ID NO: 132998 - protein, 173 aa, Heterodera glycines
MRSVAICADSTRTRGRQMRKYGGTISRCNGRRRRIERGDGGGPIRTASRIAGGRGQRTDLGGRGGKVAIGVGRVGGESALQPQRGATAAAGGGGGGGHGECVGTTKARTLRGHSTIVRPAFIEPFQEMRLDAYPLMGHGRRAGGTRLECNAPAHYPRNRNSKTEILEQSIAEE

SEQ ID NO: 132999 - protein, 42 aa, Heterodera glycines
MKKWMREGRKEDDEMDRRKTHEEEEEEMEEEAEKEESGREME

SEQ ID NO: 133000 - protein, 58 aa, Heterodera glycines
MAFWGNGTYALLVDWKAVELTMRLTEGEAEGGGGGGEVKEVEAMPSKEEERSWDRGYK

SEQ ID NO: 133001 - protein, 101 aa, Heterodera glycines
MTSTDRPNWAGHFRMDGLEANERYQVNFAKTDFDLVMEWSLQFRLRPFGEGSRAVALSQWVRTEQSVPVEAVRHIRFRMLDDTHVLLEWEPVEKVVLLSLA

SEQ ID NO: 133002 - protein, 195 aa, Heterodera glycines
MRQLVINHFGRPEQRANHGGGGGGDIAEAATEQRTIAVPCQRFVRTRQADIFTRRSTRVYRPVYTKGRVLRPPPTAGGEAAAAEEEAEAVTPTPLSIRTRPFGWCSAEAQQMETDDEEEEGEEEADANSDDAGGESDGLEQPVRKRARAEPVQEMLVEVEEAAVPPADPDLEEEPVAGCSTWNQQRRLNEHIFRN

SEQ ID NO: 133003 - protein, 166 aa, Heterodera glycines
QAEANNLVVAKSLSPRVQQQPLATVQSFSPTNGAIGNEQFRFSFFSSVCRPPWTPQTEKRRLIGVKDFVSQNTFSKEAASNTCHVAVPSVTPNLTKVSALSSEVARRCSTSALCANGSNFLGKNDGILEESTKSAKTPQKLEKQSHLTKYIPPKRTAEELLLDKLE

SEQ ID NO: 133004 - protein, 205 aa, Heterodera glycines
MAEKLWEKAKLGTKTANECVGEEMGQKMMEMCAGGTSKAKEIAQNWGKSALIATGQCVLAQMQTEEEQIQEEQNAEGMAKLAEFDASFKECAKALAPEQKAKSGIDMEAKANQQLKPSDLVNAVLKNKGKADDGKSEGNDDKKSKKTQKNGKLITLEKGKGKGNLEFYPYMGMIVVLFFLGQQSLIASLLLLCALPWILRPKNSD

SEQ ID NO: 133005 - protein, 95 aa, Heterodera glycines
LFEYPKRTLEKINFFVFGAVPPNRCAQIYGETESFGNSFPIACTLILRWIFAPHNCLSTPNGHLKKSIFLFSGQSPRTDAPRFMGRPNPSGIASL

SEQ ID NO: 133006 - protein, 42 aa, Heterodera glycines
MLIKPLFTFSILLAFFGQIFCDILGREQSAGAKGIDADDLMV

SEQ ID NO: 133007 - protein, 135 aa, Heterodera glycines
MLSIEPQKRMTAKGIIDYLEGKCKPKEYEKNAEKMALFGDVSAEKLRELMEKEGFKRTTMKKVKNNLKSAEENTKIFMQQLEERSEFFSIWQNFPILSFSNLLTWVVIPFPNPFRLFSESNSLKLSFRIVSRVAR

SEQ ID NO: 133008 - protein, 108 aa, Heterodera glycines
MAADYIQQNPEDFLPFLANENGEMFKDEQFDDYCSKVARMCASGGTWGGEPELRALSCVLRCPIEVLHADGATIKFGEVFSGHPLIVTYHKFAYTLGEHYNSTKPTGE

SEQ ID NO: 133009 - protein, 201 aa, Heterodera glycines
MEHLTDAPPWASAMLGLVNQMVGMCRELIFMVREQDGGSNPNSVFDEERRLHSVVIAQLQESNSQTPTQRATDDLANVKELMDHCDIECLPTQVYRMGKKQADGRPRLLKVELPTKFHTNLFLRNKNKIKNFNKFSKVLLRPSLSKSDLIDRARLITLCKSQRENDPSCDYIVYAGHVLARDDIPAFKSDLNFKCICHNKS

SEQ ID NO: 133010 - protein, 84 aa, Heterodera glycines
MAQHSAMRFVMALEQSDVIYLGASEFSAIILFSMLSQRSNNRRRRHPMTCPPMVMPAPPASMISAITPLMCNSSVTLSRPFDRF

SEQ ID NO: 133011 - protein, 68 aa, Heterodera glycines
MLDFMLQNLTKDHFKIIIPHLFIICVVKTLNISYSSLSIPKKILRQDALFDCPNNSKEARDLRSQTGS

SEQ ID NO: 133012 - protein, 54 aa, Heterodera glycines
MTISTYAWNSCHKKVFFRGGFIAIAPAPFGQFQRTRYRRTHRMNPIFILLIIIF

SEQ ID NO: 133013 - protein, 178 aa, Heterodera glycines
MTEKNIRGMRLCADTFYHLRQLAPSILNDCPLLRVINFQVTDLFTEFPADDSAMASDGQAVAKWLFTPRICLGFFSRQFLVVIWVFPPSLADSVLPFDQTNELTREHLALKRSVNRDDCFLLVRCPITRNESKWTKWEEETIGGDFFDQWNRIDINIWEDEIGDGLLDATPGPNDQQQ

SEQ ID NO: 133014 - protein, 53 aa, Heterodera glycines
MPNWGDKGRVKRKFGNLNNISFTFYGKCIGPLSPPAEEEKAGQSVEKGAPSDK

SEQ ID NO: 133015 - protein, 27 aa, Heterodera glycines
MFNKNANKIQILFSMGRKRDYFLIIKY

SEQ ID NO: 133016 - protein, 62 aa, Heterodera glycines
MASLLNTSCCLLFINIILIGRVLASAQSEPGENEWFSNDTNMLDKSAFTLHAAATGSVDNDL

SEQ ID NO: 133017 - protein, 132 aa, Heterodera glycines
MSKNTIKFNILGKPEAWLSRRSCDFLVNFAWINATISYRGDVSVRNICQMQPGCERNSACHFLKLLSTQRMHELKDYYLFGNSLFDKETLYPLIDNPCICKDGLQMNVRVVGDLYRRNMAIIQLDGSVFFNN

SEQ ID NO: 133018 - protein, 32 aa, Heterodera glycines
MTTEGREEKEKKTNDNNNNRDGGMVLMEWRKK

SEQ ID NO: 133019 - protein, 203 aa, Heterodera glycines
MDNTAPKKFLTSLDQLQIPPEIDNDSAIPDYAKLLIKQLHSLLATASSLVQSQVTANDAIEEDCRQRTVVITNVPEFQSWKASERGEADRALVNLILDTVDLDQTPVVFRVGMRTPNRARPLKMEFPTRHAARHVLRMKGKALALNALHGARIRESMTKEQLAERRKLIEQCAKKRKEDAGDWIIYANQVILRSDIDTIRKNF

SEQ ID NO: 133020 - protein, 161 aa, Heterodera glycines
MHSAAGTSSSNFNWSKYLEGIFLCLIIFLVESDWVLAGDILFLLGYDSNFDLQKGIYESSNQMVARLSDVVDTGQSASMNMDCIALSDEPYYGQFLIVAGQDEFCALYETKHFSLSEMDGVVNFDRRFDAPSNLSFNVQELVRVQTDKHPGDDSYQAILFY

SEQ ID NO: 133021 - protein, 24 aa, Heterodera glycines
ALPGPGPGPELFKTRDREPGQTRT

SEQ ID NO: 133022 - protein, 150 aa, Heterodera glycines
MGVCALDLFLFTCTMENVEPNDDIQQNNMMNMFSVEFSNKNNNNTFDMKRQLNLSPMQPSYKPRALVLCISRIFLFEKWQLLIACLEAYRIFKVDLVVAYVQSAILSVFELMRAYEKDGILKIRPGIRFPHHRGMKWDPNAETELEQTKK

SEQ ID NO: 133023 - protein, 125 aa, Heterodera glycines
MAAATAMQSQQQQQQQQQQLAQQATTAAAALRGDRASAAAIAAGAYGGVAVSGGYGGATTSGAFGAGSSGANVNGPPMATANVVSRPNGHRQFRAVPAELLPAVLPAAVWHRWARQRHAKRRERH

SEQ ID NO: 133024 - protein, 212 aa, Heterodera glycines
LRFFVIFITFFLILFISPSTPSSNRAAAPFGAGAAQTHRCFSCMSPMYAELFKDSVFRHFYEPKNFSAKCDDPMEPTGIGTVPCRGICLTLSQEFIIMGRKTGKRLTMRGCASTLSRHGYGRKTGKRLTMRGCASTLSRHGYHNRTIAFFAEFDLCREVLASELFRLTSESSSEEIVCSCLGDKCNKQMSSGSAVVVRRHFFFVGMAPVLYA

SEQ ID NO: 133025 - protein, 109 aa, Heterodera glycines
MNPSLRHSFSIENILTKSVNFEAFSEPLLPHHFLGRCFDKVPTFVLEPPPKAFPTEFSSAFFERNNGEREGVRKLEFLLKFRLWIWNCELDDGFVIIDPEKLQDQDFMT

SEQ ID NO: 133026 - protein, 47 aa, Heterodera glycines
MIYPAPKLKAQKWTESIPTVRAVLSLGAMNMMNIYQIGSCPFSVSLP

SEQ ID NO: 133027 - protein, 177 aa, Heterodera glycines
LPHLMIEPMKEMAGFIVMVFPLAQFVAMFNWSNMGKFIAVGLTDILESSGLSGIPAFVGLALLSSFLCMFIASGSAIWSILAPIFVPMFMLLGFHPAFAQILFRIADSSVLPLAPVSPFVPLFLGFLQRYKPDAKLGTYYSLVLPYPLIFLVVWLLMLLAWYLVGLPIGPGIYPRLS

SEQ ID NO: 133028 - protein, 330 aa, Heterodera glycines
EHKNRRLCFATLSFCEQLPALFGETTHLIIDEAGQAPYVQILNLVSQLPCLTKVLITGDRRQLRVHLPSLPIAIREGFGMDTVIQNLDVAQGTDVTTLSVCFRSHSALVRCTEAGFYKPHGELLTPGRDDSERALMTDQAAFKLPKKGVPLILVHQSTPAQRDEVSTSSANPGQTDTAMRALWRLARAFPGTLVRCICFYAAQALEIERLVAQQEIPDILVTTADATQGHESSLAVVVTTCSVLDSGADSQPFWAYAARVDVAISRASHGMIIIGDLLLLNRTVPWRRYLDQATTETTVVGPEYFDFEQFNNPDNYHDKDGQLISANGGA

SEQ ID NO: 133029 - protein, 87 aa, Heterodera glycines; identical to SEQ ID NO: 129152

SEQ ID NO: 133030 - protein, 25 aa, Heterodera glycines
MTYQLSYVHQDHCILGCAGHHEGVV

SEQ ID NO: 133031 - protein, 60 aa, Heterodera glycines
MQKSTSFEDWCHERRVMNESGKANANIAKENALCAETMKNKEVSGKLGGSSKKSAVAAEK

SEQ ID NO: 133032 - protein, 21 aa, Heterodera glycines
GRFAPVFKFSWAFSAASRPQT

SEQ ID NO: 133033 - protein, 368 aa, Heterodera glycines
MKNLARQYVYWPGIDDQIEEIVRSCQTCASEAKAPVKTILHSWPKSDGPWKRVHMDYAGPFFGKMFLVIVDAYSKWPEIFEMNSTGSAATIGKLRYLCARHGLPETLVTDNGTQFSSKEFKEFTRLNGINHLFSAPYCPMSNGQAERFVDTFKRTCRKLKKEGITEMLNTFLATYHVTPNESLPECKSPAELFLQRKLRSTLDLLKPKNRIVIRDEAMERKFNRRHGARPRSFDLDDMVYARHRLSQDWRPGHITQKKGVMYDVTFQDGSVGRFHANQLLVRHSDVDEEDPLDILNDAFGLPLAQANQQLGDVVAQPAGGVIEIAPPSPRPDQPQQLNEVNEERAVQQNVQNERPQRNRRPPDRYSPG

SEQ ID NO: 133034 - protein, 158 aa, Heterodera glycines
MKFAKKMLMIPEAEYLALRSAMNSGDYLQNEKASLDAKISQNLQDPDISEDLKAKRHDWLYKERRTVKGILENRPQKVVIENHVPGPNVAPYLGLNNQSKPQETEEPRKIIIPRKRLEEQTPDPESDNDTLEELTPEPQTTSTLKTPITIKTIIHPTL

SEQ ID NO: 133035 - protein, 135 aa, Heterodera glycines
ESSMWSLEVPDIDNFETLRNIMDSSKRQDYLPTIQWVKANRGEDNDRHDLLFRLQCQHVIRLLETNGKRQALGYVKEMQDEEKEKYKEELKHLMFVVMTHPQKGPHDYLFNEGRRFELEWKLANAITDYRSSLST

SEQ ID NO: 133036 - protein, 64 aa, Heterodera glycines
MPQRSLLILFHDTAGITDFGSIELRKPYLQVPIAVVGTNCEMSGKKVNTESALLWASRVKKVGR

SEQ ID NO: 133037 - protein, 141 aa, Heterodera glycines
FFTPVLPKPLRKVSSSTTKTSSTSPVPKSHVTTLPRRTKAWTTKRTTTIATTETTTPLTTTAPTVEPLDFEKVGIGIRDWHQIGVGLAGLKSLFCSRFCRDPDPGSFFKKGPGSRAWENPGGIPIRVWALITIQIFKIKKL

SEQ ID NO: 133038 - protein, 151 aa, Heterodera glycines
MDDINGSNSQALSAADQQSINDDHSVNQEQDDDINNVYKHKGQIEFRMTNFKAFSEGTEPKEVLSEPVVYMNGLPWRILAKHNDDASFGLFLCCFGDETDMAWNCLATKQLSVVSCAKSGQKCQNEKGNTNDYDRFDAKKLRWGWGKICKI

SEQ ID NO: 133039 - protein, 100 aa, Heterodera glycines
MNEQKGFYDANDDAVTFKAQVVTQPPNGMPGLRTVDTLRVNGQLVYVNKFKQVLDAMNKSDFEITGRNYMVALFDHNKMDRYALKELDERHKQLFATSPQ

SEQ ID NO: 133040 - protein, 86 aa, Heterodera glycines
MATLIRRAIELGRERTAELEETHATTSIADWLNVGQAATQIRQRRERVIGREMKRKDKEMLKMVKLMRIETNLSNLNGNEIENVKK

SEQ ID NO: 133041 - protein, 145 aa, Heterodera glycines
AFVGTFNPSGPINKEKNTVKINFINAIEQFMYDYTVLKENKKERKDVEYLKVVFAKFAKLWDLAHFAQICAEGKEYEQTYVNGTPFVRNVRYIFAKWADIKKMAVDTANNQVSEQSLEFAFGPLFWNYKNKFHGPTAKKHSVLKE

SEQ ID NO: 133042 - protein, 318 aa, Heterodera glycines
MSEMGTPTPNVRNRTPTPNVRNRNPRPQMSEIGTPTPKCQKSEPRPQMSEIGTPTPNVRNRNPDPKCQKSEPRPQMSEIGTPTPNVRNRNPDPKCQKSEPRPQMSEIGTPTPNVRNRNPDPKCQKSEPRPQMSEIGTPTPNVRNRNPDPKCQKSEPRPQMSEIGTPTPNVRNRNPDPKCQKSEPRPQMSEIGTPTPNVRNRNPDPKCQKSEPRPQMSEIGTPTPNVRNRNPDPKCQKSEPRPQMSEIGTPTPNVRNRNPDPKCQKSEPRPQMSEIGTPTPNVRNRNPDPKCHKSEPRPQMSNIGTPTPIVRNRDPDPK

SEQ ID NO: 133043 - protein, 50 aa, Heterodera glycines
MFMELRLISPNVREGFPFVLGRFVKSANLGMFRKSANLGMFRKGATVVVL

SEQ ID NO: 133044 - protein, 105 aa, Heterodera glycines
MDVGRVRQLSSYAFKLFVIADVFLEHDTVFWVDTSIVFHNNNTKPILASIQTGKIGPVQMPSNQMVALRIFLMFGQSVSEGQFVSGQFLICFINDQNLRKSLLNL

SEQ ID NO: 133045 - protein, 80 aa, Heterodera glycines
MHQTGVVVALPFAISIFLSIAVGRLFDRLIGTKAALVLLTCVLQARMVDQSFGNADQYSTNAKPRKRIRTKKISKLQTPD

SEQ ID NO: 133046 - protein, 247 aa, Heterodera glycines
FKIKFSFINFEEKYFKKFHFTSNFDKKTRTEIAVKRKLTQRKYNFTSRDFAPLERVDFAPLERVVVKSIPFAAGSQWQFLGALYFCTVVITTIGYGHSTPITVGGKLFCMMYALGGIPLGLIMFQSVGERINHFIASLLGKIKASFNSNDIDWLVHVKSRHLLCVSFAIGCVTISVATCVFHQHERWSVCVFHQHERWSVFNSAYYCLITLSTIGFGDYVPAQTDQRLHKEPFYLVNKILKILMQFI

SEQ ID NO: 133047 - protein, 21 aa, Heterodera glycines
GITVDGLSMVLVNATADTYAN

SEQ ID NO: 133048 - protein, 55 aa, Heterodera glycines
MKNTFYYFTIFTVFSNLHVKALPSKDKAGTRNGQIADSLADQMEKVLNKREYSDV

SEQ ID NO: 133049 - protein, 198 aa, Heterodera glycines
MAKVHHQMPFLPNIKNNGPPLIHQSASTDAKQHKQQQNIIAVIEKHLEQYTSDSTKEEQHEAELFGLGHIGDDTPLEKKRLKQAATDNDRNAGDDAQALASSAGTKNEHCEALHGWLSTFLPLLYVNKLNSLCAKQPQSESTRLLMAMKAQDDPKDGNDDGTVAPHESLWTKKRATVEEEMCEFGIRMGCAPSIYEII

SEQ ID NO: 133050 - protein, 211 aa, Heterodera glycines
MNKPQPNFHCPLCGRYLCASVFSSDNPLDPREQHQPLKRESLIPSMRNVKSMLKRLFGGGGVENGGKASATKLVVTAQNDGPSRNHLMDIVGSEEEETVKKKKRKLNEDEGNNDQREEEESGKKVRVVEESGKKARVVEESGKGMERVEESGEKEGRDVGENGLGNETMGESLGEEGKEVKKGETVGDVPATIENGNGHDQTEEEQQTKAD

SEQ ID NO: 133051 - protein, 67 aa, Heterodera glycines
MHFSLPLALLFALILTLCNNFCDGMRRNNNKSLLNNLSKNGNTVPRTQISGIMNRQAGQELTLGQPA

SEQ ID NO: 133052 - protein, 131 aa, Heterodera glycines
MQSMDLLRELSEYSGGTRRTKRWEEKAREIDQTEEGKAKNAANDQQSDQNEGIPIEVIVYPGTASQEEAEKGYEGEQMEEEEEEEEEEPTPEQMARWRRRRLLPNEVSVSMKCHLSRANQWVGLDKVVILT

SEQ ID NO: 133053 - protein, 51 aa, Heterodera glycines
AFSDATSLLQTIQANSGGGAVGVVPLSSPAVDSAGAKSAILQQQQQAHAAP

SEQ ID NO: 133054 - protein, 21 aa, Heterodera glycines
GPGSRSRVLKSSGPGPGPGRA

SEQ ID NO: 133055 - protein, 48 aa, Heterodera glycines
MLILGLGRTMPWALGIPLIDDNVKRHKMPMYFAAINFFKIMGPSCGFL

SEQ ID NO: 133056 - protein, 38 aa, Heterodera glycines
EDDQHQDSASNSNTATKSSKVDTISLENIQQKELDKQI

SEQ ID NO: 133057 - protein, 141 aa, Heterodera glycines
MALTLGPIPLWQILRGAWPAVLCTRNVCVFVLIDSPGGLKGTHRHTHRDEAKQLIRKEGEVEEKQCYWQRKRERGRDNAIGRKEGKERKNVEAKRVKSGDLHLKGRQRSMEVRDRERMKRKREREKGGKGEGMGRNVGQVD

SEQ ID NO: 133058 - protein, 18 aa, Heterodera glycines
MRNSKTLKFRLLFEFGSK

SEQ ID NO: 133059 - protein, 130 aa, Heterodera glycines
MDNGSYLLGAQLEGSDMDLICFVPNDINVYNFYGENKDSLLSAFKMTKLTDVDLSFVPAPKSFVNLLNADFKSDEIVKEIKFESALYSLAGSLNISDNWILKLRRFSELRKSETRNYWGPKCIISIIRKF

SEQ ID NO: 133060 - protein, 129 aa, Heterodera glycines
ALSVPSSSVSRPLLLSLQSALQLSPQRYCSLSDSWPYLVLDEVYHLIWAAIPNNPTPRHVKMDRHRQLDRSCTFSGAPVKGNLNKRANPSSRSIRYTSQPRGAAIQRWTLPSSLAVTTGILVSFFSSAY

SEQ ID NO: 133061 - protein, 39 aa, Heterodera glycines
MPQHLARCACLLLAHAKAVALVCHVERRGAKSLVYDLTT

SEQ ID NO: 133062 - protein, 47 aa, Heterodera glycines; identical to SEQ ID NO: 127360

SEQ ID NO: 133063 - protein, 99 aa, Heterodera glycines
MDLTKLEPCLKEYYLNCYPYDLIFKWLSYSNKNRDYLSKREFAFIKGQSHLRFFSFVEPKEFMVQLRKTPPQKIDLGAVYNRPGHKCVQKVLALDHNCG

SEQ ID NO: 133064 - protein, 171 aa, Heterodera glycines
MRAKAKRANRLSAISERLSRNAAMRNAKRDENGGQTEQSNGKRDEDKTNTTEEEQHKTAERGTNTTALAQLATERGTNTTALAQLATERGTNTTALAQLATERGTNTTALAQLATERGTNTTALAQLATERGTNTTALAQLDPEFFRRLVTNVINRGGGNEEKGAEEKVKK

SEQ ID NO: 133065 - protein, 105 aa, Heterodera glycines
GRFAPVRGTTAIRTRTKVIRRGTTVIRRGTTVIRRGATVISRGTKVIRRGTTVIKRGTKAIRRGSTVIRRGTTVIRRGATVMRRGTTVIRRGTTVIRRGTTVISR

SEQ ID NO: 133066 - protein, 678 aa, Heterodera glycines
MPNKAKNLRKKMKEDRRPAEKSVSPGCSPVPDGSADGNGAASPRGFNTPNISALQLSTPASSIGSKRRGRPPKARAEPITASQNSVSTIDIPIESSSQKADFSPASKKVKITDVGRALAVNEAIASTPTTTQRNRGGRPAKKRGGHAGSGRSKANDSMSESSSMDQSSEATTSVAVLPTVPEKINFSTVPINFATSRNMACKIRRWADVGLYERDGETSQGPRSGPRFIETCWNDLTQFLNDAFVVEYLAYLASISQRKVVVVDPVVWQMGIDRVIQYKNMTFGYDANVPAEVILLPVHFPGHWTLIVHDVQCGTHFADSLPTPYGRLDVQLTDKIIKIISDILPSTMLTGIVDVQNLTAQHDGNSCGYFVCLYAESWLMNNRTFVLPDLSINYEKKRILWHINELYGSDNVPYHPREGVPTPCPIVYRHADEAQSTSKAVESMEVDDNDDIMIIEPQTSGQAANAILTQAQVAGENQVDSLGLVSESCAPQEPIAQADDVIFVRPKTPTRRSVRIGRRQSASISRSPSPAPKRRTSENVPGQVTRFTKRCHLVHKGWCCAAAAAKHFPEYSDSGKLGEKKCAHCGALLFPHEDSSHCCRQGRVVLPKLNPHPKELEELIVCDKQPREGKEFVRNMSRYNNLLQFASVSAGNKPCPAGGPMAVILNGEFHRRISSMQA

SEQ ID NO: 133067 - protein, 223 aa, Heterodera glycines
MSKSASFEEWCHERRTLNDGGKSNVKIPNENALSEEMTKTKKHSGKFGVSSKKIAVTAEKDQASRRNKNAEKNVDENVVLEVLDAATMEPLSSQTAAAIEADARIIITKAKKGKKREQKIANRSQTKKLRATTEKTPNAVPEENLGTSTEFEKKKTRSYESGWKKYPKAKSKLSDEQIVRATVNRLVAHVLYEETMKTAEAKKRKNQETAQDCNTQKMRKSNI

SEQ ID NO: 133068 - protein, 99 aa, Heterodera glycines
LFGKASESLRIVMNPMMDTIPIPFAMGMATIPIPFARGMATIPYRLLGGWTTSPYRLLGGWPPSPYRLLWGWLPSAYRLLEGWPPSPYRLLGGWTTSPY

SEQ ID NO: 133069 - protein, 332 aa, Heterodera glycines
MHLNTGLEEDLLKLATKNLPIKFHDLILATKNDALLKNVVQFVQKGWPNDKDLGQEEEIVRLFHRRKDDLSILKDCLMYGERVVIPKIFQSKILHLFHKGHPGMKRMKQLARQYVFWPKMDQNIEEFVQKCEPCQAAAKAHVKVNLHSWPKSSEPWQRIHIDYAGPFYGKMFLIVVDSFSKYPEVFEMTTSSATATLDKLHNGTQFSSSEFAKFTAANGITHLFSAPYNPMSNGQAERFVDTFKRAFRKLKGEGMPNQEIIETFLITYRTTPNDSVPNSKSPAEMLLGRKPRTTFDLLKPPPFRPLIRDLAMEEKFNKRFGTKPRKFGIDDK

SEQ ID NO: 133070 - protein, 255 aa, Heterodera glycines
MRGGQMVTNTINRMCLTVKGVENAIGDFPFYYTFKYERNSGEDGNECKYNHVDAKDAELEEHLSFYHDNGKDEKLAILLRSYYNEKKELEEREKNFAQVNSLNDLRAVLRAHDNRHKGLAEQEYYEQVINQQHMFGFLHPISEGNLERQKVIYDAAKNELDAYMTKMKGQLEGQHKQLENDDDEFSSKIKQIEGQPEQSEKDDDELNSNMKQIEEKQPEQSVIMKYIRKIAKKLKTCMKGHVKNGGDNSNEKCED

SEQ ID NO: 133071 - protein, 33 aa, Heterodera glycines
CSPPPSSDLFICYFNLSSINYLFVRPFDISRTE

SEQ ID NO: 133072 - protein, 58 aa, Heterodera glycines
MQQKSGEANDGHTQRQSDGAKATKSNDGVTDCCRTTTTNATEPIQRGTIRHAIIAKSK

SEQ ID NO: 133073 - protein, 63 aa, Heterodera glycines
MARAIPQFCPVIFSLLLGDYFAQQQKEREREEKKSNPLNVRESAWGREGEQEKNEEERKGAEK

SEQ ID NO: 133074 - protein, 18 aa, Heterodera glycines
YREAIPEGFGLPINLGAS

SEQ ID NO: 133075 - protein, 93 aa, Heterodera glycines
MDQEMSAGIQQSRPSGKINHEILMEETRRIPILGEVVGQLRNIYGSSLAEQFKNELIIASQLNRGPMNNGISNPHMDMLLGVDEKISDLLHQL

SEQ ID NO: 133076 - protein, 23 aa, Heterodera glycines
MVLDPKSKDKARELGSYRDMRFE

SEQ ID NO: 133077 - protein, 70 aa, Heterodera glycines
MDTAKFCATDQFEKFLATGRQRLQRECAELKSQKLVSALFERKRKRDNEMALLADEVDQLKFELVIKIMI

SEQ ID NO: 133078 - protein, 29 aa, Heterodera glycines
MAISFFEKFSMQQTLSNMKRSAKNGYLFF

SEQ ID NO: 133079 - protein, 29 aa, Heterodera glycines
MAISFFEKFSMQQTLSNMKRSAKNGYLFF

SEQ ID NO: 133080 - protein, 29 aa, Heterodera glycines
MAISFFEKFSMQQTLSNMKRSAKNGYLFF

SEQ ID NO: 133081 - protein, 29 aa, Heterodera glycines
MAISFFEKFSMQQTLSNMKRSAKNGYLFF

SEQ ID NO: 133082 - protein, 20 aa, Heterodera glycines
MAISFFEKFSMQQTLSNMKR

SEQ ID NO: 133083 - protein, 29 aa, Heterodera glycines
MAISFFEKFSMQQTLSNMKRSAKNGYLFF

SEQ ID NO: 133084 - protein, 29 aa, Heterodera glycines
MAISFFEKFSMQQTLSNMKRSAKNGYLFF

SEQ ID NO: 133085 - protein, 29 aa, Heterodera glycines
MAISFFEKFSMQQTLSNMKRSAKNGYLFF

SEQ ID NO: 133086 - protein, 27 aa, Heterodera glycines
MAISFFEKFLCNKRSRNMNEKNGYLFF

SEQ ID NO: 133087 - protein, 29 aa, Heterodera glycines
MAISFFEKFSMQQTLSNMKRSAKNGYLFF

SEQ ID NO: 133088 - protein, 29 aa, Heterodera glycines
MAISFFEKFSMQQTLSNMKRSAKNGYLFF

SEQ ID NO: 133089 - protein, 29 aa, Heterodera glycines
MAISFFEKFSMQQTLSNMKRSAKNGYLFF

SEQ ID NO: 133090 - protein, 70 aa, Heterodera glycines
MNMLHPFHLHGTKFYVLKVGTMEPEYGLNSDVQCAGRLFGDEMVKYKLLQRKHTTFEEGITILIKFTMNK

SEQ ID NO: 133091 - protein, 168 aa, Heterodera glycines
MNSTKRPLEKNKKDSIKSITKERKLELRNIAENGQIENENKEEEESDQLSEEGEESDDGEVMPEIEDGNDQSEEMAKLDFEFEALPPAEDDLDDIERLLIQIFLQAEVDEREMAKAVVGQSPMGCVFRPTEESEDDESEAITYGVLSIVPLNGTQANLGRQFEKKIKL

SEQ ID NO: 133092 - protein, 52 aa, Heterodera glycines
MLAQNNEDKKGTGVFPFQIIQIDGKGKHLWVELLNQIKFRTKEIYCTKLDCA

SEQ ID NO: 133093 - protein, 148 aa, Heterodera glycines
MGNNVLMMTTFANSSVWDRVTVEVNKVQPWYYGLMNIRPGLTGKDGNELQSEYIMPYKNGVPAIKAVSSLHQQIQPLLNGFVIRTVKGDDLWLSMSNGDGPMVALHFSWAESRPTKVNAVLAQIERVSERISRRTEEFLIRQVEKGAH

SEQ ID NO: 133094 - protein, 42 aa, Heterodera glycines
MSKENTLTGEEILYIRSLFVVDNEKQFIISNFMLSNSCDFKF

SEQ ID NO: 133095 - protein, 333 aa, Heterodera glycines
MVRISCLFVVATYCLNGLLLSTTIMANSDEETETKMPAKRPRKQKETPDYYLSSYLPTDYSRSSSSAEPDNSSDEDWNAKEEADTKDEESPNVSLANSSSSAADEKQLLGHKVTVQNRPKTGQSVQNKPKKQKSVESSPEDNENIERLKAEVQELMRKSKAKAAAGVGSSKTKTNLQTSKSFKESGDRGKGKGKTTEETGEPSKKMKKATKGKVPKKQTSFDDLNISEILANLDNSSSDEVVSKKSKAPANSSKSLKLSSPSKNKQKQKQNSSDESVEIITPVKKERMQKKGKGVKVEKPTASENAKAMETLNINAGRISGAMTLVKNHHNGR

SEQ ID NO: 133096 - protein, 199 aa, Heterodera glycines
MHDLFNSFIIGQLSAANGTDGSMSQPSDPMTHNQNRLVETNFAKFSRETNQANNHRGGTSKQQTKSMSSKSEEKMLWPSTNQPNGVPLDMDKVRLFSNAIAFIAMEFVASSSESRAELYTCKCLSDNEMEKKIFGPNGAILSHLNASFLNSAQKKRQFLKLLFSFGSILSTETAQIRGAKQKVKVNAIVKAYECAGINR

SEQ ID NO: 133097 - protein, 25 aa, Heterodera glycines
MRSPPAIPRSFCSAAKAKVRFQCPG

SEQ ID NO: 133098 - protein, 41 aa, Heterodera glycines
  unsure (1)..(41): unsure at all Xaa locations
NFLKYKPKLFGLFKKELKIFXIFIHLPFDRKSIREPYLTFN

SEQ ID NO: 133099 - protein, 267 aa, Heterodera glycines
MNFKTAGGLGNKINEAFSHHYKIKKQRGKREAKAEDTKDSKIDVAKRAAERAGRDVERHFNQINNISNSIQTQLNTLRETNPHILEEPDIKIWFDKMVEMGTEIQTSRNELKSFQEEVDKAKNTTLEHVEKNDLKKAKKSADVAKGIARQAKTKYTSTLEGYNDKSEKGFSGIVNRLNEALGEHIKRKDIENRQVSEAEKGPQKRERLANEDVQFQYDSIDQKFIVYLSAAVSHIDLSKHLAYVLGFKNTRLFHAEEANYMPDLTGG

SEQ ID NO: 133100 - protein, 198 aa, Heterodera glycines
LPHRVHNISIHPLYQIHSAYDAALIRISPVSKFGDSVWISPVSKFGDSVWPICLPTFPASVNRMCVVTGWGRLAEGGKPQNLREIHVPIMRSTTCNGVSHYAGRLHYPSMLCAGFNAGKADARLHYPSMLCAGFNAGKADACQGDSGGPLQCQNENIWELQGIVSWGIGCANPKFPGVYTKTFVISPWIRAEMLRLKT

SEQ ID NO: 133101 - protein, 179 aa, Heterodera glycines
MRPFDSVDTEFGPRAGDDDTSLVISRWALQCIRMIAGDDAKMTTMKTVNADSPEQISPTDAANSIFLNPSIALGNGNAFPLFQQMQKAKRIRTAFSPSQLVKLEQAFNGSQYLVGSERKVLAKQLALSETQVKVWFQNRRTKSKRLDNGEMMPSKRGAEEESERGTKRKETAQNTSNET

SEQ ID NO: 133102 - protein, 51 aa, Heterodera glycines
MTLVGSIALLLILFIVFLAVLLRMNLNKKENRGHCVKNEEVRMALFITLIN

SEQ ID NO: 133103 - protein, 45 aa, Heterodera glycines
MGKRHGVHLCPLDIQTGRNQPQNSDFLRSATPGNEHKFTQLNHFG

SEQ ID NO: 133104 - protein, 635 aa, Heterodera glycines
MQAILTQKNRTKLQHNGHSYIFHKLSAEGEVRFWSCEHHHAKDIRCKGRLHTNLNNNVLREVGNHQCEPSAARMEAQRVITKIKRRAEQTMEPPATIRSLSLQNVATPVLPQLPTKNAIKKSESLVIPVCYCMLSNKTHTTYERMFRMLVAVWPDFNPDSVSIDFETAAITALNVVFPFTERYQNDPTFAEMARCVTSLAFLPIGDLTPGIIALDMALPDELTPVLDWFIMNYTGRLKHDGNRTRPRFDPNIWSVYTRTLQGDDRTNNHSEAANRRLQCAFACSHPSIWHFIDLLRKDQKLSDDDFAKCSTGQEPPQKAKKYREADRRILTMVQNYLPLNNADTNIFPIHHPFNHHFIITFLIGISRNYEMRPTMHRSYLMRRPNDEDDSYDYGEQDLVRAKPIDARFSRNLGPTYAGGKDFVRASEHSQKQFYGSQMVVGSESQQHNEEFGEGTSKEADDKSSRPMTHDERNKISASILKAELRGDIERVKKLKRKLEEGIVENENGGNGKDEEGEGRERRREVLLLSMDKRSGVVMPAKGPQKNRNEPSEKRRIGTVDEEFGKHMELSQMVAEEKTTTAEQQIAMFNRSAKVCSDSKTDDDWVVDDNMMSHPKKRRHEEKEIVRKKRNMVEGG

SEQ ID NO: 133105 - protein, 226 aa, Heterodera glycines
QFYILLNVLASTGFVFCTTEWFGDLRAHMNPPKFPPFYDIVYDEPVADCPFGLESVAIPEFVYFGEMIATVADCPFGLESVAIPEFVYFGEMIATKFVQEHSQCLQFCLETSKCKAVNFFESIEGKEVGFCELLVEGQEVGFCELLVEGQYDNPRLMRPFKKATYHEKIHCRAENEEEKTKEETAQKSETQEKATEPPTAQLSLILKRLAERIQELKKRFRNQMRN

SEQ ID NO: 133106 - protein, 87 aa, Heterodera glycines; identical to SEQ ID NO: 132477

SEQ ID NO: 133107 - protein, 48 aa, Heterodera glycines
RRRVNVRADEVQIGHPFFVLLQSFAVTAHQNGLCFCLVAFLLFIKLGF

SEQ ID NO: 133108 - protein, 256 aa, Heterodera glycines
EESSASANEEVSTSDDPASTTEESSASANEEASTSDDPASTTEESSASANEDDPASTTEESSASANEEVSISDDPASTTEESSASANEEASTSDEESSASANEEASTSDEESSASANEEVSTSDDPASTTEESSASANEEASTSDDPASTTEESSASANEDDPASTTEESSASANEEVSISDDPASTTEESSASANEEASTSDDPASTTEESSASANEDDPASTTEESSASANEEVSISDDPASTTEESSASANEE

SEQ ID NO: 133109 - protein, 255 aa, Heterodera glycines
YENFEKFAVSSLSTVITDLFRISLDIGSLPDIWKESIVFPLFKKGDKNNPENYRPISLTCSLCRVMERILSKNIYNFLLKNKKISEFQFGFVRNRSTTSQLITVVEDWYEAIINGKNVCIYIDFQKAFDSVPHELLLYKLEKIGIRGKLLMWIKDFLSNRTFRVKIVEDLSSSKKVGSGVPQGSVLGPLLFLIYINDLPDALSSGVRIKLYADDVKLYICYKARTETEIMHKALHNLSEANKWQIIISIKKTFVL

SEQ ID NO: 133110 - protein, 456 aa, Heterodera glycines
MTLVKTTVEALKQLQTSFTSDQMPIFNTLITTLSSQIDLLNGSISQLRSTALSTEGMPISAEELERQRSVVIIGMPEHNDSSPAKRAEMDRSKINCLFDSLGIECGTIAYRMGRSFNPAQKSPRPLKILLPSRGFQKQALAAWQKKQNTIRAADSSLHHVRLRESLTKAQLEERRRLHLQCVEKRQKDGQDWIVYAGNVILRDEVHIFRKTWTKDNEGIPLSPWIKENYNYIFASRKSENSSRGGGCGDLNLSNRELVWRQGQPHAINHIGEIFCDFFNKFTFINATNEPTRGKSWLDLILSANDKIVKHCTVEGGIFSSDHLAQLFVLSVPEIRAKPKEICLRRFTPSNVSHLNAVISARLSSLSLSHFSINEKCRAFNSALLNALNECIPIKKLLKKDLAPKYPQHLLASIKEEAKLYRQCKIDPTKKALYDSITLHIKIQTKKIHNLIEHKAI

SEQ ID NO: 133111 - protein, 185 aa, Heterodera glycines
MPDCAQSFAGQNEALKKHYNDHGRYEPDQHKLFSMAPVIVHGDFWSNNMFFKTCNGQSVADQLSAVFDWQICHTGTGVNDLLRIIYVSVDAPLRRVHFDDWLALYCSELHSVLAQLGKVFSLAQIHPDQHRSLELIRQMVAHQNGYELCFQLFLITNILGTVQQQNEQKRAKLIKRMRELYDDIC

SEQ ID NO: 133112 - protein, 62 aa, Heterodera glycines
MTRSGQTQKPFKTRALIALLRMWKKGSNKILWFIKLAFTFSSQSSSALSVNESTNSPGQAQA

SEQ ID NO: 133113 - protein, 209 aa, Heterodera glycines
MPLDNLDSAIDQSHADFTVGYVLDKLATVGKLGPSAGLANVENAQFVQLSTGGFLSDIYRIQIQFKQADDTEEATTPTAFSCIFKVPTSRRLDMHTGSEKAKEDMKMWMYTVHNSECHFYATVVPLLRAMPVPLPFHIPELYACRNAASPDCLAGGYLLMEDVAGDGIIETDLSEGLTKEQVGSAIRGLAHFHALCLCLPRGIGGLVHA

SEQ ID NO: 133114 - protein, 38 aa, Heterodera glycines
MAMLMDNNEECRSIIFYKLNLWEKIHLAFIAVASYMYT

SEQ ID NO: 133115 - protein, 343 aa, Heterodera glycines
MSDGERRKLHQAMGELKRSGEFDRFNDQHRQANNGIDKVCAFANWSVISQVGVSSGAHSGPGFLPFHREFIKRFEIALRLVDPSLSLPYWDSVLDSYLPNPADSVIFTPQFMGETDQLGNVVSGPFAGWRTLEGRANILRWPGAEGRVIDGERREQRVRDRPKSNKCWLIRHHNKVKASGRGEGTAGRIERQRMADRSVENRKKPLIRSFPFTILPITTRFSLNRLITSSDCPYQPNFGALEYSHSQVHLFVGGDMKPPTLAANDPIFYVHRNLIFYGRKAIDKKRLNPLIKTHSLTWSGNSGGSYDRRDGQENRWNRQKTMEKQSKLMTNPITDPNKSMLRD

SEQ ID NO: 133116 - protein, 370 aa, Heterodera glycines
RSRKAERVRTIRRFIISDLYFLDAKFAYLQEVTMPNFMLVIYPDGLVFKTLRMLVIYPDGLVFKTLRIDVTIDVTLSCNMDLQLFPFDRQECPMVIQLFPFDRQECPMVIQPFAYIENLVNLSWHVDPPYYPITTNPELKLNDMVITGMRFITTNPELKLNDMVITGMRFERCTSPYTLFRGIGVWSCLRGVWSCLRGYIVMKRLVLFHLIQTYIPSAMLVSVSWMTFWLDPRASPARITLTITSLLTLTTMSNGLLTLTTMSNGARQDLPQVSYIKAMDIWQTARQDLPQVSYIKAMDIWQTFSQALIFLVLLEYSFVSYFFSRRSFSQALIFLVLLEYSFVSYFFSRRSFDCAHRILRSEKLIRECEE

SEQ ID NO: 133117 - protein, 65 aa, Heterodera glycines
MEIHAHFKSFKITVYVDLAGQLNVKLTDGESNFAYNVLLMERLCPMVNKMGVAANKSNLIMQPLE

SEQ ID NO: 133118 - protein, 96 aa, Heterodera glycines
MSFPTKEAAINEIGQLSTDQQKTSASKRPRSQNDAGAETAVPKRPRGQNDLAENSVATETETNNGVDHLLATDQHQSWKLIQNLRINFKLSVPIWR

SEQ ID NO: 133119 - protein, 222 aa, Heterodera glycines
MESNFVAFNNNITDQNNEDNDDKADNHAKQSKEMLKESQSEAETSSKEEAKNELEETEKEERKQKSVGSESTRELIDLHITLMRKIYLKSARADKWEQSLLKFCAIAPGLDAEFRQLQRNTYGNIPMGSKLAVMKALCDSQFDYNLKFKENVDYDLEFRVYSEETDDMAGVSWSLRARTEAELAELIETLRNPDYGLVTKEQQEEEEADIDEEQLLDQPNEG

SEQ ID NO: 133120 - protein, 68 aa, Heterodera glycines
MPYLLTNSNGIFCWSLNFISYKLINQSPPFNAAARINCVLCSRGNIVMVTFKNDGAAIFRFKNARHSH

SEQ ID NO: 133121 - protein, 17 aa, Heterodera glycines
MIIDKVKGYTYKILFYA

SEQ ID NO: 133122 - protein, 76 aa, Heterodera glycines
MSLLFARIGEPNRAKTMESSIASSSEVDDDGTSSSFSDGNSRKSAIADRRKINKLFILTVVNITVTVAVIIFFTVV

SEQ ID NO: 133123 - protein, 105 aa, Heterodera glycines
PGLKCPAQAKIFFYFREKIEIFPKKIPVDRARKTMFWKWSPFFWENSLKNHKIKKPENRFLGLTRKILKIFEILKSGKIELIELYNKSAGHPALRSNPNELFGWY

SEQ ID NO: 133124 - protein, 16 aa, Heterodera glycines
MRVLITFRKYAPFYNW

SEQ ID NO: 133125 - protein, 130 aa, Heterodera glycines
MAAKNENGIQLPQKLNNDHGVRGIAPVDVLINAFELNLKGAPDMVYQHELRFVGEYQMKKGREGQLETPSVKRRVVSCIGRSGDFARSECRLLWGREEQFSYDCALLLYSVRRLMVNGEMREFGDHAEEL

SEQ ID NO: 133126 - protein, 86 aa, Heterodera glycines
MKAEIQAQKNKQKKIMPKSNSKRKKLDGGVQNFLMKQNDGTKATEPTNLTLPNTVTPNQFSMGNLLNGTAAASLPFAHNFWNGKLS

SEQ ID NO: 133127 - protein, 30 aa, Heterodera glycines
MSGPPNCLRHKKSEMAFYSSTIPATNDLAA

SEQ ID NO: 133128 - protein, 126 aa, Heterodera glycines
QRSVLSSDCDDFDLVNSTASPLFAYPCVRLIPIGQIKQILHDKITSLNEEEFQCKVEGDLFRSEDGLLNSLLSFEHFARKLRIVERGWPSGFRMWFREKSGWIYERCSLVARIKAGFAQNDAHFDM

SEQ ID NO: 133129 - protein, 17 aa, Heterodera glycines
MCHNRRRFLDKFLKKRT

SEQ ID NO: 133130 - protein, 84 aa, Heterodera glycines
DNSGVFKNCRRICDELEVPSHGSNDYLIMREVCHVVSLRSAAIVAAAITALLRHVGKRKVKVGVGGALIQFHPTYHELLESQLH

SEQ ID NO: 133131 - protein, 66 aa, Heterodera glycines
SAASNCTRRKWSFVWSIFASGLLHVVLLTPPHSPPPPTIYLIIIITIVFFYHTLNMFFVVDQQINF

SEQ ID NO: 133132 - protein, 55 aa, Heterodera glycines
MSPNTLCSIVCLLLVCNFIWADDEHRSFAEELVRPTSHPKKTATIGALGLPCTKR

SEQ ID NO: 133133 - protein, 72 aa, Heterodera glycines
MTAPTSAVVREQHLALRVMRLSNPKFHETICLGRDPADPFSMAICDSIGKLSGQSSVDLPLDSYLIAPHAMR

SEQ ID NO: 133134 - protein, 221 aa, Heterodera glycines
QRHKQKAKSTLGSIYLQREFDQLSQSSLSDQNDHFSYESPRSYQIGTEIVEVANDHSNEGNATDHFNRRQFNETNNEIVPIEKSQNDGSVSAHFSHNENGQMHYGRAITVVSDRINDSRADGLDRSHSSSADYTTQKCGIMPKLPNLGEKFRHWQLKMKMDMQLRMHCVKNTKLPRNLVDDHKNNNFFLHEHPGNGEENPYSKLGWDENPFYGKTPSFKSN

SEQ ID NO: 133135 - protein, 18 aa, Heterodera glycines
MRTRPIWQVKQRLLTSQK

SEQ ID NO: 133136 - protein, 72 aa, Heterodera glycines
MCCLLLALASRSRSYTVNGRRSISRRSRRRTTLAAFQAHSSDAGARTAAEPLAVPNRPVEEKESTSRRVPGI

SEQ ID NO: 133137 - protein, 130 aa, Heterodera glycines
MSSPIKFSPSKSSDAKNETNIKAAVLTPNSLKLPNRKHQLNSAGNNGEQPPTKVRKVEDRELWKLAKGKYMLGFYLCSDDWNRLYNNNAKVVRTEDGRFAVNFELCAECTLKNARATDLLAPPKQKKSAE

SEQ ID NO: 133138 - protein, 215 aa, Heterodera glycines
MAINMNDKKGLLKQLLGESDITVTTSGLTISRPRLTNPRFLPFEESGRCRSCKATEVEVDTMVTKEGITLWCTRIDKVQFVPFDVVYDLPGHCFFRVKNKARVFNIPYGDLPSDNTCDQIQLTLHADEERRLKRKAKAALDLVEQGLMADAMHDGASWKKAKTAIGVLNKLPARRNTWRQRKQRNGCFDNIGKPAQRTATADGTSVGRNRFHRAI

SEQ ID NO: 133139 - protein, 367 aa, Heterodera glycines
MANKFLLVPQEIYRGLTSAADTGVINLDAVRHDLDRARGERTNPSTKNVRYNQQLRRYLQMRRELTDRPTKVELTKGLSVLLKRDGGADEDDEVVNTQPRPPAPPPPPPPPHHSSQQHHRRPPSLPDQQSSSSDDSHPPRPPRPQRTKKNHQSSLKHGRLNQWQQRRRDLQQQQPVVRDLLAEAAAAPLPESDDDDEQMLEGGYLLPAPSQNYGDIPVLPDYADEIEEMDTAQQRLASRRKLKEEQRLDKNKKYKIYYSPPPSPTLPPVYKRLDHPPPPRSIPKVELKRDPQPTKLKKSASPPPPPLPPHRAKREPKIELAPPPPPRNVSKREPKIELAPPPLPPRHFTKKEPKFEVDPRPSTSKQA

SEQ ID NO: 133140 - protein, 81 aa, Heterodera glycines
GMTSSAAKIGGGGGASVEELNQLLSKDEEWLSSFQGILEKSATLTGSVCSLMDNFQERIDSLSTNVQTLVAKSSVIQKEQQ

SEQ ID NO: 133141 - protein, 44 aa, Heterodera glycines
PWKSESAKECVTTHLPNQLALKMDGAGAGHLYSTVIWLVHVLVA

SEQ ID NO: 133142 - protein, 63 aa, Heterodera glycines
MDFFETNATTQAFNKSIFTISSPTMEEVKNSVFLKMIFIINLFINLIGGIMHFTVVYISIKNR

SEQ ID NO: 133143 - protein, 78 aa, Heterodera glycines
VHRAVCMLSNTTAIAEAWARLNHKFDLMYAKRAFVHWYVGEGMEEGEFSEAREDLAALEKDYEEVAEDNEPDADNEEF

SEQ ID NO: 133144 - protein, 70 aa, Heterodera glycines
  unsure (1)..(70): unsure at all Xaa locations
CKXNRQQNGKQFVPPLSASFRIGINSSFHGNVFNFQFNSIFCVYFYVPANSIIKLLFIQFSLHFQKSICI

SEQ ID NO: 133145 - protein, 480 aa, Heterodera glycines
MPNPSPQNVLDLKEQLQNLSAKVSELVALVNTEPIQYPANFYTIFKKIKQRMANPLEAAIAYCEQLQKGADSFGQMTDRTYLEGIVPKVVHIVERLSIEFGTLATEIGIDPVEKFVDSKCKDGEDKLKELSETIAKIRREIKENNYFNEAPFENAMAQLNGTQTADDWQSMRRKSVRRHSTGDAHISNWDKNSGENGTNVEKKMPRRHSENNLIMPRKILGDLKMNDGQRVRRKRNATIGRKAGEKMCQILTEMILEAKTDALERETAAKIKAIAEPPIKGDELMQLIDTFDWEWRQISDRIDRWTKTDGEKDNYRIKLVETSMAAYEISKPLKLAMVSALDGLNSAAKTEMKRWEEELHKLLHERIEICTRAKDTLAKLSTDLQTAIGLPRQIVNAQIGPVIDLLRGNGAEQSALSYYVIENSLYAAKQKVQSAFQIPSNAFKWSIFVDEQNEQDDKPAAEIEEANQPQIETAAEDTEI

SEQ ID NO: 133146 - protein, 216 aa, Heterodera glycines
TIVSICVNVTQYGATTVFLLLCAKNIRDFIRAFLDKEISFCYLIVVIALVLLPVTLLKSPNDFWPVIVGGMLSTIVAIVFICIGAMMDWRSCAPSRQLPSFDLTNYLSALGTMLFTYGGHSAFPTIQHDMKKPSEFNKSAILGFFIISVFNFTTVIVCGTVYGNSIRESVINSIQTVWIQQAINLMITAHCLLTVTLLINPLNQEMEEVFSVPHGH

SEQ ID NO: 133147 - protein, 175 aa, Heterodera glycines
MHVIRVRTSGRRKAQTAKAMKARWAKKTSPEPNPNAEMPPQDEAGPSSTSAVPAEELMEPPPPAPAPVPTPEMDEEILEFGFSLPSTSVTALKFRLSTAKDNLIPARDLPLKISGDCCFTTLFHLRANTDFWGFWMSREMRHCIPCGGDLSNFGRRCRTLNKCANSWSIISSQIG

SEQ ID NO: 133148 - protein, 25 aa, Heterodera glycines
HTPSEKTRCVPINRECQRKTLSFFL

SEQ ID NO: 133149 - protein, 194 aa, Heterodera glycines
MGEPIFPYFDWVGGTSTGAMVTAGLAMGQTLHQIQRLYLRFKDMVFDYRRPHNTRVLEKFICQEMGAETMFSDLKWPRLMFTTTRAEFFPVQLELMRNYKLPTNDEENEELGYRTPDDLLLWKVLRRSSAAPTYFASVDNKYIDGEFSQFRERWMLSQHLHRCHSAHSIGAHLYRSFAKLDRPTEHLNKRLLDH

SEQ ID NO: 133150 - protein, 129 aa, Heterodera glycines
SVGNQNAFGGKKNAVFRNLNDEFLFFDFCLILMKFHPIIICVFSVHNLIFVRHYCEQPVIGTAPGNPILEQLQQVQGKTPITTAKYFFKNFFFVFSEFSQFRERWMLSQHLHRCHSAHSIGGFFKNKVS

SEQ ID NO: 133151 - protein, 220 aa, Heterodera glycines
MDGRTAEAIGSEKVITTSGQNCDQIALGLLLNVVNCSDDQIFAVRQRKAITIEFRVQWTDLRHRSQIDIGKGQFVVGRINDSRPIGTGENIKRILFGRLEKTQRSGLSAQCKFLLRRQSAGERIDAEMNHCAIAQSDEKKVRALHGHLNERGQMRNGRKARRDACHKHGTGHKFTGQTLLRDQCWHSARFKCVDSDRMLRPKANGEEVGQSLAILDSQTR

SEQ ID NO: 133152 - protein, 28 aa, Heterodera glycines
MQLISTDIFIILSLVAAFSHSAPITQGK

SEQ ID NO: 133153 - protein, 39 aa, Heterodera glycines
MSVLLREAVVERLVEPAWAAMSMSPKELLSRQLMPKIGK

SEQ ID NO: 133154 - protein, 128 aa, Heterodera glycines
MKLLLHNFFSSNFLKGVTNGYPLLLRATKIERIDGTEFNGDFVKKMMPRLDYPALIQAAKAVDERAADELPKELGTDWEKDDDFLKKVHSLLVSYEIVEGELECPESHRIFNIKEGIPNFLVGADEVE

SEQ ID NO: 133155 - protein, 90 aa, Heterodera glycines
MLTRTQLDAAAAKRLFRDMREVQPQTAGVSSFFERCDGVDNGALTSLEQLYALAFAEGDKQGHEEHKDEQKSLDISLMKGCLIIGPLTQW

SEQ ID NO: 133156 - protein, 254 aa, Heterodera glycines
MSDHPDAALADLYVDLEVIAFLQCLQRVINRGIAVQFTIHSTDLRCWAVMAQRIWPLISHAVLALNDMKAVNFALLRRHVSPNVLFDCANLRAITNTHMFPIRPPPSAVHINALLNPPDEFDEKPKHNLFRWLHTPRKDGRPKIVTIRKWRKPQWASFMPSLITFFIAPSAVPVNFLVICHIACHTNFQKMERENEETDERLTLNSRVPADAVIVRCRNGTDQCTVNAWEKEANQMLDNLLCFTIKDSDIGWSF

SEQ ID NO: 133157 - protein, 99 aa, Heterodera glycines
MANAMYAARARAAKAEKRQAQLRKAARARAGNARKREVVAIAWQTAEGWKERTTDHTMNDWPSVFIDVFVMDIHSFVVSYNHVRTHALFVSLTIIFVLN

SEQ ID NO: 133158 - protein, 34 aa, Heterodera glycines
MNKGTKMRKKQWKRKEKEDNYGEEKRKKRVNDKQ

SEQ ID NO: 133159 - protein, 30 aa, Heterodera glycines; identical to SEQ ID NO: 126607

SEQ ID NO: 133160 - protein, 93 aa, Heterodera glycines
MNLRKSDFASWINRVGSMRRVGKEVEKRAAIFCFTKAKEKEEKKTGRCPVNRFLFSLCIFKWYSIVSTPFSLRPALLRQSHFSSVLNAQPKNG

SEQ ID NO: 133161 - protein, 16 aa, Heterodera glycines
EAIPEGFGLPINLGAS

SEQ ID NO: 133162 - protein, 58 aa, Heterodera glycines
MHEKVMITTKIKSNQIKFISSFIKLIISKNIMRVFNIPIKISMTTPQHRLFKELCKGK

SEQ ID NO: 133163 - protein, 125 aa, Heterodera glycines
MVQANERFQEEGEPTNNGTDTMPTEEQLQSEAEDEAETQQLRETCNRRPSEKIEVPEGLLAEESVSEFSTLSGWARLGLGLEIALLCGICLNTTVLSVLLHHTRHHLSTVTILFIFNILFSNVKM

SEQ ID NO: 133164 - protein, 78 aa, Heterodera glycines
MRSGAWQNRTLKAKEKNARQKKAWDKKLARQKTAGDEAREKKAGDEKLAREKKAGDEKLARKRRKNNNNLINLFNYLI

SEQ ID NO: 133165 - protein, 149 aa, Heterodera glycines
MDESKRENFSPQNDDDVITIGDNNNTQTLLDLQPGPSKRGRKPRLDKIHKEIASAMKKAKAMKLKYGVFTFMCKECRDDNFRQGNSRFKLINQNGEQQRLEFTQSFCQDCAKLNFDCTDLIMKHLKKDEPATTTTTMAKSFRWTKDEEK

SEQ ID NO: 133166 - protein, 122 aa, Heterodera glycines
MYNQHLRRYLKMRKEHKERPVLVQLSNGAQLLNKTVETGVQVRPGPDEPKDKSVMVTDEDEDEEIEVPKFLTPTSQTQGSNRSPRTNKKAAKQQKLIEKKDHLLAIIMSDPQRFGANENVSH

SEQ ID NO: 133167 - protein, 333 aa, Heterodera glycines
MDYPRIIESELAFLIPSGIIVSGPSSSGKTQLVLRLLRHANVLFDPPPKAIGVCKRVLCAVGCCYLVWAYGEYSTQIPDLERQGVVPHAGAPSDEMLKKLPKPCLIVYDDLMGDIEAKKLADLYTKKSHHNNFSVIFLTQNLFDKSMRVPRSNAQYIFLMRAPNDMLSIRNLASQMFPREQGFLMDAYRQTCALPYGYLLTTRRESFLPPKMVKREQKIGERVVHNYDYLKKLGKTTSEKKRRHLLNSAGCEELLTLVEICLNVLNGSFCLSRKQKQRLAPFAKDIRQLARVRSERGARKLVQQSGGSLFAPLLAPILIEAARYLLSRSNNGQ

SEQ ID NO: 133168 - protein, 86 aa, Heterodera glycines
MKRARQSEKLGAFPEIEFAVNTMGVTVYCPRHLQTPRFVPWDQPGRCPSCRSGTVELDYIIQPEGVTIFSNRLKTDGENFVPFDAI

SEQ ID NO: 133169 - protein, 55 aa, Heterodera glycines; identical to SEQ ID NO: 127903

SEQ ID NO: 133170 - protein, 115 aa, Heterodera glycines
MNVFLDELNASFEQHQNNPEIRQVISGLIDYAQSLIDEQPGADQIGLDFDSDQEDDLYDDESENNTDQEENNHDPTQSKYPFETQIQIVNMLNDGKTYKSIRHQFKKLKSDIEII

SEQ ID NO: 133171 - protein, 162 aa, Heterodera glycines
TQFFVLAILRHAINQAKSQKAIGCPFNQRDAIALGIFSNALIKASTNDAMLSNICRYGDKVFGFVDGLCEIQNAEQQSLLDDIKFKEQLEKQLEIRVNELRAFCQRWKLYPKNNAQTSAGHESEQHLKAKMKNYIEKPQIDQTNKQSTSDSEHICVICLTEE

SEQ ID NO: 133172 - protein, 51 aa, Heterodera glycines
MGSLVAAHLSSSNEKAMPYSAYYYRQRKMNVIEAYSRITLKKQLWALYFFV

SEQ ID NO: 133173 - protein, 112 aa, Heterodera glycines
MGTNLELNLCSSDNDDDEEPIWDVLAREIWPIFAPSIRHLGFANFDALCRRISPTILADLHQLISIDFGHLFLHGIDDDDEPNATSPGQVLSEWLHTPKKDGQPKRLFHNLC

SEQ ID NO: 133174 - protein, 81 aa, Heterodera glycines
MNQRRLKKIWICHDVWMDILPFFRRRKLGLNLALISDRFDVLVDAHFDGKSELTIWKAIRIHKDAFTEVPKLSVLIDNANP

SEQ ID NO: 133175 - protein, 93 aa, Heterodera glycines
MYSFQKYFEEALEKEDFFWQKNRAEVEALLIEASNYKIITHRDYESRYSDYIATYHRTPLFCFCMIERNLRFFYDTGNRDAYRKGYNCATCYR

SEQ ID NO: 133176 - protein, 114 aa, Heterodera glycines
MTREYADSEILEFVSAGPKQYALKLRRKKDGVIWHKTKIRGMTLDRRNEFKYELFKEMVLDHKEGVKKVFHYPEKIGPTNDFRVLSKDVQKEYTPVQKKGIIDDHFNVLPFGHY

SEQ ID NO: 133177 - protein, 388 aa, Heterodera glycines
MPNGQTVTRPISRLCPLETENQALEPESDATEPNPTNQSRRDSKNAELVGQDMTPVPSLPEEPMTRGHDGMVTRRKSRLLGIPPTTTMIMAILVTFLGVQASPAQGIWPFASDHPEPPPTSHCIGNHVNCTRRGVRVSSTPAVQKVTICCANSCLDRLGAATIEYELSADLLVNNYGCSATFSLSSTRSCAAETVCSAIDECELIDCSVCIDQLANWRCNPRLSVFLFLIIGSLISCLIGWVVCFCSSARVVLNFGYQITAFLLSWPLRLAFSLAGRPWTREDRERVAERLEVGIQRVRRQPRHHGRRAQRAATRLIGILLATPVIFGNAETISVTTRTESCLKSHSGLTCRVNTATTLTLLPAGQQSSLILRDDTGNTIGTVQMHLH

SEQ ID NO: 133178 - protein, 77 aa, Heterodera glycines
RATLGSSRCSVYEGPGFCHLVRTYGASAYRASAPPFWSSCGTVLNSAKYLGCPCGTYKTWERCGFLYMGYRYLCYAC

SEQ ID NO: 133179 - protein, 104 aa, Heterodera glycines
MALTILAIFCLAFVHLGISGKYDKSDEHDGKYGAGPPGGYSHENNNNNNYGGDSSGEKYETMEHMWSCATKWQWEKPGVSMKWEITDTLTEAAVDTDCPSRKSK

SEQ ID NO: 133180 - protein, 86 aa, Heterodera glycines
MILQNEEELNYGIKEEKSGENPSKTEIQTNIAKLRKEFERKMKNLCENANEKAKAEKAKLEKTIENAEDYLIKTPWELPARFGLFC

SEQ ID NO: 133181 - protein, 121 aa, Heterodera glycines
MKFTLLAILFLALVHIGISGKYDKSDEHDGKYGARPPASGGYHHDNNNYGGGNHYGGGGNHYGGGGSSYDKYRPTEHQSTYWSSCGSLLATARSLGCRCGTYKTSETCGFLYLGRRYLCYC

SEQ ID NO: 133182 - protein, 41 aa, Heterodera glycines
MGDFVPKFERNLDNKPLGPRPLPTAGAIPVKDEKGRIVMKK

SEQ ID NO: 133183 - protein, 181 aa, Heterodera glycines
MDSPKAPEVVPFDDEQLSAEEKRLLNEFEMMKMKLEETNKRKIELEKRNKEKEKLKQVDEVILEDDEEEEEEEQIPKMSKKPGLDPVVAKYVVEKVINEEWDGNDLVVIDPRGKRSMEEQNDEESRRKEDLVRIGRRNDHNEPWREFLATTTSLDREKEERLKVMGKIGLGQSSRRMAKKS

SEQ ID NO: 133184 - protein, 95 aa, Heterodera glycines; identical to SEQ ID NO: 130684

SEQ ID NO: 133185 - protein, 16 aa, Heterodera glycines
MRVWAYILPIHRFALP

SEQ ID NO: 133186 - protein, 36 aa, Heterodera glycines
IYGKINNTLKLKYKIKFKIPALCHALAHVPLMSSKF

SEQ ID NO: 133187 - protein, 376 aa, Heterodera glycines
AFKEVDENGSAILPFLNANCAAHLLNLVVKEGLSADLDIEKLFVKCRKIVGHFKKSNKALGKLHEIQEFLEIPEHCLLQEVSTRWNSGLMMIERLYEQKKAINEYAYQNCDFGLTLTSEEWSILEELIAILKPAEVMTKGLSKSPISVVIPYAGVMHDELYEMKLFSKKVDQVRTIMYNSLKRRFFGLQNQKVYAVSTFLDPRFKDRVLLAEMTSNVFRANVIAWIKAMSEPLQPEIFDFDDQHFTMPPDQSLSPPPKRNDSFFDRLKNIVKSNIDRRTPTEQHENIELEFQEYLECGLEETNSTPIDCRRKLSNQFPKLAKLANKFLSTPATSVPSERTFKTARPGLDPGLEEPGFFLDLDFCPGNPGPGPTWNP

SEQ ID NO: 133188 - protein, 498 aa, Heterodera glycines
FTGHSKKMNLFTSLDPSVKKLLGWKMGDEEEKWALKAVESLVKKMQKRKHHGYGKEYALSHPGSSSNCVTIPRSLCVTIPRSLDGRLQVSHRKGLPHVIYCRVWRWPNLQSHHELRSTTDCELRSTTDCMFPYDGRSEQICINPYHYHRIEMPVPPPPSSSSVVPSSSFSPSSASIGTFSTPSPSAAASFPSASPSASSVSSASPSVPSFRHVHSYPQTTNNSSCPPMSSPISPLSPPPPAALFTQSPSALSDDDDFMAQQQQRHNAALQQQLCHHSQPCCWCSVCYYELNSRVGEPFKARFVDFVILSSTHKRICLGLLSNVNRNVTIENTRRHIGMAVTIENTRRHIGMAARFYWFSRYVYFPCSAVEPSEAAVFVQSRNANFKYSLQPTAVKKCPPFCHLSIFVHLSFCQMLEKAKENGYQHVYEIVKMCFVRLSFVKGWGADYPRSDVTSTPCWLEIQLHQPMAWTDAALSQLWTDAALSQLDPPDHNGVTSVS

SEQ ID NO: 133189 - protein, 148 aa, Heterodera glycines
MAADITVFVRLIEAVPRGAKFDKIWKEKKENQIIDLYDSFFEMDYSNEYRTQMHFTWKLFDAVRSELADLSFLINEKKLRQKWDGMEKRAQRDAADQTASDDGTVPTAPILVAKLHAQTLQKLAFENAETAKRKTAEMAKHFREKLKT

SEQ ID NO: 133190 - protein, 22 aa, Heterodera glycines
MIVTDSAQILSPVVCASEVASS

SEQ ID NO: 133191 - protein, 704 aa, Heterodera glycines
MMDVPNSSNTSPGFFENLAQSLLDLKIQDNRNYKNEEPRSGAMNALTHIKPKTTAMDCQVENELAKESSSESPACGPETKTNIPKTSNWERPSVRSKVASLMFITLMLIGMTLPFTTANMPHLPMHPLVCQTQNGGKIWQLPAVTGCSKLSIDHSKAPVVRTFDVFSPNLFEHSADAWACRKVRKSVRKYTSITNVPIQETLEPLMLQITPSECKQMAENGKCSLGLLINDSGLSHTDKKLDLSPRMWLIGSFSWSTVSTENCYLFKTKIMSQHGSTVMQSPLGSVNNCQFKAGQCEMEDKTLLMWDTNTTRACEFSKIGTWKGLQLDNIWISDEVSFRLTFLNNTKKVNSCGLNLIKSEEGFAVQDLPSDDSNESSKRSRKTRSLESWVTESEMNSKLGYLDEQVREMLTLSFSQTIKSICDYMLETRRWAATALLSDPTTFARKLFQSGKLVAKVAGPELIKVWPCIELQAHDYEFAKIGNSADSEFECFDKIPIKFRVKDNKRMAFIDPRTMILSSDARLAPCSEYRKQLIFVRGSLYEVDQIDAQVKQVNANRIDGFSLNLSLAPTYARHSFLHLALVNVSDFIGQFYDANLARESELTFQIKSEDAIVTKTLSEQWEQVNFLIRFRLMIRDEYVGRGTTRRMTFGGNKTQKIVKSPAHLNMMDLNASVEFGNEIELSPVKLIEPAQTQAHKIAGKRKRP

SEQ ID NO: 133192 - protein, 204 aa, Heterodera glycines
MLQITPSECKQMAENGKCSLGLLINDSGLSHTDKKLDLSPRMWLIGSFSWSTVSTENCYLFKTKIMSQHGSTVMQSPLGSVNNCQFKAGQCEMEDKTLLMWDTNTTRACEFSKIGTWKGLQLDNIWISDEVSFRLTFLNNTKKVNSCGLNLIKSEEGFAVQDLPSDDSNESSKRSRKTRSLESWVTESEMNSKLGYLDEQVREM

SEQ ID NO: 133193 - protein, 769 aa, Heterodera glycines
MPVPLNVKEVKRVLGQAGFYRRHIENFAMVVEPLLKLTRQGNKFEWGREQQKSFDKIKELLTQAPSLIFPDYDKAFHIFTDASSTGQGGVLMQKDDVTGTFSAISYCSRTLSAAERKWPAVQIEMSAIIYALREFRPFIFMSDIELHTDHKPLAFLLKKSETNQQLARWLIELQNYQVKIVHVAGKSNTLADALSRAAEDKPLSEIYNVDELEDIIEFPVCLALAAHSRVVADPFLHTLTIRHEDGNTYEINLLEEQAGDPEAAAYIAFVRDGEFPADLDEKEKELFAIGTANYKLISGILYFEDKGLPPRIYVPISLRGLIFESFHSSLLGGGHLNYRKTIAKCKKYFWPKMYSDVLTWVKLCVTCQLRHNPTPAYREEMLMVPANTLFAKVGLDLAGPFPVTQKGNKHILNIVCWFTKYVISVPVPDTKAQTIAHAFLTNCYLKYGGCVELITDNASAFTSEFFREFCSMLYIDKKYACPHWSQGNASTERTFRTFHNILAKYISKTQPDFDEFLDAANFCYNTSVHASTGETPFFLMFGRDPIFCVDQIIDPKVRDPIAISDRNEFKQKLVVAIRHAWHAAADEYAKAQRKMKEQYDRKARPQQITIGDRVLIRNYDGRVGTSKKFQLPWRGIFRVIKIEGIYVTVISCTSPNSNPKRLHLNQIKKCFEILGPPCTMPTQPVEEEKCLENTDNADKAISKGYEIRNEMDPESREGENLEQIHARGPETRPEIEADEEKNVNKKTDTEPRKYDLRKRTRTWKDLVNY

SEQ ID NO: 133194 - protein, 93 aa, Heterodera glycines
MPTQPVEEKKCLEKTQNVEEVSSERSGIRNEMDLESREGENLEEIHARGPETRPEIEADEEKNVNEKTDTEPRNPNHFSICPITGIESSVISR

SEQ ID NO: 133195 - protein, 156 aa, Heterodera glycines
IYSDFLKDKCAKTCGHCLSEEDKVRLENDYGSDSSNSEDYDQPFESVRRIRNRPSAAPPAGGQKNSADNGTTVAQRAKEGSSKRSKSSGKFSERIIIEIGGGDQKEHIELRGKLGEALRISREILLENDEENDDEQAEKKKRKRQKKKQRNLSPLL

SEQ ID NO: 133196 - protein, 131 aa, Heterodera glycines
MQRKTFKDIHLQFFLNFFTNYANNEFGLAMILRKNRAQFHAFAIYKMPKITSCILVIFWDIILIDPPKFQVWMCRFEHLLSLQLPAVRQEIEKIWLFFRCYYDIISDFEPPISTEIDWPLAAATKELILSN

SEQ ID NO: 133197 - protein, 108 aa, Heterodera glycines
GEGGVKCSCPRHFCRPACNDIDGQCHCKQGRGGRTCADCQDFYWGNPFAGECMSCECDTDGNPFAGECMSCECDTDGSQTLQCDRQTGHCVCKPGSGGPKCNHCARGT

SEQ ID NO: 133198 - protein, 33 aa, Heterodera glycines
EQLQNQEELQNDENVDPQLHQQRAAQQAQYERL

SEQ ID NO: 133199 - protein, 70 aa, Heterodera glycines
LTFHKVWVLMGSLSLVLVPPFNAYFGAVKSGRQAFLRVGPPIVFCISFLSLSLSHTFPRFCVLISLTKNI

SEQ ID NO: 133200 - protein, 31 aa, Heterodera glycines
MSSAMPLIKAIKRDLFNYGTGKHLKINENIV

SEQ ID NO: 133201 - protein, 531 aa, Heterodera glycines
MKSIHFRKYAMIILYYFFISYTVLLCMGLSTKELKDLNTQIDKIKHKITETIGRENEGKETMDDKVIKKLEDIANAKIFIETLSTFAINMTAQDYANLMFFEKKFTIPEIQEEYNARKELQILKKKLDDKIEEAKKFWKKNGKGCKNQSQTEIIEMKVKLELMDVMKESNLLMTRQYENLAKECAKFGEMEKNEWGKKLVEMFLKSLKEKMDKLKEKLNENDWMRIDKLEKSLSKIIKGEKPPEEAAKSNSEELSKELRSTSEEASKAMEKHLKLDWKKIGIYTQEEMSNWRLAMHGYWALISFHKIGIVSNAKKIVELLTPKRKKNGDQQEQHQESNNDKEKYQKWLEENAKLYKTVYARLFPQNDDVLVVISRGNSFIFLLMAYAVFLKHCLNFLLFNPSDAKKGRRRRKRGFGGGSETSGCSRSRVNWSAWLQCISLILLIIILIWLIIAALIAICSCILATADNGGRRGGGDIFIFNSGGSSSRNSSSSDCCCCFGTSSSSSRGYSYGRPELTYFDSCAVVWWDLWN

SEQ ID NO: 133202 - protein, 372 aa, Heterodera glycines
MANGKNSNSTSPPYSIDKTTTVAKDDNVNNAEADDVNELQNSMSKTTSVEMDKDDDGNSAASDTDNVVQQISNSSPSYSMEKTNTVETDAVENDDDESNAAAETDDVVPYSMDKTTTVATDDNESYAEANDANEPPYSMNKTITVEMDKDDDGNSTASDTDNVVQQISNSSPPYSMEKTNTVETDDDENGQQENGGNANGGRKQNTSSISISSSRRITTHNEFDDELQNIQKSNGCDTNENGDNNDGIRYEKKSWMTTEKKSSNIGGTNDNDDDGNDGRKRKSKWTKKAWKWRNEDDDEEEEDDDENEQEEEEEIVQRKTEISEKNDGRKWKKSWQMSWEEENDEDEEEEEEEENYNGKKEEDDEEEMFEEN

SEQ ID NO: 133203 - protein, 95 aa, Heterodera glycines
MASDFHFLLFLFTNHHVEFSVAELKSLVASVRKSDAQGAKEWAERSENWGTLLLLSQSGGIGGHSPTAPVSESDAGSWNCQHCTMLNPRQRNDCS

SEQ ID NO: 133204 - protein, 91 aa, Heterodera glycines
SSPFISALSLQPMHCTPNVDGSCPGNFFCWFSTTTSSVNAFYCCRSPDSIDTGYCPPQLVPVPGEGAIPYRYCSPSAPINDGIQGCGINTH

SEQ ID NO: 133205 - protein, 118 aa, Heterodera glycines
MARTMLLARHRRRSKRNRDEVAREEPKEEEKAEGEDEMTEFGQNLLLTDNEEEEGHTTTAKTKQKKTAQRTEEQPPQGGRTVLRSWHNWIIFECSNQGPFPGACGVDNIQLVNAYWPS

SEQ ID NO: 133206 - protein, 281 aa, Heterodera glycines
CPCPHPIESNNFATSCVVSERGLQHCACREGYAGERCELCAPGFFGDPLVPNGECKRCDCNNNNDLSNPGACNPRTGDCALCEGNACNPRTGDCALCEGNTDGRHCEYCKAWYWGDAVHAKNCSLCACNQCGAAYCDGQNAHCECQPRVTGPLCDRCEENAWGFDSCKGCTPCQCGLAASNSQCDLKNGQCACMPGAAGQFCGQFCDQCAHGFWKYGAHGCQKCDCEADLSMGTVCDVQTGQCHCQEGATGPRCDKCLPGYLRVPNFGCRFCDECVYALVS

SEQ ID NO: 133207 - protein, 61 aa, Heterodera glycines
MLNNFIFCAFFLCFLHRFPLGSAANDEIDEAMPGFGEENAEEPKASGAIPTDKKAEKETFA

SEQ ID NO: 133208 - protein, 36 aa, Heterodera glycines
IFSENLFINDQNFQFFPRRRLSAPPRPQNSYFFLEN

SEQ ID NO: 133209 - protein, 90 aa, Heterodera glycines
MPLEEAREFRSRLETILVFSLLFYLIFFCSQFFGMANAPRNVFDQAVKLFVWKRSHYRWAAQRNGRVKIHRGLFDSFEDQVAICKEAYSC

SEQ ID NO: 133210 - protein, 140 aa, Heterodera glycines
MAMHLGETVPKARFSTETRNGLAQGLLQVLLLSLSAHITQQLGMAPGGEFRAAHAASKLVPGCGVILGDRPLNVTLQRALSALNIFQRMKFFFHLTVSLGMEIDEAEVERCKNMDMLEEMLQQMAGEFPQVSRILVDERD

SEQ ID NO: 133211 - protein, 246 aa, Heterodera glycines
MPSFTLPMPRHLDANSFQQMLLHNIDTFIFDADGVLWLGEQSIPGSSDFVNFLAKNGKRIIVLTNNATKSRAVYARKLGQLGFGRCVNEHNIVNPAAVVADLLHRAGLGQGSDKKVYLIGGQGVKDEMDQLGIDYFGDGFDPVDEQPASKGSAFLYDLELEEKLERVGAVVVGYEKYFNYLKLMKASNYLRVDDIMESQMQGRDDLMPDFYANSLGALMLKSHGCATKKEAAAAKSACTPRATAFV

SEQ ID NO: 133212 - protein, 199 aa, Heterodera glycines
MFLATDPILMDLQKANKKSEKRKLNDEEQDNTRQMKKLKKSGTKKTDCDQNAMSGKKMEHSVLTGHKSDNSNAQRPNGNTSNCNKSDKKSDATSNSVHPQVASDTKFPIPFTIPKVSASFSDASKSPLPSALTKEAKNELSNFEAETNSQRTLRDNEEFPLNDTNIPICNEAKHSETECSKNQGRRKRETNKLPKISER

SEQ ID NO: 133213 - protein, 43 aa, Heterodera glycines
HIETHSNGGASVLRCDWRRLKHDLSSQELKKFAEEFIDLGLSE

SEQ ID NO: 133214 - protein, 107 aa, Heterodera glycines
MNLRILLFFAVFIPSARSFYLPGLAPVNFCEGKDKKPTCLINFKENKQCSYLCEKDYKSSDKSHQEKLRLLQRGMKLNYQHHWLFRRVFFLNWNSGSLTTNLSLSAS

SEQ ID NO: 133215 - protein, 63 aa, Heterodera glycines
MTDCPDTNLNENGNQLVTPSTNADECKRKSTKQTEASKCLKGEEDDTGGLGWDIKLNRFPRGI

SEQ ID NO: 133216 - protein, 86 aa, Heterodera glycines
MFSDQNRIIFNLRSQLIDQMANHAGRGNFHLRYIPMAAATLLGQRFEERARRHRMAIGATASTSASNGANGVKGSVEGGAAINENG

SEQ ID NO: 133217 - protein, 139 aa, Heterodera glycines
MLFTAIDRLIVIFFDEMQNKRKIRLYLTTITLICSIFCIDLCFTFYQNIELYGLPSVDQINYRTFRALSCIIIVNIGGYFISALYAMLIRPSISSPITAWFGQAITGIPLLIGAASNGGILYFTRCYKYLKKGLFLNKF

SEQ ID NO: 133218 - protein, 96 aa, Heterodera glycines
ALAAQLSSSSSSSALAAAAVPLEEPCPPRRQSDMFDEDDDEADVFGSERRRNDEDDEEEEELDLLLEKGAKFSDSAMLDVGGSSRGGGSTPGPGYT

SEQ ID NO: 133219 - protein, 75 aa, Heterodera glycines
MYKIVRRGTKVIRRGTTVIRRGTTVLRRGTTVIKRVTSGCVNRRLFSWEKALRALGASLPRSVMGCGVIVGPEDI

SEQ ID NO: 133220 - protein, 60 aa, Heterodera glycines
MTMNVLDYYRHFENAWTWTWIPCWTWTLISWTKIQKNPCPGKIQAPRDLDPDLDPGKIQA

SEQ ID NO: 133221 - protein, 68 aa, Heterodera glycines
MHKTFFRENRDEKSNSRLKNKKLNKFVVKRFLLLKGGKSDKKVFLAISTWLDKMSTENKTKCVDPMDK

SEQ ID NO: 133222 - protein, 81 aa, Heterodera glycines
MYVEACVTFPISQLPNIFEAVQLTRLLDLENLPIVVWIILIQRWKLCSEQMIFCKLINNSCAKSLGRKNCKLMAKFHFGMP

SEQ ID NO: 133223 - protein, 95 aa, Heterodera glycines; identical to SEQ ID NO: 124528

SEQ ID NO: 133224 - protein, 343 aa, Heterodera glycines
MKEDVKLLIDACDGCQRRKVQPGQSNFSPSVPIKAAEYPFQRVHCDLMGPPLKKTDRGNFYIFLTIDSFSKWITAKAISDQKAETVSEAFVETVIHKCSTPEIVVTDQGRQFTSEIFSNLSKIYGVEHTMSTAYHQQSNGQAEGSMRIVANIMSQIINEKGNNWDKLLTHALFAYNTAIHTVIKHTPFYIVYLRHSKLPVDRLLKLPNSENLESDISIYTKIHSEKASKAWKIVREEIEKGQEKFKKENCEKSTKKRKMYNGPVDLPLREADEPLNWEKFVNDPNLELEEKTDEESFDEEEKNTEIENLNKEKRDKKGVEFKKSLTEFGFESSEEEQESQIAF

SEQ ID NO: 133225 - protein, 33 aa, Heterodera glycines
NNFKIILVTFPFIYSLKSSKYINSMHWEPNLGP

SEQ ID NO: 133226 - protein, 83 aa, Heterodera glycines
MEHDEQQMSMLPYDHGMLLSEDAEEFLLFDGDFLVRKTEEISDDGRIFVLSVNVAGRGQSLLSKSLSGGGKISQILNEICDEK

SEQ ID NO: 133227 - protein, 260 aa, Heterodera glycines
MPKRKLLSKINARNSTQIVNKKGRSGRTKMAKATKARLAKKTAPPPNPNPETPQQDAGPSTSAAPAEEAMEPPPPTPGPVLTPEMDEEILEFGFSLPSTSVTPIGDLVPFSTTQTAPMDTGETTPPPLAIDERSERIEQLEKKARHDGEQHPENPRPRRSNGGPFRDGMGQNNLPNNGTSGKSSNFHNFSGDEALHSLWKTMPDDEKMRQQLEHHFVSNWLLDTGRFDELKLREEEQREQAEGDKTNEESDQDAEVDIVD

SEQ ID NO: 133228 - protein, 69 aa, Heterodera glycines
MTALIRAFLKIFVKNIISKRNRPNGATNSVANKQLMGYRMIPRNTNTHERVGRRREKAFRQYCATNSFW

SEQ ID NO: 133229 - protein, 29 aa, Heterodera glycines
MNPQQYSPSAQPQIFHQQYPQYSPYGGME

SEQ ID NO: 133230 - protein, 212 aa, Heterodera glycines
MPNKSNSRQSNLFAFFQKKPKDEPIEKEEKQQKCVENECENFHTPQRKRTEATRNSVNKSQPMTPLNQQRNQSLVAEPRKDTTDNNTTNAAFTDSEEEGEDSSCGVGFMSCASLATPSSAECASAPKRRRVILSSDDEEEKMMGNGQRKDQKGDETENEPQRQATKRKRRDAAKEAKERTPPSVVRVPRDEIQTTPSAKCAHSFINSFVCHL

SEQ ID NO: 133231 - protein, 197 aa, Heterodera glycines
MVTWSAKDGLEPMSEFVNCVKGFSRFETVAFAHYGGRFDSHFVLAELSRKENETELMMADLKIYQIKAGRVCFRDFWMLSQNKLADLPKTLGLSIAAKLYFPHKYNKNENFGKRLPNLPPLGDYCPDSMKEEEAVKLESWYKGMCISRVPEVLSAVDDWTKWALHGRELQKDRDADGKLREKCMLRAAPFGFRVWST

SEQ ID NO: 133232 - protein, 906 aa, Heterodera glycines
MAQPTAQELLKLIADQQTAMTQQQQQIAQLLALQQTQKADTVLTLPDVAIFEPSDDKSRISEWLKRAQFAIDCVSPNASDAVKVKAIMNKLSEAAFSEYTKFCLPEPVTSFSLDTTVKKLEKLFAKPQSIFIDRFECLIARKGEGEDFRSFVNRLKRLITDFKFSDLKEQQFYVLMLLTALKSHGDAMLRQRILSNLTADGDNITYDAVVEDCMNFMTTIAEAKVIESSSSGSQRSHAVNAVHPKREKPKYERPKSQQSTKTEQQKCWRCGQTNHHHAACPQKGYKCRKCSQNGHIESRCEAVQEWRKKNAKSWLKKNVGNVHIVTVNIGTTAKPTTKSTLLRVKVSFQGKVIEFVLDSGAEVNVINEMTYKLIGSPKIRPAKEKAVLYNGSTRSFIGKGTGTFEFNGMNVEHEFYVAGKDSLNLLSIQTMDAFGLLDELKEKISSKMVNMCKGGNKENAPSRPKGTEVNEYLTKLKEIFPNVFKEELGFCTKAKANLVLKPDAQPIFRKARPVPYNSREVVEKELERLESLGIITKVEHTDWAAPIIIVKKADGSARMCIDYSTGLNNALLDHQHPLPLPNDIFATLNGGLVFSQVDLKDAYLQIELTAEAKKLCTIATHRGYYQFNRLPFGVKTAPGIFQSIMDKLLAGLEFATAYLDDIIIVSKTKDEHFQNLEKVFDRIQSWGFRVKMDKCAFFKKQIKYLGQIIDKDGRRPDPSKIAAITNMPAPKDVPSLRTFLGMVNHYQQFVKNMRFVRQPLDDLLKKDKDWDWSKECQEAFIKIKEILSSDLLLMHYDPKLEIIVAADASDHGIGAVIYHRFPNGAIKAIEHASSSLTPAERNYSQIEKEGLALIFAVRKFHKMIYGRQFILQTDHKPLNRHFWQQKGNPPDEREPSSTMVTHAFGV

SEQ ID NO: 133233 - protein, 17 aa, Heterodera glycines
TFYEMYKNNFIILNIIL

SEQ ID NO: 133234 - protein, 194 aa, Heterodera glycines
EVFDCLSLAAVLHPCIFCVHGGLSPSFETIDQIRTIDRKQEVPHEGAMCDMLWSAMCDMLWSDPEKECVGFAISPRGAGKECVGFAISPRGAGYLFGSDVVKLFCEKNGVEMIARAHQLVMEGYKWHFDNTVLVLTIWSAPNYCYRCGNVAAILEMDDVLKKEFLIFEAAPQVGRNTPMGRNTPMKGPMPEYFL

SEQ ID NO: 133235 - protein, 323 aa, Heterodera glycines
IIWNILRRLPRPILASPDNIPYILLKIVLTTITKILADIFRLALDSGQIPERTSLVVPIFKKGEKTDPLNYRPVSLTSTVCRVFERILSSEILEFLNGIRFFDKEQFGFLKNRSTTTQILKMMDDIYNSIQMNQQIDIIYIDFVKAFDSVPIDLLLQKIKKIGIEGKIYKFLTNFLKNRSFKVKIGEVLSESFSIFSGVPQGSILGPLLFLIFINDLPSFIANDIKMYADDVKLYYAYENDDKTNHLDKAIEALEKWSKINGLEISTGKCFVLYLGKNNMKKRYFINSQRISESDNGRGLSIIIDSNLKNQGNLKNQGNKEPN

SEQ ID NO: 133236 - protein, 93 aa, Heterodera glycines
SFVYLLRCVPSAGTCQSRLGFGVRLRLIRLFGGHALQQPKMVTWPAENCPSVARRRSQHRKLKNGTTTFVLQFPIPQTPLPNGVVGFECIMIV

SEQ ID NO: 133237 - protein, 210 aa, Heterodera glycines
IAASTVFSLPFKSPSITAVPPRPISPLMASRPFRPLSSFRNGRANGAPLFRALPQPALCLTLWPMQRRQRPQLRHSRNARTPVHERPHQCPVDNCDKRFSRSDELTRHIRIHTGHKPFQCKFCMRAFSRSDHLTTHMRTHTGEKPFCCDVCGRKFARSDERKRHTKVHAKQKEKKRPKKGTIGGKGRKKSENWNGGGGLKAINFQMIDCF

SEQ ID NO: 133238 - protein, 120 aa, Heterodera glycines
MMDKLDNDEALKSGNDVEEARKKQLSAIEETNRTVRQIMENLSQFKKTGIPSGKGLKCISQQLFNRMAHHLGIEWHQVQPYRDMSNWRLAMRGFSALNAFLKMGIHFDSFAGKKNHKREE

SEQ ID NO: 133239 - protein, 38 aa, Heterodera glycines
IHTLGGDDDNKSRQRSNSSDDENSDEGRQGFFVGGSDH

SEQ ID NO: 133240 - protein, 142 aa, Heterodera glycines
DPHKYRFLSLSRSLSLFSHSSSQLAIDTANEYPKKETLDGIIRDKFENILKDLFKKAEEKAKKDNPRRANEINDDINKILLGSKFNDSYTWLDEALLSVFVKGNVKFNKFLKRLKEYQAAAFYQDESDLCMRIGNVTKRGEI

SEQ ID NO: 133241 - protein, 167 aa, Heterodera glycines
VGSDLLKNYRIGWPLFLKVLRLVVLFPGLLFVDCAHFQYNHCSLGLFLWAISFLEKGRLRAGAFFFVLALNHKQMELYHALPIAFYSYLTFFSVFNLFQLALVVLLTFVILWSPFLWPEPSLALQLLRRIFPFHRGLFEDKVANFWCCDKVANFWCCASVLVKFKQI

SEQ ID NO: 133242 - protein, 34 aa, Heterodera glycines
MEKACKIWRDYIDFSALDFYSSPFLIVKASECLK

SEQ ID NO: 133243 - protein, 225 aa, Heterodera glycines
PPPPSPLNSLLPIVPSPCVSPIYHPLFVQHSLEFRLHLRHEFLMLGILQVVEQLRSASPEGDGSSLGDHLDLFEMMRQEDEQEIRSCFSNDSLSDSGSTSPIDFESPSGMAEVLTQRLDNTLALPHLISLFQHLLMVPSDEKNLPLWRLFDLVLQQLTLQSAMGGLVCFSSQLIHHSNLVRFFGRLKTQEDCEQLEGKLRETEQELEMERRSQGRLENRLSDLQD

SEQ ID NO: 133244 - protein, 49 aa, Heterodera glycines
FRFSHFAFRIFWRFAFRFLARNATFTPLRIGLNSHKIFQNFTYKLANFQ

SEQ ID NO: 133245 - protein, 200 aa, Heterodera glycines
MHHGMIAEMERHLTRKRSIQYPDEGEIVDMEVVEEEEPEEAPLNPLKNRTKLDQLRLKHERDKKEREEEDKRRQQREEQQQRKQQEEQRKQREEQQRKQREEQRKQREEQQRKQREEQQRKQREEQQRKQREEQQQKQREKEQEKAKKSEAERLAKEKKTEKERLATEEEERLAKEKAEEERFEFGQVVLTLQFKKVVTF

SEQ ID NO: 133246 - protein, 137 aa, Heterodera glycines
MAPRKQNEQFLDEIQNIDDDVILVDSQSSHAEERPALKKRGRKSRWEKLLEDVNNAKKSNPAEVEVTDVDERKAANVFDYPTIFWKLARPKYGVFTFMCNECRNENFKRGDKRFILNTGSGQEKLELPKRFAKTVPS

SEQ ID NO: 133247 - protein, 165 aa, Heterodera glycines
MPPLTTALSKLLNCKAENLAEYLNNPEAVNKASAYLRGKKLKTTYSNKGGTTKEVEFGNFSLKSASETYAFEGFLGKCPFCKHSLTLESSEVKVHQYFYIKHRIRLLYPQLKCIVEYHSKGHCKYYPLELLAIEESAEITGEKPTDTNYLDYLGFRSVWQPTPVY

SEQ ID NO: 133248 - protein, 501 aa, Heterodera glycines
MMKKLPKPFLIVYDDLMGDIDAKKLADLYTKKSHHNNFSVIFLTQNLFDKAMRVPRSNAQYIFLMRAPSDMLSIRNLASQMFPREQGFLMDAYKQACADPYGYLLTTKKRLSLYPKMVKKQMVGQRVLDNYEYLKSLGRTTSHKKRRHLLSSAGCEELLTLVEICLNLLNGSFCLTRKQKQKLLPFADTIRRLARVRSEQSARKLILQQQQPQQEGAREGVGVAKGDDDVAGQTNLGFVKRQLETAKRKRTANVSERNVLYNQQLRRYLKLRKEVKDRPLKVQLSNGAQLLNKTVETGVQVRPGPDEPKDNSVLITGEDEEIEVPTPISKTPGNSRSPRTNKKAIKQKEMNEKKDHLLAIIMSDPQRFGATDRGKILNPKTGREFINSDLAWSIERLVDPRPENAPSPSGTKELMRKLAQNPLASSLLNRLFVGSGQRNTTYTLFKPKREKFRRLRTVPGGFMTGGLGRLPSPFAKEQRLSVPAVGGGCVVAAYVRLTRKE

SEQ ID NO: 133249 - protein, 213 aa, Heterodera glycines
MHHGMIAEMERHLTRKRSIQYPDEGEIVDMEVVEEEEPEEERYDTRILYMDTDSIFYDFKTALGDPLKGGNQLGELADEYPSHTIDEFICAGPKAYALWLRNNATGEDEYKLKLRGITLDSNACTHINFEKMKEMVLEKWGTPGNHVRFDYPTKNFRITKQGDILTVPITKQFNPTVNNGVLRDRGLKIVPFGYSSYEYCKAHNPYDCLCKKE

SEQ ID NO: 133250 - protein, 158 aa, Heterodera glycines
MDIDYDVILVDSQSSHAEERPALKKRGRKSRWEKLLEDVNNAKKSNPAEVEVTDVDERKAANVFDYPTIFWKLARPKYGVFTFMCNECRNENFKRGDKRFILNTGSGQEKLEFTQTFCQDCAKLNFDCTDLIMKHQKRMMDHRRTEDGTPFSRRKSDL

SEQ ID NO: 133251 - protein, 153 aa, Heterodera glycines
MLCRHNFLNNLWASSIGEYGHLIVHIQLSSASSTQFDVSKSLLMQKSHDASLVNSLLKRRPNIVPPMREFFDSCRATMPSTITRLTKMITITMPLSMLTPITSSIFSLVFLGIMRCAPVQCAACDGGTPKQQQQKQQTEHNPTMALASEMVLI

SEQ ID NO: 133252 - protein, 146 aa, Heterodera glycines
MARRCALVLVILCTQLSNNALVAGLTCYETVNGKTTIVQNESWTYCALVPATIVGNELVNGSQFGLGPDNDMMAAYNTAFAMSVDEYRILTVCIYERYDFSRFMTIKPDLAVEFAFRCVCNYDLCNSEPTFSAYLSAIKSESFARR

SEQ ID NO: 133253 - protein, 53 aa, Heterodera glycines
MQVQSAESRPRRAWVFPGLDFCPGPTWKQENKKLSADRFTQFASDSNEISNFN

SEQ ID NO: 133254 - protein, 40 aa, Heterodera glycines
MTMPIDILEVNQVISIRLLTDKMLDNTITLKLWHSIQGKE

SEQ ID NO: 133255 - protein, 34 aa, Heterodera glycines
MRVFSQLLVQTCVVDLFVLILAALVLPKIFLASA

SEQ ID NO: 133256 - protein, 31 aa, Heterodera glycines
MIFGLSSCTFCQLPHLILAISLFLFVFINIA

SEQ ID NO: 133257 - protein, 64 aa, Heterodera glycines
MAPKCVAKCNVSAVQCKCELAHGTEQTNCAVRPEKGALRVDIGMARANPTARPRAHQLQFVGAK

SEQ ID NO: 133258 - protein, 74 aa, Heterodera glycines
MWEKAAKLRPIGGTETDTQRCGKFRKTQEPINGPRESRLGTRARNFEKPGPGSVIGTRITRWNRTAFRTMKSLF

SEQ ID NO: 133259 - protein, 212 aa, Heterodera glycines
MFGSLAVFLTLFLVLLLFSSFVTGGEYDLTAEVPPGKIQCFFQPVLEKHKSMEVYYQVIDGGDLNINFMLILDANVLKQDQMRTDGDHKIDIPAPADYQLCFDNSFSYQTRKVVFFEIYLYDANGTLEEEDVTKFAIKGSDAAMQEMLKQVGMTVQQFQESFTTIKSRLDRVEYYQGQFRASEARDRAVVGANNDRVQFWSLKKQVPDSMST

SEQ ID NO: 133260 - protein, 125 aa, Heterodera glycines
MDFKELVNQAERNAKRQERKVHEAEREMKARQQSQMERLAYEKAREKLVLKRRAVATMQQQKEQQQQQQLQQSQKQSTTHERTDGTTKAMTKRERLGSDAVATDNKHRKGAGPGDAAQLCNGSNE

SEQ ID NO: 133261 - protein, 66 aa, Heterodera glycines
GGGGLKKSIFFVFGAVPPNRCAQIYGETESFGNRFPIACTLILRCIFAPHKCLSTPIRTLEKIDFF

SEQ ID NO: 133262 - protein, 47 aa, Heterodera glycines
MEMELKLAKLELEIKVLEQKLKHQEMMVEQKALKEKVIKIEQKNEKK

SEQ ID NO: 133263 - protein, 42 aa, Heterodera glycines
EKSKKAYNTFDSQDVSVPSTKKAQRCLTCQIGRDGVLSTWYG

SEQ ID NO: 133264 - protein, 104 aa, Heterodera glycines
MESSSLEYEVQQNCNLTQIGGVLGSKGYGIALQKSTTKWWRSKGASCHGVGSSVKQQRISLNLHNVSGLFVILSMGLLFSVFIVCVEFYARKRENQNNKRNGQK

SEQ ID NO: 133265 - protein, 106 aa, Heterodera glycines
MESSSLEYEVQQNCNLTQIGGVLGSKGYGIALQKNSEWTDRISRQILLYQKRGIIAMKKTKWWRSKGASCHGVGSSVKQQRISLNLHNVSGLFVILSMGLLFSVNF

SEQ ID NO: 133266 - protein, 310 aa, Heterodera glycines
MVRCMRASRGSSKGKGIKHMSSRTQHAQSASKRQKLHNNEDDCQWEGCSNGTDSRRKMVGINDLPHPVLGLILANLNPAERLRAESVCHRWKFVGTHFSWTNQRELTVKEIVHPSTAVHSLFSMSKPLTNKHIEILLKRCGSSLRLLNIGSLSSVNRDSITYALEELNISYCYHIGIHGIRQIRATCANLRRLYMDQIGDSVSIRELDEMLRELKSLVYLKFCECYGSSDFNDLQLNHDQHLTGIGELTNLTELHANENRLKCPVPFAMDSLGRLPAQLGKLADIERCFHHCSSSEHSDDRHLNDREGRE

SEQ ID NO: 133267 - protein, 241 aa, Heterodera glycines
MLDSKVLDNYVEIEKGRFSEGGQMVQTRYKAKHDRHTTAVRQQQIIFQREKERKEERRQRQMERNFDAQMWRPSEKFGQPSASGKSFSNYYESQQQQNHRFYAQQREHSPAMEMNGALDSNWYTNEDDDNNRNNNSDGIDNVDDREEVSDSDGASAKLAADYSNFFGASKWPSNLYNNTHCQAKPTAKEQQKQHKSPPKKVGGVSEWSSGSGDEQQQPSEEEEKPKPAQEQKLTKHQFVGI

SEQ ID NO: 133268 - protein, 131 aa, Heterodera glycines
MVCSAISTSKSGSNSQSESFRTGLEEEEEERANGMEEVVNETPHLDMMETSGTGTEVENASNSKGKIEQRKSAIAPICSITLRQRSSAMKFAPSEMKRTHSGHYHIKAGKKQEIDLGNLGFMDNILTCYFE

SEQ ID NO: 133269 - protein, 86 aa, Heterodera glycines
MPIEPFELENKVTNEKLTLKLSEESIELEYNWLLKRCPIGETAPVRFDPRYGNNACANLNIVRFDLGGNHWIGPLSPPAVVEEELD

SEQ ID NO: 133270 - protein, 51 aa, Heterodera glycines
RLAWEHEIYNIGRIHAVTISHFSTHSNPFRNSLMDIPTSLDFSMVENNAKL

SEQ ID NO: 133271 - protein, 40 aa, Heterodera glycines
MPFYLWIKCLLSPVNDCVDWHNANQLVSIFYFFIKKKSII

SEQ ID NO: 133272 - protein, 48 aa, Heterodera glycines
MPSTLPTLVKPPNTEDIARQRTHAFTHLWPRPSSPAVEGNLDKYFELD

SEQ ID NO: 133273 - protein, 237 aa, Heterodera glycines
MSDSWGGRSYSDEGEGGAAATAPLCCWHSDLAFPCLGTTNSTSYTEPSADEVEVGFTLVQQCAMRGSDEEFTSSSSTSSGSYTSGTYTSSSSIDEDEEEEEEDEEVEEEEVSGDEHGSRPSSRAVSPSHRSRSVSSTSSSGESAESMCSEEEQQKPAEETELKAIVEDEEKPVATEETSPIAKKSPSPMFVQMAEESEQMLEGHATVEELDGEEMNMEELEQIEEEQSIDGSKEVAN

SEQ ID NO: 133274 - protein, 149 aa, Heterodera glycines
RAVSPSHRSRSVSSTSSSGESAESMCSEEEQQKPAEETELKAIVEDEEKPVATEETSPIAKKSPSPMFVQMAEESEQMLEGHATVEELDGEEMNMEELEQIEEEQSIDGSKEVEICREETYVRVQELRDGRTEEATRPLTGQSKPRTDF

SEQ ID NO: 133275 - protein, 269 aa, Heterodera glycines
MLKEAKAKVPNPNLIIWTGDSLPHDKYDEKVLFDILQKVTNAISAQFPDAVLLPVLGNHDSAPGNSFTDHPAKQQIYEKMFIIWKQWIGQEGKNSDGKAVQRFFTAPALTPAFQKNNPAFRVADYNTDTWELEDMKTYYVELDELNKNGADGTRAKLEYSMRDAFGGLDAQTLDAHIQKAKRNGTVFDALIRHNHVMYEANNNWRLNATQRAVHLCALEFVDYKMFEQCLANDANTNDQIPAAIPLAIGGFAVPFLVTLSSILTLLLPF

SEQ ID NO: 133276 - protein, 67 aa, Heterodera glycines
MNRRWICNDVWMDILPSFDRVQLGLKIALLSPRFDALVDKHFDGKMTELTIWRAIEFARTMDKNQCY

SEQ ID NO: 133277 - protein, 323 aa, Heterodera glycines
HFNHWDSILLHSNHWDLTSPGPSAFQSLGLNSPAFQSLGLNPPAFQSLGLNSLAFQSLGLNTPAFQSPGLNSPGLQSLGLSFYAFQSQGLKTPAFQSPGLNSPGLQSLGLYSPAFQSPGLSFYAFQSQGLKTPAFQSPGLILLHFNHWSILLHSNHWDLTSPGPSASQSSRLNSAKFQSPELNSATFQSLGLNSPSFQFPGLNPTSIPVTGTLFSCIPITGTQLSNIPVTGTQFSSIPITGTQLTIIPIAGTEPHLILRTSITGTLFSCVSITRTQFLCIPITVTHSPAFQSQGLKSPGLQSLGLYSPAFQSPGLSFYAFQSP

SEQ ID NO: 133278 - protein, 112 aa, Heterodera glycines
MLRHKLAAKLRCTAGSLTIQSCVSVKSQQKSFFELKYLLFVFACQQTVQTDSDRKAIQSPKQYLGCFRGVDLEYDISASVIINGGGIELEEKMNGKERPLGPETLTSALHSL

SEQ ID NO: 133279 - protein, 258 aa, Heterodera glycines
MLIVIHHIYAFVMPKRSNAGIVAWINRSWSRPIEPVKSFRMISRLFDSVNNFKSYIDSKLAQTELARRSWPVPNFMENLYVFQKFSKKIAAKLKDSDNFSLFHIETRNFLGFEIYFRYLRIPRHLNITPYLSTILTFEYNSTFLFFDSFKSGEDLVDAASDLVNEANEGVISDDLAIDGMKKASVGVMCNDAIFELKMDHFGKLRNDLCKQLKSDGQNFEVFLANILNIFTNVLPAVLSNAINEIEKKALLNEQNVQN

SEQ ID NO: 133280 - protein, 44 aa, Heterodera glycines
VKGGIRVSGYHQVFYQGHLIENIVTSFKFIFFVLDKKVKCLQYN

SEQ ID NO: 133281 - protein, 577 aa, Heterodera glycines
MLPDECLRHAWIRKNRERALAASRTASPAVCHPLAVDKFRKYVKNKRFRRLVFGVLFINQNLLVAAEQHQTNANNNNNGTTTTTTTIENGHGNSIDDSDSDRIGTTISGGGSANETAKGKVPKQQRRQEGQKMEEMAMDTSNNDNDHHHRQQKKVVIAVTPPGDSGDGGDAKKAGETTAASAKKKVVVVKRVPRGEKRSKSEARRAADQQRTRSSTEQTANKKQRQESGGAGGGEQCQQNQRAAVDSDCSVKSPLMARRLGQRETAAATGGGTSDNSSSSSKSPLMARRSVKFEEVPTMATTTAAAPKAATTSATGSPIMKRVSGGDSKVLRIAARLAEQNAGGGECSPSTSASTNGGGADKRLSAEAATMTKKKSLSSSSKVSALLKKLEQKGAGAAAAASSATTTPTSSRWSAVSASASPLSLAVTAIAPKTATLKKAEERASDHGEKQQQQQKVIKVVKKKKRVLRVRTVDDQPQQQTTEQRLGEAVATVTAARAPSASVVTAGEEKPGMKTKQQLRRQDKVAQKAIINEEKPVKKLNVPGRWSTMALAAQNGHRLAAEVNPKEKQQLNGGELT

SEQ ID NO: 133282 - protein, 35 aa, Heterodera glycines
MCVSQTSNQIKLIDFGLAQWYDGSKDLMFMAGTPE

SEQ ID NO: 133283 - protein, 95 aa, Heterodera glycines; identical to SEQ ID NO: 125597

SEQ ID NO: 133284 - protein, 97 aa, Heterodera glycines
MGFGATGLGRLLAMDACRLICVLRRGANDGGGIRCESVSAWDSLAGTSEAAAVVVSTVDGMDSVGDAALAFFSGRPPMMPLGFGTAHNGAAFSTPQI

SEQ ID NO: 133285 - protein, 47 aa, Heterodera glycines
KWREIARQREWRGRVAARDTGNGEFGWREGKGGQINKSINGISQFLT

SEQ ID NO: 133286 - protein, 38 aa, Heterodera glycines
MVRATTARTRASAARARTIKINRRNAKKARAAIGRAGH

SEQ ID NO: 133287 - protein, 233 aa, Heterodera glycines
EDQESRRESGRGTESVRGTESGRESGRGTERGRETERGRETVRGTESVRGTESGRESGRETERGRGTESGRESGRGTESGRESGRGTERGRETERGRESVRGTESVRGTESGRESGRGTESGRESGRGTERGRGTESGRESGRGTERGRGTESGRESGRGTESGRESGRGTESGRESVRGTESGRESGRGTESGRESGRGTERGRGTESGRESGRGTERGRGTESGRESGRGT

SEQ ID NO: 133288 - protein, 130 aa, Heterodera glycines
MIIFKLMQFGIDASSYIFFGDEQKVINWSLENGLLTNVRYCYGKRPTRHYKKEMRFDKNRGRAGSFICSTCRAEKALFVDSGMIENDSEDFRVVVCPDNVRSPDALLPIIQNTLQLVLKYTLTCGGLILD

SEQ ID NO: 133289 - protein, 37 aa, Heterodera glycines
KRGDPFVLQNFFKIKNDDNFLSGVLKVANHESDMYFD

SEQ ID NO: 133290 - protein, 185 aa, Heterodera glycines
MKILKQPVLNSKAVAAAAVPFVPPSNQKSLPNTPIASSTQKSTPIPTQVYKQTTAMRLRNSQAPLNIKAIPFVPSKKYLVNTAIASSTQKPSQQNSQPTPTNKQQPSTTTPHKKKSREQPATNKKDVKKDTTKNLEQAQKTTNEMTITPNYKNGKAEEKAAVCTNLEEVQEKTNELSLKDKREKT

SEQ ID NO: 133291 - protein, 125 aa, Heterodera glycines
MSVPFIDMSGKMMKDIRVVRCALSTQKISFRNPTDTWPPPFICANVAFHPHNFVGDYFYQQSRKESVDVGQLAERTTWILRMLETNRVVHARPKYIIVLRDGLSEAQFSMAIDEEMSALKMGCME

SEQ ID NO: 133292 - protein, 30 aa, Heterodera glycines
MAPDVIIIDFKKATRSATGTDSAQSAEPSC

SEQ ID NO: 133293 - protein, 23 aa, Heterodera glycines
KPKLFGLFKKELKIFKNFIHLPF

SEQ ID NO: 133294 - protein, 264 aa, Heterodera glycines
MSLKIINKVHPSKKKKEVKCSNTKRYLLVPEEIYQSLASPPPSDGTPIGLVRNRIKQIKNDDGINEAERAIKYEQELKRLNKLTRDEDECPVGVKLENLSDVVDAMPKSVNVRRPIVVATRRHLKVGRARKENVEQLEDDDDADDHADHDHETPKPSSSNKRQPTQTEILKLIYKNAQSLGVSEEGQVLRAGGRPFITSSVYDIVSHLLNKDKRAQNKEPTAFKEFVERARQIPLLSRHLFPEGQSGKGIYKNTTLKFKPSLWI

SEQ ID NO: 133295 - protein, 46 aa, Heterodera glycines
IGIGIESGEWRMALCCTSVTLVYFRTPFAARKCSYYGEGITRIAFL

SEQ ID NO: 133296 - protein, 92 aa, Heterodera glycines
MQAEDAPEVDLEVLNGTWMPDLTLRYPPTFSKRDLIFGIDGGLLYNGKQPLESMERPKFEDIEVRDQVRIGGNRRGEGDDAALADARPDSER

SEQ ID NO: 133297 - protein, 84 aa, Heterodera glycines
MRRGTKVIKRGTIVIKRGRTVIRRGTTVIKRGTKVMRRGTTVMRRGTTVGTKVIKDTKVIRRGTKVIRRGTKVIRRGTKWFKIK

SEQ ID NO: 133298 - protein, 102 aa, Heterodera glycines
MDHSLVAQHLAKHFPDVDCTAPLIKDTCIYTMTDDLQFIVDRHPRHQNVFIAGGFSGTGFKFALTIGNVLAQWVNGEDTPPHIDVSSFRLDRRIADTDRPKL

SEQ ID NO: 133299 - protein, 88 aa, Heterodera glycines
MPKQNEIVIKYSFLDLTWFLDIEAVFYAISKTKKCLVVKTIFHISLHNFVSSARIETGIRPLERAARALQEGMERKNSYFWDFFRNQN

SEQ ID NO: 133300 - protein, 124 aa, Heterodera glycines
MSNRAGQKEFENENECENENGATKDGENADVKWWTNWIMRNEIENDDLNKKEKNGKKRRKGQIGGDFVISPIFCSVRPTNGNVPDHQWYHGFFFFGPETRGGAVNHAPGVAHRFSSSSSILRAL

SEQ ID NO: 133301 - protein, 113 aa, Heterodera glycines
MEEKRRQFVAIEEEKMRQEMPLRAEIMGQAEQVGAALLYTLIHMKMRRMFMDNNQTPSGSNSQARDDDNNNNNEKNNQQQGLADPAYFPFWLKRVEEAFRSHFEKGKEQFGIF

SEQ ID NO: 133302 - protein, 155 aa, Heterodera glycines
QFEVGFSALNSNSLNDNILSGIRILDFSRVVAAPFASMILSDLGAEVWKIERPGVGDDSRLFTPPEINGQSCYTLGLNRNKKSIAMNLAHPEAQNLAQKLATKADIVIEAQKLATKADIVIENFKTGYMKNFCLDYPQLAQLNPGLIYCSITGIF

SEQ ID NO: 133303 - protein, 98 aa, Heterodera glycines
MDLPELCNSSDYKTNADRVRNREKLIGIFSKKFLEHDLEHWNVLLKHSKFPAGPVNTIREAFRHEQTQHIGIVKPITHQQYGTVKVVEEGQLKSSEIY

SEQ ID NO: 133304 - protein, 34 aa, Heterodera glycines
ECHGTGNFCQNRDRDLPGPEKPGPGPRFFFRDRD

SEQ ID NO: 133305 - protein, 16 aa, Heterodera glycines
EAIPEGFGLPINLGAS

SEQ ID NO: 133306 - protein, 35 aa, Heterodera glycines
METHEYTKQKIENNLISVEGLNQGKEEGKVKETSH

SEQ ID NO: 133307 - protein, 121 aa, Heterodera glycines
MRDNKSLKKMIDSIHWIKSDNSTIFILYIPFNYFFYKFDEKTKIKRIKKLYNFKFFYEMENRQQQRRKSEMIRRTLSEDYPGLDYLGFHNVLNAKYFWYRVLWFSVVTVCLLIGLFTIFRH

SEQ ID NO: 133308 - protein, 322 aa, Heterodera glycines
GISEDLKAKRHDWLYKERRTVKGILENRPQKVVIENHVPGPNVAPYLGLNNQSKPQETEEPRKIIIPGKDLKSELQCDLCIFDQLKKHNDGYKYLLLCISTWSRMIFSAPAKSKKNEDMIEAFDRVFEKSKIIPMKYSDSGLEFQAGKIKNILRKNFIKNVMYSPDLHAGVVERANRTIKERLYRYFTKMDTLRWVDVIDRIIININNSVNRKLGAKPVSVTFENARALWEKLYKAKEFKISKKNKFKIGDIVRITKEKGKFAKGYLPNFTEELFKIVIVNSTTPDSYRIEDLEGNLIKGIFYNQELTKSKNKVGSEKPRLK

SEQ ID NO: 133309 - protein, 95 aa, Heterodera glycines; identical to SEQ ID NO: 125597

SEQ ID NO: 133310 - protein, 53 aa, Heterodera glycines
STGYREAIPEGFGLPINLGASVRGDCPENKKKNFFKCPFGVLKQLWGAKIQRR

SEQ ID NO: 133311 - protein, 49 aa, Heterodera glycines
MSTRQDLISECILSFEKLRDYVVNELHHLPALQKSAARATYGCKFEEFI

SEQ ID NO: 133312 - protein, 27 aa, Heterodera glycines
MIKANELVRTCAFREEASMDMLGHFDT

SEQ ID NO: 133313 - protein, 103 aa, Heterodera glycines
PFPATIASPLLDVGQVLRTKSTESLPFLLCLANLAVVDFPSVFKCLSTPVLFQVCVQWLLYGVLVDDFYMKVPNGIGTFISTMQLSLFIVYPRTYKQLTVGNV

SEQ ID NO: 133314 - protein, 131 aa, Heterodera glycines
MQRRRLAQPKNATTTTRMTKKCHDDDSYDQKMQRRRLAQPKNATTTTRMTKKCHDDDSYDQKMQRRRLAQPKNATTTTRMTKKCHDDDSYDQKMQRRRLAQPKNATTTTRMTKKCHDDDSYDQKMPRRRLV

SEQ ID NO: 133315 - protein, 25 aa, Heterodera glycines
SKSSLTTAQKNMFFVRFRPRGSQEK

SEQ ID NO: 133316 - protein, 133 aa, Heterodera glycines
MADAGQLVALTGDGGVDKTALLNTLLDHNLKTLSVEGQVLINAHSLGRFITYVIGYVQQDDLFMGTPTVKEHLMAQAQLWMVGHTQRTMRRRVNELEEAISDGEARRLPFAFEPRHNPQIIFALKPTKVPIFF

SEQ ID NO: 133317 - protein, 128 aa, Heterodera glycines
MERLQLACGGEAVNSVDDLTPDVLGWAGSVYEHVLAFAEALLVIPKTVAVNAGFDAQEAIVKLVETFSAAGELVGLDLESGEPCVSQSVWDNVCVKQASLNACQNIASNLLEVDEVMRAGMRDLKGGQ

SEQ ID NO: 133318 - protein, 282 aa, Heterodera glycines
QGEWHGNRGGLNGGQPMGNGTGTEEGMGDKGNGTGAEEGKWGTTNGEWHGSRGGLNGGQPMGNGTGTEEGKWGTTNGEWHGSRGGLNGGQGEWHGSRGGLNGGQPMGNGTGTEEGGGQPMGNGTGTEEGMGDKGNGTGAEEGMGDKGNGTGAEEGWGTTMGNGTGTEEGKWGTTNGEWHGNRGGLNGGQGEWHGSRGGLNGGQGEWHGNRGGLNGGQPMGNGGNRGGLNGGQPMRNGTGAEEGMGDNNGEWHGNRGGLNGGQPMRNGTGTEEGKWGTPMGNG

SEQ ID NO: 133319 - protein, 29 aa, Heterodera glycines
FTPHFPFRHSTDILLFNYYNCPFLNTEFP

SEQ ID NO: 133320 - protein, 192 aa, Heterodera glycines
MANYDFEIRYINTASFGQADVLSRLIANYPRPEEDILIANICTETECYNSTILQTKTEQLPVTADEIAEATPKDEILAKILAFTQSNWPKKCSDPDIAPYFPKRDILEIEGCLLYQNRVVVPQSLRNRMLKSLHMAHPGIVRMKALARQHVYWPGMDSEIERIVRQCEKCQKAQKAPIKAHGVNSRSRSRKP

SEQ ID NO: 133321 - protein, 743 aa, Heterodera glycines
LMGQAPQNAASASLNHANLASSIDGRISKFNYDAETGNTFEQWDLPESTKVRLLLGKLGDEEDLPESTKVRLLLGKLGDEEYGKYRDSISPTQPDKVTWVDSITKLKGLYAETRSLFVRRYECFKIRQQPSQDISSLVAHINASCENANLSPTKEKCIILVIALNDEHHDLRQKCLKMLEDAKKTADITLQKVEELKAIQIVKESALSLLTQPVSTSAIHEPAPKSPHHVHEPAPKSPHHVPSPKQKSDNKANRHPPHPCASCGSTDHWRSDCKFANAFCNKCNRQGHIAIVCRCSSNTAHKSQNRSFHTVVVKSHCMVIGTTQGRWWKIPVIINGINLKMNGDSGAQATVISFKTWIKLGQPKLSPTDIETRNCNDTAFSPEGKFHCTVLLRSAIQKLIAYVSSDLKHDLFGLPWIEEFELIPREILFPKSTKGKPNASIAVLQKDFEEVFKNGLGHCAIKAHLILKPEARPIFCKARPVPHGAIEAVDTELDRLLQIGAIKPVEFSHWAAPILAVKKKNGKTRVCIDFSTGLNDSIELNRHPLPRPDVIYAALNGAAFFSNLDLRDAYLQMELDEKSKPLCTINTYRGLFQCQRLPFGVKSAPSIFQHLMDQICAGIPGVFSYLDDCLIASKTLEDHVNALQTLFKRINDFGLRIQLEKCKFLQKELLFLGQVVSSNGIRPDPARSEAIEMSAPHDKTTLRSFLGALYGRFVKPMREIRAPLDQLLRKDESSWGGEQQSAF

SEQ ID NO: 133322 - protein, 87 aa, Heterodera glycines
MGHISLTFAIYVKPMENEYQPSADENNENPPDDEDIRTMVRRILFRIKITKKKWRTEKKIRKECAICLESFEDDKLTMKLHEDYKVN

SEQ ID NO: 133323 - protein, 66 aa, Heterodera glycines
MCFTRNASLNAEQKLFEIGPDGVKSHPIVEELKNQISDILSNGRQNSEEIIAKAEQMNFLINRITI

SEQ ID NO: 133324 - protein, 159 aa, Heterodera glycines
LKHSASDALTMDYGLGRIRRRRSNYGAMSPTKSVQEVQPVALSWHGLTAVHAKSGRKILDNVSGMADAGQLVALMGASGAGKTTLLNTLLNRNLKSLSVEGQVLVNGHSLGRSITYVSGYVQQDDLFMGTLTVKEHLMAQAQLRMVGHSKRTMRRRVNE

SEQ ID NO: 133325 - protein, 131 aa, Heterodera glycines
MRSNNLDENKRIEQRKIVGIKIGDHREEQLQKRSAEIWTNYMEETLEKIKAHMEMDPIYQQLAEQKYAIDNFPGLDDIFRKTRFFLVNSQPEVDFDNYRSVKGMEKVKFIGGFNLMPKARELDEVSKKIVK

SEQ ID NO: 133326 - protein, 33 aa, Heterodera glycines
MYNTKLDIAFFRSQLEMSADHLSTVALFTIRCL

SEQ ID NO: 133327 - protein, 16 aa, Heterodera glycines
MDTLCSYLMVNKATVD

SEQ ID NO: 133328 - protein, 16 aa, Heterodera glycines
SALKRIKLMYELNKAL

SEQ ID NO: 133329 - protein, 53 aa, Heterodera glycines
FNFLNFFEFLKIPGWSRFPVPKKNRGPGPGFSGPGKSRSRFCPKFPVPLYSTL

SEQ ID NO: 133330 - protein, 62 aa, Heterodera glycines
  unsure (1)..(62): unsure at all Xaa locations
YEYPKRTLEKIDFFVFGAVPPNRCAQIYGETESFRNSFPIACTLILXWIFAPHNCLSTPNDT

SEQ ID NO: 133331 - protein, 771 aa, Heterodera glycines
MVHQDFPDDQFGNFTATQGPGQQRQVIDPVVIWYNGTNHFQTVVLPSRPSASRFAVEIVTSPQFPPSIHLFGEEVEAMEIAAPAAAPSAPIPSTSSGIEEKRSTTVTAPSIVTEEEDVFLEESLPKMESCKCCNSAVVPPALEDANVHLKQQFAYYGYISTPCCGDFHLRCFEKWSHLFFEEPTEPESQQLTEAVDLALNINEELYTPIKVEYDNTSIAYFAVYNAMIRAKNNCYRNRPTPPPEMLAELRACSEKEKSLYWDFSASTKRHQYATEQMLKMQDYLKATAQPKHRQCVKEQLCDSLKEATNNKAPIIREQHCLLIQALEEQLYDIIKQFLMLWHSMQQISPSTASLESMQEWLLSSEDNGMELARLADSWVEHLALINENIKSCVKKCNKAKRRTSFMSLEAAIRKQEEAQNTTDGGQRPRANSIGKKRRIDDKSVTRESPVKRREKAADAAEHRMQRPVLMTAEQAKTLEAERIEAQKRMAADRRAQERLRQADQFLKQHLAQQKRLKQRNLVWGRQAAYERYINERLEKLKAEVNALRKSARESMNFTEIDICQLKIIILSNSVKYLVLPTRQAVEAYCADIIRYANHHAEEDVQKAIKEHQQILERRQRALDEERQRQKLLSTWRDEDRQWAYREDPVLAAELEKIRQQKEQIDVEYAEEQARLRNIRRAEEDARSRARNELLGLYDSPESEGWSDEDLFYNVRQADRMPIMQEVGVAQMPREAIRAREVIDRRLNFQEADYVGEMTPANKGDDNRGSRK

SEQ ID NO: 133332 - protein, 70 aa, Heterodera glycines
MSISTNSTNGDFTPTEGEVNCESISLDNDGQSDGKATDPQQQKEFVEKCAKMEMDFKISTLELEKVGFHR

SEQ ID NO: 133333 - protein, 161 aa, Heterodera glycines
MNRGRNNQNYLIHGISKYWQVVGALGLCVVMVCITYQLFLHVDEKHKSFKLMIDGHFKDFKQIHNDFTAWSKNFTSHLNERFEQQQARSRARFKQQLAKSKERFDEQHANFVKIRLDFDRQFQKTMHRFAEVELETVLNKRLDCLFFGKQRIFASPPHPFV

SEQ ID NO: 133334 - protein, 53 aa, Heterodera glycines
NHPILLYQKVLELFGDLQHKGTKKAKKEFVNFSGVICHFPTRYELCQCRIEDS

SEQ ID NO: 133335 - protein, 77 aa, Heterodera glycines
LTNDQFLLFSAHSPRPIRPRSVPAPPALLRLVHHFREGLALGAADFDRALSAPQLAHQTARLRLRAVHAHKVDTLRL

SEQ ID NO: 133336 - protein, 238 aa, Heterodera glycines
MASSFCSSIISIVAIVCLLCKCCFSAPHPCCPGSQHVVSMMKDHTGTFSAPHPCCPGSQHVVSMMKDHTGTFSASMPKSSLCLSAERVAAAVENQLKTIWCPGNGGQTLINEINAAQSSSDECAECARSLGFIRAMFEIAASAASHAGANAELANLAVQFREQVGTIDTNCAALDISVGQISLGTPKGDHPQVHDSETVLSNPGNSGFHKRLKGDHPQVHDSETVLSNPGNSGFHKRL

SEQ ID NO: 133337 - protein, 63 aa, Heterodera glycines
MRCFLPILRCESITLKSTTKHVLLNLNDRLSPMPMNSLNAVMDTEEMLNEANLEIKGTISAKV

SEQ ID NO: 133338 - protein, 199 aa, Heterodera glycines
MDSHIRWPEFKTPGPHWRSQEMKLPSNIGQKKLSNIGLVVTTRKIVSIGLEYPHAYEEIVKQYNDFRSHIVLLQDLKTALHNTELELDQLAAQMPADKLSECPIIEPRFRVSSTFYEELERSPVRVLNTPMTEGGKGKGKGKQQLKPAPVTGRAITKMIEVNTAPTTVTRKRRMHYPEGTPPTRSQTAIHLQQQQLQQN

SEQ ID NO: 133339 - protein, 46 aa, Heterodera glycines; identical to SEQ ID NO: 127686

SEQ ID NO: 133340 - protein, 52 aa, Heterodera glycines
ISKIVKNERMLIKPNLCQVARDPSGLVFRILIFKKVHFSIFGLGPKRPRGPK

SEQ ID NO: 133341 - protein, 134 aa, Heterodera glycines
MEAILTKRNRTKLQHNGYSYTFHKPSADGEARFWACEHHHAKDISCKGRLHTDLDNRILREVGNHQCEPSAARMEALSSDHWNQTQGGTNHGTTSDNSLFGTAECGHASPCATPNQTGDKTSDSFLCFLKYLYI

SEQ ID NO: 133342 - protein, 41 aa, Heterodera glycines
LLTLLFVILLAVGGKTEIINVDLLGSYDPNATIGGATDCNS

SEQ ID NO: 133343 - protein, 51 aa, Heterodera glycines
MFKTYLRPKLSVLLTLLFVILLAVGGKTEIINVDLLGSYDPNATIGGATDW

SEQ ID NO: 133344 - protein, 27 aa, Heterodera glycines
MRRMNYCPRKARRKHLELSNDIKKIKI

SEQ ID NO: 133345 - protein, 89 aa, Heterodera glycines
MNQRNVYYSWTSIHSLPVGLEFGFLSLRFSVGPNDMFKWRLRINPKGRDEESKDYLSLYLLLVQSNNTQVHAKFKFGILNANGDEGRVL

SEQ ID NO: 133346 - protein, 23 aa, Heterodera glycines
MPIAKICGDVFMTLAQSRLFEES

SEQ ID NO: 133347 - protein, 31 aa, Heterodera glycines
MAAAAASAFPSRRHSCTSAGADCSECIFIII

SEQ ID NO: 133348 - protein, 132 aa, Heterodera glycines
MLGVGQLGNHCQVRNLDSGPAKLEKHNGRNEPKKAQKRQPMTEQTTGENQREGKSDTDGAENAKVEIGNGKMPSQPMICHDFRRPKRRKMPGRRDKSLSIPTNGVDTASVTWRKMAKCFCPSTFAVFPWNIH

SEQ ID NO: 133349 - protein, 304 aa, Heterodera glycines
FSDKRKSAALPSRGCERSERKRRRRNRREGRTKFLAYSTGHFYNDLCASMWFTYLLIFLEKVVLLLSWQAGLLMFIGQVTDAVTDAVSTPLVGMLSDLSLLPGILRRFGRRKSWHIIGTVCVTLSFPLIFSTVCVTLSFPLIFSGCLLCHLPFLRLLWFIPPIMLFQFGWAAVQISHLAMIPELSNSEHTRMSMTSYRYGFTVSMTSYRYGFTVAANLFVFACLFLFLAQDKDTSKIKPSDLANFRNLGLVNLGLVAVALGTAVTALFYGGVSEPNSGQRRMSRLNSESGDAHRLGRMSWQENI

SEQ ID NO: 133350 - protein, 57 aa, Heterodera glycines
MDENDGKLFNSNYIDFEALTVAPPDLPDLMGDSELSNYNAKKDVKFIQKEKVCLILR

SEQ ID NO: 133351 - protein, 16 aa, Heterodera glycines
EAIPEGFGLPINLGAS

SEQ ID NO: 133352 - protein, 18 aa, Heterodera glycines
YREAIPEGFGLPINLGAS

SEQ ID NO: 133353 - protein, 18 aa, Heterodera glycines
YREAIPEGFGLPINLGAS

SEQ ID NO: 133354 - protein, 70 aa, Heterodera glycines
MERWMEWGEIINRVGRPVKYRRNITGRFRKKEEFIREHKVSNMVLSWWPTSAAKDKTVRVQGAGLQGGRV

SEQ ID NO: 133355 - protein, 114 aa, Heterodera glycines
MTREYADSEILEFVSAGPKQYALKHRRKKDGVIWHKTKIRGMTLDRRNEFKYELFKEMVLDYKEGVKKVFHYPEKIGPTNDFRVLSKNVQKEYTPVQKKGIIDDHFNVLPFGYY

SEQ ID NO: 133356 - protein, 171 aa, Heterodera glycines
MSREAEPGWKIEKISVDLYCSALSDPVIIPARPFQQSNPDIVFNEFMHRQQSFGEKMQTIAEIKNFEIIEGGRVFIVRARIENVVHAEYRACVLCRKGACSCGVEKALTPYLKVSVADDTGILENVAIFWCMWEEKRNGGVERIVWGRVHYENRREGERIRREEGDLLLFD

SEQ ID NO: 133357 - protein, 151 aa, Heterodera glycines
MSDSIWEIFTILDKINLESEKAESTWRDFERCKTFDQATKLEEQSQNSLMEARRLHFESRRMYAQQNDMQISAQGDDVLPLTAADFAAMDEAHRQWETERRQREEQRQREQKSARNGSGLMNGWCAKESGKKKKKKKKKTPKMENGKGPAI

SEQ ID NO: 133358 - protein, 255 aa, Heterodera glycines
MVERMSDWPKLIKEVSAVPELLRMYINHANKLENYSLDKDLVAQLAKFEESQKKTKAHHHHHHPNSQQQQKNSKELLTAKSDKKEDENTNNEMRTDEGLERKQAVSSPSHDTSQQPEPIQRDENSPPKTQPEQILQHQNPASQNQQQTPPQVQQNPSTDDQKETDSIQQTPSQSQPNQQQTPPQVQPNQQQTPPQVQPNQQQTPPQVQPNQQQTPPQVQPNQQQTPPQVQPNPSTDNQKQSDSIHLQTEGLPKSE

SEQ ID NO: 133359 - protein, 116 aa, Heterodera glycines
MFSEGFERMFNSEGFREQRTQEVELKTVSPDVFREFLYIIYPSHKRPHVPNTRGLLELARMYFIPTVTAMCEQCLLQATETDMVVGERLKLADEYGLLRLKVQHVPTDLLFNTKLP

SEQ ID NO: 133360 - protein, 38 aa, Heterodera glycines
IFRHLLPTVRRTATAALAFDAAVHGLSNPIFIFFLSLL

SEQ ID NO: 133361 - protein, 169 aa, Heterodera glycines
MVRFMSTCVRCLRTPNMRFTSLLMGQVAKNCATLAELPRFAPEEWSVHQRTLDGGDRTNNYAEAFHRKLQQAFDCTHPSVFHFINTIRCEQKSIDADISRCVAGELPPLKKPKYRAADARILRLLQGYNTINNNPANQNDHNYHANVNVNPDNINHLLVGVSRNYEMRP

SEQ ID NO: 133362 - protein, 105 aa, Heterodera glycines
MDKGNLWVVPGFTLLVFAILWTTKLSKIALEESTCRGASIYDFAGTQLDEDAKRHCQTAKRYYVGPDEAFSLDHNWRKQREVKNPEVGTKCNNINIIIYLFLCKY

SEQ ID NO: 133363 - protein, 252 aa, Heterodera glycines
DIKLTIVIADAVRNVNGKSVWTLVGSDGYDFINITMWGSNYEKMAREFGQEFKQKTYVFNTWGVQKVIPNFNYGNVDYELIAKEGSTITLITAEQYQILSIKTTNYFTFLREKFALDNDGFFPTPIKKIRAGEQFVEIECELFELKPVRTVMAKGNEARVIDAMINEGNNKTQLTAWNILADFLEYILQDKKGYVLKLQGLLTKKGFPVQNISFVFINTSRIGFAEKQRPQKIPLKLAELTEGLCECNFKKF

SEQ ID NO: 133364 - protein, 16 aa, Heterodera glycines
EAIPEGFGLPINLGAS

SEQ ID NO: 133365 - protein, 82 aa, Heterodera glycines
MQQPRVLYHPQGMIVNGLFPSSISTIERRFQFSTSTLGRIMQFYDFGYVLFCIPVSYFGGRHSKSTGLGAGLLLMSVSAKNS

SEQ ID NO: 133366 - protein, 45 aa, Heterodera glycines
MGFLLYMFVAAVAFGGGAYCGMIYNAKGAKASAGGGSKKDKKQKA

SEQ ID NO: 133367 - protein, 145 aa, Heterodera glycines
IYSFPIMSEDVDVAAANPITGYSNLMYTFHFYAGTHTVSGLGAKLKTAYTKSGSGVIIFKTICTNCQVCPFFDGTIATSSMNEWWSFLDGYKISYCNWSVCNKGESCSALTTSASASNVGSSSYWTTSGKLIQAYYKEQSNGKFF

SEQ ID NO: 133368 - protein, 110 aa, Heterodera glycines
WAFHKKSSVWAFHKKLSVGVPQKAQCGRSTKKAQCGRSTKSSVWAFHKKLSVGVPQKAQCGRSTKSSVWAFHKKLSVGVPQKAQCGRSTKKLSVGVPQKKLSVGVPQKAQ

SEQ ID NO: 133369 - protein, 153 aa, Heterodera glycines
MQLKGIDLSFCTLRRYVSRLTIVSAHTNKNDASNSNASSHEMPKHELRFEKCFSKTLRKNVFIIGNESAWRKYVQTNENNEDIYISCSKCRYFREQEKNVNVKSIVASAVLRQGIQLVMLQSNHNANCKPEKLEKLETEQVDREQRRENYKFL

SEQ ID NO: 133370 - protein, 68 aa, Heterodera glycines
MAGWDPRLIWGGGGGRELAGNGTKNVRDSLMAQHSLLTSADGGRPTTSTAWQWAEETLRQRDGQQKGK

SEQ ID NO: 133371 - protein, 33 aa, Heterodera glycines
ALPAFGREILFLQTKLLVNITYIVILTGYSAKN

SEQ ID NO: 133372 - protein, 88 aa, Heterodera glycines
MTDSAGDSRSTERDKTMVNGCKVRDNEPWLRQAVSAEGPWGWGGLATKSVFPLLAPDDGLIRHVNDVQRDGEHKACFTGVDQIYTCRC

SEQ ID NO: 133373 - protein, 88 aa, Heterodera glycines
MPKQNEIVLKYSFLDLTWFLDIEAVFYAISKTKKCLVVKTIFHISLHNFVSSARIETGIRPLERAARALQERMERKNSYFWDFFRNQN

SEQ ID NO: 133374 - protein, 88 aa, Heterodera glycines; identical to SEQ ID NO: 133373

SEQ ID NO: 133375 - protein, 75 aa, Heterodera glycines
MPGGSKTNYKIHVQTIPWKICDSDNPKPPITYFHDFLNKNSSKKVAHHLEFDLERFYTQKRQCCCQWALAKMKKL

SEQ ID NO: 133376 - protein, 222 aa, Heterodera glycines
FPLLSTVTCETHSPFTPDTELDGLDTKLPRGWYRIGTTKLPRGWYRIGTLSIRHDRAWFNLYRLSIRHDRAWFNLYRRRATGLGRRATGLGYWDFYTQIPERNCIGSGPLYIPERNCIGSGPLYFSASQFGLHAGENIAGSVAVKDKRCFDRLVVQIERLVVQIERKSTTEKFDVLQCRKCVFNSCWLFDVLQCRKCVFNSCWLGSRTLHDQRTYLTNLRSY

SEQ ID NO: 133377 - protein, 219 aa, Heterodera glycines
LNPPAFQSLALNSPAFQSLGLNSPAFQSLGLNSPAFQSLGLNPPAFQSLGLNPPAFQSLGLNPPAFQSLGLNSPAFQSLGLNPTAFQSLGLNPPAFQSLGLNPTAFQSLGLNSPAFQSLGLNPPAFQSLGLNSPAFQSLGLNPTAFQSLGLNPPAFQSLALNSPAFQSLGLNSPAFQSLGLNSPAFQSLGLNPPAFQSLGLNPPAFQSLGLNSPAFQSL

SEQ ID NO: 133378 - protein, 60 aa, Heterodera glycines
MSSINTSSDNALYLAYRSVGPSVDLIVPAVALYLVALVGIVLNGTVLVVTAKSRQMPWHF

SEQ ID NO: 133379 - protein, 99 aa, Heterodera glycines
MLEQQYPDQSWNPGGPGMKTEFILFSFYGEKLTFLIENLSSLDSGLEEPGFFWTWIFGPGLTWNPVQVHAFFKIPISTNNSLSALWFIIQLFVIISFIP

SEQ ID NO: 133380 - protein, 211 aa, Heterodera glycines
MPIRFLSMLCPLLVLLTNVPSTLPWMLERDGVLLAYDPNNYNAETWADWGKKVGASAVAGGVAGSAVPGIGTVAGAILGFFGGAAVAAGEFAINKVYCQKFSSLKCKRGRKTTKDYNIGGNGCPYESLYCYFMFCYDVRFEKGHFAEWGCHPADERVDHSKNYPQGDWACEQSYRLHPDYDKQTLGYDMSNEQDTFEEAYEDLRKKYSKKT

SEQ ID NO: 133381 - protein, 53 aa, Heterodera glycines
MKDYNNITSDKYKQIWELVDDPIVIWHDGDEHFNSICLVKRSKCQMQPKNTYF

SEQ ID NO: 133382 - protein, 21 aa, Heterodera glycines
MKSWFLVLVLLLAFCLKFMLF

SEQ ID NO: 133383 - protein, 70 aa, Heterodera glycines
MPSSPMPFSLFVVLFLFVPFLPGCGEPSVAHYFECCGDNGAGRHTKLAHDKCFVALFGFFVPLNMNMAFI

SEQ ID NO: 133384 - protein, 86 aa, Heterodera glycines
LTNSVLVLKWAPQLEILAHPNVRAFVTHGGNKRCRISSTVIYSNYCINCRLISVREGICAGVPLIVMPVYAEQVKKGCHLHKRTQI

SEQ ID NO: 133385 - protein, 109 aa, Heterodera glycines
MPNIAKFGVPNFSFTEFYSRSQLFLHDSIDRLGLPVTTAADIFGVGAHCKTPKDSSALSAKIKQFLEDPSSKGTIYIAFGSHIDWKFAPRKFLDDFVTVFRKLPQYRFI

SEQ ID NO: 133386 - protein, 52 aa, Heterodera glycines
MSISILVSARALEIAYEKGTDSYLNGKHVFGKAVLMWENVKSVPSHLLTLKA

SEQ ID NO: 133387 - protein, 53 aa, Heterodera glycines
MSISSYEKFYVLQKRSSVRRRVAGHNQTFTGTYPGFGLGGGTDPKSQLLGVYF

SEQ ID NO: 133388 - protein, 23 aa, Heterodera glycines
TKLLITPNSVFGVNFCALIQNLH

SEQ ID NO: 133389 - protein, 173 aa, Heterodera glycines
EYICSDETEYNFVKNAWIEINQNDPALSQLLEALFATVISANKALEYDDANKISAQLNELKQSLAYAVFFMAKRGQIPLESPREEKEREPKEILIGLIDIYNECQLDADKVLKSCGECGKKGKEEKWQKGKEKYGKKERRFLEFVAHSLEMKWDANAFSAGGQQQQDDDDGNY

SEQ ID NO: 133390 - protein, 292 aa, Heterodera glycines
MANFSPTLRQNEFHANATRKFALHLSAPLNACLSVPSRSRARKVNGQLFDSDEQKWADGRRKAKDSGTLALTKAIRHNLERANPPPVGATPPLSALSVLAHSPVSASPPKEYSPQKEFCARRPLFPKSKFLRKAQKLRKEWNWVANGSGRETTPTRTKAKEEEEEEKEEGKRKNRKNKAMMEEEEEEEERKRKNRKNKAMMEEEEEKERKNDNTKGGSREEQKRIIHLLIVNGAAAEKVKEEERDDESERDEEEEEEEDEEEDEEEEEDEEEDDEEEEEEEQGEGTEESDGT

SEQ ID NO: 133391 - protein, 35 aa, Heterodera glycines
DAAELLYDVLFESGNAVPVLIACNKQDIGHAKSHS

SEQ ID NO: 133392 - protein, 115 aa, Heterodera glycines
MRKAKCETPKNANNAKGEMRKAKPRPIPGVGGGRRLFADKEIVSNEVGNRETICSPFPAIWLLTMTPRNKEQSGTHRQMLDSYFCEFLWRHSVKRRDVDAFEYHLQNIVAYMPPN

SEQ ID NO: 133393 - protein, 246 aa, Heterodera glycines
YNSVQGQYGGQGTNGGSSTAQHYSQQQPQQYYSYNSNTNNGYGGGTGGYQQQQSPQYAQGNYYYSNGNYPQSQYSGSYPQSSQYSSSSAQSSPYAYGQQTVVVPSSSQGAGGQYGTPQQQPIPIVQSGGQTQQQQQLTQFSGNGGQQQQLQGTQYGGTAGTSHGTQQYNGGQGQNGQGQGQQGYYSQSTAQRQQGQHIASAAGQNGQGQGGQQQYTTRQVSGDSVLSATNVNSPSFARRTSQRRLR

SEQ ID NO: 133394 - protein, 378 aa, Heterodera glycines
MGEEEYEKLKKWYYMNYNNGFILEEKLDEYCSNDTDILMKALIKLRKIFIDITIDNETPNGIDGCAFHGCKKCYKGFMIQANGLTAEQNYDRTQQKMERLRIAGKKMGYTVEEVWECDVRKKLNRKSEIYDENMAKFFNNLPEIGPIIPRNGFAGGRTGPLCLFAEASENMEISIYDIVSLYPWVNYSTPYPVGNPKIVIPKQYIVKWTSPDDIPYEGLLKVRVIPPKNQFLPVLPFHTDDLLLFTNCSSCAKKTKTDFVYSKNTKKCRHSAEQRALTGEFCTLELKKALELGAVIDRFYRSYHYENFDGNLFKNYVRKFLKLKVEASGWPQDVQNEEEKLEFVKTYREIYQIELEATKMNFNPGLRHIAKLAFNSVW

SEQ ID NO: 133395 - protein, 264 aa, Heterodera glycines
MGRRLEGKTALITGGARGIGRAFAEGFVKEGAKVALADIIVDVATKAAGEIGAGTIAVELDVTNQKSIDGCVHKVLAQFGHIDILVNCAAVFDMAPVGEISRESYDRVFAANVSGTLFMTQANHQLAWLISLIKQAVARHMIERGKGGKVINMASQAGRQGDALVTVYCASKAAVISLTQSTGLALIKHSINVNGIAPGYVDTEMWRQVDKLFAKYEKIEVGEKTRQTANLLPIGRMGVAEDLVGAAVFLASEESDYVVGQTLM

SEQ ID NO: 133396 - protein, 85 aa, Heterodera glycines
MNSNYEKDGQKKEENQMGKVPNERPKENGGKDEEKKKEEAEEEDEKQKGGENGKRQLKESGEEFRLLVDEEEKEKEEESTNCAHK

SEQ ID NO: 133397 - protein, 104 aa, Heterodera glycines
LLRALFKRNPANPLGGGAQGAAALRDHRFFASVNWQRLAQRQVTPPFRPAFGTLDLDVAHYFDTEFTKRTPKDSPAVPPSAAAHELFRGFSFVSPSILEEDEEE

SEQ ID NO: 133398 - protein, 28 aa, Heterodera glycines
MTWTIEYLGNDAAEGAPTKCPSHEMSKR

SEQ ID NO: 133399 - protein, 247 aa, Heterodera glycines
MAPPMETPTTSKTTPTGRPKMNVDHLQRTSRRKLADEIAAVIKRDRSRSASRASLERISREVRHKFAHYTPQKKKQQLSRQKKSVDPEDALLILGLVGTQKAYRRLKSTIRLINAKFDVFPPLEKVLDIKRRICGSLQYAPIETSAGVGFVCTDVEAALEARLSSAKDNLIRFGDEIYIKLSGDHGQSCTKITVSFSQAARSNSPSNNFVCAVFPTKDSRENLERYGSTLWEQIDGIGTLAGNRVKW

SEQ ID NO: 133400 - protein, 193 aa, Heterodera glycines
FCLRVASLIGQPQIENVLAFTSRVILFNQYLCFSSTFLGTERRLYATDANVLEFIHNGVHAWVGGDMPLTTSPQDPVFFLHHSFIDYIWEQWRLLHQNRQQRETQFPPDSQICAGSQNCAGSQNYLLSATMPFSRPRRAPGLSNSYTDSLYTYAPRPTCRAAGDCRSGRKHSFRLNFTFAAPLPSNIQKCNFL

SEQ ID NO: 133401 - protein, 37 aa, Heterodera glycines
MPQALHSLDELLTAALYLVNGCLSNANLKDGVRVYGI

SEQ ID NO: 133402 - protein, 53 aa, Heterodera glycines
MANYNAKGVDLSMVASGSGTKRQKEGEDELLIDLGGAADGIGTKGIADKMAQI

SEQ ID NO: 133403 - protein, 197 aa, Heterodera glycines
MAFLGGKMLVQKCASGSLREAKIKVDFDRSAHLSIRKITQRRLRRICIEYERDKTEQRAQAEERRLEEMISEERARREHEERERVMRRLLRAERRQRLREQRNFEQILRRKLKRKLDHRLESSWRERRRQAKALLRYIAELYRAQQQHAVESKQSIHELASEYARDRGLPEEEELRQRILQKREQKMRTRVGSNEYD

SEQ ID NO: 133404 - protein, 81 aa, Heterodera glycines
MKKVISLLNGPSFRAIGFADPLTVKADEAKLDFPTRVDWDQFFTSAAGKCPMDEREPGERPDTVYVGGLPFDWFQVGANGK

SEQ ID NO: 133405 - protein, 31 aa, Heterodera glycines
LRKRNMKARVFSILRLLIMSTFLRLCDISPL

SEQ ID NO: 133406 - protein, 248 aa, Heterodera glycines
MENEMAAASSSAANATNTNDQLKSNETKGNESQTKRNVMAPLALTGGTPSGGGGKCACISRLLQQICALIKHRPNALDDDLPSVSVVGPFEQRWSTLFREFVLDPANCSWEKCVAHSDDMLWYVPIVRMANGGACAVGSERVYPSPSRRRMDAKGECEEVTYPKIFFPIDSFDECDQQPPLPRCSPTWSCPRANASALSWSSGTVTETQRPSFSLAPFVSMCSKSSMIRGKLPLPALGIGPNALSARQ

SEQ ID NO: 133407 - protein, 184 aa, Heterodera glycines
MKISAFYLHGIELDGQKSYGQNGTEQNKVAEKNSQPTLKQYSRLVSDLLFNVPLFRMARLRRRCAVPTFLYFNDYFNKCQFEPWTPFRGATHGDATRHTSLFTMSPLCQAMSTPTSTVSSPWANSNSPRRTDNTVPLWSKCCPLSFAMDDKLKKTGIPNPNSPLMFKSLEKPTNKRAARTNQKL

SEQ ID NO: 133408 - protein, 356 aa, Heterodera glycines
MAVDVNSALTKAYDELRSIDMNISMLSGVSESDRNAKRGRYAADEGPPGDYSPPSSARTHRTLQSSVVMPTIETKSRTAVINEMKKNENKEDQVRNRRLFGNLLVATLRKFQNEEKTVGSKGQVQIDKQREVERRLEETEKENRNRMMREREALMAKKREKEMEIQSLRRQKAIEQSAEEKTKHFRRLQCFIQTQTKPPLFFLPSKHTLRTLELLKESSKKIETLIELRRDEMTRELRRLDTYTTASFGGTIGQAKNNVADESDDQDEEETNVRGGLKSAIVVKMEGMTGETVAEAEEEKRDEEEGEEETGQKDGEGEDEAEPKDGEEGEEETGPKEGEEQAEQQQNGRADSEGPD

SEQ ID NO: 133409 - protein, 208 aa, Heterodera glycines
AFGWSPPHFAHLPLITLDGKRKLSKRFEAGYADFYLKNGHLPIAVLNFLLRNGSGIRDHQPQTVYSLEELIERFDERLITRGSFTMDTNELNNYGKLGMNFVAPSTILCFPSLIFVITALCQWFLSSDTAHTFDNFKLLATDLAIPYQLLAKIFRLSMIDNVRGPPIKELIEFFGVAECYARLNAMGQMFEDGAKDEETAPKTTVTSL

SEQ ID NO: 133410 - protein, 286 aa, Heterodera glycines
LCSEIGRDVLLEGGNSVDSMIACSEIGRDVLLEGGNSVDSMIASLLCIGVSLLCIGVVNPQSSGLGGGFIMTLYNTSTQRCTTIDARETAPLGTNSTMYVGTQRCTTIDARETAPLGTNSTMYVGTPRDSVIGYRSIAVPGELHGFSIAVPGELHGFWTAFTKFGSGRVTWKRLFEPAIKLARFGFPVSSNLAMVLQQKDVSSNLAMVLQQKDIFVDKKTGRVFEEGDIMTRERLAELLDELAVAPNPIELFYKGLDELAVAPNPIELFYKGTKINERINFICQNS

SEQ ID NO: 133411 - protein, 59 aa, Heterodera glycines
IRRGTKVIRSGTTVIRRGSTVIRSGTTVIRRVIRRGSTVIRRGTKVIRRGATVIEEVQQ

SEQ ID NO: 133412 - protein, 225 aa, Heterodera glycines
SPYEEIDQDKAGVSPEELRAAFFRCGGVNAHSWRILVVAAEGDNETTKFIGKLLDFLTAEGTSAPPTNCPPAAAPPNSQLANPPLQHQAGTSQVSYDGALASQFPFSAAIHSQSGLTCRQEVVGGIAGPETPPEHIYDTISSSSSADDSHSQHKKLSIPPGHIYHTVMSTSSDGSKRSSVFYDVPPTPPPPVLQHTVLFRHRGEKNRKKNETPSPASKCSDAKKR

SEQ ID NO: 133413 - protein, 56 aa, Heterodera glycines
MSVRVPFLLLPLLFLCPLLLPVSVRAVQSVFSCPLSAASVAGVPGTLPAFAGALGE

SEQ ID NO: 133414 - protein, 125 aa, Heterodera glycines
MCKRMYEMEVRAHMDSVAVRASPAAVTLLTKVNAKLAEQQQGKVGPNKFIHFQILKIKQNQPNEENDRPALREYPNYWEEKRIDRSVYWWFRPMKSTSGTDAINMTELSDDLREAAELKRKFSEK

SEQ ID NO: 133415 - protein, 343 aa, Heterodera glycines
NSFQNPIKILSSTSKSDDLILTQFEEKIEFFNDRYQVQLPFRSDPKTIALPSNFGLCMGRLRSVFNTLSKNPTLLKKYNDIIQEQKTLGIIEPVPISSKFSPPLHYLAHHPVINEIKGKVRIVYDGSAHVGKEPSLNDCLYPGPILIPDLVGLLLRFRIPKFVITCDIEKAFLQVLVHPNHRDCTRFLWLKNIQLPPSSINLQMFRFTRVSFGLTCSPFLLAATIRFHLHINPSPLSDEIISNIYVDNILLSSETETEGVDKAVAAISLFEKAGMPLREFVSNSNEIISKIPENFVLHGPDQKFLGINWNPLSDRLVFKLANLPNSPLSKRSILSFVASNYDP

SEQ ID NO: 133416 - protein, 30 aa, Heterodera glycines
MEKQFHFDYFRYQIRSKLSIKIIFVLGVLE

SEQ ID NO: 133417 - protein, 30 aa, Heterodera glycines
MEKQFHFDYFRYQIRSKLSIKIKFVLGVLE

SEQ ID NO: 133418 - protein, 77 aa, Heterodera glycines
MISSDNGDGLMCKWNRIVAAKRKGIRKRNKRPTRSGIRMGPGYRQSLSEGSLPTWAEPSYTILTFPFISLITGWWAR

SEQ ID NO: 133419 - protein, 127 aa, Heterodera glycines
MCVFNVVQNRWPKIGEFVLVYQENAPRSIWLTATILNVFYNELNFPNSAKVKTINGHTTIRSVHHLYPLETQEELASKTPKISWAPYPPNYQPPVIERNFPSKVHIKQNRRWNWADKPPTNTALSQL

SEQ ID NO: 133420 - protein, 157 aa, Heterodera glycines
IRFMSLYFLINLIQNGKKIYFANFQVVIHLANGYKTADFTWFFDGLKKAGGSFDVVGISHYPTSSNWQTLNGQAETTLKTMISRYGKKVVVAEIGLSWNEPSASKSMLDDMFKRVKALGNNGIGIFYWEPQASPGWNHYQWGALDNSGKFTAAMESF

SEQ ID NO: 133421 - protein, 257 aa, Heterodera glycines
SIHQHFNHWGLNPLTFKSLGLNPPTFRSTGLNPPAFQSVGLNPPTFQSTGLNPPAFQSTGLNPPAFNHWDSILLHFNYWDSILLRFNHWDSTLKHFNRRDSIHQHSDQRDSIHQHFNHWDSTHQHSNQRDSIHQHSITGTQSTSISITGTQSTNIPINGTQSTSIQSLGLNSPAFQSLGLNPPTFQSTGLNPPAFQSLGLNPPTFQSLGLNPPAFQSVGLNPPTFQSTGLNPPAFQSLGLNPPTFQSLGLNPPSFNH

SEQ ID NO: 133422 - protein, 121 aa, Heterodera glycines
IQTLGLNPPTFQSLGLNPTAFQTLGLNPPAFQSLGLNPTAFQSLGLNPPTFQSLGLNPPTFQSLGLNPTAFQSLGLNPPTFQSLGLKPPTFQSLGLNPTAFQSLGLNPTAFQSLGLNSFLH

SEQ ID NO: 133423 - protein, 68 aa, Heterodera glycines
MNCALASSFSPFGKHFAAVVADKKGMRADLYVNGEELVERLGSCVKNTQIELQNFFVKVEATLRDFIR

SEQ ID NO: 133424 - protein, 93 aa, Heterodera glycines
MVKWGPAVPLGSPGKFFEKFYSICQGNCFAADISHSPRGGIARIYILAQWEWTLDMMRGNDGINTKEIRDKWMTYARGEWDKEVMITLEMRGI

SEQ ID NO: 133425 - protein, 376 aa, Heterodera glycines
MENYLIPGIPFLLDGQIAIKFFTLRYFTSNHHPAPFEMDFDDWGVRHMHSSEQGYFALRAVEFGDQQQFEYVLNLASARDVKNRGKRVRGYNYGHWQTVKREHMLRVVLEKFRQNEPLCEALLRTGFVRLVEASTDRYWAAGLLITDEAIRSSNNWMGLNELGWVLMHVRDQLRPLPQQVHLIHKHYIVCQAAAPDYVVALAAEPHVQPYAVRINNETVNAARQLQIGDTLVIESVEWREGFEQLGAEGMNDRPCWVHQARLNWQATASAVYSVCMHQWVPARAKILRCVRGGPRHNRAVCSIRIQLDGIEFVVTQRNVNGNIGLARQGQWIDVWAIVVAEHWHADWGFILPPDAVFRGRHQIVSDGRVRIPVFVG

SEQ ID NO: 133426 - protein, 272 aa, Heterodera glycines
SKNIAILPRRDSDLEAFSHNPSDGSFAPLVYRPSTTKCLNLRFLSYAGLLLATGLGKTNLSHDGLNPAHVPYWWVNNPTLGEFCFAMIGRADIEGSKSDVAMDAWPPQASYPCGNFSDTSCWKLYTLKDRATLSRSVFVLKIRIKAFAFLLYERFPSSLSSLGHLRYALTDVPPQSNSPPDTVIGAGRRARVARLNTKMDTRRTPVLPIKGIDESSGISLAPCGSHLCYTSHDSSQSQTRVKLNRVFFPAKFAKPVPLAVVSLDSRGQWESR

SEQ ID NO: 133427 - protein, 72 aa, Heterodera glycines
MAEQNSFNSQKGENVEGPIGSDFDPILFTPEENQNLNNVLTRMRTFESAICRQFRKLEREFAELKIVAHPIR

SEQ ID NO: 133428 - protein, 96 aa, Heterodera glycines
MEYFYEAIEQKLLAKVWAFHSSYNFALKGMETLALRDVICNVTPRFHFTRKWSFRHENGLEEVRAGPSLLQHFCQLDKIRGSRIVGRGKSVCEGAN

SEQ ID NO: 133429 - protein, 81 aa, Heterodera glycines
MFPPPMTLPRHGSVCEMFDGPIECHPSDTAAAKGGGKADQKQSNSGEQMADGGGKAVAKDGVSEQNEQFRFPKWKNEIALG

SEQ ID NO: 133430 - protein, 193 aa, Heterodera glycines
MEEEYVPGKVVGYIEDPREEKEGEWDMAKALQNRSKEDEVRIKKREQREEGWKELISGERKAKGRERPKLVEKFVKNVLGPAENDVSRNPGPPPEGSRRGPTPIPCWNRYKKRPRFVSPIRNISPVRTRQSTVGTQTTNAWPSCIGDVVEQMQLMKTKLDELIAALKKKEEEKNNGNNEQIGEKEEQQKENGK

SEQ ID NO: 133431 - protein, 695 aa, Heterodera glycines
MSADQIKQLLEAMRVQSDAIQQLMGQAPQNATSLNHANLASSIDGRISKFNYDAETGNTFEQWFKRFGVLIEEDGKDLPESTKVRLLLGKLGDEEYGKYRDSISPTQPDKVNWVDSITKLKGLYAETRSLFVRRYECFKIRQQPSQDISSLVAHINASCENANLSPTKEQLKCIILVIALNDEHHDLRQKCLKMLEDAEKTGTDITLQKVEEELKAIQIVKESALSLLTQPVSTSAIQLRPQQWRETSKGKHKAKPAPKWPHHEPAPKSPHHAPSPKQKSDDKANRGHPSHPCASCGSNDHWRSDCKFANAFCNKCNRQGHIAIVCRQRSSNTAHKSQNRSFHTVVVKSHCMVIGTTQGRWWKIPVMINGINLKMNGDSGAQATVISFKTWIKLGQPELSPTDIETRNCNDTAFSTEGKFHCTVSCFDRPSKTLIAYVSSDLKHDLFGLPWIEEFELISKEILYPQSTKGKTNASINANVVKAPNPAIGITDESSLTAVLQNDFEEVFKSGLGHCAIKAHLILKPDARPIFCKARPVPHGAIEAVDTELDRLLQIGAIKPVEFSHWAAPILAVKKKNGKTRVCIDFSTGLNDSIELNRHPLPRPDVIYAALNGAEFFSNLDLRDAYLQMELDEKSKPLCTINTHRGLFQCQRLPFGVKSAPSIFQHLMDQICAGIPGVFSYLDDCLIASKTLEDH

SEQ ID NO: 133432 - protein, 60 aa, Heterodera glycines
MGEPIKTGSGSREFSRDPAGLNTRTRPRDPTRFSKVFGTYEPKERLIPKVDENSCLMMLK

SEQ ID NO: 133433 - protein, 145 aa, Heterodera glycines
FMSKYLERQFGVLPSKATLFMGAVMVPMAGFGTMFSGLIIHHFRLSCVRTLQYCIALVLLVLCSLLLSPMYFIYCDHDQLVGIERHYPVDEVILEQLAKTDTFVYPFGRRCNAQCHCSPTEYHPVCAEHIRSQMAYYSPCYAGCP

SEQ ID NO: 133434 - protein, 109 aa, Heterodera glycines
MKNSFYEQKKKEFIEKIDEFKSLYGQGKQKEFVKELGIFKETFRRWKSELLPKYNKKQSKYSNEDKLQKMKQYFKIKERNPKINDRKIAKKLGIGKTTLKKWKKKFPQF

SEQ ID NO: 133435 - protein, 235 aa, Heterodera glycines
MNLWHIIFLIFCFIYKIESCKIRPNFDEIFGKEWDKNENEENREEMGTESIDKMSEYSNQNVIKSDQNSKMEPNDQQKSEIIQKFEAIKEKLKQKGKYQGKKSVKIEAKIGKLLGANRDKIYKWKKELNLNIKQIKIMKNSFYEQKKKEFIEKIDEFKSLYGQGKQKEFVKELGISKETFRRWKNELLPKYNKKQSKYSNEDKLQKMKQYFKIKERNPKINDRKIAKKLGIGKTT

SEQ ID NO: 133436 - protein, 158 aa, Heterodera glycines
NLGIGIPTLCPSYISDKSIKVCIHAENGMLGVGQYPIAGEQDPDYVNAGKESITYNPGASVFSSDESFAMIRGGHIDLTMLGGLQVSMRGDLANWMIPGKMLKGMGGAMDLVSAPGSRVVVLMEAVFDVCRKEGLTLIEIHENYSIEDIKKATGCNFK

SEQ ID NO: 133437 - protein, 100 aa, Heterodera glycines
MENNQIITKRNNKKLEHEGCLYVFHMFNADRDVYKEQVEGAPTPINLNVQFGTNARELIFDMDDSIAVVKEKIHRAWPVTPVPAQMLLYFARMVDFINCF

SEQ ID NO: 133438 - protein, 44 aa, Heterodera glycines
MGKGCNAHQPPSSSAFEFIALMFTAPKFYVTVSIEHMEDIEASF

SEQ ID NO: 133439 - protein, 109 aa, Heterodera glycines
MRKENNKSSAASADSDANANSGGDASLTAPTEEEGEEISANEQQKEQRKSLDALYAAAREEFDLDMSPLDSAMKTLREGREIQKLSVLRNLWSSWWRASRTRRYTACCP

SEQ ID NO: 133440 - protein, 196 aa, Heterodera glycines
MQIFNDRFFEFGDPEREEEEERVPIRREPRAHRQSESLSSWIERSYGPHWYETTRDRRAVDEDLCRVLREGATLIGEHFGRAVDIHFDGLTCYGPEGLYLSPGLTVFDHFVRLGLQVDPLIPCTQEYVGFSPHEGGMLVDLYPIELISIRHRVRAAWRAPEEDELHPPARYRAQSPDGHLENRPQRVVQRRPMNRW

SEQ ID NO: 133441 - protein, 37 aa, Heterodera glycines
MVIVRIMTVKAACPRPCLAVTTAAQQKQRHGVGMPPG

SEQ ID NO: 133442 - protein, 472 aa, Heterodera glycines
MRHAVAQLNGKMDRLAQQMARVEAAVVVGRKTNNGAGMVVVPTAEEAEERTEQQQQETKGIPTRTNGQFSKRMGVKEMPTMPTPSYTSSATWNGAAITTNGDGGAKSSPSPRGITVKEEIVVASNDGGIIGSNDHYYHQQQRHNISGDNGGGSGGAINTVAAGTFASSTGTGGTTMPTTSATTTAVGSRKRKPARTANNSNNSLPWTTTATSTTTHGGYRVEASPPALSTTTVTTTDELLLANLFGIVPTAVSSSSVHAAAPSTCSAASSASSSAASSVAAATAASTQQAAALYSILLQHQLNNNNAAATPTTETTTAMDIGGIGTIAADGGVTGVGAELNGSGATNCDGVSSNSTDATTSPNLLSAAAAESQHIITATAVAQQPLLLKNGSNANDGGGIVMIGCGGANATSPPDGGGGIFFGDDFQLFKHTNNNNNNNSIKLDASDHHNAMVMEASPPGSRENQQVGTKKE

SEQ ID NO: 133443 - protein, 163 aa, Heterodera glycines
MNGSEHTVGGVGYAGELHFVHRSVKWPNIGEALKQPDGVLAVAVFFNENLEDNATLAPLDDALARVTFRGAECPMHSLRLSQLMPVEKSKEFWLYDGSETAEPFRETVGKSGKVPMKMPTDDRSNGSCADRRCPFRRHNWKGCANCERVGRRTKLRKQCSPSV

SEQ ID NO: 133444 - protein, 146 aa, Heterodera glycines
MSSSSSAAPSDPQQKSIYEFSAKDIDGNETSFGKYRGKVLLVVNVASNCGFTDSNYSQLKQLLDKYKSKGLEIAAFPCNQFNNQESGCAIDIKDFVTKKYNFEPDLYDKIDVNGPNEHPIYAYLKSVQGGILGFDAIKWNFTKATQ

SEQ ID NO: 133445 - protein, 287 aa, Heterodera glycines
MPPLGQVEQLVQPMFINSAHQQMPAALSHRCSIGPPSAPTNASWLTPGDQCCAAQWRRSACRSLGLEATGQCSGVFEHREHLLVHQLHCAGPIPATGLLVPIGVDGKNAIVVPHTAAPQAPHVQTGGGRTVNDARAPPAADPIEEDENNNVTRPIEDCFVIERTTPMRNTLRNTRGELCEIRFLPLEDAERPDLLLETLIQHLLDRVLEGHPPPMLVGLQLHPPGFDRPYVIRLRPPEQNNAAALAAAIERLNEQSAAGIDLLAGTTVAKVLAVWPLEPIRADAQRG

SEQ ID NO: 133446 - protein, 158 aa, Heterodera glycines
SSTANASLIDFERIRMIGTGSFGQVLLVKHRRTGKYYAMKMLEKQKVLKLKQVEHTISEKRILQATEFPFLVKMHYSFKDTADTANLYMVLEFVSGGEMFSHLRRIGRFSECHSRFYATQIVLAFEYLHSLDVVYRDLKPENLLIDVNGYLKLIDFTF

SEQ ID NO: 133447 - protein, 61 aa, Heterodera glycines
MKEMVRDKRREKGEKTWNKIFHNAEFDSMIFCRLVILKMGKFENVNRWIRQWKITKQSNGN

SEQ ID NO: 133448 - protein, 51 aa, Heterodera glycines
MNGEARLSRTNDSRHQPTNWRWNFIGYFELKKLLKQVSEELEKLKKLNLPE

SEQ ID NO: 133449 - protein, 154 aa, Heterodera glycines
MAIFITSARMAENSRDSRPKRVASRLSNSTNNHFHCREAVQRLHNERNTVLDELRVLAGEGKLIEQAEKTKKELEEERRMHAEAIQQINKDKDELEPVLAEVRQKRRRTETELGQRYAKVPFLWDQLSKRARELEVPCALMTPEGLLPKTLLSE

SEQ ID NO: 133450 - protein, 276 aa, Heterodera glycines
MKKQLEGKTKECDSLKGSVNELQKQLMTMGTTTMPRELNELKNERKDLMKKNKEKDEMIAKLKKKMDEDSRKMANLLGQEKKKEEEHRKTVNALKDEYQRKIEEVTKKKDQSIEKQRTENDRLKAELSKNEKTIQEQKQQLVKDQQQKTDRVGREEALREQKRQLTEQHRTETEKLKTEMRKTEEEAITQQRNQMMEEQREKNDKLRTELFRKKEEALLRQKEQFEEESQQKMDELEAKLRNEYKLKLEQSEKQLRSEFEAEIGQLKRHCNQGGRD

SEQ ID NO: 133451 - protein, 177 aa, Heterodera glycines
MLSDLELAGCTNLTDAGFVQLSKSCHELERIDLEECLLITDSTLTNFNGCPNLYSLSLSHCENLTDTGLAELCVAHRERLQVLELDNCPNITDHTLESMKHLKVLERVDLYDCQLVTKDGIKKFKSSTFCKKPGPGPEFHVWIWPGFLEKIPGKFRPRKNPGLFAWIQPGLDMDFFL

SEQ ID NO: 133452 - protein, 64 aa, Heterodera glycines
MPLKPMVNANAMIEDIGIATTTIDRWDREILMETLDENHFDEMIYYHEPIPHWQFRKNAFLVFI

SEQ ID NO: 133453 - protein, 69 aa, Heterodera glycines
MALAMLCATIFLVQLILQQQHPNWAAAGDDRELKTMIETCEFITERLAPEGILENLAVITLGTAIEAQF

SEQ ID NO: 133454 - protein, 23 aa, Heterodera glycines
MRIMRKAKCEKRNLGTSLVYMVA

SEQ ID NO: 133455 - protein, 152 aa, Heterodera glycines
MQISLYLYRSPRGTCLGTAGPRLAAAAVFGAKQLFVVVVDGADVVGVVLLLMLLLVDFVAVEDGAVLAQVVDAVVRIVVVVVVVVADDGPNQIEMLVAMAKSVTFIIIVVVVDNIAMAECFVSPMARIPHVVDVVVAAGCSCGREKQRFDFL

SEQ ID NO: 133456 - protein, 80 aa, Heterodera glycines
MPQKLLIKENRKKNIWCVRIEKPKVARERHPWHVMDDVQIGEEHLPMNKGDDDAHLRMEKKLTRETIGEQPKFWTESSDY

SEQ ID NO: 133457 - protein, 58 aa, Heterodera glycines
MGKENEINGSEGNSGTNGSEGQNGMEEGKEKVKEEEEETTSEESCQKAAQSQQQSAKI

SEQ ID NO: 133458 - protein, 91 aa, Heterodera glycines
MFAKHLRNFPFGCSFAARPLRRYSAHGLQVHRDNERNNPNTPFQFTEANLAKITVLLNNFPEGHKGAALIPVLDLAQRKHGWLPISAMHEV

SEQ ID NO: 133459 - protein, 86 aa, Heterodera glycines
MTIPNFSDNDCNEWTQWMRTPGNWLHNIEIIQKELIVWRTMMNDQIGNENNNYPKKDPHWLQFLHLPLLLTFDYSGKMKIDHFLKL

SEQ ID NO: 133460 - protein, 113 aa, Heterodera glycines
MENDLERIIDHRINAYGNDEWHVCWSGYNQTTWEPCQNFIGQDAVQMLADFEHARKKTVLHLKLGTFFKYETVPGKFMVKRQTATSNEPQYLFAGQTAWTTNGVIKLIVFVWL

SEQ ID NO: 133461 - protein, 131 aa, Heterodera glycines
MVKGQNGIAIADDELGDSCKGHEDKCQNGGYLNPNDCTKCHCPDGNGGQYCAALEENLNCEDLSGIPRELVANQSAVLLKTKAKYPEAGKKVRIQFKSLSNLFECTHNCSSAYVEVKYRADKRAQGKKTNN

SEQ ID NO: 133462 - protein, 95 aa, Heterodera glycines
MGTLNYIIIFPLTPFDLRDLLNGKVLARHSLKELLGDQSWFAFVFVFHLFSQDKHLLASAFSLRKNEKETNSTSIFLELLFSDFNSFAFSSNSAD

SEQ ID NO: 133463 - protein, 95 aa, Heterodera glycines; identical to SEQ ID NO: 130684

SEQ ID NO: 133464 - protein, 103 aa, Heterodera glycines
VCGIYERGKKSVKFPPREEDRCSKKQLEDPEVQNKIQQYVDEALKRVQDDFQREEVTNVIKAVKEIIRAWILMYMFFTVLLWPNTHEKRVFNLVAFITWLEDF

SEQ ID NO: 133465 - protein, 158 aa, Heterodera glycines
MPHPFSGIYVSWFFNPHMGYQEDLDKITFIQVVLISSINAFAAGIYVYMQYFKISKALIVIGQLSWLFAHGIPSLIYLCLNKTIRKDCLKMTTGLISQITGKSIMQTNTTRMLNTINVLTIGGGRINMATASRHGGMSRVVPTNSTMNTTPTNNGERQ

SEQ ID NO: 133466 - protein, 71 aa, Heterodera glycines
MMSKTRRRPEIVRKTNCEFQLEIFVSVPSNPIVVIDIEAITFKKMLRFIYTNDLSSIDGDGIDILYAAEYI

SEQ ID NO: 133467 - protein, 73 aa, Heterodera glycines
FGPPFLGPGVVWAPVFGPRGRLGPNPKIEKCAFLKIKILKTKPEGSLATWHKLGLINIRSFFTILLIPNPIIF

SEQ ID NO: 133468 - protein, 300 aa, Heterodera glycines
ICLIFHKKCKLVGKISAKLVKRTHKKTKSNYVRLSWNNWNFPFQIVVGLIDCTHIPILMPSEPNMEEYYNRKGWASINVQGNCPKRRFLNINCKWPGSTHDSINVQGNCPKRRFLNINCKWPGSTHDSFILRHSSVWEDFENRRIRGVLLGDSGYPCRKWLLTPFANPSTNVQQHYNVLLGDSGYPCRKWLLTPFANPSTNVQQHYNNAHTKTRVLIEQTFGRWKKRFHALQTPIRIKFENIGMFIVAAAVLHNIAIMRGVPEFDEEDLVDEQPETEIMLEENAGDGFAARASVTQNYFS

SEQ ID NO: 133469 - protein, 43 aa, Heterodera glycines
SVLPTIKQKFEEVKEWVHEKTTTVSVEGPQEKEKYKVIELDEK

SEQ ID NO: 133470 - protein, 63 aa, Heterodera glycines
VLSIYSKWIIIIAIFRLFSYFSSNSITLYFSFSCGPSTETVVVFSWTHSFTSSNFCLIVGSTD

SEQ ID NO: 133471 - protein, 53 aa, Heterodera glycines
MAEIDWIDEYLGKKLFGSRHAAAATARDLTKCAALALLCSIHKQYKKQSNSNG

SEQ ID NO: 133472 - protein, 45 aa, Heterodera glycines
MFRPFVILAFCLFFLCAVDRSNAGGMFEDLLEGISDKFSEGLKSM

SEQ ID NO: 133473 - protein, 346 aa, Heterodera glycines
MVGMRPEEVQTKRSQKRKASVNTALSEAEIQTNAKKKKQQKIGTKIENEKQMKKNLALAKDEPIASVLSSQQSLITLVKSGDQCLVKKLDICQLCEIFEQEKALFEECLLNDATVDGERLFMQCQISLDDRQQIVLSWLILESAFCTLNCGGIQTNRAYLPEKGFVELHVDGLTEFYKSKFALEAKSLASFALPIGKFFLESLCRSLQMSHFKGREKDAIFALLLLNAQPNFASTSDPKVVSCREQLKRQIFKEVLLDETVSQNGGISSGQTVQNEQKKKMKTEKEAKKLTEKTQKQNGEGKRRRDGTGGEEEAEIGKGKKEKEKQMEEQKEKVGAISNCEKKDHH

SEQ ID NO: 133474 - protein, 70 aa, Heterodera glycines
MASSLTIEKRCKLFNTKQMECQFDGTEAGKCAFCVKLPCKFGAVNCAEEVSISCVNPQELEKCCKGNLHV

SEQ ID NO: 133475 - protein, 34 aa, Heterodera glycines
FLVDRNGNVVQRYSPNTEPRDIEADIEKLVAAAA

SEQ ID NO: 133476 - protein, 22 aa, Heterodera glycines
MSTSSSLFLVVVVLASLLISAN

SEQ ID NO: 133477 - protein, 185 aa, Heterodera glycines
SKNIAILPRRDSDLEAFSHNPSDGSFAPLVYRPSTTKCLNLRFLSYAGLLLATGLGKTNLSHDGLNPAHVPYWWVNNPTLGEFCFAMIGRADIEGSKSDVAMDAWPPQASYPCGNFSDTSCWKLYTLKDRATLSRSVFVLKIRIKAFAFLLYERFPSSLSSLGHLRYALTDEPPQSNSPPDTVIG

SEQ ID NO: 133478 - protein, 56 aa, Heterodera glycines
METNNMLYLVTEYAPNGEIYDLISKQKKLSEEMAKQKFWQLFRAWISAQLNMCTGI

SEQ ID NO: 133479 - protein, 118 aa, Heterodera glycines
NGESFVRKGTSRDWKNYMSKEQSDRMGRAFRQKLAGTVAENWWRTEMRWNEAEEEEEEEKKEEKENEQEQREAKKKEEDDSGMESGDDLLERSAKVSDDSLRLNGSPAPQGPTTTDSK

SEQ ID NO: 133480 - protein, 103 aa, Heterodera glycines
MHKNRKICTKKHENYGSLIIIINLLHISWINKFHKFHVKCFVTDSAVIITLYDDEVVEETQTTTASGAESIVGQPKAIEQMAGNPLANYHWWISTRLAMDKLK

SEQ ID NO: 133481 - protein, 49 aa, Heterodera glycines
MIGEQTLCELMEWTKLEMHTNGKKKKRHFGGLIPWGIGISDDGLPMPST

SEQ ID NO: 133482 - protein, 50 aa, Heterodera glycines
SLSDFITAFTRDIDKQLDIGRAEHLQKSRKRPQRYIIKEQNVVRILDEAD

SEQ ID NO: 133483 - protein, 113 aa, Heterodera glycines
MSQLCCLNCRKPTSTNMTKTVKLFVPLFRVSEQGRAAQILLQRPHQAGVRKFHAQGRGNGHRCERDRQSVHKDEAPAAMYVSADREFSKPQRGHEIPEKSGILGPYVRPVTGF

SEQ ID NO: 133484 - protein, 16 aa, Heterodera glycines
EAIPEGFGLPINLGAS

SEQ ID NO: 133485 - protein, 75 aa, Heterodera glycines
MSENEIYYRKCRNTEITTPKMSKTGIPTPKKYVFVRVRHQQQNWQTPKVNNRAVHQSLMPKEYMDQQQKLMKSVK

SEQ ID NO: 133486 - protein, 15 aa, Heterodera glycines
MGHSVTLWTQMEMAM

SEQ ID NO: 133487 - protein, 229 aa, Heterodera glycines
MPSKDNKGTNRGLLSTGGGTATQTQKGVGTSSNNPAGPTRSFFGINMLSNSLSINSNLELFGEESVYAFDDWAERFKDYLSVSGKNLTEGEKVTRLKLALKDTPRTLFKELEADQIVTLTSALDALRAKLDSPQRRELAKRTIALCRQREDETVGQFLRRMTPLVESSNPSLSGDQRKEKVCEEFLDRLKPNMSFLIRLVGLTQAKNLELVKAQAEELEALFLASKGDD

SEQ ID NO: 133488 - protein, 30 aa, Heterodera glycines
LIVQNDKIIDNPSVNRSISIFYVRNLFIYK

SEQ ID NO: 133489 - protein, 292 aa, Heterodera glycines
RGGGMGGGMGSGMGMGSGMGMSGMPGGGMGGMSGGSYGSSGYGGNSGYGGSSGYGGTSGGSYGGNSGYGGSSGGSYGGNSGYGGSSGGSYGGNSGYGGSSGGSYGGAGGYGGGSYGSGSYGSGVYGATNFGSGFGSNGGVYGTSGSYGGKSYGSGSYGSSGYGGRNYGSGGYGSSSYGGRSYGSGSYGSSGYGGRNYGSGGYGSSSYGGRSYGSGSYGSGGYGGRNYGSGGGSSSYGGRSYGSGSYGSSGYGGRSYGSGGYGGRNFGNVGFTAGRGTMAMVAVTVVADMANS

SEQ ID NO: 133490 - protein, 54 aa, Heterodera glycines
TQFIFLLALLPFLLVPICCEQCSWDDVNNICVGDCSSLCVLKDFDNCNCNRLPK

SEQ ID NO: 133491 - protein, 25 aa, Heterodera glycines
SKSSLTTAQKNMFFVRFRPRGSQEK

SEQ ID NO: 133492 - protein, 62 aa, Heterodera glycines
MTTFRRGRTDSKKGKATTKSSSNQCSKCGPMGEGVLTGPIDLAELISDIDMAYNITCLLVKT

SEQ ID NO: 133493 - protein, 22 aa, Heterodera glycines
MAISFFEKFSMQQTLSNMKRSA

SEQ ID NO: 133494 - protein, 29 aa, Heterodera glycines
MAISFFEKFSMQQTLSNMKRSAKNGYLFF

SEQ ID NO: 133495 - protein, 29 aa, Heterodera glycines
MAISFFEKFSMQQTLSNMKRSAKNGYLFF

SEQ ID NO: 133496 - protein, 29 aa, Heterodera glycines
MAISFFEKFSMQQTLSNMKRSAKNGYLFF

SEQ ID NO: 133497 - protein, 16 aa, Heterodera glycines
LTHGMQEHTVIVYTKV

SEQ ID NO: 133498 - protein, 92 aa, Heterodera glycines
APPAENALRHIAVIAHPPAEKRKAQDRSQFALLRHAFPPLRPPPLHSHIPHKNPQSVYQRDENSQHFYDYWSAAPPPNVCCVKNNSLHFCGQ

SEQ ID NO: 133499 - protein, 76 aa, Heterodera glycines
MADFVRPFGPYFGQIAFGFTHFGLSAEQLKGHRSRSNWKSQKTKKLTNFAREQNQKMRRKRKTDREHLGLSNDIKN

SEQ ID NO: 133500 - protein, 36 aa, Heterodera glycines
MAQKDGQNQPSVQRHDNDHQNVADQKLNSVQQHIKG

SEQ ID NO: 133501 - protein, 105 aa, Heterodera glycines
SASSATRGLPPASVNRCGPKTLNQAPNLNIAEHLNGFRGTTQIGSNSKAYRQMTLFVCRCQKWHFALRVEYGPCQFDESAGGHSLLMFALIILSFICDLENLIGY

SEQ ID NO: 133502 - protein, 591 aa, Heterodera glycines
MEDYAPGSMNKEKYAKFEKWYNENKETPFYLNDELMNYCRNDTEILLLSIIEFRRILINDITKGFDPLPRSCTNAGVAMNIFKAMFLLNEQLSIVPDKGYERCDRASVVAIKYLEWRSQRDGVEIRHAGNGREVKVGKYKLDGFIVNEGTMDKCIEVMGCYIHGCLNCYDPAAELIGGRTAQELNDETQERLAELWKTLDVEEVWGCQIEKELKKDEEMRDFFADRGNEKGPIDPRMAYAGGRTGPMKLFAKSDEKKKISVYDIAKALECGYTVDRFYRAWHYEEEANDLFKGYVRLFLKLKEEASGFPKGVETGEQKDMWREEYKEKYGIDIELAKVKKNPGLRYISKLMLNSLWGKFSMRNCLNKNAVIDRASEFYKIACDHKIELCDIVEYSDEAIRLIYRDKEDFVMEHKSSNIVISLWTTSMARLKLLEFMREAEGNGGEILYTDTDSIFVRHDRDVEPITTGKYLGEMSEEYGGYEIEEYCCGGAKQYALKMRNKQTGDIEYVMKIRGITFDVDNRKTLHYDTFREMVLNYGKGEVDPAFFVYKNDFGPTRDSKVVTREKHKMYRPVCQKGIIDEELNVMPFGFC

SEQ ID NO: 133503 - protein, 530 aa, Heterodera glycines
MAAKRNGTSQQSGPSTKKWDFRSIGNNFIEEMETFKLMDYRSTICEKFGFTKNIAEFTINPDVGRPDEAIKDAVDNMIKVAFKTTEEKMNRKVRMFGVVITGAGLAFPVWVPYRAFPQNNADVILEEINKLGQSGDGDENKKMLLLSEQITMKITCVTMPGGEGPRNVHKFDFGFKEHQRIRISNGDKFCLFYALASSMNYLVMDKYSFIRFMKNVVRQKETAYELLRNCEINGNEMNYGVEHLSSVQNYWDEIYPSKYRVVAFEKSADPRKSIRVLWKGPMGRENVVPIFLENGHWDGLKNYVCFFNRGRKFCIDCECFYSRDVYHTLECRARCYYCNRVGGMPCEKESGVKIECPKCRRYFYNWECYNYHHGHQTCNLWRRCVMCDKTYLFNPKKGHECGETYCQLCSVCHDPKRGCYIMPIEEKEEKDVYRIVVWDSETSQDTMYKGDQKEHIIKYISVRVTCTECCDDKNRTNCKICGDERTKDWSEAEGHEPTKDFVEWILMAFTNYDTYIFAHSAGRFDGHFCI

SEQ ID NO: 133504 - protein, 691 aa, Heterodera glycines
DPGVLGPCIFPTNRLFQELWKEGHSWDDALSEEDSIRWNSIQSQWKEEEIRIPRRAMLNDTQSIELHAFVDASVHTFATAIYVRCAMNEKIQALIFSKNRLKPKSASTLTIPRMELLAILVGTRALKFAQRQLRRPIASLHLWSDSQIALSWVKTHETQPQFVERRLKEIRECGCTFHFVRTADNPADLATRGATPSELRNHHLWWKGPTWLTQESHLWPNLCFQVTESDQQISENVGPSGAFLAYTHSKQPNEQVLIDPSRFSSWKRLMRTTMFVDSSPCLKGARKRLLHLRSTERKFARFPSHFKTVIGDDGILRLKTRLEMSEKPYSFSHPILLAKHSALAKLIILDRHQKRHHLGVDTTLTEFLSEFWMPSARLNVKRALRDCLFCRRMNAQQFALPTMPPLPGERVRRHAPFQSIGIDYLGPTTISLAGEKIKAWILIITCLATRAVYLEATLDLTSESFINVLRRFISRRGKPDIIWSDNATTFKLAQKTLELLSAPGPDQEVQNFLTHNRIQWRFIAQISPAGGFYERLVKLVKDCFKRTLGRRILSFDQLNTFVAEVEATLNYRPITAVSDAVDGPIPLRPINLLQPEIQINWETTTDPIDSEEQFSSTHERLASRIQALREANDVFWAKWHSEYLTLLRERAQWDHKGPRLQNFGEPKEGMVVLISQDLLLPGRVLKWHNIS

SEQ ID NO: 133505 - protein, 27 aa, Heterodera glycines
SHFRLIKRAPFSLYAHFHISIHSFLLL

SEQ ID NO: 133506 - protein, 450 aa, Heterodera glycines
MAENNGRQAPLQRGERAMDYGRPNSPDGSFENRPRRAVPNRPMRRWQNGLFIVAVALCLGNLAEGKEFPSPRTCHQPLEAADMARENQWGFSPMPFPWPFSHDQKANLIKGPRPLNGSQPYIKAGIFHVPTSFHTPTMPKPIKMPSSSPSAYSSSSSLASSPDRQSPPPPRKKAVELFNIAAATPERDAKSGRNFSVRDFIDAEAKEESSSKRMPTCSACQLSGHRRGAKACPLYVPPQKERTAAASRPGTSNTRRDSPEEGEITADKAGRDRPPVRAPSKGWRAEPSISPPRKTGDTNKQRGRSRTLRHFPMDTILKAMGPIAPIKKIPAQDNTGTVANTQPPKAAADIVAILGELSALRASVAYLTAEQARLAQFIRHRLGTPPNMSGGNAMPCGPGRRRHHQRQPSSEDDEHPTQKRAKHHHHRRSPSPDTQHKPKKERRHHREEFR

SEQ ID NO: 133507 - protein, 111 aa, Heterodera glycines
MAKDWGQIEEDEKIGDEYDQSADEDGQFLYTFNGIACVRDPDRVSFLNTDFGIPLRFSVFKKLYLSESRIFNLGGTRTENKHCSTSLNPEFSIPAGPGQKISTGKNGDYSN

SEQ ID NO: 133508 - protein, 477 aa, Heterodera glycines
NKAKSREYHAKHQLFLEDFKHLFYNKEHGIWYDFNLESGTSNEAYYGSAAMPLFTRCYDVSDLGTAERMFARMERLDTATNRKLISHPFADAATPGRGGEYNVQVFGVADHESGILLGQFRILDPTSKHVFMTFGNIKNFSKKEEGQSTVLPNVQFNFGWTIGTVLDLLVTYSDELALSTDTTTVYCLEQKIEEEPNEFPNNFSEYRAERLTAAQKEVDMMNTSWAVVNERFALMKDEDFLNFFGTPVDETVEEDKNENNNIHLRSELKAADGEEDKNDLPTEFDAREAWKDCAEIIQSGYAQGDCGSCWAVTAARTLTDRICIARLKKGKKTNSSDPRAYVSAQFTMECTPDTKGCGGGNPFYAWKYYRNLTVSGTNHTMNTGCKPYKMPSKSNCVFSCNKEWLQQQYPNKAKTPKTPGGIPLFGTTWEVFLAEATRMPVITGLTQHRNTQNFVRHSESVNFLYTKLTFISFIVRC

SEQ ID NO: 133509 - protein, 32 aa, Heterodera glycines
MVAWKTLLNVFEKCEETLGESLYEVGPMDGTS

SEQ ID NO: 133510 - protein, 263 aa, Heterodera glycines
MEHNKAKRTIAKLCNNSLWGRFSLRNGLSKTKITDSPAMLRSLLDDPKIEVSSVDLLNEETVLITYSAVTEFIEEHGCSNIVLSLWTTSAARLHLLSLMQRVVRAQNSLLIYTDTDSVVLAYKETDGCPLTTGPHLGDLSDEYPGHELLEFVSGGCKQYALRMRSKRTGEEDTVLKVRKITLCADACRLLHFSAFKQTVLRYDTAEEEEDAFEEIIIDYPNQLGPNIREGAVQSVSILKRYRPVVTKGIVSENFTVRDFGFKL

SEQ ID NO: 133511 - protein, 23 aa, Heterodera glycines
MLVRLQYDVKKIFGNTFKIMLMN

SEQ ID NO: 133512 - protein, 371 aa, Heterodera glycines
VPFPSHFATVSPHFSLFFGSLIAFVTFVGVLANAFVVVAVAGDKKMRRSPMNLLLLNLAVADLLYLLAFTPFWASMSVHGDGGWHFPESFCPIGRYLSNCLLIVSIFTYVAICVERFVAIVHPMHAQVWCTRSRALLAVLGLWTFVMAYQLPYLALFQTQPAPWNGFELLIKYVYQSHPCSRLAGKSSLWRAYKWSRLAGKSSLWRAYKWSEFVLTYALPVLLSASLYARICRVLWAKSAILQNNGRIGISFNYFKSIANDKARRNVVKMLMVCVTLFFLCYTPMVVYFLWGALFGRPLPLPFEFVFLTSTFVQFQSAFNPFLYTLFATKFREKLAKLVKRKQKQRKDNLRDKNEQKAEGREEKGEKMEQN

SEQ ID NO: 133513 - protein, 267 aa, Heterodera glycines
MCRQIGLGETGEHFWIPPQFLVKSRDELIDFVYPDFQKLLGNDKELLNRLILAPHIDTCDEINEIMMANVPGQVREYLSSDKPLDERPLDIDEIESEVAALNRRTDSGMPPHRLRLKVGSVVVLLINKSDKEGLINGTRIVLEELGDDRLVGRVINSNAVGGQVKFFIERTRNVYEDKTPGGIKYERLQFPIKPAFAMTILKGQGQTISTVGIDLERDVFSHGQLYTAFSRATDGNNVRVYAPRRETDGQGQTKVLNIVAKNMLKLQ

SEQ ID NO: 133514 - protein, 60 aa, Heterodera glycines
MAIALARDAGTDQMRANRGRQPMVALCALLAGRAGHSHSSTDDAVGRRRPDSSWEMILQI

SEQ ID NO: 133515 - protein, 67 aa, Heterodera glycines
MAISFFSFFYRKIGTNSIGFLAIIGIGDLIGIGFCLARHIPDPNWSCECSATPRILYTKEWNGGLYA

SEQ ID NO: 133516 - protein, 152 aa, Heterodera glycines
LIFLPQNWYQQLPSFVWPYQTILRYLKRKQKKFLTKKWLSLFSHFFTANLVPTVAFSCLALSNNLTIFETQTKKILDQKWLSLFSHFFTAKFVPTVAFSCLALSNNLTIFETQTKKILDQKMAISFFSFFYRKLGTNSCLLLSGPIKQSYDI

SEQ ID NO: 133517 - protein, 255 aa, Heterodera glycines
MGVPSTVNKLASGALLLIASIIHLGKSGLCKQPITEDDLDRLSTTVRLIVDQWPKAVDVFLRECRASLESMLKAKGDVDRHERDTKAPKKKIPDKTIMFTQLSTRVSENVTDTNLFDLSLSQALGTAPKTTKYTFASSKLGKVIQLAGFSDPVYAEAYVNVNQYDIVLDVLVVNQTSDTLQNLSLELSTATVKVSSTENGVIFSTIAYDVRGSTSDRNCVYLEDIHIDIMDYIVPGTCTDTEFRKMWAEFEWEKQ

SEQ ID NO: 133518 - protein, 245 aa, Heterodera glycines
MGQMGEGSDWMELYGPVEPDRHLRWVVRRSMSKIWNYFKKEIGIAFCKNCDYKTNFPPKTPTTTLATHLKHKHSELYKEFTEKTGAAKEQQQTFGIKRAFSSSAGALTSTSLDLTVDEEIEEITLAKKLDEQPKIDRIWTRSPWEMGGERASSVHKRKTSHTPARGFFITNLLSILSNKIQDNKKLATNGSEENFPVFEVKKANLSVGGRSIRGFFGKTPKYAHKICTKCQNMHKYAKYAYRNPF

SEQ ID NO: 133519 - protein, 27 aa, Heterodera glycines
QKLINQWTTKNFGPLIDGREKCALNAL

SEQ ID NO: 133520 - protein, 45 aa, Heterodera glycines
MAKLMEHFKKGTKCQKYQKNVMKKIAEHGISHQNLYFHEFLFKFI

SEQ ID NO: 133521 - protein, 108 aa, Heterodera glycines
MAQPVEKKKKYSSVDRHLISSAIGERQQQFFRKIWICNDVWMDILPSFDRPQLGLKLALLSDRFDVLVDKHFDAKSELTIWRAIEIRKDKGPSGDDNGPKAKLLALYG

SEQ ID NO: 133522 - protein, 55 aa, Heterodera glycines
MLGNIRRVMREELERVGGARGIGADYVHKSVHLAIMKALLHKNMGLERKLREMDS

SEQ ID NO: 133523 - protein, 96 aa, Heterodera glycines
MFSNKRKCSFNPDWEKQYNFVKRSRKGNGFFYCSFCQKDFNVESMGVSAIKSHTENRVHKQTDEERRKNTTIESFSRSKLALNSIDRQVATAEGHF

SEQ ID NO: 133524 - protein, 146 aa, Heterodera glycines
MIKEEPEEEEEGEFGYPEQENLPDEAAENGLVPQHGPAALAPFVAQNWDAMPPQPQQQMAMAFAQPFLPPMGMPPPMGMPPPMGFPPPVPFVPLFANPPLPMPYPPPPIPQPIPIPPARPLYGAFNAPQMRPPPLINMPFAPIKNG

SEQ ID NO: 133525 - protein, 68 aa, Heterodera glycines; identical to SEQ ID NO: 132170

SEQ ID NO: 133526 - protein, 183 aa, Heterodera glycines
MADLNNGTFYLAYKNAKPSWALISCAFIFGIIAAFGIIFNVSVIFVTIRTKQFRGTVNYLLALCSFFELLHQQGHFLFVYTTFSGQNFIPYRLATKIELISMLGICGIYPTMLFTGIDRLIGVIFDEKHRKTKIRLYLATITIVWVAFCFDLCKSLYQSIELIGDQMVTGCLIDIIKVSKFFY

SEQ ID NO: 133527 - protein, 26 aa, Heterodera glycines
MEHQTFMKWSGQENEKHHTGSRITAQ

SEQ ID NO: 133528 - protein, 117 aa, Heterodera glycines
MVKKYEKYSIPWGTEPKRKIMKVRSHPIWQIGLFKRIKEDSVDCLECLFFYNKIAKCPALRPLLVVMEEKGKVNAPQVQLRSSRSTNLNGIRFEALPSRRAAVRPPFWALSIQLIGF

SEQ ID NO: 133529 - protein, 186 aa, Heterodera glycines
INQLVTTQGMVTRISPLIPQMVEGYFQCSFCNYPVVRKVDMGVVEEPINCINCNNQGCFQLIHNRSTFMDKQVIKLQEIPGDMPAGQTQHTVTLFVHGALVESVHPGDRITVTGIYRASPVRLNPVQRAVHAIFRTSMDVIHFRKMCQDRLHDVGDGTFLTEERVAKIKALAQCEDVIERLMQAIE

SEQ ID NO: 133530 - protein, 45 aa, Heterodera glycines
MSITQNKVHIRDQRPKLRITFFILIVEMHNKNHKILPIFLHFLII

SEQ ID NO: 133531 - protein, 233 aa, Heterodera glycines
MSISDVAKRPSPVRMEGSLIEPGCFTGRTMAVFTSGGDSCGMNSAVRSVVRTGLYFGCRVFFIKEGYQGMVDGGENIVEAHWNSVSDIIQSGGTIIGSARCKEFREHDGRLKIVGLVGSIDNDFCGTDMTIGTDSALQRIVEAVDAVVSTAQSHQRAFVIEVMGRHCGYLALVAALACEADYCFIPEWPQPKKWEEVLCAKLTNSRELNQRLNIIIVAEGAIDEEGKVITSEM

SEQ ID NO: 133532 - protein, 48 aa, Heterodera glycines
MTFYASLVGYTGRNNKILSVKSAFGILMSKSGTVNDILCFSCWIHGKK

SEQ ID NO: 133533 - protein, 40 aa, Heterodera glycines
MTFYASLVGYTGRNNKILSVQSAFGILKSKSGTVNDILCF

SEQ ID NO: 133534 - protein, 80 aa, Heterodera glycines
MLRFGQFSDENKFHAIKEEIKKKDKYSAKVSWKKEFNLMKRKKNRMNYYEKKKREFVERIDELRICPKKENIKNLPKNWA

SEQ ID NO: 133535 - protein, 49 aa, Heterodera glycines
MPFLIFVFVLSFIIIQLKKLYHQKWDKEKIEFENEIDQNANYRKSDKMN

SEQ ID NO: 133536 - protein, 204 aa, Heterodera glycines
MNGWEEKGTNWAKKWQIERDSESIQETIFMEENDTDRYEDDYDNDDDGNDDELDYEYEDIAVTDKTAFFGHFDSIKSDNETFEETEEEQQNESVEEREEQFEGQRWKLRERKEKEEAGKDGEKQEKEEGKCEKGWLNYRNELCFYGRRTEKDFYAGVEECAQMKVNGGWKAAAGMPICVILLFRQISLPSTVWTSSPSSLSTGT

SEQ ID NO: 133537 - protein, 30 aa, Heterodera glycines
LQNFFKIKNHDNFLSGVLKVANHESDMYFD

SEQ ID NO: 133538 - protein, 173 aa, Heterodera glycines
RWKRELDKRMAQRKAAEKRAAETLAEQEKRKKEEKRADAEKTFEHWKRTEAQRVRRQRERAQSAVQQREADERRRKEANRTKADSALTKCAPKREGANGARARGTDGTRAEGGDGKAEERSGARGAEERRYTQSLAYRILDFERKASQRWCSAPWLPTSPSTTTKICRPPPGK

SEQ ID NO: 133539 - protein, 252 aa, Heterodera glycines
MQTVSEEKPKTVTFAMQTDQTDLVNSEMQTETAEKPKITNKLITTEAQTEPEEKPKTFAFGLQTDQTGLIDSEMQTLSEEKPKMTNDEVLELNVSKLPMDADSSFLSNQGRSSPLLDESLRRKYNEKCEEMAELRYAYEFQQSIISNQLDEIARLKQQQQLRNGVQKNGSPSSTRHPTITAASPSSVFPSGALPTISGRPRAARRTYCEHCEMFDAHDSSECPKEEAKRAERRDHEALSPQKWDERERTFWH

SEQ ID NO: 133540 - protein, 42 aa, Heterodera glycines
  unsure (1)..(42): unsure at all Xaa locations
ISKMNGSLTNGNKVDRGVTILLGAQWGDEGKGKVLDXLIGHH

SEQ ID NO: 133541 - protein, 162 aa, Heterodera glycines
VEPGKKAYNRLRAEFGDSFFDDENGGVLRRDKLAELVFTNVEKRKRLNAITHGEVIKEMIKRILWEAVHLRKFIFLDIPLLYETKMDRFVQKTIVVACNDDTQLWRVALRDELATDEAEKRIRAQMPMEEKARKASFVIDNNGSLEETEQQLDAVVELLESS

SEQ ID NO: 133542 - protein, 139 aa, Heterodera glycines
MEVDEEDDDKTFDWDVLCAEDQDDHEFCAVLRVSELVPALGNAELGTMAVKTPLHALLAVFLLKAGTVKSMTAARSLVKAIIEGEPKEEIRLFVAKKGDFVATGQYPTEKDQKKALECFFEKCLVARRALEKANLRRLA

SEQ ID NO: 133543 - protein, 103 aa, Heterodera glycines
MGVRTIEGKNRAQASKLMAHPRIIIGDQSAHQLAEILDQTAVIGPKNGTLAETVRTLKPVVLSSKVKAALIIAGRDSLLRVETVEMMMEQYEMIANLCAVLHM

SEQ ID NO: 133544 - protein, 121 aa, Heterodera glycines
MVKSQLITTSPSQQKRRPCRSIERRRGCLHCCTGGGDLGGLFLRTCGVDGHPDQSSPNHGDADHDNRSNQWCGADGPPDQSSPNSKCSAVGGHPDQPKQRRELPTELSEFSIFDHPGSLTE

SEQ ID NO: 133545 - protein, 111 aa, Heterodera glycines
MKLHLLLVLIIFLIIEIDQIKTEKKKLQQKSFDEIFGEKREEKEEERRNELKKREIIAKFYKIKEKIKQKGRKYSTKEWEKIELKIAKKLGTNRTTIYKWIKELGLKKKLF

SEQ ID NO: 133546 - protein, 316 aa, Heterodera glycines
MGTYRKNIYEWIKELGLQKQIKKSYKSKTDEEKLEIVQKFIEMANELKEKRKYSTKEWKQNYAEICKKIGVSQRIIEKWKKQFAIRKFKKKMKLHLLLVLIIFLIIEIDQIKTEKKKLQQKSFEEIFGEKWEEKEEEKRNELKKREIIAKFYKIKEKIKQKGRKYPRKEWNKIERKIAKKMGTYRKNIYEWIKELGLQKQIKKSYKSKTDEEKLEIVQKFIEMANELKEKRKYSTKEWKQNYAEICKKIGVSQRIIEKWKKQFAIRSIKLTEKEKMEKMKIYWEIKRENPKMSDKEIAKMMKIDRKNISKWKKLFG

SEQ ID NO: 133547 - protein, 47 aa, Heterodera glycines; identical to SEQ ID NO: 127360

SEQ ID NO: 133548 - protein, 215 aa, Heterodera glycines
MCYTVSTQNSFSITDFSTIKADTEHPAAAAVVDNFETLTLRFFDLINDGNIQQLRVLIDSLDADELNILLWWTVDPVERDNTRSRSALWTAFLRQHIQIVDLLVVNEQFYPSALIFVCHFQLEKGADPDEPVADQVNNINTRYFPLIDAAVGGSLEVCRLLVEEWAADVNQQTIQERYTPVICAASKGHLAIVNFLVEHGADLQHVDVDGHNALM

SEQ ID NO: 133549 - protein, 18 aa, Heterodera glycines
MDKDSEVSGIGKGQMDKD

SEQ ID NO: 133550 - protein, 248 aa, Heterodera glycines
MQTIFLLSSCFDGHRPQMCNLIKRCDECNRTFQVDRKNPHKCYSNYCARCKVYHEKEGACFIKPIVVPDEKPKYRMVCWDTETRLEQLQQAGQQRHKVNYLSARITCTECCDSENGMRLNCKICLTTYGAMERTKDWSESEGHEPISAFVEWILKAWDNKYQTFIWAHNASRFDGHFVLKYLGETKRRPEVIMNGLKIFEFRLQHSRRHSKLTWRDSCLLMPIRLEEMPKTFNLNCADKPFFPYAFNR

SEQ ID NO: 133551 - protein, 95 aa, Heterodera glycines; identical to SEQ ID NO: 124528

SEQ ID NO: 133552 - protein, 191 aa, Heterodera glycines
MEPKFASILSELHSLNKSVEELKRTVATVHTPPQRRGLISVPGMVGSTGSSGSSTTKQTMLNGCQNYAKAPVSTGGSATPTKIAFRPYPMNNGSLRYQQHNNAKAPAENTVNLEIGRQTAQQQQQHQLLTSKLFASSYSELPANLLLAENGQYDEDDEEMEEENGENGERAEGEDGQSPVEEDEEAEELNL

SEQ ID NO: 133553 - protein, 268 aa, Heterodera glycines
KHLNKSIISDIRSTRRSKRRDKRNGVSRAAKLWPNARIPYVISTHYSPHERALLAKAVKQYHDRTCVRFLPRSASDNDYLFIGKVDYLFIGKVDGCFSEVGRTSGVQVLSLDNGCMDYSTIIHECMDYSTIIHEIMHVVGFYHIMHVVGFYHEHERWDRDFYIDIIWQNIDKSALDQFGKIDLTKTSYYGQPYDYKSILHYDSLAFSKNGFPTMLPKKGADSLAFSKNGFPTMLPKKGAATIGNATIGNAKDFSEMDFVAELLRSEPK

SEQ ID NO: 133554 - protein, 106 aa, Heterodera glycines
MHFPPTIHNAQIRHGPLKPPNMSRSPTQPDTSLGKVYLECVASFSEPTKAKWLFGESELSKTDGRFEFSQEQQDTNRDKFICEIKVSGRDEVSDGLATDFRIWTNR

SEQ ID NO: 133555 - protein, 55 aa, Heterodera glycines
ANVWQFQQQKVKWMCLIMSKLALPFALFSLSFRHFAFVIRQFDSECLSLFKFRRI

SEQ ID NO: 133556 - protein, 69 aa, Heterodera glycines
MALAVSWHFAKSFLVTADKKCSAIDTIGIHRMSSRMSNKHRWSSRMITNVVGEMENVIQKVHGDQYGNK

SEQ ID NO: 133557 - protein, 28 aa, Heterodera glycines
KIELPKLYNKSAGHFSLRSNADAVLAWY

SEQ ID NO: 133558 - protein, 27 aa, Heterodera glycines
RPYFANFLPLFRSLNWNFSPLKIHTLL

SEQ ID NO: 133559 - protein, 90 aa, Heterodera glycines
MILLLNKSKFESKKKAKLIGLYVIVSLSDESSVIHMENFVPGMVPAILMNDTKYPIRYRQTGHGQWQIVKANQMAPFAWTDSLNGAVSVL

SEQ ID NO: 133560 - protein, 20 aa, Heterodera glycines
KCHGTRKLLLGRVKCDGTRK

SEQ ID NO: 133561 - protein, 149 aa, Heterodera glycines
MHGIFEAAEGGGHDEEGGDDEEGGGDGAGGGDGAGEGGGDGAGDGGGDGAVANDQCPSVGTVAGQMPCLFGVHTKSTGRTRRIHRKNVAPFNPAALVPIRSSLRPIPPSAGASPALAFRRQPSVASSAWSKPTKRVSAPGHFRLNCLTP

SEQ ID NO: 133562 - protein, 119 aa, Heterodera glycines
MEQQQKQPKEMPSPSGASAAAPPLPKLSVHSGNGKLRGGGVRAVREQSVSSVPLDATRATIYLFPAEGAAATILAVGASLGPGDGPLHGHHFVRVGHQRTVPRQVRATMVQLIGTIEQE

SEQ ID NO: 133563 - protein, 139 aa, Heterodera glycines
MANFSPPSDNTAPKKFLSDLDQLQIPKEIDSDNSIPDYAKLLIKQLHSLLSTASVLIHSQAAAVDAVEEERRLRTVVVTNMPESKSDKAAERAREDRAVVDEILNATDVDQAPIVFRVGKRMDGRPRPLKMEFPTKHAA

SEQ ID NO: 133564 - protein, 63 aa, Heterodera glycines
LTSKNNSLPKSFLQPLIANLISCRLKPSIACRFSAQQSTNTVFDSLQKIIHYPKVFYNHLLPI

SEQ ID NO: 133565 - protein, 225 aa, Heterodera glycines
MSAKIIRVPKIACDLSLAKNGVSKNRNYAQKAPQTILALPIPSTIAFIHPIMSAKIIRVPKIACDLSLAKNGVSKNRNYAQKAPQTILALPIPSTIAFIHPIMNAKIIRVPKIACDLSLAKNGVSKNRNYAQKASQTILAHPIHSTIAFIHPIMSAKIIRVPKIACDLSLAKNGVSKNRNYAQKAPQTILALPIPSTIAFIHPIMSAKIIRVPKIACDLSLEKNG

SEQ ID NO: 133566 - protein, 246 aa, Heterodera glycines
LNYAPSSAAALVAAATAATPETNCNNSGTQKLHQQMALSAPLCAAQQNHVTTALEVTPTATELLSTNGTTTPSTNGVGHGSSNGNGTTALAPKELCGTDFLRFAEPHLHHQQQQQFDSNGAVALQCFDGSSLSQSYQDLSADLFQALIQLSEASSAQNARNSLDGLNIYNGCCTLHIEYSKLNTLNVKWNNDKSRDYTNPNLPAGDLTYEQKLQLSESSTGCRFLKFNYLMYFLWFPLTNSPMVGI

SEQ ID NO: 133567 - protein, 267 aa, Heterodera glycines
MPVLRTPPLTRTRALNQGIIVDRDGNAFRAENFGVSGGRPISPLANNENQRLDDNHENVLAETDIRRRLLYGGMEQSAPEEQLEYDEMENGDEQNVNGMVQQNLENGVEAGDRGSFGNDALDAHGLRAFSTPLNEQNLSALQRDLRMQLPENLSVIENQIRVMNFMQNQMPNQVGQNFPALNHPQAVNPIACPRPNGQLYENAPVNFERQREQQIRLTQQPVVEGQQPHVGGFLRHMPMHRDTTVTRTKDLSFTKDSNAQISTKTCL

SEQ ID NO: 133568 - protein, 108 aa, Heterodera glycines
MMKKTLPINDEMISERIEAERERLQQDKLRKRYAYEAICALTDTVNESELQRHLSVLDPTSWCEVVEERFLGRLCGFPLCAKTITVDFRKKHTIVRRLNESTRKEHKM

SEQ ID NO: 133569 - protein, 236 aa, Heterodera glycines
MVESSWQLSLITLLLIPILAVFIKVYSVYYDNIAERSQMSKANANRIAEETISSMRSVRAFAAERRERQRFEAELDATLRVDRVSLVPQEPILYSCSIRDNILYGFDNPSAEDEDGGDAAVNAAKMANIQEYVAHETEKGFATKCGEKGIQLSGGQKQRIAIARALVRQPKVLLLDEATSALDARNEQLIRESLSACAKGRTVLMIAHRLSTVRRADRILVMEHGQIVQVRNRKRL

SEQ ID NO: 133570 - protein, 119 aa, Heterodera glycines
MFVFSWSVLLSAVPCSPVWAAPGRGRFWHWSAQSVSDSICRLLSVFVVENLNKVCHLQLQARITKSRMELQAGPIEALFEKNFGICIILSLTIFFPSIRKSYNDWKQSRPYAEVFASAL

SEQ ID NO: 133571 - protein, 113 aa, Heterodera glycines
MSTGIIIIICHNDEDQPKNIAVYCDYPLLIYSSGIFGGVAMFTKPILFSGVYLSWFFNPYVGYTDDFGQITFLQVIIISLIHSITAVIYALMQYVRIGEIYIIVGTYAWLFTN

SEQ ID NO: 133572 - protein, 106 aa, Heterodera glycines
MYEMKVRKQKKRNPNVIFRDSFNLMPCSLAALVPSYGLDVEDKPFFPHLANRPENYGIEIHPTPDEYLANGMMPGKRRQFDEWYAEHRHEPFRLDEALARLHLAWL

SEQ ID NO: 133573 - protein, 74 aa, Heterodera glycines
MYFFENADYYENRRLSCVWSEGWEANECCGKNYQLVIMDKKYVKNVKILKDLRNIKPEESWIPHSVLRTPYSVR

SEQ ID NO: 133574 - protein, 70 aa, Heterodera glycines
KCAFSKEIFIGGTDARFLREKGIPAIGFSPMNNTPILLHDHNEFLNEGVFLRGVKIYTKMIPRLANLPSF

SEQ ID NO: 133575 - protein, 95 aa, Heterodera glycines
LFEYPKRTLEKIDFFVFGAVPPNRCAQIYGETESFGNSFPIACTLILRWIFAPHNCLSTPNGHLKKSIFLFSGQSPRTDAPRFMGRPNPSGVASL

SEQ ID NO: 133576 - protein, 204 aa, Heterodera glycines
MTSSSSRNGIKKIAIRKFQRRNDPSVSNFDTNWSVLEDSVKKIQERESVTVTCVELYNMVEHLCQMNYAGEIYARLQLLIGKFAEAESASLLDNSLNVSNEAFLAALNRLWEAFCQQLVRFWTEKLLIVLFYPSQTLTRSVFLYLDRTYRVQSTSSVSIWLVSAFANFLHPKGSGMQDWMHFGGIFWRGVAFVPGQQITNCLHL

SEQ ID NO: 133577 - protein, 102 aa, Heterodera glycines
MLDCFARSVGRALSNASSSNEFFNVSPDDCLRFCSTERACNTVVYHKHFSTCQLYSGAEEGDTAREVSAKGHDLYVKKECEENRREQERDEAENTAPKGGKL

SEQ ID NO: 133578 - protein, 340 aa, Heterodera glycines
MSRYNNLLQFASVSAGNKPCPAGGPMAVILNGEFHRRISSMQAGTTQIPGFGQLYILDPVEAMEQRRKNPTFTGEKITNDEEFVQGHQLNEATLEILEQVIQENHPAASAYKQAREQLQELLKQQRTEELRFFRMTLLDERSAPGGMKDPKLHPHQIITPSTGEGMFAIHADPTGAPAPKGIWVENKQGQLNEIAPFSPWTDSLTYPLIKPKGDDGYKIGIPYAKPAQRKRKSDNSDDMFDTEAMSDDDMCETKSIALSDTGSETSTQSVTSRYDKSKRFVSLRDYCKYHLAIRDENLEWQYHHILSCGGGLGQRWVLDQASKIDWQIATFLRRPDMDLR

SEQ ID NO: 133579 - protein, 29 aa, Heterodera glycines
  unsure (1)..(29): unsure at all Xaa locations
FLINFIHIQMLSSMIGGRCAIDXLFLREF

SEQ ID NO: 133580 - protein, 79 aa, Heterodera glycines
MRYEWGPSIFYPNFGISWKYFFLETTLNLRKVFVQCVIIHLISIISIPFYQYVFFNTSYLFVTCLFYLAIVIRLAWIKG

SEQ ID NO: 133581 - protein, 90 aa, Heterodera glycines
MPPLMRRRHKILWTRKVRESLCYALLSKSMAYVLCYLLFLLAVCMDMRVQFAQMIRKMFVPFRRRGTQTMTVQTVQANFNSRMRHNANAN

SEQ ID NO: 133582 - protein, 187 aa, Heterodera glycines
MYRMQHQIDAKRNRSTLQHDGHLYKFAKTSTDGTIKFWRCEFKDSGVDKCKGRIWTSLRDEFIRMATTHTCERNTSHVVAQKVTTAIKRRSVEKAPSVIRAVSTQSISSPALSEVPSKKATNLMINRTRHLVDAPPAVPLNLEQLQIPQSYQFYEKTMYKNVFYSAKLTFDADQKSLLQQLDQITPL

SEQ ID NO: 133583 - protein, 111 aa, Heterodera glycines
MAGQTKGGAGISPAALEDERRRRHAAEQQLRMEQLRADETEQQLRDMEERAHGEKRALLVENAELQRRLDELTPKLAEQEAKMMALEEQRDEANVRLKATLKQMNALQAIN

SEQ ID NO: 133584 - protein, 28 aa, Heterodera glycines
MYSKKSILKGVFFVFIAFLLTNFGKTPK

SEQ ID NO: 133585 - protein, 123 aa, Heterodera glycines
FDAHFLAGSFRWRSAVLQRVQRQQQHAHLLPLFGPTAIGPRRQAETEDQLRRPSGAENHRPMATAKPIFPKFPDFDAEFGIRQDSESAQQQQLQAVHHLRRKRANLIFEHFFPQTKVPTLGDS

SEQ ID NO: 133586 - protein, 48 aa, Heterodera glycines; identical to SEQ ID NO: 127256

SEQ ID NO: 133587 - protein, 299 aa, Heterodera glycines
MMVEVSTKTTDQRINSEQLHVGQFTAAKGQTNNRIEGDTSLLRKSTLKEKAKGEKKQSNDQNNEREVIADKKMGAIKQPSDRISDWTRSNRNEEASSGKKMPNGRILWTKILPVQTSARNKSLPNSADKENILPTTDGRSLRNLSGDRPSSSKQLPTDEQKKSDGQKKDGPGGQQRTSDMRTKAGNSELSQRILQLLKNLRIAKEAVANYGTERRRRRKRSAEKIADQKQGRRITENGQEMISDQKSDQSLADQGQAPLPGQQKAAITGQDFRERPGEEKPPDEKKAEEKGIEEEAKFV

SEQ ID NO: 133588 - protein, 20 aa, Heterodera glycines
YICYIGFEFRFKKQNLPAEG

SEQ ID NO: 133589 - protein, 174 aa, Heterodera glycines
MIVPLLITFVQILITVVPLLITVVPLLITVVPLLITCTSSNHWCTSSNHCCTSSNHCCTSSNHCCTSSNHFVPLLITVVPLLITFVTLLSLLYLFIKFVPLLITVVTLLITVAPLLITFVRFLITFVRFLITFVPLLSLLYLFIKFVPLLITVVTLLITVAPLLITVVPLLITF

SEQ ID NO: 133590 - protein, 1233 aa, Heterodera glycines
MDPLNKNFQHDRCQLIKNVISMVVGVDIDVINIADKNVSQQPDFNSCGYYICLFAESWIFNDHSLILEPIHIISEKKRILWHVNALCSSDNVEFRSRYNQVNNEILMSDLSRGSSLSKPLNYSDCSDSDSSKCSGNRRGRPKKRSGGPGRLKKPDSINLSMNVGNMNSNTENINQAQENQSIISNELLTLLNSGSIDIPGSQPIAPGRVCIQSINKDLIKEAWSIPNEMFSDDLVYCFQRYLSSKIVDKIVTVVNPQYTDLQNFHVGPHAFPYNVMDNCFNYSENYDILLMTIFFNGHFALIIFDRCDRDNLICLFIDSLPHYDRLFDPQYPGYDVRRIEIIKNGICELTPGLSHDDVVIRTLSPSEFTPQHDGINCGVFVLLYSEAYLNHCSLKFPNLNINLERRRILWHLAHLINNDDVEYIGRNLTNGPQNPQRLPLYNVESNIEQTCPRDGDGAFICVEPDIDRTPDVILRPPSTSNLSTATRRSLRLQKSVSNEVSSDDNIDTIPKMPHNDITRRCHTKHQGIPCADVRARHTTDYYDSGNLGDKICAYCNALLLNSEAEKKNGKFSSSHCCNHGSVVLPPYEEYPPTLKRYLSGQDPEAKEFLSNENVYNSLLAFASVSVGYRESSLDGNVCYLLNGEFTRQIGSTLPGKFSPSFSQLYILDPVTAFMQRTQNIAYGGDRVNETTIKKLDFIIRKYNPLAQELVNFHKQYQNTLKEKGPEAVLNFRLTLVEARDAPASVRDVSIHSRQANLPDEGNSLFAVWAESEQPPFLKGIWITNDEGKLKKFPPHHPLTDSLCYPLMFPHGDDGFHLKIPYNPLNKPEKNEAMEIDVESDENTGDSDADASDDDNESVASSVDSVDKRGPRQFLSIRSYIRYRMALRKHKNIHNIWSSGGGLSQKFTLDYAARIDTNVANYLRRPELNLRSTLPENALRWLSRNAGLSSTEDLGSIVMFRRSEPGTRAYFQHKFYDATTIMSRFKKPGNASFFLTFTTNPRWREISRNFLHKGQKTVDRPDLICRIYEDKLSHLHYLIDQKNILGKMIGQECREFQKKYGGPHAHRVYHTSLLAIPENVDNIIWAHIPEEPAKNDKSDWANFIRKVRELLPKFQFHDCGPHCLNNKGKCKKGFPKPFSKFTILHDDRPAIYFRPSPEDGGQTLSVKRGKAQVIYNNSRISSYNPYILVHFETHHNLEYAYGQSTNLKYLYKYPFKGPSFSYVKTNESNGKDKY

SEQ ID NO: 133591 - protein, 589 aa, Heterodera glycines
MPSKQWNEKNKRKKRSVERPLSSLWTSDHSEASSPVSDFVLSTPQNSNSRKRGRPPKNIHTPLANSFEKVHLNTPQSSWKKQNICPDSPVPKKDKSFGCPLNESLEEIDFANLTSLEFIQRIDESAKIARWANLNVPDVNSGQNVIEKAFYNLDSWLNHELTFAYLCLIAIKSTRRTVVVDSVLTDPDIHVKRNKRTLKRACFNFDPNIPTEIIVFPLFFQNHWALAIYDQEIGTYFIDSLKQDPSRMDPLNKNFQHDRCQLIKNVISMVVGVDIDVINIADKNVSQQPDFNSCGYYICLFAESWIFNDHSLILEPIHIISEKKRILWHVNALCSSDNVEFRSRYNQVNNEILMSDLSRGSSLSKPLNYSDCSDSVSDSSKCSGNRRGRPKKRSGGPGRLKKPDSINLSMNVGNMNSNTENINQAQENQSIISNELLTLLNSGSIDIPGSQPIAPGRVCIQSVNKDLIKETWSCPTDMFSDDLVYCFQRYLASKIVDKIVTVVNPQYTDLQNFHVGPHAFPYNVMDNCFNYSENYDILLMTIFFNGHFALIIFDRCDRDNLICLFIDSLPHYDRLFDPQYPGYDVRRIE

SEQ ID NO: 133592 - protein, 64 aa, Heterodera glycines
MIRMSRDDSDAVEQLRKETRKLEDQVGQYKAKVRELKSKMKVQEEEFNRRYNEKALFGLLALCR

SEQ ID NO: 133593 - protein, 280 aa, Heterodera glycines
MSFSTIGSSTSSAAIAPMIDEKGELLNRHEVQLISKTLNWSVENDQKFEFNLLIKIGLTCLIYYSALKELDFGNEIVVRLLNDKRSLFKSLLARCAKQAHDIEVFDPKSLARFCPRAVRVGDGVTRFFENLAIELEKGHAIADLEQKVAELCRANGQLHYRMKVWFQAENWLCVKRSVVDTVIVAHTKQFDTFCGGGDLYNENSHYFIIMMYIKMAKSNVSECQKVVVINSNTNCPPTSQNHSLIIPIFSFTITEMQINNWQLLWELNPIDHTIRGKLYH

SEQ ID NO: 133594 - protein, 24 aa, Heterodera glycines
TAKLVPTVAFSCLALSNNLTIFET

SEQ ID NO: 133595 - protein, 154 aa, Heterodera glycines
FSHFFTAKLVPTVAFSCLALSNNLTIFETQTKKILDQKWLSLFSHFFTANLVPTVAFSCLLSNNLTIFETQTKKKFLTKKWLSLFSHFFTAKLVPTVAFSCLALSNNLTIFETQTKKILDQKWLSLFSHFLPQNWYQQLPFSCLGLSNNLTILK

SEQ ID NO: 133596 - protein, 134 aa, Heterodera glycines
MNGQRLGDVWILDLESMNWSNPLPQGFGPLPRSLHTANLIENRMFIFGGWVPNDSDDNSERPNKGWKCTNTLAVLNLSTLRWEHSLGPPTPVTATTYSTDFWPTARAGHCSAVINKRIYIWSGRDGYKKLQNSQ

SEQ ID NO: 133597 - protein, 114 aa, Heterodera glycines
MSMELNNLSALYSAKCLENSKLDEEMQKMLREREQKSTNTNNLDAINKRLQRELRQKEQSIDDLRQQIAWLEKKLKMSGIEVSEQELCDFFKRLVAITHYNSSNTFHAFAFIII

SEQ ID NO: 133598 - protein, 77 aa, Heterodera glycines
MQDNGVIVPIEHRYLLKSAPPRALALLSKGRFRPVFFSRLEGAWKTYAEEQEERVISDLEAFDLFYICRKEAEHNQK

SEQ ID NO: 133599 - protein, 56 aa, Heterodera glycines
MGDAKPKAAQSNGIFYYVTDEFYEGTVKLILEYGASVWEHLDLLDEAEHTPRENVH

SEQ ID NO: 133600 - protein, 121 aa, Heterodera glycines
MPFINLWTNLPELKLDNEFRRTFLATVANSMQKPVESTALIVQSGPNCCQIGSDPAEPAMILQIKSIGCVSADENVIHCKNISEFVQSRLGIPPDRVMIHFQSLEKHEVGKGGTTVEKMCQ

SEQ ID NO: 133601 - protein, 17 aa, Heterodera glycines
PVNSCIGCKCRRCCTPN

SEQ ID NO: 133602 - protein, 48 aa, Heterodera glycines
MTFYASLVGYTGRNNKILSVISAFGILMSKSVTVNEILCFSCWIHGKK

SEQ ID NO: 133603 - protein, 32 aa, Heterodera glycines; identical to SEQ ID NO: 127531

SEQ ID NO: 133604 - protein, 106 aa, Heterodera glycines
SSIDQLDEKHILITYLHKKDWVHEHACSNIVISLWTTSAARLVLLKAMQKVVRTDRCELLYTDTDSLILVHPEERCPLKTGPHLGQFTDEYPDHDIVEYCSGGSKQ

SEQ ID NO: 133605 - protein, 175 aa, Heterodera glycines
MPSVAANSLQMLQQQAAAAQQYSAATGTPSFISSVSGGKCGAEYQTVSVSASGTQPQASGNNASGDPATASGAGYPSGASVGIVGGSGANGTSGVTPYAQLLAMGGGGTGAMVDPATAATATLMAQQQAAAAAAIMAQQQQHQQQQQNQQINSIIVLIGNFKQFHDLLGLFQNLI

SEQ ID NO: 133606 - protein, 129 aa, Heterodera glycines
MPSIFDNFAKANGGRGPLMMGEASSNWVSTPLIDENGLPVANDTASNSTSGTFWEEMEQELRSQPTGRAEPMAFEMAPSDGMSGGAQQMTMSKEEKCQRLKTIQEELLFTLASRFNGYANLDDIKRDFK

SEQ ID NO: 133607 - protein, 83 aa, Heterodera glycines
LYIISFGFAVKQQIKLDGLIQNEKGIYSYESDGKIWTNGKEKGTIAKYSYGVGDTVGIGVHLSTRQLFFTKNGFRLGWQIKNN

SEQ ID NO: 133608 - protein, 127 aa, Heterodera glycines
MAIEDTENDALFDQLWGNLKTNQQKSGGFEQIKIKEEQERDGDQQQKRVKNNEQIGNNQSENENYEGKFGKIFIKIEGEKSEEMKKEICENPIKNEQQNEEELQQSDEQTIGNSNHLINKVIYEKVN

SEQ ID NO: 133609 - protein, 243 aa, Heterodera glycines
SAMSVFEKSIRKVFVDTYKGIDDGFLVEARRQKPTLKDGTTAKPTLKDGTTATTIFLLDKTLYCANIGDSKIVCRHKSEKSTNIPLQITVDHNPLVFDERMRIQKSGGTVKDGRVFGDGRVFGILEVSRSIGDGQMKAHGVICTPDIKKLSLTPDDLFIILACDGLFIILACDGLWKAFSPDAAIDFVIGQYKMLAKTAEFNEEKDSVGLWTKIADEMSAAAVRKGCGDNVTVLVVIVANIAK

SEQ ID NO: 133610 - protein, 48 aa, Heterodera glycines
MSQQPNAPPPYDDAQKYPAYPNPNVPTDQGKELDQSSQWQFMLMPDSV

SEQ ID NO: 133611 - protein, 140 aa, Heterodera glycines
MKINPKTGVNFEVFYYGKRQDSDYKAYAFKANQPYEIHIAVFETEYQVKLNGQSFENFPNKMPIWTINFMRVQGNVSLLAEPEINVPKVSQKGQFSFALSSLFNYDEQITFFFTVNNAANSFQINFMHESSEIHPMSQFV

SEQ ID NO: 133612 - protein, 84 aa, Heterodera glycines
MQMLSTISKTSGPTAMNTCINGWHGQAKKPIFAMASLTVYISFTEIPLDKFGDCLCSVRPLSRSSRLSEVRRSAECCKGQPDKL

SEQ ID NO: 133613 - protein, 382 aa, Heterodera glycines
LLVLLVYSHLQQRFHSISVYLMALAVSDFLMICTAMFLFVLEAWRHHGPMGLAYAYGIGALAYAYGIGAPFFFPLASIFQTTSVYFCVGAAIDVFVSVALKGPISESYCTVRIAQKFVVVTTCIAQKFVVVTTCLAVLYNIPHFFELRSIDCLDGLNINSLQICPTEFRMSHMSHVYYSIYYTYMYTVFMAVGPLVFMAVGPLVLLIVLNICIVVNVLRRPRDTFRSDSDIVSLITFRSDSDIVSLILVVCMFIFCNFTALLVNFLELTFAEQLVIVYLVDLSNLLVVINVIVYLVDLSNLLVVINCSANFFVYLIFGHSFQLYPSREMANGGARANLLVMVESEEKSNGRSREMANGGARANLLVMVESEEKSNGRSNNNA

SEQ ID NO: 133614 - protein, 75 aa, Heterodera glycines
GCSPPAEIFHIRAGNRHFEARAIASAWLALMLVYLLFSGWIYSVIYRAYATQKEEEEQGIKADEIHGHQNYAGGV

SEQ ID NO: 133615 - protein, 1635 aa, Heterodera glycines
MICIEIRVENFAPSQPASPRNFLQPPHTSTPSVNIENRQRFGPFPIIVGQAERMRQIAMQQPVANTVFRPIPLRPPQINQIAANAQRSINMEFFSSGGHRIDPPNAPIQAGSRFIRKIPAEAELWQGAEENINFVYPQNQQPRQPNAFPFQGNEQIFQKPIMNPCEKQFVMHTQPNSTVLSNLEFNLILERIPDLNGNEGIEIVRRFFKKFDAYTDEWPNSKRILALESKVFNKAERALEAAKATQPYRYELIRREMLQQLEETDSKNLNAFDELMMGVRRKLNEPIDDLAGRISALVKRAYPGLTNNLSDEYSIKFLIRAMDPVSIFLHITNAPIGFGLLIGTNALQDLGFKLYDERNKAMVEFEKTESGKRDFLTVIYRTTIEPNSVKNLELSIDSQFEGAEIVATPDENSVAAIRVEPTVGLAQKGKIIVPVTNFSMSAITLFENSKVGKVELAKSVEEAENFLNSQIICSKKNDPIAAFRLDAMKFLEILQTRTGDLPEEHMEKLQKFGKKFPEIFALSDEDLKQTNLVEHEIETEGKAPIKTKTRPVPYAYREKIAEMIQNYLGRGLIRPSMSPWASPIVIVPKRDGTLRFCVDYRGLNSITRKDCFPLPNIDNTLLMLGGRKFFSTLDFMSGYWQIKMEENSIEKTAFTTEYGLYEFMVMPFGLTNAVATFQRFMSRLFDGMINQFLFVYIDDILIASESFEEHLIHIELVFSRIKTAGLKLKLEKCHFCATELPFLGHILTREGIKMDADKLKPVIELPTPTTKKELHSLLGFLTYYRKFIHSFGTIAAPLFKLLSEKVEFKMGEKEKEALEELKSKIIRDVVLYFPDFKAAENDPSRQFIIMTDASKIGIAAVLCQPDPEKRIRPIYFASRQCNHHESRYSATELEALAVKFGVKKFAQFIIMIPTRVITDHKALIWMFQSKNETGNSRVDRWLLELSSRFILKVEFQPGKKNVIADILSRSKAADQILEPKDNQEIALIGKVRTNEVPDSIQDFTDHKEKWEEETKSSEMQPIYEFLAKKVVPNDPQIRQSVMDKSHRYTIFEKLLYLCEDDGRMRLFVPKSFRENLVKERHEGKCSGHMSGKKLYKQLSELYFWPNMLSDCIRFHLACRICAHTRNARSNEPPLKVVHSSEPLELVCMDILDIGPSQSNFKYICVIIDHFTKYLVAEPIPNKSADSVAKIFVEKFLVIFGTPKKIHSDRGKEFVNATLKGISKILGTEMSFTAGYDPQGNGLVERVNGIIIGMLKRSTASNWTWDERLPFTVFAYNITPTESTGFSPFLLMFGRPAIIASDKITQINFNPIYTIDHENYFQLFLENLLNIQDKAKQNLEEYRKKSKEWYDAKPRVKANKFEISERVMVAFPGMHRNSRHKKLLWTHFGPYFIVKITDSSAEVVPVDKKTANPITVPLERLIKVPKSIPNISTLPRGKNPYKNILNAMILSVSVQMECQRREESLAENKQFGTIAIKGDEEGKEEKNGGKDSGINKSFSIKGTEFPLKISGQMNSDAGISWNSICNPKEEGHEFCSVLKLGELDPVLGQTGIGATIVQTPLQALLAIFLLRSGTVSSNTAARIFVELIIKNGPKNEMAAFSEKRGDYVETGKFPQEEDQSKALEKWLESCCAAREA

SEQ ID NO: 133616 - protein, 224 aa, Heterodera glycines
MEKAEVSQCFSKFDNKFLFIIGHGDEYRKFKQTNERNGAIYIYCLKCESYRKQNSDGFIIASAIIREGQLDRTHKIIHNQHCNGVPLEQLTAEQIDRSQRRDLAQCSTDPKSIWREGSDRSREHDIAEDIGIEDTTGISFNYPNWQTVRSAYNRRRKNNLGDSLDPFNVPERFQLSKRGAIKLLLRKNISEEDITQASYEAVLSQLNEIWGEEIFEGIDRIHTD

SEQ ID NO: 133617 - protein, 167 aa, Heterodera glycines
MTFQSLKIRPPAFQYWDSTHQLSLGFQSLGLNPPAFQALRLNSQAFQSLGLNPPTFQSLGLKSPAFQTLGLNPPTFIGIPISGNQATSIPISGLNPPAFQSLGLNSPAFQTMKSPAFQTLGLNPPAFQSLGLNSQAFQSLELKSLAFQTLGLKSPAFQTLGLKSAAF

SEQ ID NO: 133618 - protein, 208 aa, Heterodera glycines
EYVVRPPPPVGRENSCFAILKSRSGKRVHIYNTDAEGRMAMADPLAEAKEKAMKAKNPAMKAKNPHLFTIATLTGHLILTYGHCSAAMDNGPARAANYAEQLRKTGDEFGQPVEVSRLFSEDFDFHSAKCEAADLMQSNALPSVRTPRGHMGPAAFLMRVSRIDEAGLDSAQPLKYTHLDIGVSMGEYPNTSFPSPLLALIAQIDNSQ

SEQ ID NO: 133619 - protein, 23 aa, Heterodera glycines
MENLALMGQMRRQISSFCSKFKL

SEQ ID NO: 133620 - protein, 41 aa, Heterodera glycines
IFYRFLNIWIFFWLTKTSSNLALSILIQIAPNFFYSLTRPN

SEQ ID NO: 133621 - protein, 40 aa, Heterodera glycines
MVPKGPVLIANSTISHNRGHGIVIESTLDGRALGTKVELR

SEQ ID NO: 133622 - protein, 27 aa, Heterodera glycines
YKSVPFSPFILVNLPQSFRSVPSPPIY

SEQ ID NO: 133623 - protein, 30 aa, Heterodera glycines
MIKQHKKVIFTTCAKNLRSCPSSYKTEKET

SEQ ID NO: 133624 - protein, 21 aa, Heterodera glycines
MRTRPIWQVMQRLLTSQKKML

SEQ ID NO: 133625 - protein, 76 aa, Heterodera glycines
YQKGRWRKNFLKIFPYILVISFCFWWGAWNSGIMRTRPIWQVMQRLLTSQKVRCRDETNQHCLPRGTRHGPPKEWI

SEQ ID NO: 133626 - protein, 63 aa, Heterodera glycines
FLNYFLHLITQRSRLIESSPNLQGKLLRTLQMLINFLRIFCLEEHSSSHLPHQYYFFLIIFCI

SEQ ID NO: 133627 - protein, 154 aa, Heterodera glycines
MVQMTAYRVQNCDGLINKSGCYDLKLADVMTGFWPSENGSLPPDEPICGFRGQLSLASGNTKLSNMSTGGNRKHAILGVNTHATYRRFVQKQPLKFLREDLVLLTAVKDAVHDNINPFLGELAFANLIGLFGRESRRIEVETLGHLNITISTDV

SEQ ID NO: 133628 - protein, 196 aa, Heterodera glycines
MLLPLLSALLLLLLPPFHRFPLAQFASKPPPLSPNPKPKSPLAAGPLLLKACCGDNCEEFQRPEEVQKDDNRQLPYPFAIQMYGITWWVLFTLTFFTRARKIAVLKLRQRTKQPIRGNLLRQCAEKGKNPPEYQQFSSRTHQCCDKPIERFGTIKCCYLKDSQGRFFPKSYDSSKQCCAYPYNKITAKNAKGKCTD

SEQ ID NO: 133629 - protein, 183 aa, Heterodera glycines
KDRPWVVKIKIFFQIMSPQTLFSICFTMRNLLPSPPFSLTSSYSIQSVAACGDSYEGVAVAAAMYHKEKVRAFLGPYKVRAFLGPYCASEFEAVAKMCSFWNIPAISYFEAVAKMCSFWNIPAISYMPTTTAVSDRNIYKTLARTSSKNSNSIARALIRLVEHYNWKKLAIVTNLAIVTNTGK

SEQ ID NO: 133630 - protein, 92 aa, Heterodera glycines
MTIPDETIIAPFDVFNKKTGRRLLLDDSHDQNLLLISCPIKRDKKAWIKWREEALQGSENYTWNLIDLTAGDADIGEWNWAQFPDLMANMQK

SEQ ID NO: 133631 - protein, 47 aa, Heterodera glycines
PEKMPTLVVFKIFRNSDFFITYLFFAKLIHKYFFRKCSETHQMLIKS

SEQ ID NO: 133632 - protein, 23 aa, Heterodera glycines
  unsure (1)..(23): unsure at all Xaa locations
KFLKYLXSSPFCYKKHQRALFNF

SEQ ID NO: 133633 - protein, 52 aa, Heterodera glycines
MQKPIIVNIIALANLGTGIKLNSLTITECEFKYNPRKFNAAVIKCTTPIKAT

SEQ ID NO: 133634 - protein, 24 aa, Heterodera glycines
MRHTILTANLITQYKFQQMFLMVF

SEQ ID NO: 133635 - protein, 60 aa, Heterodera glycines
MSTIFYSLAVCYFGLLFLGAGHALMLGVKDHRMYCILLQANITGIVQYTDELDYMGYEDY

SEQ ID NO: 133636 - protein, 111 aa, Heterodera glycines
VMYLLLRADLLDVLRWPLGAVFTQIAHAATACIWTFREDPEVAAYMTDMDNMHKVTLKVPDEKTLLEHAKRLADEGIGHRVWHEDGMAVCIAVKPMPKQKLKPFLGNLPLY

SEQ ID NO: 133637 - protein, 141 aa, Heterodera glycines
MRRKRLNSLNELVKRQKEFVKELVISKDTFIKWKKELVPKYCKNPQYCIPSDGAFLDPFPASKALFQAYASQLPNPVWHFLSNTLICKSRAVLLMIMLEIFPQFSFFGRHVISSSRSSRKVSYFATDHAARVMTNRCQVCK

SEQ ID NO: 133638 - protein, 118 aa, Heterodera glycines
LFEYPKRTLEKIDFFVFGAVPPNRCAQIYGETESFGNSFPIACTLILRWIFAPHNCLSTPNGHLKKSIFFVFGAVPPNRCAQIYGETESFRNSFPIACTLILRWNFAPHNCLSTPTDT

SEQ ID NO: 133639 - protein, 331 aa, Heterodera glycines
MKNLTEARKLIEAAKNAFEVILNYSLEIKQLNNKMHELNDKFTVAVKEKEEEAKEGAAINIQQEKKLEKEIPQVLKELEREKSQHDINTTAENTETEFPSSEYEIDDSSEKQPERTEQQAEVSYVLKKKEGKLEEEKIETKDDTTINEFPTTEYGIEESETEETEKWSPDQAKQKILKGNEEPFEQPDDQKDEETILVIGTDKKGEEFPSNQYEIEDNYPSSSSSSSFIAQNEASVTTKDEEGLLTVQIKKLPMTGDNEQKTIQMVPSDFPSYNDDDSRDTTVNELSEEQLAYTVPEEDMPKSEPYDVDEFPDLPDPQTSLPRGEEVIKKE

SEQ ID NO: 133640 - protein, 38 aa, Heterodera glycines
RGQADEARTAVPCRALSPGGRAPTNAPNIAQTSPIGTP

SEQ ID NO: 133641 - protein, 155 aa, Heterodera glycines
MSINENAMNAEMPIAMDARLRNGVNTWPAPYLENAIPNDGLNKRIMFGNFFNLTIGPALETSDLFYHFRVFCDEDKMKNTILEIDEEGKTVEKWTVSEDYSDYKFKTFTKGTRPTKVVFNSEQIQCDRYHIKVWATHAEWMDMDQTAMTVGSVYK

SEQ ID NO: 133642 - protein, 46 aa, Heterodera glycines; identical to SEQ ID NO: 129275

SEQ ID NO: 133643 - protein, 26 aa, Heterodera glycines
IRPLRGLRTGASRPFSNFVGKLGRFS

SEQ ID NO: 133644 - protein, 216 aa, Heterodera glycines
MSGATVTLVSNLSGLDDEREVMDGVGDIAAGFKALDCDLLIVEGLSHLKLFIPKSVHPRGTPFAFELGKDFAVKVQMYVKNDDKPALPLKFNQVAWQKSAESDQAQELQKVRRYETISDASAAAKTIRFDQIDQATDAAIAAFNQAAPAALPSGRFVEKEQITRAFRYGTTLVPFGEEVAKLVDYEREGKQLQLLQFVRKENVSFGEKPGNGKTVN

SEQ ID NO: 133645 - protein, 1469 aa, Heterodera glycines
MNVFEFSPMETHANSAHIIYRVTLLPQSSTLVELSMANGQEDKEVTVIGRNDLDEQLRIEPTLTSCKNGQIAVPITNFSSIPITLEANESVALVEHVDEWHELEHSFFPPFFVSSVTHENENIRTEQIKEILRTRIGRIGMSQQHEADKLERLIIGFEQIFALDDSELTQTEITQHFINTGDASPIRGRMRPLPFAHRKKVSSMLQDYLSRGLIRPSKSPWASPIVLVPKRDGSLRFCVDYRGINSVTVKDAYPLPNIDYILLALGGKKYFSTLDFLSGYWQIRMDEKSVEKTAFVTEFGLHEFTVLPFGLCNAVATYQRFMSRLFEDLINDFVFVYIDDILVASESFEQHLEHLEIVFERIKDSELKLKIEKCRFSASELPFLGHVLTRRGLKMNADKVRPVIELPLPSTKKQLHSFLGFMTYYRKFIYGFGEIAAPLFHLLKKNTPFVLGEKEILVVEKLKEKLLEDAVLYFPDFKSAMNDAERCFIILTDASKIGISAVLCQADENRRVRPIYFASRQCSRHESNYCPTELEALAVRFGAWKFAQFITGIPTKIITDHKALPPMFRSKKQTGNSRVDRWLMELNARFTLTVEYSPGKSNIVADVLSRSGALISEVTENFDMDSAFVCKLKENEGEKNLEVDEIGEKERIDWVEATKTSEPLELVCVDILSIGMSENGNRYVLVSIDHFTKYIVATPIPDKSKDTVSKAFVKDFVLLFGAPKRFHSDQGKEFVNETLKEIFAILGVEKTTTAGYDPQANGAAERANQTLLNMLKKSTSSHWSWDERLPFVVFSYNTTPSEVTGFSPFQLMFGKIANFPGEIDFKKYGNPFYTVDEETYLQAFKEHLQLILEYARKNAEISRTETKNRYDSRPNVTANKFAIGDKCMVIYPGSKSRIQHKKLHWNQFGPYKIVKMFESSADVVPVDKSSAEPITVPIERLVRVPVGVPDISTLPHGKNPYRNILATILLANLEIIYPKREQVNETPVSSEECQKRGITENSAENFDQNQLGTTDILGGRKMQQDESAELIWTMKCEGESHEFCGKLLCAELDPVLDAKTEPGNVEIGTPLQAILCLFILRSGATVSSAAAKSLVHLILGSEPGMELVVYEGVRKDNIRAGALPREEDVEKIWSMWCEKCAVTKKLLQSSGFEKIRVQNSDGEPKEKPETIQVEMPEAVPKLPESERDGWSTLFEQTGWILEKVRSMAIHRCRTLVETPRVLIGDSTAFQLLSEMRAQTQFIGTERGLLTEVIRPLSECVFSSKVRAAMIILGRDSLVKDETVDQIMEQCQRIQQLCSRFPSVSFIWLPPPYVRQYDLAYHEMIGRLSELLGDWFVFVTPFGRSLIEIWRYGDSFDRSRVNADGWMTENGIKALSAWISTQIPKWPNNRQLGIRTVRSSVSVTRRVYGLGLCDRPETAASSSARGGLGLCDRRPNSRSRSPFRRRDNRQSQPFVRGGHRRDDVTRDRRH

SEQ ID NO: 133646 - protein, 90 aa, Heterodera glycines
MNSAGIEDPLSMVFCNADLHERHCSFLNCTNPFHREWGCITQATKMYCDQINKRFATKCECHFGRADENIPFIFPKLSKMPEDKLFYKGT

SEQ ID NO: 133647 - protein, 59 aa, Heterodera glycines
MAASFCSILYQKPRMIHCAASSAAVDDDVVLGGVDRLAMAPSSTDDGNCLSDRKGNKGL

SEQ ID NO: 133648 - protein, 29 aa, Heterodera glycines
MTFYASLVGYTGRNNKILSVKSAFGIFNE

SEQ ID NO: 133649 - protein, 48 aa, Heterodera glycines
MTFYASLVGYTGRNNKILSVISAFGILMSKSGTVNDILCFSCWIHGKK

SEQ ID NO: 133650 - protein, 30 aa, Heterodera glycines
MRIFFAILFLMCFKGNAEKIKVTKAEKYHQ

SEQ ID NO: 133651 - protein, 108 aa, Heterodera glycines
MSDRRKEAEEKMGKAIFISADCWLKVFDLLPPSQLGLGIALISRRFDFYMDEHFKTRRWALKSIQIQRKIGKNGTKEMEIANYDGKPMPTPQIQLPRKVSGFERINIT

SEQ ID NO: 133652 - protein, 72 aa, Heterodera glycines
MDKMPKGERRVKTAYETRKYLNREGKKKQAEKNMQTKHNGQNDELDNCFAFDCSKNGEFVTRQIQQRLVDYD

SEQ ID NO: 133653 - protein, 155 aa, Heterodera glycines
MPFPFRHCFSSLLLHLPLFLLLFHTIALHRCSSMTPFPFSAPSVAVCPITFHAQAISTRQLSSVEFFLTKVITVLKEERIAADKLRQYELDPTQGIRIRERKKTYRENDLAIRNLVEGFDAIENPNEDEILAHLRSLQYRLMRNDFENWDDQNGD

SEQ ID NO: 133654 - protein, 138 aa, Heterodera glycines
MPSQLNTFCQIKEKVPTLSGKTRQLADQQQFPLPEFLSLHDGRHLLDKAQRQFLPDGGGGKLSEANKSAGDQKDGFLGAVRQLHQMQQKLEMLLMNAVNREEKVMPQRTVQWKANGIGVQAENGDGKVEKLKMLGGAD

SEQ ID NO: 133655 - protein, 142 aa, Heterodera glycines
SAFGCVKHATIVHELLHKVGLWHEHMRFDRDDHIKVHFENIPPGQHAQFRKIGQYESHAQFRKIGQYESTTYNVPYDYLSVMHYEESGARRNGLTTMETMDKRYQNLIGTNLIGTVKDASPSDYRKICAIYKCTKCMGRGFK

SEQ ID NO: 133656 - protein, 17 aa, Heterodera glycines
MEKACKIWRDYIDNYWS

SEQ ID NO: 133657 - protein, 87 aa, Heterodera glycines; identical to SEQ ID NO: 129152

SEQ ID NO: 133658 - protein, 55 aa, Heterodera glycines
MFFTGTDRLFVIIFDEMKDKRKILLYLTTITIVCFACSLDLCFVFYQNMFCLVIR

SEQ ID NO: 133659 - protein, 133 aa, Heterodera glycines
MHWSVQFPLDCNAVESDDFIWQRYFRYWQRFLIGIDNFHFFHAIFSNFASNFHLSQCPFAGFEVFVHTALKSGTDKCNFESVLRRHHIGAVLLNMPLKQYQNACTTPGTQRKKLCKWGQNLHNTKIELPYFLK

SEQ ID NO: 133660 - protein, 116 aa, Heterodera glycines
MDGSISLWFLRTHWPMLQDNIGGLSFANFGIGRFRLMHEHIFVDLPIDERPSFANCPSLRVVQVPFGHHFFPDFPPDNSSSANDGQSLAHWLLSPRPDNSPKLSSVLIYLNMEDKK

SEQ ID NO: 133661 - protein, 28 aa, Heterodera glycines
ILKVSKTCREQEEKQEDTAGRDEPHPQE

SEQ ID NO: 133662 - protein, 36 aa, Heterodera glycines
MIGRAVRNLPFIFEGIFKFILYPRKMAISFFEKFYT

SEQ ID NO: 133663 - protein, 85 aa, Heterodera glycines
MRLCPFVGQISPVGGLCPSPPEHFKGKANKNGSTGGTSSHKARNNSQFASAQMGAQKVGRIWQQNDHRINYGNTTKKLPSLFQWK

SEQ ID NO: 133664 - protein, 58 aa, Heterodera glycines
MYYLAKFYILVLAWFCLPWPTFDKAKQTATMNKKVILTTNRRQMEKFVSFLYNPKAMK

SEQ ID NO: 133665 - protein, 240 aa, Heterodera glycines
MVAKSRGRASWKFRRYVHSQHGQQGCLQRDALQLMQQIGARPGLNAYDAEIVVPRVVDHWNNSQQRHRFSVFIFGSTGQYKPLYKYINNYYDTRISLYLNNAHFDESKQCKECGVIWNVRDNNRNGRKGHQCHETYCQLCNTYHNPERGCFIQPIEPKEQDPYSIVAFDLETMQHQALDPQQPEKKEHQPNFIAAPGCMPRLHSKRQMEEGNCRMSNMWATSGPLCSVNTDSWTHKWTSK

SEQ ID NO: 133666 - protein, 24 aa, Heterodera glycines
RTLSTAVRQRSSKIYSMPQILWAG

SEQ ID NO: 133667 - protein, 24 aa, Heterodera glycines
RTLSTAVRQRSSKIYSMPQILWAG

SEQ ID NO: 133668 - protein, 181 aa, Heterodera glycines
MPNKNEIVLKYSFLDLTWFLDIEAVFYAISKTKKCLVVKTIFHISLHNFVSSARIETGIRPLERAARALQEVKKLFEFLQFCFHNFRKLFGIIMPKQNEIVLKYSFLDLTWFLDIEAVFYAISKTKKCLVVKTIFHISLHNFVSSARIETGIRPLERAARALQECMERKNSYFWDFFRNQN

SEQ ID NO: 133669 - protein, 497 aa, Heterodera glycines
MSGPIRSKIGPCAARTKAYIEAATVNLGKDTTDESIQADLTAERRGLRRAIRLLEDCNDKWQSLLLKFNGADRQQEEQRYDDFKPSGKHFMEWADKARGAVDTIDGVIGPEDDDEITGSIISQPANPPQIQHVQPHPPRHEVNLPPISLPKFAGEPREWPMFWRLFRSSVDNLPIDDFKKHIYLLGCLPHNSPARRAVDLYPPSDENYPRVVDILKKRFGDSKTITESLQAELLHLPKPGESVLSLRNFAESVERICFQLMDFGESEDNMFMASTIKSKLPFSILTHVVEKELSSGKTFSCLDIRKALQTIVEVKEEVQRCAHVLRGDERPRSSAFNSPPQQRGAWDQRGDHRHSNNRRSQPPRPFNRGGTPQPEYRAFSAINKNPERAKTPARKWGRSCSLCSGTDHLPSECPAFPTPGARRKRLKEQQRCLNCLVQGHNTEECTSPYRCRNCGNKHHFLICFKREESHSRSNGNRSASSPKSGREPGGRKFHQRQ

SEQ ID NO: 133670 - protein, 1249 aa, Heterodera glycines
MSGPIRSKIGPCAARTKAYIEAATVNLGKDTTDVKEEVQRCAHVLRGDERPRSSAFNSPPQQRGAWDQRGDNRHSNNRQSQPSRPFNRGGTPQPEYRAFSAINKNPDRAKTPARKWGRSCSLCSGTDHLPSECPDFPSPGARRKRLTEQQRCHNCLMQGHRTDECTSPQRCRNCGNKHHFLICFKREESHSRSNGNRSGPSPKSGRRPGGQRFPQRQVESQNHLITAGFQPNDQSTPPTTEGQIVQSIGMSTVDTSKGRANKAPKCKKPHAYLMTRRLLAKSNRDSRNIIKVAVLFDPGSQTTYGADPLIEKLRPHKLTSEEMEVHGFGGKREPLRFHSPIYSVLLQREDGKWEEILLNRTEKISTHFSMVEWTADESVTNHHEVCEAMCFTNEEPMILLSARHFWQFFQGKREVSPGLFVINTSFGPLINGESNIGPPNSNQKALSMTAIHRTNVEQMPTINEVEHFFNLESLGIQDDPAQDDDQTALKLFNESIRQEADGRYSVKWPWKESNPDLSSNFKIAHSRLSSVLTKLRHSPEILEKYDATIRDQLQQGIIEKAQRAPGQLEHFLPHHGVLTKKLRVVYDASAHTRGTPSLNSCLFRGPVLLPDLAGMLLRFRCPTFPLLADIQAAFLQISLEPEDREVTKFLWLKDTSKGLTPDNLAIFRFCRVAFGVVSSPFILAATLRHHLQQFDSPLSREISESIYVDNVLLECETVQEALEKYKFSKDILQQGCFNLREFISNSNEVMKQIPQEDQLDKPKAKVLGLPWDTEKDEIVFKFPTTDPLRPVTRRLVLSHLASLFDPLGVLGPCILPAKRLFQELWKEGHSWDDALSEEDSIRWNSIQSQWKDEEIRIPRRAMLNDTQSIELHAFVDASVHTFATAIYVRCAMNEKIQAWLIFSKNRLKPKSASKALTIPRMELLAILVGTRALKFAQRQLRRPIASLHLWSDSQIALSWVKTHETQPQFVERRLKEIRECLGCTFHFVRTGDNPADLATRGGTPSELRNHHLWWKGPPWLAQASHHWPSELCFQVTESDQQPYSTENVGPSGAFLAHTHSNQPNEQVLIDPSRFSSWKRLMRTTMFVLRFLALMFKRGEETVALLAKHRKEIRQISKSGDFKAEDFALAERVLIRLDQMDDAEEFQHFKTVIGDDGILRLKTRLEMSEKPYSFSHPILLAKHSTLAKLIILDRHQKRHHLGVDTTLTEFLSEFWMPSARLNVKRTLRDCLHCRRMNAQQFALPTMPPLP

SEQ ID NO: 133671 - protein, 138 aa, Heterodera glycines
CSLPHFHSFIFSFCPSLNSCLFRGPVLLPDLAGMLLRFRCVVSSPFILAATLRHHLQQFDSPLSREISESIYVDNVLLECETVQEALEKYKFSKDILQQGCFNLREFISNSNEVMKQIPQEDQLDKPKAKVLGLPWDT

SEQ ID NO: 133672 - protein, 312 aa, Heterodera glycines
MPIPFRERPPFFSAPTISRPTNEVVINDRLVIDIIGQYEAENGQRANNAPQPGADNAPPPGAEDQRGPWWFDQDWGPQLPMVPENNGQNRQMDDQRDDWGAHAPPRREPSPREHTERLNSWVERHHGQQWYETATIRREAEEHLRRELRTGATLFAAHLGPFANVRFDGFSRFGPANTQMFPGRTVREHFRRRGFQVDPNLPCLQEYGGFSNSQQGIHVDYFPIDMVNVRFQIGAYQREAEPPRLPRIRAYLALEEAPNDQEGPNRGPPSRRFFEAIGLRRGNPNVGEMAENNGRQAPLQRGERAMDYGRPN

SEQ ID NO: 133673 - protein, 29 aa, Heterodera glycines
RPSHFRPIKRAPFSLNAHFHISIHSFLLL

SEQ ID NO: 133674 - protein, 67 aa, Heterodera glycines
MLSFRMLPTMLDWLTRKKVIVEKRTFLMNQCNYYIHLEKDCHRQRRGGNFWRKGIMTAQNTNGRRGK

SEQ ID NO: 133675 - protein, 301 aa, Heterodera glycines
MALLSPRFNALVDKHFDGKSELTIWRTIVIRRKDKGPEPKLTVCYIDHSVIAFLRSNHQIFEKRGTNLYLSIPSSHSTNGQRIWDVFVREIWPIFSTNIHRLRITGRDHLDNLLRRTSPTILTDLNQLASIDSYDLLPAAIGDDFDVPNSTISAGQALSKWLHTPRKDGQPKRLHCKDIQEQTNFDWINNFKEYELEQYELEQYELEQYELEQYELEQYELEQYELEQYELEQYALEQYELEQYELEQYALEQYELEQYALEQYALEQYELEQYELGVVRFRHPTVQEKKYGFPYNSQPKS

SEQ ID NO: 133676 - protein, 99 aa, Heterodera glycines
MNRRWICNDVWMDIFPSFDHAQLGLKLALLSPRFNALVDKHFDGKSELTIWRPIEIRRKDKGPETKLSVRMDDKSNKFVEFPLPDRPLPSKIRFKSLEI

SEQ ID NO: 133677 - protein, 242 aa, Heterodera glycines
WICNDVWMDILPCFDRPQLGLKLALLSPRFDALVDKHFDGKSELTIWRPIEIRRKDKGPETKLFVWFDYKFVPFPLPDRLLPSKIRFKRLRIEYIDHSVIAFLRSNHQIFDKRGIDLHLCIPYSNTTDGHRIWDIFGREIWPIFSTNIRCLRFTGGDHLDNLLRRTSPTILTDLDQLTSIHSGALLPAAIGDCFNVPNETISAGQALSKWLHTPRKDGQPKRLHCKDIKEQTNFDWINNFKE

SEQ ID NO: 133678 - protein, 92 aa, Heterodera glycines; identical to SEQ ID NO: 125147

SEQ ID NO: 133679 - protein, 92 aa, Heterodera glycines; identical to SEQ ID NO: 129648

SEQ ID NO: 133680 - protein, 113 aa, Heterodera glycines
MCFSSEFEDTRTKSRFMFEQPCHCPTNQLEAIKFSKRNTVTGRWKCCTNVRRVTKKRTELMSASLTSIITAAVVTTARTVITILASALATVLERTVRGDSTRQMSQKWHCWGG

SEQ ID NO: 133681 - protein, 211 aa, Heterodera glycines
MIGFIKERRTVKGILENRPQKVVIENHVPGPNVAPYLGLNNQSKPQETEEPRKIIIPRKRLKEQTPDPESDNDTLEELTPEPQTTSTLKTPVPIKTIIHPTLLNGLFRYVKENKDLFKITAAGKVQSNMNLPIENSNYRDVLLYLAGKKDETPRGAKFLKDRLLKDPTVKDMVDKSKVMWGRGRKKAIKSIKTPGIVREKKPFKPLIWARL

SEQ ID NO: 133682 - protein, 277 aa, Heterodera glycines
SVLHIYSPGQIHREENMAIRYRLFNRLDPGGSHLFQRMPSHVIPAIFFSILPFDFQRMPSHVIPAIFFSILPFDDFKDVEGKQSSLVTIFSIWFSIWNTMMGTSLLTIPWAIHQSGLLTIPWAIHQSGFLLGLFLMLLMAALAFYTAFRVVESPNSLGDLALDRTGADFSDVCRFLALDRTGADFSDVCRFFWGRRGEYFSVFFSILVLVGGVILYFVLMSNFLFYTGNIVNEALQPNSSIIPIMVNGTLSCDVNEALQPNSSIIPIMVNGTLSCDV

SEQ ID NO: 133683 - protein, 15 aa, Heterodera glycines
LKAIHCLPVLGTAKH

SEQ ID NO: 133684 - protein, 183 aa, Heterodera glycines
KMKLFLLMYNFLIIFDGAFELDNALLGQPTISCHPDTIEMRFRTQRPFTGKIYVQGHYANPDCRVDFSEAGGADHDGRGGIRLHHGSCDMDRKRMVGPEGGTGMEFSTVLVISFHPLFVTKTDRAFHINCLFVTKTDRAFHINCLYKEADRNVGVDINVGDVTPANIQNDMPIPQCKYTIRKD

SEQ ID NO: 133685 - protein, 166 aa, Heterodera glycines
FFYPFSSIFFSFLFTSLSHFVSQFSSNKFNFIKIKKNDFSFFVFRRALAKSPVVKRAAAIQEQEQKRVSKHRTSRYWLDEQGPVLSPSEHIWLPSSASSASSSAVDTECYLGEKDCQKMGEKRRCSGCHIVAHTACFPLLAKMNLSCKMTFRDSTKCQCQKSVVNG

SEQ ID NO: 133686 - protein, 21 aa, Heterodera glycines
MRKKMFDRARQEKATVCTKFA

SEQ ID NO: 133687 - protein, 256 aa, Heterodera glycines
MAIALASCQPSPILNGGANVIVVVANEQPKICKSNNNWALSSTSASASSSARRKSFNPVRIKEEPMQTENDGQEHVAGAETTAAVEQQQQKQHSQAFNKRHDEGEEGADDEQMGPINRQQMNNKVVGDFSTTSSSSSASNGSSVDNNRDHVDEQYAQQCQQQQHQNAVQQQQFQAVQARLWTAALALAATRQQQQQQQQHQLLPDQQQPQFVPAAAGTCRPPASQPPFSLASSMVVPSCTMRGGGGMAQLPNSVNN

SEQ ID NO: 133688 - protein, 95 aa, Heterodera glycines; identical to SEQ ID NO: 125597

SEQ ID NO: 133689 - protein, 46 aa, Heterodera glycines
ATQFGKSVFLNALKKIQSIAWSVSKKTLLIFIFIIFWFKNIFEYFF

SEQ ID NO: 133690 - protein, 98 aa, Heterodera glycines
LFEYPKRTLEKIDFFVFGAVPPNRCAQIYGETESFGNSFPIACTLILRWIFAPHNCLSTPNGHLKKSIFLFHKYFFSESALKCTQIFIYNLIFSTLML

SEQ ID NO: 133691 - protein, 16 aa, Heterodera glycines
CPFGYSNNMGSKIQPE

SEQ ID NO: 133692 - protein, 254 aa, Heterodera glycines
RSAFAKTNKTCQVNYCMDRSLNDCDVIAFCEELADGYNCTCPTYSIDQSPMPEKPGRKCKLLKNECLNPAENNCSRFADCIDKTEGYECVCRPGFRDENPANPGTDKTEGYECVCRPGFRDENPANPGTSCRQLINECKFSAINDCSPHANCINECKFSAINDCSPHANCIDLPDGYTCVCKPPYVDEGPKETGTCVCKPPYVDEGPKETGRMCCFDECANQKDNDCDKENAICEDLEEGFTCKCVPPFLFGVS

SEQ ID NO: 133693 - protein, 115 aa, Heterodera glycines
MVSVYIVCMKCQDLPGSHRGTQDGTHTHSLPSEALFSFIVFIILLPRLVNTIRESAAIVLRGVQTFVLQQFALSSRLFRHRRLIDGISRTCAIVPVGQFLAKCDHITVIQRTVHT

SEQ ID NO: 133694 - protein, 182 aa, Heterodera glycines
ADIEGSKSDVAIVAWPPQASYPCGNFSDTSCWKLYTLKDRATLSRSVFVLKIRIKAFAFLLYERFPSSLSALGHLRYALTDVPPQSNSPPDTVIGAGRRARVARLNTKMDTRRTPVLPIKGIDESSGISLAPCGSHLCYTSHDSSQSQTRVKLNRVFFPAKFAKPVPLAVVSLDSRGQWESR

SEQ ID NO: 133695 - protein, 244 aa, Heterodera glycines
GELPEGVYRQLREVQQTSTRLRGVQGFSARVLNSGTCEGTCEIRVVQLVEIIKPGQSLGLYLREGNGIDQFTGVFVSRFGEKSELIDQFTGVFVSRFGEKSELQKCGDILRPGDQILVVNNVLVREMAIDDVVLMLSIPRRLLLRTRQAKNGKTEIRGPTERSEQRPVVVFQKMPDRRDSESNSGILAKPASNSGILAKPASTAASWLGKKVRQQQQLKKHAATASASSVSSSTTTTANDGNYH

SEQ ID NO: 133696 - protein, 18 aa, Heterodera glycines
YREAIPEGFGLPINLGAS

SEQ ID NO: 133697 - protein, 61 aa, Heterodera glycines
MELFLFTFLYILAVCAFLALFETVLPVVWVDDQHFVEQQRREAIFNATKNCDPLSSLAITI

SEQ ID NO: 133698 - protein, 88 aa, Heterodera glycines
MSKNTNQFRDQDVCRYWVLYRNVKKIYETFVKLEQMDKTVVAVGTEHFGIFLELKRCDQLKLIQKSVIFYKGDRKRPKTHGNGKLIIL

SEQ ID NO: 133699 - protein, 141 aa, Heterodera glycines
IIFIQKIFFWVFGAVPLNRCAQIYGETESFRNSFTIACTLILRWIFAPHNCLSTPNGHLKKSIFFVFGAVPPNRCAQIYGETESFGNSFPIACTLILRWIFAPHNCLSTPNGHLKKSIFCFRGIPPEPMRPDLWGDRIPRE

SEQ ID NO: 133700 - protein, 231 aa, Heterodera glycines
GYSPRIVPIINPLENTTQTQLLEFIFAFTGHSYGIKLNGKFVQSNYLKEGEEFFPINWTEPKEMKKQFERMTSFQVLLALESLDNRENLFGNYKFGFFKISAAALLVNDPPPWMPFVTIDTNYESPMIPLPFFMAIPSVEIDTEINFKISLTDINKYNFTVSLLHDRPESHLKSTVQIRRKYGIIPTKSLEVFNSSSVLIRIHARTKILMSKIISLICHTYPKKDQKLVKT

SEQ ID NO: 133701 - protein, 70 aa, Heterodera glycines
MVVHPSRGNQDAAQLFEELLADYNKLVRPVDENNATLVVKFKLKLSQLLDVHEKQQIMTTNVWLQQKEEI

SEQ ID NO: 133702 - protein, 31 aa, Heterodera glycines
TMGTPQCQTKLLITPNSAFGVNFCPLFQNLH

SEQ ID NO: 133703 - protein, 64 aa, Heterodera glycines
MILIAFFLPLPPLFGVEIFAAWLLRGDNANVLIICRCCCCAEQSISVVGLSVMIVHECCEESKN

SEQ ID NO: 133704 - protein, 139 aa, Heterodera glycines
MPMRIPSIQFSNFMFPVPGLPSWKMTIGEEMKQQKVMAQHILLLQEKVAKMEQEKEQQKKKKENEKYVDQFIKMQNDHFAILERISELEKQQLKEQKQQDENGKGKYGNAYGNSVKINIIYLFNIKIIFSFRSIHKVTR

SEQ ID NO: 133705 - protein, 99 aa, Heterodera glycines
MAFCGKTVPSPLALTVNVHTVLAIRSDVALIWPLGKFSSPKMAFVWIASICAFIFPFRLMLANCSHSFHCVTLMTKLRRTLAPISWPSLRRRLTKCGRP

SEQ ID NO: 133706 - protein, 391 aa, Heterodera glycines
DAETKVKKDADEKAKKEAEVKAKKDAEEKAKTDAEVKAKKDAEEKAQKDAEAKAKKDAEEKAKTDAETKAKKDAEEKAKTDAEAKAKKDAEEKAKKEAEAKAKKDAEEKAKKDAETKAKKDAEEKAKTDAEAKAKKDAEEKAKTDAEVKAKKDAEEKAKTDAEVKAKKDAEAKKKEEEMKKQKAKPEEKPEAPAEGVAVVPEAKKAEETKERLKQEEKPVEVPPSPAEKKRKEAEEKKAQKDAEAKAKKDAEEKAKTDAETKAKKDAEEKAQKDAEAKAKKDAEEKAKKEAEVKAKKDAEEKAKKDAETKAKKDAEEKAKTDAETKAKKDAEEKAKKDAETKAQKDAEEKAQKDTEAKAKKDAEKKAKTDAETKPKKMQKKRLQRMPRLKP

SEQ ID NO: 133707 - protein, 109 aa, Heterodera glycines
PGLKCPAQAKIFFYFREKIEIFPKKIPVDRARKTMFWKWSPFFCENSLKNHKIKKPENRFLGLTRKILKIFEILKSGKIELIELYNKSAGHLRSGQTLMSYSPGTEVGK

SEQ ID NO: 133708 - protein, 39 aa, Heterodera glycines
MLLRLHCLVVPMAGNNGGGGGGAVGVTVQPIVAAVQRCL

SEQ ID NO: 133709 - protein, 174 aa, Heterodera glycines
MPTIIAFLNKCLPNSVKKIGTTQINLDENGIKIGFEATAGAVANSLETSTATAIDEFSTVANLSQMLGETDNTESANKNNSNNDIPPTSGGQAEVASISNSNLTSSADDGQNATGGGPLTKLEKRDKPENRRILVDNERDEPIKAEEEDEKKDREESAKAERDQQTLRKIVPDR

SEQ ID NO: 133710 - protein, 393 aa, Heterodera glycines
PFLIKYLPTEQLKYNEANFLSPSLFSLHTKGHGLERQMSLPNLMKKGVHLVDRDQNEWLNLIMEASGVNEQVDTVKREFDGLYLTKENVRSKWAKWTIVHSLIKVREMYGHEQRKSDTWEKLVQNLSKEQLAEMNRTGVVSMSAELAEMNRTGVVSMSAEQLRLIYGPSSPFNDSQTLRLSPSVFKPGIKAKVGKIIIKKNLAKLHRIGNSLVLSPLVFSPTILSPTIMGPAILPAILSPRFFSPPSRFIHLLIMFNCLIILILSPRIMTPLVLSPFIFSSIILTPIIMQPFILSPGRLNAQIAQILSPFILNPQIMSSHFFHPAILSPLVLTPALLNPSMMSPIVLSPLVLTPQIFSPKFLSGLFLSPYALSPVLMSPVFAYLVILSPSWLS

SEQ ID NO: 133711 - protein, 50 aa, Heterodera glycines
MYAVFVCRILCVKVRVSVRSMQSNSSVHSFYDEEAPIRDKLIVAPFLFIF

SEQ ID NO: 133712 - protein, 47 aa, Heterodera glycines
LNCRGGGSRFPAPILNRRRGRGNGGEEKRNHRLLPGVTSATFLPPCA

SEQ ID NO: 133713 - protein, 88 aa, Heterodera glycines
ADIKKNNFLTNFFGFYYFYGACVKFVKFFFLIIKNHYFILFIFILNSGTNFNRIWRHLTASAAIVSQYQQQQKQKHGTNNNSKTHSNN

SEQ ID NO: 133714 - protein, 95 aa, Heterodera glycines; identical to SEQ ID NO: 133575

SEQ ID NO: 133715 - protein, 31 aa, Heterodera glycines
MAFQMLERQSLNLFRAQNFEKVGIWIGIRPR

SEQ ID NO: 133716 - protein, 399 aa, Heterodera glycines
MPSNSFYVVLPSNTNIEGNRTNSFRVRLPRKLQFNSEWEVGLAVIVYPHSWPSIGTVEQQFVQIEWQTGNTVRIEVPPSNVTNPHELSKNLYRLLGEGSDPLAKKVRSTQNSFMLLINKARRWAREEYIKRKTKEKRSVRDEELLLQALLTDTGTLVDLNSVAQGFLTREKRAETSNIALRIPADDNDSYQQKLDEYFSKLSEKNLSILDELGMTKLTAEIKNLSEEERAILEATKEMGTEAWIQAYREIRLVCQFNYDVHRNRFVLNTDPRYVKKVKVSPQLAYILGFNNTEFIQSENEARFMPDMSGGVSSFHVYTPDLIEPMMIGDVTAPVLLIVTIRGNPDQVVEEQFFAIQYHKLLLKEFSEILIEIRTNSGILMPFQYGTCTLTLHFRKMSYF

SEQ ID NO: 133717 - protein, 91 aa, Heterodera glycines
MSPNEFSDRPFQQPDNVQTVQLPHQQPDPEAELRAQIEDAEEDLLLNWWREDPTIIRFLFGHRRAPTIEAALLQRAEREAEILRQYAENHQ

SEQ ID NO: 133718 - protein, 190 aa, Heterodera glycines
MDNIKQNLRTKNARQQRWDKAKREERKAQTQRATEARLAKKTAPLPNPNAEVPQQDEAGPSTSAAPTEEAMEPPPPTPGPVPTPEMDEEILEFDDPPPSTPATPIGDLVPFPSTPTAPMDTGETTPPPLAIDERSERIEQLEKQLKDRDDTIQFLREQVRNREALISDLRRQLDEHIVPPMAPPTTSKSE

SEQ ID NO: 133719 - protein, 151 aa, Heterodera glycines
MTKIPGLGLGSRFSKLINKFINIKYRNKTFFIHSKERDRKAAPKKRERSFFEQVRARLAGPVRLLPGRDGKRAKSYDDNENRPMEEVAASMPTSRDQSQARQMRQRKGSNNNQFEPVYNQQIFVSTTTTTAAAGGGHTHSIINRDFNFHVK

SEQ ID NO: 133720 - protein, 16 aa, Heterodera glycines
EAIPEGFGLPINLGAS

SEQ ID NO: 133721 - protein, 95 aa, Heterodera glycines
MPPIPNTKVPLMLMCRCTVLFLGYCVLCYGADGSKYPNEIIDTPIVSCEQENIVVKIHPLFVTDSDRSYCAQCVYMDANLVDDLERVDDTVIGQY

SEQ ID NO: 133722 - protein, 129 aa, Heterodera glycines
MERHKQQQQQQQVRVGQLIKENAHWLCALARTKSAKKCKKLIRMASTEQLLSLVEICLNLVASRFRLTTRQKKRLMPHVNTVRRMSRARSERGARRVLVQKGAGFGGLFAALLTPVLVELAKNVVSKNA

SEQ ID NO: 133723 - protein, 80 aa, Heterodera glycines
MDSEEVTKELNELHMMISGEEEKLRNYKIEVNRRRHNYMPFLVKLLKCLAREGKLVPLVTEAVQKKKIEESKKKDSAESA

SEQ ID NO: 133724 - protein, 43 aa, Heterodera glycines
CCDHICIPLFGYAYVFVQWNVCSYMYSVCTVCIILVSKILSLF

SEQ ID NO: 133725 - protein, 357 aa, Heterodera glycines
LLLDSVYALLLMSQLNFKSDSFDAQIYEGRIMGPFLIKELQNYIKMLNEAPLLDTSTNVRNKLIKLIIEISNDFFANIKRENDFCFISQRTDVCRLIRTINYVEQLIKRMKDKKLARNLKMRTIDEWWPSECETENEIQKAFAQQKVRMRPVHFDYLKRILAEEVYVSSFNELKGAKARIRKLLSDESAKGTTAEERANADQIMAMFRTQRYFERAFFYAPVVEFYEVALFDGNAEKRCAEWLKLDIIFWVTIVETIILKEEKEREEEEKVQNEQQKEAGGENEVPIKQYFEETFRLGTEQLIKTFGNERTDEILRICKRENEAKEEQWVEEEKGKATKKKNRKKKIKQKKENEAGK

SEQ ID NO: 133726 - protein, 129 aa, Heterodera glycines
MALVRFEEAKSNRGKILLSRLVFEYAYESDSRIEQGWEYWKCPKRPPYCPGRACVQMAWHVDANGSRYKMGRMSAGGELKPATLPDFSQYNHYASAANLRPILDGHNVLSAATTAVNCGLGQAINGHTL

SEQ ID NO: 133727 - protein, 92 aa, Heterodera glycines
MGRKRKGRRSPNAAIAILILSALSFPSGSEKTNGRHKTGKPRPTSVEVRKTVNEAKSGERRSECERKDDERANGNKRANLALANECHFEWST

SEQ ID NO: 133728 - protein, 59 aa, Heterodera glycines
MPLSNLAKVLGPTVVGTNSRLQTMQDKQQQQGTAYMTEATNQIQIMQALLNMDHLRNSP

SEQ ID NO: 133729 - protein, 52 aa, Heterodera glycines
IIYIYEYAFLCSICHFICIDFVNMHVLRMCLSSVYIYEDALLCIYHPISVYL

SEQ ID NO: 133730 - protein, 127 aa, Heterodera glycines
MTCAYAKLLGPCFKTGRTDDRLLHRERTTESPSWTELVAGTCRTRPPPTPSSSQHGPETIAQFTQSKQHSPDPGTRPRKAGLKTELTQLLRASQRTPPANAPFATEQKEGQQTPVWRLAAQRTATNG

SEQ ID NO: 133731 - protein, 128 aa, Heterodera glycines
  unsure (1)..(128): unsure at all Xaa locations
TERRTANPSLEASSPTYSNKRVNADQIRQLCPFPPHXFTSSLTLSSKCFATFPHGTCSLSDSWPYLVLDEVYHLIWAAIPNNPTPRHVKMGRHRQLDRSCTFSGAPVKGNLNKRANPSSRSIRYTSQP

SEQ ID NO: 133732 - protein, 23 aa, Heterodera glycines
RISSASRHRGARILLSCPSGILT

SEQ ID NO: 133733 - protein, 96 aa, Heterodera glycines
MLKQYKNFIAETKMPPTGDLTPIRHQSGGVISSKKRKFSTASAAADYMSAERKEIVEIFPAASSTATARDLQIKVLEKESAKLDLEMEKLKLEIRG

SEQ ID NO: 133734 - protein, 90 aa, Heterodera glycines
MIILSTKLLTLPVLLSILLCIAKGQSVEELCEKHENEFNELFVEKKGGAVPEVLWEESLEKKEDKEEEKERLEEQKKTEKAKEKDANAKN

SEQ ID NO: 133735 - protein, 178 aa, Heterodera glycines
MDDVLDKYAAYVIDGVINNQSSVKGEQSTEINRNSVNKSMMNTMFMCFKMKLYAKLREDYGNERIKQCFSSFKVIRLHELQFVVLNNVFEGINEDNLLKFDIKGVFSLAYAVQYTRKQCRGEKGWQKCIYREFDFFGLSRGGVEVAAFFPEGIQLSAEAYGQLADRVKRDARVCTRNS

SEQ ID NO: 133736 - protein, 194 aa, Heterodera glycines
MAKATKARLAKKTAPPPNPNAETPQQDEVGPSTSAAPAEEAMEPPPPTPGPVPTPEMDEEILEFGDSLPSTSATPIGDLVPFPSTPTAPMDTGEMTPPPVAIDERSPRIEQLEKQLKDRDDTIQFLREQVRNREALISDLRRQLEQCAAPPTATPTTSKTTPNRGRPRKAIDELQRSSRKQNSKLFKSVLSDFY

SEQ ID NO: 133737 - protein, 24 aa, Heterodera glycines
REKKIMFFSGTLYLLVHISFFETV

SEQ ID NO: 133738 - protein, 130 aa, Heterodera glycines
MFATFASLLTESFMLFFGIAEWLIFARLWRFNEQRYKLSIAKSEHNLSERFQLSENIRTGKQLTPTLSFHFWMLFASVVTAFWSYFDFPRFDQIYLAINVANGVTGLIIETLMITWVSLKSWFGPPFHFA

SEQ ID NO: 133739 - protein, 286 aa, Heterodera glycines
TFPFNSFLLFANLHIKIRSFFIDTMLDFIRLVRWWKKKVKGQTVVTGGGSGIVRKLLADPRTFGAKLLADPRTFGAKVAIIDINLSAKKVTEKICENGGVAKAWKCDWKCDISDANEIRRCAAEIQKNFGRVDIVLCSAALLYVVPILELNDADIQRSMDVNAMGTINTIRVFLPEMEARGKGHIVAMGSIASHFGEVFQMAYSPTKFAVRGAMECLRVELRERGLEDILCTTIYPFYVRTPMVTSKGLRPVARWLPFWLPFLTVEECAKSVVDAILKEKVNACIP

SEQ ID NO: 133740 - protein, 15 aa, Heterodera glycines
MAMALGESGIARDGG

SEQ ID NO: 133741 - protein, 56 aa, Heterodera glycines
MALADECKGNGAVDGQWQSDGALDKKFVRPPQNRQIRPVPRLWIAKSHFHWRKCAN

SEQ ID NO: 133742 - protein, 35 aa, Heterodera glycines
MKAITTKAASTLMPECSKSTTNPEQLLMKKDTVDR

SEQ ID NO: 133743 - protein, 135 aa, Heterodera glycines
MSIEHAEKVVAECKGAADEKLQEDKLKGLRESLRLYQEEKELIDNATADDSNGPTVITAENVKKFFDELCELPFFGADIRQMFETKQKARHELYTEYSEKKTGGITYKATRNGKGEAETAKIDWIFCFKKGTTFG

SEQ ID NO: 133744 - protein, 150 aa, Heterodera glycines
ICCCVQAVAAARQKFPRWAFEYTAKERGAILRKWCELLGEREKQLAELLTREQGKPLAESRGEIQYAASYLDWYAAEARRCYGQVVPASKPFRSHVHLREPCGVCLLITPWNFPAAMIIRKAAAALAVGCTVVVKPAEDTPLTALALAQV

SEQ ID NO: 133745 - protein, 532 aa, Heterodera glycines
MRVENLVMMLPIYEKLFERLRNFLVAQRNAANANVLKDGWQKAKRKAESDAAKSFDTERKMIRITVPEWVRDRHERKFRQMLGMAETPTEDGGKSELETMGKQQQTDQKQFRETLRMGLKKSTDARLRLWYFLRMETVKEIFKSIEMEFNEKEFQFNEKKQKSEAEGMEKKEKRKERNRKKNRGEGKGGKRAKDSEEKEEKKEKEEEKEEKKEKEEKKGNGEEKRRDEEEKEEEEEKREKGEEKEEKINNIKMDTEIGENYDTGENERKEEEEKEKNQRKERGNNEVKKESKEGTKRKAKREKGGKEQKTKGKGKSEEKKEEMREKREIGIKELQSDEFISQKYLEFVSKSVGEWPTNSKILLELSVYANEIWQRIEALKEIGKEFQFEFGKKVENLANKWEKAEEEKVGIDQQKENWKKIGKMRAFLKQLMANLGNGENVEEKINETGEKEQLMQLQRNKFAKSMTKNGKTAEIWHILSKERQINTLSAIFWMEEANKRCKEGKRKEFAKYLAQWETAVAQLEMGEKGVAF

SEQ ID NO: 133746 - protein, 170 aa, Heterodera glycines
SAPQAALTTSPRTIPERTARSHGQKPPHATARLTRPEPILFPKLRIFADFPYLHYSRLEAVHLGDLLRISVRSGRRFKLPSHFQGPCGAHETPQEPRCFTGATSLSQAEPLPGTHTLNEKRTLARTPHDVCEFICVTAQNSSCEPSFLAWRGNEPTSLSATGWTNCASTE

SEQ ID NO: 133747 - protein, 59 aa, Heterodera glycines
FPHGTCSLSDSWPYLVLDEVYHLIWAAIPNNPTPRHVKMGRHRQLDRSCTIAGAPVKGN

SEQ ID NO: 133748 - protein, 292 aa, Heterodera glycines
NRERLWNPVFEQYRQDHQQPSSSSAAASFLSRRANGANALQAARQKGVWLLVNVQEASEFACAVLNRDIWSVETVREVVRSNFLFWQVANASAFWVPLQPLSPLSLSSFPAIFIVDPRTGEEVSGRLKASDSVSFLDSRKLSRFTSYPHICSNHFLQSLRSSTRTRPLRRAIVSSENKHRYKMPIPIQSFNCSTPKKSTLPPEFVRTTSPPSPKNRTETPTKKRKKPVDDEEKDIETEEEGQQEKVKTKRESKEERMMNIQAKKIKRVMTISDHEDLSTRRPFASSQFAASN

SEQ ID NO: 133749 - protein, 73 aa, Heterodera glycines
MKRSAATLSAAAAAADPNQYENKTEPIPTHLEAEPDHEKKGSPPPESARRLEPIVPPSAEGEAPGRRPLFCEL

SEQ ID NO: 133750 - protein, 113 aa, Heterodera glycines
MDVSLASVAKDLGFDGHDLTDMLAKLPVEEGFEGDMDPDEDTLLSNCPQHWVAFQSKVSPCLADINKEDSDEAPPGTTLGHSWADVEQFLLEQEEGLHQPTSHIYSNPIDTQK

SEQ ID NO: 133751 - protein, 91 aa, Heterodera glycines
MAIDKSAHQKKFVGTISVEPSVNAQRLRREQQQHQLLDGQNTGELIQQIFDELNAQHSSTGRILERNGRALFRIADHPGTETPCHVPKGQQ

SEQ ID NO: 133752 - protein, 223 aa, Heterodera glycines
MSSPIDAILGPKENADPEAGAKASKTKGSNKPKVSPANMAEIQMELGNAKEEILSAVAKYIGEAMSTVNRGMEGFTAAINQMANVLDENRAREEMEQMSLDDPELEAVSVEARETGKEPESPTEGENGQGETHPGPKGISLPQEQSARERGRGTGQGRAFIRGRGGHGRGTATGAAAHARHYFNMRQGHRAHHQHHNHRHPAPGHCRCHDCQPPNHHFGRRFR

SEQ ID NO: 133753 - protein, 119 aa, Heterodera glycines
MFTKPPYLRANKFNLDMERKEEAASASAVGDHLKILRAEFDKKLEEFAQKAIELVNDKAMAMKEGFFEVQWQGHPFFKHEKLSKNGSQGIIANANNNNNNKEMAEEEKPNEEPSKKGID

SEQ ID NO: 133754 - protein, 153 aa, Heterodera glycines
MPSTNSAAARYERAIRRSQCANRQADICLSKAIAVEARIKRRSATQLRKKALARLKMDLGLARAAINSGNFFLKRKKGISLWLLPNGRGPLRAAIVVHHGPPLPPPPPPPPPPPCDLMAALQIVAPLAAPGGKKGQLALCFRCHVELFDKQPE

SEQ ID NO: 133755 - protein, 31 aa, Heterodera glycines
MGSKNPTHNYSTGYREAIPEGFGLPINLGAS

SEQ ID NO: 133756 - protein, 103 aa, Heterodera glycines
MDDLLNDIDEDQQQSESGSSSLPPQSVNTMAWLEQNKQNQARAFSENLLKDLSAVSETGKSAEFNVKDEMEGEAGDEEENQFIQNCQRIRSYQVASEKNCNHE

SEQ ID NO: 133757 - protein, 126 aa, Heterodera glycines
MVIRRGTMVIRRGTTVIRRGTTVIRRGTTVIRRGTTVIRRGTTVIRRGTKVIRRGTKVIRRGTKVIRRGTKVIRRGTTVIRRGTTVIRRGTTVIKRGTTVIKRGTTVIRRGATVIRRGTTTVENVQ

SEQ ID NO: 133758 - protein, 20 aa, Heterodera glycines
KTSWRRNGSAETGAPKRVGP

SEQ ID NO: 133759 - protein, 39 aa, Heterodera glycines
MAADSCSQSPEELILKTRKRKIILISKAQSNTITIREGK

SEQ ID NO: 133760 - protein, 221 aa, Heterodera glycines
FMGTRRTRVGEKIPKFTAKKSAGAGNLGVLIPKIASLLCKMEPIRMPSVKLRNYFRDFWFYCVTLGFAFPLGCPWPEEWYNAICKIAPWPEEWYNAICKIASKSPALLPHENFKTEMVENAAIKVDGIATTEHQQVRNIISNEFKQTEHQQVRNIISNEFKQNAEVIAIVSRMDIGYCLFLLAVCRLEKLRVVYSRHSTVVQTLFTYLENRSNCFDLNNQF

SEQ ID NO: 133761 - protein, 215 aa, Heterodera glycines
MEEKFRPVNSLFAPTVDQSVFYEQSTSQNTAKPLPPNNANSSEKPSTLPNDGVGRTPSPPQMPSDRNCFSSSKTKFELPNDVNESNSDWTKNISKTAANEHSQRTPRVNWDGQSLAHYDGTGGGEGKEQTTNGSKNNGKTKENSSKKKVGKMEGEGREKNGEFIQYTSRNTGTYTDSEEEEADNEEEEDARSDVTLMDQNGRREGQNGTGGLQQK

SEQ ID NO: 133762 - protein, 54 aa, Heterodera glycines
MVISFLYQNPSSYDAAEEITNMTWAQFDHHCVRNGDNQVNAQRECSQLKGFGNG

SEQ ID NO: 133763 - protein, 306 aa, Heterodera glycines
MNFKTAGGLGNKINEAFSHHYKIKKQRGRREAKAEDTKDSKIDVAKRAAARAGRDVERHFNQINNISNSIQTQLNTLRETNPHILEEPDIKIWFDKMVEMGTEIQTSRNELKSFQEEVDKAKNITLEHVEKNDLKKAKKSADVAKGIARQAKTKYTSTLEGYNDKSEKGFSGIVNRLNEALGEHIKRKDIENRQVSEAEKGPQKRERLANEDVQFQYDSIDQKFIVYLSAAVSHIDLSKHLAYVLGFKNTRLFHAEEATYMPDLTGGVRQLYIYAPNLIENTIIGNQMAPLLRIVNVVDDPGSISE

SEQ ID NO: 133764 - protein, 67 aa, Heterodera glycines
MLPIKIILLIFLICTPNSAENITENAKSRNERDLKQQLAYACNGLIGSLKYVLRVIDFIRGFWQSNN

SEQ ID NO: 133765 - protein, 24 aa, Heterodera glycines
MIADLRPSLEEKMAPPMETPTPAK

SEQ ID NO: 133766 - protein, 100 aa, Heterodera glycines
MAAGACSKRRAKADVTVPTADGEGTSTQAAESGSSTSTLDLPTPVRHHVRVRPKTTDKATNMDFTTTDNATHMDLTTMDKATDVDLAYEDAATQTEQLDK

SEQ ID NO: 133767 - protein, 333 aa, Heterodera glycines
MNGEDEVTVQEWTELKIGIMKEALKAKFSVPDLKDVLLSTGSAIICELSPDQFWGVGCRPGLIYDKWPTADIQQWNGSNTLGRLLMQLRDDVKEATPKGTTRAVQPNYGWPKNREENFQNIPVEEEVFDLKSFENLEITSTDEAKDKPKNSTKANSISELLMSHADEVAETEEKTNEKFALSERMNQWLKYAGINCQVLVFGSSLCQLARHGSDLDLFIYKFDQTSVRLADELGKVRQILRQKYPRTEMELRARGNTPVLKIKLEFHVDLTIGRSEKLNGVYNSVWLATLVRINDLFRSVCLLIKEWGTDINQPEFGSFNSLSLVIMVRRLLR

SEQ ID NO: 133768 - protein, 1924 aa, Heterodera glycines
MKLQLELERVCRQLEHYNQDLSSPQIYMSLEQKLSKKVLTRYVDLKNVKLSAMPHGSDWSTNLFRETFKAAVEQLKQINDIVQRANPEQTHHTSKREKHKSEEKESTLNLAIRYKDQEKKDNRQSSGAVKPKPWRGTSTSSEGSSLRSSSQSSRYGRSPGRKPGSPWPNQSRRRESNSSSPSPSQSRSPSRFPCQFCAEKHFALDCDKFSSVVNRRKQIEAKAMCYICLFNNHMARNCPRKLRKCFLCQRTGHHPALCERRKSVARGQVATTTTEKQENTSTNVFAIQSCMKNPKEIWSLLKCVWVIIRHPMFPKRKKRVLAFLDDGSEKTYIAKILVEELNLMKINEVHFQAKGLQGTKLGDFVTSVVELNLLGKNFNMNIQARQLDKVMPKLPHVKIKGAKIDKLLSNKLQVLPKFEEPLLLIGGDVYNHLAVKPVQQLANGFWISESKLGNILSGEGKVKLSTKELANTASTTSVEKIVEFSPKFGNKLQPDDDELTFMVEQHNKLETIGLGDANDRDDNAKWIQNFEQNLNFNGERYEVRLSWKEEVTSLPDNYYLALGRLKSNFKKLREKPCLLKQYHEIIHDQLEKGMIERVDSSINYWKLKGTKERDELNGVLYYLPHHFVERQDKQFTKIRVVFDASSKLRKEFPSLNECLNKGPNLYNDLAGILLRARLKPVLVTCDVEKAFLQISIHPDDRDALRFLWYENPEDENSPIVEYRFSRVTFGVICSPAHLSIVLKHHFAKYRQPQIRLMEKDTYVDNIVLGIDQDKTIGQTYRLLKAVFRDAGMNVREFVSNDWSEIEKLPETDQGKKEETKLLGVGWDLESDKLTVKLARFPKEGKITRRTILSQIAKSFDPLGIVSPVILKGKLLRQSVEQNGKLKWDTIVDKNLASVWIKLMNSWDAKTLSFTRKYFDATEVRNYELHGFSDASETGLGCAIYIRANTNEGAQTQLAFAKSLVVPTQLSKASRTIPSLELHAAKICCNNLLFVKRELEKAITIDSVHLWTDSTDVIDFLNSSKLKDRFIRNRTKFIQDKMIPVSHVDGKFNPADYASRGCSPEELMENKCWFYGPNWLYKDKSEWPKSIKEYDPTAPNENKHQDSFIEMSLVTKSSVMEQVELLLNYEQFSQFRRCRNTLAYVLRAVQNFKNSANKIIISAVKPSNEVKSFSKQINPLTIDEVERAEVHLWKEAQKAFPPSNETILNLNLFQENGIWRAKGRMQNSGMDHYAIHPIYLNKNCPIVDLIIMDIHRERKHTGMENMVASLRSKFWIPSVRSKVNSVLRINPNTRCWICARFHAKAYAYPEAPPLPSYRISGNLIWETIGLDYFGPMTVKSSDGQGKHKVWGAIFVCALTRMIHLELVTDMTAKRFLLAFTRFVRRWKIPQRIVSDNGTNFVLGNKALTEIVQQSIKEKEHWLKVLKDEKVQNFSNQQKIEWVFISPFAPWRGGQYEQVERIVNERPITYTSQSEVIQPLRPIDLILPNIGNNRLEINTRSVENTYNDYILENSNTANVVQRYQKAMNMAEKFWQNWKDSYLLGLRERHQGNKHTPGKAPKLGDVVIISEPQTPRNCWKLRKIEEILSQRTARVRISEKSIIERAIKHLYPLELAENANNSDSGIRKQEHSSVKQIHYNWAKEPPQNKALVKANSPNHYKWAKQPPRVINGITNVTCISEMARDFDAVSLDCEEMERDLEDEHKEEESKDERKGISQIPVEERRPWDGVGEKRVIINAPIAFVGDDEVEPIGRTFQDNGLRALVLVHSLRDIAWWHRLPEVVIINDVCQMVVVRTTEWAEHIRPFLSLLGRWAKPAVWIGSPIHVEGVAWLEPAQTVELDINRLVFMGAPRITQRGGSALYKKRCQQSFSDDHSSGATKSKRFRPVEDQPSHSEWTQAIRPIRPVEDLQQHQSSSNPRFHPPQQFP

SEQ ID NO: 133769 - protein, 145 aa, Heterodera glycines
HKEEESKDERKGISQIPVEERRPWDGVGEKRVIINAPIAFVGDDEVEPIGRTFQDNGLRALVLVHSLRDIAWWHRLPEVVIINDVCQMVVVRTTEWAEHIRPFLSLLGRWAKPAVWIGSPIHVEGVAWLEPAQTVELDINRLVFM

SEQ ID NO: 133770 - protein, 73 aa, Heterodera glycines
MHETGVETPFLHRLEAQTALDCTIPLLLLFHPLAFGFRPQSLSTPFDHKSNCVSVGRSTPLEEGWARACRDQN

SEQ ID NO: 133771 - protein, 184 aa, Heterodera glycines
RAVQNFKNSANKIIISAVKPSNEVKSFSKQINPLTIDEVERAEVHLWKEAQKAFPPSNETILNLNLFQENGIWRAKGRMQNSGMDHYAIHPIYLNKNCPIVDLIIMDIHRERKHTGMENMVASLRSKFWIPSVRSKVNSVLRINPNTRCWICARFHAKAYAYPEAPPLPSYRISGNLIWETIGL

SEQ ID NO: 133772 - protein, 397 aa, Heterodera glycines
MSDIYVERIETAKYAIELYLDKPLPILPLGVLTSQQRHNLICDQREWKEIADEIQTQVDEIKAARVLYNQELSALQGDAKTEFQRQFRASVNANDLQNFLRRANHKLADTRTLKGNIDRLLQDGPGGTARRNIALPKLSLKEFDGSNWDDFWPLFESTIHADADLDYVQKMSYLDSLLRGEAKKVIQGLLPFSRDNYDLSVSLLKDKYGKNENLIRDLHNQLARLSNSKSLGDDMKLQLELERVCRQLEHYNQDLSSPQIYMSLEQKLSKKVLTRYVDLKNVKLSAMPHGSDWSTDLFRDTFKAAIEQLKQINDIVQRANPEQTQHTYKREKHKSEVKESTLNLAVRYKDQGKTDDRQPSVAVKPKPWRGTSTSSEGSSSRSSSKSSRYGRAPGRKA

SEQ ID NO: 133773 - protein, 42 aa, Heterodera glycines
REFDFASSPLNTAYKLAGTEIVMRHKGHEVRKARASSNSESP

SEQ ID NO: 133774 - protein, 334 aa, Heterodera glycines
WICNDVWMDIFPSFDRPQLGLKLALLSPRFDALVDKHFNGKSELTIWRQIKIRKDKGPGPKLSVRIDDKIVPFPLPDRPLPSKIRFKRLRMCYIDHSVIAFLRSNHQIFDKRGTNLYLSIPSSYSTNGQQLIWDIFVREIWPIFSANIRHLRITNGDDLDHLLRRTSPTILTDLNQLVSIHSFDLLPAAFGDGFDGPNSTISAGQALSKWLHSPRKDGQPKRLRCGNYNEQTDLDWINNFKEHFLRANAISSVSYEIHFYVHVPSIQMVPFDLVNECTKEKLTLAKANENELDNWIMKRCKIIGETAAVHWEDGNWDNNCNNVFFWLFGTTNCI

SEQ ID NO: 133775 - protein, 235 aa, Heterodera glycines
MTGQMQWDRRVPHLSVFASVIERQIFLRQKRQQQPKGQDDECIVRQHGTGIDCGDRETDAGNEEEKEEGDGQQTDSYSDLSDLDVFSSCDEDTNGGHEKTPPVTREETATKEHGKKEGGETKTETEESVGEEGQQQKTESKAKATEEGDTNNNTKASNSGMKRKKMQSSASQRHRHGHCSERRQKHKQHLLDSLICGAFAHRDLTPPELALGYALRQHCRVSHFVRQILQKIFLL

SEQ ID NO: 133776 - protein, 28 aa, Heterodera glycines
MASCHDYFESPHCEACVIIIFKIVRQSF

SEQ ID NO: 133777 - protein, 96 aa, Heterodera glycines
MCHGNWRKDLNSTKCSMGQQSVANAAKMPGKFNFHFATQQSFSENKITYSTSPVTNKWHKEFFTNSMLGPFLEEYAELWLLAADIVPKLSQKRKTK

SEQ ID NO: 133778 - protein, 31 aa, Heterodera glycines
MSKIKSLGSSSGYLFLFLRSDLLKFLHHYLI

SEQ ID NO: 133779 - protein, 42 aa, Heterodera glycines
MNQNSNASYTAAPESALKRTKFCCHINKHSNAYILEKAYEFD

SEQ ID NO: 133780 - protein, 38 aa, Heterodera glycines
KMYFTTEIFFNIKSYAFAVKKRALSRNKLKGIIAIESS

SEQ ID NO: 133781 - protein, 148 aa, Heterodera glycines
DGVWYYRNAFIPINLECKQPPPAEIVKEWMDKYGSAAPKSTKQAKQKVATPLKKSSHKPKLSSADKDSEMLKRKRKHEQMLSNSSTSSSSTSKPLPVSAQKVVSSSALPTPGAPSPNIPKQKQPARPSSAPTPKTALSSNAINETPTK

SEQ ID NO: 133782 - protein, 66 aa, Heterodera glycines
MTDIRGIHTTEVWQASHGLIGKEYCTTQTIGERGPLSTYNYDGDKNTVNFCWKIASHPIRHHPFIH

SEQ ID NO: 133783 - protein, 24 aa, Heterodera glycines
MGRFITAPNLLATFNRCLTCQIGR

SEQ ID NO: 133784 - protein, 1086 aa, Heterodera glycines
TDKNKENKKITLCDFTKYKLFFRNGKFLPHHYSNKLFQQWCVDQAARIEWDRLNFIKLHQKEICKELVKLTNFYAKATEVGAQVKKKIILPSSFSGGPRNMHESFMDAMAIVNEVGRPDLFLTFTCNPKDEDILKSMISGQQAFDRPDIVARVFHLKVSQFLREIIDGKIFGKVAGFCYTIEFQKRGLPHLHMLLTLDSANKWKNTNDIDQFISAEVPNENIDKELYDLVTALMVHGPCGPANAMCWCQKKKKCSKKFPKQFREKTEINENGYPLYKRPNDGKTFKKGLENREEQVDDNQDIVPYNRYLLKRFKSHINVEKVADIKAVKYIYKYIFKGYDAATLRCVTTNGNVKELFYDETGNYLDARYLSPVEACWKIFKFPLQAKSHSVQRLPVHLENEQIIFFDENDDDETIIEKRDKSKLMAYFDFTNENPGMSDILYTEMPKFCTWNSKQGKWLLRKNPEIRIGRMYPVNPTEGEKYYLRYLLLHVSGKGFEDLKTFNGIIYNTFAQACLARGLIKNDDEWKHCLNEASHFKIPTALRNLFASILVFGEPKHPENLWEQFKNNLAEDFFVNNTINAAYKLALSYINKHLIREGKSLADFKLPQDYSINDDEENIDYEEEKTAYNLYNLMNSEQKCIFDSVKQVILGQIKQKLIYIDGPGGTGKSFVLNAIFHLVRSHKKQINNMAFSGIAAILLKKGRTIHNRFKFPLNINANVVSGVVQGTKAAEEIIKSDFFIIDEAPMTPKFALDAIEKKTTITKCNHLFGGKTIILAGDFRQTLPIKKFAIRSEIIDLTIRKSIFWSKFEQMKLTVNNRAKDEIFAEQMLDIGNGTLGDLIQLPSECILSDDSNLTKEIYGDIFAHNFNELKNRMILSPYNDLVDHHNALALENFPGEYVTYLSIDEVETTHNFPVTPEIMNSFNAPGFPLHKLKLKQNCKVMLLRNISIEDGLCNGTILQVLELKDNLLRCIILGDDKDGSEVYIHRISLITENFPVPLKRHQFPVKLAFAATFIKGQGATYEKIGIDWTRPSFSHGQTYVALSRVGSWQQIKIKLPADNKDGKIQYSLERNFINPNKLFKKLKVL

SEQ ID NO: 133785 - protein, 361 aa, Heterodera glycines
MVRKKQKLITDDCAPSTSNDQRTNDGFKAPGQKSGQLIETVQSSVQKRSETIHNSIELQSKEKSTERRCLKRKRLQMEEVIDLDDLPDEFFSPSISNEKIKEYDRNRKISRFQMNEEQRKLERELNLTVVQARRELIKNQGLYLKADQAIDYRLNVFRDPGGDPKDQTVALIAYIENYLRENYIYSKSYEMMKDVYEEALEESKKTGDEIPDVQMLFDIREGTDLRRYNIPRSNEVCAIIWRDANDDIPAANIVVHAKGSKKLKRFFHLVQWLNPCVTRYFIPQWCVDQAARIEWDRLNFIKLHQKEICKESYSEIDKFLYAKATEVGAQVKKKIILPSSFSGGPRNMHESFMDAMAIVNE

SEQ ID NO: 133786 - protein, 78 aa, Heterodera glycines
MDEKVKYRKYGLYRTYGQKKVVLEVSNMAKYGKNMDEKVKYGKYGLYRKYGQKKIFSLKMAKYGKNMNEKVKYGKYGL

SEQ ID NO: 133787 - protein, 242 aa, Heterodera glycines
MNRRWVCNDVWMDIFPSFDHAQLGLKMALLSPRFDALVDKHFDGKTQFTIWKAIKIRKDKDEMPKLFVEGKSEGFPLPDRPLPNKIIFKKLRIEYIDHFVIEFLRSNQQFWDKGTTLYITVWEKNEDNKPIWDVFVAEIWPLFATNICQLCFAGAEFLDYLRRLISPTILSDLNRLDSIISCHLFPDVLADDDDFDGPNTTSAGQALAKWLHNPRKDGQPKSLHCWELKASTNFEWLTNFKE

SEQ ID NO: 133788 - protein, 70 aa, Heterodera glycines
MTIPSLEAPAFYFTKALSHRQKVMRLYKRAIRETQSWHAQDLCDWHNIFLLTDVANFGCTEMFPKQCDDG

SEQ ID NO: 133789 - protein, 201 aa, Heterodera glycines
MLFNEELKISRNFQVSFAKDVVKASDQNDLAADQIEFLNQTLGIGQLTKLILAFYTMTVYALIEFALNWANVIPLNAILIGLATFKGLFFLHSSNLRCHGFLCLQNCLVDSNWNVKLTNFVTEEIIGDKLRHNEMKHISASELIKEKKAKEAAKKMKSGGGGTAKGTAADAEGADEVDSEAAGAKRRKRQAAAERKRVENS

SEQ ID NO: 133790 - protein, 103 aa, Heterodera glycines
MNISAKAYKFRGNETEIVWRAVDFHGELKQCVTKLVFEGGTSSDDATAGHSSNDKDIECPEWQIREVNVSAEFGGDPLTDEPPLIRAEYPPILAKNRRLLRQK

SEQ ID NO: 133791 - protein, 25 aa, Heterodera glycines
MITNAAQLAQAKYWKDWKNRKKVLN

SEQ ID NO: 133792 - protein, 174 aa, Heterodera glycines
MCFNFAVCKHAFTFDNTIYKVNGEFAKVIEKWGITKDKPDIKCHGKAMEAKVGCQTYRCMDEYNNDVFVINGCATDRGNCSHTELDEFCKLKSKKLRTKCDFCYDEDTVCNANNTELLIKTYIDCKLSMDYSWLYTPSAELKKWLTNRNMEKNLRTCAKRIYKCQAFTCTDKGE

SEQ ID NO: 133793 - protein, 126 aa, Heterodera glycines
MSLFRRLAIFIVLLAFFPLFCGALKCVVGSHGLQKGHDKDFEHTECANPNHKRCTKIKCSAAPNESFLEMKCYPDDTNCDFYNKDVNEKVGYMASSKWNCTCEFGNLLNDDPFTSGHFVGWAAEFN

SEQ ID NO: 133794 - protein, 89 aa, Heterodera glycines
MSFLAAPEVQCSRMEEFQQLAKFFEILNNRLLRSIQKNAADNESAACGTTGQKKERIYYSVRDLGMEVRGWVRGEYFQIQHHFMFKVKY

SEQ ID NO: 133795 - protein, 81 aa, Heterodera glycines
MRLFCLPNEAFENFHLPSLNPATVLYITLEKTSLEKDLFNPQYEWCVPKNATLALINKNYKKLAMATHPDKNNQCSGKLFT

SEQ ID NO: 133796 - protein, 22 aa, Heterodera glycines
MATTSQMALEPPIMVTQDTGMK

SEQ ID NO: 133797 - protein, 31 aa, Heterodera glycines
IVLKKGAQKTHFCVKIFSFGRHFSSLEITIL

SEQ ID NO: 133798 - protein, 195 aa, Heterodera glycines
MFEAVAMPHSIFICSARRTTLNFRFIFVKKIFYLHKYHAGHRFVKPTILAIFGKNTAQLFALKQQSKFSFLAIEKWKQIKKKLGYRNQGCQILIPLSKIRPYFVEKIAKMSDFTKRLTWWIFGNGLALLKNDASKNVFRLSKSGLDRPRLPLASHPIKCQNTTGKLTFTFWLYNGARIEVLILEDREDEVKKNRF

SEQ ID NO: 133799 - protein, 241 aa, Heterodera glycines
MNEIKSGNFDASSGIEWLNKHSFAVFCDGKIKEEINDENLEKLRKYFRESLLNGTLTTDDENVRDLVKKVQIDEKKAIIGKMAKDSILGKENKENFKNFLDKLIIGIEKTAAIIKAKNHQFSHQKNNRQLNIRAKRGVKDVLCRMCAAVIALIPYIMICGFLFYLSVMQLKENNTDHIFYYRLWNYLRYFDGITNYYMYLVGRCLPISRLIIWAVVIFWTGIFLVRVVFSYSNSFLFFCLV

SEQ ID NO: 133800 - protein, 73 aa, Heterodera glycines
MQHHHHLSCAFWADQLSICKSDRDRRGARISNDKEKIDQRDDQSLQSIAENVLSVCLDKQNVPRWLFGGRISV

SEQ ID NO: 133801 - protein, 188 aa, Heterodera glycines
MLDPDTGLFSHPDAQKQMTLKELIVKGYLNPYNTRIMDRASGTDMHLLDAIREHIVDDVAGTVRDTLTGRVHDFATATRQGLVKEDSGVFSVDRRTSRTSLGDAGSPRIVERKLQLTPYAQEPFQAASSTGSVGSVGGGTTHGQHASLFDAAAAGPVVSAAKSRDVWSSSNGHGTAIIRERVPMPEHA

SEQ ID NO: 133802 - protein, 155 aa, Heterodera glycines
MAPPKNGTPKENRFMRRLRKMLKAAKKLYRDWHINHLAPIGFIGIYMFVGIPLTLITLNELGKFLYKCINEIMAVVSNRWNAQKEYERKTTHFFKDQRIAQKDLIFDYDLKSMSEDKKFSESSAGGDNLTMDAEKGAFLTAEGQLRENEAKTAIG

SEQ ID NO: 133803 - protein, 39 aa, Heterodera glycines
MTESQQKRAKDIVESLDWIKPAEESTNPIIAKMESMQVN

SEQ ID NO: 133804 - protein, 116 aa, Heterodera glycines
MEADVSHEVHGQSNGHQTKKCGEMKQRIFINRRCGHGNGVQVDAPIKEQSEHAQIDGQNAGGAGQNGADGRSEHHQNESHAEKGERNCKKMDKQKDIRYNKADSPVCIVTDGILSN

SEQ ID NO: 133805 - protein, 830 aa, Heterodera glycines
KVITINFHAIFPNSTMETVMKKWEHSVYNFAMNSRGDPLLKLHVTSEGLVSEEVRRTGIEVLPLMPISLSVIILFTVITSLKRDQIRSKPWEALVGVFCPTVITSLKRDQIRSKPWEALVGVFCPILSVGASFGTLFWLGFEFLPLGFEFLPILVVVPFLILAIGVDDVFIFLHCWAHTDPSKDLRERVADLLGSAGPSVTITSLTNWLSFTIGIATPTPAIRTFCLFISVAVLYAYLYQLFFYTAVMVIGAQREADERNAYLPCIKRVPKRSPKVATLKKETNLWRLGSTNLWRLGSDLVDRYVDFVMSWTARILLAISLIIYWAFSAYGVAQIKVAQIKVGLTSEKLFLDDSPLLELVRLQNNVIFKEGGQMAVFVNSPGDLRKPMAVFVNSPGDLRKPSAIPKIMRILERFEQSNGSVGPSSTQMWLNTYLPFIGLQNRGSINRGSIDFRYKYLYDFFSIPEYHRWSHFVSLGPKEDCLNERPSCINKFFDCLNERPSCINKFFFSTGFQNAVAWSDRLVLLQRWRQLAADYSQLNLTVYEDFSMYADQMYADQLLSIPSVTIQTVAFALLCMTFVAFALLCMTFVLVMFTPSISTILPGTACVLSINLGVFGLLFYWSIDLDPISMTTTLMAIGLSVDFVAHISFHYYKGMTTTLMAIGLSVDFVAHISFHYYKGEIEDSRERLRHALSSIAWPMLQAALSTVLSLMILVLIHAYMVQVFVKVVLLVVVLGLVHGLVVFVKVVLLVVVLGLVHGLVVLPVVYAAIPFQKSGATAKPKVPPLNRRRTAVTQKRRREMEKKNGRHQREDGTESKEEKEKEWFRDSSRT

SEQ ID NO: 133806 - protein, 89 aa, Heterodera glycines
MAQKLAPIINGWTKCLDEFSVEHEGVQYAYSDFCGAQCETSDAVNIFLTVFRDVQHRGKGNIKLTFPTIDVFGHRIYLAHNIFQVQLNN

SEQ ID NO: 133807 - protein, 208 aa, Heterodera glycines
SIPLFPFESPPFPPFEPPPLSLPLSPISSLSIVPPQYACVKCGQSFSIKRELSTHHRIHSGEQPHKCLQCGKEFGTRQLLKKHSMWHIQCGKEFGTRQLLKKHSMWHIGKRSHTCPHCGKSFFQKRSHTCPHCGKSFFQKGHLKGHLTQHLMIHSGDRPHQCELCDKTFIFKFDLNRHLKIHQERKIKKCLNRHLKIHQERKIKKCGK

SEQ ID NO: 133808 - protein, 106 aa, Heterodera glycines
MGAANLASLSPWNQAASNNESANGSGFLRNHHKWTKWSPIVVSFVQRLMKTKAQFGDVPDKIGVVKIAIIRMVGRFPGSGYGDGMFEFGVRLKSRGFRGATLIQWL

SEQ ID NO: 133809 - protein, 256 aa, Heterodera glycines
MTSIPPALAQYQICPTSPLEGSSVTMSFPAEKNCTLPTETQPIMNKSILYIPIRIPRSFPVFKCWNVTTVACTESFLRVVTLDHPPKKFESETSLDDCQNSLNHRPMNRISEKRWESSKPIRKEYGWYGVNCYDNVQTVIEEGTGGILDGEMLVTSWGDSLKIEQFTIGKDDWIRLPGAVELLMWRIPSGEYCDTHFSMGPVTTETWPGQAVVVHELQYTFPISKDQDRKNQVIGVPKEAIKTENNVLIHYIGEAE

SEQ ID NO: 133810 - protein, 176 aa, Heterodera glycines
MVPTAEEEEAKTKTETEHLEMIESETEEGKAGKGKMRVAEKGGKASRLPKMMQRKGKAKERVAEDGDKWRKMPKSPLMSVAHSVKTRFTRLTTLRQSKDALPMSRSLEIGRQQSRIPTVCGGGDPMTKSWSLETTAMQNNNNNKNNSGSEMPRRGPITTLMPSPRGMPRRMPTEGG

SEQ ID NO: 133811 - protein, 388 aa, Heterodera glycines
IPASVFCIPIRLNLAEMTVDIVTPGTTQTATRTRTRRTASRRRASTAARSVTVPGASGRSTASNETTTTTTADAATNTDATGAATVTTDAATTATTPPTTTTADGATVTNANEPGATTATNTEAPAATTPATTTTADGATVTNANEPGATTATNTEAPAATTPATTTNADGATVTNANEPGATTTAATTNTEATAATTTTAIADGAVATNTDATGAATATTDAATNTEAPAAATAPMTTTTTADGAAATNTDATGAATTPTTNAATNTEAPAATTPATTADVTSTNICICAVFQGPPAATNGTAGANVTTTTTPATTNVNNNTAPENAAAASSSSSTTVTDMTRGRMTMHGTTTTTITAWHEEKWRSEWTRILQRNCGPTENKLKNFI

SEQ ID NO: 133812 - protein, 109 aa, Heterodera glycines
MVRATTARTRASAARARSIKINRRNAKKARAAIGRAGHTRNAIAREKCMMCLGKVSSMTRVTMGCVHEFHRRCLYRWLKYNTNCPVCRFNFMRAIPPEEPAEEQQQQQE

SEQ ID NO: 133813 - protein, 46 aa, Heterodera glycines
MSPIFLGFYKGLLPPLVIETPKRALKFMAFDRYWRVLRSDALPTWL

SEQ ID NO: 133814 - protein, 110 aa, Heterodera glycines
MVVKHLKGEKKDTPPTYAVEFKASNTKLLSRQQIYDLVAQLMNELSPESAVNLTQPDLLVIVHTIRTVTMLSIVANYYQRRKFALKLATESEPKEKSNEKQNTTHEEGET

SEQ ID NO: 133815 - protein, 32 aa, Heterodera glycines
MAAPSIRLITTSKAPPATGHRSEQRRPSKPSS

SEQ ID NO: 133816 - protein, 226 aa, Heterodera glycines
MAPFAFQSDPNVPTTTYVIRKKPQQAREPVFVNIDDIEQFSWIEPLQKVVEERLNEPDYKTIWSAHFVLVFSLDTLKADQHAQDAHSYKEVEHAFINTLVRGDVSSLTWVESGNQYFAQSRDQLGPGLELCSVYYAAVNFRDVMLAYGRLPPDAIPGQFADRECLLGMEFAGRLQNGRRVMGILPAQALATSVVCNRDYCWEVPDGWTLKEAATVPVIYATAYYAL

SEQ ID NO: 133817 - protein, 95 aa, Heterodera glycines; identical to SEQ ID NO: 125597

SEQ ID NO: 133818 - protein, 47 aa, Heterodera glycines
VQAWIQVSRSLDFSWTWIFLDFCPGNQGPGPTWNPGPGPGFFQNVDL

SEQ ID NO: 133819 - protein, 43 aa, Heterodera glycines; identical to SEQ ID NO: 126089

SEQ ID NO: 133820 - protein, 172 aa, Heterodera glycines
MDKWAALVLLIALINALDSAVVRQQRAANADASKPEPNNEKPGNVDSDKGNSDKSQGAGTEGKNPDEPKESQEEDEPNPKKPKESQEVEEDGPNLEEPKKPGTREAEGTWRKKGQGGGGKKTGGKGGKNAKKRGKRAPDEPAPKSPKMPDKFDLKLPSMHKTLIVLGSDPIF

SEQ ID NO: 133821 - protein, 136 aa, Heterodera glycines
VSFYSRGGYQFAAKKYGIEKEKPTENFKNMEEIDEYGFMHDMVLLLFDGCVICNGKEVPNVTLSLLQHMPQGPLVDSCQEYVKRPSKALIVPMKRVQQESQGNFAYAVLLMERLCPEKKPATDIDNPANKFYMQML

SEQ ID NO: 133822 - protein, 156 aa, Heterodera glycines
MARCVTSLAFLPIGDLTPGIIALDMALPDELTPVLDCVYTRTLQGDDRTNNHSEAANRRLQCAFACSHPSIWHFIDLLRKDRNLSDDDFAKCSTGQEPPQKAKKYREADRRILTMVQNYLPLNNVDTNIFPIHHPFNHHFIITFLIGISRNYEMRP

SEQ ID NO: 133823 - protein, 200 aa, Heterodera glycines
MKGAGVHAAHWRDAFLESKAKNASTRAVAQAAARGEFIRTPQNSDYVRLRDLLPEQRDVREAAAEEWHESTDSLRNERWAVARRDREIKALKRELRKEQVEKQKEIEHLEDCCNEYVQSMQRILQMSATQQGLLRLFGKAAIMAKIEDSEEFNFLLEDQELLKIVLGEATDVAAKAAKKRKKPGATPPPQGAVAQQQTVP

SEQ ID NO: 133824 - protein, 316 aa, Heterodera glycines
MLEQKAYVLNYMPKIYQVHQNERKKKRCYLNVTINGKDVEALFDTGADVTYVRNSTANQCMLNVRRGDFPQARAANKTSIRFFGSALAEIKLGEFEGKFPLLVSEDDCCPCAAIIGTDLMDYITEQGEEEIGLNFKKGSVRIGHIHLPMVAAVTIEKKPIEIRLLTTQTLPPFSDTFVWGQLNQSFDAEKIFITTEREHQYFPLRVGKCLASPGSTRNAPLRLLNFGNCPIKVHAGSRLAILEAISDTTQINSLKEEDKNEDPNIMNEAEWSKFKAEIDHISPEADWTDQPLEFPKEVEKIKSILERTSHYIGCPL

SEQ ID NO: 133825 - protein, 15 aa, Heterodera glycines
MDATQLTMNEANREF

SEQ ID NO: 133826 - protein, 38 aa, Heterodera glycines
MEIFDEYIIVDEKSLSINIGSKFNEVTQFAAMCLPIDS

SEQ ID NO: 133827 - protein, 57 aa, Heterodera glycines
MKTLRSQAGRQSMPMVVNFGRTGDAQRTGQVGGRRSMPPSVVPANLGGVPPYQETTK

SEQ ID NO: 133828 - protein, 226 aa, Heterodera glycines
MLPPSVGGGWPTAYATQQQQSINAVTSSSAKLLPQQPFYAAGNYSSKAAAASMFGVMPRPPMLCPWGGGSAVIGPPLPAAYAAQQQQPIDSIPSSSSWNFGQQQQYQFAADLSQQHHKMAGPTSSTAALNPTLFVPTAKVLDPELVDEGLKKAKQQVSSVANAQSSDEQRRKLLTEAEVILSTAVSTDVNSFKCVCTHLYTLLGKEDQAKEAFTNCNFGYGNLHLE

SEQ ID NO: 133829 - protein, 160 aa, Heterodera glycines
MDSLFDAGKNEGRKKDEANGGGDGNMLRNGQRKRSQRKDEEHQVEAQNEPNADKATVTSFNLIWPHFKVPPNHAFSAVAFSFSANSSAVHSMGWTDSSTSRTFFESDDSGMPLRKCVGRLGVLPKRDGRQNEIRWTERKALAKGMAETFGMNSCLAQKCI

SEQ ID NO: 133830 - protein, 213 aa, Heterodera glycines
QILQMHFCARQLFIPNVSAIPLANAFRSVHRISFCLPSLFGKTPNRPTHFLSGMPLSSDSKNVRLVEESVQPMEWTADELALKEKATAENAWTPIYRYRGFVGVWFILRFNLVFLIFSLASLPLSISQHIPISPSIGLILFSSLVFAGIKKYFTRIVAVVSVDTASRSIYRIGYPSVFATRRSRFARFLDVQPLSTNSDSVRGVARLRFTDGF

SEQ ID NO: 133831 - protein, 161 aa, Heterodera glycines
MEQFLKQENLDYQVQSTDFMTQANSLEDFFGKVVVDNIVQEKKKAYAKQPNDMKGIAVNWDKWPNVARKVEDANVASKRVSQKKPGTISKQLGSGTSVTQKSSATESAAKSTTQKSSATLRQKSEADREKSKKEEETETETDEEEETTDNEGRGGRRRGKC

SEQ ID NO: 133832 - protein, 33 aa, Heterodera glycines
MTIVMVCRFRFVLALVVTEIHRHIDKCVFHSLQ

SEQ ID NO: 133833 - protein, 137 aa, Heterodera glycines
MAFFPELQCWHGFSAEAELKVYLPELGLHNSGIHMPLKTYSVTKSTKNCPNHLLKCYKSQCIISKDAIIERIDKKLFPENATYEVEGTELEGERTAENFDQIIYPSEISIMLARKMGSKFCKLTHYWAKKKRKFKIF

SEQ ID NO: 133834 - protein, 137 aa, Heterodera glycines
MAAAAYSFLAMHDADDGPALAGINLNYRHMVFMYHDKRRALNKPPSSGRKGGAGGGGGSADSPPSSAVAAQLDESPSSSCYFSLHAIKFYFQVVHRHAVSKYRKKKKTTKNCYFFNVKFAKNNPSSCGCAPKFRRRI

SEQ ID NO: 133835 - protein, 39 aa, Heterodera glycines
MTEQMCRISAERTVGQQIEAVMTYLANVRGEVYENAMCW

SEQ ID NO: 133836 - protein, 102 aa, Heterodera glycines
SFSYQKKKENYYKENLFIFFKLQKQNSAAFWGLSFFGVFFICPLALSERKYENFCSAKWLFVGISGRNDGQMLDYSMNESADGRQKKYCHFLSDEFKFHWKK

SEQ ID NO: 133837 - protein, 21 aa, Heterodera glycines
MARCTVTHPINQCCKDHDKYV

SEQ ID NO: 133838 - protein, 63 aa, Heterodera glycines
MNRTAVPEENGKMEHTFERMGNIQWGVGELEWEAWMRQLDGTGYQTGHKYRLPILLEPMTKKK

SEQ ID NO: 133839 - protein, 293 aa, Heterodera glycines
MLDLVGKEKSYSQKIGWGRTVRGRTELVVDILATAGFILDAESALKLRFYIVSFLNYAFPNSEELSASALPPFASVDGSSQFVPPATTTTTAAPLALESSTVEQQQAQPNPFKAAPPYSVYDIANGNFTVLGCTAQRPYLFLTLIARQWAALLMLFMGLERLLFVLYPLWLRSIQMNWFFFGIVIAPQAFGCLFCIIAYFMVHHEHALRKFGGNRLKLASEKRKLRKIKWLLITSSSFVAFPQMLLLFLQLIAPQEMFLIKMLISQLFLAKCFGNILMYNRAIASTRFGFIEM

SEQ ID NO: 133840 - protein, 27 aa, Heterodera glycines
LKNRFFQKMIYQKLICKIFKCDSKPIF

SEQ ID NO: 133841 - protein, 95 aa, Heterodera glycines; identical to SEQ ID NO: 125597

SEQ ID NO: 133842 - protein, 112 aa, Heterodera glycines
MGEMVVNEIEWARIERPLDDTQLAFAVQNDMHLKKRTDGATTLDLEAFMMNPFFVRMIQDEKIKQILCRILFDERGMLKYGYPQTKISNLMISLSLNKLKISQKTLPGLTTF

SEQ ID NO: 133843 - protein, 16 aa, Heterodera glycines
EAIPEGFGLPINLGAS

SEQ ID NO: 133844 - protein, 315 aa, Heterodera glycines
MVEHLALVAPIVNAGLGRLENFGRNMGEINGGEIRNLPPIGHLFERNGDFEDSWVRERPPLNSPLFESIRHAYLNVGRAENRGHHLPPSFPNRAVEAYATGGQPTAHYTRAHVIQQLHTFYTQPIAVKPTVVQYQAHLQQQFAPAAPNRIHSPVSANFNRDANIGRNQQPQTFQHKERGQQVHKQIAYASHDHLPFQKGTNSRDGNFGQINPVNEQNRYYQSNQVDPNMIMAQTIKSLDNFSYSMTLHHLPELRGNAGADEVNVFFRQLDAVSEDWPNDKRLSAALKSNSRVGQNAQPIPPLPTIPSGMKISEER

SEQ ID NO: 133845 - protein, 233 aa, Heterodera glycines
MAKILSKIDDNGDISSADQTSEYRIFQFVLQFLTKCNLTEQNKINVQNCFCILSFFVEQLLENAINAKHFPLVGIESISMARERFAEKQQQLCADKSISKEIRKYFGESIVNFAKAVELDFDFDNDIQQIVPVLLMQFEKLKENKVWNNANPKFFKTVEWNLLEFELKASDKKEKWEQIEKLRNNWEDTFGKMEQENAKFEEKMQNLKEYLGKMKQEKSVSRKKQLQVKFIEK

SEQ ID NO: 133846 - protein, 107 aa, Heterodera glycines
MHNFLKDTEKQKIKFSQILFETVTKYNDNVNYDEHRQLISFPLSMGVHLVKRFSALITLISQRFFDYKIQIRDNNLLEINSPTWLLPYYVNYENENEIKQKEAKEIY

SEQ ID NO: 133847 - protein, 25 aa, Heterodera glycines
MYAAAKEQKKNFWLTNYTYRKKIAN

SEQ ID NO: 133848 - protein, 18 aa, Heterodera glycines
YREAIPEGFGLPINLGAS

SEQ ID NO: 133849 - protein, 130 aa, Heterodera glycines
MERISLFVNIAGIVFIFFCIGSDAVSISDCAERRFPGSESFVCVCNRTFCDLPIGPHRLGKNDNNAIVYISDPAKFRLHQQQVPIEVEYSDQNRRKDKPQRICSSDDEGMEKPAHFGSNNSDLANAIKKC

SEQ ID NO: 133850 - protein, 62 aa, Heterodera glycines
MKGSKPLKDSSKEYQTGLGSGGAFTDAAGVNLNALSNTTRATLLRAYFDKDIATFFTLLWKT

SEQ ID NO: 133851 - protein, 65 aa, Heterodera glycines
AKNFFYFREKIENFPKKIPVDRARKTMFWKWPSFFWENSLKNPKIQKPENRFLSLARKILKIFEI

SEQ ID NO: 133852 - protein, 54 aa, Heterodera glycines
MPFAVHLCADGPNNVAVQRKSLSRLEFVDIFVNDREAIYKLWNWYHFIGFLGPK

SEQ ID NO: 133853 - protein, 17 aa, Heterodera glycines
MTNFLRFFVNLLRKNDM

SEQ ID NO: 133854 - protein, 20 aa, Heterodera glycines
MESIYAFNPFVNSVSTSLGL

SEQ ID NO: 133855 - protein, 113 aa, Heterodera glycines
MAYFGQQKEQKQELHDGAMELNIIGEGTSKNELGFKEESIRAGFVHTNLSSAEDDMPIDEHGFSEPITRAAFVRKVFLVIGVMTKLNKLFIQTEKIIEFAMNLCFAFSDITVV

SEQ ID NO: 133856 - protein, 140 aa, Heterodera glycines
MAYFGQQKEQKQELHDGAMELNIIGEGTSKNELGFKEESIRAGFVHTNLSSAEDDMPIDEHGFSEPITRAAFVRKVFLVIGVMVITAFCSSVSVLVAMGITTVSCVGIALLTMVTKRDITSRCFIHCIFLPFLVFGFFMS

SEQ ID NO: 133857 - protein, 25 aa, Heterodera glycines
REKKIMFFSGTLYLLVHISFFETVC

SEQ ID NO: 133858 - protein, 350 aa, Heterodera glycines
MNTTAPTDIELFLLFLGGAVELLINFVGIPLSIANLILVARTSVIHPNMKAILIFQSFFIILRGCCRFVICLFKFITGNQFGAKHMQFFPVLLKIYFIGIYARNFVPHVLIVERILATLFVRTYEKNRGNLFTILWMPFALIIPIYIATTTPSPHDHKQPITNLIIIAVQLLVGSIELGIFYQLSRYNSKIYQKMFQNIGSNNLSIRYQLSENIRIGKQLIPPLSLNLGNIFVGTIILLWDLLNWPYNELIANFCINLNSFFGLLIELFIITCHPFLKRDLCQFLNRIGKMFGFNHLAYNHRIGVTPSLSALNGIAQRNLISGKAWINTQSKPEDHFAILKEAWEKGSNP

SEQ ID NO: 133859 - protein, 38 aa, Heterodera glycines
MVMKFVNLNWISSAISTGVEKKITFKLLSFYDEQIFCF

SEQ ID NO: 133860 - protein, 111 aa, Heterodera glycines
SKYLEYDFESNETIPLFQKLRDEKTADYSQKTAEIDTEMVLLITNPYLVAVDKIKQLLAILKTIPDKQCDQIANAWRQIRIEYAKSLIEKAQAAAAQQEKEEQSKRRISLI

SEQ ID NO: 133861 - protein, 43 aa, Heterodera glycines
CPFQSSKINPIIFIAIRHLSVGRENGSRGDFFIYRRFDQLHFM

SEQ ID NO: 133862 - protein, 129 aa, Heterodera glycines
MANTGGKIAFENSTVVFNGGKIAEPNGTTNWEITLNLFFVNIISLNDQQQNNDQFYEMNVYCHDKNTQPFYHASFKCWNGGCQRIINVDEQKCPKNAYDIQLWSWDNWNQQQVFDREMVKICFKSINKA

SEQ ID NO: 133863 - protein, 57 aa, Heterodera glycines
MAKKYGILFKIFIFLYTSKDANCGQNKLILDLSPSFHENSQIRKKSNHTVISNDFMV

SEQ ID NO: 133864 - protein, 39 aa, Heterodera glycines
IRHLSVGRENGSRGDFFHLSEIRSITLHVNISGHYCTFI

SEQ ID NO: 133865 - protein, 207 aa, Heterodera glycines
GDDTNESEESSLELIKCMVENTKTEADIDAEDNDGNSPFMLAVMNQRTQIVRYFISKGVRIDRTNKNVKFLVEQCGGDIELADSDGASAIFYAVAKEQFDVVQYLVSKGARIDQLNHKAKFLVENGADIEVVASDGLTATQPPSPDLHFLLVHTHPRPSDKKNTSDFAPRRSTMAHECYGFGNVRAIKHAHRARCWGICAAPQAAHK

SEQ ID NO: 133866 - protein, 47 aa, Heterodera glycines
MIVILLSTRGTAGSDIWFMCLVDRPMAHNSKKMKEFNRIHEMKTKEN

SEQ ID NO: 133867 - protein, 218 aa, Heterodera glycines
MGDAIQQLTAALQQLLANPPQNAAPALNAHALPSLPTIDCSEPSDDRSISDWLERFNFALDCAAPQLADQSKVKLIMTKLSEAAFSQYSKSRPQSIWIDRYECLRASKSDDENFRPFINRHKRLFRDFQFDKLNEKFSCLMLLTALKSTKDAELRKRILSKLAADGDLIEYDGVVEDLQMYQSTIAEAKVIEERPMASRNLMAVKQKQRPMKPTQKGN

SEQ ID NO: 133868 - protein, 930 aa, Heterodera glycines
MGDAIQQLTAALQQFLANPPQNAAPALNAHALPSLPTIDCFEPSDDRSISDWLERFNFALDCAAPQLADQSKVKLLMTKLSEAAFSQYSKSCLPKKVIDFDFNQTEERLKLAFSRPQSIWIDRYECLRASKSDDENFRPFINRHKRLLRDFQFDKLNEEQFSCLMLLTALKSPNDAELRKRILSKLAADGDLVEYDGVVEDLQMYQSTIAEAKVIEERPMASRNLMAVKQKQRPMKPTQKGNQVQNQTQRVCWRCGKFHHAPSECPSIKTVCRKCNKAGHLEAQCEKHHEWLNRNKNGKFQGKRACTLRIGGVMVNIVNHPTRLIEITVEMNGRKVIFVLDSGAEVTVINEETHCLIGKSQLRRCQEQAAYHDGSKCTLLGRGEAKFKFGDTTKNGTFYVSKSGSLNLLGIEMLDAFGLLDDIRQKVNSSLHLNAIEKENGDQATIIKDLKKIFPEIVADGLGHCKKVKAHLSLKPNATPIYCRPRPVPFNTKSVVEAELERLQSMNVIRPVEHTNWAAPIVVVKKANGSTRVCADFSTGLNSALLLHQHPLPLPEDIFATLNGGRIFSQIDFRDAYLQVELDENSKELCTIATHRGNFQYQRLPFGVKSAPGIFQSIMDSMLAGCAFAVAYLDDVIVVSRSPEEHKKHLQEVFKRIAKFGFRIKPEKCSFFKMEIKYLGFIINKDGRRPDPAKIQAIAEMPVPTNLSTLRSFLVMINHYQQFEKNMRFIRQPLDNLLKQDVVWSWSTDCQKAFDQVIQILQSDQLLAHYDPSQQIIVSADASEHGIGAVISHRYSDGTMKAVAHASHSLSPAEKNYSQIEKEGLALVYAVQKFHKYLFGRHFLLQTDHKPLLSIFGNKKGIKACTANRLQRWAIILLGYDFEIEYQQTLEFGQADVLSRLIAKTPMPEDDIILAKLSTSATIGTLNSVL

SEQ ID NO: 133869 - protein, 73 aa, Heterodera glycines
MDMAMARIGAVGDGGDRRRRTWCGFVVSRPEEENGKDKKKNEENGKDKKEEENGKDKTKCRHAKSDEKFWKIY

SEQ ID NO: 133870 - protein, 98 aa, Heterodera glycines
MDEQIAKKLQTSASSIYSWKRQFGYVEKISHERDEKLRIIKQFQKRKQECAEEPITTNKIAKELGVGRNTISRWKKELGLSTHKQYSKQDKFNIVNPI

SEQ ID NO: 133871 - protein, 52 aa, Heterodera glycines
MFRWDHGPIRPSDSNPTEDLGTLSGSGDLRLCPQYYGPPPPLKCPNVPILRF

SEQ ID NO: 133872 - protein, 92 aa, Heterodera glycines; identical to SEQ ID NO: 124679

SEQ ID NO: 133873 - protein, 138 aa, Heterodera glycines
MYRIRVRVVQSGYRNENKHICDLLIICAKIVDKRKGNLQWKIPFALLQRQNQRRSERTAERSHHSLRSNQTNISALTHATTSSSLAQSKNFTLYAYNGQMCIVHAYGPTMLAMPLSAEGMAECRTVEGKLAIINNMVD

SEQ ID NO: 133874 - protein, 115 aa, Heterodera glycines
MKRKRKKEKRKRKRKKEKRKRKRKKEKRKRKRKKEKRKRKRKKEKRKRKRKKEQMKRKRKKEKRKRKRKKEQMKRKRKKEKRKRKRKKEKRKRKRKKEKRKRKRKKEKRKRKRKV

SEQ ID NO: 133875 - protein, 249 aa, Heterodera glycines
GRRATGWPDLTQKDTLSGALPFYRLSKESMKVVVFHWRLAAPTYATPLMILHKVRLESSSTGSSFPAKFAKPVPLAVVSLDSRRDSGNLVDPFVRVGKPTRHLATLRESCYSPVYPRLIKFPWLNIQSTGQKSDTVNVHKDHPSPLFLDSRIPRVRASSKLVVQRQPKCIPRAYTQLKRSTSSSHHSTHHPRKNSTQPRAKAACFTQQPGPDLSQFFSRSYESNLPTSLTYIILSTRGCSPWRPAADIG

SEQ ID NO: 133876 - protein, 82 aa, Heterodera glycines
MGNLYLKRRIGFNIVQSYIPTGLIVIISWVSFWIDRRAVPARVTLSFTTLLTMTTLGNGMRFVLPRVSYAKAIDYWFGGIYF

SEQ ID NO: 133877 - protein, 257 aa, Heterodera glycines
MYTRGGELSLAKPPLGKDSVVPSPKVSDTVVEPYNATLSVHQLVENTDETFCIDNEALYDICFRTLKLTTPTYGDLNHLVSITMSGVTTCLRFPGQLNADLRKLATKFVCGCVLFRAVFGSLQHGALPPAPLLHARLRPAHFPRQSAVPGIVRPRTYPANVRCQGSLELWTRPLVSPFHMTEYDGRVRPSPRALSDGGGHFPGSDEHEGGPLGGNASASLPFFLMVSFPKGRRANAECAEQKLRLFCRMDTEQCEDG

SEQ ID NO: 133878 - protein, 154 aa, Heterodera glycines
MDSSATVSEELSAAESRDKQHNSSRRAKHRQQQAVPVAQHPRQQNHLPPNMGNGSSRLKKCFSNAGEGGGCGNGMPNYHQTTTTPGMMNGSYYDNMNWSLNGRKGLEDNFVPEKLKKSGGISVAFAMDELVKGRTLNGTPCKKFQLAYLFVLQY

SEQ ID NO: 133879 - protein, 321 aa, Heterodera glycines
MDFEARIKAYRFVAYSTVSFSIISLLSVCFTLPMLQNYVSNVAQNMDRELSACQGSAKDIWSEVNQLKSIPVVGGNRTARQADGYGGGGGAVSGGGGGGGSCSECCSGGGPGPAGPPGPPRQSRKPRSTRITRTTREICFRSMRTSYPGNFKLLLAKVNVAIQPPCKPCPGGQPGQPGPPGPPGQPGSPGQPGSGGGNPEPGPPGPPGPPGNPGGPGQPGGPGQPGQPAASEAAGPAPPGPPGEAGAPGQPGNAGPPGQPGGPGQPGPKGPPGPPGQPGNDGQPGQPGNAGQPGGAGEKGICPKYCAIDGGVFFEDGTRRR

SEQ ID NO: 133880 - protein, 158 aa, Heterodera glycines
PPCKPCPGGQPGQPGPPGPPGQPGSPGQPGNSGGNPEPGPPGPPGPPGNPGGPGQPGGPGQPGQPAASEAAGPAPPGPPGEAGAPGQPGNAGPPGQPGGPGQPGPKGPPGPPGQPGNDGQPGQPGNAGQPGGAGEKGICPKYCAIDGGVFFEDGTRRR

SEQ ID NO: 133881 - protein, 140 aa, Heterodera glycines
MFYQIIAMGTFAVSSLCVLTQLVLLPWLNQHTQQLKNDFESRLRRFHHNTRLFDEQFRRVSQFAVGSGGSLTDNAFGRLVKRQLDECPPQRVGPPGPPGEVGGDGESGDTGEDGPPGLDAITLLLEEAQKCIICELELFS

SEQ ID NO: 133882 - protein, 198 aa, Heterodera glycines
GDVAPGTPLPSFHGNAGITNATTPLAVGNPYGPTPHQAFSAVNPVIGAAPAQQDPSAWTQYYNQQQAMAIAGGPPSQPASFGATPAQHYQTVPGTMQTAVSQAAQLHSTQMQQQQIHQQQQATIAQPQQAVSAGMGAVSSSGGPAINPQTGQPDYSAQWAEYYRTMGMHEQAALIEAQMKQTHAAAQAQRPQQQLYMQ

SEQ ID NO: 133883 - protein, 68 aa, Heterodera glycines
NEKGTKSDAQQQNENGSAMALEKVPKIDWNQFEVQYLDLVSALHYLLTVEVPRNPVLGNTELTALKRF

SEQ ID NO: 133884 - protein, 246 aa, Heterodera glycines
MYPDQSLYPCNSGPELARRINRALRRADQVECVEAEDYTAQRDWYAPIVADAEAGFGGALNCFELMKSYIESGVSGVHFEDQLGSEKKCGHMGGKVLIPTAQHIRHLNAARLAADVCGVPTIIVARTDAESARLLTTDIDERDHPYIDYAAGRTAEGYFRLRDDNAIQSCIDRAKFYAPHCDLIWMETSYPKLSVAREFAEGVRKEFPDKLFSYNCSPSFNWRQHLRPSDMEKFQKELGAMGFKYQ

SEQ ID NO: 133885 - protein, 19 aa, Heterodera glycines
KAQEAFIFASKAPHGQNTK

SEQ ID NO: 133886 - protein, 106 aa, Heterodera glycines
FGHYGKKWRKKFPGRPPMICEEIEIPPCNPCPPGPPGRQGPTGQPGTPGRSGPPGRPGTNGLPGPPGPPGPPGTPGPTGPDTNGLPGPPGPPGPPGTPGPTGPDGE

SEQ ID NO: 133887 - protein, 63 aa, Heterodera glycines
MNHGFKLFDQHHKQNVAQIAAEAVMQHNFGAENMEEEVQKMELARVNGNDQQTIMTTMANGNN

SEQ ID NO: 133888 - protein, 75 aa, Heterodera glycines
MGVSGSSLSAYVQVAVHRFTTDAAFAQAVKMITSLAFVLLEDITPALAALEDHLPDELEGVLDWLFEFNFFFQFH

SEQ ID NO: 133889 - protein, 102 aa, Heterodera glycines
MEGKEKIGNEMEDEIGLPGNPREVRCFKCGRSGHFARECRDAGDRDRGRRVWRNWGDARGRTGRGTWRNSDQNEVGEGPSTSTSSAHLTDFGTFFNYIGGNQ

SEQ ID NO: 133890 - protein, 17 aa, Heterodera glycines
MNLMKIFTVLTQFKNEI

SEQ ID NO: 133891 - protein, 115 aa, Heterodera glycines
MKSHTTHELPSFYTDEQLLAYIDLKFGGIGNEIAHHGNVQGGIGDMQSIRSAAYTYVMKQIFAFNQIRLLALPSVVSADVESQMQKIITERKCAVVARLQKPEIKAKTVQITVNF

SEQ ID NO: 133892 - protein, 55 aa, Heterodera glycines
MDNAMASMCEGERRHVVIPAALGYGDKGHDNIPGGASPNFDIVLHKLIRPRAGEL

SEQ ID NO: 133893 - protein, 63 aa, Heterodera glycines
FPDAQSPRNNHPFSWSFLLQHEAAAVSRAQSEILCRNKIKTKRKRKTEINEKEVRGEREKARE

SEQ ID NO: 133894 - protein, 373 aa, Heterodera glycines
MTPTFVVDFSKAMVEGKDLEELKALIEEFADVFTAEHHITTTTEEPIASAPRRMPYKYKEELKKHINQLLEAGVMVESDTPWVTPIVIVQKKDGGIRPCLDFRKLNEVTVPDKYPLPRLDSIMERVGNCQFYSSLDLASGYFQIKLSEETSRKCGIITEDKVYQMITMPFGLKNATAAFSRAMAIVLSGLEDTSLAYVDDVLIFTKSPNFSEHLTAVRKVLERFRLYNLKLSPKKCIFASNEMNFLGFVLTAEDYDKAFHIFTDASSTGQGGVLMQKDDVTGTFSAISYCSRTLSAAERKWPAVQIEMSAIIYALREFRPFIFMSDIELHTDHKPLAFLLKKSEPISNWHDGSLTTKLSGQNCPRGGKSQHFD

SEQ ID NO: 133895 - protein, 346 aa, Heterodera glycines
AVKKKNGKTRVCIDFSTGLNDALELHRHPLPRPEDIFNAIAGSIFSRLDLRDAYLQLELSEESKNLCVINTHQGLFQCQRLPFGVKSAPSIFQSLMDKIIAPIPGAFVYLDDVIIRNQTLEEHIKTIFQVFNKIREYGLRIQLEKCTFMEPQTLFLGHIISEKGIQPDPSRSEAIKQMPAPHDKSTLRSFLGALTYYGKFIKEMRELRSPLDELLKKDIKWEWSRQQQEEFEKAKEMLSDLLLTHYNPKLPIIVAADASKDGIGATISHILADKSERVVEHASCTFTAAQKNYSQIEKEALGLVFAVQKFHRMLYGRFTLLILAIFGSKKGIIYSASRPARALILS

SEQ ID NO: 133896 - protein, 74 aa, Heterodera glycines
FKPTCRKCAGGEHAIEGGECRVGKVHQKFDAFDFALPTDEFEGTTAKVIRERFTFGVKCLIVFCFAVRNHFILG

SEQ ID NO: 133897 - protein, 61 aa, Heterodera glycines
MVQPRKCAIPKLKLNDVEQFRNWFLKINLCSEVLEMLQMGGEDQFHDASLFDIFMNEYTGK

SEQ ID NO: 133898 - protein, 150 aa, Heterodera glycines; identical to SEQ ID NO: 128546

SEQ ID NO: 133899 - protein, 125 aa, Heterodera glycines
LFEYPKRTLEKIDFFVFGAVPPNRCAQIYGETESFRNSFPIACTLILRWIFAPHNCLSTPNGHLKKSIFFVFGAVPPNRCAQIYGETESFGNSFPIACTLILRWIFAPHNCLSTPNGHLKKSIFL

SEQ ID NO: 133900 - protein, 65 aa, Heterodera glycines
MNRRWICNDVWMDIFPSFDRAQLGLKLALLSPRFNALVDKHFDGKSELTIWRTIEISKDKGPETK

SEQ ID NO: 133901 - protein, 75 aa, Heterodera glycines
MPQPQLVAVGPRSALQIPYSFLPFAFDFHVLLQRPQRKMYQQQQGTTVGAVHGQKQQQENEVPLLSILDMANTTL

SEQ ID NO: 133902 - protein, 66 aa, Heterodera glycines
MCPGLFDTKMFCYILCLLLVQSRSGQNSVFEPKQCGNESFGDDDTFVCQTYTCDGGKCKNLLFVLR

SEQ ID NO: 133903 - protein, 107 aa, Heterodera glycines
VIAYASRTLNSSERNYSQIEKEARAIIFGVDKFKQYLYGRKFVLQTDHEPLKEIFGPKGELPIVAAKRLHRWSLTLMNFDFEVVYCSTKNLAADGLSRLASTAANDE

SEQ ID NO: 133904 - protein, 181 aa, Heterodera glycines
MEKLAPQNYCLADSTASSLAKAAQMELDFIQSVLLGPQRGNLTAIECLLAQNFSKQSSMMPNYGTERKNAKVPKLEMEKAGGGDEAKLDNGSETDQSDQKQKRKGVGRPKRHPSECKVCGRKSFYCYYSVRCCENGIRCRGCRLDKCLLAGMDPTMVIAMQQEGMAQYLDRLELRKRSALL

SEQ ID NO: 133905 - protein, 109 aa, Heterodera glycines
MVFSILLAFCLAVPIHFVDAKCASDVVEGNKLLSNRKTIMKNPPKEIGKNDDTEIKQFVRDLLDHYNMISDLSKSNSNIEEIVNGIGKITLTKFDKKGKNGKKLNFLYI

SEQ ID NO: 133906 - protein, 52 aa, Heterodera glycines
MHCGALFFFGYGAAKIDQRKIDLMKMPAKYVLIILLHFNAHLSWVRIRTTAW

SEQ ID NO: 133907 - protein, 111 aa, Heterodera glycines
FTDAGFAHHDLYFIDGSTPTEEIVLRFLDVVDSAPGAIAVHCKAGLGRTGCMIACWMMKHYRLTAPQCMGWLRVCRPGSVIGPQQQFLIEKQAWCWNLGKANGLHLCPTIK

SEQ ID NO: 133908 - protein, 47 aa, Heterodera glycines
MHRNCARRRIDDIQKSEHNFLGGRRTVDEVQVMVCKASIGEPLTHTL

SEQ ID NO: 133909 - protein, 70 aa, Heterodera glycines
MVYASFTTKRELHVRSLLDRRGPVNWTPENWTPENGGPVNWTPNGKLDTVGILDTKGKLDTGKLDTKFLF

SEQ ID NO: 133910 - protein, 33 aa, Heterodera glycines; identical to SEQ ID NO: 126025

SEQ ID NO: 133911 - protein, 95 aa, Heterodera glycines
LFEYPKRTLEKIDFFVFGAVPPNRCAQIYGETEFFGNSFPIVCTLILRWIFAPHNCLSTPNGHLKKSIFLFSGQSPRTDAPRFMGRPNPSGIASL

SEQ ID NO: 133912 - protein, 26 aa, Heterodera glycines
RIHVLRFDVAFFAKGTLLGFTAQHQG

SEQ ID NO: 133913 - protein, 51 aa, Heterodera glycines
MADLNNLTFFLEFANETPNWKLISFATIFGFIATLGIVLNFSVIYVTIRTK

SEQ ID NO: 133914 - protein, 75 aa, Heterodera glycines
MATIQFLKSFGKCTAKKPICCNLVKNDEYNFIKKRITLINHSDPPLSQVMDTLIVTLMRIKKAMESGKKQIIFLF

SEQ ID NO: 133915 - protein, 129 aa, Heterodera glycines
MSFRMIPKLPNLIGNTFKNEFHKSSFFNFFGQKINKNTHVAHGLEPQPFVSLPSYKSHLATHANLIGTERLIEFFKCFRTIPRMFNLVEKEKICVAKIRPAKRFGWRRFFLVRFLIPRFPFLFKKPKKS

SEQ ID NO: 133916 - protein, 76 aa, Heterodera glycines
YQKGRWRKKFFKIFPYILVISFCFWWGAWNSGIMRTRPIWQVKQRLLTSQKVRCRDETNQHCLPRGTRHGPPKEWI

SEQ ID NO: 133917 - protein, 109 aa, Heterodera glycines
MIPKGTAKNGTNGRKRANLAKEPKGFHKFTAEYASPELHVMDEETGAKVSPKSDMWALGIMLIELLILQNPSFYHLREEEEKRDKLEVSGQKAKTAQKSTPLRRMFGNG

SEQ ID NO: 133918 - protein, 145 aa, Heterodera glycines
MPSSFASVWKHWANFLGNLYLANQLNELITDVQQRRGNAMAEILKRVGLLQPQEVFCALRVELGPSHVGRYIQQCSDQFTKIADLTNTTSDPQLLKSLVEWLQSPEIVMAVNANTDEGKMFNELLNDFAFCCSPSFLATTTTTTA

SEQ ID NO: 133919 - protein, 230 aa, Heterodera glycines
MAEKLVAQLNDRLSKTLSSDAISGLSTALQTEQRAWEECWTSSCVQLNDWASLDHFAKSEEISDAALAMESAWHLHDWNQLKDRFAQVDAISSPQTAVRSTMLQLMLNVTNFRLNKETIERQLIDLYRALISEWRRLPSIVSHVHINILNNSHLLHEISESANLLYSNLPLLTNWSGNSNNGTPASTNSNHSLNNAVKHLMKTWRNRPLTTVDQNSGWSDLFNWRLQFFN

SEQ ID NO: 133920 - protein, 203 aa, Heterodera glycines
MGRYDWLAHVVHLLLLSEHAVDDDKQQQQQHHRLVELKQCATLDNTLAQIVAAADSDTIERVQLQQRQQVGEVHGQAVAERLGDSPTKQLDQVRDGGAATEGTTIHAKIASLRLSAPADNIDGTSPPQAPPSLSVPSGGEESLLEAATANRNSPQNSNRTTMLDMQISLLSLATQLTVAQLISNLVDILHTDLAFCRKTFVEV

SEQ ID NO: 133921 - protein, 296 aa, Heterodera glycines
MVLDIFRPLQRAMISCISYTNSQQILRSTYNVLSKLLEKTKCSANGLDELDMLNHHIARVIQDSFAKYAGSLNNASPPMTTITLLRLMHSAQPSYLEAVCLMPFINLLQRLVREHIMSNVGTTGALDQAQKLISDLLSICIEMLCTRTKFLSAESQHNVIQLVLLPLIEKGTVDKIVENIIKVAQEIVTSEIALAQQHQDGQPSQQQQYHHQSQQSQGALVLVKLYGAMEQRLYANNELQRHFLNVVVQLYEQERLLLSEGDATLNKLEPVFHWGLASPNPELRNRSGKNADLIGL

SEQ ID NO: 133922 - protein, 60 aa, Heterodera glycines
PGLKCPAQAKIFFYFREKIEIFPKKIPVDRARKTMFWKWSPFFWENSLKNHKIKKPENRF

SEQ ID NO: 133923 - protein, 19 aa, Heterodera glycines
CAIWRYEQFCLTLARTHSA

SEQ ID NO: 133924 - protein, 39 aa, Heterodera glycines
MGLQNQLILLWCRFSRPLLRHSLDEFAKLTNIFVCKEEI

SEQ ID NO: 133925 - protein, 138 aa, Heterodera glycines
MLIAPPPVKILYCYSEMNDSVIGLMKQGIETHNGVPTQTLVQSMPKPLLLILDDLMLSVNNDFLDLLFTRGSHNWDVRTVGSQLFPKRLNYFMEAYNDATSEPFSYLVINMHPNASESERLTTKIFPDEQREVYLPIE

SEQ ID NO: 133926 - protein, 65 aa, Heterodera glycines
MRQMDNMMNSMLGDAWDMLNGFGMMGPPFPNHPMLTDGLNRQNQALRRQQPPQHHFGPDTMMSPY

SEQ ID NO: 133927 - protein, 373 aa, Heterodera glycines
MGKTIAPKQPTVDKLLEQIYYDLRSPASYAGMLKVWEEAKRRDPRISLHNVYEFLHRQRTYTLFKPRRNKFPRLKTVPSGLHTDWQCDLCIMDTLRAHNDGYRYILVCIDVLSRKIFTAESESKKSEHMIEAFEKVFKKAGVLPNKLYSDAGLEFQAKRMIEYWKQKDIIKHIMYSPSLHAGVVERANRTLKERLYKYFSENNTLRWLGVIDKIANNVNSTTNRTIGTNPASVTFKNAPTLRKRLYKEHTDDKEIKINTKFKFGDIVRISKEKGQFSKGYYPNFTDELFRVQRVNNTNPHSYRIRDLNGEDIKGIFYDQELVKTTENGTHRAEVLKSRTLNGVKEHFVRWVGLSDKYNSWVRDSDLVKRRAFE

SEQ ID NO: 133928 - protein, 92 aa, Heterodera glycines
MPNLEIAVSPEGTSKVPTLDLNASQFMRKRLAKSGEQQKTHKTELKVTLEAELNVPTLDLNAAQLSMKRLTEKNKGKFTTAEEAKNEKKEKQ

SEQ ID NO: 133929 - protein, 353 aa, Heterodera glycines
VRKKVVRKVVRKSSNKSDSPEKNGSPAPEEPPQSPTVKATTTTNGTVPTAGAKTTVGNNTQSGTGAKSVSAIIAGRMASLFNNCAGNGVEGAANGENGTGTNRNDAAPATTGDGGGAAIHEISVARFGGDEPTAQSDEEAAGNNSTRKEAASDAKKGESTGINAKREEAAGNNAKREEAAGNNAKREEAAKNNAKREEAAGNNAKKEEAAKNNAKREEAAKNNAMREESFDTACKQSNGPDVTESGTNRSASETVPKSGTAVEIKPAKAGQLESEPKTDHTVDDSPPIVGSRRVGAVSKTSTEAPNESAVPEHSSAIKERRSQSLDGHELANGTTNGVGTLRMTESSSEDNGR

SEQ ID NO: 133930 - protein, 42 aa, Heterodera glycines
LREFHISELTSAMHSLAFISFAFCLSLTDAFRTQSSGVRGTL

SEQ ID NO: 133931 - protein, 149 aa, Heterodera glycines
MSLHLPQKCEQLAQCTQCEQYKKERDKKTEALLDKIKESFDTKKQKKQMENELNEQRQKCADLGKQKDLLTCEVCSLREELEREKKANAHFDDDLKEFKRRRLAMDDELKQFKRREKDIGAELEQCKEQNQQLVAAAEERESRIMELER

SEQ ID NO: 133932 - protein, 331 aa, Heterodera glycines
MPTKPFKPLEQLMGVFPAASRAHIPDGWRWLMTDSSSPIIDFYPETFEIDLNGKKYAWQGVALLPFVEEKRLLDALDSVYATLTTDEIARNATGPDRLFVGNKHNLFSLVYEVHSQKTTIPIKDELTNDDTKETSEGTRETEGEAEETQQAENGESEQIAKAEETTAQEEQANEEAISKPEQAPKQEFETEIEFVDDEEKKWVHIDAVKAYGMSGEVSYDVEALAFGEAHRSLFRNSLEFGDIKYQHQQQWQQGQFYNGQQQQQPVPLFSFGQMAMPPPPPLPPQNWITSHPPPQIQSHVPYGQPPPLISQPRNTQHHHRRNDNNRTYNRK

SEQ ID NO: 133933 - protein, 241 aa, Heterodera glycines
PMIESHCCLMPKKSNKEAIIDIPKLLVKGLRESLPKVTCGPSPSFYGKFSRVKYLTTVENEYPSLLLLMGFRVLGLTEFKIYSIISQHGVRLVIPETCPSQLNNIIQNCWRTEPADRPDMRYVLAVLQQIGNDAELQREVAQFLVFRKDEWREMIREQTFALEELKLDLARQMEDLRRREAIVRKRENSHRNFLHLVDVMNVEDVCEWNEDCVCEWVQNIAASAMEDFSEAIVDQLISCIL

SEQ ID NO: 133934 - protein, 92 aa, Heterodera glycines; identical to SEQ ID NO: 124679

SEQ ID NO: 133935 - protein, 163 aa, Heterodera glycines
MLFIFSIFLIYIHLNASNGCGTELGIWENKMVQNQLQNDPALLYSLEKLFFIYQMLKSLKIDANRHKNYLTASLEHSMTLMANRFGIPFNEISNVVEPRKSAFMLKEITNLLNDQFENERTGNEHEKEENGQDGYRKNQKWTFRQLSNNSNNLFGKWFNSFHK

SEQ ID NO: 133936 - protein, 75 aa, Heterodera glycines
MTTAIGDTIILLITLIAFPNAAVEFLFYAVVMVVVSAILALLAIFYYEYNNYTTTDSEMITKLEETEGKREPLKG

SEQ ID NO: 133937 - protein, 666 aa, Heterodera glycines
MAAAVAAQSFDVKADLRKHTLFVEPVVINEISTRSVVIQFVMPVPSIEELTELCKIWEIDLAVGCKVNPAAKAKPCAHGYVLSIDKRALCVGYEIDAKVILSYQAAKDQDAQDEFDQMRCGELDGCVELIPQTSVRALQERMFTLRSNDCSKVATDEGKEKVGRIMSILLGRPVKPESPKANNPLMTFGALSKLKEGQIDTALCMLDEVPRLVFQQAGPGTGKTFSAASIVATVLATDPTARVLALAPPNVAVVKLVLEMQDALAAGNHVEPMLALFSGTGKLRYAKEVERISPHLLATAVEAQDFQELLQKDQDRVKVERYLDACERNPRLAQEMAVAKIVQEHKNRRLCFATLSFCEQLPALFGETTHLIIDEAGQAPYVQILNLVSQLPCLTKVLITGDRRQLRVHLPSLPIAIREDFGMDTVIQNLDVAQGTDVTTLSVCFRSHSALVRCTEAGFYKPHGELLTPGRDDSERALMTNQTAFKLPKKGVPLVLVHQSTPAQRDEVSTSSANPGQTDTAMRALWRLARAFPGTLIRCICFYAAQALEIERLVAQQEIPDILVTTADATQGHESSLAVVVTTCSVLDSGADSQPFWADAARVDVAISRASHGMIIIGDLLLLNRTETWRRSTWTKRQRKRQWSARSTSTSSSSTTPTTITTETVS

SEQ ID NO: 133938 - protein, 68 aa, Heterodera glycines
MPILFRTRFWLVVVAGGAASAFGIVANAMLTRLFLTRPAFRHSPFFFLGFVALFDTLLDSVYIFLLVS

SEQ ID NO: 133939 - protein, 68 aa, Heterodera glycines
VVEDRIRINEANGGIRKDGLMHSEGSLYKGKIMAFLDFLLTLREEQKLSTEQVREQVDAFMFGDHKLY

SEQ ID NO: 133940 - protein, 62 aa, Heterodera glycines
MAICSHQRRSIPAQFPPELLLQNGQQFRHAICLGNRDGMPLTTETWHYRWKYFVGRHINCYV

SEQ ID NO: 133941 - protein, 32 aa, Heterodera glycines
MNEFGFQSSKMFKRANHEKELKLRKKEQKQRD

SEQ ID NO: 133942 - protein, 68 aa, Heterodera glycines
MEALIIEVCASKFIKIQICDHQKRKINCKKNYKINEFYYFVNLKLEDESQPNIITSIWRHQRQAFKLS

SEQ ID NO: 133943 - protein, 119 aa, Heterodera glycines
MTESTGSLCSSNFASAAQQNVVPPATAASAVDVHQQQQQQQQPMLQTNSFHDRRRLNTLAEKRSFLVRMVSDPKCYNPKIVHHLNMRTHNQTSQDLFRDRTLRCAAGEEDKVTNDKWDK

SEQ ID NO: 133944 - protein, 489 aa, Heterodera glycines
EKAKKDAEDKAKKDAEEKAKKDAEAKAKKEAEEKAKKDAEAKAKKDAEEKAKKDAEDKKAKKDAEEKAKKDAEAKAKKDAEEKAKKDAEAKANKDAEEKAKKDAEDKAKKDAEEKAKKDAEAKAKKDTEEKAQKDAEAKAKKDAEEKANAEAKAKKDAEEKAKKDAEAKAKKDAEEKAKKDAEAKAKKDAEAKKKEEEMKKQKAKPEEKPEAPAEGVAVVPEAKKAEETKEKLKQEEKPVEVPPSPAEKKRKEAEEKKAQKDAEAKAKKDAEEKAKKDAEAKAKKDAEEKAKKDAEAKANKDAEAKKKEEEMKQKAKPEEKPEAPAEGVAVVPEAKKAEETKEKLKQEEKPMEVPQSPAEKKRKEAEEKKDQKDAEAKAKKDAEEKAQKDAEAKAKKDAEEKAKKDAEAKAKKDAEEKAKKDAETKAKKDAEEKAKKDAEAEAKQDAEAKKNEQEMKKQKAKPEEKPEAPAEGVAVVPEAKKRKRQRKS

SEQ ID NO: 133945 - protein, 19 aa, Heterodera glycines
TFAFSSLALPNTHTIFEML

SEQ ID NO: 133946 - protein, 19 aa, Heterodera glycines
TFAFSSLALPNTHTIFEML

SEQ ID NO: 133947 - protein, 19 aa, Heterodera glycines
TFSFSSLALPNTHTIFEML

SEQ ID NO: 133948 - protein, 19 aa, Heterodera glycines
TFSFSSLALPNTHTIFEML

SEQ ID NO: 133949 - protein, 19 aa, Heterodera glycines
TFAFSSLALPNTHTIFEML

SEQ ID NO: 133950 - protein, 19 aa, Heterodera glycines
TFAFSSLALPNTHTIFEML

SEQ ID NO: 133951 - protein, 123 aa, Heterodera glycines
MDIWSAAITIYEIVLINFLNGSWSSNSMPINMADFRPNIENKVKRIGELCRFARLYDGTLNEQQQQMMIIKLGLLEGAFKPGSEDWWLRYSGVVINILDMWGNKYGMPDIAYLLVVRARENWN

SEQ ID NO: 133952 - protein, 94 aa, Heterodera glycines
MPKLGIIKVILGTPNQAENAFFVLISSAAERHHTFITKKVFILIGFPFFAYFWHIEQPSPIFYIFWHLNQSSPNFVHFFPHLINHRAYLMFDSL

SEQ ID NO: 133953 - protein, 81 aa, Heterodera glycines
MAFLGSLITNVTFISNNSEKCYDQGANSADYHHHFADLKGFLSVIMRAKLCRQTAKACRPKANVLPSKFIITKSSPTLLII

SEQ ID NO: 133954 - protein, 55 aa, Heterodera glycines
AKSTPSKSLPSYYSHNSPTKTTFGVKENVPISSPLPCGTQIPPKTPPLGYMDHRI

SEQ ID NO: 133955 - protein, 28 aa, Heterodera glycines
MRTRPIWQVKQRLLTSQKVRCRDETNQQ

SEQ ID NO: 133956 - protein, 123 aa, Heterodera glycines
MKKGWIKTIDFQISQFHFENLRESFGNSDALFVILSAKWNKYKYELRNIEDELERLSGGKLRVEYVPLLEGYENFSLADDNSLLLNGKIVGVVYSGLSALGYQANEKEMHTRKIVELSTAIVK

SEQ ID NO: 133957 - protein, 116 aa, Heterodera glycines; identical to SEQ ID NO: 127487

SEQ ID NO: 133958 - protein, 92 aa, Heterodera glycines
MIIWRSAGCYSDFAWAAKVEPGAGPDPAQDFAGSQYAILIAGFAGLIRPDPVLQKFLNSNPATGSVNLKFPGSMLKFGTQMSDLQQAAIRGR

SEQ ID NO: 133959 - protein, 63 aa, Heterodera glycines
MAISFLRIFYATNALEHETKCEKWLSLFLRIFYATNALEHETKCEKWLSLFLRNFLCNKRSRT

SEQ ID NO: 133960 - protein, 57 aa, Heterodera glycines
MAISFFEKFSMQQTLSNMKRKKWLSLFLRNFLCNKALEHETKCGAPWPFYFSNNFYI

SEQ ID NO: 133961 - protein, 177 aa, Heterodera glycines
MRVTIIAGENVASLEISADMELENFLALCKFELPSIADTPIERIALNCSGRQFIANAGLAKKQLKELNIQHEDAIHFETISASSTAQTPHSSLSTPSSAASSSLGAPLQTSNLISSLVQNIKVPQKQKSVAEDRAMSDQIFTMLQHPARLDFLRVDHPELAAAYEKNQRTEVLVHRI

SEQ ID NO: 133962 - protein, 162 aa, Heterodera glycines
MSEISPGQTLNIHGNVNADAHRFEVNLLSNCVEIDAHMGSAPLHFSVRFDEGKVVLNSFAAGEWGKEERHSNPFTKGQPFDLRFRSQQIVRGSQKDGVWGEEEREGAFPLKKEQAADIAVFNEPYSLQIFINGHHYCAFAHRVESPNTDYKFVRVEGDIELT

SEQ ID NO: 133963 - protein, 37 aa, Heterodera glycines
KMSKVFTFLSFQQLLTWLFPKCLLLIFYQCKHSSFIK

SEQ ID NO: 133964 - protein, 246 aa, Heterodera glycines
MALPTKIHQIPNLLTVFISSSRCIYENLALEEWLFRNNGVKEDGDSLLIWRNSPAVVIGRYQNPWLESDVRFCAANGIRISRRYSGGGAVYHDEGNLNISLMTTHERHSRKKNLQIVADFLNAKLFGGCASATAPRLIANERDDLLIEPSGAKVSGTAARIARGRAYHHFTLLVDVDIGTVRRALKSPFDDQRIQTNASRSVRAKSVDFHKMMNASTKGGRFCSQSVRFAVQKQRIGSVERRNGQI

SEQ ID NO: 133965 - protein, 43 aa, Heterodera glycines
MPKKHTQSNKTRKRSGRDLDEIHADLIRPDKMQRIQVLFISHW

SEQ ID NO: 133966 - protein, 125 aa, Heterodera glycines
MFGCNGGAHIPGSLVTGRILANTLASHFIKVYVNWEEDGKTYQAYYRGQSPRKKYKVKLYPPLSFEMKERRRAEEAAEDGGETPKNKRRDDEVEVINKCIIKNGNWNGDLNSFSSQGHFRNDLPP

SEQ ID NO: 133967 - protein, 80 aa, Heterodera glycines
RSQASPARPRRKTVHAKRGGIGRRIGRGRANQIGKPGGFDILAPISYRVNLCFFLLLFLSSLSYKQKIINNIFAKQNIKQ

SEQ ID NO: 133968 - protein, 113 aa, Heterodera glycines
MSVRRGSTSSQPASKSGSVETNNSDDSLPVPCTKRQKAIFKARKLMDALWANKPVDLYAEKVKAICIRPNVREGFSDGHVGLGSFETEGRPTEGMFELQSGGPRWVLSEPMHP

SEQ ID NO: 133969 - protein, 62 aa, Heterodera glycines
MKCHLIKLINLPVLVPFQFDDYYFLQNVQCSHWAMNDEVVQIGVIGRIFGRTRVPTGRRNDL

SEQ ID NO: 133970 - protein, 353 aa, Heterodera glycines
TVRMAAYRPIYTKEKEWVNTGTADGEIMVFRPTMEEFSNFSKYIETIERSRAHLSSGVCKVIPPPGVIPPPGWHPRPSKNPSDYSDLNDFVIHCPVKERIEGGSSTGCYVKNNTVYRKEMRVGDFRRMALSKQFRPPKPNYDLTELERHFWRNLLHHEPIYGADTPGSIYDPGVSQFNMNGLGTILDLLKEQIKGVNIKGVNTVFLYFGMWKTMFPWHVEDMDLYSINYLHFGEPKFWYAIPPSAAAKFERLAAQRFPDLQICKAFLRHKVYIVSPSVLRTNGVPFGSMVQYPGEFMITFPRGYHMGFNLGYNCAESTNFALERWIDYGKNAVLCYCRNDKNAVLCYCRNDCG

SEQ ID NO: 133971 - protein, 80 aa, Heterodera glycines
LISSQKSCQFKTAKKAEFSKFFISIFFYSSKFSVIFSRLIEPVKSFRMISRLFDSVNNFKSYIDSKLAQTELARRSWPVP

SEQ ID NO: 133972 - protein, 247 aa, Heterodera glycines
PEKSGVLRDNHFQIRYEPYVKVEPDELSALAHRRLVATVDTIEHFCALMDELSALAHRRLVATVDTIEHFCALMDLHNIKDRLLALVKAAFAPLTLFCAVSSTARVTRGAHLSYAEPYHFSNRLVDRALDELVEPFRTFAEPYHFSNRLVDRALDELVEPFRTFNFKEQEIVLMKAIVALNPYLPNLLPNLSAEAAEQVADFRDRVQETLYNVVRETLYNVVRESHPKEVASSRFGNLLLFLPNIMV

SEQ ID NO: 133973 - protein, 117 aa, Heterodera glycines
MVDGDSDLAGSAEMEEARDRMADTLPSMAPQKMAWLMQQSTTATEAAKEEEEENEHVTNSLRSLRENVGQIEDIDRSEEEQRELIEDLQRRLKTKNDFFRNIGGENRNGEGTAADGV

SEQ ID NO: 133974 - protein, 354 aa, Heterodera glycines
SLLASKNNNCVDSNFNCFDAFDLDSQLTEEERTLRDQAHAYCQEKLQPRVTQAFREERVEVVKGEIEFDPSLLPELGRMGFLGAPYKGYGCAGTSFVGYGYGCAGTSFVGYGLLARELERVDSGYRSIVSVQTSLVIGPIVTYGSEAQKEKFLSEAQKEKFLPKLASGELIGAFGLTEPDHGSNPAGMETKAEWDEQQQLYRLSGLSGSKSWISNAPVADLFIVWARSPKHGNAVKGFIIERGAKGLSTPKIEGFIIERGAKGLSTPKIEGKLSLRTSITGQIVMDEVPVPDEVPVPEANLLPGAQGLSGPFGCLNSARLGISWGALGAAESCFAAAREYAMDRQFGKPIAATQ

SEQ ID NO: 133975 - protein, 76 aa, Heterodera glycines
MSNAWTVLFRQRSSRDAAQTPTPAAKPWSSTKGHGLWGWSEDGLMVSVPWAKKQQTMTNFAVFDKNLRVIVVRRCR

SEQ ID NO: 133976 - protein, 92 aa, Heterodera glycines; identical to SEQ ID NO: 125147

SEQ ID NO: 133977 - protein, 61 aa, Heterodera glycines
KGEKYSLEKGHAELLFQFKWSNNDDGSAEEKFVLDLTPTQLKDGKLEFTIDSKGIELKRTW

SEQ ID NO: 133978 - protein, 450 aa, Heterodera glycines
PFLIFAVQKFHTLYGRRFTLLTDHTPLIAIFGSKNGIPIYAASRLQRWALILANYDFEIKYISTNCFGQVDVLSRLAAKQRETVEAEERVIVSLDKISLPISDNSALLPVTANLPVTANEVAEHTQLDTTLRKVLTFANGWPKKSPSDLSAFFTHRHKLSEVNGCLLFGERVVIPGALRQRILSALHFTHPGIVRMRALAQQHVYWPRMDLDIERWVRHCVDCAMAAKAPPKTTLSPWPRTNKVYKRIHMDFAGPCSDGNLYLIIVDAFSKWPETFQVKSTSADNVIVQLEWLFSRYGFPREIVTDNGSPFHSKDFSHFCRIKGIKQRFSPPNHPQSNGQAERFVDIFKRQMKKCSHGDKWITNSPFAYRNTPNAALKGQTPAELFLGRSPRTQLSLLKPDISCSNRNQNDYTNNMSKQFDRKHGARHRTFAIGDDVLIINYRNNKKSWY

SEQ ID NO: 133979 - protein, 55 aa, Heterodera glycines; identical to SEQ ID NO: 130740

SEQ ID NO: 133980 - protein, 21 aa, Heterodera glycines
GTHAFRRSRFGAPVSAPARFS

SEQ ID NO: 133981 - protein, 153 aa, Heterodera glycines
MVKADNERHSRQLQMAKNVQKLDSLNGRKSKGIEIKEPTQKVPKVEKNDEGIEAKGKEIVEEKTKKTKPKKKKGDGKSRKSKDTSVDKHKAEGEGMDEIWAKIKSDQKQEEEEEEGKGTDKKDGKEEVLEEEEEGSGSAMLRELRQKRGKLKK

SEQ ID NO: 133982 - protein, 19 aa, Heterodera glycines
MASLALSTVKCKKRGNFST

SEQ ID NO: 133983 - protein, 256 aa, Heterodera glycines
MRALWRLARAFPGKLIRCICFYAAQALEIERLVAQQEIPDILVTTADATQGHESSLAVVVTTCSVFDSGADSQPFWADAARVDVAISRASHGMIIIGDLLLLNRTETWRRYLDQATTETTVVGPEYFDFEQFNNPDNYYDKDGQLISSSRWHSGTHSWQSLNFWTTSAARLVLYKNMERVFNTPGCRLFYCDTDSLVIAHPPNSCPLKEGKFFGEMTREYADSDIIEYVSGGPKQYALKLKDGKLEKFGIKPKYAG

SEQ ID NO: 133984 - protein, 711 aa, Heterodera glycines
MQKPIPSNRPNSSVSKTLACGLEKMVNASGIEPLTVPVLADRSDPLGLKSVQPDPVPMESAKAGTKEMEVMEVDEMSGEKGKKGEMGKEKVKSGGIEEEEESEGSEGELLGDGGFGNLQLNPSLRAGNKAVEKEDKGKSYLVAQVRSDGVIAARMKLFWDFPELVFVPFSLFDNAQPIEIGDLFRLHKCEWTKSETGWEERGDWLYEATGRLNYQATATDVSQLRQRIPTLAVGILVDVQRARDRHVKVAMVSAPELSCVMRAYRRHFPADFTDNDIRYRSVVRLQLRQINSPPWVLYSQQFAYVLPSDFGKKRGDELLVHHANVIAGVEPEPMGYEFPFSAELSWAKVQLGEKVMAAAVAAQSFDVKADLRKHTLFVEPVVINEISTRSVIIQFVMPVPSIEELTELCKIWEVDLAVGCKVNPAAKAKPCAHGYVLSIEKRAFCVGYEIDVKVILSYQAAKEQDAQEEFDQLRTGELDGCVELIPQTSVRALQERMFTLRSNDCSKVAKDEAKVGRIMSILLGRPVKPESPKANNPLMTFGALSKLKERQIDTALCMLDEVPRLVFQQAGPGTGKTFSAASIVATVLATDPTARVLALAPPNVAVVKLVLEMQDALAAGNHVEPMLALFSGTGKLRYAKEVERISPPPARHRGGGTGLSGTPAEGSRTRQGGAVPGRLRAEPTPGPGNGSGENCAGAQKSPLVLRHLVLL

SEQ ID NO: 133985 - protein, 155 aa, Heterodera glycines
MAGNGNELIKREDDENSVNFMNLFENLELMDSEKLASLRDIEKIFADTSPPPTGPSPIESSVLGVVFISHPILWALVQPDILGERNELLDRKNLSLESDQLVFQSTPSYVTTITLDPNNNWPHFTQISLNWFDYHTVTYVPPWTCNNHQNADELI

SEQ ID NO: 133986 - protein, 173 aa, Heterodera glycines
MARDWGTLRSSDSAVGRWTHSFTSKFHRCQRRNWEEFWGTCFVQLNITVYESDSVVVELAKQWFEVSDDQTRRTVVGDGAAAISDHVKRGNRFDAIILDACDSSPHIPCPASPFIALKMLGNAKSALRPQGVFVMNALPASEQNEQKTLALLQDKLLSVFPLCVRMTMGRQMN

SEQ ID NO: 133987 - protein, 55 aa, Heterodera glycines
MPFHHVLLLVLVCFFLLFAFLNFGNAQIFGFTGIGIGFSGPENLSLEVHSKRLRH

SEQ ID NO: 133988 - protein, 16 aa, Heterodera glycines
EAIPEGFGLPINLGAS

SEQ ID NO: 133989 - protein, 95 aa, Heterodera glycines; identical to SEQ ID NO: 124528

SEQ ID NO: 133990 - protein, 80 aa, Heterodera glycines
MEQKVEEKVEEEQKVEEKVEEEQKVEEKVEEDQKVEEKQKVKEKLEEEHKVEEEQKEKAEQKVEEKVKGTVEEEQKVEEK

SEQ ID NO: 133991 - protein, 96 aa, Heterodera glycines
MEEKVEEEQKVEEKVEEEQKVEEEQKVEEKVKVEEKVEEEQKVEEKVEEEQKVEEKVKVEEKVEEKVEEEQKVEEKVEEEQKVEEKVEEEQKVEEE

SEQ ID NO: 133992 - protein, 185 aa, Heterodera glycines
MRWTAKWKAECWPSILAARNTASWSRWPNRAGAWHLELKGGMAIGVFYPITNNWLSFLISDCTNKITTQYQLVLLTDLEEIYFCPILKLNFQKNGDLHRTLAEGLIKYIYAYRQAQSRLTSAFSAIEANDMRKMKSLVDDEIVQSRDSRGTALTSLDFFWTWVFMNVCPENPGPGYKMSSLVTIN

SEQ ID NO: 133993 - protein, 354 aa, Heterodera glycines
KIIFKIFFQFFFSRHDAPSDEQVKRWLTIGEVSQLEQIVLDGRAHLLADKTSTNLASAEFLQGVSQYQSKIDVSQYQSKIDAIHKAVEEGDVRRVKSLIDRNSLATARDTHGMTPLHKALLYGQTNTVRFLLAKYAHCVNEADHTIFNLIDLSNYTYYKGIFKFAGRTALHYAAADANGEHMIKVLQKAGGDAFIEDRYGHTPFFYRTHGKRLNIRTLKDNAVINHLIAGQLNRTLLQDLEEDITDWVHTGNIGKLEELVLNGYADLLLGRNHQVEDAEAISFLEVLPQYQAKIHAIHKAIEQGNLRAVKLLTDRKKLALCRDGRGLVSSREYSSTDPADQLPVILSDFFSSWQ

SEQ ID NO: 133994 - protein, 263 aa, Heterodera glycines
MPKEPSSRAFLFKKWVSNYMNDVYTTDSKIIYCQACQIEVLRNMHLEINTLNLYLKVNNPSFKAFLEKYCGRSILHHETLRSNYVKNCFEGVLSKSKDDIGENGFVWCSVDERTDRNGRCMANLLIGLLNERWNAPHLISVKPLLDENGDPKVDHQTVARFVDEGLADLLSTGAKKNRLLFMVTDSAEYMKKAARNLRVFYPNMVHFTCLAHGLHRIAEEIRNQFKDVDELISSTKMVFRKAPSRVAFYRKKLPTVPLVPKPI

SEQ ID NO: 133995 - protein, 133 aa, Heterodera glycines
FNFLINYFIIILFIHFYSHRVLGISEGIEHVGSLRQDMALYLLICWIICYFCIFKGVKWTGKVVYLTASFLYLMLFFLLLRGLSLPGASLGLEFYLKPNFSKLLESKVWIFYLKPNFSKLLESKVWIDGVTQV

SEQ ID NO: 133996 - protein, 58 aa, Heterodera glycines
METEGKVICCRAAVAWEPNKPLVIEQIEVSPPKEGEVRVKILFTGICHTDIFVIILFI

SEQ ID NO: 133997 - protein, 81 aa, Heterodera glycines
MFTKNFFLSVLILLVLIGVKNCAAYGSRKASAFVPEKGFLAFELIKHRSNDAATDSQKAPYTVSNDPCGIKLGPTFRVIYN

SEQ ID NO: 133998 - protein, 121 aa, Heterodera glycines
MAIYGLCVDRLYRQWPQADNTVLWRTTAAHCTDVNVTLFVENKCAETNQFLMDLRLRYKPEEMHEVMHDFVLPVKASEMQVTVGSKDITKGTVHEVARIKRHEFYRLTSSANDITLLEVQF

SEQ ID NO: 133999 - protein, 92 aa, Heterodera glycines
MSAHAELIDSKILRQDLVHLSPVCPQGFFCQFSAIHKTSHGDSGSPLLREIGGSLYAIGIVRGHESKKNLFAKISPYCDWLKEKSRGEVRCS

SEQ ID NO: 134000 - protein, 54 aa, Heterodera glycines
MAKPSSDWRTIEGLISKKYNKRSACFSRFPVALPGPGPEIFKTREPGPRRTAAL

SEQ ID NO: 134001 - protein, 43 aa, Heterodera glycines
MDTNKEQLRVFSVKIDIGDEELSLAKPSTIFRIANLNFQEENK

SEQ ID NO: 134002 - protein, 118 aa, Heterodera glycines
LFEYPKRTLEKIDFFVFGAVPPNRCAQIYGETESFRNSFPIACTLILRWIFAPHNCLSTPNGHLKKSIFFVFGAVPPNRCAQIYGETESFGNSFPIACTLILRWIFAPHKCLSTPNGH

SEQ ID NO: 134003 - protein, 20 aa, Heterodera glycines
MSAHAAMSGAIAFSGATKGF

SEQ ID NO: 134004 - protein, 108 aa, Heterodera glycines
MLGSVHKSARTTCARQRTGAFGGANASPTGQQQQVHLQLPCYDFCPVQATAIKSVPVCIPTEAGTLTVPEFLEMAQSRAATGGVYKGQGRIQSELMTRPYKEFLVHGQ

SEQ ID NO: 134005 - protein, 157 aa, Heterodera glycines
RSGACGLICGAWPFLVRGAICLVYSDNERDSSLLNSWLIASGHNFLEGFSVFSRTKLSNNRSVMPLDVRGCTRATLAKSACLPSPKGVGKPVKICRDWDRTLQLLSVNEEFLVGASHQLALNTSLPFVHTARRCPGLSHFEKFGDGCSGRSVCRLEP

SEQ ID NO: 134006 - protein, 1047 aa, Heterodera glycines
PVSNGCHSLCSSNSVQTGPNGVSTHSSSFSAIDARPNYEIGNRRGSPSFQRACISIDLLVACQREVNFLRMIDRKAPVLYKAPVLYEKVVVENAIRRYEMCWLPAQAAKPNLHNIPPLDVHWIWHTHPLDVHWIWHTHMLSPTHYREDCLAICGTVVMLSPTHYREDCLAICGTVVDHKLLNADEIQQRYEQSVSSWSEFCPEEPYDFLQSNDRVREQYQQKSKYNLAEAVQRQRNFNYQVSLPHFTAVSLPHFTAPRFLTDAIDRYIKFLQLKQTYADHFLTPCYDFDLVWHTHQVHPLDYHRDCVAIFGAVLKHDDVAIFGAVLKHDDSVNDRSKGSSVNDRSKGSKLLKGETMTKKAWNTHFKESFWRRETMTKKAWNTHFKESFWRRGCMYRGHVGHVAPAFLGFESQDNATITYGHIHIPSIATITYGHIHIPSIALKEIPVQREQLRMKLNYGGKKIITFNADLCDKPVTRSSFSLVWQPNATANSVTRSSFSLVWQPNATANSASIVKFSIVKFPFERKTPHDLLISLDLWNRTLIHKRDHDLLISLDLWNRTLIHKRDVVRLLGRLPLERLLPSENTKPQQGRLPLERLLPSENTKPQQRVVQAYLESVKEGEFRARVNVTASVSLNRELELLAGDYVEQSLQPDSRLWALCQSAALNRSQLHPGVHVFTAIHTLVDVRDGTKYFAQILVDVRDGTKYFAQIVHSAPLLLSMILIFGTEQRLLSMAHLLLSMAHLIGADSLPSKEQLDSNLVQFLPHLSQFLPHLSSPDERVLLVLNREGDFGILKGRWHGFVRRQTGDKRRKGKSGSAGVLGKSGSAGVLNVELFNLLKNTVQKFQVPNSDGNTVQKFQVPNSDGSTLFTIGDSTLFTIGDAQARLNGRAQARLNGRRMHCRTTQTSEYLSCIFGIGTLFILRMHCRTTQTSEYLSCIFGIGTLFILCNPDKVRARSESTTPGHQCQKWPMCQKWPMTLACGYGRPVPSNRILAAQHQQNFTSAEVAPMLLMMNAMTDGTFSGCDGAASCGSVTDIANCDMNPLNFLN

SEQ ID NO: 134007 - protein, 555 aa, Heterodera glycines
FNKVEVKNLTIRALVVYHCFFGMALNLETDNVGVVVFGNDKVIKEGDVVKRTGSIVDVGVGEALLGRVVDALGNPIDGKGPINVSKRSRVEVKAPGIIPRVGVREPMLTGVKAVDSLVPIGRGQRELIIGDRQTGKTAIAIDTIINQKRFNSSTEEKKKTGKTAIAIDTIINQKRFNSSTEEKKKLYCIYVAIGQKRSTVAQIVKRLTDTDAMKYTIIVSATASDAAPLQFYTIIVSATASDAAPLQFLAPYSGAAMGEFFRDNGKHALIIYDDLSKQAVAYRQMSLLLRRPPGREAYPGDVFYLHSRLLERAADVFYLHSRLLERAAKMNETHGGGSMTALPIIETQAGDVSAYIPTNVISITDGQIFLETELFYKGVRPAINVGLSVSRVGSAAQTKSMKQVAGSMKLELVAGSMKLELAQYREVAAFAQFGSDLDASTQQLLNRGVRLTELLKQGQYVPMAIEEQVAVIYAGVKGHLDKIDPSQITRFEREFLAHIRAHEQELLKVIREEGQLTTATDEKLKNVIREEGQLTTATDEKLKNLVTSFLGGFKA

SEQ ID NO: 134008 - protein, 25 aa, Heterodera glycines
MLETMNIIRIDNLRKQCRRQAPPET

SEQ ID NO: 134009 - protein, 123 aa, Heterodera glycines
MRKTFCGQIIEGKGIENATEKVGKMSIELAKELENDKTLKENIQNALKNKKDKFIFKFSNAIELTDQLTNNYTQEYLEKLKTTFYLELAGFLKSSKASIENLCQKQQIAFAPRRHRRADFADK

SEQ ID NO: 134010 - protein, 142 aa, Heterodera glycines
MLALIINNTPYFLYSSDFWIEIRNSMKTLRNLEFYLKDKKPRFLLLFLGGGGEMQQIDEKHHNLKISQSFKSFQIQMFLLAIVMLLSIICSNGIYEVRQNEGNDLFGELRQNAIIGGMEQFGNEFKHNGICKGIMSRSSLLF

SEQ ID NO: 134011 - protein, 232 aa, Heterodera glycines
MYDWVSGKRILKNSYYIDKEKALERFPMLKKESLKGALIYYDGQHNDARMNLAIVLSAIRNGAKCCNHVAVEHLLKDENGKLCGAQVKNMVLSISHFFKSPPPPSNGQLTGELFPIRAKCIVNATGPFTDSIRMMADPDTEPICRPSAGVHIVLPGYYSPANTGLLDPSTTDGRVIFFLPWQRMTVAGTTDSPCDVSFSPKPRNSDIEFILGEIRGYLNKDISVRRGDVMSA

SEQ ID NO: 134012 - protein, 140 aa, Heterodera glycines
LTGELFPIRAKCIVNATGPFTDSIRMMADPDTEPICRPSAGVHIVLPGYYSPANTGLLDPSTTDGRVIFFLCVFVLECPHKLSYIFSPWQRMTVAGTTDSPCDVSFSPKPRNSDIEFILGEIRGYLNKDISGWQCQKSQI

SEQ ID NO: 134013 - protein, 37 aa, Heterodera glycines
MSITQNKVHIHDQRPKLQKKIADFINIFLYLSTLFGE

SEQ ID NO: 134014 - protein, 153 aa, Heterodera glycines
MPQFIEARNLHRPHTFERIFWPNLRPSTRPNTQWKCGDLIISCQLKIEFRSFNGEHVRDSPWHIQFSGAVGPASSPALSSDHEEHVARNLAALRRHEQRAAGGALNGRDGVAEEFVNGNGEDIITELVGPGLNRAAVNELAHFSIHSNQRLRC

SEQ ID NO: 134015 - protein, 22 aa, Heterodera glycines
MARIVPQEADGTVRVEWKPIEA

SEQ ID NO: 134016 - protein, 139 aa, Heterodera glycines
AVVTMCVIWASTHKAYFTSLHYFGRAKRFLGMSEELREIVTLLGVLRRKKHGKIITWDDVCNFLENELYNRPFEPHELLMKLRFIDENTLSSALSTMRHNSFQSDFLRDAEYLRRLRALRPDQPAYLLRALRPDQPAYL

SEQ ID NO: 134017 - protein, 85 aa, Heterodera glycines
MVCIRPNLFFLIKSYIFFGFTVKRLMYESISAYDSDGLARNNGEIKKNAKHSYGVGDTVGIGVNSATRQIFFTKNGIRLGWQINK

SEQ ID NO: 134018 - protein, 174 aa, Heterodera glycines
MNSQQRQAERAQLRARLNLLVDEVDIVVQGLINNYQADGLINGAPHEGQLMGMDHGQGLQHEQQQQQQPWELDPPMPAQQLEIGPQLPDAWELVPYQPTPQWDQVAHVEQQPQQQQHYHHQQQQQQQQQGAWDEEWEGPLSPNALAQIQDEADGLRQDLSKDFGSGSLHKTKIK

SEQ ID NO: 134019 - protein, 216 aa, Heterodera glycines
FKAKKKRVIGGLSPVLGTVVIHEVYPDGAAAIDARLKPGDQVLEVNGTSLRGTAHEQAISLLRRTPAKVRLLIYRDVNLQMSMLDPAQIYNILAIELTKKSGKGLGVSIVGRKNEPGVYISEIVKGGVADNDGRLMQGDQILEVNGQNVANCLQEDVATLLKTCTGRVVLKVGRWKLNETATCTGRVVLKVGRWKLNETAQKVRSAQPPNGTNAVA

SEQ ID NO: 134020 - protein, 376 aa, Heterodera glycines
MFAFSTFSSLSWPFSPPILLLFSLLTLQNSLSVDALFGWGDKSESAEQSDTSLSINLALNHQHSSVSQSDEDETQENAEQPAVQQQQQQQQYGSGGYGSYSSGGYGSGSWSNSAGTGTASASSSAQQQQSGSQPSKESDDDSEETIPYGDDMITGGDAGADQSVDGQQTVISSGSEIIYSSNMNTSDVTNYASGSYDNSSNNYDSSSNGTGGNNAIPQQPLISPNSGSISSSKSNYNYSSVSSSVQIDYSSSQNGGGGTNYLEEQHNSDYSASSNSNQNGDNAADQQNQQQQSQEYTNYLNSIRTALNQTNGQTQQRQARARLAACVHAISVLLWQGYDQLLQNNGTSCRKNGDTGNSGGEQANDGSSSCTVKSRN

SEQ ID NO: 134021 - protein, 263 aa, Heterodera glycines
MKILFVLFLYFAILTIFFHRFSAANETNEHISTAVDADAEIEKLSKKHVTFADPIETEIKGRVTLAELIKKERDGESTALISQEGPSAADDADQLIKKDERIREKQWLIKGSEMENAAEKRDEKAIAEQVEKTHNSLSLTQEESADLLKTERKPMINGSLAENPNPNNGTIFADVIEEMEAKRALKRNALVKLIEMEQKGVHQTDPAPMPKAEDGIRESSTTDVADRIVEEQKKAADGPKAPIAKQTLAELLEMERSSQEEAI

SEQ ID NO: 134022 - protein, 149 aa, Heterodera glycines
MASSADAFPNGAVAIECELQLLAKQIDETLTTAQQKEATTAKDNVLLLRQKCQKLEQNLAECKEFLNRMAMEDDFRTNTNRTIIVVEDKENVPEVVQKAADQTDGNNASDIIFVDDVIRNKWVAKIGQKSVKNEPTEVVELDDQPSEAE

SEQ ID NO: 134023 - protein, 107 aa, Heterodera glycines
MRLDSDESDIAWFLGSVIHLLAFQTYPLEEWHSRNKTLADQCQLDGTFKMPQTSNHFVCFCSKTASTKCYFLLKSSKFVLIFLMVSRKKCSPRRFGKENFLTEMDNC

SEQ ID NO: 134024 - protein, 94 aa, Heterodera glycines
MAEERREKVEGQRGKPRGENGEKENEKDEMEKEKREKEMEEGKREGGEGKGKGREMEMEEGKRETEEERKEKEIREEMEEGKRDGEEREEIFVF

SEQ ID NO: 134025 - protein, 122 aa, Heterodera glycines
MLHKATRMVVLEYFESFFGQWDKKQAQPWMDEYEVRSVRRQAEKIKAGKAGGTVELIAAAKKFNMNVLVYKTDKDMWLCMSPKTAHKWDLDKNCQSKDAMTIALELYDNENYDVIMDVQQKK

SEQ ID NO: 134026 - protein, 58 aa, Heterodera glycines
MNLCDDPQALQKQWKSIRDKYIKEKKRRKGGTTTMMDHSESTTNGTRNFNGKMDKKYS

SEQ ID NO: 134027 - protein, 18 aa, Heterodera glycines
YREAIPEGFGLPINLGAS

SEQ ID NO: 134028 - protein, 37 aa, Heterodera glycines
MSDSSIRRLSILSILPTDMSRSHHHKGAKMDGRIVVL

SEQ ID NO: 134029 - protein, 38 aa, Heterodera glycines
MATPLVGGWFVNAQQKKVVTGYLTPCNHGTLNIILPIY

SEQ ID NO: 134030 - protein, 174 aa, Heterodera glycines
MVIKSGMGWKKMHFERKFTPHFCTAVGFTCHVLIGGLLNENVRANAICVKLESGESIPLYTRIEYRQANDRLLNILRRYNEYLPDDYNLIIVRNAKLKLCTKLHCTNCPLYELNIVRTAYCTNSIVRTAFVRTANCTTAYCTNSIVRTAFVRTAQCTNCHDPEFKTASFNLFYD

SEQ ID NO: 134031 - protein, 34 aa, Heterodera glycines
MSKMGRMESDTDPNTVTILRKHQAPQRVLKSDAA

SEQ ID NO: 134032 - protein, 96 aa, Heterodera glycines
ITIEGDPVPGHVGVPVPCCAVKLIDVPELNYFAKDGAGEVCIKGPNVFRGYYKMAEQTAETLDIDGWLHTGDIGRWTEQGTLKIVDRKKHIFKLAQ

SEQ ID NO: 134033 - protein, 264 aa, Heterodera glycines
MAQSFGDIGQFGINYANDGTVLRNIPIITTVSLDGIPKINGIIQRRQEDEGEEEHQLSIDESLQMVESTFILEDAEEEEEEEEIPDIDVEVEEEVMLTKLYKGAPNAEIETIEEEEEPMDEEESGREREKEERWKRVGMEEEQRDGRETERVEDGEGKEEKRRWNREITDEKVEERWKRLGMEEEQRDGRETERERGEEEEEEREIGVGIELVKEKEESAEVLLDVTEGTAQKQQQRIVLIVPDNQMPKQPVAMPLPEENASKT

SEQ ID NO: 134034 - protein, 73 aa, Heterodera glycines
MLNVVEGQTEEEPTYEIKQLEVNCGSVAGTSLDRRAAQLNHVMLKKVGFHAAPEDLPENWPDRAQIESIKMAW

SEQ ID NO: 134035 - protein, 81 aa, Heterodera glycines
MLPNFLSLCSVFAVFLLLFTAQFPPKVRGMICGAKALKYQRMEGFSLTSSPRWRLSRPKSMSTDTLKSPKIFTPERSESNL

SEQ ID NO: 134036 - protein, 215 aa, Heterodera glycines
MALVKNGTVRIPFLMKTRIKFPIILKRMFGKHSKQLLFGMLTVMVTVMLNVSSMNNDDDNNNNYHPYYYYNNYGYGNDSNFPGNNNWYNANAYTDNWYSVNDGDDDTSGYGSTTSGNYGFETNSYSSSTLGGNYDYGNSSESSSAPALTKKKKELQQIFRGNVQIRETDSDGLCFEVYCGTSNPTDGIFTDHYGNFEETLHKEQIKALKKMQIWN

SEQ ID NO: 134037 - protein, 88 aa, Heterodera glycines
MGAQSASLAYGNGTLFAALGAGTPGSATDRAYGLRPLRHFLHSSTPSGGPSLTKTEPTSASACSFFFYMMKAISEIFFGWVHMEERDL

SEQ ID NO: 134038 - protein, 380 aa, Heterodera glycines
MVPLLNEARKTNSSIKRRDVEEYLAEQPSYTMHRQAIRRFKRLPTLASGLHTDWQADLAVFDRLAPQNKGFRYLLVCVDTLSRQLFVEPVKSKKSEDMVHAFDRLFAHSKYIPWKLVTDQGLEFTAKRMQTYFDSKNVKHFCMYTSPQFHAGIAERANRTIKERLFRYFTARQTQRWLDVIQDIVNGINHSYNSSIQMRPVDVTFRNADTLREKLANEAAMSRPKRLPRFHVGDLVRIEKHKHVFQKGYVGRFTSEIFKVDSADEGRSPVTYRIRDADNELIKGRFYASDLCRVRKNTHQDGEKLYDIEKVLRKKKKDGVEYAYVKWKGKNDKTKKCPPFRQILFMLLFPRTRTLKGTGRTLSVCDYHEKYNLIRNGMWA

SEQ ID NO: 134039 - protein, 40 aa, Heterodera glycines; identical to SEQ ID NO: 126546

SEQ ID NO: 134040 - protein, 123 aa, Heterodera glycines
MRLMSIREAVESGLFDVTSGELINPISGRHYPVQRAVQMRLVQTTPERAQQLEDALAQAQQQHAHIVQPLQKRPSGQFSPSSISLGSGGGGGVIAGPAGGAEHGYSSYSQRRSSYGVGDGYPS

SEQ ID NO: 134041 - protein, 92 aa, Heterodera glycines
MYFGSGGDPELKKCVICGNLVQLADKMMIDRVTLHNKCFNCGYCGNPLKPGECAMEVHSFGRRWYCSGPAGSCAMLPTAQKEARRKTQAAKQ

SEQ ID NO: 134042 - protein, 102 aa, Heterodera glycines
MKRKEFIQRSDELKRMFEIGKQKQFVKELGIGKEMFRKLKREFGIEMRKSGNRFSNEEKMSKMTIYYQMKKANPSLLDKEIAELLEISERTLRNWKNKNQNL

SEQ ID NO: 134043 - protein, 138 aa, Heterodera glycines
MLADQQKMVQDQSQQIAQLIAIRQNAPNAAAQPNQGANSVPILPDISPFEPTDDKSRISEWIERFKFALDCTAPTADDEVKVKCLMNKLSESAFSEYSRSVLPSSVTDFSFKVTTEKLEKLFAKAQSIFIDRYECLKA

SEQ ID NO: 134044 - protein, 987 aa, Heterodera glycines
LKTAVLFNKKPVEFHLDTGSDIVVIDQLTHEYVGRPPIEKCNEIGKAFDGTKISFIGKGFGTFKFGKIEVEQTFFVAKAGSLNLLSCKMMDLFGLLDELKLKISNPAVNACPEVEIQGLEKAFHEIFEVEIQGLEKAFHEIFSEELGHCLKEKAHLALKDDARPVYRKARPVPYNSLEVVESELSRLEKMNVINKVEHLEWAAPILIVKKADGSARLCIDYSTGLNDALLDCQYPLPIPEDIFATLNGGKIFSQIDLRDAYFQVELDENSKNLCGLATHKGNYRMERLPFGVKSAPAIFQSIMDKMLAGLEFATAYLDDIIIVSKSIPEHTNHLKEVFGRIQAYGFRVKLAKCKFFRDQIKYLGQIIDKNGRRPDPAKIYAISQMPAPNDIPSLRSFLGMVNHYQQYVKNMRFIRKPLDDLLKKEIDWSWSEGCENAFRKIKETDASELGIGAVIYHKFQDGDASELGIGAVIYHKFQDGNIKAIAHASKSLAPAEKNYSQIEKEGLALIFAVQKFHKMIYGRHFTLQTDHKPLVSIFGSKKGIRQCSANRLLRWSLILLAYDFTIEYINTKDFGPADALSRLIAKGNETEDEKIIAMINAETDFETNFGQTISKLPLKFSDLVAASERDENIIQVQKFVKKGWPNEKAMDKENQIVRDLCRRKEELSTEKGCLMYGERVVIPKVFHSKILKLLHKGHPGMKRMKQLARQYVFWPKIDQDIEDFVRECVPCQAAAKAPIKTNLQSWPKTSGPWQRVHLDFAGPFFGKHFLIVVDSFSKYPEVFEMSTISTAMTIEKLRYLASRHGIPETLVSDNGTQFKSTEFAKFTAANGINHLFSAPYNPMSNGQAERFVDTFKRAFRKLKEGMSSVKEIIETFLVTYRTTPTDSKSPAEMLLGRKPRTTLDLLKPPPIKKFNRRFGTRPQIKKFNRRFGTRPQIFASKDAVWARHRLSQNWKAGTICGCSGVIYNVRFEDGSGRYHANQLRFRK

SEQ ID NO: 134045 - protein, 35 aa, Heterodera glycines
MKSGAALAPLLARHPLENLRNLNKIIAQLTLCELK

SEQ ID NO: 134046 - protein, 178 aa, Heterodera glycines
PQNEHIELHRKRHGRKLDHEERTRKKLARAVHDRSKVAKKLRKGKAKLYHKKRYAEKVQMRKLIKQHEEKKQKGTTDTQTEGAVPAYLLDRQKETAGKALSTAIKQKRKEKAAKYQVPLPKVRAVSDAEAFKVVNTGKTRRKGWKRMVTKVTFVGETFTRKPAKFERFIRPMGLRFKK

SEQ ID NO: 134047 - protein, 59 aa, Heterodera glycines
MVMEDIHEVGKKAGLFTFEQAKDIHLYAELFTVENDLLTPTMKSKRPQLMAHFKDELCK

SEQ ID NO: 134048 - protein, 29 aa, Heterodera glycines
MSHLIGLKNDGQQMSFLAVWPQMSGHAMI

SEQ ID NO: 134049 - protein, 62 aa, Heterodera glycines
MAKLITVNSAKGKFCDGYCYHKHKMTKNKTWWKCELYQQGCKGWGFESNDQILLQIEREQQI

SEQ ID NO: 134050 - protein, 351 aa, Heterodera glycines
HIKEACVLTRLVASSVRLSEAVVGIIKALMNSGDLQIVNKDQTGLMNSGDLQIVNKDQTGLMEDLQTEADRSAQLCIERSLREKFGKNLTIVGEEVNECRLSLFGLPFLQEIELPSTPFEPLEALPPSHHLVVWVDPLDGTSESQMAKINKFQALLRHVTVLIGITYTSESQMAKINKFQALLRHVTVLIGITYKGRPVAGIVHQPFYNGEQSRTVWSIVGVGTFGLKKTAQQNMNFPKGKAAFICLVVQKALDALEEKKLISEVERAGGAGFKVLRCLEGATAFVYAAGDTKKWDIAAPEALLMAAGGGTLSDMSGRQIRYETSVQLANSGGLLATASGVDHQVSGRKRK

SEQ ID NO: 134051 - protein, 55 aa, Heterodera glycines
MNAKKCLTTCGDCTMKIKKNEDLAIKNFLVEIELKPSEPDFGSGKSRVPEHPKET

SEQ ID NO: 134052 - protein, 142 aa, Heterodera glycines
MNRARSDPELNANFPQRTNDLFGGRVYCIGSLRRLTNVIFLIDTGSPFCLIAAQFIREHNLAIVNTNITFSLGGVGGVSLRTLGRAEGVEMRIGRTRFSSDLDCVRDESYHVLKTQSIMTYWMTCTRRSLPLSRIRQCVALC

SEQ ID NO: 134053 - protein, 61 aa, Heterodera glycines
RNQPGQPLSAAGARQQTKHHLGQCKLRLGPADRDPVVARQRHLQANTNAGAGDGSNDQKAI

SEQ ID NO: 134054 - protein, 118 aa, Heterodera glycines
MTSPFKVGAAAFGAGMCFAKTYMEKPKSEDDKEAPKKEEATTGGDAEEKAKKKDKKGDGAAAADKKEEKRKDKHKSKEGKSDDSNRRSKKDKHGKKDAAEPAANAGEQSTAETTQADE

SEQ ID NO: 134055 - protein, 80 aa, Heterodera glycines
MTDQKNENRKQQREFVLRHKLAERTKKRTRYGLNSIKKMLIGGGKLAEKFSNEFQDFYLTSINLEKVPTYASLNREFHPL

SEQ ID NO: 134056 - protein, 16 aa, Heterodera glycines
EAIPEGFGLPINLGAS

SEQ ID NO: 134057 - protein, 29 aa, Heterodera glycines
MNNGIQFGLMDQNNLVDFWDTYQTTNLRG

SEQ ID NO: 134058 - protein, 590 aa, Heterodera glycines
MIYRFVTRNSVRRITSVAKKKMMLHLVRAGMQKGPSMLHLVRAGMQKGPSMSKTELDDVLRWGTEELFKEEEANELGKSSEHNIVWDDRAVDALLERGAEEEGEEANERKDWANEYLSSFKVATYTTTVATYTTTKEEEQEEEEDEVLKEEVQETDPDYWEKLLRHHFEQEQEVERMNLGKGKRVRKQVNYATEALQQDWHADQDYSDDQDYSDSYSGASDHDGSGSNEDEFDSAREERRRKRERDSEKLPPLLARVNGQLEVLGFNPRQRRAFFNAVVLGFNPRQRRAFFNAVMRWGMPPHDAYQCQWLVRDLKGKSERAFKAYTSLFMRHLCEPGADSQECFNDGVPREGINRVQVLTRECFNDGVPREGINRVQVLTRIGIMSLIRKKVQEFEAINGEWSMPEVKVEMIDAATELTGSETDRPSSKVGEEKDKEETSEEKQQLEETAEEPLHQQQQPHREPRPLFKFNIADGGFTELHSLWVNEERVAVPGNEYEIWHRRHDYWLMCGIVTHGYSRHGYSRYNEIQNDPRFAIVNEPFKSEQGGNFMEIKNKFIQRRYKLLEQALIIEEQLLLEQALIIEEQLRRAA

SEQ ID NO: 134059 - protein, 160 aa, Heterodera glycines
SSIFKVLNEEEQLGMRLAAKLGREVLDEAARAIEPGVTTDEIDRVVHEACIERECYPSPLGYYKFPKSCCTSVNEVICHGIPDKRALINGDICDVDVTVFHRGFHDVTVFHRGFHGDLNETFLVGDAVSEENLKLITVGFPPMDQITFILKNSEKKWQIF

SEQ ID NO: 134060 - protein, 128 aa, Heterodera glycines
MSNLPVSSLIRQQHGGGLGEEDGIESGKRKSKDEYRRQKDLEEQRKAGTAPAMVDVETGRDINPHIPEFIEKTPWYVPSSGPTLKPSLEMGYDAKRDRWNGYNAEDYSLVAAEFEKMEETRKLIRAEQ

SEQ ID NO: 134061 - protein, 114 aa, Heterodera glycines
MGPLGAQTFNAWVQSQATLASYPFRLSWGKLRREPATRCLDYPFAPIPKSDDRFARQNRFGLPPEFPLASSCSGIVHHLSGLSAYALSPPHRMRSRRDYVAPQHRSARDHTSAP

SEQ ID NO: 134062 - protein, 66 aa, Heterodera glycines
MEESGDELGTDKQSVSRDRDDDNIAQQQDSTNPISQNMVSPKKRWTSALRVVTAMARFRNMPRVGN

SEQ ID NO: 134063 - protein, 299 aa, Heterodera glycines
MILSKIAETLAPSKKSLGKSEQGEAVSAAEAAPAVRQQKEQKKEDEMPKKYEDKYEKVKKLGNEAKEVARSAGHSAKEAASRVGSSLKNAFTEKDHQQRNGQNDNNNQKGTEGQNGIEERQKQSKSDQKNGERSDQRMGSDQRMGSDQRMGDNVIKGWEVIRETEHKVIKGWGVIRETEHKVIKGWGVIRETEHKVIKGWGVIRETEHKVIKGWGVIRETEHKVIKGWGVIRETEHKVIKGWGVIRETEHNVIKGWEVIKGWEVIRETEHKVIKGWGVIRETEHKVIKGWGVIRETEHK

SEQ ID NO: 134064 - protein, 116 aa, Heterodera glycines
MYEISADPTDKGVKKRVISTDNGQFKWNIWNAVRDLDTNAKITVLLCLDDEYRVYGQFADYDAMEDEMGERFHEVFQVVYNNYPIYEIDETVPIEHDVPIEYEDEGHSTCTIQKSV

SEQ ID NO: 134065 - protein, 82 aa, Heterodera glycines
MIGRAVRNRPFIFEGIFKFILYPRKMAISFFEKFYTSQKRLRMRRRAVHNRHFISQRIFIFRGYPRKMAISFFDKFYTHTNA

SEQ ID NO: 134066 - protein, 92 aa, Heterodera glycines; identical to SEQ ID NO: 125147

SEQ ID NO: 134067 - protein, 187 aa, Heterodera glycines
MHLNRRDSTHQNSIHWIQLSAFQSLELNPLSFQSPGSNRPAFQSLGLNSPVGQHDAPKYETVPKLMEDFVRDVNHHLHRMDAPELAARAHFELAYIHPYMDGNGRVCRLVANWILSKGRFRMFELPEIARDEYNAGLDLAVRGRREGHATGLDANINRSGEHDWPRPFILLIYFHVQNAQQENVTFD

SEQ ID NO: 134068 - protein, 29 aa, Heterodera glycines
MPNEKQKLSIHRGVFFVVAFLGNGQNRSK

SEQ ID NO: 134069 - protein, 132 aa, Heterodera glycines
MNLLITVVPLLIKFVLLLFTVQPLLIIVPPLLITVEPLLITAVPFLITVVPLLIIVVPLLITFVPLLITVVPLLINHITFAPLLIIFVTLLISVVPLLISVVPLIIAVVSLLFIVVPLLITVAPLLITVYLF

SEQ ID NO: 134070 - protein, 53 aa, Heterodera glycines
LFSKYFLSFFSAGTASDNIFYLFRKINFFFFLIYFNYISFLNFLINIFKLSPY

SEQ ID NO: 134071 - protein, 152 aa, Heterodera glycines
MCYVPATTTAQRRTDASTAVRSPHERASHIGAANQPSEAARHRHIATQQPYTGFHMCSTERYTTAPTYGSTPKAWLQQVHLQLPCYDFCPVQATAIKSVPVCIPTEAGTLTVPEFLEMAQSRAATGGVYKGQGRIQSELMTRPYKEFLVHGQ

SEQ ID NO: 134072 - protein, 29 aa, Heterodera glycines
MVVSFPVLRAVTSGVFVLAATSVAVMRRR

SEQ ID NO: 134073 - protein, 68 aa, Heterodera glycines
IIERADWTASDFCGQLFTDCPPNSDEMQQILSSFELANKLNGSAANRDEENGGGNDGGGGGGTGNLLE

SEQ ID NO: 134074 - protein, 77 aa, Heterodera glycines
NYLRVFSSWDYSQKSWLFIFDQFNSQNHNHFHFSYHLLCRSLPPQCFSFFLCLFHCCLRLKATRKQMYTYMFTIRHG

SEQ ID NO: 134075 - protein, 131 aa, Heterodera glycines
SSITPSTLSGEPAPAVGTKIEAQLALYKDVERVGIDADIFLWWKENGLRFPELAKIAQIVHSIPATSVSSERLFSKAGLIYANSLRNKLSGKTVRQMLVVKANMDDVKLAPPIEPDPIDLIDYENEMINDD

SEQ ID NO: 134076 - protein, 84 aa, Heterodera glycines
MKVLPPSLSPPPYRQFDLQQPYRWPAAAELQQQPEQTQFSSNFGPLRQQQQQQQQQQQQLNQRQQMKSGIGFYKNILFSSKFIN

SEQ ID NO: 134077 - protein, 233 aa, Heterodera glycines
MELEQSFELPVYPDDESLSPANSLPTDTVPFGPDVDEVPELGPNPHDQNCEEAINDYWQRYREGKEYRERKKEEKMKKTGQRKRKVSGMATAAGEKEQKEEKKEDEKKGAEEELQQQLPINAGTEGTNEGKAEVGEETDGAETTEEAKKEMGSAPGEMVEDGTEGREDVCKKGNSESADVGLEVEQLKKMLRDSGQMATDNAPLPLPRWVKGCGAFKRKYKKIYDNMIKINNS

SEQ ID NO: 134078 - protein, 152 aa, Heterodera glycines
MDVTLPVSNSAGEWIGEERRDGVVLYAPWTDEWHVQQQQQQQQHQQQQHQQQQQQQQQQFVRRTGTGWTRFPAWNEPLVANDWREKEENLIQRKRLQRENPEYWAQILEEEKRAVCCWGREDSGWKFWRRALVNDVCMGLKVLRLTMIGDGI

SEQ ID NO: 134079 - protein, 150 aa, Heterodera glycines
MDVTLPVSNSVGEWIGEERGDGSVVLYAPWTDVWHVQQQQHQQHQQQQQQNEVQQQQQQLVRRTGTGWTRFPAWNEPLVANDWREKEENLIQRKRLQRENPVYWARILEEEKRAVCCWGREDSGWKFWRRALVNDVGMGLKVLRLTMIGD

SEQ ID NO: 134080 - protein, 262 aa, Heterodera glycines
MSEFVDWILGFKRFETVAFAHYGGRFDSHFVLKELTERGVETELMMADLKIYQMKARGVYFRDFWLLSQNKLADLPKTLGFKTLAKLYFPHKYNKNVNFGKKLTHLPPLEDYCPDNMKEEECAKLVKWHNENYRMEFELGEQLKVYCENDVEILMEAILKFRQLFLEITDGMDVLKDSVTIAGVVMRIFRTKFLRENHLPIIPEGGYERAENQSKIAVKYFEWLAQSKRVRLRHACNGGEVEIGGLKVDCIIGAEKKIIEFQ

SEQ ID NO: 134081 - protein, 46 aa, Heterodera glycines; identical to SEQ ID NO: 129884

SEQ ID NO: 134082 - protein, 53 aa, Heterodera glycines; identical to SEQ ID NO: 126996

SEQ ID NO: 134083 - protein, 36 aa, Heterodera glycines
  unsure (1)..(36): unsure at all Xaa locations
NKSKRKKINLFFXINKKHLSEAVPAEKKTKNFSKKS

SEQ ID NO: 134084 - protein, 152 aa, Heterodera glycines
MILPTRLFFLLFQFLLVISTLSETQPKLPSWAQIDEMYSKLFGLPIKKEQQTVDELTEANVPKELDQNLIFEIEASVFANEIEEILKNASIKSLTEEQNKILEKKRKNFKEFFGVAEEKRRPTMSRVCELWKFGRQIGDEFGGIKTFFTSFF

SEQ ID NO: 134085 - protein, 131 aa, Heterodera glycines
MLGPALFNIRFPLVQKMEFSEKIVPFGVLTMEEVIGIEKYHSPPNFRGMSNGILYPLQFPCHGRISPRGTILVHIDKLSEFAGESVGSRRYSIIEPIMGFGWRIVAQIRINIKTKEKFLGFCLFSLVPKGG

SEQ ID NO: 134086 - protein, 121 aa, Heterodera glycines
MSIKNDVENCSSFILQHVTGHFSKNNVEWWYDLKKRIFVQTLPEKMTKIGKIINLEFVIKAYTCEIEGGLNAKMTFITDFLLKDEMTFKSVMPIKICHSHKLNGEASNLEQLTDHVIHIVI

SEQ ID NO: 134087 - protein, 78 aa, Heterodera glycines
MRSLLFLAFVALFVVKCSADESMQNDENDEQSPPGPPPSNEMSEESNDRRKRSPFFNFFGGFKKGGRGGRPKGEKPNG

SEQ ID NO: 134088 - protein, 104 aa, Heterodera glycines
MRRRSIRSGIASGEISRVSPFLNDIVHVNKLGHEEMMNSSKFSSAASVRSANVPRQRMRSRSAGRQSIARLIPASKPNVHIHKPAIPASRPNVQIHKPAPKEHI

SEQ ID NO: 134089 - protein, 522 aa, Heterodera glycines
STTNSNISYSKIQPGPYSTAGFNPKIALSVLFLCPPHTLSIPSNFGLCYGRLRSVLNTVSKKHPFLEKYNEIFSEQLKLGIIEKVDNPSKFSHPLHYLPHHAVINEQKGKLRIVYDGSAKIGPGLALNNCLHPGPVILPQLIGLLIRFRFPQIAIIADIEKAFLQISIHPQHRDCTRFLWLKDSSQPLSQQNIQIFRFGRVPFGLSCSPFLLAATIQHHLSLSPSPLSNEILNNIYVDNILLNASTSSEGQSKCSDAISLFQCASLNLREFTSNSPETLAHLSHDQKLTGPNQKFLGIKWVTDTDSLIYCLSPPPPNFLLTKRSVLAFVSSFYDPTGLISPVLLSHKLFLQSLWHEKIGWDDILPKNCEESWSKLFTHWSPNSEISIPRFISFLNVKDNKHYQLHCFSDASNNAMSVTVFMRISHCSQENAKSHLIFSKTKIKPLPKRSPALLTIPRLELIAALLGTRALKFVFSQLSEFDLDPILNLWVDSSAVIGWLHSPPERDIFVKNRISPIHSTKNL

SEQ ID NO: 134090 - protein, 133 aa, Heterodera glycines
MQNEAVLLNGSDKGGASFEFDDGSASSDTTDANDDEFVVPNSTDESDETCCDTFFEFNEAHTSSRKQNKGKAKRREKTVKGVKDDGEEANYMERIKATLLTTPMTSKHCPMTAAFQIPFGTDFTGHKRNESRQ

SEQ ID NO: 134091 - protein, 117 aa, Heterodera glycines
GAIAQLMLSNSTTFVKDCCWLISNVLAGNTSQIQDVIDAQLLPILLSVLQKGEHRLQNEADFEYARISPFGAAHCCTNQIYSNVFKIIEEFFSEDENEGLEMKGDVQPQNQAIQQKP

SEQ ID NO: 134092 - protein, 135 aa, Heterodera glycines
MKRENGLLTRNFSNEQKKEIIHRFEIIKEEFMRKFKIKTNAKISDKIARKVGVNLETINRWKRSFGSTAKPIYTSAEQLEFIRKYDALKIQNPLISDQNTAQMIGTNAISIKRWKKKFGIAYPCKRDGSRELIGQ

SEQ ID NO: 134093 - protein, 173 aa, Heterodera glycines
ENYNKMDNASGTDLLIGYLSLFVSCLSFGFLFVPLKRCDTKDGLFVQWVQLFVQWVQCAVVFMAGLIINIARGLPPFNLIAAIGGFLYATGNVASVPIIAEMGIGLGMFIWGSFQIIVGWSVAKFGLFGIIVGWSVAKFGLFGTKPQQIKSPLINYLGVLITLISGVMFVFVY

SEQ ID NO: 134094 - protein, 32 aa, Heterodera glycines; identical to SEQ ID NO: 127531

SEQ ID NO: 134095 - protein, 161 aa, Heterodera glycines
MLNLDPKERMTAKGVVDYLDGKCKPKYYEKTAEKVAMFGNVSVEELRKLTETEGFTEGFNAFLKGPEKEWKNEMEKKEANEKKHEEQIKKMEQQKALKEKEKKKTEKEKKKMEKKKEEAIENLKEKALMKKKNIKEHLANALKSIAGLLEELKQRSAICED

SEQ ID NO: 134096 - protein, 170 aa, Heterodera glycines
KYAAKQAHVELAERMRKRDPGSAPRLGDRVPYVIVNRGGGANTPAYEKAEDPIFVLQNNIPIDFDYYLEHQLVKPLARILDPVMGDQAEKLLISGEHTKKKARTKLKSGMMAGYFSKKSVCLGCKTRMDFEEEAAPATCEQCRPRIDKIYLEQARRPISFVFVIPFALNS

SEQ ID NO: 134097 - protein, 206 aa, Heterodera glycines
GVIECLKIMTREKCERVAKFAFDYATKHGRKKVTAVHKANIMKLGDGLFLNVCTETSKLYPKIQFEQMIIQFEQMIIDNCCMQLVAHPEQFDVMVMPNLYGNIVDNLAAGLVGGAGVVNGESVGSDYVIFEPGSRHTYKEAFGRQIANPTAMILCCAQIANPTAMILCCANMLNHLHLDQYGSALRESVEKVIRDGKVRTRDLGGV

SEQ ID NO: 134098 - protein, 143 aa, Heterodera glycines
MSDKIPHNDALDLARQIAPDLTNNLFDDVSEANQILNSIPKDELQKLNPEQKWMKLFEADLPHLYKLVSIVLSVPVSNASVERVFSLCGSQWTDVRNSLKVETVKALLQTKINFDLTCPEMYQMLISNHKLLDQIGGWDKYFE

SEQ ID NO: 134099 - protein, 23 aa, Heterodera glycines
NFTIMVSFESHRCLEDIYNRFLS

SEQ ID NO: 134100 - protein, 333 aa, Heterodera glycines
IERDIYVDNIILGLERAEEIKSYYSLLKIFSNADMNVREFVSNCTKEIERLPSEDQVVKGGVKLLGIKWDINNDTLVIHFPVFKSEKLTRRKVLAQIAKPFDPNGFAAPAILPAKLFRQRVETNKKLKWDTSLSNEELNEWITLMKDWENQSITVPRNIIPKEMIKNCQCELHAFSDASHKAMGTAIYLRVINPNQINANLIFGKSLVVPAIIPSKYRTIPILELHAMLLTSKWLNYVKGQIEKSLKIETVQLWTDSTDVLDFLNSNRKLERYIKNRVEKMRQWNVHIEGQSNPADVASRGTSPEDLELWWKGPPFISLKNTQWPSSSLSWGI

SEQ ID NO: 134101 - protein, 371 aa, Heterodera glycines
MKILLIFLLLCALIFKKAINQIEAGKIIQEKSFAEIFGQRWDDGAEENICQNDQIIHGEIADQNNQFGQNVRQFDQIFDENVKVKEEESEEMSTDYDELGDQLPMPTNNGQSCDNFSNAIDKKKRETVEKFHNIKEKVKQMGKKYSRKEWVKIERKIAKKLGVSQEKIYKWKREFGMMKNKNYSVEEKRIMLKQFDQIYGKLKTKFNEKLEGKRTKCQKIIAKHLGIHIKTIFYWKKQLKVGKMVKKQKTDDEKREIVEKYFKTKIKFMQNEKHSLKEWKEFNAKIKQMFGIYYRTIEKWDKKIGLNQILSKGQKHYTFAEKTEKIKQYYQLKNQNPKLNDRQIAEILNITKRSLERYKSEFKRKSEGVTD

SEQ ID NO: 134102 - protein, 119 aa, Heterodera glycines
MWDVFVREMWPIFAPNIRHLFFSNAYHLDNFRRLISPTILTDLNPSMCSGDLFPDGIADDGPNATAGQSLSKWLHTPTKDGKPKRLTCYDYPSKSSEWVNTFKEASPHIGTKLFGLIAI

SEQ ID NO: 134103 - protein, 43 aa, Heterodera glycines
MEEKKKKRRQRMRRKGEKFERSVEKGNVWRCVDGGHLVVCPSY

SEQ ID NO: 134104 - protein, 39 aa, Heterodera glycines
MVVLNQIFAVFVVSFLSAFFNGKSYGNIQKDFYKFQSFL

SEQ ID NO: 134105 - protein, 366 aa, Heterodera glycines
LAMQMSKIGSDIWLSRWASAVSPLPNGSDFPLFSRPIQKMVPSTNAQQEETNFYLFVYIGIAALNTICTLIRAFLYAFGCILAAKQMHERILHRILNATLTWWDRTPCATLTWWDRTPCGRVTNRLSTDVNRVDDALPFQLLSTDVNRVDDALPFQLNILLASLFPLVSSLLVTVVALPLLSPFVLLLTVAYFFLQAHSLPSNHSHRRIAALSLSPLYSHLAETVSGLVSIRAFRITHRFSSLMFSSLMCHRLEGNVRALFSQLACYQWLAVRTQMLGVAIVSVVAFASVFDVHFFHLADPGLIGLSITYALSFTLIGLSITYALSFTALFNGALNTFVETEKELVSLVSVERICDYLANVPEEIA

SEQ ID NO: 134106 - protein, 175 aa, Heterodera glycines
MPSKKTSCTGEFCFRAFIKSKLGHLNAYRTTNDTEAIERAKESRQNGERKAGKMRPKNGRERVKGKGTREKEEREKTKEEDETEGEEAKDKGHKGVREQGEDGGSRRRELQEDEEGEEETAEKEETEQEEEAQEEMENGRGDSETKQQQQHVIFERPTLAPAVTESNNTAWVFFY

SEQ ID NO: 134107 - protein, 70 aa, Heterodera glycines
MERIEMWKVIAYAKHRYENRPFNLTVLMDGEITDDEKANTWTDACSSTFVELCEYDSERETAHFPMEWSN

SEQ ID NO: 134108 - protein, 242 aa, Heterodera glycines
LSSIVFLFAFACTVWNFREHYNAFYLLNSINLMVCIYAVKSSRIRSLRLLTFLMLLLTFLMLAMFIYDLFMVFGTTLLTTDGCSVMMEVKTGISTEKTSIRHPIAPIDLKEVPEKIPLLFYVPMIPLLFYVPMFADPMGRCFDVEVEREYRRVMLGLGDVIIPGYLIAFCFYVDVVKYLIAFCFYVDVVKRSRFYAYGSISIIGYSLGMFATFVALLLMETGQPALLYLVPFTLGPIFAWAL

SEQ ID NO: 134109 - protein, 84 aa, Heterodera glycines
MAFETNELDGNQTLYWSAHSAAQKQRENHFCVGRRWQLTAVPLLEIDTEIGASGGQTFATDIQKSEAGVVFVESGGWTLKILGI

SEQ ID NO: 134110 - protein, 148 aa, Heterodera glycines
MSVFFVYNDTFRQEIEPLLLNSSSTELRFYRPQTAWPMDPAVGVLWLFAVGSILVGSLWAAFESKAMLAKRVPLDVSVSDGLGSSRAALSDEDQPAQPNEPTNKGPLKRTQSAEIAQMNVCQHLSVVLVALVFIVIVLTLAYFFRKFA

SEQ ID NO: 134111 - protein, 53 aa, Heterodera glycines
MLGKIPTELCDQLLATEDALLVQAYDKDSFFAAGMVENGVREWAKENEGKVLK

SEQ ID NO: 134112 - protein, 19 aa, Heterodera glycines
MSIKWFYLVYRELRNPMTN

SEQ ID NO: 134113 - protein, 46 aa, Heterodera glycines
MERYKRQQQRQQQQQQAKVSQVLEHCCFPIPTDNLAEETTNALRGH

SEQ ID NO: 134114 - protein, 84 aa, Heterodera glycines
MMDATIILKKNAPSSTSNSEKQKGGICLWSEVWTFEQKQCKMAFGRDNDAEIHDVITDLGLQVEGYAEKLKDYENMEDSSMAVA

SEQ ID NO: 134115 - protein, 120 aa, Heterodera glycines
MGDKKSKYGIEIKNFFKWCFSGRGSESGRGTESGSETKVEEEQKVEEKQKVEEEQKVEEEQKVKEKVEEEQKVEEEQKVEEEQKVEEKQKVEEKVEEEQKVEEDQKVEEKQKVEEEQKVE

SEQ ID NO: 134116 - protein, 134 aa, Heterodera glycines
MSEFLIFLLGFSFAMLLMLCLLVSLVLFVLYTTWYYWTKEEQQEECIFYALEFAKLYQTVGREISRDKFRHIMKTGKKQHELALVLMEKAGINTQQKTFGLKHLQFVQNWDKEFPDIFRIVAFDMVNEHFQNCL

SEQ ID NO: 134117 - protein, 393 aa, Heterodera glycines
MSEEGEGSWVDIYSFMGAEGTEERHGTTLWNIYELAKIQSAKLDGMINEAMWAEHEENWRNKTEKNGQKKKGNERVLIEGAGPIGLFCAVHLFLAGANVTLSFGRINTLDGEVGQQNVKDIEQILKMRLVELTSFVESKIGPEQPNRLKLLYQTELKGIKRDGPMEEKVENAKEIYAARRAAALHQQKQADQSDLPSQKQADQEDHNAAVEQVRLEKWEGKVPELRHLAPIPFDILFCAGGANDRIRNKLLGNPIRRSISKNYGLVVFHKGSPNEKDGIMEQRVFDHLTGFFKVKMSDFEPILQKQNFDKFVTNHGNILPKEFIKKYENLTQLIVRGLVKENEGKYEEDEIHKPHTKHIYKQQSANTSHRFDNAAGGGGICSGHKARVAAIGK

SEQ ID NO: 134118 - protein, 23 aa, Heterodera glycines
LGPRFWAPGSFGPNPKIEKCAFL

SEQ ID NO: 134119 - protein, 144 aa, Heterodera glycines
MRSGKIVSRKCVSGNFIVTKTESLAFSRSLTTIQYPFWPLPNPGPEFEQKVESPNFRFSIFGRLGVEWSAYALRDYHQGKITEKELIERMSKKLNSIEQRVVKKVREYVTIEDKEGEKTDKASTILDKDEDKVYKAIYHAKKTQ

SEQ ID NO: 134120 - protein, 96 aa, Heterodera glycines
EAKGHDSDAAVSAVQNEYGNNRVEMEVPKFVELFIERATAPFFVFQVFCVGLWCLEDMWYFSLLTLFMLVTFEATIVKQQLKNMSEIRLDLFAIFL

SEQ ID NO: 134121 - protein, 40 aa, Heterodera glycines
MNRRYTDHSVITASYIIRLLSTEIDPVELMNRMDQRNADI

SEQ ID NO: 134122 - protein, 58 aa, Heterodera glycines
FGPRGRLGPNPKIGKCAFLKIKNLKTKPEGSLATWHKLGLINTRSFFTILLIPNPIIF

SEQ ID NO: 134123 - protein, 104 aa, Heterodera glycines
MRSSESRAKGGGECSEGTVECGSGGGGKQLGPLRRSTTWGRKSRTLTNWQRTNCSRRTPWAARRTNWRAWGKRRRWTAKWLFDGQLRQIGQMANGKNGTNDTKI

SEQ ID NO: 134124 - protein, 28 aa, Heterodera glycines
MPCNFTPTFPFGQFNILQATELKRFMFL

SEQ ID NO: 134125 - protein, 120 aa, Heterodera glycines
PLIVKEEPIDEQFRLADLEKEIQALAKRLSLLFRIENDVFVLMLPTEEGDHWLSRLLMLRDDNSSIRLAEFTGSSEAFAEKAEHWLKSDFEGPQQLMEALNAKCVEYFQQQKMAQDEDNL

SEQ ID NO: 134126 - protein, 50 aa, Heterodera glycines
MPCHLHTVGGGTTAHLHATLAQTMGNTIAALGAPVIGIFVGIASISKLLL

SEQ ID NO: 134127 - protein, 80 aa, Heterodera glycines
MAAWVFLVPNSWLIMGLWQKSREKSWALNGRNRACQFPSKTKVELIFGIVNVLKLTTELSIRVERDREFWAKPGLGLAGI

SEQ ID NO: 134128 - protein, 48 aa, Heterodera glycines
MNQIKLCSLTEKGDSGGPLLRTLNDFFNKVSVFCEWINRATRGEVSCK

SEQ ID NO: 134129 - protein, 33 aa, Heterodera glycines
MIYVLIYGNDSHVNSRAFIIHVSNRYFKHLDPN

SEQ ID NO: 134130 - protein, 21 aa, Heterodera glycines
MRTRPIWQVKQRLLTSQKKGF

SEQ ID NO: 134131 - protein, 95 aa, Heterodera glycines
LFQYPKRTLEKIDFFVFGAVPPNRCAQIYGETESFGNSFPIACTLILRWIFAPHNCLSTPNGHLKKSIFLFSGQSPRTDAPRFMGRPNPSGIASL

SEQ ID NO: 134132 - protein, 39 aa, Heterodera glycines
MALAHQLAEFAVAPLALALLKNGKEIFPRKYTKNGFPNN

SEQ ID NO: 134133 - protein, 67 aa, Heterodera glycines
VDSADREKRQDNRADREKRQDNRADREKRQDNRADREKRQDNRADREKRQDNRADREKRQDNRAIMY

SEQ ID NO: 134134 - protein, 844 aa, Heterodera glycines
MANKFVLVPQEIYRGLTSATDTGDINLDAVRHDLTRARAERTNPSAKNVSYNQQLRRYLQMRREVTDKPARVELVKGLSVLMRRGGADDEAEVVDTPPRPPRPPPPPPPPGQHPPRRPPSPPGPGPSPPGSPPPRPQRPPRPPRAAAPPSRRDGRVEEWRKKRNDIQQRQPVVRDLLAEAAAAPLPESDEEDDYMLESGFALPAPSQYYGDLPVLPDNADAIEEMDTAQHRIATRRKLKKADDDDGDDDLHRKKYRVYYPPPPSRPPPSRPQPKIETPRPPPRPSLKKEPQPLLDPRPSTSQQVDRKHKREPKFDLDPRPSTSRQAGYNPPAEPKHEQKPSKKPPPRATPYHIPKREPKIEETLPRQQPSPAAPQVPPVPPPRRGTKRRHPPENGDESGELRIRKRVRQARRVRVYYSPEPGPSTSAQSDEQQQQQQQQQQRELFAIPSNQLTMAQRIELIYIKCNRYADQHKQQDVNKEGISSEKMEMINTTLDKLYNDPSSPAAFAGVSALWKEARKKLKNLRKKDVQHYLEGHRTYTLMRPRRVRFPRAKTVAAGFMTDVQVDLADFQALSRHNRGHRYLLVAVDVLSKRLFVVPLKNKKAEEMLDAFKELVKQMPMVPHRIFSDKGTEFKNKLLKEFFEEQEIEKHEPVHSSVKASVAERAIRNVKQRLYRYFAERETLNWVDVVQQIVDGINSTPSRVHGMRPIDVNFENAQKVWKRIYESPQKRKKPRFRKDEFVRMSREKGQFEKGYLPNYGDEILEIDEVLKAVRPIRYKLRDDRGEKFRGTFYDQELARVRKDADTSYRIEKVYRKRRKPDGTTEMLVKFIGYPEREWIDESQIV

SEQ ID NO: 134135 - protein, 172 aa, Heterodera glycines
MSNSFFVFLPSNVTDYPDNQPNKFRVRLPKPLHFNGSWVCGLHSISYPYSWSTIGTLDEQWIDIHFTDIGVPEEDKHRIVRVPVPRSSHNRVEQLRDFVATTLRNHANAKLKPLPREEEADRNRTKPLYSPPPAKRSIKDVNDLSLFPSPPRVNEPEKPPKSPPAHVPPTEP

SEQ ID NO: 134136 - protein, 606 aa, Heterodera glycines
MSNSFFVFLPSNVTDYPDNQPNKFRVRLPKPLHFNGSWVCGLHSISYPYSWSTIGTLDEQWIDIHFTDIGVPEEDKHRIVRVPVPRSSQNRVEQLRDFLTTTLRNHANAKLKPLPREEEADRNRTKPLYSPPPAKRARRSLALSSPPRHEEAPARPLESPPLYDEPKLQKAQKTPEKPAKTAPATPILLDSPPLYDETKLQKPQKTPEKPAKTPAKPPSQAPPIPATPTAAVSKPSQPIAPVAPPTPTAKSVATPTPAKTVSPPPAKTPSPPPPAKMPSPPSPPPAKTASPPSPPPAKTASPPPPAKTASPPATTITTTTKPKTPPPLVKHSPPPTAAKQPSPVKTTPASKLKPAKTVPKPPPPPPKQKTPPKPSPILESPPRYEESNRTIVKPPVIQPSPPHLEEANKTITKQTTFNTTAKEVMPTEPVAAALTQLADLPENTFSFRINPLPVVPRSVSIQYLDDVERFKVSFNDRLIRHLSFSPQLGYVLGFENPQHVMSNEVAKYPVDLRGGISSFAVYSKGLTENMIVGNSLSSLLRVVSVSGATPGDYNEKIYDSPIFARVLPREINEIEIELRTMDKGRLVPFAYGTTLVVLLFKKVINF

SEQ ID NO: 134137 - protein, 69 aa, Heterodera glycines
NNANFFGIHVYRYGKNENKCALNSDVSADRSIFIQHHQRVALAHHHQHYSSSGHRLIKFDAHCCGPVPY

SEQ ID NO: 134138 - protein, 158 aa, Heterodera glycines
KGVIALVDVMFEEKRTPKKKKVGRLLLQEELPQDLSRNELLHYLCYGRLGTNLFEIYFVMTQAINSIAIGNLFGLLLDFAMSSPTPWLMKRPICCGIFYRQHMPWILQQPMSVMLSHGIFPEVRSDGFEFFWLFNPHLKKYAGNDDTMTDGIFWAKLS

SEQ ID NO: 134139 - protein, 264 aa, Heterodera glycines
MDNHPRKRSSNFSIDHILSAPKRPRQGFLINELLGVVHFLGSFQQGEGTSKQAKDYVKKLDNSIEHVAKFHYVKVKSKFTITDLPSTPEALLAGIFQHCIDEAIADSRERNIEPTHLGCMISSPLLEGGDIPTPVRQMTNNTLDTILNQFKKVAQSKQQKNVSLWGEPFTVTITTLNRNGLPPKRRVKGGARRPVKTAVHHRINDQCLIKIRNNDNHFCLFYALQATMVDKTCNWPRWKFSRYLNNQYGQQGQLHRDAVELMKQ

SEQ ID NO: 134140 - protein, 60 aa, Heterodera glycines
MVYELEQQLQIDNCCALKVQLSVALIFLSINHKKINAKQNVNRYRTHVEALTTKPQIYQK

SEQ ID NO: 134141 - protein, 33 aa, Heterodera glycines
MGTIDVIRRALLCIFWPTPEEILCRNSGPIHLK

SEQ ID NO: 134142 - protein, 99 aa, Heterodera glycines
MPLFVLCNGFYSVQQNCDVFCTPDGLMPIKTFENSYYKQDSVAMGMGDKLFCKAIQPFVRLKLSNEEFVLIRAIIYSHMGQLRPKNIIINELKLIWIKF

SEQ ID NO: 134143 - protein, 66 aa, Heterodera glycines
MPLKIAGCKHFFRRTISLMKEYNCKKGGECKERMKEHPGKNAVLNSVIRRDGEGQNSILNYILRGL

SEQ ID NO: 134144 - protein, 57 aa, Heterodera glycines
MMDQQWACGTLRGKTQTTIYGVEIREFASKTGTKGLFSFFGDATLKNNFHYNCKNYR

SEQ ID NO: 134145 - protein, 65 aa, Heterodera glycines
IFLVKAKTTVDNKTIPDDFTIKLSTLFNYGDSVRLSVQPEHGARNQSNNNFMFIFMHESLEENGK

SEQ ID NO: 134146 - protein, 163 aa, Heterodera glycines
MITICTSEEQWTNGKIEGTEGTEETFRKRVAEAVREEVVARMRAMDDLAELDYAEEVIRHYVERAAGDGPDALVNRVDVAEVAANSANPWAASQSVCADDLVFNPTPRGQSVEDKEQKDMRSFAEMVANFVTFGDPNREERRTDKNTFTTVYQREKANCEGAN

SEQ ID NO: 134147 - protein, 60 aa, Heterodera glycines
VDPRLYYALMITVIGSTFPLINVSMNTIFSAAVGPRLQAKQQSILMVSGGMGRMLGPLLI

SEQ ID NO: 134148 - protein, 160 aa, Heterodera glycines
MIAAVNDFEMTQKRFQSVIDQAIYEFRRTFSFTPPYKRKTEAAKLIWTIIGANVAIFLLWRVPTLVPLLWQYFSSGVASKSLCMPMLFSVFSHQNLMHLFFNMYVLNSFAIGAITLLGPSQFLAMYLSGGLFSSWVSLCQKAVMRSTMPSLGASGAICDV

SEQ ID NO: 134149 - protein, 17 aa, Heterodera glycines
CLKSPYSCNERSFSRNC

SEQ ID NO: 134150 - protein, 95 aa, Heterodera glycines; identical to SEQ ID NO: 128210

SEQ ID NO: 134151 - protein, 168 aa, Heterodera glycines
MFRGPFTLILSGATGSGLIGEGVETFNGIPDMNKIKEQEKPLLLILDDLMLNMQNTFLDLLFTRGSHNWNVSVIFVTQSLYGRDIKTARANAHYLVLMRNPSGQLQVRTLGSQLFPKRLNYFMDAYHDATNNQFSYLMINMHPNSEEEFRLCSKIFPDETLEIYLPIE

SEQ ID NO: 134152 - protein, 137 aa, Heterodera glycines
MQKPIIVNIIALANLGTGIKLNSLTITECEFKYNPRKFNAAVIKCASPIKATALLWESGKMICLGTKSLIDCENAIKNFIEIIKGSGCPGASYTGHTVENIVSTFKFGREIELNEFRKNRRAFYEPEICCGLNFKTG

SEQ ID NO: 134153 - protein, 372 aa, Heterodera glycines
GSSSTPWAKEGGIRRRRGAIKHAKVHEIRGHQFVATFFRQPTFCSLCSEFMHEIRGHQFVATFFRQPTFCSLCSEFMWGLNKQGYRCRLCTLAWGLNKQGYRCRLCTLAVHKKCHEKTLVHKKCHEKTLSQCPGSAKNSKETIYLKERFKIDYLKERFKIDVPHRFKQYNFKSLYNFKSLTFCDHCGSLLYGLFKQGMKCEVCGVNCHNRCERHMPNLCGVNHNRCERHMPNLCGVNQKQLSDALLEIKRGGRHNSSKCSTEWATSSKWASACRNNNKVPLPLRLFRPQTAGSLDIVGTEKDGAEEGAGGDSPRHFKLQNFAIHKVLGKGSFGKVLLVELKGRQQFFAMCLKKDVILEDDDTECTFIERRVL

SEQ ID NO: 134154 - protein, 219 aa, Heterodera glycines
EVYCGPESVCSLDGLHFNTLYSARVRAFNGSGEGPYSELISLQTAPVAWFHLSPDDSSSLLLFSNDCCTVTGASIDYRTVLGTVTFSQGIHYWEASVDRYDGNADVVIGVAQPPVNRRAMLGKDAHGWSMYVDGQRSWFFHADTHHGRMSSGVIGCGSVIGVAMDCDRGTLSFAINGTRKLKNNPYLYRNMPRGLFCPAFSVNSKATITVHSGLKLPEV

SEQ ID NO: 134155 - protein, 214 aa, Heterodera glycines
LWVMRNGAHPRHTLFSAASSPLTELSQSLQMLSAKVRQATEDITALKQLQNEIDANCDAFSRGIEREMDELIALLQLRRQQLTDFAAGEKERRKAQLREQIGRSTAQLGRNRALIQFCIELLKESDPAAYLQGFALASRVTDQEFLWHREIRTKPEVEVQFEFDIDSAQLRTAIDQLEFIQLKGESLTTIFFFFHCSAPSAPQVADECSAENNS

SEQ ID NO: 134156 - protein, 102 aa, Heterodera glycines
MQQFGCLSLFPVGISAGLLIMPMLLLLLMPSSTDGIEIVVNVDENIANEINQQQITVKVRASRGTAAYLRKLADFWGKKPSEMAIFSLSTSPAPNFPNIFKI

SEQ ID NO: 134157 - protein, 138 aa, Heterodera glycines
MKVTKLGSFVSIGFATKEMPLDGAIGQHLNSYGYRSDGSFGCNGISRPYKMGFGTMPMPFNAAIGQQRDRRYVGSANWPFPLEFVPVPMPSDGALAFQSPAFSTGDVVGCGVCLATRQIFLTKNGRRIGGPNTKRKSK

SEQ ID NO: 134158 - protein, 80 aa, Heterodera glycines
NCLSTPNGHLKNRFFCFGAVPPNRCAQIYGETESFENSFPIACTIILRWIFAPHKCLSTSNGHLKKSIFLFHKYFFQKVL

SEQ ID NO: 134159 - protein, 36 aa, Heterodera glycines
KPKLFGLFKKELKIFKIFIHLPFDRKSIREPYLTFN

SEQ ID NO: 134160 - protein, 39 aa, Heterodera glycines
GLDTTSAELSVLESIFKLGDAAPSAISTDLRDTLIESML

SEQ ID NO: 134161 - protein, 365 aa, Heterodera glycines
MNVEESPLLTEFKTFLQATLVAFGSDGALFSLVNQKFSEDWVGSPSLKEYATKLGFAGSKGILKLLQSIPDQVIEQCVMVSNRCNNLHVIILKVSILVNPTGEVILKPVPMEETRDNLAKIDATNRELKAEKMRRQQFHGPLPAAVTAQLAAAMMPAPAKKKINPNLIPLEPTRIAQCDSTNNIVDNGNANKVTSGVSCSASKITNNANGNASKVPSGANKITNNANGNASKVPSASNRSPSKVTSGANKITNNANGNASKSGANGRANKVTNGANASAGKVPSASNRRPSKVTSGANIITNSTNGSAKIARNAGAIGTNGSTAVTRTTSATEQRQQNIKIRKVSFEKAMRYMEREAWKQAEKRS

SEQ ID NO: 134162 - protein, 28 aa, Heterodera glycines
VKINRNSRVHSIVARNSPEKLQNNVKLI

SEQ ID NO: 134163 - protein, 128 aa, Heterodera glycines
PNIMLTLSNNGFFLNFFFIFVLIYATNYGYALFAVQNERRQLDSLDGLWTFVREPPNSVGIGLQNQWASLELALFEFVNGKLVTEHCGGHLPFQVEVELVDVNLISVAVNNTLSHDTIPPGDFATIKL

SEQ ID NO: 134164 - protein, 153 aa, Heterodera glycines
ANTGAPNIMGLDWIVPFEKATQSPIATTLDLSSAPTKVNTIDERPRHFKIGDTVRVLNYGKSGKPNWLEGKVVAGKGLIWKVKIPLLNITVNRHVNQMRSFVPYQSETTFPNDTVDQVPQQKSPCHSTVTTTPPTNLPVQPTQRPQRQRRPPI

SEQ ID NO: 134165 - protein, 75 aa, Heterodera glycines
MTKNDIFSNKKAIWENELTFRLRMVVFLKNALNPNLMKTLIKDRIYEIFGAKNAEITHQLYDKYPSLTYGIGDLI

SEQ ID NO: 134166 - protein, 317 aa, Heterodera glycines
MDFFAYFHAIEVIFEQKEYPISEWPKLRIQCAQLIDTIPLEVNFTENDEIMKMINELNAKIGKMQSFLKENKNCMDEKQIEKTSNELEKKIELLKILKQISNEIDQLLARENQDEAQEEEGRKLYEKVKKIQSEFEEIELGDQQKQQHLLSDVEFGSEDSKEFEKDKTFGLGDQNGQNVEFSGSRPDQNKQTDNTDYDQYPSSSNEMRSNTAADRNQSYAKYGQFIPADQQIGSDAENKARSSKNCGTVPNPPFINLKTLFLLKADMEKLKSNDKKEKESKNKNKSKERKANSIDDLTAVQNDLSQMHVQTMAKVPM

SEQ ID NO: 134167 - protein, 65 aa, Heterodera glycines
MVSMDHPNADFYFDRDVQCAYDEGNFEAHLAEDSEEETEDGSSRDETEEQQKEGDEEEKHEGEQM

SEQ ID NO: 134168 - protein, 41 aa, Heterodera glycines
  unsure (1)..(41): unsure at all Xaa locations
IVQXLLVLKKKIKKFTTFHQKFRKSEFRPPKMLEIGSLSVP

SEQ ID NO: 134169 - protein, 146 aa, Heterodera glycines
STHQHFNHWGLNPPTFQSLGLNPPTFQSLGLNPPTFQSLGLNPPTFQSLGLNPPAFQSLALNSPAFQSLGLNPPTFQSLGLNPPTFQSLGLNSPAFQSLGLNPPTFQSLGLNPPAFQSLGLNPTAFQSLGLNSPAFQSLGLNPTAF

SEQ ID NO: 134170 - protein, 76 aa, Heterodera glycines
MVVLLTPCLHMLPLPYALLGSDREPGIETPIMNPIAGGATAKPFTTHHNDLDMKLYLRVAPELYHKAAFIFFNEKF

SEQ ID NO: 134171 - protein, 133 aa, Heterodera glycines
MSSEILVSTVFLLLVDCATILFCFFLDNAKKRRRPHKKEIFICSDCWLLVFDFLAPSQLGLEIALISHRFDIYVDEHFKTRKWKLNKQFLIQWDIQENGTKKMQIVNSDGNPLPIPQNPLPNKVIGFRDIHIM

SEQ ID NO: 134172 - protein, 179 aa, Heterodera glycines
MENSNSNNNELIGGGGRLAVPERNVALEQDGEAEADAGREADKAEDDDDDGDDDYSPFAGDNIFLPAHWKPNFWARQFTLETFCTLHLEVMGLRNTMAGTLRDCEMTVGNFHPMPPEEVPGAMQQFVAWFNHELASASSSAAEFAARAQHTLVYLRNDLQSHQLEFDLMLSFSLRLTFC

SEQ ID NO: 134173 - protein, 145 aa, Heterodera glycines
MDILPSFDRPQLGLKMALLSPRFDALVDKHFDGQSEFPILRTIKICKGAVAAMPKLAVIIDEDNSVPFPLPDHSLLEPFELVNGRTNEKLILIKASEDEWVDRWIMKRCQNGETTAAIQWEGEEVNSSNLNNVHIGIHDVNICIG

SEQ ID NO: 134174 - protein, 263 aa, Heterodera glycines
MDPANNASSAEQAPNVPFFRMRRKPMNTTTMRKRREEDENEEEKRRERKRAEEEDEEEAMEAEGKGEKQRQRGEESDGSGTSTEDDEGAKAAAEATRMKLVERRKHLRGRNLMHTVGPYLHHKNKKGIQTSKKRRREIEALAEEESSEDESDEKSGREGQTSFDPDVKFASSGTQRTGPSDMGATARSEVDTEYGRDSQSQFERIQEMLKKERMEREKREAEEEEDRKKYGEKAKRKEQPGTSQQVVTITISPSDILSMYQLN

SEQ ID NO: 134175 - protein, 120 aa, Heterodera glycines
MKILLARPGLKCPNSSKKLSGEVVEIQGPAFAESISEGDIRWNKQVGDFVKTDDIVAEIETDKTSVEVPAPFAGKIVELLVEEGAKVLAKQKLYKLEKGAEGGEGPAKEAKEEMPKKEGE

SEQ ID NO: 134176 - protein, 19 aa, Heterodera glycines
MHSCPWFMSHLMSLPQLHN

SEQ ID NO: 134177 - protein, 43 aa, Heterodera glycines
CFAVPRTGRQWMAFNLQEIRLAICGCKKLLGMELFFEVSQTPY

SEQ ID NO: 134178 - protein, 156 aa, Heterodera glycines
PPAFQSLVLNPPTFQSLGLNPTAFQSLGVNPPTFQSLGLNPPAFQSLGLNSPAFQSLGLNPPAFQSLGLNSAFQSLALNPPAFQSLGLNSPAFQSLGLNPPAFQSPGLNPPESITETQFSGISSNATQIKQFSDILPVSQSPDKKLCQIHHCNIIS

SEQ ID NO: 134179 - protein, 84 aa, Heterodera glycines
MFAAVVGDFCGKRADLFISGEKLPEMFGQLDSKDQLELKRCFVKIEDECMQLNVLASDVNVCGCKVTIGDKLVTPVKRKSDEAI

SEQ ID NO: 134180 - protein, 108 aa, Heterodera glycines
MSSSHAKVTVLLLLFVIAFVALAVSAPIEEEANAIVEANNGKLAASIGTDEATSLVRHKRYGYGYGYGRRYGGYGGWGGYGYGGWGGGYGYRSCYCGYGGYGYGYYGK

SEQ ID NO: 134181 - protein, 178 aa, Heterodera glycines
KAGSGSKFLNRVREEQKVEEEQKVEEKVEEEQKVEEKEEQKVEEKVEEEQKVEEKVEEKVEEEQKVEEKVEEEQKVEEKVEEKVEEEQKVEEKVEEEQKVEEKVEEKVEEEVEEEQKVEEKVDEEQKVEEKVEEKVEEEQKVEEKVEEEQKVEEKVEEEEKVEEDQKVEEEQKVEEKV

SEQ ID NO: 134182 - protein, 37 aa, Heterodera glycines
MRTRNALKTTKMRNAKHEIINVPVFSAILSNEWEFKI

SEQ ID NO: 134183 - protein, 94 aa, Heterodera glycines
MHNYRENELLRISMLLDPHFAYDLNLFMGGFWKSIEEDLIDFAKETTSVCSERLFSKAGLIYANSLRNRLSGKTVRQMLVVKANMDDIKLAPPI

SEQ ID NO: 134184 - protein, 98 aa, Heterodera glycines
MANRLQLLHYEGNDIADSIYNALDENGLKIVKLISIVRDDAKNMQRMARVLGKSSHQCVVHFLHLVVHDVLKLGQIKELTDKVHEWVKFCLTRKGFDV

SEQ ID NO: 134185 - protein, 296 aa, Heterodera glycines
MIKNVMNRRHGSAHSPMEIAIEKPIKAIEKNIIRPKIEINLENELDGQSATNSNISPNFKCPINEYLAAVVAYHGFYYKVPAKTIAKIAMNLIFAVLFSQNWSTKQQQNSDQPIFDGILIFDHFSVIRQNEFEFGAEELAGNLKIEFNGTVEKVKDSRERTLPSEQRSKKQMIWLKDVLFMSPEQIKDKRSTTTGKDLVWFVGLLLYRMLFNNKHPMDNWEPKRRLDMEFMAKMGFSKLNQFNCMYKTDDFVTGDFGIVPLKPKSRWIWMPESERDETGEMALVEERIGMEQVAAN

SEQ ID NO: 134186 - protein, 57 aa, Heterodera glycines
MHSTYSRFAGDEEYTAPQKKLFDLTKMCLHTFPEHRISPNFLEQILVLISNWQMYCD

SEQ ID NO: 134187 - protein, 96 aa, Heterodera glycines
MNDIQIQSQQHNVGGHLQQNDNKLKQELDEVIVNSYKFIGLGGGRRGGANLNLAEQKIQKHFARNNLSQAIDEANQRDFVNLESEYIDKQIVADLI

SEQ ID NO: 134188 - protein, 308 aa, Heterodera glycines
FFHRNIFLASPPLPQAMSSLDECESDPILGRPIIRIPIILAYIAVFLICLIGNSFAILVICAHRSMRTATNNSFAILVICAHRSMRTATNFFLANLAVADLLVAIFCIFNMFHLVGIDDGRWLFGNMFHLVGIDDGRWLFGATLCKLYAFVLATLCKLYAFVLHLFPCTSIGILVCASVEKYIAVLHPLLALKVFTPRFRVLLMASAVLHPLLALKVFTPRFRVLLMASIWAISLLFSLPYYIFTSYIFYKNVAVCTRLMPLTNSTSFVLWYCVPLLIILFLYTRNGLVLWHNDDNCLGDRQCQNKSQ

SEQ ID NO: 134189 - protein, 110 aa, Heterodera glycines
LANSFITGHAIFSIIIVLNPVNQAAEKFFKIPPIFGLLGGFAATFSAIRALTSTHFVPPCYVSALISASVNDEDKSIAGGPVNCCGAFQNISIYGENGAYCSRVDLHFYE

SEQ ID NO: 134190 - protein, 34 aa, Heterodera glycines
MSDFDSEVRLRPLIVSKNICRTNEYKCKKKNNIH

SEQ ID NO: 134191 - protein, 87 aa, Heterodera glycines; identical to SEQ ID NO: 129152

SEQ ID NO: 134192 - protein, 158 aa, Heterodera glycines
EYQQQCHRNNIINSGGSCPLALSSSERMVSELIAAVIEQSRQRQQLQKHQQQLLISTNKVEETNNSGGSENEAEGEERGDEMAPEEGGSIWQQSKGENGTVTAEAVPNHPTTANAGGDEAQQKKEMFMRWVHQHGNNMYPSREQKERLAAQMDTSYEK

SEQ ID NO: 134193 - protein, 98 aa, Heterodera glycines
MLELLGVDVVEEDGVESVEVLEQLGVDEVDDAELVELLRVDEVDDVELVELLGVDDVELLEVVDVGVVAVEVLKVVVEVDEVDVEDVLVVMLSLQQQM

SEQ ID NO: 134194 - protein, 132 aa, Heterodera glycines
MDGQLIASDQKSLSSVSGASSSGTQLTCTVCGDVATGRHYGSVGKLSINKKFLLVKVACNGCKELLNERQFTDNRAVCRACRYARCIQFGMKVDAASTAATDAPTEEESQGALSPEPNKNTIVHQKMEERHK

SEQ ID NO: 134195 - protein, 71 aa, Heterodera glycines
MAFVALATVTAMVVVVVVVVEKAVFKKRFETKIARNGVWMDRSEGKGGGGIICSMEQKELKQQKNPMEDME

SEQ ID NO: 134196 - protein, 124 aa, Heterodera glycines
MPPLRAEQHPPPLAPQTNNVQQQQPTVPSPLNERQQSVQPTQGEHPQIRANATLQPNVVQAQQQQQQQSHQFLALDHDNDDQLLNQIFLDLTTTAEMEPIALDNSNNNNNNNMVVNDFWFCLFV

SEQ ID NO: 134197 - protein, 158 aa, Heterodera glycines
MVDMSKMWTEDQPIHVRVAAKGAKPCATGFIMNVERQESETGLSIVAKLFLAYQEAKNYDFNLFTEMAKNTTTGLGTIMSILMARQGERTPPQNSWDELFVATSADVDHSDRELLLLLAKDGTERTVADTVAPNVNKMLVPKRKVTADALLDSFRRED

SEQ ID NO: 134198 - protein, 105 aa, Heterodera glycines
MQLSNEEFGTNDQQFKTARIGKVFVEVFRATKKLVNCEANSLMIKLLMAFLDESIDQLDAFFCRFNLAKKDIHNRVTEKGFISDYLMENCVNYIIKTNDTNGNSG

SEQ ID NO: 134199 - protein, 68 aa, Heterodera glycines
AVLVRFITAPNLLASQQSLLNLPDRTGAHDSTVPSTPPKAKRYNQNIRKNFLKHFFSIFLFDTKASEC

SEQ ID NO: 134200 - protein, 55 aa, Heterodera glycines
MQSECPKDCTWGACHPHEGAIGDECCKAGYGFKCCEEMSHDQRTAAYPLYVSLDK

SEQ ID NO: 134201 - protein, 89 aa, Heterodera glycines
MFRFDSKNAKSENEVPDVEAAAFKVMLSFIYTGELAELNGDNAMAVLYAGLVDASLQVPVSSLRNVFVAYVQAELYELEFHLVFYQKMN

SEQ ID NO: 134202 - protein, 32 aa, Heterodera glycines
LFNFLFLAANIFYNNLSVWSDVRKTEKIIKIL

SEQ ID NO: 134203 - protein, 64 aa, Heterodera glycines
LIRSQKSCQLKTAKKAEFSKFFISIFFYSSKFSVIFSRLIEPVKSFRMISRLFDSVNNFKSYID

SEQ ID NO: 134204 - protein, 363 aa, Heterodera glycines
MITRHMRTHLLLDGSPVPFLFAGTPTMEYAEIPPISKLSLNSSSSSSPGAAVNAATASSTSTSGSCGTTATAQQSLSDTGTTTALAGGSLSSASSATVPWDEPQATRVVAQPQPPAPPDPAPAEPGNSNNHKTAAMEQQQQRQQQHMEHMVAAAKLLSAAAQQQNQQQHQAVQEAAAAARMPSLEGLLNQQMVLSTLHAQLPAHMRRSTPNLFSVPDYQQPSAFRPPPPAAAAVANLLQSQQPPQQSPSSVAANASATVAAVALSNALSSVQQLLQHQQQQHQQQQQQQRLAAMAVAAAGAATANGLFRQHSFGGIGFTEQQQQQQLVQLQQIAATQPTPPPLLQQQQQQQQAAHNQQQNPPK

SEQ ID NO: 134205 - protein, 21 aa, Heterodera glycines
  unsure (1)..(21): unsure at all Xaa locations
PXHLKTKRNRSKGKGRRGNLA

SEQ ID NO: 134206 - protein, 166 aa, Heterodera glycines
MSNLNPGNWWYYFERQGKSTAKCKADGCSYSKTLNASLSTTVLASHLKNHHPQLYKQREDFVQAEKQKTEKKGQSGINPLKRAFVGLREDKDNRYSNIKKTIANAIELRLKQAEEQKNLVLATILDPRFKTIYLDSSRLNQYKDWLISEVESYHAKTDVILFFLFL

SEQ ID NO: 134207 - protein, 123 aa, Heterodera glycines
MPIQQKHQQVARKLNTSILKSLNERLYPQPWELKWRKVNVSETDQNGFILTPCFHDLAEFPAANLFNKKFRIRMKAELEQEQKTCIIHIPCKFSLLIFNPFVAGEVFEFHILDGVEHLDKCSA

SEQ ID NO: 134208 - protein, 24 aa, Heterodera glycines
MEKACKIWRDYIDFSALELLELAS

SEQ ID NO: 134209 - protein, 25 aa, Heterodera glycines
MSCYNSIKQKSEKSEISSTDSQRKK

SEQ ID NO: 134210 - protein, 242 aa, Heterodera glycines
LLFVHLNFCFVLNYSSVFNCKGNEVNEGVPLITEFALFTFDYNFTVKLSQFLEEDTENFTVKLSQFLEEDTENSDIRSYLRHREMLRKKITSRPTILQLVRLLVRLRAKHGGQQLLCANTHLYYDPKYEEVKIIQTLLCLRYIDKIRAQLSNDSSCQIQVIFAGDFNSKSQLLSGSPDYTNFTSPGSSLGFNGCLDYIWAHPPLRIEHIWPMPDHRLVTKYDALPSPIAPSDHLPILCDVQL

SEQ ID NO: 134211 - protein, 19 aa, Heterodera glycines
EPVNSCIGCKCRRCCTPNS

SEQ ID NO: 134212 - protein, 106 aa, Heterodera glycines
MALTIEQHLQEISQQNQNPSLSGIDVFELGDETTNIEDWLQQFCFALDCSAPNLKDEQKVKLLMTKLSKAAFSEYKKSCLPKDVTDSNFAKTEQQLKALFAKPQSV

SEQ ID NO: 134213 - protein, 775 aa, Heterodera glycines
MYLSTIAEAKCIEQPAPSKQILAVKQNFVPKTKGFEARGQFQQQLKVCWRCGRGSHFPSACPHIKIACRKCSKVGHLEAQCNQHQTWLIRQGKMQSRKQGNLKLGGVLINLVNQPKRLIECPIKMNGNFVEFALDSGAEVVVVNEETHEAIGKPKLSPCNVEAKYHDGTKCTLLGKGEAEFEFGGIIRKGQFYVSKRGSLNLFGIEMLDAFGLMDDVRKKVAMTLNVNNVKKEESVVDETLSRLRAKFPNVFSTNLGHCKKAKARLSLMADAKPVYCRPRPVPYNTKLVVEAELDRLLAANVIRPVDHTRWAAPIVVVKKAAGSARVCADFSTGLNNVLLSNQHPLPVPEDIFATLNGGHVFSQIDFRDAYHQIELEEGSKELCTIATHRGNFEYQRLPFGVKSAPGIFQSIMDSMLADCPFAIAYLDDVIIVSRTRKEHWTHLAEVFKRIDNFGFRIKPEKCSFGKERIKFLGFIIDKDGRRPDSTKIEAIRRMPIPTNVSTLRSFLGMVNHYQQFVKNLRFIRQPLDDLLKQDTVWNWSSECQKAFDQVIGTLQSDQLLTHYDPSQEIIVSADASEHGIGAVISHRYADGSIKAIAHASHSLAPAERNYAQIEKEGLALIYAVQKFHKYLYGRHFILQTDHKPLLSIFGNKKGIKSCTANRLQRWALILLAYDFDIEYQNTSEFGQADALSRLISKTTIEDDEVIVANLMNVETELLNAVVKQFPLNSDQLIVEIGKDEVLKGHEVPSHSMAHFKEYVFKNHSISPQARSLIN

SEQ ID NO: 134214 - protein, 214 aa, Heterodera glycines
ICTPSNNAVPLLITVVPLLITVVPLLITAVPLLIIVVPLLITVAPLLITVVPLLITVAPLLITVVPLLITVAPLLITVVPLLITAVPLLIIVVPLLITVAPLLITVVPLLITAVPLLIIVVPLLITVVPLLITVVPLLITAVPLLIIVVPLLITVAPLLITVVPLLITVAPLLITVVPLLITVAPLLITVVPLLITVVPLLITVVPLLITVALF

SEQ ID NO: 134215 - protein, 234 aa, Heterodera glycines
EEVQQRLEEQQLEEVQQLEEVQQLEEVQQLKEVQQLEEVQQSKEVQQLEEVQQSKEVQQLEEVQQEEVQQLEEVQQLKEVQQLEEVQQEEVQQLEEVQQSKEVQQLEEVQQEEVQQLEEVQQSKEVQQLEEVQQSKEVQQLEEVQQSKEVQQLEEVQQEEVQQLEEVQQQEEVQQQEEVQQLEEVQQRLKEVQQRLESGHSNIAFTVIKELFLFKIDKKSMCYIFHFLKYNTLF

SEQ ID NO: 134216 - protein, 304 aa, Heterodera glycines
MEQENGEIIEKMDKEKAKADQKMKELIGEEKRTKKKNKRAMKRKQRQRSAADQKEGESEQKEEKGKERNREESEQKEEKGKERNREESERISEESEQEEEKRKERTEEESQWNTKESEQKEEKGKERKGEESGQDFAREENDVEIVNDQNGGERKQAKKNCENNSMELRENQERKIRKEKKTQKRESAQKELKRKKDNDGKSERISEEKIEEKGRKNNNERKESREKNEGESTQNERKRNKEKRKQKLKALEENNEININSWNKTATDSVTTEESQKQGQEYGEETMEKGGKASAEKERENAIE

SEQ ID NO: 134217 - protein, 31 aa, Heterodera glycines
ITVYALIIAQSLLIPQSPIIPSLRGVLKNNP

SEQ ID NO: 134218 - protein, 95 aa, Heterodera glycines; identical to SEQ ID NO: 124528

SEQ ID NO: 134219 - protein, 227 aa, Heterodera glycines
MKRPMDSTATPPSSKTTRISADALAGQIDSLSAAVNALLVQDDISQAVKLQFGVLLTTLHTCQHVIDGLNNNANNNSAEEQERRRSLVIVGLPENASTRPSERVREDQKVVSGILDELGVVAVPTTTYRMGRPYVHRASPRLLKVVLPASVHQHIALGGWKKERIRLRSLPNWGRLLIRPSLSREQLQAEYEQRQAKRNGMTNHPPNANTISTQLHELGRQMNQNFH

SEQ ID NO: 134220 - protein, 92 aa, Heterodera glycines; identical to SEQ ID NO: 125147

SEQ ID NO: 134221 - protein, 100 aa, Heterodera glycines
MIGRAVRNRPFIFEGIFKFILYPRKMSISFFEKFYTSQKRLRRDGGLCTIAILFHRGFLYLEVIPEKWLSLFLINFIHIQMLSSMIGRAVRNRPFIFEGI

SEQ ID NO: 134222 - protein, 88 aa, Heterodera glycines
MYIFGYGSLLWNPNFLYDEAIQGVVIGYVRRFWHLSPDHRGTPDNPGRVVSLFPDVSGSCWGIAYKINRKNIESTLKYLDHREKAGYQ

SEQ ID NO: 134223 - protein, 80 aa, Heterodera glycines
VNGESLVNARHDEAVRALKQAGKMVNLQGIQLIHSFIFNIFEFFSLSSAISTRFAPPSGEYAAPAELGGESGRCVVGWAD

SEQ ID NO: 134224 - protein, 128 aa, Heterodera glycines
MKIFLNSMDKCENGGGTRIIGVINDQLTEEKKKGFSASSSNIQFGKHLLTKNSFLTTDKLEICAYSLSFIRSIFNLGVESLNYLQLVTTASKANIKIFKEQIKQIDSICNKFQIGINANVYFEAPWGN

SEQ ID NO: 134225 - protein, 426 aa, Heterodera glycines
ATGSRTFASSTSAFVTNDHQQQQQIHRRTSGTTTFVKGTALISRGSIVGGLVELKTFGMASSNGAELGLNPWDFDVQPDDDFVSQTKILEMPNSHRLGACHSCKGEMLVHCFHCRGSGNDKCSYCRQVGTGMKAGVAHPAVYTHPMIGGGTFPGAPASVGGCGVAGTAPNRGAAGFHHQHQLHHPFANPSMVRPALLGAQRDKPYAAGTPVHFMAKAGLPPPGIGQHDLCIFCHGRGIRDCQHCKGQGKKHCLTCGGNGQVHVYTKLKVVFSVECTDYYSACGVPEVLLRQANGELIFSETRPYPIKRDGLTEINDVSRRFCAAHLKKLLDSCRVLKQRHCVESIEVAKVRFRLGSKMGHFFVYGRQRLCYIPEGPTRCTSAQPNARLRQLSARELLAFAKRRDPYGRPVCMLTLFYAPDCVFSAK

SEQ ID NO: 134226 - protein, 42 aa, Heterodera glycines
MAAQFEKARPEQWKKICQRRVKPQEIGAVLRDKCLPLEANVQ

SEQ ID NO: 134227 - protein, 216 aa, Heterodera glycines
EKVLPVKGTIEFLKAIGFREEMRAAPAADGQQQSAERYLVLSAQPTAGGVDTLRNALATLLDGKPIAIRVFREAKVFKIESNQQQLPNPEIPPDFFKRTVEEIRREQQRMSEELEKIMTLRTRKMREADTKRKDAEGNPFKYCYIRGIFNVHERFANVREFVAQHLAIHHGTFTLTAALGANQQQQQQLREEEHTLLDYELVPSALIHFQWDTETR

SEQ ID NO: 134228 - protein, 49 aa, Heterodera glycines
DKAAFAAAIRGKKRRSRPKRDEDEEAPLPLHSSSMMNLNKIFDYFCGLN

SEQ ID NO: 134229 - protein, 19 aa, Heterodera glycines
MRRRRHFRWLCKCLLLLVR

SEQ ID NO: 134230 - protein, 118 aa, Heterodera glycines
VSKAERGRCFFDIHIDGEPVGRIVMELFDELVPHTTENFVMLCTGQAGINFVMLCTGQAGIGKVTGKPLHFKGSMFHRVIKNFMIGSDFSAANGTGGSHFFMFLFLSENEMEHTSATS

SEQ ID NO: 134231 - protein, 111 aa, Heterodera glycines
MLGFVYADDLSELNGDNAMEVLYAAKKYNITGLIGPPLQIPISELRNVFLAYAQALLFELEALRWADEKCRQNGVECSPENLRAVLGPALFKIHLPNIHEADFSKYVGKNV

SEQ ID NO: 134232 - protein, 52 aa, Heterodera glycines
MRPKEEAKGKIGLGLKVSPYQSLFAFATKRCGQRRGQTCKKWIQNFVTAICL

SEQ ID NO: 134233 - protein, 557 aa, Heterodera glycines
MHVNPLNVIQLLQKKFSKYKEQTPINAFESDIAKNFAEEIERCNKNDEEMEISHDLITKFISKSHYINLEKVKKEAEEFVECVKNFVKDEQISSRDLLNADQSGFELELHAKRSLAPVGTKLIECVVQSVSSTTHSYTVMPMITASGSLLSPLFIVLAEQKGKFPQKGIFQCPRRRRQKRHISIRIGRGKRFANLDRPLPNCPKRSQKSAFGPISIELPQGLSLLPETEREGMRKSLESAPFLLEKLRATEIQKKTLVTAERVILGDSNAYQLKKLWPRSAFVGVQEGSTAEVIRQFDQVVLASKVKWLIAMVGKDSILAGDSVDSVIEKVKRLRQLCLRFAHVKIFWLLPPFIYNKKAESEEFCGRMRALFRKKSEIELVAVTEEGRSLLEIWRFGKNFNNEHVNHNGWMTEKGLKTLNAWLTSLVPNFPGDRELGIRTVKSKVVKIGAVKGGGPGDPSLIRGNAPERNVRGEGPGDPSPSRTIGISDNGPTGSARPMTNQNRGFEFGRVGTGYRSVPPPTFRGPSSRFHPYQQSRGRPAFHPTPMNRRNRFEPRR

SEQ ID NO: 134234 - protein, 38 aa, Heterodera glycines
MDFKAVIVGFIYYFYVTYKSIVKYLFFINSILNQKKRN

SEQ ID NO: 134235 - protein, 79 aa, Heterodera glycines
MAEKFVLPLTAQNFRLERKTSVEEPLFILGQNFFEQLHYGAFLDDYAGIWLFGIDTMQKWGRRSTKIVVHRHQKCGLMV

SEQ ID NO: 134236 - protein, 181 aa, Heterodera glycines
IAASDGVMVARGDLGIEIPAQKVFLAQKMMIAKCNMAGKPVITATQMLESMICLEAETAFFHSRYFEELLQNTPSPTGPGETIASAAANAARRCRASAIIVLTTTGKSAQECSRFRVPIPVLAITRYEQVARQLQLCRGLFPLYYPHMERDTEWTEDVNKRIAYGIGVGKERGFIHNGDFV

SEQ ID NO: 134237 - protein, 169 aa, Heterodera glycines
MEKLAQQNPSLVDSTASSLEKAAQMELDFIQRVLLGPHRGNLTAIECLLAQNFSQNSSMMPNYGGATWKNSKMPKLETEKHIVGDVDEPKSDNESETDRGDQKLKRKGVERPKRNPSECKVCGRKSMYCYYSVRCCEANPALSRKKTRDRNLDGIPIQYAPGRFSKYLR

SEQ ID NO: 134238 - protein, 39 aa, Heterodera glycines
MAKRQISLLKIEEIYEQMGNVYHVVNLNELEWVNLFFEK

SEQ ID NO: 134239 - protein, 88 aa, Heterodera glycines
MTTVGKTDGSQGRTVAQNVWGELSQTSELRWPKFHAADFAPEQWPKLAHKVLSSAINIAAAKGKEKVSERVKEAKRKARTFIVKNSEQ

SEQ ID NO: 134240 - protein, 123 aa, Heterodera glycines
MEEPRRKYDDEEEEEAEAALVSDGGDSSAATDSPPLSRALLALWWDEHSETDEADDRQLVQLTLIVRDVEQHFECVDQIQVDVAETVGRPTNAEKMGQKLRELEKACGSAAPMKQIGWQCPRR

SEQ ID NO: 134241 - protein, 713 aa, Heterodera glycines
ADSPCCSNYATEPMDLFELIRRCCDCFGVQGDPAEPDPDFPCWFFSASGDPAEPDPDFPCWFFSASEWLCPELAELMAIFVSLYQAIENVGYGQKVCSAVGFWIRRHPAHIENVGYGQKVCSAVGFWIRRHPAHFDANAQLGRLLDRLKVKMSKRNNNKANGLEIGRRPSYAWLRNVSVRNPVSRHSLCFEQWSPEDIATSMSHIDHKVLSRVNVVSELKRYVRVGRLCQQTPLLERSIGIFNSFSGWVQCQVLSKATASFSGWVQCQVLSKATASERAEIITKFVQVGRHLRRNNNFNTLMAVIGGITHSNVARLLLTHSLLPPDILDDLSALTKLLSHANNYAAYRKTLRSVGGRFKVPIMGVHLKDLIAFSVPGWNSSKGVHLKDLIAFSVPGWNSSKTRCRTSAGLFQLSQLLSHFCRTSAGLFQLSQLLSHFLGVCRTAHCFGDVNLDLINTLKVLFDIAYDERELYQLSLEREPKTASSVAAAQPAVFADWAAGVCAQPDPDPAVFADWAAGVCAQPDPDTVDKIAAMVDAVFKHYDNDRDGYIYISRAEFKQFASNFPFLDAFGEIDSDRDGKRIYRQLNDSVSHHSFDQDCRNGLAHQWTDAQFLAPAVCAHCNKLLWMRHGVRCKMCSCSLHGQCKAEAALKCTRRRPTTSGGSAKRNAKTKNKTMPKFERCPKKRSQKRAKDSEVTHQRKVKSEQKPREGAPL

SEQ ID NO: 134242 - protein, 92 aa, Heterodera glycines
MFEYPKRTLEKIDFFVFGAVPPNRCAQIYGETESFRNSFPIACTLILRWIFAPHNCLSTPNGHLKKSIYFCFRGSPPEPMRPDLWGDRIFRE

SEQ ID NO: 134243 - protein, 120 aa, Heterodera glycines
MVENGTEIKTYRNELKSFQEEVDKAKNTTLEHVANNDMKQAKKSADVAKGIAKQAKIKYTSILEGYNDKSEKGFSGKNARLFHAEEANYMPDLTGGVRQLYIYAPNLIENTIIGNQMAPL

SEQ ID NO: 134244 - protein, 54 aa, Heterodera glycines
KKHPRNPPLCTIDGVRPPPAPLQKFTLTKKQLSHNFGSAAVPQLVAEFNNLVRL

SEQ ID NO: 134245 - protein, 82 aa, Heterodera glycines
FWGTLSILRGEALFGAQQIQRFYRDIDETLAWMGEKELTLATDDFGRDLNNVQALQRKHEGTERDLAALESKVARHGEILSV

SEQ ID NO: 134246 - protein, 95 aa, Heterodera glycines
LFEYPKRTLEKIDFFVFGAVPPNRCAQIYGETESFGSSFPIACTLILRWIFAPHYCLSTPNGHLKKSIFLFSGQSPRTDAPRFMGRPNPSGVASL

SEQ ID NO: 134247 - protein, 46 aa, Heterodera glycines
MNIAAQLHISTAKTLQNRLQQREDDQLKELIKLEKRQGKRRNWCCI

SEQ ID NO: 134248 - protein, 104 aa, Heterodera glycines
MLSRVFGICVFSVVLDCPRSYPRAGPTVTFNKPIIHPNVSNASDRTRNQMCINLLDLWNDTNNLSQVVEGIRSGTMRMRPIPMQLQHMVGTGPTTKQWSEGMSS

SEQ ID NO: 134249 - protein, 41 aa, Heterodera glycines
MRVVPIPANTDNYMYLIIDDDDKYQKGHRPAALVDPVNVEK

SEQ ID NO: 134250 - protein, 117 aa, Heterodera glycines
MQTRYASSVRFHLIGFTSSLTLSSKCFATFPHGTCSLSDSWPYLVLDEVYHLIWAAIPNNPTPRHVKMGRHRQLDRSCTFSGAPVKGNLNKRANPSSRSIRYTSQPQRSCDSALDSS

SEQ ID NO: 134251 - protein, 39 aa, Heterodera glycines
KRATISIKLTTHKVLAPVPYRGCKGEHNTSLLLYFRRGS

SEQ ID NO: 134252 - protein, 136 aa, Heterodera glycines
MPDRTGLVFSKMTGFGIRSLIIRSIRKTNKRQGFLVETKPDRIRSKIRRTGPDWHFQNDRIRDPVSHNPVNLCNPVNPYFSKKSPDRIPDPGKSGTGSGPVRSLLLNNSNAKKQALARKLNKNFVFGKFCPKIFMF

SEQ ID NO: 134253 - protein, 25 aa, Heterodera glycines
TCTCGVVVKLSTFHNFSPGFNSPLG

SEQ ID NO: 134254 - protein, 24 aa, Heterodera glycines
  unsure (1)..(24): unsure at all Xaa locations
RDGPRFRFSHFAFRIIRXFWRFAF

SEQ ID NO: 134255 - protein, 167 aa, Heterodera glycines
NPDNPAGSRKKSSGFIGIRSGSRLGIRLDRFSKMFGIDRDRDSVGIPTRDPSDPSCPVSTAKARSNGHKLKPYVHTSLAAALASARSSAWPVLTPTNLISTALPAIVAINAALNCAGVQSSFGLRVDNVWPSRPFWPMMVVLMKLFAMSSFNRTTIECAASCAATNA

SEQ ID NO: 134256 - protein, 116 aa, Heterodera glycines
MSSLTTLTWCCQSALRLETGETTPALVAAHEAAHSIVVLLNEDIAKSFISTTIIGQNGLDGQTLSTRRPNEDCTPAQLRAALMATMAGKAVEIKLVGVSTGHADDLADARAAAREV

SEQ ID NO: 134257 - protein, 27 aa, Heterodera glycines
MSLFNPNEPFEMRIETVQEEGEDCRFS

SEQ ID NO: 134258 - protein, 112 aa, Heterodera glycines
WRLSLGVAVDKLGGQKTGIGVGLCGGEENPRRPPEEHQRNAIFGAETAAEKVWAKKCCFCAGGRDDGQRPAVGAGDGVEWRGERVPRPSDAECAGDGQISAKFDAMAQRALF

SEQ ID NO: 134259 - protein, 40 aa, Heterodera glycines
NGSAAAKVWQRRKTEREGQCPSHLMGRGTAQRKRRTEEAS

SEQ ID NO: 134260 - protein, 91 aa, Heterodera glycines
MTTVLFTNSIISREFHSMQLRFNSLCRDLSSVVRCTLPIIKDNCGEKPANLLLKFIGLEFSRYFDEHRRNSRIVYEQYEWGLVGCSTIHNV

SEQ ID NO: 134261 - protein, 178 aa, Heterodera glycines
MMSMCEHTCGLCAADACFDAADDCTSLGHLCFHQAVSPLVRQQCARSCGLCTPQQRAETAPRGGGAESREVVGVQKTPKEIYSDFLKDKCAKTCGHCLSEEDKVRLGNDYGSDSSNSEDYDQPFESVRRIRNRPSAAPPAGGQKNSADNGTTVAQRAKGTKALQSEANQVENFPSELS

SEQ ID NO: 134262 - protein, 37 aa, Heterodera glycines
MEKEKLWGGIEFREKNGEWKEEMERKKEQGEEREQSG

SEQ ID NO: 134263 - protein, 88 aa, Heterodera glycines
MNAFFSFGIFLAIQFHAQFVLADVTASIKPSSTWNGGGQYILSFKNNDNSKTVCSVKFTLTPASGGTNPNGPPATPTLQLIEAKYYSN

SEQ ID NO: 134264 - protein, 132 aa, Heterodera glycines
MNRHSIQYLTSIGCLKQSTPSHNRRVSSQESPRALMTLPGSSSRSLYSDLASPSGQYLFPSRIIKWENELNLTKTKLKSAFEEKMKEIIERFDELKELYMYPKKTAERICERIGHFGNDLYTMEKRIGAKLP

SEQ ID NO: 134265 - protein, 66 aa, Heterodera glycines
MCRPFRYAILYYNQIGIISFNNGLVTPKQFKRMISINILIKYKFVVQIKHELHYFFRMCRPFRYAI

SEQ ID NO: 134266 - protein, 176 aa, Heterodera glycines
MNVDTGAQATVLTIETWIKLGQPKLLPTDIETRNCNDVTFKTIGKFRCLVSIMGQPAKKLTAYVTEELNYDLFGLPWIEATELIPKEIMFPETHTSVGIRASSAAPFQEIADVKSLTTALKENFPDVFGKELGQCTKIKAQLILKSDARPVFCKARPVPHGSLEAVNTELDRLLQI

SEQ ID NO: 134267 - protein, 425 aa, Heterodera glycines
PSKSGLLYLFTKLGYVHLFDIETGTKVCNTRISDKAVLLSTELKEDDEVLCIDGSGKVISVGLDKSAIIPFILKHHKNTELALKFASRYNLDTDGVTSDSNNNDQPVAIQAHHQCQSVQQVLQRNSSVNAMGLLISVSNCFKNLVEHFQWSKFWHLQWDGTNAIVRVDPEKQNVGRIGSVSFTVTNRETCAIYFKIKSTSNSFYSICPENGIIQPKENVEVIIKPNDDELGQFARNNDQKAQVLDHGIELLFSVQKTPHNQQNSEQRKGSTNKGKMSKKGKQMMEQKEKASEPIEIPKADLGETSQHSEGLLEKRSKKTSPIPENLETILESDREQSQGLASPAPESFQGFELVPRVAETSNNSEGVSVQEPKVEANRSNSSVNPQYSAEIALSLLEKMSARDAVQFRIDLNSFLEKYEAKFLDE

SEQ ID NO: 134268 - protein, 139 aa, Heterodera glycines
MSTLADFFLDDYIFIAYGTERISLDDFFVISEEVELPMELKEQVKILEVLGDGNTALVYKAAFRTEKRDKNEEEQWMTDALKIVREETLQNDEVLGFVRTEVGLLGVLSHEHIVQLRDVQILDGSWFIRMELVQVGVQS

SEQ ID NO: 134269 - protein, 138 aa, Heterodera glycines
MRFGQNEEEEDGHGDADSCDFAVSESSAEFFFSRRASMDELSEQGGSSSGPPMDQQQKTNANSDGTNKKGGIEAANVVGTSRRESVQKHIQIGTTTPATLALALNGTTMDGETATTTGKETPKVGRRVVVGQQQMRKT

SEQ ID NO: 134270 - protein, 71 aa, Heterodera glycines
MKWMASQWNTLIAGWHWLWLDEVKMEEDEEIEDVSVVVPWAEEAEEDEQFPMAYRIPIFGIMTKYPRKCTS

SEQ ID NO: 134271 - protein, 59 aa, Heterodera glycines
MHVHLQSVFVGYDHCLTTPSSPFQLRVEIGLAYLTSNIVKDIARLKFDCHLHDLIMVCF

SEQ ID NO: 134272 - protein, 97 aa, Heterodera glycines
MVAPAWGDGPKKEEWPRNGGHGLCQFAHGELGDGTRTVPIDFEDERVSESPQLPPPPTVPIPMGHLNDSEFEQWCETEIDEAMEEYCDAVKQYTDKY

SEQ ID NO: 134273 - protein, 160 aa, Heterodera glycines
MARTALRCARPNKWCPTLATKNHADFLWWLQMMIKNGTEMRKFFDIMLEQIKAEVDQFNKNCEEIVEKWAQKHKKSRTATNSSASIASCQNFGQNVPTLQSYYVYYQLFRHLNTIRAAQTMTSEHYLLSYWVATMTDQLKIQIKYFATKNGCAEMIQSLI

SEQ ID NO: 134274 - protein, 106 aa, Heterodera glycines
MAFQSLGLNPPAFQSLRLNSKAFQSLGLNPPAFQCLGLKSPAFQTLGLTHQLSMAFQSLGLNPPAFQSLRLNPPAFQSLGLNTPAFQSLGLKSPAFQTLGLNPPAF

SEQ ID NO: 134275 - protein, 38 aa, Heterodera glycines
RLIEPVKSFRMISRLFDSVNNFKSYIDSKLAQTELARR

SEQ ID NO: 134276 - protein, 23 aa, Heterodera glycines
MRLHVHHAHQAVISSILTAFSPI

SEQ ID NO: 134277 - protein, 268 aa, Heterodera glycines
MLCFLILPPTKCQSSLTPLMAHRGQLLPPHRTTAHLPAESPPPPRRFATGGRTQVLPLTAQNCRRVTPLVMLMADQQQQQRQQQTLSVQIARGRMPTTSDSRATTTTGTNSAMKSCATIHEDPEEANRLLSDELLSIDRVQPPSYSPPEPPNNKPLTINICRESINFSRCSYGGAQTPLNTTTGSSSADPSVDSILNGCGRRGAQVRISELESEINADGTPNCANVVTGQLEPSCHAVMCRRVPRSISQQLELMNMAQQQQPSPDQQQ

SEQ ID NO: 134278 - protein, 68 aa, Heterodera glycines
MHAFCARAIYHRACQSKAKQQRCCFERIKGIESVHILLEKYICNLSTILRSELEMINFTIQTNFRCSN

SEQ ID NO: 134279 - protein, 83 aa, Heterodera glycines
MRLQARQLGMAVEECFPDWPKLRQQYCRIRKQAVRERMQRNWEMMVMMHGGERMIDEDFDGQEQYYDGSDEPINKNPIVEQNQ

SEQ ID NO: 134280 - protein, 39 aa, Heterodera glycines
MQKISKRHYIQQLKNSQKAAAGKCKKKHSSKKRKPINVQ

SEQ ID NO: 134281 - protein, 128 aa, Heterodera glycines
MAFSTVCMLMDFFKWMAFGVGTICNVLMSRLIIWHTPKLMRIYSKILLQTCAADLLLLIMTILFIPKIIIIYFQNKVLCHLVHLYNEQRRTDTDSRWFDQFEWINGRKSWLDFASLCFLDFSRNGIIV

SEQ ID NO: 134282 - protein, 173 aa, Heterodera glycines
MGTKNGRIPYELLFELISALPFDIRWAVTRVSKAFDGFVWQKQFSWVRAELTRKEAQRQKEAAQSLSTAAHSLSTAAQSLSNSAFNKNKLFFNLLTKQMCSVRQLTVDMLQGIEAQQAVKKGGRIPKAGCSSAGGGRGGGAGRKGGGRGGGAGRKGGGRGGGAGRKGGGRGGR

SEQ ID NO: 134283 - protein, 51 aa, Heterodera glycines
SNYEETGMFGGMNIYHQKYFTVPLPEFRPEAAALGASTHSVSQSPTVRASA

SEQ ID NO: 134284 - protein, 181 aa, Heterodera glycines
MDPINGFYSNNEDNVTLTVDFILKNAEMGLFASSVPRTSDRTINWEIEKVSEFFREAIGSERKSETVHIKGFPWKIVAKLSQFKDLDFFLLCAIPKTSNWSCKCSATLRIGSDDFSDRFDNLIFNNELPICRFDVGLPFSHLELIGTNKGWYDKEEDKVTVVIDFLFDDEKMEKPYGSIFS

SEQ ID NO: 134285 - protein, 106 aa, Heterodera glycines
PGRPRKSLTNFDPTCADYRSLHRILMSDKERAEMYRKRNQQQRERRRQMTKDELAEARAKARQKAEERRARMDAAQLETARRKHAEQRRKYREKVRRAEQRGKRNE

SEQ ID NO: 134286 - protein, 602 aa, Heterodera glycines
MANSQVTYTVFDSDCLMLSDLELTDSTVLRLDEDESDGGEGEEEEEDAFHQNRMFLLTEEAEETKRGSFLDRSVILDGPTLNLALPVIESNKMRAEEENEETPTPMVEMSRTDDFRRERDEDRLNRNHLRLEFAAKSEPTQKTTTAAASLFPSAPPANPMRTKCKAPSKSQMIMDQLKASIEAEKQRAKRKKEEEEEKRKRDEEEKKRKEEEEEEKKKKEEEEEKKRKEEEEEKKKKKEEKKKREEEEKKRTMDAEKSELNVALPRSHSRSRITPSARPVLSSRENTSIALKGTAPMSGMTRRSMTTKSQSVEHVAVAQKHLSGIGRNIANGRTKESKSANASDRQRKEVEDELNRTKQMLKQTTKTLDVFAVVASHFDRKLDNANTESAVLMAQKGDEAAQHQRAIAEQTSQRIGESELRIANEERRNVQIETGKSRIAIRSGQIARKRGPNSQIGSTNWRLARRSEPFETVAKLEGYQHELNDIRVKADAVVKEKEVLEYQLNGQNGGEANNGTPRTRKSFAVPSVSASTPPNRTPETQRKRTSHLSMSCHSNGKANTPRFVPPDSSSNGRRVVNFDSTREDNEEPNRAVDSEEKCDRSP

SEQ ID NO: 134287 - protein, 208 aa, Heterodera glycines
PERMKNEQWFRPKVIFWNIGINHEASLAASIGDSLAASIGDISLEEEINRTAAIAIAYGTAANGGRASKRSEEGGKVLKVSSCPSKKNWAIFTQVMALNSASGGVPIICCKSGKDRTSMGVTLDEGRILKESCGVSNQQISEMIKCLRKNGVRRISEMIKCLRKNGVRRENCRKNIGKPFYSFSPFQLGFLPPPFRPPSGTFSNVVSS

SEQ ID NO: 134288 - protein, 88 aa, Heterodera glycines; identical to SEQ ID NO: 124691

SEQ ID NO: 134289 - protein, 101 aa, Heterodera glycines
FVFPGRRTKKFVGKREGTNWGGGGRKPNETRSKSGDAEKPRRREKGGGVVEARREGRMTPNDGSDWRGVGVPAVSHLAVPQILSCDQKEGLLNNLLRDGII

SEQ ID NO: 134290 - protein, 304 aa, Heterodera glycines
MCEHMQHTVRKEVLSDCDIAQGNKLLLYLSCCLAGRAYPYGELPDEHLAKTVPLETYKFLVQLRPKFVTGPPSSATTTPSPTTASKEDDQGGYGIALDAAAVVQPINNNHVDNNNSSNKPSVADLRFPHLQLLLKLDPQQFLNVINTCADAPVFASVDVDQTGVATSVSECACPETGRTAHCGPVESGARNRLGQCLAAHLVLSHLPGLLADAQSNPRKLPFQFIRQCFALRHHYHFVGQRVGGLVALLASAWCSDGPLSERGHAMAAAETAQCCPLLLLQCFSCPYVDHFASAGRPGAHPTRI

SEQ ID NO: 134291 - protein, 45 aa, Heterodera glycines
MPVSNANETKNPSAGKNDREMDERWAKKREDSEDSLTRRELTPAG

SEQ ID NO: 134292 - protein, 42 aa, Heterodera glycines
MSMHFHKNGFEKYIKKLFDLGFIGNFGSTCTVLDSLCCAVYF

SEQ ID NO: 134293 - protein, 259 aa, Heterodera glycines
SFSPIFEALNCPLTVQECLSFGDTSKNVFAGPECLSFGDTSKNVFAGPSALFHAIEPFVPCPVDTAHIALPNFALEAHLRFAENLHELWAMRKVDLGWTYGEVRNEQTKRHPCVRNEQTKRHPCLTNFERLPDTEKAYNVSLALDTMRTIEALGWHMILDQPPTRLRPVILDQPPTRLRPVRLPQNYAQANGYKPQPLDTHEIELSEAMEPLIEALAGNTHNVWAKEKIRRGWTFGISEFVDASQKRTPHLVPYDQVDE

SEQ ID NO: 134294 - protein, 70 aa, Heterodera glycines
MSTNMSSHGRRQRLERSSSSIRELQQLQEIALAIENLAAPNPRRRHDSSAGESEHGEILMAINQLQQVDE

SEQ ID NO: 134295 - protein, 67 aa, Heterodera glycines
MDLLVSLELLDLHYNMIARLPDELFRCLVLRTLDISGNQSLNIGNLQTWPSWCCARTKSGTCPAQSG

SEQ ID NO: 134296 - protein, 95 aa, Heterodera glycines; identical to SEQ ID NO: 133575

SEQ ID NO: 134297 - protein, 88 aa, Heterodera glycines
STGYREAIPEGFGLPINLGASVRGDCPENKKIDFFKCPFGVLKQLWGAKIQRRIKVQAIGKLFPKDSVSQKSGRIGSGGLPPKQNKSI

SEQ ID NO: 134298 - protein, 74 aa, Heterodera glycines
  unsure (1)..(74): unsure at all Xaa locations
SPNVLDCSEAHQILQGNCXRTLQMLINFLRIFCLEEHSSSHLPHQHYFFLIIFFILSPNVLDLSEAHQILQGNC

SEQ ID NO: 134299 - protein, 85 aa, Heterodera glycines
GPERLGPRFWAPAFGPPFLGPGVVWAPVFGPRGRLGPTQKSKSAFLKIKILKTKPEGSLATWHKLGLINIRSFFTILLIPNPIIF

SEQ ID NO: 134300 - protein, 93 aa, Heterodera glycines
MTNRINFQFSNVYLPKSMPRANDLAFATTACDSLLITAQSSTFSWWIAYLMPDNATIFYNSKITKNIYTTNENFLAEWVPIELVNGNIMLSNG

SEQ ID NO: 134301 - protein, 181 aa, Heterodera glycines
MAGPDSRFILEFFNREAKEIGVTQELLDNSQPSDQLIQAYYFLCDLIFENVGTTKENEYEMATELTRARAKMIIRTQQHCNLVYNKLFDGSNEFLYSDLFQPDPRRTKMHIAQLIRLYTTKCDIAKELSAVDNHIQLKDREEALNRMETRNDEMGSKVRRFKDKLNDRQALVEDEKSRVER

SEQ ID NO: 134302 - protein, 89 aa, Heterodera glycines
MPFSDFDGRAMQNDFLRSNGPSFLSDYADLWLLALDMLPMAHQTAEEQREQLKMELFISRSSNCSMEAWFVQPSDSVGPSDPKMPFDDS

SEQ ID NO: 134303 - protein, 45 aa, Heterodera glycines
MATKMAQSFGAPLKCAQCQCKRITMTKKDQSFWSHQLPLRNLKRL

SEQ ID NO: 134304 - protein, 78 aa, Heterodera glycines
MNENEKQKEFVKLFKKYKKQNKEIMNLEIAKKLGIHQNKLLEFRKRFDPTYKINARENDDEANSEEDRHFFYLTAKIM

SEQ ID NO: 134305 - protein, 19 aa, Heterodera glycines
TFAFSSLALPNTHTIFEML

SEQ ID NO: 134306 - protein, 19 aa, Heterodera glycines
TFSFSSLALPNTHTIFEML

SEQ ID NO: 134307 - protein, 19 aa, Heterodera glycines
TFAFSSLALPNTHTIFEML

SEQ ID NO: 134308 - protein, 19 aa, Heterodera glycines
TFAFSSLALPNTHTIFEML

SEQ ID NO: 134309 - protein, 19 aa, Heterodera glycines
TFSFSSLALPNTHTIFEML

SEQ ID NO: 134310 - protein, 19 aa, Heterodera glycines
TFAFSSLALPNTHTIFEML

SEQ ID NO: 134311 - protein, 19 aa, Heterodera glycines
TFAFSSLALPNTHTIFEML

SEQ ID NO: 134312 - protein, 119 aa, Heterodera glycines
MPQEVGRTTVAELTYFDPNNPNRVMMMKKKIYFSWDVRQITISAYLGTGHICTEQTDFDQWTNKSYLEFFPDQWVELQNNTGCDDNALVTFKINLEEATQTFYWFKIFKIQFTMITKIL

SEQ ID NO: 134313 - protein, 63 aa, Heterodera glycines
MEEFINLIPELHANSRTWRSIVTMDEFSQFQSTPTVPMDIGDTTPPPHATNDRSNTSNKSTIT

SEQ ID NO: 134314 - protein, 179 aa, Heterodera glycines
MAAKPIFFCGSHETVAEFGGWGGRSLLWWAKGTLKEARCRGNSKHYKIVLVFSFCRLTNSFLMAASDVFEAMFRFDSANATTSTSKPPSDLASSSNPVVVSDVDADVFRAMLGFIYADDLSGMNGDNLFDVLYAAKKYNIAGLVKACAEFPISELGNVFHTLAEARLFGEKVTFSRNTN

SEQ ID NO: 134315 - protein, 107 aa, Heterodera glycines
MADDSQSCYLELARNDEDGTLMLFNGISAKTLGQLLQQRIDELDTETNFWMMGLDVLVNRFDEEREYFRQLLANFNTAIGAMNAEDQRKRLGGRKCGGQTAGEENEI

SEQ ID NO: 134316 - protein, 97 aa, Heterodera glycines
MSTKSDIWSLGVTIYELLLIQPHFGLYKKPNQRSNKHNKFLSEFSNIYKGFAFDKKDKEFEYCTNDLDWLDGHLDQIDQMIRIWNEQHPRIALLLTV

SEQ ID NO: 134317 - protein, 224 aa, Heterodera glycines
ILGPPTVVTRDGHQQRGRVNGNHQSNNMGKLAAATAGATAHNHHHHHHHNHHHRNHHYHNNNHHSSSSARNGSSSAAATTTVAHHVATGEQATGGMPTLPLVVASLSNGGNAMDNATVPRTPASGGSTFDELFKPSTNGYCSTNNNNNNTNSVMNTQQQQLMATQMMAHMFAAAQQQQQQQQLISAGGTDQQVAAAAAAAAATTLMATAQMAAHMAAASAAGGF

SEQ ID NO: 134318 - protein, 148 aa, Heterodera glycines
MAAAGGANACGGGGVPPPTTTSGAATTPLLSQLTLPLTPSAMPSTGTGNNSNGGGSNGCGGAGATNGSSNAPSPSPQKRARTRIADEQVKILRQYFDINNSPSEEQIKEMAHKAQLPEKVIKLITLSIIDQIKPFYAHFGGKILKNIS

SEQ ID NO: 134319 - protein, 231 aa, Heterodera glycines
MEEDEQQQEKNREEEEEKREREEEAEKGKEEEEAERMMDNKEEEEEEQAEEEEQKLKDEGRMEEEEEDRRHRHGDEALVERHGDKASSSPPSHSAAAFVDPGTFLASLGNPTAQQSAAMMPPLFPFFGTGAANSAAATPGASGGGMESFASMFSAFPFHSFGQLATAASSSTPTSNGFSSPSAAQQQQQQPSPFLQPSPAGLMAAAAAAAAGTNNGGTFGHLFSGQNMLLN

SEQ ID NO: 134320 - protein, 245 aa, Heterodera glycines
MSTASESGSDKIVFQKNTSSANDNAQSNQQKEQVQKWKVGDQCMALYEVDGKWYPAKIEQISPVKNTCTVSYIGYDQKAILKLEDILGSAEFAANSHFQHHSVDLNWYFNTSHSLSFFEQTPPIKRRRLSIEQPIALTKFLPESNCCIGNEKSGTTSDNLKTPDFVSENSTTVRLYLEGIRDKLRPNMSGIVVSNVFNFYLSESDVEAADDHGDEREAEGTSGTTKAKDKLEKAIFPFLRLRTMM

SEQ ID NO: 134321 - protein, 56 aa, Heterodera glycines
MLKKQDTKALTANAVVLAGLSVATSVAFYNIDKISAYWTMPFTLWAIFCAGLTVKA

SEQ ID NO: 134322 - protein, 134 aa, Heterodera glycines
MAFKMEVAAEEPKLMPGLRNEHALVVNGKVLFVNKYLLAAHSKFFEELFFGANAKETPEIEIKEVENAAEHFERVLSVMYPQNIELDEENSAGDEQGGLCGDGDQLHGQSVEQQEVGGGRSGGTDGTPQRIVQK

SEQ ID NO: 134323 - protein, 125 aa, Heterodera glycines
MGQGNGASTYSAPPPSAVVSHGRARHSLDNSQRTMPRNAGPREIGGLEGGTTTAREWCRKRGRNSAVGAATPKPLVPIADLGDSNKYSAEETDCRNKLASLYRLVDLFHWSQAIYNHITVSQKQG

SEQ ID NO: 134324 - protein, 41 aa, Heterodera glycines
MPQGTECGRKWDKGHRRTAKRSARSSVVNFYLFVNILSILL

SEQ ID NO: 134325 - protein, 115 aa, Heterodera glycines
MRSVVPHFPPLPALRDFIYMYRMDADKTLSQNYLMDMNLTRKEQRLRQRGSETEETIAKRLKHAKEDMEAVEKQPSLFDYVVINDILDKAYNDFLDVINPELDALQKQKQHQQQQ

SEQ ID NO: 134326 - protein, 30 aa, Heterodera glycines
MAFVLQESVLAFKKTRQRRNPAKGRDPDKS

SEQ ID NO: 134327 - protein, 156 aa, Heterodera glycines
QLSPFLKFLMKGLNISLSTDDPLRLHITKEPLLEEYSNARILWKLSSEPLLEEYSNARILWKLSSCDMCELARNSLQSGFEDRTKMYWLGSNYKEEGDRTKMYWLGSNYKEEGVFGNDMTRTNVPDIRTNVPDIRVSFRHEALVSELYNQALMLMK

SEQ ID NO: 134328 - protein, 201 aa, Heterodera glycines
MLSEDGSRDNQMERSLVRGVEGHDDLSGRIGSLSLRTIHQQQPVTLPADRGRAGPLDDGQPPTQSAGRRRTRRRGKRRPLNLVKALCRFNGGCMPSVLPQMIQRRRIENLCFLRDLRLQTVHLKSNIMISANSLSFHSAGSLLAYRGYLSITVEQHLYVRHRVRLRFPFLPCVVQYGGNHHHYYFPLELLEICSRPTDESS

SEQ ID NO: 134329 - protein, 159 aa, Heterodera glycines
MVDERTGEIRYVQKIRGITFDVQNSQTLQFEHFRQKVLNYGRQGEEPAVFHYDKIQPTRASQIVTRQEISSDNMDNSECKTEKEMDLKPEEKGHGEEKGEEEIVFLGMTINETPKDEKKELPPSTSSGDSRKRRHSFDGSATSMLGAMIKAQGEARAEW

SEQ ID NO: 134330 - protein, 40 aa, Heterodera glycines; identical to SEQ ID NO: 126546

SEQ ID NO: 134331 - protein, 86 aa, Heterodera glycines
MTYKLIGSPKIKACKEQAVLYDGSTRSFIGKGTGTFEFNGVNVEQEFYVAGKDSLNLLSIQTMDAFGLLDELKEKISSKMVICAKA

SEQ ID NO: 134332 - protein, 181 aa, Heterodera glycines
MVFNALFRHLLGHVLIIERFLATISTNSYENFSKMQFTFIWLIITFIIAFVNTVTNGQSWTFTTLNLITQTMSTVISLFEYLLIIVIRNYNCRRYISQFEEASPKNYHIGQRYQVSENVKTATQLSPTFLCLFLTNLSSNFFVFVTTFGIVTESNNICLTFAFGIWTDVFLSAATELTIMT

SEQ ID NO: 134333 - protein, 30 aa, Heterodera glycines
MLNIFSTNKINFNLLVPGSRPVVFLASGQA

SEQ ID NO: 134334 - protein, 19 aa, Heterodera glycines
MNGPKSGENSGKKKQIKKV

SEQ ID NO: 134335 - protein, 71 aa, Heterodera glycines
MVLTTQFGGKPIECLTPDIFSSSWEEYAENYCWAQDTYFVAPSTNVESLEKIERKQRRISYYQWVGVNMHR

SEQ ID NO: 134336 - protein, 155 aa, Heterodera glycines
MRTSNSASSAAVADDANGGRNSSDDSPPVEPEEEALDYMVTIPETDGESAFSFRKLWAFTGPGFLMSIAYLDPGNIESDLQSGTVARYRLLWVLLLAHCVGFFLQRLSARLGVVAGRSMAELAFEYYPRVPRLCLWAMVEIAIICQFNTLISHYK

SEQ ID NO: 134337 - protein, 88 aa, Heterodera glycines
MTYPFLRYSILIVILCLVYGNDDENRQEAIHKNDDYIIGDVYLGDEFWDQFSPITDLPTIDGVEFIGNHLKYTDQTENDKTHESVIEK

SEQ ID NO: 134338 - protein, 184 aa, Heterodera glycines
MALLFQQLTDTLKNIANQNANPNKQNSDLFATINSQLSEFIYNPEADLVFEIWHERYGPFLETDGQSLPDEMKTRLLVGKLGAQEYARFTESILPQKPTDLSYNVTLQKAPSQSPIDFAAQVSAQCERAQMTLTKEEIKALVFISGLSSADRDLRERCLKMMEEDRAKNTDIKFERLVEECRSI

SEQ ID NO: 134339 - protein, 96 aa, Heterodera glycines
MEYTYVGFTVHLNVFSFTFNCAGVHRARNELEFHTECYVEVASGDYVNGTMLTGLCRQILLEDLKESRKHDILEWTEVPQKLKEQLEKQEFDQKCN

SEQ ID NO: 134340 - protein, 94 aa, Heterodera glycines
MPSSYGTSGAMSQSYGMGGGGPPAAYDTGARGSYGSAGAASYGTGSMGSGASYGQAEPKMSVAMPSAMPPPPAMPMAAPYGGDGSGRYGNDGRR

SEQ ID NO: 134341 - protein, 89 aa, Heterodera glycines
NPPPTPLPSPQPCGQYNQYGSGGAFGGGGGGSYSQPNCNTYGQQNNYGQSNYGGQSNYGQQESAGGFGGIGGSPSQFGVGAPGCGGASC

SEQ ID NO: 134342 - protein, 256 aa, Heterodera glycines
EVGITILNSMLVSVPFPSTRLFWSVQENGEWGEEEFHSNPFFHGKPFDVRIRVHEKRFDFFVNQVPWAVFEHRTDFRKIDHIQASGDVASGDVSLSAVHWGGRYFEMPYEMTFHDHALESGQRLFVYGIPRGDFAVSLISDSLEELFRMSALFDKQIVVRNAQTDKEWGAEESEGVVRNAQTDKEWGAEESEGGPFPFRKGEGFDLVILNEPLALQISINGTPFCSFFHRTIDAHKDYKQVRISGEVELTGMEVSL

SEQ ID NO: 134343 - protein, 169 aa, Heterodera glycines
MPQAQSVILLAHDGHNTDLASETLTASARLSKKVPIFAIAGGKTPPALAKLDEYTGGQRRRVFAFEQDGQQFLDALDEEIEFCPSPSSVPAEKNEAEPSPSVALAAEAEKPIQKSEVKKPMEIIRKQVRNSKDLVKLECGTNSGEVRNNCKFNNPLGQKIKNKCLGFMT

SEQ ID NO: 134344 - protein, 90 aa, Heterodera glycines
GKMTFCCCHLFCGNRDKKAAFVRLGSAMKHFDRDIVPTSDGARRRRKSEQKLRLETDEQRMRLEMERRTKTRKQIGERKRRRLSTDDNWE

SEQ ID NO: 134345 - protein, 55 aa, Heterodera glycines
CCSKMVRKKKRDQKRRKEEDDDEDQEVEEKRQKLNFSEKDTELFVGGIKLGQRSS

SEQ ID NO: 134346 - protein, 131 aa, Heterodera glycines
DPTFIQPFALLYVASIFAQFPLFFTPFECFLKWAFTLWHFALCQFLANFVWRIRLAEFAQFTVVKLALFQMILAQFYADFCHRLIFGSNFAFLPMMVPSVACALLVFFAYCHFILIVFAESVQIHFFKFRC

SEQ ID NO: 134347 - protein, 39 aa, Heterodera glycines
MNALMLSALSTFFVLFCAIVGGGVIRKAQDTEQPPMATG

SEQ ID NO: 134348 - protein, 20 aa, Heterodera glycines
ETPGGVRQTPREKLATDQTT

SEQ ID NO: 134349 - protein, 557 aa, Heterodera glycines
SARVDALGTVKRGTINHWLNIFYFYFRYNRAKDDPFSLFLAEAENNPCRKLQLKDMIPAEMQRLVKYPLLLETVAKYTPEPSDELQRLLSGIQGAKNIVSEVNSAKRNAENVRRMEELQKKLDFSGAEKSFFQNRLSNVRLSMHKLVFEGPLVWRQARGKHKLVFEGPLVWRQARGKNIDLHVVLLEHLLVFLTNGDGRRRTAAIFSSKFTRWQPIMRLTSVEVEEKAGDKRSFNLLYCDLRMFELVAQTATERKTLVRLGSDDGSAWRRRDAATNKSSEDGSLQRLNSSSMDHVHVLMHPALVNANEIVIQQPTVMDNAQPVLSVSERLRKNDRMIFAALAEKHQILAELLNDYGGAAAAEELDRMADQMTGLAVLDLKQRNAKELAMSAIVQGNRLLESINKVGHHFVYISMIKIILLGNDELMLPSVPCYKLTSELMLPSVPCYKLTSVAAPLMNHVAAPLMNHLKAMLQVLQDQEREIQTLKQRLKLKAMLQVLQDQEREIQTLKQRLKRFIPQDTQSNPSRKTASEETLVESGEQRIKVTRTSVEEDTPPPP

SEQ ID NO: 134350 - protein, 21 aa, Heterodera glycines
RVQNIPIGTWKRRGGPKGKGP

SEQ ID NO: 134351 - protein, 165 aa, Heterodera glycines
GFSDLGDKPLHSSILPFPMTNKSRIFYYHHPDLGNFHYGPQHPMKPARLAATHSLVLNYELHKHATHSLVLNYELHKHLTCVHPPKATQHDLARFHAPEYVQFLKRISPLNADQYEGLFNRFNIGEDCPVFDGIFDFCSPVFDGIFDFCSLYTGGTLGGCKECVL

SEQ ID NO: 134352 - protein, 121 aa, Heterodera glycines
MEDGEPVQALPPQNPGQGPKEPINRAPLGKRGRGYAMGGHGPRGQWKNGGQKIQKRVGYLVRQLEREFHGHHDVPPSCSSWTCHRARGWDRGGRGGGRGRGGRGMQFGRAHYHAGPSHGGR

SEQ ID NO: 134353 - protein, 587 aa, Heterodera glycines
MANLTELYSPENFNETIEAAKIVQEITRLSKPDSWDEQSERTDQIAATIVANGLFAFLRGENGQDEGVAQVNIVEKEACGPNFKIGGMVNEKRVIFLLDTGAHVSLCSMKTAIRLGITKLEMAQISGVIGVGGKIVPILGQSKILLELAGCYVETIVYVTEAEIGGTQSYDLIVGRNTFRQMPLLLDLQTGNLISKENGQIFACEKVKGVKIEFCEENRKIEDGEQMKVELERCLERHKHVFSSHEYDLGHCAYEAPPILTTTEIPEKIKPYPVPEKYESELKVQIEKMLESGVIKESCTPWAHSIVLVKKSNGQLRPCVDFRPLNKITIPDPYPIPRMDKTIIRAAGKRWYTTLDLASGFWQIPLDKKSSYKCGIVTPWGLYQMLKLPFGLKNAPSIFQRVMDKILDGIPNVTVYIDDILVHTNTVEQHLDTLNNIFEKLGKNGLKVKKEKCSFLKTQCTYLGHVLTKDGYSPSLNNREVIEAFPVPKNAKEVKRFLGMMSFFRKFIPDFAKLAYPLNQLTKQENIEFKWEDQETEAFENLKRQLLKAPCLRAPDYKLPFYLFTDASATAYAGALMQSEKSDEMHA

SEQ ID NO: 134354 - protein, 61 aa, Heterodera glycines
MSEEGEIREDSPEAPEAVPPQADQQEVDQTIFREKKSTHKKTILVHDGYEYGFDKLSRADP

SEQ ID NO: 134355 - protein, 81 aa, Heterodera glycines
MGPQKSKICLCFHFCDGGQVVHDGEVVTDGSSPQSFKNSSGENFVQCISNFKLWNFMYSQAIQCSDGSVVVVVVGDLVEVP

SEQ ID NO: 134356 - protein, 85 aa, Heterodera glycines
NRSKIRPAKILSNAFQTSNFGILCIARRFSAQMVLSLLWLWAIWSKYRNTANVADPVTVEQFHVQFKAILAHSFIQRQINDRWKA

SEQ ID NO: 134357 - protein, 219 aa, Heterodera glycines
MDEEMLEFGDSLPSKSATPIGDLVPFPSTPTAPMDTGEMTPPPVAIDERSPRIEQLEKQLKDRDDTIQFLREQVRNREALISDLRRQLEQCAAPPTATPTTSKTTPNRGRPRKAIDELQRSSRKWLTEQILDAIDRDRSRSASRCSLERIHREVRYKYGHYTPKKAPAKKGKDEMEANDGLLLMTQLGTQKTYQRMKATLRLIHKKFDILPPLKKVHLG

SEQ ID NO: 134358 - protein, 57 aa, Heterodera glycines
MMSNANNLNKLQKKEPIEDCFDCKVTFATGSFLLGSYMFYDSFKSTSKSPILLRSIA

SEQ ID NO: 134359 - protein, 160 aa, Heterodera glycines
MDSLFDAGKNEGRKKDETNGGGDGNMLRNGQRKRSQRKDEEHQVEAQNEPNADKATVTSFNFIWPHLKVPPNHAFLAVAFSFSANSSAVHSMGWADSSTSRTFFESDDSGMPLRKCVGRLGVLPKRDGRQNEIRWTERKALAKGMAETFGMNSCLAQKCI

SEQ ID NO: 134360 - protein, 213 aa, Heterodera glycines
QILQMHFCARQLFIPNVSAIPLANAFRSVHRISFCLPSLFGKTPNRPTHFLSGMPLSSDSKNVRLVEESAQPMEWTADELALKEKATAKNAWTPIYRYRGFVGVWFILRFNLVFLIFSLASLPLSISQHIPISPSIGLILFSSLVFAGIKKYFTRIVAVISVDTASRSIYRIGYPSVFATRRSRFARFLDVQPLSTNSDSVRGVARLRFTDGF

SEQ ID NO: 134361 - protein, 37 aa, Heterodera glycines
MNVNKEEERLEKKVTKWAIMLTSEDKNGRNTNQHFVL

SEQ ID NO: 134362 - protein, 143 aa, Heterodera glycines
MDVPSKQESTNFVIQLDDEDDKKADDEKEVEPKEVYRRLIELLNEKETIGAALKRLNNEKKSNAAEERKRRWAAKKSGANVQEDEKTKQIAELTSLADSLISLGNMEAYQLDQNSINALLDDLQAKNKIPGAKEATLDMFSEG

SEQ ID NO: 134363 - protein, 39 aa, Heterodera glycines
DKIGNFEATVYNYKGLSFETTTRTNLDGPTKRNWEKYIK

SEQ ID NO: 134364 - protein, 46 aa, Heterodera glycines
SNKATGFAAYARFSTSDGPPSGSSAPHNNQLASPKPSADKMAEMGN

SEQ ID NO: 134365 - protein, 39 aa, Heterodera glycines
WKKIPEGENLIKSIPSGDRAGCRGVSSAGSFHHGTEPFG

SEQ ID NO: 134366 - protein, 24 aa, Heterodera glycines
MEKACKIWRDYIDFSALELLELAS

SEQ ID NO: 134367 - protein, 95 aa, Heterodera glycines; identical to SEQ ID NO: 124813

SEQ ID NO: 134368 - protein, 394 aa, Heterodera glycines
NPGEGFNLRRDVYLRVANTVRQLREKGFDFVLVLPPWGNCWHFDFVLVLPPWGNCWHWRTKPRQTKIRWSELFDLDSLSDFVPVIEFDEFLEGGQGTSVSTVGTSVSTVLYLQHYAEGWADGEYTLKYDIRPCIEADKYYAKRGDKWNNGHFFDYADLHAKDLQCLSIQGQSSTLAEAIAQSILSRSLMVDSILSRSLMVDRAETILHDQFGDHFFWKARKSMRYAKRLRSIGDTFRADQLANTSDYLCAHLRRADFVWAHREEIPSIEGAAAQIAQNIAQNASKLDISDVFLSTDATPSEVNIGESFGETKCPMVKFSDENEQMELSGAAISIIDQWICANSRFFIGTHLSTFSFRIHEDREILGHDARTTFNRFCPDNVSDCEQPAKWTIVN

SEQ ID NO: 134369 - protein, 229 aa, Heterodera glycines
MHNRLCSAEKASVKRDGHRKSVDLTSNASTALVKCHYFLVLICLFPQNSHILLNGNNDPKWVVMVNSLDSLDPETRKKTSVPRYYSQQQHTRLQGMFRSATLSPNGRGELEKTAHDGRCPRYLFARPPLNGEETTKNKKKRVEEKPKGKEKQSKKEAKTDEKGKNKGKDELDVFAALGTLQKSLVTRDLMSRFCGQQDCPLARHFPVFLIPSKTPRWPRKLHGITKVSS

SEQ ID NO: 134370 - protein, 253 aa, Heterodera glycines
MSRPILDELTRALFAHLRGGNACFDEVSQKGWRNPPTQRTVGPSGAFHDGFAGRENELIELFRRCPRCSRSLRPIILDKFTDEKDGQQYERMWWTCPGIEQKECFFPLDIPKEVFWTRRSMDQSLRGILPLPNLHLLPLSLRALYHKLFKSKVNIEKIVRISAFVPSDGQKSAVQQANFGAEEQPKRQESAQIVQRSVGSVGPSLPSTFPPLPASSVRHLPTPPSVRSHNQCASLCDGFPSSSKRCDQRTVHS

SEQ ID NO: 134371 - protein, 310 aa, Heterodera glycines
IAIGEVFKFESIALECHSLFCQCTVGWLEPLLARIGEEKRAVACPIIDVINDRTFAYQKGIELFRGGFNWNLQKGIELFRGGFNWNLQFRWYSVPLDIARAYSVPLDIARARSAVPTAPISSPTMAGGLFSIDRSPTMAGGLFSIDRAYFEQLGTYDPGMDIWGGENIEMSLRVWQCGGRVEIVPCSHVWQCGGRVEIVPCSHVGHVFRKASPHDFPSGSSSNRVLNANLARLSEVWMDEWRHFFYKVHFFYKVAPRKSQNPPKMKVSERVELRRRLGCRPFAWYLHVWPEHFLQHRYLHVWPEHFLQHR

SEQ ID NO: 134372 - protein, 99 aa, Heterodera glycines
SIDQFGAILEKIDKLEQQKQDEKNTKPLVVQIEQLQNDQKALLGRIAQLEKLEPNRKEMDNGAQIERTFETNADYNQQQKVKIVLFDCCFLVLNHKMLH

SEQ ID NO: 134373 - protein, 18 aa, Heterodera glycines
YREAIPEGFGLPINLGAS

SEQ ID NO: 134374 - protein, 206 aa, Heterodera glycines
VGYCQGSAFIVGQLLLQMPEEEAFAVFMRLMETYRLRELYKPTMTELGLCMFQLEVIVQEQMPDLHMHLYVVLPVSISLINWFSNNMGFDTSMYASSWFLTVFLTTVSLELANRIMDWFLVDGIDAVFRIAISILQQSRIDLLQLDMEGMLKYFQREVRERYENDHELLFAIASKVHLNVKRMKRLEKEYMTKKTKEQEEAIELRA

SEQ ID NO: 134375 - protein, 21 aa, Heterodera glycines
MRTRPIWQVKQRLLTSQKKGF

SEQ ID NO: 134376 - protein, 71 aa, Heterodera glycines
LFEYPKRTLEKIDFFVFGAVPPNRCAQIYGETESFRNSFPIACTLILRWIFAPHNCLSTPNGHLKKSIFLF

SEQ ID NO: 134377 - protein, 37 aa, Heterodera glycines
MLIRSIFYEISDRVIFDPSYFRKYVFYKAATWLSLLS

SEQ ID NO: 134378 - protein, 50 aa, Heterodera glycines
MANSVAAAATMISTAAVRTNTVQIGDGGNLNLAHHKAKRMGFCSSHCLRF

SEQ ID NO: 134379 - protein, 33 aa, Heterodera glycines
MTSRKRDKQRQTSEITFKMEEKAYIWRNGVLIV

SEQ ID NO: 134380 - protein, 129 aa, Heterodera glycines; identical to SEQ ID NO: 126960

SEQ ID NO: 134381 - protein, 30 aa, Heterodera glycines
AEPVDFIKHNLTLQSYYLAGDAPKALTPLV

SEQ ID NO: 134382 - protein, 38 aa, Heterodera glycines
MDIRSDQHRYPFCIVWTPIPLISWLFPFIGHIGIATSK

SEQ ID NO: 134383 - protein, 302 aa, Heterodera glycines
KQREISLRNLQIPTIENLGVTRDQFDVIDLTDNNIRKLDNLPRLKRLRDQFDVIDLTDNNIRKLDNLPRLKRLETLLLHNNRVDFISKEIGDQLTKLSTLVLTNNNLAQLGDIDVLASCPRLEYLSLQGNPLTHLPKYRLQGNPLTHLPKYRQYVIYKLKNVRVLDYKRIRLAERQAAKKLFKGESGERQAAKKLFKGESGARLKSELVKRSHSEGGEETEPNEHSSSTPSKVTRKEYWNEHSSSTPSKVTRKEYWPCQELISGAKTLVDVERVQQILQSGENGTEEQQNGQNGTDVHMEEQ

SEQ ID NO: 134384 - protein, 118 aa, Heterodera glycines
MEVVHRRNLIERLDKLKASHEAFFTVPQLKAVSNNQLSLFLRRLLKSADIKQHISTELLERILLIEESNENASDTAKMAFRTEGELGQFADRLTYIGKSETHLNLNQQTDEEDELTDE

SEQ ID NO: 134385 - protein, 121 aa, Heterodera glycines
MTNEIDQERFKTYQTALKSQEQLNELKHAFYNLEEDFHEDDDRFGTTEAKGIKISLPFRKMLKKRSVIVDQNTEQTDTESDPEDYEYDADPSSPREMCKFKRRRMTYSSGTAKPPKVTKSK

SEQ ID NO: 134386 - protein, 330 aa, Heterodera glycines
MKDAIDNMIKVALKTTEEKMKRKVRMFGVAITGAGLAFPVIVNTDKFCLFYALASSMNYLIMDKYSFIRFMKNLARQKEAAVELLRNCGIDGNEISYGVEQLPNVQKYWDEIYPGKYRVVAFEKSADPRKSICVLWKAPMGREKVVPIFLENGHWDGLKNYVCFFNRGRKFCIDCECFFDKDVKHTFECRARCYYCNRVGGMPCEKESGVKIECPKCHRYFYNWECYNYHQGHQTCKLWRRCVICDKTYLFNPKKEHECGETYCQLCSVSHDPKRGCYIMPIEEKEEKDVYRIVVWVSSTNKINKNKSLTPGFGDFAGFYLQGGPEGACY

SEQ ID NO: 134387 - protein, 86 aa, Heterodera glycines
QFRRATNAASYKIQFTAHAPSTSTMVPFELVNERTREKLTFTKAGYDRWIIKRCQIGETTTAQWTDENSINNLNNVSINLSGVNCI

SEQ ID NO: 134388 - protein, 117 aa, Heterodera glycines
FLETDRYQLYGFGAVVDLLNGTNWEQSGIFPRVSLCDFQVRVMGNLQEYTIQCVLIINIFNEKIFVLLWFWSEIIIIFFNSFLNVFASSFFYILKILKCKHIYLEDCFEFYLNGLFF

SEQ ID NO: 134389 - protein, 325 aa, Heterodera glycines
KNKILTKLYYNLKSPASFAGIQKILNEAKKIDPDITTDDVNKFLEKQRTYTIHKPIRKRFPRLKTIPSGFHTDWQCDLCIFDQLKKHNDGYKYLLVCIDVLSRMIFSAPAKSKKSEDIIEAFDRVFEKSKIIPMKIYSDSGLEFQAGKMKNYLGKFIIKNVMYSPDLHAGVVERANRTIKERLYRYFTKMDTLRWVDVIDKIITNINNSVNRTLGIKPTSITFENAGIIWERLFGNIETQKNNKFKIGDLVRITKEKGIFAKGYLPNFTEEIFKIYKIIKSDPIAYRIEDLNGDNIKGIFYDAELVRVSKKQNSVYSVGIYASRV

SEQ ID NO: 134390 - protein, 283 aa, Heterodera glycines
AFPPDFSECSNQHHFANAQMRPFDLTNKDGLSNAYLSNAYTDNLFRFSARPSCNFFDDCGSPFLFCDRRDAETPHCVSKIRIGGIRIGGNCQGFEGIDCCWEGECQNWRCRNDWHFAQKAFNSTEATTRQREQRMAQTHNQQLATNDCFNDDPCCSAWAKLSECSANPAFMHRYCRRACHQCEAQTAHKGCTDRHISCCTDRHISCGYWRSAGECSRRRQWMAENCRQSCGWCQISQQQCQISQQQLCASVARMSRMEAFLSFCLWSADSKRKVEKFQNGRQQ

SEQ ID NO: 134391 - protein, 19 aa, Heterodera glycines
GPGSRSRILKSSGPGPDRA

SEQ ID NO: 134392 - protein, 193 aa, Heterodera glycines
MSNGAAERFVDIFKRAMKKSRKEGKEWAEKALLAYRTTPSAALDGHSPDELFLGRRLRTKLSLIHPPNQKSKLIDLENFQNSKKIYIRKMEHQFNSKHGTKTTNFQAEEPVYFWNFKDNKSVWLPGKVIERVENSPTYRIFAPSLGRAVHQHANQLRRRFPVELNFENDQSKNPAKPGIFDSEKEVSLRREVL

SEQ ID NO: 134393 - protein, 94 aa, Heterodera glycines
MYIIVFLLSTLNISISFARISGTIGPIQTKIYVDGENYENSKANLDRFPFLKDATKEAKKEFEKISNNKSLTKFELEAARMEWAKKQTKTIKAN

SEQ ID NO: 134394 - protein, 139 aa, Heterodera glycines
MIISIKSAISALPFEPENGKKLNHFPIPYYRQFQPPYDSPSRISQNRGLFLAMANGNANGDSVGKEENERGFLPKRLRPPPRFPRPRPTRPRPTQPPRPVPMTNAYTPAPSPVPHPTQANHGDYPAGPPYNPHWKNQCN

SEQ ID NO: 134395 - protein, 20 aa, Heterodera glycines
CHRVDPTHIIITAMDGSNGG

SEQ ID NO: 134396 - protein, 192 aa, Heterodera glycines
AKPVYCRPRPVPYNTKLVVDAELDRLLAANVFRPVDHTRWAAPIVVVKKATGSARVCADFSTGLNNVLLSNQHPLPVPEDIFATLNGGQFFSQIDFRDAYHQIELEEGSKELCTIATHRGNFEYHWLPFGVKSAPGFQSIMDSMLADCPFAIAYLDDVIVVSRTRKEHWTHLMEVFKRIEKYCFKIINKYFL

SEQ ID NO: 134397 - protein, 117 aa, Heterodera glycines
MQYNAFKPRREAGQFQNFVPHFTVESPSTLLDNYVSMSTVAFGQLWNGKMGISDGLLIMQYNAFKPRREAGQFQNFVPHFTVESPSTLLDNYVSMSTVAFGQLWNGKMGISDGGALF

SEQ ID NO: 134398 - protein, 76 aa, Heterodera glycines; identical to SEQ ID NO: 128275

SEQ ID NO: 134399 - protein, 42 aa, Heterodera glycines
NGGTKFCNCPASRRGLKALYCIIKTENNFRIFFTIYFKRQKK

SEQ ID NO: 134400 - protein, 394 aa, Heterodera glycines
MLSNWAIHLPNQQPIVYRAFQLVSKAQQIQQGELPETHCSAYWKQWQNEWKNDPKFKDILFEKVPEQFRWAKDKWVLYKRQQIKRPPIGRIVAVPPSDPERFALYSLMRHFPGDPDHLKMVNGLLCTSFTDAAIMHGLLEDGKIWDKTLAEAALSRWPDQMRWLFVSIMVYGQPSNAIELWNKYKDQMYNPQGIITPAQHKAAELEALADLDWRLHSCFNLSCVHFGLPDPPNSIAKNTDAAIEEFFFGDDDLNLPPGQPNLRPQPKAPPPLNSDQQKVFDAVLLAIQSNPRDPTVPRRFFIYGDGGTGKTFLFGQIIRRLRKAPYTYKVLATASTGCAAILLPYGKTAHSTFRLGREVSLDKLPSIPLEKFFARRIREAQLIWKMRSPCFTTR

SEQ ID NO: 134401 - protein, 37 aa, Heterodera glycines
SQKKWLSLFLINFIHIQMLSSMIGRAVRNRPFIFEGI

SEQ ID NO: 134402 - protein, 152 aa, Heterodera glycines
MDVQKTGKNPQRRPNPDLASGDFVNAPPKRRRNTNSSRLEGNPPQEQPGQVQPSVLMVQQQQPVLPIQQQQQQRQFVNYSKPFTMGEQQQQQQQGEEDVIRERIRRRQLQELAAMELAKPLPEDLQFCAQYNAYGLTDIGWLLMGWRDQMVI

SEQ ID NO: 134403 - protein, 289 aa, Heterodera glycines
MFPNDDGYESEDDEILLPPPPIPPQLGHPPPNVPAVRVQPMHVGQQRLPLRDLPQIFHPPPNVPAVRVQPMQQPVPMRAVPQFLHPPPNAPEIGVGPIHDGQQPLPLRALPQFAQPPPNVPAVRVQPIQQPIPLRDVPLFVNPPPNVPVIRVQPMPQPLPLRDMPQIHHPPRNVTSIWIKLWLLFLSLWVFLQGIHVRQIQREYAVPQFAHPPPNVPYHPPENVPVMLGLVSHISGCLFRSFLRFGNCSKLPAHREKYNGKQIPLSDEDGEETKGNGHGIDGKGRDKHG

SEQ ID NO: 134404 - protein, 311 aa, Heterodera glycines
GPLLQCPVRPRDHPCPPLPTIEPRHCFQRVHAQTAIIWGIKMYSFQKYFEEALEKEDFFCQKNRAEVEALLIEASNYKIIIHRDYESRYSDYIATYRRTPLFCFCMIERNLRFFYDTGTGTPIGRVTTVLHVTVEASYTGEGFISPMFSFWFYWEGRSQTTNESFTSRLYLYTVSMLRAMGKAWGRELLLNPVEVLIDMFYQRIDRDLVGSWSLFYRLPPSLFDTSRRACVLCRKGACSCGVEKALTPYLKVSVADDTEILENVAFFGVRGKKNGMEELRGLSGAVCTMKIGARVKEFGGKKGIYYSLIDI

SEQ ID NO: 134405 - protein, 200 aa, Heterodera glycines
LYNLHPHTRILGHLSSIFCVAFDRSGRFLFTGADDNLVKVWDAQRCLLRFTFRGHSGEITDLSVSYDNNLLASGSVDKTIRVWCLRKGTAFRVWCLRKGTAFRIFRGHTGTVNSVQWVPLLAGPMRYLLSAGNDCAVMFQRYNAETLAFEDPPFKFNERPRGERIAPKSQIRRNAQFMGGGGDLLLIIPLFRRIFQKKKW

SEQ ID NO: 134406 - protein, 240 aa, Heterodera glycines
MMYKLSAQGVARLYEFQAHSDRIDTLVWSHHSLRFVSGSKDGTAKVWSLDEEGRWAPVELNPFPTVQQTPRVTATTGDGESPAAGVALPPSQQSTNRRAANANAGATPNNGYKLTMLCWTLDDDMVISIGELIVSAGHDGLVIVWNVYNGKQMSKHRNENNDREAVAIFDNQISADGTTVACVDAMGHLSIYGVDHNQEALKRPHEQFFTTDYKVAEHESGIHFARFRKPDPDSNKKSKI

SEQ ID NO: 134407 - protein, 318 aa, Heterodera glycines
PQLGDEVAYFLQGHKTYLKELKENGIQVTKVMQPRFHDMQNVLDFLVLKQHFDASKQLNLQPGNRVESIVDDKFYTGKVLRVTAAEYDSYPNSDWCAVCVEWDNGEDDRYSPWDLQALTKGRKSESPATKHDTAKLGEYHPMAGEWLVPEWALANAPPRASSSAVSSRPSNSLLRSLAILYDVQMLGKNALAYNKPKYPIVRHACALVETIFVFMEDWKQNDPLPMFRHFVEAGTEGTKYWQLDLLATSNGGGIGSTSTLFTTGSGSVSGSALSNGTANHQQNATSARLQVAPGPSSSSATAGLPLWASECSAMVDEL

SEQ ID NO: 134408 - protein, 154 aa, Heterodera glycines
MEEKQKFIHQFDKIIGKKEQQSVGRKDKLEIAERVGINLRTIDKWKSEMGLKVTKESQRIALVKEYYRIKKEDPKVPTKEIAKSFNASKATLFYWKKQFDKNNYESSSSADGPEQLSCSDGPHLCDHLPVDQKAWEWNNGTRKRSRKRKISEFY

SEQ ID NO: 134409 - protein, 53 aa, Heterodera glycines
KKPRPLDEKQKVEIVKKYEQMKNENGKMKDSEISKKLKMFPWKIIGAEKGISA

SEQ ID NO: 134410 - protein, 137 aa, Heterodera glycines
FEESPPADADQSTQKLEKQKFEEAPLPPQEQTVENGRHTMNGENVLHQQQLKEEERTSAADAVPSKNGNGMPKVLDLDQAAEIIYKSINRGGHGGGLIKMFKKAPKSDTDQILTILTASNYHTQIFETFRSKFQIIG

SEQ ID NO: 134411 - protein, 150 aa, Heterodera glycines
MKVVRTIHLWTDNRSLNNPSIDNLSLKDILTIWRSVALNESFLSTKTARQINRRFKSDIFKRNFGTFRKLPTKRMYAEMMAKCYDNIFYLHDKQVTDCPGPHRCRIKPINGLNCFIAKRKLIEQELALGIFWYISPKKGKFRFSNEGCSL

SEQ ID NO: 134412 - protein, 29 aa, Heterodera glycines
MNAKLFYNFVMTCETLSIHFWHFRQKSKE

SEQ ID NO: 134413 - protein, 109 aa, Heterodera glycines
ALHGRETSHYQQAAFFELGAMILQNMFGALSFLRFQKDDDLVDRLSYFYTSSFLIMMAVLVSFKQFGGRPLECWVPAQFTSSWEAYTEMFCWSENTYFVPVEEVGIIGL

SEQ ID NO: 134414 - protein, 68 aa, Heterodera glycines
MAQMVANIVTVILAALKVASRPTLRERKKVGKRGGKFSQKSVGDGCKNLKKDIGERQQRCWGIFFIKS

SEQ ID NO: 134415 - protein, 67 aa, Heterodera glycines
ELAYGLTRFELLCGFRPSDEIAFNMKAFPELCLAMGNENCALFIAANESENTGFPDLSQLLKRWWVN

SEQ ID NO: 134416 - protein, 499 aa, Heterodera glycines
MEPKWIWKGTHLAFANELLCDRNGLLRENSTKEILTLNSERKKMEIDPTFVGDFSRAMVKDKDLEKLKALIEEFSDVFSKFRYDLGLFTAAEHHITTTTEEPIASAPRRMPYKYKEELKKHINQLLEAGVMVESDTPWVTPIVIVQKKDGGIRPCLDFRKLNEVTVPDRYPLPRLDSIMERVGNCQFYSSLDLASSYFQIKLSEETSRKCGIITEDKVYQMITMPFGLKNATAAFSRAMAIVLSGLEDTSLAYVDDVLIFTKSPNFSEHLTAVRKVLERFRLYNLKLSPKKCIFASNEMNFLGFVLTAEGFKPSLSRIEILKEMPVPLNVKEVKRVLGQAGFYRRHIENFAMVVEPLLKLTRQCNKFEWGREQQKSFDKIKELLTQAPSLIFPDYDKAFHIFTDASSTGQGGVLMQKDDVTGTFSAISYCNRTFSAAERKWPAVQIEMSAIIYALREFRPFIFMSDIELHTDHKPLAFLLKKSEPISNWHDGSLNLQIS

SEQ ID NO: 134417 - protein, 45 aa, Heterodera glycines
FTNNSSGTNREFSQESGFLFFKNRDRDLKNPGIPDPVPIPLNSTL

SEQ ID NO: 134418 - protein, 88 aa, Heterodera glycines
QDPLGLDQKAPGAFLRLNRPAQLPLRAFSPALLRCHDLSKHRSPELNEEEREYALDYCTSKNQYYVAPEEGIPWANPERRARQLGYYH

SEQ ID NO: 134419 - protein, 18 aa, Heterodera glycines
EAIPEGFGLPINLGASCP

SEQ ID NO: 134420 - protein, 41 aa, Heterodera glycines
MHAINDIITQNTAKIKRGFRAGDADALLQLGLQLVTDLNQY

SEQ ID NO: 134421 - protein, 95 aa, Heterodera glycines
PCPPCDSEDEVVLKVGPEQFTVSKHFLMSVSPVFHKMFSVDMLEKAQGEVSLEETNGEEFGAFLDAISPKMASPNRKKKMHTNAKNVPLFTQLPM

SEQ ID NO: 134422 - protein, 126 aa, Heterodera glycines
MEHDFGFGTSCGPSSLNEDKSGNNNNNRNGDDEERKIISVIIDEDEDEEEGEEEEGETTELAHQTEDIGQSAELAPQQAEDNGSVALAPAPTSAPAETLESAPPPAPATEEEGGAEDADCEPDNLS

SEQ ID NO: 134423 - protein, 32 aa, Heterodera glycines
MRTDPEAKNFAEQLLEIGNAIKNLHLSLKYLK

SEQ ID NO: 134424 - protein, 588 aa, Heterodera glycines
FELFNPYSRNFYSIFMPYLMFFSPSNFEPYLLKFTNYKKTIIFKLVNGDELVESAFEKCRIFVLPCPRAKFTEFEFDLIRKFIHSGGSVLFDLIRKFIHSGGSVLVMCAEGGERTNINFLLEEFGIAFNSDCVIRTMFHKYFDPKEACVIRTMFHKYFDPKEALVPNGVINRAIPSAAGVKRQLATEEKPNSSALTFVYPFGCTLSVDRRSVCVLSTGTVCYPISRPICAFHKVQKVNQINDQAQIISSVQMFTDPFFGKEDNAKIFEVIVKFLSDGFELEVIVKFLSDGFELNQIDAAEPNISDFHQIPDNLQLSSQPKMCLQESEIEQTFTGDITQLSSQPKMCLQESEIEQTFTGDITKLFDTSLSSISLEHWPEAIRLYDKIGLKHEPLTLVSPAFQVPMPPFAPAIFAPEFRELAPLQLELIFAPEFRELAPLQLELFDLDDAFATHEIQLAQLTNRCAENELDLYIREAGEILDINKTLLRCAENELDLYIREAGEILDINKTLLRSERRTEGKITAKKVMEYVILHIIEWKKSTGDDSDEFPSAFLTDEIGMPIEANDRKATEDKEEEEDAFSNIDQYDDL

SEQ ID NO: 134425 - protein, 77 aa, Heterodera glycines
MDSAERFFTPKPSPSVSDWTFSSEMAKKNNKAGIKADTEQEPVNEQQSYFDQLRQLIFDTPEFAPHGLETVKDEEQT

SEQ ID NO: 134426 - protein, 52 aa, Heterodera glycines
MSLMRQLLTFLSIILLLLSLVTLSDAQLFGGWGWNSGIYMPGFYCAHAKVCG

SEQ ID NO: 134427 - protein, 219 aa, Heterodera glycines
EFNVLFSQRTLPMPITVDPLTGDLVSVAVARQTRAFLPPAKFDPLAPQCAENPDAEIPSLYDVSVFENKSPAFGPLLEIVDKWQKFIIINQNYSKVGRCEVVCFTPEKTGSFDTLSPSRARTVIEAWADRTAAAWADRTAALSAMPNIQQVFPFENRGEVIGVTLHHPHGQIYAYPYITPRTQALIASLDRYGNEKTGNNMFDFILIHHAQYQMKNILE

SEQ ID NO: 134428 - protein, 276 aa, Heterodera glycines
MSAKIIRVPKIACDLSLAKNGVSKNRNYAQKASQTILTLPIPSTIAFIHPIMSAKIIRVPKIACDLSLEKNGLSKNRNYAQKASQTILALPIPSTIAFIHPIMSAKIIRVPKIACDLSLEKNGLSKNRNYAQKASQTILTLPIPSTIAFIHPIMSAKIIRVPKIACDLSLEKNGLSKNRNYAQKASQTILALPIPSTIAFIHPIMNAKIIRVPKIACDLSLEKNGVSKNRNYAQKASQTILAHPIPSTIAFIHPIMNAKIIRVPKIACDLSLAKNG

SEQ ID NO: 134429 - protein, 63 aa, Heterodera glycines
LTSKNNSLPKSFLQPHIANLISCRLKAIHCLRFSAQQSTNTVFDSLQKIIHYPKVFYNQLLPI

SEQ ID NO: 134430 - protein, 40 aa, Heterodera glycines
INVVDWNKWTKKQSQRQNLKALGDWNKWTKKQSQRQNLKA

SEQ ID NO: 134431 - protein, 116 aa, Heterodera glycines
HWVPRQGVPIHELLGLVNHGNTPLTRIPTPPPTLGSASPVLSSPQHLCLRPHLHKSINSPNFFNTQTSCMFYSFRQLPIAGETEATTKVAPQQQPSPFNAEHKRKQALEPRRPRSP

SEQ ID NO: 134432 - protein, 137 aa, Heterodera glycines
TGKSISTALDALEEKKLISEVERAGGAGFKVLRCLEGATAFVYAAGGTKKWDIAAPEALLMAAGGTLSDMSGRQIRYEPSVQGTLSDMSGRQIRYEPSVQLANSGGLLATASGVDHQVAGGKGKDCSSIGTEIWAPP

SEQ ID NO: 134433 - protein, 43 aa, Heterodera glycines
MRTILFIAMVCLLMAVLMEMANSKAVKKDNKKGQNEFQCILYN

SEQ ID NO: 134434 - protein, 73 aa, Heterodera glycines
YPPPFGEHEKEEKDDEKEGGEKEVEEAGDEEGKGERDGDDQQGGEERRKKKGTMMTKTRGLIKRKSNKKKEKK

SEQ ID NO: 134435 - protein, 247 aa, Heterodera glycines
MDDAEKPLEIISLCPNCHENDCGHHNSNLQSGEQAQEFGTEIVLKVQKLEDLNRTIVRSEYGTIQIPELELTIPAKSRSGDLTTVEGVVQSVREDLQHFQPERKKTEPNTAEKIDHFIGRLSKLLSLQSSWTLKLRDPSGNCFIQNPDPFHVDPRCITSHYYRRLEEDKLLGLIDDDAYEIQSAKLSQDEVDDREWKSYEDVKAEVLHFSTQCSACGASCDTRMKSTGNFYGFHLVCLHLKSTKGNE

SEQ ID NO: 134436 - protein, 199 aa, Heterodera glycines
MSTDCDICGFKSNEVKSGGATQENGCKLILRIAEAADLSRDLLKSDTCQIIIPELDIEMGQGVLPSRFTTVEGLLIAIKEQLERQAPFFLGDSATEEERTKFQKLLDRLRDAIQIKEPLTLVLDDPAGNSYLQARFLAYSFILFALFQSLTDHVEDKRLQKEFYTRTNEQNEELGLNDMKVDNYEELETLKEDDEMDDR

SEQ ID NO: 134437 - protein, 124 aa, Heterodera glycines
VVKFSPTCGTILTLSDGKDYCKQFSCGSCSYTLPISKKLTSRIYSKKKELTSRIYSKKKEDEKIIGGTEMWENAQVTNERCPSCSRCPSCSHDKAYFQQIQTRSADEPMTIFYRCANCGHRWKE

SEQ ID NO: 134438 - protein, 24 aa, Heterodera glycines
RTLSTAVRQRSSKIYSMPQILWAG

SEQ ID NO: 134439 - protein, 18 aa, Heterodera glycines
MYMKMVANYLNGSSPVSA

SEQ ID NO: 134440 - protein, 110 aa, Heterodera glycines
FAGDKDFVMMTIKNKFPRTIILEGLKAEKDSGIEWNVEQLIKGLEEIITMREEAMRCTKITRAIGGQHENWDSGQRQFNRPRSNWQNNRYRNNNREYIKREERNPQNNQR

SEQ ID NO: 134441 - protein, 62 aa, Heterodera glycines
MRITEGHDTVWVDQANSNGLIEKEAIRNVGIVQILFPSTAMPIDKYITGEICEIQVHNTKFY

SEQ ID NO: 134442 - protein, 467 aa, Heterodera glycines
LFYPPTSIAKNTDAAIEEFFFGDDDLNLPPGQPNPRPQPNTPPPLNSDQQKVFDAVLLAIQSNPRDSTVPRRFFIYGDGGTGKTFLFGQIIRRLRKAPYTYKVLATASTGCAAILLPYGKTAHSTFRLGREVSLDKLPSIPLESFFARRIREAQLIIIDEITMLHNTVIEVIDRVCKEMAIRQHKDLLFGGKTVIFSGDFKQSLPVVPHEGLTAQVTACFQTSPLFGQFTTMKLTINQRLGQGQQAYLQMCRQIGLGETGEHFWIPPQFLVKSKEELIDYVYPNFQQLLGDDKELLNRLILAPHIDTCDEVNEIMMANVPGQVREYLSTDKPLDDRPLDIDEIESEVAALNRRTDSGMPPHSLRLKVGCVVVLLINKSDKEGLINGTRIVLEELGDDRLIGRVINSNAIGGQVRFFLERTRNVYEDKSPGGIKYERLQFPIKPAFAMTIQKGQGQTIRTVGIDLERE

SEQ ID NO: 134443 - protein, 122 aa, Heterodera glycines
MQAGTTQIPGFGQLYILDPVEAMEMRRNNPIFTGENVKNEDAFVQGHELNEATLELLVEMIKKYHPAAQAYKQAREQLQELLKKHNPEELRFFRMTLLNERRTPAALKDPKLHPHQIITPST

SEQ ID NO: 134444 - protein, 442 aa, Heterodera glycines
SPQQLVESAANNLPPAAMKKPPHFVPIKPNHHHHQQQQQQHPVVEEKFKQYMPSSSSSTASSATSSPAAMPPPAVTPNNDNNNNDGGGGRHQTNATTATTALAMVADEYVDVVGDGAEGRSSLMRHQRKAHIEFYRKLKGLRSRGSTLDCQQCGQTVANTDACARSHLHAHCDVAQFVCKLCQRGFTDQHLVFEHINTEHPTKKGTQCIEDRRDMVQLMQLLTDCFPRIVCKTKDAMQEHLERLLSADTQKLAAAGDAVACTAAAEPTVCSNNSSDVNSSTVGGTSSMQCCHLCKADVPSERTALHAHLNAHPAFRCKKCKFVCMSHAEQKEHQRVEHGLDDEVTANSSQLPYCVSSALEVQYDMLRACFPLQNRQQQQSHSAPPPAGEHPATADASVAVSPPAAGAKRRRKTLKPDDSASAACGGKQKRNKKCSTASSIED

SEQ ID NO: 134445 - protein, 358 aa, Heterodera glycines
MQRKKYELEELERAAERRDQESPENEQRKISDFFQHHPEDYNKKLNESRLIFTQHLSGLQEVMSKYIGEKDINEIRQLNTEMQAKAVGLKDNASFENQIDRAKQLIEYRRKRFAALEFEAKKRDEQQQFVAAAANTITAPTASALIGREALKKRTGISASTDGEVGDKADVGPQTATTTTHGEVLKEKILEQQKHTDNDDTADAGPQAATTTHGEALREKILEQQKRTDDDDKAAVGQQTIPTATKTHGETLKEKISQEQKHLVDDKSNSANAKQDDGSGTDEKIAHGQTLIARLKQSEEQKKEWGDPPARYNDDDGRAPKHGEMLWKTVRSTVPTNQQQMGDVIHHHLADAEQTRGQ

SEQ ID NO: 134446 - protein, 20 aa, Heterodera glycines
MARRKLLLLLLIHLTYEAVQ

SEQ ID NO: 134447 - protein, 22 aa, Heterodera glycines
MGADPKTLGKWEMLAFSLFPCV

SEQ ID NO: 134448 - protein, 32 aa, Heterodera glycines
MFSFRIRHTVQKNISNWSLGHQLKLMEKLIMK

SEQ ID NO: 134449 - protein, 469 aa, Heterodera glycines
MSNLFYVLLPSDSPGYDNKPNKCRVHLPRTLTFGGQWLCGLHSIIYTNSWPAIGTTENQWIKVHLKNGDKIKIDIPAGSYQNEQELENAINESIKNGIKQPATRVKRQLEDGVDLFFHYNPDDYWEKIEEERQRYKELLKLIVTKSRERDDETDTHRKRKIEDEEIDPLQNQSLTKKARIEALEEAARQRDDGKEEKEERTGQEFLEMYPVNYREKLNEVRLELIRDLFNIQDHMKKYQGVTDGRTIQELNETPLKMRTAMKHRRKNLNAFNKAVLKKDLQISAEEYERTSYEQNKDYVEPFFDSHPTDYWEHIHKKYEGLQDDYKKIRELREQQQFLTDEQKKQSIQDEIDQLRRLVDYRKKRFAALEYEAKKRDALQQQPMALALTHGEALKERIGKIEGTTTTADGEETKTHGKSLVELIEQVQKERDDSKAKTEGKTRGEILGDKLKAKIDEQDSSADGRSMVKH

SEQ ID NO: 134450 - protein, 207 aa, Heterodera glycines
ERDDETDTHRKRKIEDEEIDPLQNQSLTKKARIEALEEAARQRDDGKEEKEERTGQEFLEMYPVNYREKLNEVRLELIRDLFNIQDHMKKYQGVTDGRTIQELNETPLKMRTAMKHRRKNLNAFNKAVLKKDLQISAEEYERTSYEQNKDYVEPFFDSHPTDYWEHIHKKYEGLQDDYKKIRELREQQQFLTDEQKKQSIQDEIDQL

SEQ ID NO: 134451 - protein, 60 aa, Heterodera glycines
MFHSTYELSFKDAAIINKIYCNENCKNTENKCQKGGYPNPKNCNQCLCPMEIAKLTGAMN

SEQ ID NO: 134452 - protein, 49 aa, Heterodera glycines
MNLPAEEIWAAHEGYIQSDTTVEEVAQMFYQEQVADNGRQITRDQYLTE

SEQ ID NO: 134453 - protein, 77 aa, Heterodera glycines
IKRRFSPEAVDTIFETDETGTIDWIPMLISVQCWRRLVFELAEQFPHCLMLTFAIKLISDAGFQHEISNVNTAAQQV

SEQ ID NO: 134454 - protein, 36 aa, Heterodera glycines
MSNASRGPIPDDVATVPTREIHLNSPFNIRTIYNFR

SEQ ID NO: 134455 - protein, 275 aa, Heterodera glycines
MLRTDKHLLLQLMDTLKSDPMLDFTFLQSNSELRNKSRQQLVDFLVYGIGRKLSGFELKRRRNISSRKSPGLLNLEGEASKECPGKEPSSAATDWEEIGTANVAEQVDLLVQEATDWDNLALMYEGWTAYIDHFVLAFLRANKQIFDKDTALLLNVWKYNDNDIVQPIWNVLVHEIWPIFAPNICHLDFPDGDDLNNLRRLISPTILTDLKQLNSINPDNIFPAAIGDFDDEPNATAGQMLSKWLHTPRKDGQSKRLFFMENKQRDFEWVNTFKV

SEQ ID NO: 134456 - protein, 25 aa, Heterodera glycines
MYFLKLLEVALKEAKVQDVGRLVIE

SEQ ID NO: 134457 - protein, 111 aa, Heterodera glycines
MIQRTEKGTAILIEAVKKEAERAWKEVSVLADEADEYAKSAHGALNRAIKSREKAPYAPGVREWFVKMSDCIWEIYTILDKINAESERVETIWREVDLCKDLDQATKLEDK

SEQ ID NO: 134458 - protein, 210 aa, Heterodera glycines
RKGKEERAEEIGEKVRDKGKGEEEEKRDEDIPTEFELDTSRGLGRHLLETLSRELQYQEEVDTEISKRRRRVGADGREIPEGVEEEERTTEEEKGRGRDEGRGKEQRIREEEKRRTEEQRMREDVERRRREEMRRTTPIEEEEEHELLETEEITQQQHEQKEFYDGTAKTTKAAADEPQHKTTPTLSTHSSGKTERRNGGNVQRRVNFTG

SEQ ID NO: 134459 - protein, 31 aa, Heterodera glycines
TKLLITPNSVSGINFCALIQNLQVASDHCHF

SEQ ID NO: 134460 - protein, 84 aa, Heterodera glycines
MSPSENSDHPFQQPDNVQAVQQPHEEQDEEAELRAQIEDAEEDLLLNWWLEDPTIIRFFWTPSSTCHRSSTSSVHAHEAKIMRQ

SEQ ID NO: 134461 - protein, 267 aa, Heterodera glycines
MRRDHLRILWDPNYVTLLCANITFYGNPENADIYTSEIERILDPVYKFVNQWFDSLLDSTWPTYENLLIRNTMQDISKGMIIPETNATYQQIVDVVYETMRFIGHPGYRRKYVVTRDRRFDLLSWDFWFACRPNSCTNTTTLNARFISIRTKTDTNDVFESLQKLINFKVSSWPIFFSAMDSELYSYTFIETAIKVLAKKYGLNFNNFTNHSSYVVLRQDVYLSGCLNSFAMKCNEDLDNAFLQALHYHEDGTVFTNCEDWVVILGI

SEQ ID NO: 134462 - protein, 35 aa, Heterodera glycines
WVPISRKPSDLAKIVQQRIILHVFRFLFCSLRQKD

SEQ ID NO: 134463 - protein, 35 aa, Heterodera glycines
WVPISRKPSDLAKIVQQQIILHVFRFLFCSLRQKD

SEQ ID NO: 134464 - protein, 332 aa, Heterodera glycines
VTRLGRIACISFSLFGIPLTLVTIADLGKFLSEHLVWLYGKYLSLRLIFIDPTRPPNGHSKSDLNSFACSSDHSIFVLRIPALLVLAILVLYTALGGVLMSQLEPWSFFTSFYWSFFTSFYWSFITMTTVGFGDLMPRREHYVGFGDLMPRREHYTALILLYIVLGKFATKSSYSFPSAIGLAITTMCPSAIGLAITTMCIDLVGIQYIRKIHYFGRKIQDARSALAVVGGKVVLVSELYTNLVVLVSELYTNLVQKRQRNNTLRDAFIIENLYVSKRHIIPFIPSDIRLIKYIDQMEPPLTRSNSLLASDHPHSNSCRFCHSHFGMAHHIE

SEQ ID NO: 134465 - protein, 123 aa, Heterodera glycines
KYAKLILPHVALVLLTCAYTIFGASIFYSVEHPHEIASKRRQVKPFGRHPFQFVSALLRLALSNASGVRVEWEHLARSHLHEMSDNLFNAFEKHFLTATEVKRNVTISIWCLISPIFFIYSFP

SEQ ID NO: 134466 - protein, 179 aa, Heterodera glycines
MWGCESMAEMCLAINRCLELASPRLTRFLFDGKRILLWMLFPTLYGLYFFIFTKPIIFSGMYITWFFNPHFEYINDFEEKYRNDLHTVHNYIVVIVLSSTYLTFAAILFFQGRQFKTIRTDTTRVSQKKVIIINKDFHPSDSDQHCKWMCCTHLCVYELCAAEPISDHSWPISLDHGTW

SEQ ID NO: 134467 - protein, 49 aa, Heterodera glycines
MAFTVFFAYRGSFNRNFVILSNDARNWQTLAREIDDEVRAPLLFTILYK

SEQ ID NO: 134468 - protein, 122 aa, Heterodera glycines
MTTAMLEGIPGLVTSTCGKIRENFPTLDQQTFVFTYLLLICALQFAKYVVIDIYKCVQNRTSLPKDCGQMVHVKMEEIFADFIKEIKATHAEIGSIEEIRQGSKAIFWHIHNKIQTDKVIWK

SEQ ID NO: 134469 - protein, 178 aa, Heterodera glycines
MLDQIRSDFSRADKCELSSRINLEDEGKEVLKFGQILYETLEKHSENVKYDEKKQLLTFPLQMGERIIKRLGKLIEINFNEHKKIANDIDFIKTIQTVASMENELIAEKRKVTISEYVNLRLINLLFSLALRLLIQTEQNELIDQYLPIYLFAIKLSREEWYLIIIKIKNIKNLFIIE

SEQ ID NO: 134470 - protein, 67 aa, Heterodera glycines
MPLLSLNLLSIEYIVWPICNGLFVMAYSSCTPVLFLCSTEYRKAFCKYVCRKQHGLTVVVPLQNMPA

SEQ ID NO: 134471 - protein, 58 aa, Heterodera glycines
MPEKSITFLILLFLLIFSAYEAAMLREYVKLPYTPEQTSFVGDVATGAGYGMMLNVSK

SEQ ID NO: 134472 - protein, 520 aa, Heterodera glycines
KGVKRKADTTTSFDEEGPSTKQPIKREVRPIKKGPAPVDYSQLKPLLKGKLNERMKFCHKLLNELITSKRCKSYFNVKWRHLPAEMPPDTAEKAVPTLALPPKEEKKEILTKTSISNKPSSVSPTALLQKFKPVDDDEQIDFLILQVQAEHARVTEKQTQLQQYSHDLLQLKIRRREARTQQQITPPLSAESHQAIKKLLNACLPISSIPTSLSLPHSTAFLPSINAVQTSVVGLLQPNVQSQLPPAMPTISPPQQMKKKAGPGRPRVTNSGSSAFIAQSVSVSQINQVPVQQQFPAVDAPHPNLLPQQPNAKSGRGRKPGSKNKPKTESQKEDTLTKEYEFNSEDEHSSEPMTYDEKRQLSMNINNLPGDKLTSVVNIIKAREQIKDLNPDEIEIDFETLKPVTLRELEAYVKACSQQPDKKPKKTSTTSYPKSLHPEHPKKKDTDPQAQQFNGSAPPTGKLPNGDSGQLSVTSTTTAFAGRTTQGMVAQKEDENSSSESSSGSSSSESDSSDSSDSES

SEQ ID NO: 134473 - protein, 171 aa, Heterodera glycines
SGSFAASKVPPPVPPPPPSISSAVIPPSVPKAPSSHVHSGAAPLLQTNNPTEISAGISGSVLDHLLPSVTNGEKGTGGAAIGAGLLNKNSWSSLAQKATEGVGQMGHAVNATNAYELFRKQAREKEERVTPPNDGQQQQQQPKINPEEVNRLREQEKVSLLRGEMGTIRFI

SEQ ID NO: 134474 - protein, 71 aa, Heterodera glycines
MAKELVISAPNLMNEIKSGNFDAKLAIESLNKHSFAEGNVDVYDRYGGHYYSHKLLYDVIVIAIVSFVVLR

SEQ ID NO: 134475 - protein, 21 aa, Heterodera glycines
MRTRPIWQVKQRLLTSQKKGF

SEQ ID NO: 134476 - protein, 210 aa, Heterodera glycines
FATPTRGLTTPRLATSTRSTDCYYVDITCDAPNNGQPVYIEVSCGRKCYVPTTPTTPTSPTTITTPTTPTTPTTPTTPTTPTTPTTPTTITTPTTPSTPTTPTTPTTPTTSTTPTTPTTPTTPTTPTTPTTPTTPTTPTTPTTPTTPTKNPPNCCDKCIAGSVKPGEQGIDCNGAKLNPEFGYKITNYKCASLNVTCSSYLVNNGIIAIK

SEQ ID NO: 134477 - protein, 160 aa, Heterodera glycines
MHIPKIEFPKEIVPSLANLSLNRQPIDVDRLLKLLERTQKDVQRLTTANQQLTTANQQLTTTNQQQQNTINHQQQNIQQLQNLLAGQQPLVPAFAPGVFGEQQQHHHAPADFLGDQHALGGQNPHAAPFGPDFFGGQPENFGVQQQHMQEQQGPPPPPPP

SEQ ID NO: 134478 - protein, 201 aa, Heterodera glycines
MPAQTIGGLEDAQPRHEVQIGECAEELIQFYADAHEYLGNWSQQFSETDEIIGDWVIFESEPTIRKAYRHFCGASTDEMDALFGEIAELKQTLKELEGDRFNRKNVDEKWAAIFKNPNFVLLKSLVSAILSIFPSNAFCESVFSVLMNIKTDERNSIGMPLLNSLISIKFNANISCPNAHNYFLSLPNLLKQVKSGDKYVV

SEQ ID NO: 134479 - protein, 122 aa, Heterodera glycines
QKENGEATAETTTKTAITPTISEQQTTGSSSIAAVQSILVTDAPTIVPTSSSSSASPPPPPQTTQSPVISFMTLMNKEENANIKHGEEKGLKLEENSGQIAAELKAFEEAQSQLGNISKKLN

SEQ ID NO: 134480 - protein, 102 aa, Heterodera glycines
MLLFLLQNDVQTHFLEFEQISFVIFAHRALLWIAENNEFEQKVEKSNIVRTRYFRSQSTCKTSEKSLKTCKLIDSSGLLKITSSNKRSKSRTLFELYKNDQD

SEQ ID NO: 134481 - protein, 137 aa, Heterodera glycines
MNRFDQNDFTITSVHQMRNRPRNTIGEIAEVSFAPLEEVERPDRVLERLVRRLFDRVLDGRSAPMLIGLQLHPPTFENPFTIPLRPPEQNNPAAIADLIQRLNDQSAAGIDLTAGTTVTKVLAVWPMQADQSDAGRS

SEQ ID NO: 134482 - protein, 257 aa, Heterodera glycines
MVGIGMAFLLAIMGCICPILGRFWSGAAALGKAIAWGAKYPIRLFNWATGRQISPPTAAQVEIKLKRGARKARTRVRELQQQLQLSRRARAAAHAWRQPKRNQLTVRGTVAAGLLPLLLLIGTTFASKPLSVTVRSEDCARTAKGLQCAGTATTIITLLPADQVNSFVIRTQQDELLGTVRLRLASITMVCVPKTESWLRSYTISTVAVKRCPSAGSCRDDNCSTMNGRVMVPELNELNHRPGHSMCMSSTSFWAVC

SEQ ID NO: 134483 - protein, 132 aa, Heterodera glycines
  unsure (1)..(132): unsure at all Xaa locations
EDCARTAKGLQCAGTATTIITLLPADQVNSFVIRTQQDELLGTVRLRLASITMVCVPKTESWLRSYTISTVAVKRCPSAGSCRDDNCSTMNGRVMVPELNELNHRPGHSMCMSSXASGQCACGHPSASCLFY

SEQ ID NO: 134484 - protein, 392 aa, Heterodera glycines
NFCRSWFLPLNIHNGKLEFELDSGADVTVIDEIDWKHIGKPKLEPSQGLVAYGGKSIAGILGKAKVKLTHEGRTTESNIHVINGKHKNLCGRDLIMGLKIDLNRAFGIPTIRAVENKKELEACLAQYPEVFQDGVGRCKKMASLKFKEGCQPKRCKPRPVPFSLRNEVEKVLDQWQAEKIIEPVATSEWATPLVIMPKANGKLRLCFDYKVTQVMEEVLQGIDGVAVYLADILITAATDQQHVKRSDQVLKRLSENGLRVKREKCEFLKPEIEYLGHIVDKKEPLNELRRNDAKWTWTKSQQKAFDRIKNVLTSTKVLVHYDPQKPLFLAADASDYGVGAVIFHKDEKGKVGVIAYASRTLNSLERNYSQIEKEARAIIFGVDKFKQYLYGR

SEQ ID NO: 134485 - protein, 60 aa, Heterodera glycines
MDSTKPIVFLKVSLKGKPATVVGRVDTKTSVLSEAFASKIGDIDSNLRGRERPQLPMCPL

SEQ ID NO: 134486 - protein, 92 aa, Heterodera glycines
SSNDYQPNNGQLINNSDQGKINGQVGTVVGHDQQGAASLTNDQINQLITQLQAKQAAGKGRPRVKITKTVAEIFLDEQETTNEAIMANPSNK

SEQ ID NO: 134487 - protein, 68 aa, Heterodera glycines
MIEIVIIFLAKSIKELSRRAPMGRYASFLAGLEPPRKAKKYQAADERLFNLVQNYIPNFSVEFRAIII

SEQ ID NO: 134488 - protein, 178 aa, Heterodera glycines
MPKKANEAEKEADLKPKKANKAEKGWTNGVKEIANAIFEKSKNVLYPKKKIYFAFGEPFNATAFHGDKELKIYTELKADQKNGKFYVEVDMTDFDQFQNQPKAMIDFKNAKGLIYGGATVQVLHNVAVLDFSDEVRNYFLNGSGQLFFRNESTGQQYSVDANGDYDIVHNEGPFRGFG

SEQ ID NO: 134489 - protein, 24 aa, Heterodera glycines
RTLSTAVRQRSSKIYSMPQILWAG

SEQ ID NO: 134490 - protein, 39 aa, Heterodera glycines
MNDLWANCLCFEWTIGHFRPLVSLEVMGKAAAEEYGNCK

SEQ ID NO: 134491 - protein, 92 aa, Heterodera glycines
MFFTGIDRLIAIAFWEFHEYLALLTVISVSYAVCESVEVYQKAIMHGDQMTTGSYLDFMKIKSFSNIINVLLISMTCIIYVFLGIVVNFQKS

SEQ ID NO: 134492 - protein, 209 aa, Heterodera glycines
MFFTGIDRLIGIAFSEFHDNLQKRLYLALLTILSVVYGFCFSVPVYQNATRDGDQMTTGSYFDFLKSAPIFDKLSFLITSITCIIYLLLGIAVRIKASGLPSADSFNRRTFRALFCIISVNIGGYFFSLICYILLIPKISSPITAWFCNVITAIPMNIGAASGGLILYFTSTEYRQAFQTAFPFVFKQISNVNQVIPLQNGAQLGTTQC

SEQ ID NO: 134493 - protein, 111 aa, Heterodera glycines
MTFLFFMNKQYNAFSGQNFIEYRLAAMILFIPVIGLGAIVPTMFFTGIDRLIGIAFSEFHDNLQKRLYLALLTILSVVYGFCFSVPVYQNATRDGDQMTTGSYFDFLKVLV

SEQ ID NO: 134494 - protein, 53 aa, Heterodera glycines
MNKIIAAKRYSMKFCPEKALYCLFIKNKKVIRRAKTTYSDDYSGKCVVESVRP

SEQ ID NO: 134495 - protein, 237 aa, Heterodera glycines
MNDNNEVCDYLNITTTTNSDSNNLTAKCAVLEASQNVTIFEWFFSSMTHQFVVAKCAYQFKVAQVASDFYHDNVLIFYEKYPIISPVTAWIVLPNIFTPISIIFNLSLILVTITTMRDRKVCNWLIAFDSLCQLFVVATFGVNLVGVIFQHSTIDYCICLATLMAATVASYDSIMAMFLISVERLLIVLCPIRMNSIKKSTVCQCSLLSVILCTLFGLVMNLEVFNIWTIINIPCDR

SEQ ID NO: 134496 - protein, 339 aa, Heterodera glycines
MASKTPTEEEIGEETKKREEKQEEERRKRRRNMRKTAGGIRYMRNIAIQVESDTKVADKYADFTCQFDNDNKGGTKSDEKEKQQKTMMDKWTQHKSSEANLWQNIWQSVEKENGQKRKGMATEEEDEEEGEAEKEEKVGEESSRTEKERSEQTQSEFNLKRKCKRSQTERLLLVSRPAQTQLSSTFRRSDGDGREEGKAEGESEAQIEPHFEREKEREELKRVFGLENENIEELRQRVIQMKEKRREDRQRRRREDGQRQSEESGGTERKRNTSSEEEDELDEEEKEILINEIKKMKSRRRRVEEQRKKVEEGKVEKGTEEEEEEEKDEEEEKGTEEDH

SEQ ID NO: 134497 - protein, 63 aa, Heterodera glycines
  unsure (1)..(63): unsure at all Xaa locations
FEYPKRTLEKIDFFVFGAVPPNRCAQIYGETESFRNSFPIACTLILRWIFAPHNXFEYPQTDT

SEQ ID NO: 134498 - protein, 498 aa, Heterodera glycines
MLEDAQKNGTNISLKKIEEELRAIQLVKESALSLVNPPIATNAIRTRPRQWTDPAQRQSGGSNQRQTPNANSSGKPTRGQRTHPCGSCGKIDHWRSDCSFKDVTCLKCNKKGHISTICRSKKTKAPPNSHRSFHTVKIDANCLHVGTTQGRWWKLCILINGRQTSMNGDTGAQATIISLQTWRELGEPELTPSDIDAKNCNDQPFSLLGKFQCTVQFADKPPQILIAYVSGEVGHNLLGLPWIEALEIIPRQILFPTNKSDQATKMIDNFSAVKPPNKSINNVSTLKAVLQKDFPEVFEEGLGHCSKAKAHLILRSDAKPVFCRARPIPHGAMEAVNAELDRLLQIGAIKPIDFSHWAAPILAVKKKNGKTRVCIDFSTGLNNALELNRHPLPRPDDIYASLNGAKFFSNLDLRDAYLQMEMDEESKQLCAINTHRGLFQCQRLPFGVKSAPAIFQHLMDQICAGIPGVFAYLDDGLIATKTLEQHITALYTLFGRIK

SEQ ID NO: 134499 - protein, 320 aa, Heterodera glycines
AQRQSGGSNQRQTPNANSSGKPTRGQRTHPCGSCGKIDHWRSDCSFKDVTCLKCNKKGHISTICRSKKTKAPPNSHRSFHTVKIDANCLHVGTTQGRWWKLCILINGRQTSMNGDTGAQATIISLQTWRELGEPELTPSDIDAKNCNDQPFSLLGKFQCTVQFADKPPQILIAYVSGEVGHNLLGLPWIEALEIIPRQILFPTNKSDQATKMIDNFSAVKPPNKSINNVSTLKAVLQKDFPEVFEEGLGHCSKAKAHLILRSDAKPVFCRARPIPHGAMEAVNAELDRLLQIGAIKPIDFSHWAAPILAVKKKNGKTRVC

SEQ ID NO: 134500 - protein, 100 aa, Heterodera glycines
MHYNSKAFAKNDKLETIETIDKNYQQTMGWRLGLSFLDAKAINHRYCEHVCDDYPWHSPDCRNNGYANPNKCTECLCPDGYAAPYCDSVEIGHVNGEAGN

SEQ ID NO: 134501 - protein, 29 aa, Heterodera glycines
MAISFLRKFSMQQTLSNMKRSAKNGYLFF

SEQ ID NO: 134502 - protein, 29 aa, Heterodera glycines
MAISFFEKFSMQQTLSNMKRSAKNGYLFF

SEQ ID NO: 134503 - protein, 29 aa, Heterodera glycines
MAISFFEKFSMQQTLSNMKRSAKNGYLFF

SEQ ID NO: 134504 - protein, 29 aa, Heterodera glycines
MAISFFEKFSMQQTLSNMKRSAKNGYLFF

SEQ ID NO: 134505 - protein, 22 aa, Heterodera glycines
MAISFFEKFSMQQTLSNMKRSA

SEQ ID NO: 134506 - protein, 152 aa, Heterodera glycines
QDKSSNSASGSSGVQQQGSSGNGSGGNGPGGSSSAKSVGNGVAATPNTHHGHGGQSSSGRPHHHTNQQPQSSSSVQQDARAQRANAFLSTIVPRMQQMLGSTTGGGSGGSGGTTTTAALDLNIAGGAAGLIDATAMPTFHFSHTHGHHQHVS

SEQ ID NO: 134507 - protein, 194 aa, Heterodera glycines
VQNDIYNDWTHICQKKLKLTFYNYKSSKLKLTFYNYKSSIEKYNRETFGNCFELSTASDGNFLEVLNISMNSFLAYHSDRRFETTGQQIIFLTPGSGVFNVDREMVNLTKQRIIDMGISISLDIVCLGEQPLHAVPLFVFKHKSPQQSDDYFIPHWMNYSHWMNYSYFNMPRNSSISSKFKTRINFPEDIVKVP

SEQ ID NO: 134508 - protein, 112 aa, Heterodera glycines
MIKAGETVEFGLYSLCSIVIRILKKREKSAENLCPPISSLPDDQFNVEIDRSVLPFSYVRFAGDQSNAQHGDEGKAAANAHFGRVGHRHGAVHGICGGHLNHSYPQANSTKS

SEQ ID NO: 134509 - protein, 27 aa, Heterodera glycines
MAISFFEKFSMQQTLSNMNEKNGYLFF

SEQ ID NO: 134510 - protein, 29 aa, Heterodera glycines
MAISFFEKFSMQQTLSNMKRSAKNGYLFF

SEQ ID NO: 134511 - protein, 29 aa, Heterodera glycines
MAISFFEKFSMQQTLSNMKRSAKNGYLFF

SEQ ID NO: 134512 - protein, 29 aa, Heterodera glycines
MAISFFEKFSMQQTLSNMKRSAKNGYLFF

SEQ ID NO: 134513 - protein, 201 aa, Heterodera glycines
VLQLEPDTNVEDARKKYKKLSLLIHPDKNPNCRERAERAFDALKKAIATVEDPDELSRCRDMYEEAKARLAVQISEKKRKMRKDGKADAIEEETDGKADAIEEETPQGYARALWITVTKVFADREKKRRTLEERANEEKRRLAESVQEAAEKRKLEEEYKKNYEESRDERRGSWRDFVKKKERKLEFRGANFKPPAPRLET

SEQ ID NO: 134514 - protein, 102 aa, Heterodera glycines
KILSFKLMLIKLNGKRHLFHPGILLTSSKISAIGIPSLKMSESEIGILAFFFILRFGAVYEKGFDLMFLLISTLDLLQNKKVFNTNVFKEIVHKIAIRETKE

SEQ ID NO: 134515 - protein, 97 aa, Heterodera glycines
MSEHKKCAAATILALFLFLAFCSYSTTAQQQQQHQKQTPPAEAEAAEEEDENAAAASYDAPVVTVEREESLPKPPPVAHSNDDGTPGTVHSLDGRVQ

SEQ ID NO: 134516 - protein, 463 aa, Heterodera glycines
MSHAFRVPPPHRPQNEGQGGKNDDDDEDQSEMEIFNRQITDICQMLLAHHHNEVEKVGRLCAQMGEAIRQVLAIQQQIPNPDEVEQQHGEDNGRDNRNNCSFDEDESDGESDDPTVEHPLPAARRVLRRLKLPTILDISAATEADVQEYGTKLSDTIKQITKLRVQNGGALTSELELRSKQKQAQNLLQQIGNLMPQLVVEEEEVAEILNLAEQSADRFSIGFLNKEQKKQFEEAIRQAKKAFEILLKHNLDSLVDKFYEDCYKKLLHVGNEILKRAKLTKEFEANMLSARIIGLNMRMEMENSLAKIQPPYAENEDLAALFDFDSHVKNAFLGFGLFKCLELDKSELRNAYEWLTENRNKIGSRQHILTLQNEFEAKMLKFRMNKLLWKMKRVENGEHDFCKLAEKLANDRIQTERNLKVEAELTKKAAISAQNLGLPVVEHINGYIDAINRSQQKCMKFGS

SEQ ID NO: 134517 - protein, 81 aa, Heterodera glycines
MRGLMLQVSTGEGKSWIVAMLAVILHTFGKKEPLADQQEGAQSDQEKEKHGHGETSTDQTEKEPAHGASDIDKTKAEESPH

SEQ ID NO: 134518 - protein, 294 aa, Heterodera glycines
NSLLCISNLEAHLCKFSLVIDSMLLLRILMHKLSWDLCLVPKKRDLCLVPKKRLLGSGLAVTGAPGGPSTDPSRRAHSSCSLGSSFKFAFRRDGQNSTKNSFAFRRDGQNSTKNSSSKHFLRVDYGGSSRLSKRVHIRRSSSVESVEIPRPKRFSSGAKELRKERNRKRLGTDTSSGSSKSKKTNSSSTSSVQKRLGTDTSSGSSKSKKTNSSSTSSVQKHLPKYITNLFRGRMGTDPCKRHARPCKRHARGSRESSPESPTSGSEAVLEFTKKLQNAPPTRRETMRMAYKQSG

SEQ ID NO: 134519 - protein, 51 aa, Heterodera glycines
MALNLTYLLTLSLYCSNSMHEVGAVQIESHPLHTGSRHSKALIGCLIHFKK

SEQ ID NO: 134520 - protein, 82 aa, Heterodera glycines
MAIKYGPKIAKYGHKMAKIAKYGHKWQKCQNMDINFSKLNVKFLQIYWLKLHMRYISKFFDSRKINNKSEIFAFLLIFDIIY

SEQ ID NO: 134521 - protein, 51 aa, Heterodera glycines; identical to SEQ ID NO: 124998

SEQ ID NO: 134522 - protein, 61 aa, Heterodera glycines
NRNYAQKAPQTILALPIPSTIAFIHPIMSARIIRVPKIACDLSLAKNGVSKNRNYAQKASQ

SEQ ID NO: 134523 - protein, 34 aa, Heterodera glycines
GGPAVPIGAARTIFAFLMQFVNRFIHKKAKICGF

SEQ ID NO: 134524 - protein, 27 aa, Heterodera glycines
IVLKKGALKTHFCVKIFSFGRHFSSLE

SEQ ID NO: 134525 - protein, 63 aa, Heterodera glycines
MEPVGERAPTEPQQLSSLMMKTAQNEEKIVNEIIEYKQKFRPQKHGLNKVCFEKKNAMYSMHI

SEQ ID NO: 134526 - protein, 52 aa, Heterodera glycines
MAIKKRRHLLEDKQRDYQRELLHSHLIQNLLFLTISAKMSPFSSKMAQLKLH

SEQ ID NO: 134527 - protein, 150 aa, Heterodera glycines
LFEYPKRTLEKIDFFVFGAVPPNRCAQIYGETESFGSSFPIACTLILRWIFAPHKCLSTPNGHLKKSIFFVFGAVPPNRCAQIYGETESFGNSFPIACTLILRWIFAPHNCLSTPNGHLKKSIFLFSGQSPRTDAPRFMGRPNPSGIASL

SEQ ID NO: 134528 - protein, 66 aa, Heterodera glycines
MRQHPDKLRQVVGANFEFLNNVQKLLAIQPSNISSNTYLALLKSLRYICSQYFFLKFTPKQNRTWI

SEQ ID NO: 134529 - protein, 94 aa, Heterodera glycines
MGQYLKTELSSDQLELHLADGTASVQGVMLNTEYINETLEASGVRILSLKDGYVEELTVCVPWKRLLLDSTIVKSMICQLSFFIQIRRWNGNIY

SEQ ID NO: 134530 - protein, 47 aa, Heterodera glycines
IVFEDLFTKGSTRRTAAQKFYALLELKKWQAIEVEQRDAFDTIEISA

SEQ ID NO: 134531 - protein, 76 aa, Heterodera glycines
MAFFSSVCAAYLFFTHLAYHKSWMFDWSPKRLQMAWTINQQTKRRFACPPAKAIKEGRKKKMRRRSRGRGEKGSKK

SEQ ID NO: 134532 - protein, 80 aa, Heterodera glycines
MERKDEAIAFTEKYEHFIVIECKGSSHNVDKFCDFVGKRLRYELLEFVENPLAIWVDFCHVRPKMIGPTECPSADLEKNG

SEQ ID NO: 134533 - protein, 146 aa, Heterodera glycines
MYQIKLGNLFFRDFWLMSQNKLSELPKTFGLDCTPKLYFPHKYNSEKNYGKINPTLPPMEDYYPDSMKKDEFEKFQKWYKENNDTPFLLEEQLKIYCGQDTEILLKAVLAMRKIFIEITRDELSPNGFDVFKDLMSILYVGNTKRL

SEQ ID NO: 134534 - protein, 185 aa, Heterodera glycines
MANKKISYDLYCEALTDPLIIPPRDLVQNNVDVVLESFYLIQQSFSEVDLLNEQISIIITTYAIPSGTRNQLNSTNYFKIKENVRISVANDDNYCLFYAIILSRFYQIIGANESFEISYDQFRRIYKNKKRQKNHVLQLIQETRIDPNRTNYGIDDLLTVQEYYDQEFPGKFLIVAFSKVKKEKS

SEQ ID NO: 134535 - protein, 85 aa, Heterodera glycines
MPNHQFQGPFGPPPLPPPPPALIGPQVAPPLNPPPRGNGDRMPRNGGRYRPPTPGVARLPPPPVPPVLRRWHDRHDDPPPPGVGA

SEQ ID NO: 134536 - protein, 363 aa, Heterodera glycines
MASKTTTTPDPHFNPNDRAFVSTCTHLELNAALEAGYTVRKVFHVLQYDQWSDNIFKSYVSEMMALKIHATGFPSWCSSEEEKKEYIEENRQRFGILLDKEKMKAEPGKRYIAKLCLNSLWGRFSMRNLLSKAIINNDESLIRQYTDDKKIELVDLEMMDEDNDVFMLTYRPKEEFVDENKYSNVVISLFTTSAARLYLYEALKKVADTPDCEILYYDTDSVIYVHPEENDPLPTGKGHLGELTDENPDHDILEFISAGCKNYGMKLQRKDTGEIEHDLKIRGFTLDAQTVQKIHYDTVKDQILRYGSDDPADPIIVTYPHFIRPNLIQGKVYTHSLTKHYQPIFTKGIINDSFQVLEFGYRK

SEQ ID NO: 134537 - protein, 24 aa, Heterodera glycines
RTLSTAVRQRSSKIYSMPQILWAG

SEQ ID NO: 134538 - protein, 99 aa, Heterodera glycines
MKEKGRWTNDRSRKMVEERGGGVRIANLRSRCEKSEQNDKRKLKQCPEGPIRSKEKCPMIKDNRSNTVNHGAENCENRANAEKSDDSSFGDQRVPTKGN

SEQ ID NO: 134539 - protein, 130 aa, Heterodera glycines
PPPPSAPLPSAPGNSPGDEPSGKKPPRPSPVGRPNPPSPPVPSPPAPSPPVPSPPKVLSPPPSPPSPPERIPRPKPPPVANPGGQRPPRPSPRIPRPKPPPVANPGGQRPPRPSPPPRPHPTPGHKPPTA

SEQ ID NO: 134540 - protein, 94 aa, Heterodera glycines
MATFTFWPISELTNIDVVFKVYHDCDDGIKPGSRKLKFKIPNSYVTDSATPKKTFDIGVLNLETVFKDEERELIVTMKKKRRSHRYQDFLDILP

SEQ ID NO: 134541 - protein, 105 aa, Heterodera glycines
MEKYPARNNLEHLAMLKCTEEPHIVRKTGIICTIGPVCRSVEMLVQMIENGMDVARMNFSHGDHEYHGGTIKNVREAAAKCTKKRNVAIALDTKGPEIRTGLLAG

SEQ ID NO: 134542 - protein, 129 aa, Heterodera glycines
MTTATTSLPSPGDEEEHTEEANEVPEITTDVPRPISASSSGGRRVPTSNRRRQKLAKAHQPQHGEEQHYAPPRRVFPLRRGQVPSLAIGQVGGLLPDEETDASPFDAERAEHLWHPKQAKIALKNTIFI

SEQ ID NO: 134543 - protein, 228 aa, Heterodera glycines
MAVNSGLTETFPPTPLSSHGQNSAPLRQNAAGAGPSTGIADGGAESGGQWFRPTIENHMNRSRLRLVREEMAHRTMQQQVEHQHQQLLERAERVRQANVEQQMEEADVLQEQLQPQDEENDENRDPEMEQRRLVQVARQAQYERLVRLQLREARRFHNGVASSVVVPPPLFWEEECVICTNARANFYNRQCGHVCLCAECAVTAVIQKLTVCMMCRAPVNGYTHMFVN

SEQ ID NO: 134544 - protein, 529 aa, Heterodera glycines
QRKQFTDLPFDQQEKALFEDFLSVCRGINGPFIQCEQLDNNEIIWVWTAENWKQRTDNQNIERWMNVCFSKAPLFLTCFCASDADKVGGELINFLFDQKERTECYHIVSLLDEIISVTLLRYNQTVFEWISQCSLSLDMGHEFFIWDLRKQSVVKRSDFNSPALDNFGFDHTYVSIPELLPKVYESVADELLNLGRFLFTMKNQNADIEHLSTHYELDQNLFKNKTLREFCAAIHSFYGKCSTNILDLFKKRFNILQFARFAVPITWIYEFVVLLETTGLNGPILDNDFEMDDNDRFIVNTQLQLLLQEAFRVSWLQNSPFHDKIGVSLMRLSPTSDDRLAEHEKRLEHRLKNPPKLELNIVVPKDNASNKNKDLALSLAFPPVVVWSYRQMFYHLLLLNRAKHWMYRKYFALKGTNCRREEFATVHQFLRVLNVYIEYLCGIASAAYPNFSKQLDSMKYTHQLMGQMMLDQGFKQLKELLVQLATKFCEYARDSIDFHTLNREASPLVGEIKKILLQNRDGGPTGLRD

SEQ ID NO: 134545 - protein, 130 aa, Heterodera glycines
MNHRTRLDWLFFWNALWRMEKNGLVKYKYLLHPRTVGFVHILKRMRKEKYVDFIYDVSVAYGGRIIQSEFDLVITILFSSQITLFELLLGLTPAHVHFLVQKIPISLIPEEDEQLEQWLNNKWAEKGAHF

SEQ ID NO: 134546 - protein, 98 aa, Heterodera glycines
MESWAIEFSDCPFFLSVVKICPILWSLRGVGCGNCANANLKPWISFKFYSDVGEKAYFRGGTLGFAGVWVEILGSRKDLLNFQHHFTDKELENKGNCN

SEQ ID NO: 134547 - protein, 69 aa, Heterodera glycines
MDAAEPIKQKRIYKKQPKTPKKCLICGRGAAFKYYNVQSCNGCKQFFRRIVNSQRTFTCTETNSCILSD

SEQ ID NO: 134548 - protein, 118 aa, Heterodera glycines
MALELLAKLQSFAVADLLSADQIADFRATADQFRVHMLEHFRRHCSTTKFHHLVHHAPEFAEKHGFWGLLSEQPVEKFHALFNDDLARKANTKDLHDILMFCARESAIRNAIFDANEL

SEQ ID NO: 134549 - protein, 88 aa, Heterodera glycines
MSKVRVADVALEREQLAFFTKFGISTSDSVQQEKSCDLSNATKVFAWDGLSKWEFFRDKFVLEPSRDYYYRWLGIVTLAYCYNLLNQV

SEQ ID NO: 134550 - protein, 118 aa, Heterodera glycines
MVLTRPSRFSVGPCSSSSSPGPSNSSLDFGVKVVGGRSPLTGRFGAFVSRVRPGSVAESVGQLKTGDEVLEWNGHSLQNVTPEATKGDVRLELIVSRSLISGGDDFLNLGQIHEQYGL

SEQ ID NO: 134551 - protein, 114 aa, Heterodera glycines
MNGTQPTTILITGTQFISIAMNGTQPTTILITGTQFISIEMNGTQPTTILITGTQFISIAMNGTQPTTILITGTQFISIAMNGTQPTTILITGTQFISIALNGTQPSGVPITGT

SEQ ID NO: 134552 - protein, 123 aa, Heterodera glycines
MLLWWAFLLFFHRVIFRPVDCGKFEDAKDILSSFKSVVDVPLSNDFKKSHQFIALSMSLMKRTVPFAELFATALKVGLEIVFVAFLALWCFPHQGHSSIYCICNLHFDLSYAWMNLITGMDAG

SEQ ID NO: 134553 - protein, 166 aa, Heterodera glycines
MVQEDELGALLTLTKGIDAKVRDIASQQKYIASSNVYRDLLLEYEEKVDEKITSLIRQIRIMSRMRFKVEKSVIDAFVYDCNGGANSPGSVADKFLDPGILNYRDQSHDWKMDLGGTPGSELSFYRVPIIGLRSCNELFPHQLFPRFPLEINKPKFYLLINSYLNI

SEQ ID NO: 134554 - protein, 86 aa, Heterodera glycines
VITVLKKEERIAADKLRQYELDPTQGIRIRERKKTYRENDLAIRNLVEGFDAIENPNEDEILAHLKSLQYRLMRNDFENWDDPNGD

SEQ ID NO: 134555 - protein, 401 aa, Heterodera glycines
MKPNPRNQQNTSSSPFPYTSAFTTKSNSVRLAQFKSNPTQTRTQNKIFCRFCERENHASKECKIYSTPEKRNERVRELKLCLNCLNKGHMANECKSTYLCFNCKYKHNTLLCTRKQTQYKPKEQKTRVNMAKNYENHEETQTFMTMDYDKNLSNYEEEELLMTAEVNCINPDKHKVKKEIILFDNGSQKSYITEECAQTLQLSTIEEKLLAISTFNQNKPKIIKSRLVKVGIKTLKGEIEYITLQTVEKITDVTKMVNKETVDVLGIKISIANARPQILIGIDYYWHFMLPNSQIQLLPSGFYSINTKLGKILSGKGTIEDTNCNSVTEKRKKDETNQILQKFWELENIGIIDSPHMTDEDAAMIHFDKNVTFKNNRYHVRWPYKRGTQIYQQILDYAWED

SEQ ID NO: 134556 - protein, 220 aa, Heterodera glycines
MPVIKVLKYPEELNPFGSEDEADDDDGKNPFGDSASSSGESELVLPGEEKKQQRKSSNAENEEEEEPEEVQNPQDRVQTCSSAADEESSACPSPARAPPMVQIVTAGGTSPAETEEKPSSAEGKQTANTSTEGNDTMPKITETPENKTPNKTQQRKLSTCEQQDNQYQYDVSGRSEKRMFKMVISPFQYIPPLAPMLFRGGGVQLRKVLPLRVPSPSPCL

SEQ ID NO: 134557 - protein, 24 aa, Heterodera glycines
MILKSPIVGLATEKIILAIILIYK

SEQ ID NO: 134558 - protein, 116 aa, Heterodera glycines; identical to SEQ ID NO: 127487

SEQ ID NO: 134559 - protein, 109 aa, Heterodera glycines
MEDQRVPREKTDPVLMDQLLKFNSMKPDERMRRIWDSARALELFNDQNLVLKAFGISVDQKSNLVSMVLCARNRFDTAQQFAADRLGRMGNEKGIPIAEPEIVAFNSPD

SEQ ID NO: 134560 - protein, 201 aa, Heterodera glycines
MERKTVSNDNNHGLKYEVINQRQGFVEKCDGCDFNVFHSNVQFPPIVWPPPENASEDVVSQHLKPFHDVLRFISANCLTIVQHPELYDQAKKTLDAVNLLNGVLDQHRRQQQGQGQQQQYTGMTVLKNSHNNRRQTNNGDEEIYISDADDDDDGIPFLVRRFLNANIADEQTVTAAEQPDYADGETSMFCDDVAEMECQQN

SEQ ID NO: 134561 - protein, 17 aa, Heterodera glycines
PVNSCIGCKCRRCCTPN

SEQ ID NO: 134562 - protein, 22 aa, Heterodera glycines
MAAKADQNYPFIRAENGGVGAG

SEQ ID NO: 134563 - protein, 21 aa, Heterodera glycines
MRTRPIWQVKQRLLTSQKKGF

SEQ ID NO: 134564 - protein, 98 aa, Heterodera glycines
MPTILSTVTSWNVVSRNTVEYLSAYFFKTPECDGKIFCACRQPYLVSPKRFVGRCCDSSPSCKCCLKLSPIRNTDECLKMIDGMPHCSCPLEFECVYC

SEQ ID NO: 134565 - protein, 64 aa, Heterodera glycines; identical to SEQ ID NO: 129150

SEQ ID NO: 134566 - protein, 91 aa, Heterodera glycines
LPTNPATESSAAPFRLSTIHHSFLPPADPLGSRQLNPSLSADHLRPPALITQLKSPAALLGSRQTLTESSAAHFRLSTIHHSSPSRQPPFQ

SEQ ID NO: 134567 - protein, 16 aa, Heterodera glycines
MHLNKKEMEIFIYIEY

SEQ ID NO: 134568 - protein, 107 aa, Heterodera glycines
GTLFISDGGIAQPFKGKERRVFLFEQSVIIAECIPPRKEYGNPTYNFKNQIMVNKMMLDEKVPDEPLRFVLQSSDPNQQATYVAQAASVDDKEQWLAKLSAQLDQQK

SEQ ID NO: 134569 - protein, 329 aa, Heterodera glycines
MQEKRQRPRDEWPEENETLLSYVQRIYGPENWTSAWQRGRVLRELHELEDQGRWMIHHKSDRLLLSVSRMYRGKRPFAEFRFVEGRYYSHMVPEDVDLPPSSTNQRTAGDHNNRRHNGTGNKYGTNEAPNKTATTTIAKTRRIPHGRLQTEHAQPIQPVRAMRQHAHNLRQNSDLRFHRGQPISNGRIPKLPCQQFLRGIALQLSDTTVEEVAQMFYQQQVADNGRQIARDQHLTEVINVWRNSCDRFGELYNQPAHKQVKFRPITTENEQQSNYGEWIERLNNRTAEIFSKARTKAQHPTSIQTALLRRQMVHTFPGGRIPTHPRTEG

SEQ ID NO: 134570 - protein, 56 aa, Heterodera glycines
SANPFDMEDMLIAPLEDGGETDLLYPDMASAAGSDHLHVVAPPADLNDLDEYPPLA

SEQ ID NO: 134571 - protein, 66 aa, Heterodera glycines
MTPIGALGIILFAYGLTILLGHCSGLKCKSGEDMDETDYSPYINATTKECIFDQRYCLTVYCFTGE

SEQ ID NO: 134572 - protein, 77 aa, Heterodera glycines
MDMAWLRMAHAIRRTVLLCRTLCIGLQLYSKKSMMVWSCARSIPGDKYLCQCQFGEQGVNFGNEKRRLPLAMYNMYK

SEQ ID NO: 134573 - protein, 151 aa, Heterodera glycines
TNVRRGRNRQVFLRTPDPNSNYYRNNFPLTFKVFKLKGNVEMNEADRTANEELDNEINNSVNANANNGTNAETVAAAGMSDSGANANNGTNAETVSNCGDDDRARRNKRCQCQQCPSAAEKEGQFWTNDVEVWAHVGPPLVFGVLIGLTPE

SEQ ID NO: 134574 - protein, 53 aa, Heterodera glycines
MPTDFQQSEKLKRILALWDRGEGVISQQLFCNIHSAEAHVREGAIIDAIGGVK

SEQ ID NO: 134575 - protein, 100 aa, Heterodera glycines
FVPNSWHKVGMRNFHVRKNHYYSPSINLDKLWTLCTERTRKQYAEVKDKAPVIDVVRAGYHKVLGKGLLPKQPLIVKAKCFSHSAEEKIRKVGGACVLVT

SEQ ID NO: 134576 - protein, 23 aa, Heterodera glycines
FSARKSKNGIYPGIGGHLRYFGT

SEQ ID NO: 134577 - protein, 233 aa, Heterodera glycines
MKFAKKMLMIPEAEYLALRSAINSGDSLQNEKASLDAKISQNLQGPGIIDDLKAKRHDWLYKERRTVKGILENRPQKVVIENHVPGPNVAPYLGINNQFNPQETEEPRKIIIPRKRLKEQTPDSDSDNDTLEEITPESQTVGSSPTLKTPVPNKTSIIHPTLLNGLFRYVKENKDLFKITAAGKVQSNMNLPIENSNYRDVLLYLAGKKDETPRGAKFLKDRLLKDPTVKDMG

SEQ ID NO: 134578 - protein, 95 aa, Heterodera glycines
MESVSLDPGEEFQEELTEELEEELLGKEEKWVTAQNSENEVEGEEKEKDEGEEVELNEDAEKKKKEWATAQNSTNNEKEVEKSGEIEVEKSEKKM

SEQ ID NO: 134579 - protein, 162 aa, Heterodera glycines
MEKYTNTFNLDMATDQHSFCSTAHQAVVEIKNELINPTMPDCESPAGGGTKMVQQIDTHLYASNRKANDEECAYSVGFISAMFEFASAASAHADQSISDLKELTLKFDQQIGIIGELCNCLNTDIGIVLFRMPRQGKTDGLKITKKQRGRTRAARNYGLRES

SEQ ID NO: 134580 - protein, 175 aa, Heterodera glycines
MTNSTHFVVKISKIKVSICDAEGVPKAANKNRNKNNNNDREEEEEEQKLEEDGNEKLGSELFNDEDIVNNNNNSQKNTANLGVTEAEDDGMLTEQDKQLRKVLSDMDRKQLTLAQRRQSNMDVYLSKGPTVIGSQISHRLFFKEPEMREMFRRCALPQQFANHDSFSKVQTAKIS

SEQ ID NO: 134581 - protein, 160 aa, Heterodera glycines
MPSSLMAGDSPRENGAEEHADIYATSSNLMKSQRQLLFITPAIGFASALCILLSLCVFLLYIQRRPDGVYKTHEHNAFVPVGSGTVSDGDDHHKQQQYGNGDEFGTARGNVRFAGVPTLMHTRLLSAAAGGDQQQQQQQQEKRHYRHVPDDETTKREYFC

SEQ ID NO: 134582 - protein, 114 aa, Heterodera glycines
MKMQDGDEEDAYILYHRAMAIYRLISDSMTDAFKRSRDGRIFYETSGRLLSDLEKVAESLKQRFGQRQITGSTLGSSKSFSDETKVEGSLSSQSSPFQIFFKFKLGIRIDQKKP

SEQ ID NO: 134583 - protein, 18 aa, Heterodera glycines
MDKKEKGISIPFNVPLWN

SEQ ID NO: 134584 - protein, 176 aa, Heterodera glycines
MLSKLNLLFDILFIGISFGLATDQNAGNDLKQLGQSTINVLASAANLGIRAVTTLAPVVRDQVIPGAVNCTKTVVSALPTVANATKNMVNNYAAPAATNAAPVIAGAAVAVKENVVKPIYNHGVRPTFGMAGIAMANLPEWQNQRKAGENSSRRNSTGSSGKKSGCMLACFGKGDP

SEQ ID NO: 134585 - protein, 117 aa, Heterodera glycines
MKRKGKAKEKERKSQGKGKEKPRKRKGKAKEKERKSQGKGKEKPRKRKGKAKEKERKNQGKGKEKPRKRKGKAKEKERKRKGMIWENKQKRDGKEWKGKRNGKEKEAKLGGGGEEEQ

SEQ ID NO: 134586 - protein, 107 aa, Heterodera glycines
MYNQSLPVIVASMLPCYWLYREVAKWMLAERQKAGGTNTVTQYHEWIDMYCSEEYAEAVDEMLALADELAQEADQRTRAKMATVFERGFQLEWMFWKSAYQMCQWEI

SEQ ID NO: 134587 - protein, 105 aa, Heterodera glycines
MIRLAQEYMIGIFSVIILKYKINYYRQGSRKINDFVEEATHGKIYDLIEPNLLGEMTRLVLINAVYFKGNWANKFNPNLTKKKTFHVDEINTKEAYREYNLNVQI

SEQ ID NO: 134588 - protein, 63 aa, Heterodera glycines
LTSKNNSLPKSFLQPLIANIISCRFKAIHCLPVSAQQSTNRVFDSLQKIIPYPKVFYNHILPI

SEQ ID NO: 134589 - protein, 61 aa, Heterodera glycines
MAYNFASKSFLIRPKAWSGKMADRGLLILDTSVPAECRARNIWKNSKFQKKIQNSVLKSHS

SEQ ID NO: 134590 - protein, 119 aa, Heterodera glycines
MHIAPLELHPLARLVQGRYHKMHCLCVASWDHVLVRVLTLLARLGCGGFGVQARTCGSNSRFTDRNSGAPMLRMLWRSAWITGIPALIFRPELRREHPLNLSISVSGGKETNEDSRSNG

SEQ ID NO: 134591 - protein, 108 aa, Heterodera glycines
MLGSVHKSSRTTCAHQRTGAFGGANASPTGQQQQVHLQLPCYDFCPVQATAIKSVPVCIPTEAGTLTVPEFLEMAQSRAATGGVYKGQGRIQSELMTRPYKEFLVHGQ

SEQ ID NO: 134592 - protein, 64 aa, Heterodera glycines
NRKKGRIFKFFISIFFYSSKFSVIFSRLIEPVKSFRMISRLFDSVNNFKSYIDSSWLRRSWPVP

SEQ ID NO: 134593 - protein, 66 aa, Heterodera glycines
MQKMMENLFMFHRLYANMKSLRKGIYPTSYLPSFYINQLCAIECHMVTIATGFGFPLNEIFANYSL

SEQ ID NO: 134594 - protein, 55 aa, Heterodera glycines
MPAVDCLNGYRSYINDRNAELIMGDPLDPNMETDFDFAGNLALFDKACNYYAVIA

SEQ ID NO: 134595 - protein, 69 aa, Heterodera glycines
MNLHEMVTSTPTPNYVPILEKSFSKNETETATIIEKTYSDENTNSDNNSCSAFGFGMPMIICTILFFFN

SEQ ID NO: 134596 - protein, 184 aa, Heterodera glycines
MRKAKCETPKNANNAKGEMRKAKPQPIPGNEWLTHYGCAKSPEKGACSDNVEKEMKDLYGLAVSCSFCTIGRKMDDMSNKNFPLYNTTNVVMPPSGGADGDDFSFMSTTQQLTTSYNLSEIATIVPKKMNLHEMVTSTPTPNYVPILEKSFSKNETETATIIEKTYSDENTNSGIKYYFVFHKK

SEQ ID NO: 134597 - protein, 55 aa, Heterodera glycines
LLKSCRKNFAFRISLFAFSHILAFRISLFFHFAFFSFANFACRISLFIFQFGPCL

SEQ ID NO: 134598 - protein, 94 aa, Heterodera glycines
MQKGYGRDNKRCWLEDELFRRRMRVNIFLAIGIQILLCFALFKSLTVPWSTTQFKTQIWVKEFNYYLNTEFTTLFLFISHKYGFKVQPNASSLI

SEQ ID NO: 134599 - protein, 63 aa, Heterodera glycines
MKKEMNLNKNKMMKKSFYEQKKKEFIERFDEFKSLYCQGKQKEFVKDGIPMRTIEKDEAIFQN

SEQ ID NO: 134600 - protein, 62 aa, Heterodera glycines
MHFIFLIIFIAFKIESGKIQPNFGEIFGNAWDNNKREEKAIKIEQNEQNDNSATVDQMEKFE

SEQ ID NO: 134601 - protein, 23 aa, Heterodera glycines
MTQGRSHNFGSGSTTFTGLIYRM

SEQ ID NO: 134602 - protein, 77 aa, Heterodera glycines
MAPRRKRKAAQLVGQDEAVVNGPSAQLPTNDGQQLASAAPVTNNGTVQQAENDGTDAVAAAAAIDDTGGQVQFLYFR

SEQ ID NO: 134603 - protein, 118 aa, Heterodera glycines
MKRRIAPLTTATAPAEQHKIIGPESPKPHEETAKNVEPKDELATKKRKVDDRELWKLAKGKFLLTTYLCHDDWNRLYNNQQKVKRLEGDRFAFGFEMCEECVWANCRATDLLAPMKKK

SEQ ID NO: 134604 - protein, 98 aa, Heterodera glycines
MNLWNLNIYYIFFFIIESDKIRPNFDKIFGDGYDKIKQKEFVKELGISEATFWKWKKELVQKHQKTDHTGQLNPVISSIHSLSSGVYKDTMPVEKKIN

SEQ ID NO: 134605 - protein, 74 aa, Heterodera glycines
NLNAADAKQRITEHRQDRRNVFIHPNYNYKTFESDLAVIKLSRPLIAPLFQPICIHCGAANKFLNGTVFVAGWG

SEQ ID NO: 134606 - protein, 37 aa, Heterodera glycines
MTKRRKCQRQNVSAASVGAANRGHIELSNDTKSVGFG

SEQ ID NO: 134607 - protein, 158 aa, Heterodera glycines
SLSSLERTLQITQNMPETVVTDNGTQFSSNGFKFVKENGINHLFSAPYNLESKGQAERFVDTFKTCRKQKKEGAQNVVNTFLTSCRTSPDDSLHDGKNPTELFILRKSRTTLDLLRAKTQQPMEKQFKRFLRSNLINSIFSFYTKMRSGSFSYGPFSY

SEQ ID NO: 134608 - protein, 99 aa, Heterodera glycines
MPKKGWNRAGFRRFARLEFRGFHSFFWASGVTQRYAPAHKALFVKYELPFVRVAIALLKKGKVSWAAVEFLRLKIFGALEQCRPMVVVVFWPAVFPVIN

SEQ ID NO: 134609 - protein, 100 aa, Heterodera glycines
MIGRAVRNRPFIFEGIFKFILYPRKMSISFFEKFYTSQKRLRRDGGLCTIAILFHRGFLYLEVIPEKWLSLFLINFIHIQMLSSMRGRAVHNSHFISEGI

SEQ ID NO: 134610 - protein, 92 aa, Heterodera glycines; identical to SEQ ID NO: 125147

SEQ ID NO: 134611 - protein, 137 aa, Heterodera glycines
MLDKLGGVFAPRPMCGPHKLRESLPLILFLRNRLKYAQSYNEARMICKQRLIKVDGKVRTEMRFPCGIMDVISIEKTNETFRLLYDVKGRFVIHRIQSREGQYKLCKVKKQAVGDKQVPYIVTHDARTIRYPDPHIK

SEQ ID NO: 134612 - protein, 151 aa, Heterodera glycines
DFLIQVIPEADRQEWAPSNTYRGIFQFCFWRFGRWVDVIIDDLLPTKNGQLLFARSKTPNEFWSALLEKAFAKLYGCYETLVGGQLADALIELSGGVAETLNVRKFLHIHKQQIQQQQQPMFSASFNACGIPYLAWDFSQSARYVAESNGA

SEQ ID NO: 134613 - protein, 300 aa, Heterodera glycines
MYQITPTINRTNIGGSWVCGLHSISYPYSWHSTIGTLDDQWIDIHFTNLHSVDEDRQRVIRVPVPQASHKKVEQLRDFLQATLKSQEKVRLKPLAHEEGYFDKPVVLGSPPHAKRLKRSTIDDLSSLPSPPRYDETDEQQSQQQQPQSPPRFDETKKEDDKVKETTPPSAAKQPIPPAPTLAPPSHPPTEAPKAPKQAAPKSATVPPQKPSVTSTITAAKTTPPPAPIPPIKQAPSAPKPSPSKTAAVPKPTPTPTPASKSTIPTPASSTKAQNIPKIPPPLAAKPKEPNVAKKSTVPTT

SEQ ID NO: 134614 - protein, 199 aa, Heterodera glycines
MGDEKVNKVSNKFKIIYTRKLMIATVLDPNYKMDFFDREMRDMYKRWIIDELSQDLDLSQNFDNSQLVNEIAECSSQDSNPVKSLLDEFVQENSFGNNENLYLDVNETELIKHEVNAYLNKPRINSNIFNYWSINSEKWPRLTNLFRRFNSAPVGSQESERLFSIAGITLTDLRNRLTAENLEKLLFLHRNLPIYNFSY

SEQ ID NO: 134615 - protein, 75 aa, Heterodera glycines
HFKIHLVLRDAQSAMKLGTNILGCDSQDCFLHKMQLVSLCFLLVKNEKLSQSVMVLKFTRIFYRFLKKSKKSLGK

SEQ ID NO: 134616 - protein, 116 aa, Heterodera glycines
MASAKLSWKNEKASFFQIQNEVNIIRLHVENGLEYTEITSSVKLAIQRLWKDSAIIAAATHKTNYHVIDSASYFFENIERLTEKNYLPTNQDILMTRMPTTGVVKLVFTLKNIEFK

SEQ ID NO: 134617 - protein, 462 aa, Heterodera glycines
MDMTNVRVDGVPESDNFVLFTTQSKKVSLITPKSGEQKPEHGEYQVEIGIKKATKIRLLVNFNVDTFGNAMTLILEKINKQRQEAKRNLVIITDMGVDDQVALAMISATELAGNVLAIGTTEQGKEAALAQSLGFEKVPVYVRRSNEELEKMFFMNPNHKNQKREENEFQHFLKNLLDERLKFMGVKVNFLVLAPPTDLTAVLLRNKKLAEAVGEILITGECKNCQDLQPPTPLSLNKFLWELPREHTKPTTYNVRMDALAALYLFEMASNGEVNVLLVSSRLLAEKFGAGDNFDKRFPKLKLISKKTMGAKIIVNREEEFEQKPHIDQQFSAAGPIAVLAIMDITNVRVDGVPESDNFVLFTTRSKKVSLITPKSGEEKPKHGGYQVEIGIKQATKIRLLVNFNVDTFGNAMTFILDKSNKQWNYKISSEKQKLKCAKRKGKSQKRRGEKEFGDNYGHGGG

SEQ ID NO: 134618 - protein, 460 aa, Heterodera glycines
MPSKQEVKRKKEQERYQRQMEKSVSPGRSPVPDGGADENGVASPRGFNTPNLSALQLSTPASSIGSKRRGRPPKAGAESITPSQNNVSSVDTQFTSATQNVESPPSKIWKVDEVDRPMSAIEAIASTPISTQRSRGGRPAKKRGGPGRSKANDSMSERSLMDHSSEATTSVALLPTVPEKINFSTVQINFATSRNFACKIWKWAAIGLYERDGETPIAPRSGPRYIETCWNDMTQFLNDGFAATYLAYLATISQRKVVVVDPMVWSNGLDRVMPYKNMTFGYDPNVPAEVILLPVHFPGHWTLIVHDVQFGTHFADSLPTTYGRLDPQLTDKIKNIISDILPSTVLTGIVNAINLTVQHDGNSCGYFVCLYAESWLMNNRTFVLPDLSINYEKKRILWHINELYGSDNVPYHPREGVPTPCPIVYRHTDEAQSTSKAAELMEVDEHDDIMIIEPQTSGQG

SEQ ID NO: 134619 - protein, 85 aa, Heterodera glycines
MSEIWKFFNKNLTDGAICKLCGKRTARTDGSTKGMWKHLEFKHKHEFSQLKNKENLSQKDVDQKQIDNFMVIKKNALEEAEECIT

SEQ ID NO: 134620 - protein, 19 aa, Heterodera glycines
GPGSRSRVLKSSGPGPGRA

SEQ ID NO: 134621 - protein, 123 aa, Heterodera glycines
MSNALSTANGIPSSQFVQNPSIMQQMAMNNHPINNKFDIGTNSLGVNQHQSVAEAPEAAHQQKKNNRKNNRHGKGGGQHKIHVSQNGHKTTNKGIKLKEKRKLRIKSSKDMGGMRSKVKKLIM

SEQ ID NO: 134622 - protein, 43 aa, Heterodera glycines
MCDYTPQKWTKRVPIRTRGKRLPNRRKSTAFHSSTPPHCLLIG

SEQ ID NO: 134623 - protein, 217 aa, Heterodera glycines
MCAFHVKQAINRRPQSMGFMQMYSSKEPNGLQFQRLVRKIGALQFCPPNYLARSLQLMRHLITHSPLETLQQGALSELLDYCELSHAEEETAVAVDEGRQLPARPLELTLELDRGIASAKADILASLNTDYGNDEFVEAMSNYYGRIGHLVGFNPPSNRNEAEEMIIEEDAKLLLEQSLDENGLLVDQYFEEMGLNEVQDENSHDVNSEDGEVDIMN

SEQ ID NO: 134624 - protein, 366 aa, Heterodera glycines
NSATVQWHNKTETLELEAEEGGEGEDSDEEIIAQHSALVPLRKSKSAFADFLRPSQIGNSKQSAAFACPIIIKKLGPEKEDEQQQKEHSEGIEELIDLARGDVLRFRMSHHLKSCASPSRSCCSSSASSLSLDGRTISRWSAPAANSEKETETDDEMCEWEEGEAEAEEEGADEKEIILKKGNSGRKRSSFGMYGKRSGGSWSAPSGLSKGRGGNGGQKRERRKREAEREEGNERKEKKEKRREKEKWKNEKKKEEEEEAQRNRKREEEEKWKEEENREVTEEKHKEPREEEEEKEEDEQGQSDGEAEENASEWDKIGGQHQNMKHLEIDANGWHLHGKADGAEEMMSTSTDEEEYNDDEENEKRI

SEQ ID NO: 134625 - protein, 180 aa, Heterodera glycines
MESPVYYASSPSKQITVIDVYDLAESINRDFEKLVEQFGNEPFDSVVRKVISALETLEALAKYNDKESSELVDLQKTIERFEQEKQQRLRDKDNLEKDFMDLEENYKQEIDELCKIVQKLKAENKRMHEQISTSPSAICGDCSDPMGCHQSAADEQIQALVELRKMTQSQKERIKELQRD

SEQ ID NO: 134626 - protein, 77 aa, Heterodera glycines
MSGSGRGMSWVGVNDLCKDLDKPNGWQLLKKYNHREVPDEYNVEFPKWKDSYKSIKKFIKYCNYLQKNEKPVQENEI

SEQ ID NO: 134627 - protein, 790 aa, Heterodera glycines
MSTSGGSSNEFPFGTSQAFGQETKMFLSGKDDESSISAIDRKLWQGKTTIKISDLEKAQNDMGKLEDGVNRAFRYLNRSLNQKVNWVKDVVANTNANFETLKVQFETLTERVDMLEQDSDGTNSGGTVSITNLNRASRAPFVTPMGNAQPNQVVPNQVPIHQLSSEDEDDGPTLFGLNMLSSGPTVGSGLEMFCEESVFAFDDWAERFKDYLSVSGKAYTEQEKVTRLKLALRDTPRALFKELLPAQTDTLDSALSELRQKLDSPQRREIAKRTLSLCKQREDETVAQFLRRLTPLVDATNSSLTGDIRIEKICEEFLDRLKPNISFLIRLVGLSRAKDLDLVRAQAEELEALLLMNKGDEASRLSQAVHALSNQSPQSNWSTEANPNNDRAGRWSSGNNVRGFRPFSGSNATRQQQRGRGGRDRSRNWGGGRQEQFSQRNWSSNPRCHYCDRAGHFAYNCHQRRANFRGNSNQSFRQGRWSNQQPRQSQGQWQNRQNPVNMMDVPNSSNTSPGFFENLAQSLLDLKIQDNRNYKNEEPRSGAMNALTHIKPKTTTMDCQVENELAKGSSSESPACGQETKTNIPKTSNWERPSVRSKVASLMFITLMLVGMILPFTTANMPHLPMHPLVCQTQNGGKIWQLPAVTGCSKLSIDHSKAPVVRTFDVFSPNLFEHSADAWACRKVRKSVRKYTSITNVPIQETLEPLMLQMTPSECNQMAENGKCSLGLLINDSGLLHIDNKLDFSPHMWLIGSFSWSTVSTENCYHFKTKIMSKYGSSVMQSPLGSVNNC

SEQ ID NO: 134628 - protein, 42 aa, Heterodera glycines
MSPYIFFVGYVVLATLLLDATKTCFHQFRLLCAKKLETYFCV

SEQ ID NO: 134629 - protein, 60 aa, Heterodera glycines
MRKAKCETPKNANNAKGEMRNLGPSLLCTTYYMINNYEVGDRKDGAQTQTNTFLGSPGLL

SEQ ID NO: 134630 - protein, 21 aa, Heterodera glycines
GPGSRSRVLKSSGPGPGPGRA

SEQ ID NO: 134631 - protein, 133 aa, Heterodera glycines
MAQQFQPQQAQNGFTFAPPINGGSDGGGNGGITPVPSPNAAQFGTPIQPQQPQQYFGQYNLQPQQQQQNNNNNFNGQFNGNGNGNNNNNNQHETFEPPTPVLHAVPNVADPLQRPRQIYPGVQQGPSGPGKLI

SEQ ID NO: 134632 - protein, 240 aa, Heterodera glycines
MPKLISIELANWAVEKECETIQSLDKYLQNDKIDEYSEEMKKFGQIVLQICKQKEVTNAQLIRMTETLGPKILAQLAMLEQKIQQLTNSTNFPQKAAPLDNFGTEMMELAKEMPDQMPIKQLKALKTHLPLPSDFFQLLLTSLSLVNSENSIKHENAKESLALSDYLINTNAPVLAQRRHRRGIPSKLVKLGLILALFAIGTKTESPKIVMLACYLGCIYSLYFLYGIWKWYKEVMEKID

SEQ ID NO: 134633 - protein, 28 aa, Heterodera glycines
MNKSRIIRMKGDGSPTPPRKCPRALSAE

SEQ ID NO: 134634 - protein, 74 aa, Heterodera glycines
QRPPTSRGGEIRFEPRQITAAAEEDQEEQPGTSGTIKMGTNGRHSSMTTRCKNDTEKSSTKSFTGQDKKWKTII

SEQ ID NO: 134635 - protein, 268 aa, Heterodera glycines
MYEMKVRKQKRRNPNIVFRDSFNLMPCALAALIPSYGLDVEDKPFFPHLANRPENYGREIHPTPEDYLASGMMPSKRQKFDECYAAHRHEPFKLDEALASYCTNDVEILMAALVAFRREFFEITRRQDYVDGIDNKENHDGIDVLRECMTIAGACMRHFRTNHLPDEHLAIVPERGYDNAQNQSLLALRFFHWYAKEHGVQVQTAHAAGGEKRIGPYSLDGWIEAERRAIEAARGTGAKGVTPTTTCCSPMGRLRDKCANGMPSGWNF

SEQ ID NO: 134636 - protein, 167 aa, Heterodera glycines
MYGFRLGINETICKKQLNLKEKQLNLKLNIVSDKEELHHERETFEQKHMNMGKHNMEMDHKAILGSEKNTHEFDELPTEESKKRLRVLAKRMDTDKDGFITLEELTDWVKNSLMTLDQEETKERFDEIDEDKDGVITWAEYTQEAFGVSDSEGDPQKLLTDPDDMKV

SEQ ID NO: 134637 - protein, 91 aa, Heterodera glycines
MRKEFFREQQQHQFQFVRWPQPPRKKQTDISQFLLPFGSVLGTLFFIFVVGYFLNHMNVSEQSKRRRQPQNRAEEANEMGGGDTNTEDNEK

SEQ ID NO: 134638 - protein, 98 aa, Heterodera glycines
MAHEQSQSEWYQTEKTRFGEEYDKDGDGFLDGDELRAWLVPDLSQTAKQEAEHLTENADTDKDGKLSIDEVVEAYKIFVGSEATNYGEHLTSIRHDEL

SEQ ID NO: 134639 - protein, 116 aa, Heterodera glycines
MDPVAADSTLSKSITSATEYRYTRTRYSCPLISHFNVEVDTKYLDDAGTSENVFELSNSELKNRTVDVLDFVSDPIPSHDYLPEEDPKLFRSTKTQRGPLSDNWVANFVREGKPIM

SEQ ID NO: 134640 - protein, 304 aa, Heterodera glycines
MDTVELDKSPPITPKVSSSRSLLILVFHGDLFPKTSADSKITDINTFRSTLDTLIAMHCPQLRGQIHVQCVTCGAELLQTSQVLSGVFPSGLGTFHPSFVPLMAADALLFNDAVQNATLNANRVVNSFIASQVGKSDASDLEIFVVGDFIGGILMYESLARTALTMADQQQRDGDGCASLTSPVAVDQQKSPIPSLSKSPASTLSSPFITQRPNKDKDSSLSAIRTNRSATAESLSFKPSAAFLLGCPLALLLMQRKLNEVEQQLSLFCGQLFNLFYPLDLCAARLEPVLNPSLSALPALKVPR

SEQ ID NO: 134641 - protein, 18 aa, Heterodera glycines
YREAIPEGFGLPINLGAS

SEQ ID NO: 134642 - protein, 121 aa, Heterodera glycines
MNKIWICNDVWMDILPSFDHAQLGLKMALISPRFDALVDKHFDGKSELTIWRPITICKDAVAAVPNLAVLIDQGIQTISCHFRCQPFAAQKIRFNNLGLENTNTIKSNSFVTSFSGTWPFL

SEQ ID NO: 134643 - protein, 93 aa, Heterodera glycines
MLRQKKYREIVYSKKTRVRRLINHFAKHARRKDGILLFRFIEGHSGPIVARELMGELFETYKKDMHEEDDEQPSEAVLVNKKDGSLDNDPKNR

SEQ ID NO: 134644 - protein, 51 aa, Heterodera glycines
MNECGRNVPMSCRPCCPPIWALAAHSPGSAGMPAGPSRLMTKYIEEKAKKR

SEQ ID NO: 134645 - protein, 76 aa, Heterodera glycines
MGHRRNGTKKMQIVKSDENPLPIPQNPLPNKDLSRLNRDLSKVIYIDWDPQAFQLNPENVLRVPKWEGNMDDTTLA

SEQ ID NO: 134646 - protein, 400 aa, Heterodera glycines
QKPQKSSKFLGILSLFLFLIHILRYKRQKEKTPLVGLMESALPLLQERLSTLLPNQSQPSCILQKQILKIFYCLNQFTINLQILSMDQFFTINLQILSMDQFSKWLHLFLAILEREVPNECNTLPEDERAETLWWKCKKWAIKIIQRIFERYGNKGNVDLSYSDFYGNKGNVDLSYSDFATQYSKDLVLPVITSLMVHVLNNFINGHFVSDEVLYFTLSHLSDAMNQAQVWQALKPHFEPLLKSVIFPLLQYSKEPLLKSVIFPLLQYSKEDEQMWADDVEEFLRFKYDVYEDLHHPSSAASTDLHHPSSAASTLLQMLCKRQGIMDSLLVFIIENLSSTSDVRQADGALHMVAIVSSQLLKLKKYRKVEKLLDAKKYRKVEKLLDAKEIARTAHEVGLL

SEQ ID NO: 134647 - protein, 343 aa, Heterodera glycines
MCEKTLNDEGEDGCDESTKAHAAKMLEVFVLQCQGRASHFIPDILRLVFNQLQKESADLKLGQLKPQLLIILIAALYSDFQLCSNLFGQLQFKTEIGTFEWLIRELYSNRKDFEGVHDRKMLIWLLCRILADGNLPALFINQPEKFMEWLLTLFEELQRCIKEIAERREDDSDSEDEESSEEDDDRMNGELKDSDDDVDEGEHIEETLSKRGNVKFQENSQYLMALEHERNERKERRTRRKSSTNKSMDDQTEGAPGDILSLASETTDSEEHHHFREMNTRNSPLLVSISDQQRIGEARVAKLNHLMEICTREENLERSKRLAQAGGYSFDANAPVPTTFSFS

SEQ ID NO: 134648 - protein, 107 aa, Heterodera glycines
  unsure (1)..(107): unsure at all Xaa locations
ELKDSDDDVDEGEHIEETLSKRGNVKFQENSQYLMALEHERNERKERRTRRKSSTNKSMDDQTEGAPGDILSLASETTDSEEHHHFXGVFIQRKKSTEISFSINSAF

SEQ ID NO: 134649 - protein, 239 aa, Heterodera glycines
LTFFFYCNHLTSALGFVNLALYAGAYTPMKRIHPSCTWIGAIVGAIPPLCTWIGAIVGAIPPLMGYSAATGHLDSAAFVLGALLFSWQFPHFNALSWNLRADYSAAGYKMMCVTNEGLCKRTTLRHSVALLCLCSFAAPFTHLTTWTFAFTSLPLNLSMLYLAIRFYLNTDKKNATNLFRFTLLYLPILMALLYASKKNATNLFRFTLLYLPILMALLYASKDGCQDCRYKEIAKTIRV

SEQ ID NO: 134650 - protein, 117 aa, Heterodera glycines
GSQTVVSLPSTWKKPRKKTKKAIKFAPEDVMDKGLGYDLEDDFIDDEQAYDEWVPTTMDTAKRGHYVNKGPLEFRQIDFDQTTSEEDEEKDGEEESNGTRRETSILEADEEEAMNME

SEQ ID NO: 134651 - protein, 361 aa, Heterodera glycines
LFGVPMFVGCCAILWIYWDIFKKPPKPRGPHKKKIFISGNSWLAVFNLLAPSQVGQGIAMISHRFDNIVDKHFETRRWTLKSMGIGRKIEKNGTKKLKIVNSVGLPLAIPQIQLPHNVSGFKRITISFIDGKAIAFLQRFRPLFASCPLNLFIDTTSDRILESILHNIWPLLSKNIDGIGLSATIYRRLRQFVPSILNECPSLRIVSYVDDLFAEFPADDNAMASDGQAMAKWLFTPRMDDVPKVLRCWLNKDDGDLASKIEAFKAAFANASSPANSIVYLSFPSPFASVVPFDLTNESTREQLTLKRTDFSCRFLLVRCPIARDESKWTKWEKEAIGRIFFDQWNRIDIRRGWRGMKSGK

SEQ ID NO: 134652 - protein, 88 aa, Heterodera glycines
MPNPAYGMPNPSHGMPNPAPSSMAVNNGPINCSPSKCNPCNCSPPCFVQQTAATGEGPGGGPAISLVLAAVTLSLLGLLTVHGMMVLP

SEQ ID NO: 134653 - protein, 279 aa, Heterodera glycines
VRERRSSDSFRLHVLYLINDWAHYCQRKKLDSIRQMLSRYVPKLYAYACSSPMAASNNTFVDKLEKLVGVWEGHKYFDDGCYKQLRNPSATMLAEQTATVAEQHQLAAEVDKEIADTLGAYTKQHKEYEQHVLTKVAEREKALRECRGWKMRAKAKAENERKRLAAERENVEQMRRRSTRFDQTIPLPSTNSPHKIPSLLEINPPPHSPAVHQQPCLGNGPSSMGTPFPPLPPTGAAPPPMAHFAPPQQRPPVDLIPKAPYYELPAGMMVPLIGIEDIT

SEQ ID NO: 134654 - protein, 126 aa, Heterodera glycines
MDNKTDLVHTLFSYLSEKYTVFDRIFVSLQLDDVNRMAHLGQSLPANNDEMENAEQIIMRLRHKSPYFVARIDGRTQTVFFEEEAKSSKQQMAAQLQSKVDTAMADVITLASIVHSYEDAVRLNTN

SEQ ID NO: 134655 - protein, 116 aa, Heterodera glycines
MSRYLKGNPPELNFTVESPSTLLDNYVSMSTVAFGQLWNGKMGISDGLLIIQYNAFKPRSEAGQFQNFVPHFTVESPSTLLDNYVSMSTVAFGQLWNGKMGISDGERSFLKIPLFV

SEQ ID NO: 134656 - protein, 88 aa, Heterodera glycines
MPKQNEIVLKYSFLDLTWFLDIEAVFYAISKTKKCLVVKTIFHISLHNFVSSARIETGIRPLERAARALQEGMERKNSYFWDFFRNQK

SEQ ID NO: 134657 - protein, 137 aa, Heterodera glycines
GDFAVVCSVDNSGDGNVSALGSEVIPLDQCRHPAMCMLIDASSVKQCAISVPDDLVNYFVHGEDTFKMLLEAVSKSFFAGALKKVQILKDTFLLHSRQKMLLLNRHEETMKMLAAQEPPDEFFEEFEVQTAMMGLGW

SEQ ID NO: 134658 - protein, 266 aa, Heterodera glycines
MKRAKDDDAEEGRVGEESNVDHPEDHDATAADCEQQHLLLTSNGTLSAASSSFGVVDGCGGGGGRIYPGLFAEDDAAEHKGNTRRSAQNGAGGPAGRSNNIGPKGSGWPPIKSVTMEEQAEDDDDVNGDHKTDDDEEEEENEVAEEEPLYPTRGGTMRNNNANSVPAVAQKIVSRRSLPASFQHQPQLQKRWSPQQQQQAVQQPWQRRRHQAVVDDDEEDDQGGKSATDGGTSAGFWQFFDSNFEQFVARGHGHRRPTNGGKWEII

SEQ ID NO: 134659 - protein, 104 aa, Heterodera glycines
NGVSKNRNYAQKASQTILTLPIPSTIAFIHPIMSAKIIRVPKIACDLSLAKNGLSKNRNYAQKASQTILALPIPSTIAFIHPIMSAKIIRVPKIACDLSLEKMV

SEQ ID NO: 134660 - protein, 88 aa, Heterodera glycines
MGSAQFHAAQLHKLFMDTAGISEEDEASPVPSLHNQPQQQQHIHHQILPHHRFVDAINRSPPLPTAHALPAMQRRRMATMATTTGLAS

SEQ ID NO: 134661 - protein, 41 aa, Heterodera glycines
MAPSHKLFFQLVILLVVASHDISNGLSLGILELVLWFVCVG

SEQ ID NO: 134662 - protein, 52 aa, Heterodera glycines
SFPIVCTLILRWIFAPHNCLSTPNGHLKKSIFLFHKYFFRKCSETHQILFTC

SEQ ID NO: 134663 - protein, 136 aa, Heterodera glycines
MFVPIHLTDGRVISLPIDSQSTPFELCEMLCQQICLKDAFGFGLFLAVGRRFIRSLGVGSECVIDAIASLETKSEKNWRIFFKKELFRAHQSESDDPLAIELAFRQILGGIHSKEYQCEKEDDLVTLAAQQHFIDI

SEQ ID NO: 134664 - protein, 130 aa, Heterodera glycines
MAGRGTTIVRKGISWLEEVQPRTTGGRGATMIRKGTTLAEKGTTTEGSKRYNIDWKDNTLVCKCTTMARKGTIAGGTSITMAVTGTTMVRKEPRVEDLLPWYKEAQPWLEELKPWMDEVRQWFEKVTPWM

SEQ ID NO: 134665 - protein, 100 aa, Heterodera glycines
MFAGPDPAGLILQILFFPKNAGLRTGILQNPAQDPVLRAFQLAILATQSHYFFLDGENEIKEKKINVIVVRCENDRFGRAIQAGQWFTQTVENQMKYMIK

SEQ ID NO: 134666 - protein, 58 aa, Heterodera glycines
PTFKQNSRVFFVKNNFMTVALGKSAQDEQANELHKVSALLRGQSGLMFTNAKANEVQR

SEQ ID NO: 134667 - protein, 93 aa, Heterodera glycines
MEIFDEFIIVYEQVIGKFSDQFTGKCSFEEITQFAALEFLTTDYPALKITDIGNASSSNPSNEEPLAQIVRWDWDQNGAQQIIQVIKYKEIFK

SEQ ID NO: 134668 - protein, 84 aa, Heterodera glycines
MANFLKANCVIEFTVARRKKSMTERYPNSNRAIIGAIRRVLWYTLWPARGHHRIEVRINDNGQIIAKQGISGQFSNFAKGSPAM

SEQ ID NO: 134669 - protein, 105 aa, Heterodera glycines
MSGAGGEGQADGVTQNAFAHIFDHIAKCHQDKRFLVRISYMEIYNEEVRDLLAKQSAAGAQRLDIKERADIGVYVRDLLNVTVASAEQCLRIMQLGNANSQNIQK

SEQ ID NO: 134670 - protein, 95 aa, Heterodera glycines; identical to SEQ ID NO: 128210

SEQ ID NO: 134671 - protein, 146 aa, Heterodera glycines
MVNFNYEWLNPPLGVLGLPLPILPISYLSFISFTLIHFASSQRKEIEKHLEQGKHWLSKGQFQEALQHYHQAVALDPTDYQIYYRRATVFLASGKVNAALPDLDKVVELKPDFVATLIDHGLRHFDSRDYVSAEQMFNDAIEVSKI

SEQ ID NO: 134672 - protein, 16 aa, Heterodera glycines
MAVGRQLLLLRLRPLR

SEQ ID NO: 134673 - protein, 141 aa, Heterodera glycines
MVAARFRVSTGKFTNGRAKRAISFPGSHPSFLCAALADKPNLYIIPLIPPSKKENASSPRCAPIRSTLASKARFIQTHPCGDFIFIGAENKLLIWEIHSGQLLSQVEAHLRDISAMRISSCGHFLVTASLDGDAKVFMTAK

SEQ ID NO: 134674 - protein, 98 aa, Heterodera glycines
RKTYFVFMTYGFESPGERLVWILLENNERSVSATDEVPSLELAVATKYVHGKNQNSDTLLQLRSLIANRRRTPHAGVGFWRWAITMIAGVSEIVIHFF

SEQ ID NO: 134675 - protein, 347 aa, Heterodera glycines
MVDILEVLAHSEKPLENDILFLFNAGFDIAYIRNGWVYHTEFDQPQRIEPGAIQRSGDNVLALAKALIRSPYLKQPADFNEGSNWVFFDVVGLFTLFFCTIPSVWSSLFWSGVVFSTALTQLVDLWLLSLPLSPSTYAFLLHCQAAFWHQLLALFAMVAVGAFVVCVLSVFNLTMSWYALPELVFPLYILPMLTASIAVHNAMAQRARRKNNLVYMSRRLNFMIKCMTAVFAFAFLVVATTSVGVPYKFSEDEPRIRRLIALHATRRIYNFDKKIVENRISSLNSTDSGLFVQTLDYRGPDDLPEHTFLQGAGQPDCSHTSDEYCQLPYYTAIHELFPPEYVEEYFL

SEQ ID NO: 134676 - protein, 146 aa, Heterodera glycines
MDLPNGQQDLQASTSKSSEHLLEKFTISAIIEAHQPNDAKCVAEMPDGNLVTGGRDGLMKIWRKRDIYENCETIPQKDCLSINSVAVAAKSVKGFLVFVGRKDGSIAIFSPSNAFKEPLKVLQGHKSNVCTLLYDENTGLLMSGSW

SEQ ID NO: 134677 - protein, 94 aa, Heterodera glycines
MTSRILVIGSTNIDDAEAHNMVFDMSIFGKCVETNLPIFSERVQLVRKYALVKEIYLTENDEKELAHDTNSLSGLTLPSLGRLGHVRYKCLCFC

SEQ ID NO: 134678 - protein, 290 aa, Heterodera glycines
MDPNQLKLILEAVLKASAEQNNSSAALATSIDARLSTFEYDPELGHTYDVWLKRYGQTIAQDGQALSGQSKVQLLIGKLGEAEYKRYCDSIAPKTQNDFNWDETTAKLKKLFGETRSLFLRRFDCFQIRQEAQQDVPSLIAQINSSCENADLSLSKEELKCMILIIALRDEFTDLRQKCLQRLEDSRTSGRSTSLQELGEECRKYQILKESALSLGSNPCSTSAIRAKPQQIKDKQKPKTKPQQSHKGQNFLPKNSTAPKGKVDQRDQPCYSCGGKSHWQKDWWFQKLDV

SEQ ID NO: 134679 - protein, 152 aa, Heterodera glycines
QIQTASCTVLNPAMARCNIPKIYDWGTKTVYFQPQSQGANDERAFVGYIYFVPPTLDPMRLDIGNIYDWYKNIYFVPPTLDPMRLDIGNIYDWYKNPMPYQVMPITWYPRNFTNPDLNYMDQTWHISDDALYGVQLGLYVIGYKEAKDDQVL

SEQ ID NO: 134680 - protein, 20 aa, Heterodera glycines
LGTLMLFLSKREMNKIFKNF

SEQ ID NO: 134681 - protein, 51 aa, Heterodera glycines
MALKKWAANVQDANVGTQMSGRKCPNLAGAANVRAAKAGILVSTSTAKAAI

SEQ ID NO: 134682 - protein, 61 aa, Heterodera glycines
MDTFMDIEKVSEFAREIIINERVNESVTYIKGLPWKIWAQINKKMKALTIMRNVWPFSFII

SEQ ID NO: 134683 - protein, 92 aa, Heterodera glycines
METGRLFCNLLRKGYIIGDRQFNGDWHIKRANTVYDHDVNRQRVSRAQLPAVIDEIMNEANEGARAFILANLENVRKVNMGLNGREGSVKKN

SEQ ID NO: 134684 - protein, 174 aa, Heterodera glycines
MLEKLFKDQDKGTVFISQKNTVQTAKTFVDFYKQSMRNGEEGIVVKAFNSLYRPGSRAERNGWKGRGGGRWFKIKPDYGVQSALDLALVGIRYENNVFSHIKSFLVAARLPGPSTNFHLKIVAGITSRLKALDFKRLTELLGPKKALLHKMPTWLERNNGAGKYDLFVPKHNIQ

SEQ ID NO: 134685 - protein, 252 aa, Heterodera glycines
MLFSFFLFQFYSVVYSIASKRSPEPWGDTLKSIDDNARDFKWPDRHEKGTWAAVAATGEGSRARAETGVNREEGSGMEEEEEEDSHIVRAEALSEREGGVAVAAANKGQTQKTSDDNNDDRDGAHQQVVVMARGGEDARAKAEASGGPRSVVETRISDNQRGGERLALGSAIIHRQGRRRGGGGGVGGRNRNRQRGKEEQGEDEDLLPTIISPPPPAYMELNNRQKGNEQVTLHNNVHTMSPVSYPYLLRNQ

SEQ ID NO: 134686 - protein, 363 aa, Heterodera glycines
HGPGTSIRFPISEVIHRMSSASSPVPSLILNSGFPMSQIGFGTWMCKPTEVNEIVKSAIRNGYRHLDCAFIYQNQSEIGAALKDMLQHGEIKREDLFITREDLFITSKVWNTFHSFDAALANVHKSLEQLGLDYLDLCLIHWPMGYKYLDLCLIHWPMGYKEGTELFPKDAEGQKVFLSDVDFLDTWRALEKAVALGRVRSIGVSNFNSAQIQRIIDNCNIRPSTFQTECHVFFQQKKLRTTFQTECHVFFQQKKLRTFCKNNGIHFVASCPLGSSADNAFRKSEYPSVFEHPTISEIASLLQKSNAQVALRFLTQFGVVVVPRSSDAQRQRQNLDIFGFSLNDQQMAQIEALDTGKRILYLS

SEQ ID NO: 134687 - protein, 48 aa, Heterodera glycines
MKLDYLSQSKKRMVLNFLFSLTGLLFQLSRVFKRPDDWGRRDPSRDPD

SEQ ID NO: 134688 - protein, 78 aa, Heterodera glycines
MLFVRFRSVFGPYRAFSEFLSANRTCLYDFHVKNGAKMVEFAGFSMPIQYDLSVSASDNFKNGPRITLFGDERRKDWN

SEQ ID NO: 134689 - protein, 56 aa, Heterodera glycines
MGYGSQAVRLLLNFYGRRPRHVSTTTAAAQCQNGEDKNGGNDKEEDEEMSRVQLVD

SEQ ID NO: 134690 - protein, 21 aa, Heterodera glycines
TTNSQLCAVRALSASLSTQTS

SEQ ID NO: 134691 - protein, 296 aa, Heterodera glycines
MISAGQNLCPLTAMIIENEEKEPEKYWDLEMIGVKDNPVEKDDDVTLKMFQDSVYRKDGRFKRVPFGVISSPFLLGATVRYHLENEQSELAREVKRNTFVDNIFVGCHDFDESIEKYKNLKVLFEKARMNIREFISNSERVNNEIPEKDRLVKENPKVLGINWDIKTDTYQIKFPNVHETERISRRSVLKELNSVFDPCGWLSPCLLPAKLFFQSLWEEDRKWDDKIGEEKQKEWKYITSLWENKSIKCIRRIVPDKFNRAELHVFVDASKDAYAACVYLRIESEKTQINLLYARS

SEQ ID NO: 134692 - protein, 774 aa, Heterodera glycines
MIENALDQQLLCFVEMCFNVLKGRVPLGKRQIQRLGELKHQLRSLARARCAKTARRVLLLNHQQQQQQQQTGAGFPMVASMLASVLLPESAKKMRHAMRMFLVPEDVFQSVFVQPQAAAAAAAAADGADGTPIGLLRSRIQQIERSRELNEEQKAAQYHQEFKRLNKLVREQEEQPINVRLQHEKEREKNAATPPPPPPPQTIDHSTPKRLEKNIVPSAFGLRRQRHHYTQKAGALSNRRPAQKQQRKAAAAAAETPNSSGNGETEKEEGDVDDGEQWDDAQSSSSTASTGGAAAKRVLRARDGEAGKGGGGGGGETADRLQPKHNYQMTKNALITHIRKKGHSLGVSDQGKVLRADGSEFKTSNVEAIVSHLLNRDKRSEFKGPPVQTDTMVIDRKKEQLLDQLYKDVNSSVSFTSVEPLLREAKKVNNQMSRKDVVDYLATQRTYTIHRQAKRRYKQLPTLASGLHTEWQADLSVFDKLSRENHGYKYLLVCIDTLSRQLFVEPVKSKKSSDMVAAFERLFKRSKYIPWTLLTDQGLEFKAKEVQEYFKNKNVKNFFMYTSPRIHAGMAERANRTIKERLYRYFTERGTQKWVDVIQQIVHGINHSYNSSIKMRPVDVNFENAEKLRKKLKQNAIGGTAELKRKQPLPRFQVGDRVRIEKYKHVFQKGYTGRFTNEVFTVAEVHTDRFPVTYRIRDDDGSLIKGRFYANDLCRVLVRKNDDDDDDDDTLYDIEKVVRKRKKQGVEYVLVKWKGYSQRHNSWIPASSMTWKNI

SEQ ID NO: 134693 - protein, 217 aa, Heterodera glycines
MDAILATDWLHNAFPERKTTTTTTTTTTISSVGEELDDAVKADEQISWLKIIEEEEERGNELQTGEMEVERAKEIEPPKRQHLQSKCSCNEKQKSVPLIDFLCQHYKCSVKELHVLLQTLNKRREISEMLRSQLQLRTNHLRPAWKNFRVHCNELTIHPAQTAYAMRGYLGITVRIYYYVKHGVKLVYPQLPCVHQFGGGDHCSLFPLECLSVIKDA

SEQ ID NO: 134694 - protein, 31 aa, Heterodera glycines
MAPVNQRHEQKGQKEGENGGAEHTNLDVWEE

SEQ ID NO: 134695 - protein, 244 aa, Heterodera glycines
VWLLLVTMPISCIIGNTLVVAAVLSNKSLQTPTNYLLLSLACADLMVGTLVTPFHIYMTINSLHWHLPVFTINSLHWHLPVFTCYIYCVLDVLASTSSIVHLLLISMDRLVAATKPADYKTHKLVAATKPADYKTHKHRRRVYLAIAFCWLFSLCLSLPLVYLAIAFCWLFSLCLSLPLVFGFNADTERYLLEEHHCGIYSPTYMFGSSIRLLFAPFVHVFDLRVPLFQLNNPSDQLTFSYIFF

SEQ ID NO: 134696 - protein, 64 aa, Heterodera glycines
MYDSPSYGSGYSPSYYGGYYGRNGGLGYGGMYPGYGGYSTASYYGGWPYTAGYGAQNGYTSPWR

SEQ ID NO: 134697 - protein, 548 aa, Heterodera glycines
GGQFLGFGADLGNIATSAMETVIGIDQKNRNMITWEKPLLKKIEETVIGIDQKNRNMITWEKPLLKKIEETAAEHASSLNESEREQVRSAIYGTGGGGSNHFTESFDQAPPSSVILDAVTTKTDKDGSQSVAVPIWWWTRGKGRSNTDAFHTTAQGQRKRREFVESAEQNCRERERKKGGGRERETRGERQRGGKERPGRESKKSMRRLSELISGWERPSRSSLGQLLTFARRDSVYIARKKLAGLKDWALDLIAKLKLIAKLKSKQGLAIRREARATKLVATVMASKQGLAIRREARATKLVATVMAVFLICWAPVFLICWAPYFSMNLYKIYKLYNDQWSHQSEFTFHWLSALGYLNSSLNFFIYSAINKKFRITFWRLLGLRRKFRITFWRLLGLRRSQRKKAWLLPPAQHKKKPKEDGQRQRATTEPNGAEPKNAAKQRNRHLSIRKPQIVVEDLANPIQTSMTISAGGETTYRRSSDDRSSDDCIQRSCSEVFGGGIVFPSGAHHNSRRGSDMSNSSASLQLHDIHQIEAQSAEEMAQAEVKP

SEQ ID NO: 134698 - protein, 28 aa, Heterodera glycines
MKVKLISGNKARWCSWLSRESHTLEVAA

SEQ ID NO: 134699 - protein, 120 aa, Heterodera glycines
PIGPPIRSRPSEVIVHLRANSYNISAFVPNHPGGESVLRLVNGQDIEQYIEGRKCVLGICHRHRYAYQVLRQFEMPSDVIVGVKGKFYNISAFVPDHPGGSFVLRAINGQQNVEQYLEGR

SEQ ID NO: 134700 - protein, 68 aa, Heterodera glycines
MPMANAQNALSSLNVLLNVLTIDQPKNGFSARVVWHKCADVVGIGTEMNDHFGGTASNRKFSEKTMKI

SEQ ID NO: 134701 - protein, 67 aa, Heterodera glycines
FFPVLPGPGPGFFSHLTWTWISWTKIQENPGPGKIQVVKKCLDLDPGKIQAWIQVQVELYKGAAESL

SEQ ID NO: 134702 - protein, 52 aa, Heterodera glycines
MRFASIRFALFLFLFLAHFGANETTENGEGQLESEEENRNELRKMPFEEQEK

SEQ ID NO: 134703 - protein, 69 aa, Heterodera glycines
LPFPRPNCAPPPIFQRFEAGARLESVKPRPTHRAAVRPLQAQMELEQFGLGVRRTMGMKEQRNGRREKQ

SEQ ID NO: 134704 - protein, 77 aa, Heterodera glycines
MNLRYNFALFLLFILAFAAFSDGLSVDEGIDEEGLDLKPAPASKVLSRAQRIARRCVRCKRKWSWSSSDWGYGGPWG

SEQ ID NO: 134705 - protein, 152 aa, Heterodera glycines
MYLPFPLICPFLIGLIVSLVMCAASEVTQQEAAFVSFYSTLILNCVSPAVYCVLAICLYVRRPKNNNTQSLSLSQLSLFRSIFVLMLLQLLGWTSNSLSLFFFQNLFAIASLSDLTKWAINFLNTKKPFKSNSVHFVEVLATPKEAKTRGWW

SEQ ID NO: 134706 - protein, 98 aa, Heterodera glycines
MTNLSRSNPMATIKAEETFLEKTGRSIGQKHWSKRIRFWPVKTMKNIGKKPNCKDTDRFEIVTKTKSKFNTMPTEAIKVRTVIRMTSKGTKPEEERNE

SEQ ID NO: 134707 - protein, 174 aa, Heterodera glycines
SVGAEVVDNAFLGLNSCVFAYGQTGSGKSYTMMGTSEEPSGKSYTMMGTSEEPGIVPRLCTELFERLARETSEEKKFKLEVSFFEVYNERIRDLLGSPKRIPKRIPSLKVREHSLLGPMVEGLSVYKVTNYDQIERLINAGNGARTLINAGNGARTTAETLMNERSSRSHRWGQ

SEQ ID NO: 134708 - protein, 16 aa, Heterodera glycines
EAIPEGFGLPINLGAS

SEQ ID NO: 134709 - protein, 48 aa, Heterodera glycines
LLFCPFIPIAYCFKVLSLTLLFCPFIPIDHVNSFSIHLVSYFMKLYII

SEQ ID NO: 134710 - protein, 93 aa, Heterodera glycines
MYLFYQNLFFVFSRIDVLNSLTTEDRKLLVRLHSLEILGVSKVFDGIKTAYLALKHRKNRNHRQRIVVFVGSPLDPLLAEKEMVNTYWALYEK

SEQ ID NO: 134711 - protein, 153 aa, Heterodera glycines
MCRLRMALPPSPAPPVEAAHSYARQPQIIWPISTTFSASTAAQLLLSSAALDDAFATSRSVGDVQHQPLPTTTATSASNAVPAQPLHQLVRSRWAGMRATLANMLADKYLCIRLLDHLLQSGKASRFITGHTLRLFLPLVLSVPTVGDGGGLS

SEQ ID NO: 134712 - protein, 142 aa, Heterodera glycines
MCRSSSTGRHCPGRISADRNWHRLSMPRLPSSQRSNGQRKVNHRLRVNGQRKNRTLDSTKNCPSLGTASLKSGCSQNFKSVLQKTQNEIIVKAKLNFPTMEMDVHGKSQNQRIGTLTCIFWTKIQDKQTLLFIPWLILTICS

SEQ ID NO: 134713 - protein, 87 aa, Heterodera glycines
MVKLGLGGGGGGDVHSKEQKMSKMIDYYKLKKANPSFCDKEIAGFLKISSATLKRWNKLMLRYNDDLFCALSISCFSKNLSAKNVIK

SEQ ID NO: 134714 - protein, 199 aa, Heterodera glycines
EEIGSHDGMEKFIHTDKFRSLNIGFALDEGLASETDTHSVFYGERCAWWLQITCPGAPGHGSRFVENTAGPKLTSILANFNAFRERQRHLLLADPNLRLGDVTSVNLTKIEGGVQTNVIPAQFVACTFFRTNSSICMITDRVDLVYEIHEQMEAMIANWCKEAGPDVTFEFVQKGMCKSLTPTDASSPWWHAFSSALSE

SEQ ID NO: 134715 - protein, 133 aa, Heterodera glycines
MEKEGNGKRGEWKKRGMEKEGNGKRGEWKKRGMEKEGNGKRGEWKKRGMEKEGNGKRGEWKKRGMEKEGNGKRGEWKKIFQFFGVYFQKFFCSFLRATVYSVYGINLQKHEKQCLLQIDVLHWHIGHGHLLTE

SEQ ID NO: 134716 - protein, 146 aa, Heterodera glycines
NGISNNRNYAQKASQTILALPIPSTIAFIHPIMSAKIIRVPKIACDLSLEKNGLSKNRNYAQKASQTILALPIPSTIAFIHPIMSAKIIRVPKIACDLSLEKNGLSKNRNYAQKASQTILALPIPSTIAFIHPIMSAKIIRVPKIA

SEQ ID NO: 134717 - protein, 111 aa, Heterodera glycines
IFYWSVITLVFLNTVCVASEHHGQPEWFTEFLSNFLFVIYLNFITNPKLFVEYAEFTFLAIFISEMLIKIFAMGYRTYFTSKYCIDTFKFIDFFFILFVCILSDLIVLIAL

SEQ ID NO: 134718 - protein, 130 aa, Heterodera glycines
FFLIFLTQNWYQQLPSLVWPYQTILRYLKRKQKKFLTKKWLSLFSHFFTANLVPTVAFSCLALSNNLTIFETQTKKILDQKWLSLFSHFFTAKLVPTVAFSCLALSNNLTIFETQTKKILDQKMAISFFS

SEQ ID NO: 134719 - protein, 30 aa, Heterodera glycines
MSSLSLSLSLSLSLSLSLCSLVCLLLSLFS

SEQ ID NO: 134720 - protein, 30 aa, Heterodera glycines
MGSEEFVKGTPRVREEAEKGYETHQILFTC

SEQ ID NO: 134721 - protein, 94 aa, Heterodera glycines
LFEYPKRTLEKIDFFVFGAVPPNRCAQIYGETESFGNSFPIACTLILRWIFAPHNCLSTPNGHLKKSIFLFHKYFFPENALKRTKFYLQLNLAL

SEQ ID NO: 134722 - protein, 361 aa, Heterodera glycines
ARVLKWYGSGKGAERGGLAADGDGSYGAGKGADSGSGKGAERGGLAAPGAGKGAERGGLAAAGAGKGAERGGLAAAGAGKGAERGGLAAAGEGSDGSLGLSAGSGGSGKGAERGGLAAAGAGKGAERGGLTAAGAGKGAERGGLAAAREGSDGSLVLSAGSGAGKGAGAAAGEGKGAERGGLAAAGAGNGAERGGLAAAGEGSDGSLGLSAGSGGSGKGAERGGLAADGDGSIGAGKGADSGGSGKGAERGGLAAAGAGKGAERGGLAAAGAGKGAERGGLAAAGAGKGAERGGLAAAGEGSDGSLGLSAGSGGSGKGAERGGLAAAGAGKGAERGGLAAAGEGSDGSLVLSAGSGAGKGA

SEQ ID NO: 134723 - protein, 60 aa, Heterodera glycines
MRRNSVQQLQQNEQKSPLHSPMANKSVPFYECLPPQREKVLREKQQIALINYAAFDRAVF

SEQ ID NO: 134724 - protein, 55 aa, Heterodera glycines
QLINERGRGQTARIWLGKPRESGQIEYGRRRGGRRPLPLGRAKRIRRRPDQKQHN

SEQ ID NO: 134725 - protein, 203 aa, Heterodera glycines
MKLPKVNTLFAKVGLDLAGPIPNHEEGRPARFFVLFAGSQVSDLSEFKQKLVNSLRTAWEAAAGESKQAQQRAKAQYDKLIRCLEIKVGDRVLLRNYAGKVGTSKKFHLPWKGVFRVIKIEEVMVTIVSCNAPQANPKVVHINQLKKCVEILGPACTAPNVSDEEKLSLEKADAVEVFDMPGFNHLNSDNPNKSETDPNTEST

SEQ ID NO: 134726 - protein, 91 aa, Heterodera glycines
MSEKSDVWSLGVILYQMVYGHSPYSALLHQFDAVEDETERMERADAALRPAILHGTEPIHFGQYEDEAMLNILKLFNKINLFFALFSFAFS

SEQ ID NO: 134727 - protein, 89 aa, Heterodera glycines
MFNCLINLLSNLIATHLSPNGAYGLVFGINSFVALLLQSVVTLLIVDVNGAFALSLEAQIIKNAFLYHSLNVHFNLICFFSSSPIAYAC

SEQ ID NO: 134728 - protein, 41 aa, Heterodera glycines
ASCRALRAPFFNFFGGYSAASRPQDGRFAPVFKLCREIRTL

SEQ ID NO: 134729 - protein, 49 aa, Heterodera glycines; identical to SEQ ID NO: 130195

SEQ ID NO: 134730 - protein, 93 aa, Heterodera glycines
MADSEMELDDQEGFIGKGIDLVPANDHVIAAYHAAAQQHNHERLQNAGGADNPRQTDEEENAENVLQAWNVAEQQGGQYLDYPPQRIPPNEFG

SEQ ID NO: 134731 - protein, 74 aa, Heterodera glycines
LSSLLFSYIPCLQNIFGVLFFIRLPWIVGTAGILEAFMVVLLCCSVTFLTSISLSAIATNGVVSGGGPYYMVGR

SEQ ID NO: 134732 - protein, 147 aa, Heterodera glycines
MTSPARRRVPTTKCAYNNKHKNNSSNHRHQHNGSSAKTPTAPPPTATRLATETTEKEPLCAKQQQQQHNMALYEDDCSKGGQNIGQMLRSLSLYNAILPTAVDEEDKESTAKGATNGGVKNGEKERNGGTKGAPKRQTAKLGTIMGV

SEQ ID NO: 134733 - protein, 18 aa, Heterodera glycines
PYRDRDLRFSKPGTGNRD

SEQ ID NO: 134734 - protein, 503 aa, Heterodera glycines
MDNQKLLLFIVFLVNYHFCFALSAEPQNKRNNHHQIANEFVALKQISEALSQQSNGENRKLIIKYPLIKYHFIYHTNTEELTNGEKIDNANKSLELVLELLKTECQLAKIASKNSSSSYPTNGYLAKFCDKKTGQNLDTIEKLTEHLTDFIEKDLPKIVEAMKKTETTEIISTGRVYGTMAEILPRAKQYPNDASLLLYAQAMKALSRISQEIEPGTTIDALTKTLKKHTVASDDGDTVTLMPSELTQIIMELWTNTILKGIANAGQEKYNYLQPQLNGTGADRSQDRRHRRAPPVFHIHSNIIMMILLIVQMSLIAVVGIDASRSDANWVTVFTAFFTMFFIWRVQIPGQPPPPSIHFSLNFNLILPVVQTRIGAGMPFGGAAQRPTAAGDDDRAQHLHAMLRMFNAMNGRANTAAPSAGSNRDRSQNITTTTTPAPPTGDNGNDDRKQVEHYDPVSDTFVGAEETFVTTTTESPINWEGEGTEDSNGDTDDSLAREYGRPN

SEQ ID NO: 134735 - protein, 70 aa, Heterodera glycines
MITDLSLFSHGWPTNGTNTWISDEALLAKNGLGLNFCQRRAAVLRLANFSTVLALHQLPKLASTGLRPPE

SEQ ID NO: 134736 - protein, 43 aa, Heterodera glycines
MALEAMGLDSSTDGNDSEPSLAARLFKGVDTKATQQVPATTIV

SEQ ID NO: 134737 - protein, 44 aa, Heterodera glycines
MEKNLQQMKKGQKKIIGSFAVQIEDLQNGQKALVEKPPPEVETE

SEQ ID NO: 134738 - protein, 92 aa, Heterodera glycines; identical to SEQ ID NO: 127421

SEQ ID NO: 134739 - protein, 149 aa, Heterodera glycines
HYLTLLCFFRMVQMESQQNAKFDLLICCGDFRSLSLRNHGDLHHFHAPFHHRKLGTFYKYYSGEKVAPLLTLFVGGNHVAPLLTLFVGGNHESSGFMAELPNGGWVAPNIFYMGYASVVRFAGLRIGGLSGIFKPGDFNRGKQFTMLVG

SEQ ID NO: 134740 - protein, 123 aa, Heterodera glycines
DESLTFGAAPTAKREGALVKSAALGDHRHRMTEKEEDEQLLQQSVRSDDSLIFENSPPFIKNGEMRDYQVRGLNWLIQLEHNRINGILADEMGLGKTLQTIALGKTLQTIAVLGFLKFYRDSR

SEQ ID NO: 134741 - protein, 142 aa, Heterodera glycines
MCKICAKPRNMCDMFLWVGGVWAPVFGPPRLGPRFWAPGSFGPQAPPLDSSTQRFGKPTIRQLDDSSTQPKCDDSSTQPNVNDSSTQRFVNSTIRQPSQNVTIRQLSQMSTIRQLNDSSTQPKCDDSSTHPKIVLKSSFKSF

SEQ ID NO: 134742 - protein, 359 aa, Heterodera glycines
MKSIRKQIEQQHRRKTPKRFGEPSADYDDSNIFPTQREDAEQIEQAEYTASDEDDEENRPLIEFQQGKTERGSLCIWHQGFRFTRIRGRWYRCSNRDCEATAALSKEGGTNGVLGRKSTTICRTQRASTRRQKRKIYGNMDRVNPLNVVLPDALLMKDGESTLLYDSRLLDVLKRARKISVDGTFKVAPVLRSYKFGPYLWKQFHPIRRPFTCSINANNPVVNNSFRRAALGAANCASTTVPRALLECPRPCEVSSGEDEQCYGGVTPPIFGNFLAAILDSVDKQMDIARSARVFPHKRRIKYILKEQLIGDALDEAEYNTDEDVLNILSLLSLQMQGYVGGLRARGAQEHEDYAEAED

SEQ ID NO: 134743 - protein, 24 aa, Heterodera glycines
MEKACKIWRDYIDFSALELLELAS

SEQ ID NO: 134744 - protein, 35 aa, Heterodera glycines
  unsure (1)..(35): unsure at all Xaa locations
CFSIKGXMNKYFKILNSFLNRPKSLGLYFKKFHRT

SEQ ID NO: 134745 - protein, 31 aa, Heterodera glycines
  unsure (1)..(31): unsure at all Xaa locations
FISIFSESALKHTKLYLQXSLGTLMLFLSKR

SEQ ID NO: 134746 - protein, 41 aa, Heterodera glycines
FFIDFLKCWIFLAYQNFIEPWFFYFSFKSPQIFFYSLTSPY

SEQ ID NO: 134747 - protein, 38 aa, Heterodera glycines; identical to SEQ ID NO: 130624

SEQ ID NO: 134748 - protein, 42 aa, Heterodera glycines
MTKQIEQEFFSKNGFGMVENERKLKIDLAIERIERVVKEWVN

SEQ ID NO: 134749 - protein, 42 aa, Heterodera glycines
VQAWIQFEGPGFFLDLGFPGFRPGNPGPTWSLGLGFFQNVEL

SEQ ID NO: 134750 - protein, 29 aa, Heterodera glycines
NTVYALIIAQSLLIPQSPIIPQSTRCFER

SEQ ID NO: 134751 - protein, 290 aa, Heterodera glycines
YVLSAWQAFGKFPYFYKGKWYLNKWVYNNEKFPYFYKGKWYLNKWVYNNEGNAYIRCFYFTAAVATSTGNNTSTGNNPMPTNVVEYLYMTFSWMMGVFVFALLLGQIRDIVSNANKNNEEFRTTMDKALSECKRLDLPEHLTARVRSWFLYTWERQRTLEEKKLVEKLPLKLQTDLALSVHYSTLGKVKLFQDADDADRAFLRDLVLRLRPAIFLPGDMICRKGDVGKEMYIGDVGKEMYIVNNGILEVVGGEVNNGILEVVGGEHNELVFATLAEGSVFGEIAIVGDDS

SEQ ID NO: 134752 - protein, 38 aa, Heterodera glycines
MTHFVPWITQRFAHGVVEGEQKLCNNLIIAMLLTGFIL

SEQ ID NO: 134753 - protein, 77 aa, Heterodera glycines
MPAPRRPLPTRLVRPIRPEHRCHPRPAKDEEEDEEEEEEDHEEGEEWADGGGEMEYLEREEEEECENNEQRKRVWIN

SEQ ID NO: 134754 - protein, 251 aa, Heterodera glycines
MSDNRKEAEEKMAKAIFISGDGWLCVFDLLSPRQLGLGIALISHRFDFYVDEHFKTRKRALAFIRIRRKNGVNGTKEMEIGKYYDWKPLPIPQIQLPRKVSGFGLISIAFIDQNVIAFLRRFRQLFAKCPINLSIRTNTSDYRILKSILNNIWPMLNKNIHGLRLSATFFHRLRQFVPSILNDCPSLRVFSIDYDNLFTEFPCDDSAMASDGQAVAKWLFTPRPDDVPKLFKCLLLCDRGHLASRIEAFKA

SEQ ID NO: 134755 - protein, 287 aa, Heterodera glycines
MKRRKRCGDEHFKTRKWTLDFVRIWRKFEADGTQEMKIVNCLWKSMQIPQNPLPKKVVGFEAITISFISADCWLCVFDLLEPSQLGHGIAMISHRFDFYVDEHFKTPKESRRIRSHHNKVKRMIFWCFLCVKRFLPLFYRYINDNVITFLHCFRPIFAAFPINFSIVDTFVIINSTLDSVLRNIWPMIATNICAIQLSAEVFRRLRLLVPSILDDCPSLRVFNAYNDGFFVEFPCDDSAAASDGQTVAKWLFTPRPDNVPKVFKCWLQWDDGHLASSIEDFKRVIIV

SEQ ID NO: 134756 - protein, 51 aa, Heterodera glycines
MKANGQNGKRKRLDGKFMISGTKLAFKLIMRTKSEMGFLTQLPAQVIRRSE

SEQ ID NO: 134757 - protein, 40 aa, Heterodera glycines
MFTQHFFSYFNSNIDINFYEFVSARRKTLSESLTKGDRFK

SEQ ID NO: 134758 - protein, 141 aa, Heterodera glycines
MDIVNCYGIPIPIPQIQMPLKGHRIRRDQHQAFTNASSPANFIAIISCPLPFADSVVPFALTNELTREQLALKVIDNSHRFLFVRCPISRDESKWTKWEKEAIGWRISYLWNRIDIEINKDDIGDGLLNATPGPSDQQQSE

SEQ ID NO: 134759 - protein, 28 aa, Heterodera glycines
MKKLEKSYIYSLMGVINFYRNLHIYHWI

SEQ ID NO: 134760 - protein, 21 aa, Heterodera glycines
ITGVSIIAVLFLMFLMPSQNL

SEQ ID NO: 134761 - protein, 202 aa, Heterodera glycines
MEAKKKKLEQKTLEEIFGEKWEEKENEQKKREIVQKFNKIKEKIKQKERKYSTKEWHKIELKIAKKLGTNRTKIYQWIKELGIYKGHNKSKTDVQKIEIVQKFITMKNEYKQKGRKYSRKEWKRNYAVIGKKIGVCHDAIKKWKKQFGMNGRRITEKEKMEKMKMYWQMKGENPKMSDEKISKMLKFNRRTIFNWRKQFEKN

SEQ ID NO: 134762 - protein, 258 aa, Heterodera glycines
CTRSQTRLTLSSVRVGVARLNTKMDTLAGALPFTLSKESMKVVVFHWRLAAPTYATPLMILHVRLESSSTGSSFPAKFAKPVPLAVVSLDSRRDSGNLVDPFVRVGKPTRHLATLRESCYSPVYPRLIKFPWLNIQSTGQKSDTVNVHKDHPSPLFLDSRIPRVRASSKLVVQRQPKCIPRAYTQLKRSTSSSHHSTHHPRRNSKQPRAKAACFTQQPGPDLSQFFSRSYESNLPTSLTYIILSTRGCSPWRPAADIG

SEQ ID NO: 134763 - protein, 21 aa, Heterodera glycines
ITGVSIIAVLFLVFLMPSINL

SEQ ID NO: 134764 - protein, 106 aa, Heterodera glycines
MLAFCARAIYHRACQSKAKQQRCCFERIKGIESVHRLLEKYICNLSTILRKSVNRLLEKYICNLSTILRKSVYRLLEKFICNLSTILRSELEMINFTIQTSFRCSN

SEQ ID NO: 134765 - protein, 77 aa, Heterodera glycines
MKLCALLRPFAEKFDRENWTETPMLPPLCAKIRHRRALARIFAVPSLPCRPPLSNGICALRMVDNLGPLKHLIIFVV

SEQ ID NO: 134766 - protein, 119 aa, Heterodera glycines
DNAKNAAVFRTGPLLQEGIEKVRSLFAQQKRLRVSDRGLIWNSDLIETLELQNLLINALQTIVAAENRRESRGAHAREDFPVRVDEFDYTKPTEGQSKKKLEEHWRKHSIIYQNVENGA

SEQ ID NO: 134767 - protein, 190 aa, Heterodera glycines
MPISLALLFISGLELFIWPHVKTLKILMIQPSYAMIQSHFTFGLNLAKLLVKNHGHEIHLLVPIRDENDKLPDRNDEKLLNVRYFIEKNDYNKTTPIERSRKIGTPPNDTTYFAIANNSSLMDDLCAEQFDVGIAEAFMMTEYSMTIFHFLRIPVTIATSAMPISPHQFYLLGILSKMAAGNVPGMKTIH

SEQ ID NO: 134768 - protein, 64 aa, Heterodera glycines
MNTWPNLIEDAIASAINGGGSAKVGEGGGHCAATQRATERRVVAAGANDDFVRRLVDVVRREPA

SEQ ID NO: 134769 - protein, 199 aa, Heterodera glycines
MRLYDFLADDLFCVSPNNSLLSPASSIVRRTHTVLTLMHTLKQFYWVVRPTTAPNSAQMAMEPMDRLTVVHIRGCILQIVNRLMFNTVPADISEKEVSRDEEFQCMLNFVNTVQEVPAFDRKKALCVIFKMISSGNELIRIPTLKMLSYFLCRSTQKRKNEAINQKNLFHLLTENLLLNCRSLSLATYNALFEMLVEPI

SEQ ID NO: 134770 - protein, 331 aa, Heterodera glycines
MANSKAVAFYNCLNLIGFKFGHTDCGPSEQRGQPGVHRQHHPSAQPTRRQSDNGMRWTASTVGRRNGTECKSELEINDTTQQELDIEDAARFIATFAELSDVFVFASGVSLNECESSKPISDFDRLLQNVDLQRLKGVIYRDMEETKQAQFLALAVVYFLSVLMVSRYRDILEPPLPPPASQAISPPLVTALLYLGVSYQSQFKHEAESNLPDTYRKQLFDGRLHDSLVFAYCPKNCHDQLCLFQQQTPKGGQLHSSAASYFVQVPHAVMKNVECPTIGMPMTHQISFQGVKLVKTHSVHCSLHSIGGIQVLVPLFSQIDAKQHEPVDNDI

SEQ ID NO: 134771 - protein, 144 aa, Heterodera glycines
MGDAAQKQKKQLDALVADMAPVIVDMVIAWASRTAWVHRALGAFVLCRFAKWLNYGHFEPILKAFVDKDAELLKEEGEEEEEDDENEEEDESEDDKEEEDEGVEEEETPDVDPKLVADVRRAMGKAATPKNATEVPSDEDNWVI

SEQ ID NO: 134772 - protein, 120 aa, Heterodera glycines
SKASSSFTIFLLMADENLSAIDEGCLRIDTNSPNGEVPAPPLPTMMARCLPGANAEDTFVVDVENISHSINLVNYSDTSSNETTFTCTTDRPKRKAAEKAMMLLIKPKRQRKNTSAEEKE

SEQ ID NO: 134773 - protein, 59 aa, Heterodera glycines
EPNEVDELWDYDMRLVYFVAKKRVLKDQIEQAKKGGHGTVDLETDLINIEASRGTENAR

SEQ ID NO: 134774 - protein, 25 aa, Heterodera glycines
LPIPSTIAFIHPIMSAKIIRVPKIA

SEQ ID NO: 134775 - protein, 169 aa, Heterodera glycines
SLCACSPAFSARVQLLLRRALPRKWRRRPLRLRCRSQFAFAHRVPTKKYIRPLYHCFSSTGPVLFSAAPANGAAAPSASDVSTNLHLHTAAAGPVLCRDGPSAAPSAANGAARPSPSGADVLHSDVLLAPVLPSSAPNGTAAPFGPSADGNPSQSVVMGTNSRVELNEC

SEQ ID NO: 134776 - protein, 116 aa, Heterodera glycines
MFDEPRGAKVEMARRGGKGEQKQRNTERTIPSPLIYQIEAGSIVYECRGAKMVPIGCLDEFGQQIRLNETTVAKGLLMRCSLSRWATDLQLKIIGCVPKGKANETILVGEKWTEKE

SEQ ID NO: 134777 - protein, 547 aa, Heterodera glycines
MRNTLRNTRGEVCEIRFLPLEDNERPDLVMEILIQHLLDRVLDGHPSPILVGLQLQPPGFDRPYVIRLRPPEQNNAAALAAAIERLNEQSAAGIDLLSGTTVTKVLAVWPLESVRVDAQRGGACDLDNEHHLSHNVQSIVRVVNPNDRYCLARAVLLGLCDRETQMPNGGGRGAFNTYASRQYQHGTQAVHLLTRAGVSVDKHMYTLEDVAQLQQYINNENGVGQIRLVIFEKEQEYRIVFKGEGTAAQFNLCILLERGHFNYIGRIAQLFKVPGYCIDCERRADARYHAIGCKAACRLCFRFGGGYPCQRERLSDGQISSRKCTECGFIFPNDNCYEYHLANDAPAPIDGRGHRQRRSLCQWRRFCPTCGRVAYFGIHQCPSIRRAIGPVDCFRCKGPHMLDEPCYIQPIGVAPPLPMLGPVHNNDDDNNNNNNNNNNNEDENDIDFIINNLGGEGDEDEDDVENGDDINDDDDDERDELLPLRLCFFDAETSQERPLQLNNQVAHKHVPLLIVAEFICEPCIRAGININDGQGQRAPGCVCLCGR

SEQ ID NO: 134778 - protein, 556 aa, Heterodera glycines
KDDAATLTRHYWMELHVVWGCEWKERLRRGAQAAFRTVFVPCPLDPRNALRGGRTEPFKLHHVCSDDEEILCIDIVSLYPYVMKVNPFPVGNPRVLTREKVNPFPVGNPRVLTRECSSNNMFRGCSSNNMFRGLLLVRVLAPRLIRVPLLGYRTNGRFTFPLCAWCADRRQQRPCQHGDEKRSWVCAYTHMELNKALQLGYIVVDLFEVWNYDEWDDDVWNYDEWDDDLFSKYVNTFVGLKVQATGWPEGCETDEQRKEFVDNFMRTEGIQLDSTKMTPNPGLRLIAKTLANSLWGKMAQRVGFTQIKYTRTPGKMAQRVGFTQIKYTRTPAEFHQLLDDPTLDKLDFVHVSEHMDRVVVRKRPEFAKAPLTNCLPVAIYVTSYARLHLYSYMEKVIALEGAELLYCDTDSIYYVNKTDSIYYVNKMGGRCVPEGEALGQMKREHVDRRIVEFVAGGPKNYGIRHSTRRNRANLKIRSFRLSYATQQLLNFDDVIDNDDLYVYGGGGAHRCIRVTFPQIDRNVRSDVYTCEAHKDYRPFYAKGRVRPGMQTRPFGY

SEQ ID NO: 134779 - protein, 193 aa, Heterodera glycines
MDLILATDWMNNAYPEMEQDKANMSPKEDPSWISLIDEEEKREPIAIVQIDEEEEKQRKNPPGNCDCREKRRCFIPLVDHLCKKFECSAHELHVLFKDLGKRRAIVEHLRSSQLCTSHLRPSIRNFPVRCNDLSILDAHSVPAYRGYLGITVRMHYYIKHGIRLRHSNLPCVVEFGGGDHKTFFPLEALNIVI

SEQ ID NO: 134780 - protein, 399 aa, Heterodera glycines
MPSNSFYIVLPSNTNVEGNKTNSFRVRLPRKLQFNSEWEVGLAVIVYPHTWPSIGTVEQQFVEVEWQTGNTVRIEVPPSNVTNPIDLGKTLYRLLGEGSEPLAKKVRTAQNSFSHATNSARRGAREEYIKRKTREKRSIRDEEKLLEALLTDIETMVDLFGVTQGLLAREKRAETSKIPLRMSADDNESYQHKLDEYFSNLSGPDLDILEEMIRAKLNEEIKNMVEEDRTILDATKEMGMEAWVQAYRKVRLVCRFIFDINKNRFELIFDQRYVRRVKISSQLAYILGFDSTDFTTSENEAKFMPDMNGGVSSFQVYTPDLIEPMMIGDVTAPVLRIVTIRGKPDEIVEEQFLAIQYHKILIKEISELLIEIRTNSGSLMPFQYGICTLTLHFRKLSYF

SEQ ID NO: 134781 - protein, 89 aa, Heterodera glycines
MKTPNFLAISIFISIGFGIATPSNEDESAMMTISSRSNIVCPTLSRTPKFCMSNAWMPKSGPCPTDWSNLFNKKCEGFQKKTKKVAKMH

SEQ ID NO: 134782 - protein, 33 aa, Heterodera glycines
MLFKQTEIFIFKGIICFLNRQKFLFLRVFLRNY

SEQ ID NO: 134783 - protein, 38 aa, Heterodera glycines
MPMKVLVPPATKALPITVPLATKKVVCLAVLVVKMFAQ

SEQ ID NO: 134784 - protein, 189 aa, Heterodera glycines
MIPGQQNLAPALRANNNQMITHAMPTNWSNHLPGTQQNVGPHLSNNFQSQQQQNCQNLQQSRQLSEQMVVPGLSENGTTSFDFMVKSVSNFNQILPPIQLFVSSLDFREAQLTPNGPMRVCNAILINGEGKTVEVSAWRLQADVLASAMRGYLYIFVNCRAKPPRERTNCWFRLNIDAMSSYMVQVQTI

SEQ ID NO: 134785 - protein, 140 aa, Heterodera glycines
MARQNLNECFVLERTTPMRNVMRNTRGEICELRFMPLEEAHRPDLVLEALIQHLLDRVLAGHPRPLMVGLQLHPPGFDRPYVIRLRPPEQNNAAALAAAIERLNEQSAAGIDLLSGTTITKVLAVWPLDPIRGDPQRGGF

SEQ ID NO: 134786 - protein, 1224 aa, Heterodera glycines
MPNGGGRDALRAYVRHQNQHGPEAVALLRRSGIPHHKDMYTLQDVGQLQRWLNNAYGIGQIRLVVFEKEHEYRIVFKGEGEATSIILAVLSKFLTCQTTALIVSAELTRVIIRQGAKLCAVFVCDLDLLPNGVTSARQCAECLFIFPNDDCFNYHLVNRGPDQIDGRGNQQRMPICQWREVCRLCGRVSYIGKHRCPQVQLGDVCRHCRGQHNADLPCFIQPLMDRPQPINIIDDQEAHDNDLVIDDDENDDELPLRLCFFDAETSQERPLQLNNQVAQKHVPLLIVAEVICDPCIKAGISVNDGFERRAPGCVCLCGRVRGQQMRQWSSPPFANAHGDNTPTPDGAPTFNQRRFYFHSFDNGEAEDPVEQFLVFLMNHGSRKAHTVCIAHNGGKYDFHLVLEALHRRSYPPKRLCTTGLKIYSMKLCGRNQRRITFKDSINYFFCELDGLVKSFDLPAHLATTKPFFPYLYIQRQNLVNRLQGLPGIEFYSPNTMKEEKRQKFLRWHADNNEGAQFQLREQLIMYCVNDVAILRESVLRFRQLIGEHTQGLDPFLVSTTAAGLALATLRRCFLPPNRLVHSPEGGYLRGRRASAESRRYIRFFEMEHPGAQVQCADWSVGEAHVDDSGYRLDGLWRRDPPLRPLAIEWMGCYYHGCPKCFPNRWQKLAAGRTAEDLFERTTRRLWELEHQHGFELHVVWGCAWKEQLRHDPALKQRFEQVFVPYPLDPRSDGLRGGRTEPFKLHHVCADDEEIICIDIVSLYPYVMKVNPFPVGNPQVITREVLLQPPTVPLPWNCAENNTFRGLLLIRVLPPRHIRVPLLGYRTKDGRFTFPLCAWCADRRQQRPCQHGDDKRSSYMNTFVGLKVQASGWPEGCETDEQRRAFVDDFMHTEGIAIDPTKMAFNPGLRLIAKTLANSLWGKMAQRVGYTEIKYTRTPAEFHKLLEDPTYDKMDFVHVSDNMDRVVVRKRPEFGKAPATNCLPVAIYVTSYARLHLYNYMEQVLALGNAELLYCDTDSIYYVNKIGAPFVQEGEALGQMKRELVDRRIVEFIAGGPKNYGIRHTARDGTDERANIKIRSFRLSYATQQLLNFAAVKELTLATYNIDGPIDDVLDNEDLYVYGGAEHRAIPISFPQIGRNVYADLYTHEARKDYRPYYAKGRVRPGMQTRPFGYVEEEARLIRQTQMVHQQLPPASSPPQPRPERRKRRLIEPDPTQAGHSGWFS

SEQ ID NO: 134787 - protein, 324 aa, Heterodera glycines
MDLILATDWLNNAYPEMEQDKEPPKEDPSWISLIDEEEKREPLGAIGEEPITNTPKKCSCNEHRQRPIPLVDHLCKKFECSANELHVLFKDLTKRRKIVEHLRSAQLRTSHLRPTIRNFPVRCNDLSILDAHSAPAYRGYLGITMISISNCTAVFKINVRPFTPEQFLTIAQRGINTEYNPRRFHAIIMRVRTSAKTVAALIFQSARVVLTGVSHPDRANYFARKILRRIQHTQNNTLKIHQLRVVNIVGVKTFAQRIRVERLLTTLGGIYDPSIFPALRCKMENGTTCLIYISGKVIVTGAKNIEELSDAFKFLSNIIPNYFR

SEQ ID NO: 134788 - protein, 237 aa, Heterodera glycines
QIADRLKIGQTVEPEQFDTVTVFFSDIVQFAALSNQMRPLQVVNLMNELYTTLDAIIGEHDVYKVESIGDGYLCVSGLPKRNGNLHAKECADMSLDFLKAFHTFRIPDLPNERVRLRIGLHSGPCVAGVVGIFYENGIKTADDLIKGLAMPRYCLFGDTGKGVMETFWLLGHAESGTLPAHNSHEGQSMAQRNAEEDEREMYRTYRKTMTGQDKDGEQKNGDEQQKKQQQNGGGVIY

SEQ ID NO: 134789 - protein, 214 aa, Heterodera glycines
MRGSIRDVILSENAMVKDVMFIQSAVKELCEGLQFLHNSPLQFHGRLKSSACLINERWQVKISYFGLRWLKSPQKMQAKDLLWLSPEQLRKATDGAEINVAVGSKQSDIYTMALIFTEVHKMDINSLSKFAHLFAISDGEHGPVLGGGPRLGGGLRRGARLGRDGAEQKHRDAAHRRRNARTQRGRNCLFGEAGRIGAIETDDTARVGQFAPGI

SEQ ID NO: 134790 - protein, 368 aa, Heterodera glycines
MNRRWICADVWMDILPSFDHAQLGLKMALLSYRFDVLVDTHFDGKSELTIWRTIRIVKDEGPNANDNGPKPKVSVRIDGSFVDFPLSDRQLPNKICFKNLHIQSVLTFVYAKALFSCFSYIDHSVIKFFRSKKRFFDKSGTKLEVFVHSIDTDVQPIWDVFTREIWPIFAKSIRHFGFHDGDDLDNLRSRISPTLLTDLDQLISIDSGYLCPDGIADDGPNGNAGQALTKWLHTPTKNGQPKQLRFRAYTFRRATTSVSYQIQLYFRVETMPIAPFELMNEVTKEKLTLKQEIDEFDLNVYNWLLQRCPIGETATAPVKWENRENPSANLNNVRFDLWSFDKSIGPLSPPAEEKEGEEEADQSNKNVV

SEQ ID NO: 134791 - protein, 371 aa, Heterodera glycines
MNRRWICADVWMDILPSFDRPQLGLKMALISDRFDILVDKHFDGKGELTIWNDITIRKGMEDEEKIGAKAKLFMQIKDNKDKFVEFPMQDHPLPNKIRFMDLMIMYIDHSVLAFIRVNKQIWDRMGTNLELEVYSYETDQIWDVFVREIWPIFATNIRHLAFHGADALDNLRRRISPTLLTDLDQLYSITSYGLCPDGISDDGPNATAGQALSKWLHTPSKNGKAKRLRCNVFSNSECVIRSINNFRETFLRATASVGYKIRIVIRSVSYHIQLFIHVETTPIEPFELVNERTNEKLTLTKDENGTGEFNWLLERCPIIGETAAVQKQQQKKDENSDANLNKVFFRLYDDIGPLSPPAEEEEEEADQSNGD

SEQ ID NO: 134792 - protein, 158 aa, Heterodera glycines
MFLACYIDHSVIKFLRANKQIWDSKGTKLELVVYVDEFENDEQPVWHCFSYEIWPIFATNIRHLSIYNADALDNLRRRISLTILTDLDQLDSINSGDLFPDAIADDGPNANSSGQALHKWLHTPRKDGQPKRLSSWSCSCFSLTRINTWFYNHKQVDD

SEQ ID NO: 134793 - protein, 68 aa, Heterodera glycines
MLTTQVEPFELVNEWTNEKLTLMKKGPYHSLLKRCPIIGETAAVKWEDDENSDHLNAFFIRLGENCIG

SEQ ID NO: 134794 - protein, 95 aa, Heterodera glycines
MNRRWICADVWMDILPSFDHAQLGLKMALLSDRFDVLVDKHFDGKSEFTIWRTIRIEKGEGPKAKLSVLIDDKCVAFPLPDHPLPNKIRFKDLQI

SEQ ID NO: 134795 - protein, 19 aa, Heterodera glycines
AWPAVAFGPSSEIPSGHSP

SEQ ID NO: 134796 - protein, 249 aa, Heterodera glycines
MNRRWICGDVWMDILPSFDHAQLGLKMALLSDRFDVLVDKHFDAKSELTIWRRIAIRKDKGPKAKLSVLIDDKCVAFPLPDHPLPNKIRFKDLQIYYVDHSVLAFLRSNKQIWDRSGTILDLNVYAFDTDVQPIWDVFTREILPIFATNVRHLCFPNANHFYNLRRHTSPTLLTDLDQLNFINSGGLLPDGISDDGPKATAGQALSKWLHTPSKNGKANELYCCAYFCEITWINTFKEVIELLNCSLND

SEQ ID NO: 134797 - protein, 289 aa, Heterodera glycines
MEYFSSFVDSSAMEMQILSKQRENYEDFFYFLAKVLSKFGGKLTKNENREQIEIGIDGANKILESLKNYAEKMLIKKAREWHPYYECQAKKKLEQQNLQMAAVEIMCPNFVDSAEIFEILNGQNELFKSVPKSEGNDEKVDPKLVNNSQLFNLLYSFVTRIEAIIYGKNADGTIIREEKAAKKREKNGSRKTCTFDSSIEMHQINSKKLVVAIKKEQKDVNNINQNLYERADDLLKLLSEININENDDEKNADGTTIIFGTVKQINSFGQRKWPNAKGKKKRIGQIAGR

SEQ ID NO: 134798 - protein, 220 aa, Heterodera glycines
MRNSYDRYGGGNRSGGGFGGGGGAYGRGASGGGYGARGGSGGYGGGGGAPRGGYGAGGGGFGPPPSGYGAPEPYYGGYGAPPPFGSGGGGYGGGGRGGGGPDPIVHLLSVHYHIPTTIQSISWPVALSGRDLISIAKTGSGKTLGFILPAIVHTMAQPPRRPNDGPGVLVLLPTRELAVQVEQVAREYCKLMKLDVTCCYGGAPKAGQANDLRRGFPKKP

SEQ ID NO: 134799 - protein, 215 aa, Heterodera glycines
MVMCLLSYGAGLDEQADSGKMTALHFAVSKRNLQITRLLLCLGADPNVANAHGDTPRHLAAKLNEVDLLKSLIICDARRCPLTKVGCVSGCVNEKQLNKLKRPSTSSMPSSATGNTTSTSTSASSTASLSSSSSSTTLAASAAAAAATAPPTQPANSSQPTAGASTTAPKPASYTSVMVEDFENRAFDKEQFRFNKLLDIQHNEIFKKLIVRKFL

SEQ ID NO: 134800 - protein, 105 aa, Heterodera glycines
MSYQQREQGGYDRRRGGGGGDYGNRRDDRNGGGSYGRNSGGYGRDGGGGQGRDGGGGYGREGGGGYGRDGGGGYGRGGGGGYGRDGGGGGGGYGRDRGGGGGGGF

SEQ ID NO: 134801 - protein, 176 aa, Heterodera glycines
PPPPPQKPPPPPPPLSRPYPPPPPPPSRPPPPPPRPPPPPSRPYPPPPSRPYPPPPSLPCPPPPSRPYPPEFRPLPPPLPPPPPPPPPKKVSGRGPKKKPGKRPPKGPPPPKSPGKGPKNKFPFKGPLQGGPPHPKPPAGGPKAKVPEKVPQIIYTQIFIILYLIPKAFDKNFPVD

SEQ ID NO: 134802 - protein, 57 aa, Heterodera glycines
ASSRVNFIIVIFRLSDSVVPFDLVNELTGEQLTLKSANNDGAFLLIRCPISRDEKNG

SEQ ID NO: 134803 - protein, 141 aa, Heterodera glycines
MPHVHICLILDWEAMRVGGKTRTPEDYIDEYICAEIPPKPDESSRDEHQQRNLYTTVTTKNIHTCAQNRCLKPYEYDNVYSENAYPRYRRRPPPPSAEEAQQNPEQFGRVFEYKDRYGKLIKKDNAHVVAFNPFLSAKYKS

SEQ ID NO: 134804 - protein, 118 aa, Heterodera glycines
MKNDLFFFLLTIPVLTWSCYAGLNGLSAIFWACASMDMKESKEKWFEDYYEKNLSVPNVHCHAEFGEKDKDFGNTHFKRPRVPDGLLCFAGEEFIKLDFCEDDDHFCYLAKCTKGWCY

SEQ ID NO: 134805 - protein, 38 aa, Heterodera glycines
MPSFEPCTTVETHKELFGIVLITAPFRDDFRLMAILID

SEQ ID NO: 134806 - protein, 84 aa, Heterodera glycines
MKINEIIMSKIAANKSFDLEFGLLTKWGCTDKQSNESPLTDPKELIDQNDTIKIMDHFCAHNYSEADVSMSNAAMAVPIPGKLI

SEQ ID NO: 134807 - protein, 28 aa, Heterodera glycines
MATFAPMGGGLEGRAFEPIVPFFKIIIK

SEQ ID NO: 134808 - protein, 132 aa, Heterodera glycines
MVHGSRHFAPEGNCHPGKIICVLLEEEGDDECCSPNYETICYQNYNFKYELYKNSEKMVPHVEGAFKIVDEQSKNREVKEGCNPERDCKQCGGLYSCIPIPEVWMTYSGCCGPGYEMKCCVTVRFISCNTVV

SEQ ID NO: 134809 - protein, 96 aa, Heterodera glycines
MLVKCKPFIFGILFACLIPSIIKTESEYVKAAFKFKNDDDGKLFEGAELGASIGGAIGSLAGPVGTFFGVVIGIAAGAVDAAVQSDKRYESCLAKL

SEQ ID NO: 134810 - protein, 217 aa, Heterodera glycines
MISIVCDNAETGRECIAYLREQHYPPETFLPLSELRMEQIKEHLRDIRDPPGVKLVFDVINVLGNAQHVRKALQPNGVISGGGADLKAKAKKWDENAIRKLKDRRTALQEELQKLHRTGKRELDVEMKREQITSLEARLRFTQQELKKSENETLRRLEQDAEVESAEPETIETRIESRRIEIEERKIEIERLEQNKNAIADEIFTEFCAKIGIKHIR

SEQ ID NO: 134811 - protein, 76 aa, Heterodera glycines
MDDDIEYGTEQKILRPNPHKERVNKNIYIIMQKLFFPLVNLYKDNCIKLMHEKLKNQQLDTWEQLQNAILKEKEAR

SEQ ID NO: 134812 - protein, 87 aa, Heterodera glycines
MHTFCARAIYHRACQSKAKQKRCCFERIKGIESVNRLLEKYICNLSTILRKSVNRLLEKYICNLSTILRSELEMINFTIQTNFWCSN

SEQ ID NO: 134813 - protein, 25 aa, Heterodera glycines
MRTRPIWQVKQRLLTSQKGYSPVKD

SEQ ID NO: 134814 - protein, 1164 aa, Heterodera glycines
MENQSNASVHSRSEREENGADAERNAENGGNGGLDGGNEHAPILGQNLNRGADPRHPQPGRHRYNLRPRQNNLFYGLNPNESADSFQPHGENRQPNRRQQAPIQNPGFFENVEMGNPLFAQNQIVEQVVENSHSGIRNEIQHPIGLEIERYGRPIANSSPITRMGSSHNEPHNSFENVEFEEIRQFRARQLYENPRGFREQNFVGEQRERMNEFEQNHAPVPNFERRNVFVGDPHGNQLIFGNFGRNMERNFGHFENFPGLARGGNQNLNVGGPRMEQIRDPHRERNQYEERQFMPIPEPNMRQIDGQNQNLAFRQVQSQNFQENMARVMPYTEGIPDIILELHKVTLSNQYANVLREIPTLFGTEGRDKINDFFTTLELCTGDWRPEKKLEILRAKLKGKASKALNLSLRKFGHQVPFEVIKREIKTILRETDYKEASAFTELTQFGKQKVGEDIVKFGERIQQLVSCAYYGIEEEQLDEISKKFFISNVSDPNMSRFLECQTKQSQTFDELLMVANRLSLIESKRNVNQSLNQNYRENNSQFSHPRNQFNQNRFFQNQSFEPRPQNNQVRFFADRNFTRQNFTDRQQPNTNENRNSGWNRGGYQNSNFQNRQNFPNTDNRTQNVPNPQQIQSSSGTRTNTNTITVTEKNQNEQNELVFCNNISQKEVQDFEIFFNCLTTKAYDFPSKNPAQPKTYECLKLVMKVEGQNAKTLGDSGAETNIVNPEFLYNLAKKLKLDLINWGFNPNKGLTRIPFDVASFSGSRISIIGVINIPIETSGFKTNVPCLISKERFNFDLVLGTGAMETLGFYLANSFTNEITYFTSKEQQEMSIPLINSVKVASFTVIPPMSSCFVDSRIENHSNLPKNSHFLIENSEKSILLKMQSDEDLMDYDETDKVEMERLRKLDKVAEQKELEKLGIIVPETNIGQKWNGKRGHSEPPIHCTDAKIPVHELPIIEMALATSEPGSFKILVHNKNLTPIFLKSGIEIAKAEIVEEIYDPHIELLPERFWKSQRFIRNFGVQKNGERISQLLSVIKPNFGPLNNEEKSLLEEILVEFSDVLALEESELTQTNLTEHKIDTGNTQAIKIPPRPMPFGVRAKVNEMLDDYLNRGIIRPSNSPWASPIVLAVKKDKSIRLCIDYRKLNSVTKRDSYPLPNIDGIL

SEQ ID NO: 134815 - protein, 39 aa, Heterodera glycines
MLFILVLLLIEKLLLANGAPLSTKNDGIEAKQNKFKEMT

SEQ ID NO: 134816 - protein, 153 aa, Heterodera glycines
MSLLSSTTKYKVSIGEIQRRINPPECLNASLIGGILRKSVILGVTNFVNIIPPSKFSANDFNAVLQHDFPAKDIGFFLNAQFLRYVGQSPMDSELVARRRTILNCSRIFIKEITSLLAADRSPICDRRPELMLDPSIQKQLTHFSMAIFMGFL

SEQ ID NO: 134817 - protein, 127 aa, Heterodera glycines
VGISTNGWTLVLSVSHFSYYLSLPTQFGKLLINSWLMVQFFLVFGLCVQFIYRFLVLNRGLKITMKKYVAMLSFAFSIAILTWTYDFIVSNDHINLSLLKAEEIFQIEQLLGGNLNDFVTYCQRNVS

SEQ ID NO: 134818 - protein, 91 aa, Heterodera glycines
MAVLRPVDAVVALFRLHIVRRSTPSFGRQQNATATIGGGNCATNPWKTGPGAVVETETQYADQICKNVRPFYEGGGFFCLAFAQMVGGTNW

SEQ ID NO: 134819 - protein, 98 aa, Heterodera glycines
MEPVTVSKSNAEPVTVSKSKAEPVTVSKSKAEPVTVSKSKAEQERYRNPKLNLLRYRNPKLNLLRYRNPKLSKKLYRNPKRNDSGGGRTIESTFSNEK

SEQ ID NO: 134820 - protein, 62 aa, Heterodera glycines
MGTDKQNEKKAIDVQNDKASTDKQIHKVGTDRQNDKISDGKDAKVDTDTQSAKSGINGLNAK

SEQ ID NO: 134821 - protein, 64 aa, Heterodera glycines
MRDHIASYFRLDNSFGLTEVQFRGELTPEIFEIQFDAIFATIDRNNLQDISWAQQCKKMPINER

SEQ ID NO: 134822 - protein, 204 aa, Heterodera glycines
IFLIFPNYRRNVCFRILFTNGVTDCLQLAPLLIFAVLNLITDQIPIWFQMFGSSIVLNAWNLLVMQHFLLAINRLIVILRARYLGSKFIPDEDTEAMCFNIAHVFCWTVYFVIVGLHQTNLMGGLFHSGTSQFVFDIGKPWTQTMREVFKYLTIAMPIICLVIYIVIIAFAKLSRAGTRRGDDFTKAKTTAPLLNDYEQRLLIQ

SEQ ID NO: 134823 - protein, 29 aa, Heterodera glycines
LFSILNSNYNITKCIWPILLIKIFIMSLN

SEQ ID NO: 134824 - protein, 278 aa, Heterodera glycines
INLHMTYKGCQTEIIPFIPSFERAVNSLELVGIQNSSFTVSFALSRHANPENAQIHPVLCFVPPPWTDRSATQQSPMAKCNCAERKCPAGPKGPRGAPGEKGEAGAAGQDGVAGVSDGVAGVSAEDVLAQVQQLEKCFHCPMGPPGPLGLPGRPGPRGMRGGKGQPGVPGRDGQPGFPGGPGRDGQPGFPGGLGPQGKAGSIGLGPQGKAGSIGTVGEQGIPGEDAKLVHGRPGLKGPPGAVGDQGDAGPQGPQGGVGAPAESEAWINIHFKGPEGEK

SEQ ID NO: 134825 - protein, 107 aa, Heterodera glycines
MDLQIDKNEYSGIISLKYDNYWVFYLVSRHLRTDICGPTFADRLLRTDICGPTFADRHLRTDICGPTFADRHLRTDFCGPTFADRHLRTDFCGPTFADHYFSIELSK

SEQ ID NO: 134826 - protein, 26 aa, Heterodera glycines
MNDWLLSSAALHENVVQNGDTAENGT

SEQ ID NO: 134827 - protein, 79 aa, Heterodera glycines
MATETMSAQIRTQNAESAAMLDTGLRFVRQSRAQLAKKQGKPVNQVNAESQKAYDIGTLVKSEEIKYISVPPAMITKNA

SEQ ID NO: 134828 - protein, 38 aa, Heterodera glycines
MWPTDGQCVCCLVMMVVRVYQALTLVFKVLLEWGLCLS

SEQ ID NO: 134829 - protein, 34 aa, Heterodera glycines
MVALCITPQIIAVVFMVLFLSGFFNESDREQKTT

SEQ ID NO: 134830 - protein, 99 aa, Heterodera glycines
MARTTYAKTAKAAHCCNKVFTSPYVQCQIPGWRAKGYKGNVPVIIGVPKKRDVGCSNSNPCAGNGYKCVAYKKGDDKLLLEGPYRFGADVLAPARVFGL

SEQ ID NO: 134831 - protein, 91 aa, Heterodera glycines
MPFAPCFSLLYLLSSKEHCPRYIKWLDEEKRSSVSLGTGPDEKWQKNIFSPKISGIFKLIDSKIEKFEKTAFIIRFRKTLVWTTGKKIAFE

SEQ ID NO: 134832 - protein, 262 aa, Heterodera glycines
MANTILQTLAIEHQKHLQLQQQQQMQQEDDGEFGAQQRKRKTSCRASIALNMEQKMRLIGIQIQEEWGKLRYCFTRIMKKLLEEGGGRTVDEGQLNTISWPYWKRMEFLLPGVRAQLAHQPTSTESECGNQEQGVQTNGPTTATRAKTPPQPFTTQDFLMANFAALKTSQNLLGQFQQQQQMLNNCHASTAIQRQRSIDYDTEREKNSEMGPMTGGVGTAMSTADLVTALGTIKAQNNSSNIGTDKCEDNEKTRRNLRNFVK

SEQ ID NO: 134833 - protein, 143 aa, Heterodera glycines
MVKQLQNLTFTAGAFEGNSANKWLQKSAIEFLCNTKIEKNLQKLESDNKTYGKFVVKMENFKAIFCHQLENGKSFEEISQNLVQPIIKELQNLNIFDPNLIGSLRRIADFQAFNDENREQMAKLMDHFMAGLRSLWHIIKSRE

SEQ ID NO: 134834 - protein, 72 aa, Heterodera glycines
IKKEDGEKIFPYILVISFCFWWGAWNSGIMRTRPIWQVKQRLLTSQKVRCRDETNQHCLPRGTRHGPPKEWI

SEQ ID NO: 134835 - protein, 255 aa, Heterodera glycines
MKYRAFPVGLPRVLSAEQLDRDAGVRLPWTSAEQNPFRGFLHCRVLPPLPAELGDRHALLPYRTRTGRLTFPLCAACAEWANADKKVQRHHRTVPRCRHRAAQRAWTHAYTDVELNAALQLGYRVLALYEVWHYDRWASLEAGKSLFAGYVDTMLRLKVEASGWPADCQTVEQRARYVARYADREGIRLEAGRVQPNPGLRAVAKALLNSLWGKLAQRAERDDVCYTGSAREFHELLGDPRQDVVDFVHLNEQLD

SEQ ID NO: 134836 - protein, 89 aa, Heterodera glycines
MLESDTLAQNQSASVSPGWNDPPPLANPATTTAAAHAGLTNGVANGAGRLHLQRQRRPVDPSVQVFGDQFCCLVFNSRSALVFLQGKIP

SEQ ID NO: 134837 - protein, 21 aa, Heterodera glycines
MKLVGLDSHCLFRKTSKESLK

SEQ ID NO: 134838 - protein, 82 aa, Heterodera glycines
MESPIGLDQEPSLQCTHQGWAKLKNKKRNAKSEICETEKCEMKKKAKCEKPKYAKMRKAKCEKRNFFYKFLIVKIIKQKSFF

SEQ ID NO: 134839 - protein, 42 aa, Heterodera glycines
MCFSSSWTSMTTYLVPLTAVVAQQLEYLAREQTVAEQRAAQA

SEQ ID NO: 134840 - protein, 76 aa, Heterodera glycines
MLLLLLLLLLLLFVLLLENGRDISISMFIRPPADRMGGEYGHNSAVFPGSTLLSAFPSKEFSILCFYIIISEIEIH

SEQ ID NO: 134841 - protein, 226 aa, Heterodera glycines
MIKLQLSKKATDFELDCGADVTLITKNDWMSIGRPKLGQTSGLMAYGKKPIKVLGSFKTDVVYNGKEVNAEIYVVDGEGKNLCGRDLIGELQIDLNKAFGIRSINEVKCKAVDRELEAVLLKYAGSAIEEVQTASRAFCIETRSGESHRQVGQRWSVGAGDNFRLGNIVVIIPKAGNKIRLCCDYKVTVNQWLDIHQYPLPRPEELFSVLNGGEKFSKLDLKEAYL

SEQ ID NO: 134842 - protein, 211 aa, Heterodera glycines
LPDFLQAACTTLFLLSSLADHLGRSNMAHIQSSSLAGGIAIGAVANVILYPHHAIIVGAAAALTSVLGHVYVTVRLEKRLSINDTCGAHSLHGLPSLLAGFLSALFVLLYEPEEYGENFVEQYSAIYPKWQGCQCIEANISQSFFQLAGLALTFLMAVMGGLFSGWVMNWSMLNQVQPRPSYEDTNYYLHAEMNLFAKASHCQMNKMNEEK

SEQ ID NO: 134843 - protein, 77 aa, Heterodera glycines
ATKHFDLCRFASVQKFGRRERFAHSNGTHPIHSFAGFNLQGLNGHQTIRRDWEFPPKHIFNKLDELFNRFFNRYYLL

SEQ ID NO: 134844 - protein, 84 aa, Heterodera glycines
MTRNKKISKMLKFCAKEIAKRRSAESATSYSMIEDIGIATVTLGPWDKDILEMFLQEHFFNKLIFDTQKGKFHCCRMDYLFLLI

SEQ ID NO: 134845 - protein, 54 aa, Heterodera glycines
MRLSQTNKESFLSPKDVIERTARAVHGNMDINREIWKNMENMDIETHPRSFKPS

SEQ ID NO: 134846 - protein, 290 aa, Heterodera glycines
MSINETILQLAIDTANEYPKKETLDGIIRHKFEKKLKDLFKKAEEKAKKDNPRRANEINDDINKILLGSKFNDSYTWLSDALLSVFVKGNVTKFNKFLKRLKHYQAAAFYQDESDLCIGYENWQCDKIGEKFEGYEQTETQKYNKYLDIIFEYLFRLNVQGKNAELAYHLPAVKPIFMTDDGNVSLIQFIRSLNEKLKYKSVDKLDLDYHPRVNIYLLNELDLNYAIKEDEKKKEKPLKNALDTKIAKIREEFEGKMKNLCDNVKERTSEEREKFVEAFYFGTFDSSPFS

SEQ ID NO: 134847 - protein, 259 aa, Heterodera glycines
MYKKAEERAKEYGYWSAKINDDKHRIIVGSKFDDQLTWTEDAFFSEFVKGLTTNSKKFFKMAKEYSNYLRLKKEKGYYIFSDENTMISFGLYEIEKMKMHLTQKYKAHLGIMYQMKENWHCDKIGKEFEEECQKYRKYLDILYEYLFRLYAEAKDPKVSKQLSPLVKPIFMYGNSSPYCLIDIVRWLNAISKYFWEKEEKVYIWSINLVNEEELNYEIKEEKNWFDKNKQLNGPTDIQSIWEQFEQKMGEIAENAKENA

SEQ ID NO: 134848 - protein, 141 aa, Heterodera glycines
MHFCTSSAICCTYFSLLITVVPLLITVAPLIITVVPLIITVVPLIITVEPLLITLLIAVVPLLFTVVPLLITAEPVLNTLLIAVEPLLITVVPLLFTVVHLLITVVPLLITLLITVEPLLITLLIAVVPLLFTVVPLLITK

SEQ ID NO: 134849 - protein, 44 aa, Heterodera glycines
MSHEEAIIYGKIDRYLRIGLYDNACRDLPTSLEVKKAVLKGGPF

SEQ ID NO: 134850 - protein, 43 aa, Heterodera glycines; identical to SEQ ID NO: 131356

SEQ ID NO: 134851 - protein, 26 aa, Heterodera glycines
MQSPLVISIISIELRNEFPFSAHQAE

SEQ ID NO: 134852 - protein, 282 aa, Heterodera glycines
MALLRFAETKTNRGKILLSRSGYDYTFETCPRGFTQVYTLAVVIDHCAVPAVYGLLPSKTLATYTRFFETIRQSVGNNWFPYRIMSDFESGAITAAGNVFPNSIRTGCLFHFGQAIWRRIQRLPNLLTRYRDDEVVRTSLRSLQALAFVPVDFVYNYFCIAMSILEPTPELQELIIYFINTWIGPRRIMQNEEVLVHDAGGVADNWIRGRIEALNLAQTDALFPIELWNVVDRVAEGLGRTNNSLEVWWDVTIFSCLFFRVGIQLGMCTLGGTNDRVHLLGK

SEQ ID NO: 134853 - protein, 64 aa, Heterodera glycines; identical to SEQ ID NO: 129150

SEQ ID NO: 134854 - protein, 74 aa, Heterodera glycines
SKGDADFEECLFSTSIERIERLSREEVNRELLLADRDNRMLKQRVTLLRDSYQQVQEENRKLKSLLNDNGMNSL

SEQ ID NO: 134855 - protein, 237 aa, Heterodera glycines
VQSLGLYSPAFQSLGLNPPAFQSLGLNPPAFQSLGLNTPAFQSPGLNSPGLQSLGLYSPAFQSPGLSFYAFQSPGLILLHFNHWDSTLQHFNHWDSILLHFNHWDSTLQHFNHWDSILLHSNHWDLTSPVLRHSNHWDSILLHFNHWDSTLQHFNHRDSILQDFNHGDSVFMHFNHRDSTHQHFNHRDSILQDFNHGDSILLRFNHPDSVFMHSNHRDSFSCISITGQFSCIPITGT

SEQ ID NO: 134856 - protein, 29 aa, Heterodera glycines
MFLFAISRRILIRFKDGTNPSLEARTLSI

SEQ ID NO: 134857 - protein, 137 aa, Heterodera glycines
MQLSQALRLVNERTLVSFVQQLPLVAQLFGDGRIVHFRIVRRHSLSLPARPHHKGTDKWAHFSMINSEKPNKNYKFCYFIGLFTCSSASSLQRWLTTAAVAGALSGSLITFSIAKLYSCAATDRRQWNLFLMLCNEW

SEQ ID NO: 134858 - protein, 80 aa, Heterodera glycines
PATAAVVSHRCSEEADEHVKRPMNAFMVWSRGKRKRMAADNPKMHNSTISKQLGHEWKLLDEADKRPFIDEAKRLRQLHI

SEQ ID NO: 134859 - protein, 77 aa, Heterodera glycines
KISHFHGVAFDHVELHFYKGGVPIWTGPIKASAVGLVFYPCLCIDENCVLDICFSAAKFSPKAPLGYQEIMSEQTLL

SEQ ID NO: 134860 - protein, 121 aa, Heterodera glycines
MNFHLSFLFACFKYLAALCYLIIAVLPKFGITNLKWMELCFVGITASLVLSLIGAAKCTQIWSSIFKYSAVSLVVGATVFNLTLRVEPRPWTEMDFKKESKSDVKNSKNEPIDEEMKEFLS

SEQ ID NO: 134861 - protein, 78 aa, Heterodera glycines
MAPETSTKTMEVVTTAKMENDSIDDDEISTLIIFNCFYITLLNENLTNILCEALKNISQIKKMVLCAQPSRTYPLLSC

SEQ ID NO: 134862 - protein, 87 aa, Heterodera glycines
MYGFITMRVVRHPVHNVLFARFALRIATRNATHFYWRSLASDTKNSMVPPESTKTPAMPSENLIKMLRKDLEEQLKLQKKERERLQL

SEQ ID NO: 134863 - protein, 113 aa, Heterodera glycines
MKIAVLVALFWRIASIFLFCKLFATAQVQATLPKFSSHKSEFAEKYSYIEPEDVEMARDQAREMFFFGYNNYMKHAFPMDELDPIHCIGRGPDYENPANWNINDVLGDYSLTL

SEQ ID NO: 134864 - protein, 29 aa, Heterodera glycines
FFCYLTNNFFSTAGYQLDFFTKNDQILAV

SEQ ID NO: 134865 - protein, 113 aa, Heterodera glycines
MTNLIEMTHNFEWKKLLHEQNNGPNFCKVWLIGISSNVNSAQMNPLLAQFDATIRKDFLKFNPLENAEENGGKNKSNKKFKMPKMEEISAKFDEFKLAFKSILVNKWKMFEAM

SEQ ID NO: 134866 - protein, 97 aa, Heterodera glycines
MVSKIVLLYPNASLPFLIQKFFLFYSTRPNFMPVQLSELDKSNIVNPFFVQNPEEQEMPVYTPIFPELNVASLVTNCSAKVIQNEMIKGKKNFYKIF

SEQ ID NO: 134867 - protein, 98 aa, Heterodera glycines
MANEFLALAFKPNFCKVWLIGISSNVNSAQMNPLLAQFDAAISKDFLNFNSINGNKQTQSEKMPETFEIVGKFENFKLQLKSILVNKWKLLDFQFLCG

SEQ ID NO: 134868 - protein, 419 aa, Heterodera glycines
MMVFWPFENLGKSGSGRSVSGGEEFEDLKALIHFAWRRGIVSTNANECWQNANFDEALAPVRWRWLRLIILYKQIKDLSENHPIWVDSVDDNVRNAGDQLVEDYANKMISNYLKNAFTRENGAEGIRSFFKSKFNENPIFYEGFVEKFPEIGPVKLRQTFENAFLDDSFLYGKYAEFLSSPWADYQIVLLDIGAYVNEIEKRIQMWEQLQKMERKIFPKFDTFDQSNSLILIKIEWTNSLTLQQKNYLTEIEHETMAEYNIKIKNSLKIIYTIVKSWSKRKARLLISGSYFLNSHSIDSGIDLLCIVPEKTIRMNAFFGNEKTKCQKNVCSSTANKTSLYSLLFENNEVTNLRKIINGTIFLITFNLNGINFDLSFAAISDNSELPLVINHQILDNFIQILWPFTDETHQKMIRALSIY

SEQ ID NO: 134869 - protein, 328 aa, Heterodera glycines
MSVAAGHELLHALGFDHEQSRSDARNYVILREDDGEIFICLDSCKDHDNKCQNGGYLNPNDCTKCHCPDGYGGEYCKELEENLNCEDLSGIPRELVANQSAVLLKTKAKCAKLCCAASLTDLKANEYKNWIEAEKPDMDIVISAHLSPKWTVPSTVFELTKCVNTDNLFAEKRNPGTSGLKCYDGVKHQFYDCSCHGDKKCLAEEKWAHDAFLCPIIKVNGIQIQGSRQRVFTDPKDFRYDWTRIEVNCYKAEAGTVSFWGYSKPETNEIIRVDEIHCLTYKAAGVPKRFKSLQVEEQPPMKKLSPSPFLANNASSLIHVFVPFVGHP

SEQ ID NO: 134870 - protein, 85 aa, Heterodera glycines
SIASFKRTNELTGDQLTLAPIHEGANVFKLIRCPIAAEGSEETLEKAMNDAMLCTARQNAIDIFIADDGVDDGLLDGLPGPSGDH

SEQ ID NO: 134871 - protein, 71 aa, Heterodera glycines
MSLFKFGDGSIKMKMSLNVTRNTLSAKAFDLHSVTSCIPIEWVCDGQADCLDMKDEANCTAKETKPECEKD

SEQ ID NO: 134872 - protein, 218 aa, Heterodera glycines
MPKSWGNANIGGGAAPTPIPSPKNQKQKQQKQPSKTGQKNAPKADQKKVAPKNQQNGKPKSDQNGGPSPMSKKEKKKQQKQKKNHMKLARESAERLEEAVKMIQARKEGSEKATGEENVKKDKDAVYNMVASSLETLLPVRFVFGRLRSSARLVAKQHSSNIVQAATLLEPKKFKQFVQLLDSSNVAKKGGVAEATEDDEEKAERKEAGEEDEQRVLA

SEQ ID NO: 134873 - protein, 401 aa, Heterodera glycines
FKTLVPFAVDVGITIHVTSISAVSEVDMDITLDFYLRQTWYDPRLAFQQLDPYDPRLAFQQLDPELARRIKKLTVGVDYLERLWKPDTFFPNEKTAVFHLATTHNSFLRIEPDGRIYTSQRLTVKAMCQMIYTSQRLTVKAMCQMELQLFPMLFPMDSQTCKLGLESYGYDVEDIDDSQTCKLGLESYGYDVEDIDYYWGERRSDGRRPEDAVAFDVFFLPQFRRTGYRVTGTHITTASGKYARLYFEVILSRNLGFYLMNIVIPSMLIVAISWVSFWLSRSMLIVAISWVSFWLSREASPARVGLGVTTVLTMTTPITTTNNTMPKVSYIKGLDVFLNFCFITVFALWVEFAIVLWVEFAIVSYWNKRQSRRRQNKFNFLEKQLINKHKNKNQSFNNAKN

SEQ ID NO: 134874 - protein, 113 aa, Heterodera glycines
TKIGGMLRHKYNNSSSSFSIVLLFILVRSEFGGVTGTLLSTENEQTNGVGESQQQQQQQPMVQWSDAYQNQPQHNQQQYDNNGFNTTYISQILNRLTDSKKYDKRLRPRYGEG

SEQ ID NO: 134875 - protein, 255 aa, Heterodera glycines
RVGRNRNNNEGAFGLKRMGRHGMKARSISIRSRRRSDVSSARIVLTLRMANVVLLLLVNLLIFSGIGHYQDKNGNRISLLLTMDKWSNAFPSDKLAFTSLSLKISAQFCASALSVAMLLTSISLQIIHCLRLQIIHCLRLKHSKFLCVCHSFGCVPISLCVCHSFGCVPISLFVFGLEMHYSACPWLDDFLIACPWLDDFLIATMEKYFDTQCGINGWALAGIFSLLSCGLFISDGLIVTFFNESHSTEPEKQQQ

SEQ ID NO: 134876 - protein, 128 aa, Heterodera glycines
MAEDEADNDVLLEAAETKDKRHAKLDHFFREAYSRAFNMPQLSDHTTDFNTYASAQAKFRALSLGKFHCFIAKVMNMTLTKAEFAEALGMRANDLFVQRMFACMAHDAQNDTTVTFQEFLEVLRKFTQ

SEQ ID NO: 134877 - protein, 458 aa, Heterodera glycines
MGADFLIRFGLMIRDEYVGRGTTRRMTFGGNKTQKIVKSPARLNMMDLNASVEVVLLRSKRNSDLPMLPNLNAISPHHAVVQTLINSTHVRCLMDTGASLTVAPRSVADELNCQTYSSDLEAMSASGHVIRLKEYAQVNLNIAGYTVRSLIYFVDDSEFTVARDYSVIVGWDVFEKLPPIKFDHLNGKFFVGENEANLCYRSVLLLNDLRVSAEKNTLIPADSQILVDASIESSPNPKNSFCIDRPDISLIKKGLSVINSVSPAGQKQIKVAVVNPTMEPKWIWKGTHLAFANELLCDRNGLLKENSTKEILALISERKKMEIDPTFVVDFSKAMVEGKDLEQLKALIEEFSEVFSKFRYDLGLFTAAEHHITTTTEEPIASAPRRMPYKYKEELKKHINQLLEAGVMVESDTPWVTPIVIVQKKDGGIRPCLDFRKLNEVTVPDKYPLPRLDSIMEK

SEQ ID NO: 134878 - protein, 92 aa, Heterodera glycines
MPICKFDSVGVSEERKGKASTTRGRRKEQQTEQKKQQMVRPTTGGGDEDEAETTAGGGGEKTAAGEESKEMEMSQGWEEGAGAVIEPMEGQK

SEQ ID NO: 134879 - protein, 37 aa, Heterodera glycines
ICCCVEDDKVSTDWLEEQITDFEDLVQSVDVVAFNKV

SEQ ID NO: 134880 - protein, 66 aa, Heterodera glycines
KKFFLIFWLPFFCFWWGAWNSGIMCTRPIWQVKQRLLTSQKVRCRDETNQHCLPRGTRHGPPKEWI

SEQ ID NO: 134881 - protein, 506 aa, Heterodera glycines
RSDGPLKTKSREILHQIVTRCYNRAVDNEKALNKHYEAFSSQTYGETSFERMRMIIDELRPTELKHGDFLNEQHRSLITEEATIIFINNFAFQSDLEMRIKRELLSDLKQGTRIISTKPYVPLNKQGAITDRQLNDISVITDVVEMKACPNPCSWTSAYVPYYLHTINRKKLEMYFTQKNSSRCKSSDFGSRRSSTPNSKASNSRESSLDLRDKSENGRTNGEDICFGPTTRRKWHEYVSDLEQQKKRKGGAGSSTTPDERSVTNSSSGTPTPVSASSAPPFVSTALPNNANANTPLPQKTICVNNLRRPSSIPELINSVKEEPLVESSPVVDISVGPANALVVNPIHQQQNHLINEVSKFEPITPVANRKNDEGDGKKNVAKRSNERKEKVQPTVGGKRGRPSKADKMLGTHASPKMPRLSDDAKDGMEVMHQMTLSVQAGKPIDPASILADMAEAKRRSVPMDTINMALPFPNLSKPFTDQTQSGGDIQSHHYTERYPGLSKFL

SEQ ID NO: 134882 - protein, 56 aa, Heterodera glycines
MYNTVPCLHGICGPGRRLLHTVIIGYTVDCGQKNCTLNNAYGNIDCDSSITTRTRI

SEQ ID NO: 134883 - protein, 129 aa, Heterodera glycines
MESYVQVEDQDSRDSGIRLAQSTTSQQSCLAKIYFPTLFDFGFKVRELQYSLDTVERPQVPHKAFRSINADTMANLLGSLTEEQFQRRALALREFDRVRNESRYPYVDYKEIYLLDRGYRYFFKERKFG

SEQ ID NO: 134884 - protein, 126 aa, Heterodera glycines
MPMETVCRRKRGKRRGEDMARNTSDGEVTSDGGMPLVKKRMVTRRQAMKEATTTAARPHRMKRFSSPTSPVAFVSSNDLLHQLDFGIVSIQPPLFSLNDAATFSVLKRIGEEQKLSLEERRLISGD

SEQ ID NO: 134885 - protein, 36 aa, Heterodera glycines
GLSCRNLMRGNITVCEAVARTRTNSNYQFLFFQAFP

SEQ ID NO: 134886 - protein, 640 aa, Heterodera glycines
MSNSFFVFLPSNVSDYPDNQPNKFRVRLPKPLHFNGTWVCGLHSISYPYSWSTIGTLDEQWIDIHFTDRSAIDEDRQRIIRVPVPKASHSRVEQLRDFLTATLRNHSGAKMLPLPRELEENRNRTKPLNSPPPAKRNKRDESPPVFDENGNELGSPPSYNGDKEDEEEEGIISESPPHYEGNETVTIDFPSSYNEDYEGVIADSPPRYVETQNETVKTSKATSPQPPPTPSTAKPAPPPPPPPSTNSTPISIKTPAVQPPKPTVSTPPPQTTITKAPPPPPPTKSAPIVNPSITTTTKTIPTPPVTKPTTPTPPVAKPTTSTPSVTKPTTPTPPVTKPTTPTAAPKPIKPASPAPQPPKPSTPAPLTTTTKPPVPSPSVKPTISAPPAQQPKSPTPSTKPIVPKTDAPPKPPPPVSLSAKLIPSAPTPPLDSPPRFEGEENKNVKSFAKPPPPPTSAAQIDPSRLIHTLDPPRIYFKTPPANQNPLNYVPNSVIVLFNNDVERFKVVFNEEIISHLSFSPQLGYVLGFENPQHVVSNEVAKYGHDLRGGISSFAVYSKGLTENMIIGNTLSSLLRVVSISGATPGDYTEKIYDSPIFARVLPREINEIEIELRTMDKGRLVPFAYGTTMVVLIFKKVINF

SEQ ID NO: 134887 - protein, 27 aa, Heterodera glycines
MHRIIAAVKKLVVGSVLAVRCTLCVLL

SEQ ID NO: 134888 - protein, 313 aa, Heterodera glycines
LRASQTCYCSISCFNTENPSKKLCPQMQANYLVGRVSLVIGINQTNRHELRTAMHHHPPNHEKAINLFPVLSQIKPQAPFPVLSQIKPQAPLLNRKTFVSGKLPTRANKSNRKTFVSGKLPTRANKSRRIASWHRLRSELGRYLIAFEPLTFFLINEDILAKCFRCSPSCYGPRISPLTQYEWPRLSLLTIISVSKTNNRTEILFYYSIFLTAAIILCILRAGITAAAGTRLALSILVKGFKLYPFRPASEIGLVISRHYLLALRVAISQAPSPESNPYPPLPVISQAPSPESNPYPPLPVITMVVRYTTIES

SEQ ID NO: 134889 - protein, 64 aa, Heterodera glycines
MMDDLYTVFERRPDEKIFKFNLTFVKFASEIASLRVINGNPDTNFNDHMLHHNLARNAATDFDG

SEQ ID NO: 134890 - protein, 92 aa, Heterodera glycines; identical to SEQ ID NO: 125147

SEQ ID NO: 134891 - protein, 193 aa, Heterodera glycines
MASSKSPIFLLTVLLIMLLICPCFNNNVNNSLFNPASDDCVVAVRNRSEIPDGLYEYVYGTLRTPELREAAKKADIFRNTFTTDCVPYGEFGTIWGGFWGCLTYTCKDMFGKDIFRVNGCFPKSDKKCPAIFHDYCWLATGDLWKCRHCDELVDGKVCNSFDQLIKLDQPADDLKSNSNSYSTSKAEKLGPAP

SEQ ID NO: 134892 - protein, 140 aa, Heterodera glycines
LYEYVYGTLRTPELREAAKKADIFRNTFTTDCVPYGEIGTIWGGFWGCLTFTCKDEHGKDIFRMNGCAPESGKKCPKFFNTFCWEAGGTSSNCRHCDELVDGKVCNSFDQLIKLDQPADDLKSNSNSYSTSKAEKLGPAP

SEQ ID NO: 134893 - protein, 39 aa, Heterodera glycines
MALNWRRMKSISHLYKGILFCKIQFYPCKIRLLGLKQAV

SEQ ID NO: 134894 - protein, 78 aa, Heterodera glycines
MDGEHTGSTDWAGGTWISKSKEQALTFSKEAKMKTACNGKPIRLSDQSFGILEDDYLKIVNDCGLGKRAIQEEQLAHN

SEQ ID NO: 134895 - protein, 57 aa, Heterodera glycines
MFYFFSVISFTIIVHPCLIRILNASPSNLNGQNAKNIANIWTFCTNICSENTSVFTQ

SEQ ID NO: 134896 - protein, 85 aa, Heterodera glycines
MNWLIGPGWSSDRHMREILLGLSTLLEEPNFESPFNEDARTQHTLDQNAYFESVRRTAEKARTKNMVKRFYFFVNLKNQIPLVAY

SEQ ID NO: 134897 - protein, 46 aa, Heterodera glycines
MSHHLANRSFFRIKEDSADCLEYLFIPNLDFDFQKSALYSNAYLIA

SEQ ID NO: 134898 - protein, 76 aa, Heterodera glycines
MWKVFMHSLRVDYLGNCDRNETNAMIKITKTGTNETVGLFCMCQGRHSEGQKIFGNWNSESPEHFGGTKIGLPCHS

SEQ ID NO: 134899 - protein, 259 aa, Heterodera glycines
KRKSTEEPKPDTDTKQSKPEQQPAQQKEGKSEEGQKPKTDTSSLSKETQFVLQKLRQQEAIAQAKELSKVIREVQATINFNRNTDLISYSRALQKASQIPEQDEATDNLNFHSNFSPEINNKFLEELNSLESTHDDIYNRAVADCERAEQKRINSVTKQTQNIFEAVGKAIKAENFNKGLLTELAKAINSPSYNSRAGKDKALIIVNKLQDNLTHHHRFLIGQQKTAEFLRKTFKIPLEDEPSTSANNLEKKDFFFNII

SEQ ID NO: 134900 - protein, 57 aa, Heterodera glycines
MKKLENLFAFGKANRAYVKSFRMIPTMLDLDVKEKSYRGKTSWRRNASTETQNFCLF

SEQ ID NO: 134901 - protein, 28 aa, Heterodera glycines
AGQQRVQVALNADVTGDTARHQETKVAE

SEQ ID NO: 134902 - protein, 66 aa, Heterodera glycines
MPSPSYSNFGRFGGGGRGGAYGGGGREESPEEWEDELSEEEEERRKWDKSKGSAECHFGWVAQWRQ

SEQ ID NO: 134903 - protein, 108 aa, Heterodera glycines
MAFAQFFVNCKLKSIESTESTITIAWKSQSITDVEIECYEVQYKNVNEVWKTIKCPQHAFVPKKSYTAVVKNLKPATLYALTVVALNKHGNTVDVLTMSPVATKPRFT

SEQ ID NO: 134904 - protein, 24 aa, Heterodera glycines
MSPPDFLVSVVLLGASSLLCLGPA

SEQ ID NO: 134905 - protein, 133 aa, Heterodera glycines
CFLQLHHLPFSFQFFCHSHLPPNFCLFVHTFSDHIFPFGHSFISFFPLFGIFSPRRFLYPSASLFCILIFAPPQGENVLVPFHSIPFHLDTHSPLALHSFSLLTIFFLFAESFPIFDPLNNPYRPSLPPIFTI

SEQ ID NO: 134906 - protein, 53 aa, Heterodera glycines
  unsure (1)..(53): unsure at all Xaa locations
CLPTPGSKNIAILPRRDSDLEAFSHNPSDGSFAPLVYRPSTXTXCLNLRFLSY

SEQ ID NO: 134907 - protein, 1250 aa, Heterodera glycines
MAAFMQRTKNTEYGGDRVNEKTIRKLDFIIRKYHPLAKELMNFHTQYQKTLDELGPEAVLNFRLTLVESREAPLNIRDPSLHPRQANLPDEGNSLFAIWAESDQPPLLKGIWITTDEGKLQKFQPHHPQTDSLCYPTLFPHGDDGFHTKIPYNYKNKKRDDEAMEVNVESDENAFDSDENGPDDDLSVTSSLDSVDKSGTRQFLSVRTYIRYRMALRKDNNFHHIWSAGGGLSQKFILDYSARIDTNVANYLRKPELNLRSTLPENALRWLSRNAGLNSTEELGSVVMFRRSEPGTRAYFQHKFYDATTIMSRFKRPGFASFFLTFTTNPRWPEISRNFLHQGQRTVDRPDLICRIYEDKLRHLHYLLDKKNILGKMIGQECREFQKKYGGPHAHRVYHTDLLAIPENVDGLIWAHIPPEPNKNDKSDWAIFICKVRELLPKYQFHDCGRHCLNHKGKCKKGFPKPFSKFTILHDDRPAIYFRPSTEDGGQTLTVKRGKTQITYDNSRVSAYNPYILVHFETHHNLEYAYGQSTNLKYLYKYPFKGPSFSYVKTNEENGKTGIDEPAYYARMLYRSSPEAYCRIMSLKYAKLSHTVIALSLHLPGQQKIYYKPSEKASVAQQVQAGILPETPLTAYWKMCETDPDVRKIVFERMPEQYSFNKSGKFWKKRTFSARPDNIKNRKPIIGRIYPVSPRNPELFALYLLTKHFPGNPQQLKMVNPTHICQTFLETARLKGLIDDNDVWVRTMEEGAASLTPAQMRQLFANILIFGATEKCLIDGALLWEKFKSQMYDTRCTDAERTARIDHALALLEKLLVAQNKQCKDYGLPTPVISIMNDPQRGLNEFFFPQQLNDDDDDDPVDTTAFERGKLNAEQQKFFDMVKNAFLKTSNSRLFYLCGDGGTGKTFLLNYILFQLRKIGAKIIPTASTGMASTRFYVGGTTVHSAFKFGINVEPGKLPAIPFDSFFGRRIIESDIIIIDEMTMLERTVFENIDLLCRQLCMQKRHLPFGGKCVIISGDWKQSLPVVINSYGSAAQVAACIQSSPLYPIFSKYKLTQSMRVNPNEIEFLKWLDDIGRGLNGDTVAIPKGMLVDSREDLIAWVFDQGLNMPSSEMLKRLLLATTNRIVDLNNSQISQSMLGNFIEYFSVDKATDENPFAVNAADFDVAQLNQLNPMGMPTHLLRLKIGSIVVLLVNLNTSKGLCNGTRLLIKKLTDNLIECETIGSGSSGNGIIIGIPRNRHTFKDKRPDG

SEQ ID NO: 134908 - protein, 203 aa, Heterodera glycines
MPLNFPGHWTLLIYDINYGTFFMDSLQISELNFARVLRVKDIIGELCQINSEDIIIQKLPPSKLTLQHDGCSCGYFVCLYAEAWLMNNQSLILPNIDINLEKRRILWHINSLYNRDNVVYHPCSLFVAGENDNLGSLHHSRDSSMSIDSNINQTPVKRRGRPAKNRSGSGRPKKTENNQILMPVFSHESFHFTELDYSGCSDS

SEQ ID NO: 134909 - protein, 68 aa, Heterodera glycines
DANFGEYHRKASTNERQKEEAAEGAADEADQCSHISIPVQYRKHSSTSETSSLYDQIVEAEGKALINK

SEQ ID NO: 134910 - protein, 335 aa, Heterodera glycines
MILELAIDTANECQTNESLDGIIRQNYDKNLEEMFKKAEKKAKKDSPWKAYKYKHKIIIRSKFNDESTWTDEALFSEFVKGLATNFENFFKMAKEYANYLWRINEKGCIYGYNRQMINFGLYKIKNMKMYLMQKYEAYLGLMYLMRENWHCDKIGEEFNEYKRNICQKYRKYLHILYEYLFRLYAEAKNPKMSKQLPPFVNPIFIGRSYLYCLIFVINTLNDYSKFFWRNDDLWDDENVEIWGSFLVNEEELNDEIKLQIAEKARKNKIKKNISKLRKQFERKMKRLSEKATEKAKVAKEKLEKAISKATDDEAKKNLEEEYDYIFGSLNSSPFS

SEQ ID NO: 134911 - protein, 16 aa, Heterodera glycines
EAIPEGFGLPINLGAS

SEQ ID NO: 134912 - protein, 30 aa, Heterodera glycines; identical to SEQ ID NO: 130616

SEQ ID NO: 134913 - protein, 18 aa, Heterodera glycines
LLINIWCVSEHVLKNIYE

SEQ ID NO: 134914 - protein, 31 aa, Heterodera glycines
NYYFFSFRGSDGNVRPLYSDQLHISANQPSK

SEQ ID NO: 134915 - protein, 68 aa, Heterodera glycines
MEGKLLVIAVCLFLHSFVPKEYYQHLRNASSSQNANSFVDKQLPSQQHSVLTNTARNTEASVLAKNSN

SEQ ID NO: 134916 - protein, 317 aa, Heterodera glycines
MEIFNFFLLFFFVGQNLIIAEEEVKPCKKKSFGHDSFVCVCSSDYCDSPEPLGDVSGNKMVYYVSDKLAHRLAKFKNAENKNEGASDDTEFEVRVDASKKRQRILGFGGAFTDAAGVNLNALSERSREALLKTYFDKEIGIGYSVGRVPIASSDFSTREYSYLDTPDDFNLTTFALAREDFEEKIPHILKAIQLTGGDLRLYASPWFFEEYAKQNVTFWGLTLQNEPFIVYNGNLSWQAHWFDSKSQCDFASQLLLPALKSSEASKNLACAGFFDWEHTPLLGDWIRGWSYGHDILNQLRNWVVGWTDWNLCEGKHS

SEQ ID NO: 134917 - protein, 206 aa, Heterodera glycines
LEIFPHPDWAMTEPIVIRGVGHLAMFGLNSHFSTFGLNSHFSTEFPSALTGKLAPEEFDDTLRRVNYVLQRNVSRNLRWLICGLLFCCCSFGISLWPVVCLNRRTISALEKTLDHENQQLYDKLGLRTISALEKTLDHENQQLYDKLGLHWKLARLPVEPSNRLTEYVLLLEHWKLARLPVEPSNRLTEYVLLLETLPRIPLSMPD

SEQ ID NO: 134918 - protein, 58 aa, Heterodera glycines
MIGELNSIADLISNFFLAAFAITNFACFDASAAKSPGFRPGFRFYNKWLSLFGSALCV

SEQ ID NO: 134919 - protein, 280 aa, Heterodera glycines
CRPEYCSNVNYSNTNTVKCLNCLTLISFLEFSGDLKDPSKSIPRGTFWAIAITTLTYLWPRGTFWAIAITTLTYLWCMVITCMVITALTTVRDATGFSEPELHPTHPATPSRRAANDTCRFGLANDYDVMTLQGAWAPLITVGIFSTTLSSASGCLIGAPRILQALCADKMFPYMHPFAKGYALCADKMFPYMHPFAKGYRKTNDPFRAYFLTLLIAISAIMIGELNSIADLISNFFLAAFAITNFACFDASAAKSPGFRPGFRFYNKWLSLFGSALCVL

SEQ ID NO: 134920 - protein, 88 aa, Heterodera glycines; identical to SEQ ID NO: 124691

SEQ ID NO: 134921 - protein, 147 aa, Heterodera glycines
MLEQQMEEAKKVKTLVNMLNVRRKPIKTVKKLEGIPNEMKAKSTNLEVIMKTNEQQKMRGQGQSKDEKKEKPKKNKEKKEKGKEKKKKKKSDKKEQGEAEVRRAKRKSDDPWGEEGGNSVLEEPLTLPDNERDGTTTGRCNSERIRK

SEQ ID NO: 134922 - protein, 115 aa, Heterodera glycines
MVEEAVQEQERRRSIVVMGLAESAEPKPSDRVAPDSTAVSSILDELGIECSISNYRMAPPPPSGSLKTNAIMMVMKNVNYLPAYLQIHLTFLMLTQAIIAWETIMQSMLYIEELD

SEQ ID NO: 134923 - protein, 370 aa, Heterodera glycines
SATRAREIAVSKDTQDERALEVEQCECPPGYVGTSCEECAEGYERSGQGPYLGHCVAARQPPERPLCDSAGALSAHPQHDRRCDCKPNVVGVTCDRCAPEAFNLSPQNPQGCLRCFCSGVTRVCESSHWRRNRVELDYARVDRDQLEATTSDAHSPYNRRRNRRFAEQSESKSQNERIVHTVPSPQVYDGSISFHGFYEARGQTLYWSLPQKFLGDKVTAYGGKLRYTFRFSGAGPLNPDADAIIRGNNIQLEYVSRQQVHADRPNLVEVKSAQREGAANIGKCPPPPQVPITELGWRHSNGVSASREQLMMVLADLDALLIKMSYMRECSQASLVSASLDTADAYGTGEGALDVEQCQCPAGYIGSSCE

SEQ ID NO: 134924 - protein, 173 aa, Heterodera glycines
MCGSMCPPALAKLLGWHRAKGGQRGQRPESFLTAYEMEQLPVMLNELEKANRHFWQMVCWRWSQNEQKAAAERSAKKARHQQQMQQQQQQQETTSGEPSPKDKRKGCPDDSYVNGCALRELVRLMAKTMCEKGTFDARTETMLTEFRARILGQRNASMRETMGKESKAERRRK

SEQ ID NO: 134925 - protein, 92 aa, Heterodera glycines
FMNIINFKFAKSPIITEVPDFNKMYELYDPVTAMFFFRNKHIMIDLGTGNNNKINWPMHDGQELIDIIETVYRGARKGRGAVGQLKDRKNPR

SEQ ID NO: 134926 - protein, 84 aa, Heterodera glycines
MTVIGDLSTQKQLKNAVGNGAAEFTQRRKKGKYSPNSTECEESPLVPNGRLFHVGQRILRALLLLRHACHSDHLFGGGPQTVGQ

SEQ ID NO: 134927 - protein, 123 aa, Heterodera glycines
MVHMHRLVGNQPHSGGSAFFTSENVELVNQSMGTNGHCSVGVAPHNFGSFGQPTNVMAFSSGQAMASGMDNPIVLMGQNFSADQMEVGPGRTAETNEETTGAFRMLFKCPECGLVKNSNGELE

SEQ ID NO: 134928 - protein, 64 aa, Heterodera glycines
MANFTIRSSIEIERTRKSTPMVAAMSGSNLSSTNRAIRLDFPTPLSPKEKYKKTWTMELFHEPM

SEQ ID NO: 134929 - protein, 132 aa, Heterodera glycines
MAATIGVDFRVRSISIDDRIVKLAIWDTAGQERFRTLTPSYYRGGQGVILVYDVSNRPSFENLDHWLLEVDTYCTKSDTVKMLVGNKIDAERRMVSREEGLQFAKKHRMLFIEASAKTREGVQCAFEELVEK

SEQ ID NO: 134930 - protein, 171 aa, Heterodera glycines
MQYNACKPRREAGQFQNFVPHFTVESPSTLLDNYVSMSTVAFGQLWNGKMGISDGLLIMQYNAFKPRREAGQFQNFVPHFTVESPSTLLDNYVSMSTVAFGQLWNGKMGISDGLLIMQYNAFKPRREAGQFQNFVPHFTVESPSTLLDNYVSMSTVAFGQLWNGKMEISDG

SEQ ID NO: 134931 - protein, 79 aa, Heterodera glycines
IVKNIRKLFSVLIMLYNAFKPRREAGQFQNFVPHFTVESPSTLLDNYVSMSTVAFGQLWNGKMGISDGVRSFLKIPLFV

SEQ ID NO: 134932 - protein, 402 aa, Heterodera glycines
MEDYSPGSMNKEKFIKFEKWYNENKETPFYLDEELKNYCRNDTEILLLSIIEFRRILINDITKGFDPLPRSCTNAGVAMNIFKALFLLTEQLSIVPEKGYERCDRASVMAIKYLEWRSKRDGIEIRHAGNGREVKVGNYKLDGFIANEGGRDKCIEVMGCYIHGCLNCYDPAAELIGGRTAQELNDETQERLMELRKTLDVEEVWGCQIEKELKKDEEMRDFFDDRGNEKGPIDPRMAYAGGRTGPMKLFAKSDEKKKISVYDIVSLYPSVNYGTAYPIGLPEIIIPKSDEIDVNWTRPEDLKYKGLYKVRVNPPRGLRVPVLQLKCDDRLLFPLCWRCASKFKKETTRCNYNCPHDETQRRYVATYTSVELAKALECGYSVDRFYRAWHYEEEADDLFKGY

SEQ ID NO: 134933 - protein, 71 aa, Heterodera glycines
MDYETVPKWGDGDDGSMGRRKFGRFEHCRLYVFPCQGMRWAFVSTSKMVSNYVKVIYAFEKRSIILDYNDE

SEQ ID NO: 134934 - protein, 59 aa, Heterodera glycines
KVRSPLFHSNFRVLNRFKNRFKCFSEPNFKLFYRSQHLRKPIKVFLCDFEPIPYSAILP

SEQ ID NO: 134935 - protein, 375 aa, Heterodera glycines
MNPWICNDVLMDILPFFERVELGLKMALLSPRFDGLVDKHFDGKSELTIWRPILIHKYNVAVLSVSIDNTNSMPFPLPNHSLHNKIRFNNLLIKYIDHSVIAFLRANKQIWNKGTNLWLSVPFARDDQPIWGVFVREIWPIFAPYIRHLNIYNDGLLLDNLRRFISPTILTDLNINSISSAFLPDATDDFDEPNAIPTAGQMLSKWLHIPRKDGQPKRLCCMLASAGDVNNFKEEFLNATTSVSYKIKFIVNPPSPQIVPFELANERTMEKLTLIKKSGHPQEDRWIMKRCQNGATATTDQWEDGDLDDLNTVSFVFFPVKGCIGRKELHINNNEQRTATKLCIRPICPFNNIQIRRSFLNYFSLPNISTVERMA

SEQ ID NO: 134936 - protein, 127 aa, Heterodera glycines
GSTGPPKAVGLTHYQLINGCRIAAQAIDIKRETVLCCALPLFRIPVFALAIFTPFLIESRCSTLLTNATALRLLLKTSPLTQGQKFSLPSIDTVILLGDRVSTDLLTAIESVMPNAKGIAVILIEIT

SEQ ID NO: 134937 - protein, 41 aa, Heterodera glycines
TKLRFFQLYNMDQQQKIKTKRNKVKLEHDGALYVFDQLSAD

SEQ ID NO: 134938 - protein, 31 aa, Heterodera glycines
FISGQDVFAWPFSRGRFRVVAYKREFITHIY

SEQ ID NO: 134939 - protein, 99 aa, Heterodera glycines
MRKYQILCKFTDVIWPQGMSDEAKKQMAKDYGEKNSETAKNPCSKPRRMGRMFEMRVYGRVGNPHTAKPRREHTWRYSPYKAHYDYADYYSDGSVDFYY

SEQ ID NO: 134940 - protein, 62 aa, Heterodera glycines
RFSLEARAHQLLAIARLHCYEFSNFYANCVPNLLSEFGRENGLGEQSRTKLEKALAHSLFKV

SEQ ID NO: 134941 - protein, 53 aa, Heterodera glycines
MSENDLARDGDDGVGLFRHLSPNDYEISVPSRRLAYFSEFSSQKVKFCLKKCK

SEQ ID NO: 134942 - protein, 58 aa, Heterodera glycines
MGCKMCVLTLFLGNRKSYAFATRTVLKILVSVRIVLIILKHTRTVLKILENVRIVLKI

SEQ ID NO: 134943 - protein, 990 aa, Heterodera glycines
MAMRDERTKNFRICVQYSRKHSMLIWRDSCLIMPIALAELKKTFNLDCEDKPFFPYAFNRRENDAIRLENLPDESEYEPGTMKADKYEKFKKWYNDNKETPFFLPDELRAYCLNDTEILLKALVKFRQILMDEITDGFDVLPISCTIASACMNIFKVQFMQEDQIAMVSELGYERNDRASVIAIKYLDWRAKSEGIEIQHAGNGREKRWKQFKLDGWIERQQRCIEVLGCYWHGCEKCFKPNEELVDGKTCRELNETTHDRLRQLREPDDNGICLQVEEVWECEINDQLKKNDEMKEFFDDLGNERGPLDPRLAYCGRRTGPLRLFAETAEDEKISVFDIVSLYPWVNYDTDYPVGVPTVVHPSAEEMIVNWTKPEHLSYRGLYRVRVIPPRGLQIPVLPMKIDERLLFSCCHRCAALFRKSVTRCSHKCNHTDQQRAFTGNFTHIELEKALEMGYIVDRFWRAWHYAEWSDQIFKGYVRQFIRLKVESSGFPEGIETLEQKQEYIDEYRRIYGVDLDFGHIKKNPGLRFIAECNESCKPCDYHFVESMDGEHTGSTDWAGGTWISKSKEQALTFSKEAKMETACNGKPIRLSDQSFGILEDEYLKIVNDRGLGKRAIQEEQLAVQLTAGQLATSRSIAQLFSKECRRSSRGGNPTIQARRLLRRKDVMARWLNEDTMQIFSCAEFSMQNVDYQAVNNCYRYIPVQIRIDKKTLNAFLDPELHILTASSPFADCGNFRYHYLQLSQSNWIKIDTRTATIQKIDSSSISEIHEASGDKSLLEITPLVFHRWTIDNETGEGLFAHLDEWLRLDQWKSKEKEHKTARALTLGALPNGVIGLTEEWFMEKLRLLVSYWTTACCIYVTFIFGRDVLIPLVWVYLMGPVIVTIRNLVTGNQWTQRNRATRGTRRAPAISRIEAIELVPPPMPQEMRANETASSQQEDPEPSPLVMDLKRQMVAFRSKRRFQSRGNVATERQPRMSVERTNGEDGEE

SEQ ID NO: 134944 - protein, 55 aa, Heterodera glycines
PTPPFTPFFPSSFPVCPNFLIISSINHSSFATSFIPPRPPHLSARRTFAADVQSR

SEQ ID NO: 134945 - protein, 18 aa, Heterodera glycines
YREATPEGFGLPINLGAS

SEQ ID NO: 134946 - protein, 115 aa, Heterodera glycines
GKLEQAGQPKLTVYTLHLATPEELRFSAGLFPVHSPLLRESSLVSFPPLTDMLKFSGCSRLSSGRKIKAGMPVIQALRHSMQSIGALELRSVKRELEPQVRASTPKPHSRAEQVT

SEQ ID NO: 134947 - protein, 158 aa, Heterodera glycines
PIFFTQENIAFFGGDPENVTLFGQSAGAACIDLLSLSPLAKGLFKRIILMGGNACTDWSMTTPERTQQAAIRMARKGGWKGADTDLDSLLTFMRSVPAYKISAPLIGKSAFNRHKKGLDFCPVIDGELITKSPEQMRRELDWPLEVIVGGTESEALLF

SEQ ID NO: 134948 - protein, 15 aa, Heterodera glycines
MKKIIKKNNAGVKML

SEQ ID NO: 134949 - protein, 87 aa, Heterodera glycines
IIFIQKKFFFGFRGSTLNRCAQIYGETESFGNSFPIACTLILRWIFAPHNCLSTPNGHLKKSIYFCFRGSPPEPMRPDLWGDRILRE

SEQ ID NO: 134950 - protein, 68 aa, Heterodera glycines
FLPGGTQFFTLTTPALFFFNYFFHFITQRSRLIRSSPNFAGKLLRTLQMLINFLRIFCLEEHSSSHLP

SEQ ID NO: 134951 - protein, 42 aa, Heterodera glycines
MIAYNLSSKTKRQSEEQDCVNIRHIQLRRSISCIFRIIPQEF

SEQ ID NO: 134952 - protein, 71 aa, Heterodera glycines
MLLFEFGFVEFETCRNCALRWADEKCRQNGIECSSGNRRSVLGPALFKIRFPNIHEEDFAKCVGKNFEIGN

SEQ ID NO: 134953 - protein, 90 aa, Heterodera glycines
MLKQEFLSVALSGSTSESGYDPIQGFDKICIILLKNNKISYSSEDSPGFSLLDCKKMPVIRARRHRDQVGIFLRSGPNHVFFKRIRMPTK

SEQ ID NO: 134954 - protein, 253 aa, Heterodera glycines
MEGLEKIEKSEDLWLEAIRLHPPNVGKNIVANAVRALPHSVKIWLKAADLEADLKGRKIVLLKALENNPSSVRLWKAAVDLQGPEDARSLLTRAVECCPLSTELWLALAKLETYENAQKVLNKARENIPTERMIWIAAARLEETRGQAKRVPLLIDRALISLRSAQVEINKKQWLEDAVECERADCPLTSKAIIQNVLAVGVEDEDRKHTWMEDGEWFITQGALQCARAVFSFYAEHISRKRKESGRKQRSLN

SEQ ID NO: 134955 - protein, 272 aa, Heterodera glycines
MDEDKLALKNGQKDDTGGRESENSDKQGEQFAEDNFDTNPLVEKGVMQKSLIDNAFDVFECASQNLNCLLANAEMSAIKFDQFIKVVEFRTFGRQYFGNPCQLIRHTLMDQSRKYIERYHAEKMEEVKMFLESETFTLCPVPVQFTLFDLPEFFFLKELQQKQQNDEQTEEETEQNSVETFVHGKSIRFSVFRHSSEMDTEIFPYSPEQFDESPRRIGDRRRMICKNGEVSQCSSSDDGTRNSIEDESLAPSPHNAMPNLCNSALNLLRVIG

SEQ ID NO: 134956 - protein, 92 aa, Heterodera glycines
SLAAVFDLGDASFGCVAAKIILFQSILKQISATDWTTGEIHSQHSPYVDTIVQECSQFKQKFVRLFPYVHISDELYAAIWSMLLLCIFRILV

SEQ ID NO: 134957 - protein, 113 aa, Heterodera glycines
CSIEGRALQLLDVEQLCGELEEITGLRPLPHRPFVENFVKAFYLPFGELQNWMVNHTEYSLSQTSAILNAAAGAAAISSSSVATNSRKATMSRIMANLLDAGGIGEGGNSLFQ

SEQ ID NO: 134958 - protein, 165 aa, Heterodera glycines
NKLFVNGHFTKDLSEDEQEELKQYQEQLDQFKSEVKTYLEERQKQFRNQSEVKTYLEERQKQFRNQVARQGGAEAKEGGTQLKKPEPPKKPSFCSDKATTQYVFDGCSVQGDNVYIGDTFVRKLSPVRKLSPDEQKELAQFDQKFTAYQKAVTAGFRKVENCFGK

SEQ ID NO: 134959 - protein, 297 aa, Heterodera glycines
MPPKRKNIYLESYEKEFRHIKKSRKGEEFALCVVCNDDINLLSIGKSAISLHQKTGKHQKAAKAANRSIPLQEFMPNTSAPSTEDRKVLAAEGRAMDIEAVIFKMAGHFKNSTKRIEELKGFCEELESFYTSVLAYLDKWHRIDRFPEKLQWVALAYRKIPHDDALALARQIAPELTNDLFDDVSEANQILNSFPNDEFQKLTPEQKWKKLFEADLPNLLKLVSVVLSVPVSNAFVERVFSLCGSQWTDKRNLLQVETVKALVQTKVNYDLSCPQMYQMLISNHKLSEKIGGWEKYF

SEQ ID NO: 134960 - protein, 393 aa, Heterodera glycines
MTISAWKFSNISITRKFQKILLCIILFVNVSRLGTDREVRSSSSGRIFQVRGSGATSLVQSPTARVGGGACTMLTRLQQQQQQMRRCVGGATSAASPTTVATAAVRQDSADEASMGSVSTVASGGAVQQQRFKMRRPKSTGQIIIQQQQQMVEAQNHHQRKKMSENHQQHAVVMQDRGSVGTAGTGQSGGSGSLSLAPVIAGAGAVRGGAHAQHNHQCNSNNNNNNSNSVSAYNTVNTAYDPSYTSATVYSDSITCLHAPGVLQSGGGVIGAGGGASSCADGITDQRRGRLIEPVKSFRMISRLFDSVNNFKSYIDSKLAQTELARSVERPSLINRYFLAGKTGIKPGLFPGQNQDLGTQLYAFFNTRCRSRTTLILTNSKILKTNYKLNMGL

SEQ ID NO: 134961 - protein, 121 aa, Heterodera glycines
MIDDDISEMELVNEEELNYELKEEKSEENGEKLMIKTKKQKIKHFNDPLEITKLRIEFEEKMEKLCQKIKENAKKEKAKLEKALKNAANNEDEKRHLNNEYDDKFGTFNSSPFSQKISGTF

SEQ ID NO: 134962 - protein, 230 aa, Heterodera glycines
MFMALPDDLLSRFPVPAAFRKLSPAQQRRVHQIYYSKRIGFDEKMRELGRLINQLSTDQQRRLMPIRPVEEEQKPKKSRARLVGVFLKQSYQLDPDNFPLPLNGDSHEIEDDIRNLGVRLMFGQSPFDRTDIFKVKLDKLKHAFSKRTQKEDKQTKATNEAALDCVEEAENAWIDRLEMFPEAKLFEFRHNDNSALTAQKSGSLFGNLEKLFAAINGTVHMDWNSNDFSS

SEQ ID NO: 134963 - protein, 160 aa, Heterodera glycines
MFCPLNRKSRLFKYSANLAKWTIFYRLSLISTETEGGRAQWVGKGCGEAAIIGPKADNSYHLYHMGRKQTLLRYSPYSNAVNAKRTQRLLATKFKAFHRQGAPEDERRSVFRAVERVSAHGLGSAAQHRLGRIFGTHFSHRSPIFCQIYIGFNILSKKGF

SEQ ID NO: 134964 - protein, 105 aa, Heterodera glycines
MSQLNIWCSMAAVFYRQINWITSFLLTDRSVKGKSAYKYELKINLKNGGYGLECLASFGVIVSHLKPLNLSELELSALNGIQLWNCTAFDGTAELMSSHEVFWPK

SEQ ID NO: 134965 - protein, 75 aa, Heterodera glycines
MTIMISIGQWMMHIIWHQIDRLRHIANFLINYWIEFRLTDYPLALSHYQCCVHDYVPLGDSLKNSEIFIRIKFLY

SEQ ID NO: 134966 - protein, 165 aa, Heterodera glycines
YAEYVVKAQILAGGRGKGHFIGCPKNGGGIRITKSVEKAKSYTEGMLGKRLVTKQTGDEGVVVKKAFIRFPRFVFVSLLIFFAQVMVAESITIRRETYLSVLMDPTSAGPVVVACPLGGVDIEEVAATQPVLILKERISVFDGITEGQCQKIAQFLGFSGKTAAK

SEQ ID NO: 134967 - protein, 24 aa, Heterodera glycines
PQFGKTQVNGQKSGKINEYNRRKR

SEQ ID NO: 134968 - protein, 64 aa, Heterodera glycines
MPKTETITKPCATAKMNKSAIFIQVIIISLFNSIACVIYVSMQFVRISKIYIIVGTYAWVFTSG

SEQ ID NO: 134969 - protein, 59 aa, Heterodera glycines
MCQQKQKHCRLMGLLAMNYDDGQQQQQLLEQKSENNFDLHRQWHQQQQQQYQQQQQVVN

SEQ ID NO: 134970 - protein, 133 aa, Heterodera glycines
MSFDSKFESCAIACSAFDPHLAWTKTCHPAPVGQPACLIEFRNGKLIVDGACPSLYAGLQTSLNTPNDVSSLNGSVSCLLCHGIMSVVELLRNESVAIIKEEIGHYCDYLLALRSVCKGIISDFILDNLVQSH

SEQ ID NO: 134971 - protein, 163 aa, Heterodera glycines
MVSGNGKLSLDSFLTKNCTGCCRYLNYGDPAWKEATRKCLASLNTFSDEVRRNFEHTIEWLHEYACSRSFGLGTKLPWDPQYLIESLSDSTIYNAYYTVSHLLQNDIYGAETGELGILPPQLTDAVWDYIFMGIPYDSTKMPIEEAKLKRMRHEFEYWYPVDM

SEQ ID NO: 134972 - protein, 182 aa, Heterodera glycines
WGGRMMDPNGLPRCPSKIRYGLGPVPDSFCPSKIRYGLGPVPDSFFVDPSQAMPDYDQLTTVYAGDKHLIELKVKANTRIGWQYLTEEEDIGFAVYFDPSGNANNLTEMDCVFPYIRLECSQVPISGSLLCEQSGRYIIEFDNYYSWFSAKQLRYNIIIEFDNYYSWFSAKQLRYNIEIDDR

SEQ ID NO: 134973 - protein, 60 aa, Heterodera glycines
MISVDEKGCEAGAATIVSMPTGFAYNPPPPPVFRADHPFAFFLIRSKKEVLFNGAFVGGK

SEQ ID NO: 134974 - protein, 80 aa, Heterodera glycines
MELEKTFNLSIANKIFLNESFTILEEFNQTLSKYYQGNFEQIDFGKREEAANEINAFVENATNGKIPKMINPEFLDGRPV

SEQ ID NO: 134975 - protein, 237 aa, Heterodera glycines
MIINQQLKHLLVLTVFKTIILLLSIKFIDASPEFNAADVCRAIDRSAQFHSLCLRSSVVQQKGFIPKHLRPPWLDSSLFEDNKLKAEEKMSANGCYACYSGTKASNGTNQDEDYCACVGRVHEMRGLQLNMAGQAVQWRDPRGAHLYTEQHQLTWQPTELKSISANGKVNIAFQYPQTTGPQFSMNLLNAIYRNCCADASSTQNTVLSPISAAIALAMAYAGARGQTAAEFVNLLAD

SEQ ID NO: 134976 - protein, 123 aa, Heterodera glycines
MDANAIHSLTLPRDATARKPFEDGHPKQHVVHVAYFDHFTANLRGHHATSATWHIALVAARGADSKRRDWFWPAQKNGHLLDASQMFVPLPSELVPFVSLFSFDDQIEANFGLNFEFDLSNLC

SEQ ID NO: 134977 - protein, 46 aa, Heterodera glycines
MRKTEKSLLHHFTLFTRIHNERIIYYKINQTDWDDSSPFFISNIPL

SEQ ID NO: 134978 - protein, 55 aa, Heterodera glycines
MTNKIILCTIIALAFLTKIDQVLSLCVVSAVRGATLLEGIASFANLFSFRLHVVS

SEQ ID NO: 134979 - protein, 191 aa, Heterodera glycines
WICSDVWMDILPSFDHAQLGLKLALLSYRFDALVDTHFDGKSELTIWRLIRIRKDTSGPKPKICVTLDENNNDIDDDDNFVDFPFSDRQLPNKNCFKSLWIEYIDHSIITFLHSKKRIFDRSGTNLYLSVATDFQPIWNAFVRQIWPIFAGSIRHLSFDAGDPLDNLRRRISPTFLTDLNRFWCSVTRRYC

SEQ ID NO: 134980 - protein, 31 aa, Heterodera glycines
KLRTSKVFSSRLPPIHLHILKHGFGSYFIFN

SEQ ID NO: 134981 - protein, 41 aa, Heterodera glycines; identical to SEQ ID NO: 130306

SEQ ID NO: 134982 - protein, 108 aa, Heterodera glycines
MNCTGTAKTIGMRAGVEVQLGKPHNHAPSPTRCEAAKINRSVRNTALSSRGNMPRTVVNECLAGASNEVIASLPLIPSMEKAVSRVRHAAGGQFQIPKTLADIEIPAV

SEQ ID NO: 134983 - protein, 78 aa, Heterodera glycines
MGRKLPAELLFEMVLCVRREHAHASICLSSLAFFKLKENYQDAIAAGQDWNFVRQTARDDIACNNVMVALDRLMDVPQ

SEQ ID NO: 134984 - protein, 17 aa, Heterodera glycines
MEKACKIWRDYIDNYWS

SEQ ID NO: 134985 - protein, 74 aa, Heterodera glycines
FISIFSESALKHTKLYLQVSLGTLMLFLSKREMNKIFNSFLNRPKSLGLTFFSETDQKRTKLCRDTERKSNNLF

SEQ ID NO: 134986 - protein, 67 aa, Heterodera glycines
MASMSDCLAQNQFPGIFKGADCKFELGFAQFRTPEPNSNKSCEIFSKRYVETGQILAQIAHFVQLII

SEQ ID NO: 134987 - protein, 31 aa, Heterodera glycines
MPFVLCPNYALGERQNFLGRQSAKFNGTGSE

SEQ ID NO: 134988 - protein, 294 aa, Heterodera glycines
MANEIGQLANRRRAFITRGGDYEELMEMNSEREKLRRKLRSLAEHHIYDNKLGFFNGISLSLLVAKVMLLYPMASLPFLIEKFFFTFSTWPWPTPVKLSNLPDGSALRWNPSEEKQKRSEIGYGIAAELAMPIVTPGHIEQNATFNFSHFIRINCKAFALADFYDFCGYVETRIRLQLLIDVERFDRIRLAHAKQIVEKEQILGENLDGSTANKKNHKKNVFFKIWLVGLELDEQIASENESESTNNWNNWKEALNSMLSEQFNAVILKAYRTKNGFSGPLVHIQLTAQYEQKH

SEQ ID NO: 134989 - protein, 212 aa, Heterodera glycines
MASQISKILPTLLFIAAAFLLNFGCCQQNESQTTETLRARNASSSPQFPLNTTTFTTTKKETTVATPSTTEAGTEAATTDDTNDEQSLLFWILIGSVSFCSTLFTAIHFSPTIFSVIVAIVLFLVLLVCIVCCMRGGSQKDARETVNGESGGAVTKLTMNGDNADSSSASQSASEPDEGWFVPDSLPNNTMTDLAKVNARLAQGKKQQAPKQ

SEQ ID NO: 134990 - protein, 85 aa, Heterodera glycines
GEKFPDENFKEKHTVPGLLSMANAGPNTNGSQFFINTVKTEWLDGKHVVFGRVVEGMDVVKQVEAQGNQSGKTANDCPSFRCSFR

SEQ ID NO: 134991 - protein, 156 aa, Heterodera glycines
MTHFPPLAPHRTTKREQTFYDGLPGHPPGICHMPMHPALNERLRRALLATATRLGAAHSDRGVLAVLAKELGIPYASVAVVTDYDCWRDTAEGVSIALVGETMRKNAQLMQKFFVEAISEIAGHKEQFVAEAQKAKQLAAASVMEGEHKLNFDHLC

SEQ ID NO: 134992 - protein, 101 aa, Heterodera glycines
MKAILIFQSLTILTRGICRFIICLFKFILWDPIGAEKMHFFPAIANLYFVGVYSRNVVPHILIVERILATVFVRSYEHWRGYLFTIIWAPIAVRNFCIFKY

SEQ ID NO: 134993 - protein, 16 aa, Heterodera glycines
MITFFCSASSNDSIRP

SEQ ID NO: 134994 - protein, 45 aa, Heterodera glycines
MEELQLNMPYRVQPHFGDTQELLGRGMHPVPKSVDTAEPLRAEND

SEQ ID NO: 134995 - protein, 58 aa, Heterodera glycines
MTEYDLPTPRPIRAVERELPGSRQSTATVGIRAESPQRAQHAFYSTHTDQVASYNPIE

SEQ ID NO: 134996 - protein, 57 aa, Heterodera glycines
MDQSESAHYTDFSESDESALKLDIWNSNPKYPCCSSIIPSALSGEPAPPLAPKLKLN

SEQ ID NO: 134997 - protein, 42 aa, Heterodera glycines
MSLDARTSLKMSIWKSGKNNQRKFESTARAIIDNKHSFNFYH

SEQ ID NO: 134998 - protein, 34 aa, Heterodera glycines
MAKKESKNGGTNEQQQKKHATSGMGSVLEWQGRP

SEQ ID NO: 134999 - protein, 128 aa, Heterodera glycines
MAKATHARWAKKAAPQPDTDAEKPQPSEEGPSTSEATAQDNDGQPSSTPTPVTPLEMDVPSVEMMVVGRYSHLGTQEKIVEKLVKHTTMLNALHDRGVENNKENDKYPDFDQIFTSLLFIFTLIFRKI

SEQ ID NO: 135000 - protein, 17 aa, Heterodera glycines
MKKVMAYQNKQSKMHGS

SEQ ID NO: 135001 - protein, 92 aa, Heterodera glycines
MEQYNARENSEIKSEARFGFSGLDLATKTAFNKFPTDQSKVLTRTIKAKSENKMRKRKPIPAAHPKMLDSCLCEFLWREDCKRRGADTFDDI

SEQ ID NO: 135002 - protein, 164 aa, Heterodera glycines
MSSIPAAVSANLIVRSPICADMSIMQFSFSKDDSSSTIGGRETPAASKSISGTASASAPSKKAPSSLSVSNGGGAKAASVVASGTVPKSKSVVGKNAKSSPAADPLDLVRASGQRTNTRLLERDALEAFVKTVDPNELLEDEVADAIGLVVEEFVDELIRHSVD

SEQ ID NO: 135003 - protein, 51 aa, Heterodera glycines
MKRIQQNFSDQIGVSSISTLKKDNRFAILYTRVSRYCDWIEKNTDGEVKCL

SEQ ID NO: 135004 - protein, 270 aa, Heterodera glycines
MGTKGCRNRETSLLAILHLTISNTMHGRRGKWIIPVCHFLLTSKSQASYIRMFELLHQAWPTFAPTSFTIDFELARYCTDSVFAENARMITSVAFVPLCDIRMAVAALDTEFGNLAVFQPLIDWLLINYVGQPRPNGTWSQPTFRPEQWNVYTRTLNADSRTNNHSEAEHHRLQGAFNCRHPSIFHFIDVLSREQKTTDVKYASFIAGEEPPPKKRKFLATDERILNLVRLYVPMNAGNINHDHNYHNRNQFHIILEFLRGISRNYRMNP

SEQ ID NO: 135005 - protein, 28 aa, Heterodera glycines
VKINRNSRVHSIVARNSPEKLQNNVKLI

SEQ ID NO: 135006 - protein, 81 aa, Heterodera glycines
IKLTNMIIHLDEETLLSINSNGILNFCEDGRHQFGQGVITYAQGEIVNWITTLSDSFRVADDVADDMGKLRFQFKVHKPLF

SEQ ID NO: 135007 - protein, 278 aa, Heterodera glycines
MQAPPGTGKTDVATRIMLSILKENDEARVLFIAPMNVAVVRAVQQMAENMEEVRWRERMLALFAGTGKAKYRDEIAHIGSHLLASAVSAPQLLDTLDEEKKKVVARYVKACQDTPKMANEGKVTEILMGKEKRRLVFCTLSLAEQLGGLFSDFDYVFLDEAGQASTVQVLSMLSKFPGLKKLLITGDEHQLGVNLQEVPEAVRDKCGLDTVLENLRVAESVDKTVLSVNFRSHPVITKCVEAAAYAPHGIQLISGRSADQMNMLSGLTGSGSHPQGFP

SEQ ID NO: 135008 - protein, 171 aa, Heterodera glycines
MPWVWHSAGQGRRRQQQQQQQQQQHYGSSCPLRVRGIPCRRKLPTNLTCDSCGQTVEKPVKNIYLKIVLQDLDDSTCTQRATIFSAVAEAFLGLKAIDVHEMEEQKLYEHFEAKLGTTINAKVTIKEDSQNFFGLDWVVTRIYKSSEKKIGDTEKKAVENEGTSSKIARLD

SEQ ID NO: 135009 - protein, 96 aa, Heterodera glycines
MEEAPDKAGERNFHRICRRSQRRGRKATAEHWEPWAEEGMPWDVPWVGVGMPWDVPWVGVGMPWDALKDTIPRLGFVRGDTVPLDFEHFVVPFLSN

SEQ ID NO: 135010 - protein, 49 aa, Heterodera glycines
GSCMVDHEKRTEGNDTTDKREQRKQRGKVIGNGFTVPIENSDKHRTGQC

SEQ ID NO: 135011 - protein, 170 aa, Heterodera glycines
MKAINLESFATIGFATKEVPLDGSIGQILNSYGYRNDGSFGCNGINRPCKMPFGQMPMSLFGIPSSFSPVAMPSADVTMAYKSSEFSTGDVVGCGLFLDTQLIFLTKNGRRMGGPIKFKKHFKMTHRFSFLLPPILFSFCKKMSQLWTTGNGICVMIMNSKMLMTEVFLF

SEQ ID NO: 135012 - protein, 176 aa, Heterodera glycines
MARKKRKPRFAKYGKVDGRWRFGLYKRKYNILLGPALEGVQNLLVTAYHEAAHAIKYGQNNIDILDKVTIQAQGGNLGETSWHDVEGLYTDEERFAQIVQFMGGRAVELLMFHNAQGDEQDVEDARAVAIQVLELREMEPTDELIANLIQQATNTATQVLTNNERRLKRVRTTFKN

SEQ ID NO: 135013 - protein, 151 aa, Heterodera glycines
MTQMIYQSIRLDELCTKNHDAFVLLRQSSVWEAFEGGQIQGIILVDSAYPTRRWLMTPFANPTTAAQQQYNYAHAKTRVIVENAFARWKRRFHILHSEVRIKLQNVPTLITAAAVLLHNIAIDRKLPDFLVALRNLFYFSFLFMSKIDKSF

SEQ ID NO: 135014 - protein, 128 aa, Heterodera glycines
MEDLYEKCLKNSRPIHRKMEENLYDIRVLDVKAKLAENELRQKMTQMANTWKKTGKDERKRKYEEIEEQFAKANDLCNEKIQLAESTYEMVDSFIQKLDKETSSFNAFVKRSKRTAQSTPGTSKENIA

SEQ ID NO: 135015 - protein, 224 aa, Heterodera glycines
TSSAWRHDIDTAGDGDSQSAALKRSKLHLLCGGGDGLTTERESGGNSEFDEEEGEGSDDYDSYGLASDDDMSPSSNNLSDDDEDDELSAESDDGGDNSDEEELERLLGGGAAAIDGDAVPLANDGDNASFEQPEEEVEVNPFCMDLAVEDPWASVQKKQSVESGGGKSQQQSLDKQRAATVAAEAEKQRRLQRRKRKREAAAKRKRQQRQMQEALIKATVSNIT

SEQ ID NO: 135016 - protein, 42 aa, Heterodera glycines
MKICKLCHPIFAICIVSVPISPYFVPTSCGRTPEYSYTILQG

SEQ ID NO: 135017 - protein, 132 aa, Heterodera glycines
MQLCWDLVIFLHFLLAANRLLIFMKASFKPSILNKEPKSEQILFNYRKKSSDGKTAKKFVLNKQEWRILGQSVAMFVLMAFIVAIWDLVDLLSWVLPDGLILLSDFFFLLFCGISPILYLCTLPYVLGATFN

SEQ ID NO: 135018 - protein, 38 aa, Heterodera glycines
MIGCNNFLAASFRVKMKCLPLQRDCTHVEGQFFGNEDQ

SEQ ID NO: 135019 - protein, 117 aa, Heterodera glycines
PKNGYLFFLIFLPQTWYQQLPSLVWPYQTILRYLKRKQKKFLTKNGYLFFLIFLPQTWYQQLPSCLALSNNLTIFETQTKKILDQKMAISFFSFFYRKLGTNSCLLLSGPIKQSYDI

SEQ ID NO: 135020 - protein, 81 aa, Heterodera glycines
MRTTVIKRGTTVIRRGTTVIKRGTTVIRRGTTVIKRGTTVIRRGATMIRRSATVIKRGTTVIRRGTTVIKRGTTVIEEVQL

SEQ ID NO: 135021 - protein, 39 aa, Heterodera glycines
MAFPQRSSLTEKTAPSASRLLLRMNSPLFQLEQPEEEIN

SEQ ID NO: 135022 - protein, 333 aa, Heterodera glycines
MNSTSSRSHAIFTIILTQREHDTITDLDTEKEGANINKSLTTLGMVIKKLAEQSTKKGRHSRTAVIPYRDSVLTWLLRENLGGNSKTAMIAALSPADVNFDETLSTLRQETHSYGNYVMVNCSVKDMRTVPNKLGSVQTAEHVAKLWSGGWQNKDENGTVPSHSPEICQVDENGDISSSTRVFSGREEETLEQIKTSEKLIAELNESWEDKLKKTEAMKVGRSEADQRPDILLSGEHIRNAHCQFINADAVVNIVPIEGECFLNGQPIEDPQEVRTSRHNLAAIAKAGHRPEAGDAQKSVGDGATVSQGNGTDGKGTPKTEQCKSKGITRNDC

SEQ ID NO: 135023 - protein, 108 aa, Heterodera glycines
MDKENCKKAGCEAKYGNHRCDSECNLFACQFDGGDCSTKQAQPFGKCPQASYCSHVFADGKCDETSVPVDKFNRTDSDHFAPVVWLLFGAFTSSRKSKWSVSQILINF

SEQ ID NO: 135024 - protein, 78 aa, Heterodera glycines
DGLGLVSLDQSRTGLALTSLDQKLLRTGWAWSALINQGQAGWDAKKNRRMVGLIMRKAIEKLEDKNNDGLMASISEDE

SEQ ID NO: 135025 - protein, 16 aa, Heterodera glycines
EAIPEGFGLPINLGAS

SEQ ID NO: 135026 - protein, 122 aa, Heterodera glycines
MSVDETIRELSGTLTQLKILVGKINEQISGVSARINITLQNFDDSVAGIATDANQMTKQVDTTIDQERRRRFNRWSNPSQSSRFTRNKFQPFITGTFQQKATSRLRVGVLNGSTDAVHATKQ

SEQ ID NO: 135027 - protein, 129 aa, Heterodera glycines
VNADQIRQLCPFPLIGFTSSLTLSSKCFATFPHGTCSLSDSWPYLVLDEVYHLIWAAIPNNPTPRHVKMGRHRQLDRSCTFSGAPVKGNLNKRANPSSRSIRYTSQPQRSCDSALDSSQFTRRYYGNPR

SEQ ID NO: 135028 - protein, 42 aa, Heterodera glycines
MGEEEEEEDEADEQRMTILCAFECYQKDSVCSNMNKVIVFIV

SEQ ID NO: 135029 - protein, 54 aa, Heterodera glycines
MRGLRTTTSSSAWRRRRAPPCCCCTAANPAQIFMPGHIWAECLSTDWQCRIGLA

SEQ ID NO: 135030 - protein, 339 aa, Heterodera glycines
MDEAEQTMMNNEDEQNCSDQPIVQRTTQDEYVVSEDWPNANNVGTKKARKSETTTTRRTSVKLTAGQKALEAFSFQRLRSAAGPSSTTIETSAVDHLHTEPQQRQQQRTFADQQIQNEHNFGLADQIILPKNEPPNSQNSQQYYYDSAADDCCCPSTAAEDEAVAAVGFEFVGTSAAAADDEEWGCTSPPISSQQPISQCFSVVTNTSAATTSCSQMTQQFIYDEEHDEFGDEIDDNDDEAATALSSSSSFRPQQIVHVDMDVLRTNFAHRCEQQRRQRREHNNLLRQSCGGNDDGGTRLHVVTTSAGIMSSGSQEEEREEDNASVEQRLSMMLKLVNH

SEQ ID NO: 135031 - protein, 108 aa, Heterodera glycines
PLPQAVPPKRRSVGCSSSTICCCWPVIGALSFAAPPVPESPQRCVELCCASQAEKDALFDIVWKVIHHETNSKNSAETLAKNTNNNSSNTEQQQQNKSCAHCDTDFGW

SEQ ID NO: 135032 - protein, 66 aa, Heterodera glycines
MKNNLRGAAVINSPRPKPSFCASNPFSGLIVRRSASMGDARIRQMTAHNRTTENGQNEKDEMAEKN

SEQ ID NO: 135033 - protein, 50 aa, Heterodera glycines
MMPRVDLIWVDMEKVLNEENSVTPEFKPYGTCAAMKDLFSEIKILHLALI

SEQ ID NO: 135034 - protein, 86 aa, Heterodera glycines
MKDLMAVGKKMFGCTRKCMSSKAGNCEKSLRCGLNLPPDNVLVQQVKRCAINSGLNTANAKAMCKCASAAGVKNLTPAVCAKIRVT

SEQ ID NO: 135035 - protein, 92 aa, Heterodera glycines; identical to SEQ ID NO: 127421

SEQ ID NO: 135036 - protein, 92 aa, Heterodera glycines; identical to SEQ ID NO: 125147

SEQ ID NO: 135037 - protein, 36 aa, Heterodera glycines
MIGRAVRNRPFIFEGIFKFILYPRKMAISFFDKFYT

SEQ ID NO: 135038 - protein, 121 aa, Heterodera glycines
DDRDSKADDGEPKADDRDSKADDGEPKADDRDSKADDGEPKADDRDSKAYDRDSKADDRDSKADDRDSKADDGEPKADDRDSKADDGEPKADDRDSKADDGEPKADDRDSKADDRESSVKN

SEQ ID NO: 135039 - protein, 105 aa, Heterodera glycines
MPTNALHSNRANSIYLPLVYVLQRVNSAEFQPLINTAPIENNLYGGIASIEGNINSDLSLIVLDTASSLTYIALAYAIRRNFQIDTNFAYELMAAGNARNTTLGR

SEQ ID NO: 135040 - protein, 66 aa, Heterodera glycines
MLRIKLSVVPGPLLSVFVQNIAKLYTFQLCKLEADDDWDGIESLDNLLTSKLPEYQYTDHLEAQER

SEQ ID NO: 135041 - protein, 244 aa, Heterodera glycines
MVQAEAISEREGGVALAAATKNALSERGSEVEQQHQQVVVMARGGTISNGDGARAKAEATGGAKSVVETRITEHHGEERLAAATAVIHREERREERRRKIRVRNRDRQQGGEERQRGEGHRQSRPNERHNDNFHSSLQLNLPPNRMDRKEQEEHMHHSRDGLMGQSNNQQGEERQQGGGGHRQYRPTESHNDNFHSSLQLNLPPSRLEGREQEERIHHSRDGLMGQSNNQQMRKRIQRECFCTC

SEQ ID NO: 135042 - protein, 124 aa, Heterodera glycines
MKDIVLEHYDHDGQIDDALYFADYDDTFVFSGSSRSIRVAFPQIGRNTSADLYTYQAHKDYRPHYVKGRIRPGMETLPFGFRNAQQQTRHRTEQDDEEETNDDDDDNDDLDQDRLSNLPGCSHW

SEQ ID NO: 135043 - protein, 962 aa, Heterodera glycines
MANRNPFSIESVHEMRNRPRNTRGEVAQVRFVPLEQVQRPDRVLEMLVEQLFARVLGDRPPPSLIGLQLHPPTFENPFTIALRPPEQKNPAAIADYIQRLNDQSAAGIDLTAGTTLTKVLAVWPMHDDRTGNGREGACSWDHEHSVVHTVNSLVRIRNPNDRLCLARAVLIGLKDHRSRQYQNTRAGQQMFKNYVGQQRFHGPDARHLLRRAGIKTNKNMYTLDDVRQLQQWVDERYEEAQIRLTVFEKVRQYRIVFKGASGRAACFNLCLLLENAHFHYVGRIEQLFRCTSYCVDCERRVTRWYHPQECKVVCRLCLRYGANYPCQQQQFANGRNSKHFCTQCQFVFPDLDCYNYHLSNRAPATLDGRSGRAFRSICEWRRVCRACGGIVYTNFQHVCPPSVRQQQQQQEQQQQQQQQQFASLCHQCGGPHAEDGPCFIQPMDGRRVFGQTRRQQKQQQQQQQSSVENCLNGNDDAADKEDDTDDDNDAEGESQHGAGGGGHRRQASQKTIRYCFFDAETSQDRPLQLRTQIPQKHVPLLIIAQVICERCIADRITIYGGIGQKANGCVCGMPSGPRGRLWCSPPFRNAPNDDTEMPTNITYNPRRLFFHCFEDATKNPVDQFLDFLISTGPRKSHTICLSHNGGKYDMHLVLEALHHRNLPPKRICTTGLKIYSMSLKGNLQRQITFKDTLNFFFCELDALPRTFNLPNEIATAKPFFPYLFIRHQNLNVRLQGLPNAVFYQPDHMKTAKREQFLSWYAYEGAVAKFQLREQLIIYCANDVAILRESVLKFRQLIMENTMGLDPFVIASTGAALALATFRRCFLSRNKLINTPEGGYLRGRRASAESARYIRMYELMNPGVHVQSAQWTVGEAHVEDSGYRLDGLHVWHYDEWDAEMFRGYMNTFVGMKVQASGWPTGCESEERRDDYIDEFERAEGIRLDRGKIANNPGLRMVAVTCLE

SEQ ID NO: 135044 - protein, 119 aa, Heterodera glycines
MPPSENFSNISLDFNDLEARPLPEPQQPEQQQAELLIQILDVEEALLFNVHEGEERGEEEEEDEEEEEDFVQFEELMRLHADYSERLKKFANDQVEKAMSEIEEEKKQKKKPKKQHNKK

SEQ ID NO: 135045 - protein, 42 aa, Heterodera glycines
MGEQNILIRLRIYRYKNSQSLNKFDIALSPYAKIFSLNLMPF

SEQ ID NO: 135046 - protein, 19 aa, Heterodera glycines
TFAFSSLALPNTHTIFEML

SEQ ID NO: 135047 - protein, 19 aa, Heterodera glycines
TFSFSSLALPNTHTIFEML

SEQ ID NO: 135048 - protein, 19 aa, Heterodera glycines
TFSFSSLALPNTHTIFEML

SEQ ID NO: 135049 - protein, 19 aa, Heterodera glycines
TFAFSSLALPNTHTIFEML

SEQ ID NO: 135050 - protein, 19 aa, Heterodera glycines
TFAFSSLALPNTHTIFEML

SEQ ID NO: 135051 - protein, 19 aa, Heterodera glycines
TFSFSSLALPNTHTIFEML

SEQ ID NO: 135052 - protein, 19 aa, Heterodera glycines
TFAFSSLALTNTHTIFEML

SEQ ID NO: 135053 - protein, 24 aa, Heterodera glycines
MVTHAYSELANKILHRNGMNLECT

SEQ ID NO: 135054 - protein, 159 aa, Heterodera glycines
GIILNIKIKLKTRYFSPKFSHFVGQNFSFFSPFTFWDFLQQRRRWLQGIYLTVHSKFIPLRCKILLASSLYAWVTMPLTTLQIFLSPFFPLPRSFLFDFLVVFVGAVNLYMYIFGVIKSFSHKYRCGILVIKSFSHKYRCGILRPKMFLAPPPLKILPF

SEQ ID NO: 135055 - protein, 182 aa, Heterodera glycines
MARCVTSLAFLPIGDLTPGIIALDMALPDELTPVLDWFIMNYTGRLKHDGSRTRPRFDPNIWSVYTRTLQSDDRTNNHSEAANRRLQCAFACSHPSIWRFIDLLRKDQKLSDDDFAKCSTGQEPPQKAKKYRKADRRILTMVQNYLPLNNGDPNTFPLHQPFNHQFIIAFLSGISRNYEMIP

SEQ ID NO: 135056 - protein, 309 aa, Heterodera glycines
RQSNRTAPTQKKPKDEPTEKEENQQKASTPDKKKQRPTNGEPPARRERAREPPHAPAKADGSDPKPRQQKSADDTAESSNEIRSLVAEPRKDTTDNNTTNAAFTDSEEEGEDSSCGVGFMSCASLATPSSAECASAPKRRRVILSSDDEEEKMMGNGQRKDQKGDETENEPQRQATKRKRRDAAKEAKERTPPSVARVPRDEIQTTPSAKCAHSFINSFSIDSPNASSVQLPFSSLQIQPKNLKNRNKNDQIAESANDGDEEAERFPHLDFDFLRTEKIKDAKGRKPNHPEFDERTLFVPEHFLKSQTP

SEQ ID NO: 135057 - protein, 122 aa, Heterodera glycines
MAPLFHRFSSLFVLLMPFLSVVLLPSTVCTGSDSAAAPFDRKNYPKIDLRLFEWPIASHSGSSAEVSFIAVDCYTQLDRSFISTDAVLRLNNSLALRHRACLLRIPTGTRLTVTEMQTTNRK

SEQ ID NO: 135058 - protein, 150 aa, Heterodera glycines
HAKMLLKFSKCVAATVCDVSSKEHRKEKPEALHTVELLRVASTALGLSPAQTMAVAEHLYTRGYISYPRTETTAYPDSFDFVGALRELAKGQRFVDTAIQLLREGIARPRGGTNKGDHPPITPMKAADGWLSGGARRATEFCERQIVLTR

SEQ ID NO: 135059 - protein, 121 aa, Heterodera glycines
MRWNGACSVSEYKASFRGKQANFRVTSTCGHVMCVDFPARYNSWDRTDPAELFLCNIEQKEANPKLKMPEFLASEAKHCDMLVLWLDCDKEGENICFEVVDAVRPAMRGAGGANFMDAAVF

SEQ ID NO: 135060 - protein, 51 aa, Heterodera glycines
MTFLCDYFLHVMAYLKIAFPYFFNAERWELLETEVFVHCFILFGYTVLELC

SEQ ID NO: 135061 - protein, 74 aa, Heterodera glycines
MVKVNFVDQLFAGIVGIANSIERFGGPFPSLDVFGLNRHDPNYANRVMKEAAAIVDDCCDSQLSTAADINMLSV

SEQ ID NO: 135062 - protein, 206 aa, Heterodera glycines
MQHEPADPHFPKRKKHQVNFVTAKVACPDCISTGKWKESLLGKFCKICGYHRTITFSQMPFRETTVDRQTIDRHPLVAFVKWLLYKLPKQYETIAYSHFGGRFDMVLVFRELFMEGLNPSMIRKGNRLFEMRVKSRKNLNPNVTFRDSWNLIPGPLASMVPMFGLDVQDKPFFPHMANKPDNYGCQIFPSKADYLADGMNQRNGTI

SEQ ID NO: 135063 - protein, 281 aa, Heterodera glycines
MCYIDHSVIAFLRSNHQIFDKRGTYLYLWIPSPHNTDGQLIWDIFGREIWPIFSENIRHLGFNDGVDLDNLLRRTSPTILTDLNQLTSIDSCDLSPEAIGGDFDGPNATISAGQALSKWLHSPRKDGQPKRLRCDDYNEQTDLDWINNFKEHFLRANAISSVSYQIHFAVHALSIQIVPFELVNEWTKEKLTLAKAKGWDNRWIMKRCKIIGETAAVNWEDGNWDNNCNSVFVWLFRTDCIGPLSPPPAEEAGQNITKGPSSELTMSDGQTNKNSDQPQKE

SEQ ID NO: 135064 - protein, 69 aa, Heterodera glycines
MDNLLTDFWLINGLTIPAPNLFITFEFAILSGLSVSGTYIMEISFKDVLPLAFKDKAEPFFIIFIFVYF

SEQ ID NO: 135065 - protein, 52 aa, Heterodera glycines
MYRRGNNRQNNPEIYAPVSDFCGFIASVAGSRVKCIDPYNAITMAKRKKVTP

SEQ ID NO: 135066 - protein, 64 aa, Heterodera glycines
  unsure (1)..(64): unsure at all Xaa locations
PFRVXMRHQLHSFLVLPNCLKCIPKNALKMIKPVFSRISCQYFPIRNDTVNSFASLIHSCFASD

SEQ ID NO: 135067 - protein, 271 aa, Heterodera glycines
MVKGNKPKLILKLRQNGGELNKQKEEKEKEETENDQKKEEQEKVADDEQREGKREENWENANKFHWRIIGDEDDEFTLEKEGIEQKQKHVSCPAKSLSIEQIRKKDEKEIPEELLLALLKRLLIEYLKSDLNESGQMSILFTLYYCSIWYLNGIAHKTLKVMERMAPKGSDFEKEVAKLKEHHREMNDNFEFDQRGMTDQQQRAEFVNKSMLIRVFRFLEHIANNKTLIENSADWNAYREEYMEKWVKNRGGKEIKKRKMDFIWLKSTNPN

SEQ ID NO: 135068 - protein, 60 aa, Heterodera glycines
PGLKCPAQAKKFFYFREKIEIFPKKLPIDRARKTMFWKWSPFFWENSLKIPKIQKPENRF

SEQ ID NO: 135069 - protein, 473 aa, Heterodera glycines
MTKKQEAKRKNDQERYRRRTEQSVSPGRSPVPDGSADGNGEASASLRGTTTPSLSALQISTPASSIGSKKRGRPLKAGAKPILATQETVSSIDTPRTAVTQSDQGSPCKKRGKVTECDKPTFANEAIASTPVSTQSRGGRPAKKIGGPGRGKLSDSMSKSSEMDINLENAPIPATSHTVSEKIDFSTVQINFATSRNFACKIWKWAAIGLYERDGETPIAPRSGPRYIETCWNDMTQFLNDGFAATYLAYLATISQRKVVVVDPMVWSNGLDRVMPYKNMTFGYDPNVPAEVILLPVHFPAHWTLIVHDVQFGTHFADSLPTTYGRLDPQLTDKIKNIISDILPSAVLEGIVDVENLTVQHDGNSCGYFVCLYAESWLMNNRTFVLPDLSINYEKKRILWHINELYGSDNVPYHPREGVPTPCPIVYRHADEAQSTSMTVAPMEVDGNDDIMIIEPQTSGQALNVIPTQTQVA

SEQ ID NO: 135070 - protein, 31 aa, Heterodera glycines
FVAFQNFAQHFLVNLQKSLRFDQSVGIFVNV

SEQ ID NO: 135071 - protein, 19 aa, Heterodera glycines
RARERAESDASTAVAVRLT

SEQ ID NO: 135072 - protein, 30 aa, Heterodera glycines
MADLKKMKRDTEAEKTSNFMHGVGAVQAQG

SEQ ID NO: 135073 - protein, 28 aa, Heterodera glycines
MHLPVPLHLRPIVRFLLPLRLPPLLRCP

SEQ ID NO: 135074 - protein, 264 aa, Heterodera glycines
MWHQWFYRHSIYTKSDSQLEPHEDDKKPPNFNVMPTEQMLIDIFEALINERNWGQLKRQKLAIIYKIGNVLERALHDDPIKTLKCMHNCEGYGPKMMEMVKDFCEKDYNRKWTGEHQNVWRLICDVFIWENWLFNYPMLTEKDLKMFHDKILKLVGRLEKKVEKNTSWIEMNVVDKSVLNIIGQILVARVLIDHSSKTFISFVNYNQSTICNFCANRTSQFSGWEHICVYNMWLFVVGALRNGQARLIIISLFSKIDRQNLIIL

SEQ ID NO: 135075 - protein, 105 aa, Heterodera glycines
MQSTKAPLLSTTQITPKVREVITTEAPPITTTQTVKIELTTKPRKIEPKVKVETPKSFSKGIQFKRVINEQQIYKIMGIRKGTILTTTIPFISTTQAPKITKPTT

SEQ ID NO: 135076 - protein, 199 aa, Heterodera glycines
MKNIKKGMEKCLDRKDLTMCQELAEEAKQSIEIAKNYRQEIGHIYRTAYSQPDLEKANTILVEAAKKETERAWRDVAALAEEVGDFAKSSRETLNQAIKSREKAPYANGVRELYLKMSDSIWEIFKIEDQINLESVKAESAWREFERCKTFDQATKFEEQAQNSLMEARRLHFESRRVQSQMLNYENRLKTIVWEHVGI

SEQ ID NO: 135077 - protein, 121 aa, Heterodera glycines
LAVQIDEGNPDSRIAPDEHGWPGYEEWTISEDCENLEQTNEFTELVTVEAIFDLMLNRPIARHLAKIVETSPKYVQVRQKYGLKNTKIMKLDISFVSNTEDRIKRKAVNGLQKFIDNVFKS

SEQ ID NO: 135078 - protein, 158 aa, Heterodera glycines
MSFEPIGQLPELPTVRYFECKLIGTGCAFGIGFASRKYATHEFVGWAFDSIGFDSMGDVLGLEEFGGPSVLKWWTMGADDVVGAGFSGSSPFFTLNGEILRNISFFFNDFFCLKGIDDVRLDVSHFAFPTVSMIGADTSVLVNTGPIFLFDINQIFMP

SEQ ID NO: 135079 - protein, 263 aa, Heterodera glycines
QYLLKFFLKFPTVFNMFGCINGGKRRGKGGAKGFCKTGRHNIQGITKPVIRRLARCGGAKRIPGMNYDEIHTADYDNIQGITNMTIKNFARLDGANDIFNMIDEQIWPNDSNFGTDNDWDSIAANLQIDETEEQIELGHDVNSAFLDIGATVEIVGAESDIDDENRSSTFATTSTTSKRAKNTAKQQRKRANKRNKPKPGEIGFTLGWPGYEEWTISEDCENLEQTNEFTELVTVEAIFDLMLNRPIARHLAKIVEACPKYDH

SEQ ID NO: 135080 - protein, 68 aa, Heterodera glycines
MAKIVGVLGSSQRGPVNWTPENWTPENWTPENWTPSGKMDTAGILDTKGKLDTGKLDTKISFLKKIKN

SEQ ID NO: 135081 - protein, 19 aa, Heterodera glycines
MKNEFWNPTRVRIHEMRAT

SEQ ID NO: 135082 - protein, 102 aa, Heterodera glycines
MPTTVFIDYIMFSVHLTLIRWQFILHGKSNFRFQTNRKRRMEEEKKVLRICNNVSDGKRRKKAIFYEKKGCLEGKNVLANLGFRLWLIEDTLELSNEINNVG

SEQ ID NO: 135083 - protein, 18 aa, Heterodera glycines
PYRDRDLSFSKYGTGNRD

SEQ ID NO: 135084 - protein, 31 aa, Heterodera glycines
MQQMHFSIVYFYKIMYRYTAVEVKLMPLGHK

SEQ ID NO: 135085 - protein, 16 aa, Heterodera glycines
KLFVFIYTNLFYIIFS

SEQ ID NO: 135086 - protein, 58 aa, Heterodera glycines
MYLVFSGIHFGLVFRKYNLAKNDFISKNLIEIDMNLFIRPMSTPNTNVEVGTSSNSSG

SEQ ID NO: 135087 - protein, 97 aa, Heterodera glycines
MSWNESLEQNNCELINLDEILKNAGPSGEKPVSLMQVYENTRTIIVQKQLIDFKTRKHILTHPMTDILLQAVAGSKRTLKATPFTRGVKPKMRAQIF

SEQ ID NO: 135088 - protein, 71 aa, Heterodera glycines
  unsure (1)..(71): unsure at all Xaa locations
RHXLDKEFIQKVIEEIRPLYVEAIRDHLNILVKLNFLENDKGFKKDAKNMENLNALENQLIANKACLIXGR

SEQ ID NO: 135089 - protein, 68 aa, Heterodera glycines
MANDNPWKGNGNDGTNRQNSTGGLISTAFTEEKNEKRKNIEEAEKDEAYPREATTWTEMAKQWPKSTI

SEQ ID NO: 135090 - protein, 97 aa, Heterodera glycines
MNRRWICNDVWMDIFPSFDRPQLGLKLALLSPRFDALVDKHFDGKSELTIWRTIEIRRKGIGPETKLYVEIDYEFVPFPLPDRPLPSKIRFKWLRIE

SEQ ID NO: 135091 - protein, 186 aa, Heterodera glycines
MNRRWICNDVWMDIFPSFDRPQLGLKLALLSPRFNSLVDKHFNGKSELTIWRKIKIHRKDKGPEPKLSVRIDDKFVPFPLPDLVWPIFSANIRHLRFYDGDHLDHLLRQISPTILIDLNQLTSIHSFDLFPAAIDDGFDGPNSTISAGQALSKWLHSPRKDGQPKRLRCGNYNEQTDFDWINNFKE

SEQ ID NO: 135092 - protein, 67 aa, Heterodera glycines
DLIKEWFTEFVQAHERGSDISGRDGIDMVVKNLPVPVPGSRKNTGLDPGTGRSLNEIILRCMKGPVL

SEQ ID NO: 135093 - protein, 96 aa, Heterodera glycines
MPNDLPGVDAATDQRSVLFARKSNRASGLEAGEYFALRTWRSQNHRLRLRETGHLASFALLCGPTQCRSAEAVSSMCQVCRGFPKMSLNVLGVLLM

SEQ ID NO: 135094 - protein, 60 aa, Heterodera glycines
KVRSPLFHSNFRVLNRFKNQFKCFSAPNFKLFYRSQYLRKPIKVFLCDFEPIPYSAIFPR

SEQ ID NO: 135095 - protein, 31 aa, Heterodera glycines
MSLLNRTKGFIWLRIIVGNRHRFGPYAKNSR

SEQ ID NO: 135096 - protein, 1007 aa, Heterodera glycines
SFRDEETRFMRDLNLLVNVFKRRLSSGIGTDANKDIISNLFGNVHEILELTIKIHRTIDDAIDMSDPPMLGMGLWELAEGCEFDAYVQFMVGGGGTNGEKPKNLNFIFGIISGSLSRTPQKVGQTADRMYSGTPGGHTFRMTVKYVLPALLHSVVAHFKCYSEFVKLIMEASDHEADRKDLYLIMEASDHEADRKDLYNTDMYLNMVTKRMNDLRGLMSAQVRIARGRIARGMRRDNSRSFQLSAIQRIQRSIDGWEGKEIGYMCNTFIREGKLFQLRGSTTIADNILRNRSGGTERHVFLFDHLLVICKPNKGNFKFKEKLYIGNFKFKEKLYIRRCDIIDLDDDHVKICTSAKAGGNDEYMSMLTLFCQSPEEKEQWMAGMVEMQTAGTLQRMLDAHQKEEEKRIPLIIPTVSEYRYAEPDTDENIIFEDYTHNSGIPVVRAGTVLKLVERLTYPQYTDNEFVKTFMTTFRSFCSYTDNEFVKTFMTTFRSFCSPAELLALLIERFVIPTPHIFMAFNDSASNDSASLSNGSLQHSQLHSFAHNLSQSQLEQAFHKFRQEYQKPIQLKVLSIINHWVSNHFYDFEVLSIINHWVSNHFYDFESDALLLVRLIDFLSGNDRSIKLITSHKKWCTKIQEVIKRKHRHQQQQQQQQNQLDSAGHSADGEVADSSNRFQQHQHSHVVVVGTARLRQRHPVWHYAKEGEVDAYDLLTLHPLEIGRQVTLLQFFLYRAIKPFELVDAAWTKRDKYQRSPQLLKAIKPFELVDAAWTKRDKYQRSPQLLKLIDHSNNLTYWVARSIVETESLELTYWVARSIVETESLEERVEMFSRVLEIMTVFEELNNFNGIVAFFAALNCQPVYRLEYLFQRLDKEKKGWYDHYYLFQRLDKEKKGWYDHYVQLCDGHLTELLQKLRSINPPCVPFAGEEKGECQQINSLIVCRYIFNANCASFGESKANGGTDEPTNDERAARKMISFMKCRKIAAIIREIQMYQNQPYSLRVEPTIR

SEQ ID NO: 135097 - protein, 119 aa, Heterodera glycines
MQCSVDSLEMMKNEQHQQQQRVMMETSVDSLEFGTKMTTAQQKDEAEIEALLLVERDSLSSAQSQQQDDNELEQYSSSRTGTTITTTTTTMTENERKAEEHPTSSSFPLPLPTAAGGNG

SEQ ID NO: 135098 - protein, 60 aa, Heterodera glycines
MKQFRIQTLGFRMIAGLFVGPGPGNALKRISSTFDRDLFQKRRKRKRELNGKEASDSVVK

SEQ ID NO: 135099 - protein, 46 aa, Heterodera glycines
MSTMIECSGVVNGEIDDMNDQQDDDDAPTSTVYLNLGKDERTAENY

SEQ ID NO: 135100 - protein, 189 aa, Heterodera glycines; identical to SEQ ID NO: 132977

SEQ ID NO: 135101 - protein, 141 aa, Heterodera glycines
MTIYPNLLKHAKQEEAEMDIKQYEMLVKVQCSADFKFFLCTLFTPVCTILNEPIPPCRHLCLSAKNGCETLMRKFGYQWPEIFDCDKMPESRDGMCVGESKTEETDGGASADGKGAEEPTERGGKWAMECPHTMKVLSKRR

SEQ ID NO: 135102 - protein, 147 aa, Heterodera glycines
MSAAFFCPFPPENGVRQLAAPRKAFPKRRKRTHYYCPGGDSVQNGSDRLGFARLGLAKASMANLEWSHGGRPLRQPKDAPAHSPEIHPKGTNEKKNTEKQSNRAETIRSRSAEKGKGMTKSKGTFGGFTQKSPTNRHFASVREIGNQ

SEQ ID NO: 135103 - protein, 45 aa, Heterodera glycines
KGMRTRPIRQVKQRLLTSQKVRCRDETNQHCLPRGTRHGPPKEWI

SEQ ID NO: 135104 - protein, 297 aa, Heterodera glycines
MYEDCNTVFARCHDAKKARLFITFTNNREWPEFKENLHKNGQVFTDRFDMWMRVWSSKIAEFREELYDKKFFGTILGYGESMEFQGRGGPHAHIVAQTDLDAVPYVIQEYIWAHIPSLPDKDDDTPIAKMHREIRETMHMQLHRCSDSWCGPSDPIYGRCKKGFPAPYSKCTILRPDRPAMYFRPSPSDGGAQLEVNGLIYDNSHVVPYNPYILLRYRVHHNVLFAYGNKANIKYALKYPFKGPGHCYVECKEESGNKIGIDEPAQYAKMNFRGATEAYAIVHSMPFARLSHHVVKL

SEQ ID NO: 135105 - protein, 89 aa, Heterodera glycines
LANEIARRVRIFCWILTGKQNHQKRAIHVKATWAKRCNKFVFMSSEDDPTLPAVNLNISEGRWRIKKYFKKFVYAYQNLLLNFFETIVF

SEQ ID NO: 135106 - protein, 111 aa, Heterodera glycines
MHLLFSVWEAVLHEAEDLMEDNERELEEWVGIRERLPGGGGGGGGAGGLGPRRGRLPGGGGGGGGAGGRGGVSTPLNLHLRRLSLAVHLFLSSAQLWLAYLQVPSSFSSIA

SEQ ID NO: 135107 - protein, 125 aa, Heterodera glycines
MERHKQQQVKIGELIKQNRDWLCALAKTKSGKKCRKLIRKANTEQLLSLVEICLNLVASRFHLTTRQKKRLMPYVDTVRRISRARSERGAKRVLVQKGAGFGGLFAALLTPVLMEVAKSFVNKNA

SEQ ID NO: 135108 - protein, 95 aa, Heterodera glycines; identical to SEQ ID NO: 124528

SEQ ID NO: 135109 - protein, 161 aa, Heterodera glycines
MTFFLILLLIHPVHFFQNNLARTVETIKICLQSILAAQQLNSWDINHCNEGIYVYDFLLVEHLSKNNYAIVNLKCFQISLIILRDVGVGLAPEHMRMHELVGHFEASIALWSDGSIHSKLPYVPDVLDGFAQFGPGDVVGCGMDANNRGIFFTLNGHKICK

SEQ ID NO: 135110 - protein, 105 aa, Heterodera glycines
MNEDLAFSIKFSNYCHRNGDGNGTKKNNGQNVIAKKRNGIALWHRTGDNAQQNGHGKKRTKAKGHLRRKCRVWRELGMGKGSDQRIRENGSDRRGGKEEKWNKSN

SEQ ID NO: 135111 - protein, 211 aa, Heterodera glycines
VALASPLLTINPFEVNTTQPPSVNTTQPPSDSYFAGNSEWNLINVSVRNMHYLVSVRNMHYLEEGEYRAEVHVHFVFNLRRRPIFYITVIVVPIFLISALSILGIFTPGSNEGPRSEKVSLGLGSLLAMTVLLGIVAGAMPKSNSIPLLGYYILSVILLCAIAVAVSMAIIRMAQQKGQIQRPSRYHIKFWGSASQRLTKASGENGKGKGI

SEQ ID NO: 135112 - protein, 110 aa, Heterodera glycines
MGQARNNSNRLSLQELIKELGAAVELTTAKSDAFGQATAGGLARTLLSVYIFVSVIREVRLVDEQRMWDDALAVFRACIWGQMVEQWAHVVDSMTRALVLNLWVFVSMHL

SEQ ID NO: 135113 - protein, 241 aa, Heterodera glycines
SYCEGASIFVDDVPSSSSSTASSANARHLHAGSSSASSSVPICSAGGSGADVRPARALPIVQPELVEPSTAAAGNANNGANNQQQLLLQHHHHSHHHHHHHQQPSSQLSYHQHHSSSSASSVSSSPTNSSSAKLRFRERAQNLQIYLDKFLEYTTRETTKIDWADPARRADTVSFMLDRVIVAYIFEVFPDAEANGVDVFGGWEGTSADEAEEEGGGTGTDADGAIVQPMLDTVDPIIIAR

SEQ ID NO: 135114 - protein, 102 aa, Heterodera glycines
MLRKKPHQDLQNSLNRFAEWGRDPVSRAKHFRNAYECLSVQERRQLFEGFSFEIFHLIDALFLAHYDAAIVDPQTIADVESALWILEQAMCCAPELVGKGEQ

SEQ ID NO: 135115 - protein, 349 aa, Heterodera glycines
SIQDKNMKHTLENCGEKFEEYLKEMFKKSEEKAKKDKQWKANEINNGKHLIIKHSKFDDQGTWTADALFSEFVKGLATKSEKFFKMAEEYSNYLSRSKEKVLFDEQAPIIVGLCEFVEMKKHLARKYEAHLGLVYLMRANWQCSYFFNFIHCWGQCQKFRKYLDILYEYLFRLYVEGKSNELTYKLPAVKPIFMNHYKNSMQLISVVRALNEIAILFWSNDKNKFEDNDYWKMVLVNDVELNYEIKEEKNLFNEFKQNILKKFNAPKNMQKNGKKILNLSNEIENNLRQEFDQKMEKIYENTKENAKEEKAKLEKAIENATNSEEKKVLRVEYIDKFGTFNSSPFIYAI

SEQ ID NO: 135116 - protein, 190 aa, Heterodera glycines
MSTEEILMDLVTATLKGSEEHLTFRVHFDERMRQLHLMQIDRKAASDWSKLDQENRKLLSTRIQRLSSLLDGLKEQNEGEYLLIYDDETLRLVRERNTGKAKKMEYSDNEGEEMGLCIQEDEEESGERNAPSVGPVYDLEWIKHFIKMKPILSHAPVEDYWNGIDPHYPLQWHIVRGQIPGALYPKNQRN

SEQ ID NO: 135117 - protein, 26 aa, Heterodera glycines
MQTYGWAERLAPIKKNANKAIRDALL

SEQ ID NO: 135118 - protein, 131 aa, Heterodera glycines
MTMARCQPLNALAMLGGARLCHHTPPNCTDAIRPLGPKSNVPSFKGQAIVNAEMKTISYDDYKGKWLIFFFYPLDFTAWVNTPRNDGGLGKMEIPVLSDFSKKIAADFGVLDKETGLSYRFVFLGQILIGN

SEQ ID NO: 135119 - protein, 50 aa, Heterodera glycines
MPKKPGTNHSSCRRIRPFLSEPCAICELFVKNANISADLSNNAKLMKVNN

SEQ ID NO: 135120 - protein, 131 aa, Heterodera glycines
RLHTDLHNNPVRQLGEHTCSSSAARVERLRIVSNIRKRALVTGEDPATIRANELMNVPDAVLSVMPSKSATKKLIQRARHEINEAPPIPNQLCNLEIPKAYQVYKHSEDSEEQFLLADSGVYKEEGLPGDQ

SEQ ID NO: 135121 - protein, 291 aa, Heterodera glycines
MKNAAQAEELKIAIGAFEMNDKIVKDVMTGIKVKTVCEYYQHPVRHVPENTPLRTMLEEFKKGDYHMALVDRVVAPSTEDKESKYELVGLVTLEDIVEEILQAEIVDETDVVTDNVTKIKRRRQQHRDLELFIDDGEACQISMQMQLVTIQFLEGTFRRAFHTDRIAQAILEKVIRAHVHRVEVSHLADFNCPKTALPRKARLYVKKQPSDKFILILEGRAMVTIGQTEMKFEVGPWHFFGKELLQQLNQIIEGDPGNPPAASGAAVSGTASVVPAATNGGANSHSDKCCR

SEQ ID NO: 135122 - protein, 36 aa, Heterodera glycines
MRAFCSMRSLYIRILNFSSAYFQGHFEFNDIFKKKE

SEQ ID NO: 135123 - protein, 45 aa, Heterodera glycines
MMKQERYGSQQVTQSYFGTNGINGMSDRNAWPQQNSTRQTRGKIA

SEQ ID NO: 135124 - protein, 151 aa, Heterodera glycines
MAPRACKKTGSTPKRLKQTEAVPTADGEGTSTQAAENGPSTSTPDLRPRSSPRPLSATPIRRHVGFRPKTTDNATNMDLTMMDKATDVDLAYEDAATQTEQLDKQLKEQEQTISFLRLQVRNRDAMIADLSRQLEQQAQNDQLTTAKASQK

SEQ ID NO: 135125 - protein, 94 aa, Heterodera glycines
LTRGTVDEPLLQSIEFERIILAPFHVFQGIGNALIKELEVTENAEIANEFFRSIRGQEGKCSGKKDMTGNSIRKVLIHADQLERLYSAEWPQII

SEQ ID NO: 135126 - protein, 68 aa, Heterodera glycines
MKEEDRHWNLIVQDYNNNPQNGMRGRGMARKNIYVQQDQAIRAIFLDRHNRPFLAYLRAIAYRMPEPN

SEQ ID NO: 135127 - protein, 18 aa, Heterodera glycines
IIGENKRILTFKESYKPK

SEQ ID NO: 135128 - protein, 143 aa, Heterodera glycines
LTDHFLNWLVSNGYEGDAFDRPDIGPSGSFGGKLTTAQQITKEPITKEPVIFIHGTGDAGDAALHTQAPQATGWSRSIQYFWSRSIQYFLEQNYTNAELYATTWGDTYTNAELYATTWGDTWGTGNILDGYATMHTCFLFGQF

SEQ ID NO: 135129 - protein, 107 aa, Heterodera glycines
MCHLGDPAHQPETAYYTDINALISYCAEFVCYALIWLIIWRRTAQITEHVKKLTISNLFIVKGIIPLLSLDPFAIEFCVFPISLFFQTLAYGSSAPVLYFCKCKTRK

SEQ ID NO: 135130 - protein, 81 aa, Heterodera glycines
FIHKKQRKYTKFRVGHSFFADQFKCVGHPSWYHVEGQLVNVLKVAVRVLRVHPLVLRVHFAVLACDHHRSVTNRFSQVLVP

SEQ ID NO: 135131 - protein, 132 aa, Heterodera glycines
MGTISLGTYTLLKAAFPLGSLVASALNIATKPESEEYKAFQQLHKKMDENFDNIRTTIGVARKVISMEARLLDYKNKVQVPINPLRDLLDLFWNPAVPKKASDVDEFRLLCYRSHDKTPLTILHVNIFFNIK

SEQ ID NO: 135132 - protein, 107 aa, Heterodera glycines
MSGLEIIRRFCIMFPLDKMIMIWPTVRKCRVSRKVADWVLLTHDPNIPIKDQQIIPYQDSEAVLLSNTYVDLLKDNELFESGTDVSQIYRIIQQSDKFLLAAIWLVN

SEQ ID NO: 135133 - protein, 44 aa, Heterodera glycines
IFLYLSTSIERKNKSNWIPITKDSEKLTHTSVSFKILGTALSKH

SEQ ID NO: 135134 - protein, 43 aa, Heterodera glycines
CFAVPRTGRQWMAFNLQEIRLTISGCKKLLGKELFFEVSQTPY

SEQ ID NO: 135135 - protein, 1401 aa, Heterodera glycines
MDAQQLQQLLNALQQMVTNAAPANLSNASLASSIDARLSAFHYNPEVGTTFESWFKRFGKLIEDDGSTLPEASKVRLLLGKLGEEEYSKYRDTISPTQPDQVNWNDTISHLKQLFAETRSLFVRRYECFKIRQQPGQDVSSLIAQINASCENADLSLTKEQLKCIILVIALNDEHHDLRQKALKMLEDAQKNGTNISLKKIEEELRAIQLVKESALSLVNPPIATNAIRTRPRQWTDPAQRQSGGSNQRQTPNANSSGKPTRGQPTLPCGSCGKSDHWRSDCTFKDATCFKCNKKGHISTICRSKKAKAPPNSHRSFHTVKIDANCLHVGTTQGRWWKLCILINGRQTSMNGDTGAQATIISLQTWRELGEPELTPSDIDAKNCNDQPFALLGKFICTVQFSDKPPQTLIAYVSGEVGHNLLGLPWIEALEIIPRQILFPSSKSADQATKMIDNFSAVKPPNKSINDVSTLKAALQNDFPEVFEEGLGHCSKAKAHLILRSDAKPVFCRARPIPHGAMEAVNAELDRLLQIGAIKPIDFSHWAAPILAVKKKNGKTRVCIDFSTGLNNALELNRHPLPRPDDIYASLNGAKFFSNLDLRDAYLQMEMDDKSKQLCAINTHRGLFQCQRLPFGVKSAPAIFQHLMDQICAGIPGVFAYLDDGLIATKTLDQHITALYTLFGRIKEYGLRIQLDKCKFLQPELLFLAHIVSANGIRPDPSRSDAIRKMPAPIDKSTLRSFLGALNYYGRFVKCMREMRAPLDKLLQKDVVWNWTSEQQNAFEKAKETMTSDLLLTHYDPARPIVVSADASKDGIGATLSHTFPDKKEKVVEHAACTLTAAQQNYSQIEKEALAIVFAVQKFHRMVYGRKFILQTDHKPLLAIFGSKKGIPIYAASRLQRWSMILANYDFEIRYVNTTSFGQADVLSRLIANYSRPEEDILIANICADTDCYINSVFENRMDQLPVTTVEITAEMANDQPLQTVLQFLRNGWPAKVADSEISPYFPKRDKIFEVDNCLLYEDRVIVPTSLRSRILKALHIAHPGIVRMKALARRHVYWPGMDSAIEKVVSTCEECQLGQKNPTKAPLSPWPTTDKVFQRVHIDFAGPCSDGHQYLILIDSFSKWPEVYRMNTISAYATVFVLRSIIYRLGIPEEIVSDNGTQFRSAEFATFCKEFGIKHIFTPPFHPQSNGQVERFVDTFKRSMKKMSKGGKDWIEKMLFSYRTTPHVALNGFSPDQLFFGRKLRTKLSLVHPNGEKAENFDQNSFKKGQSKYTDKMAQNFDRKHGSKLINFFPNDHVLLINYRNNKTEWLQGKVVERLHKSPTYRVYVPVLRRLVHRHANQLRRRHLLEEEAEKEAPQIEEPPPVVKPPLPPQQNLPQPANSPLVVRRSTRVKKPRQFYSPSK

SEQ ID NO: 135136 - protein, 19 aa, Heterodera glycines
MPKWGRSKRSTTAHTAIFY

SEQ ID NO: 135137 - protein, 147 aa, Heterodera glycines
VLKLGNAFAIFEPGPANVLERRFARFRIRLALFDAVSLSQNEAAQFVGTKFVDDDNYGTFGRLKIGHFATNYAKDSAVVDDDTTNSKTITDFGPIAYAIQTSGSTGAKFLFFVPTDFCVKVPKFRFFRIFRHSEGRLGSVLCHFAKC

SEQ ID NO: 135138 - protein, 171 aa, Heterodera glycines
AEHNSKCEAETMEVIKAEQVDRKQRKKIFKCNSDVKTIWRQGLEKVREEDAQKDVDSLEQNSLTNLYPSWIEIRKSYNRRRQQAHGSEAAEPFDVPPRLQLTKFGAIKLTMGKKIAGSEWLIYKNQEIGVMIFASQTQLDAAKNCRIMVADATFELAPKGFNSNMATSKGI

SEQ ID NO: 135139 - protein, 79 aa, Heterodera glycines
MSTLAKRQEYTSDQWQELESEFEKIKYPDAYMREELAKEMGLTAEQVNKWFQSRRTRERKWDKLAEHTAQIKKKVCGND

SEQ ID NO: 135140 - protein, 162 aa, Heterodera glycines
MRFLMEKLYFVHNELDIYVLDEQNERSLIKTIEYLEAIELMKIEKESADFKTHSPKQTVSIPQNDKKANGLITTQFGSFKSTEFNQMLDILHTHIFSVLVAKNVQKITASNESDETKCAPNWQRYYSHIINMERLNSLFKSVENLVKSVENIEKMEKQQKIG

SEQ ID NO: 135141 - protein, 174 aa, Heterodera glycines
MLSLCANWRAETISSVRHQLDNLKDYVTPPVDRVEKVSRPHNNEFVDSIKSCMAEIQRSMQEKLQNIVEKRLVAALGKHYFHAIAISDLLPNSFSLDYLKTKMSEHMNTSDNPQFNQINADLMLRYTELERHLKQIQLAELEEQEQKKRTLLAKGKGECQFNLEKKEILNRLYR

SEQ ID NO: 135142 - protein, 18 aa, Heterodera glycines
MCWCCSNWPTSSRIIFCI

SEQ ID NO: 135143 - protein, 69 aa, Heterodera glycines
THKKGRIFSFFFLSFFYSSKFSVIFSRLIEPVKSFRMISRLFDSVNNFKSYIDSKLAQTELARRSWPVP

SEQ ID NO: 135144 - protein, 47 aa, Heterodera glycines
MREKQHRLITLNELGLDMEQFKDFMEAISLVALQCPILPNRDPPWVK

SEQ ID NO: 135145 - protein, 101 aa, Heterodera glycines
MLISTLQERQAHLNALQAVCDADIKSVKEEEEKEKEAAQILLQAEKQREEAAQILLQAEKHREEAAQLLKEATERRKKAEEKKEKSVPRASMSLVTNPLSI

SEQ ID NO: 135146 - protein, 24 aa, Heterodera glycines
TSDFMVDPSFADGSFYPFVTLFDS

SEQ ID NO: 135147 - protein, 67 aa, Heterodera glycines
HSQSILCVDSPSWDDQMVASGSKDNSIFFWRIGGVKTDSASDGHQNLTDAFMADKIAVATGHTHSVA

SEQ ID NO: 135148 - protein, 115 aa, Heterodera glycines
KLSFPIRKCVHVIVDGGPERVVDKTGTFHEPTQRRAAAVMREKERRKEMRRKFTQENQAQQKRQKDIEKRHNEWTKQMEEEREAVKERIRMNKQKLEERKKSGMNGEGDDDDEEN

SEQ ID NO: 135149 - protein, 47 aa, Heterodera glycines
MAKTGFPDFKSIFLGNKTVIQYLREAEFLLYVVVDELIFVLPCNKPP

SEQ ID NO: 135150 - protein, 268 aa, Heterodera glycines
MEMCEEMWAPFGPSQRLALQGVDIICNSSGSHHVLGKSRMRINQLNYTNNQCPLENWFQLGGTYLYANHRGMDGERVFFDGMSSIAQDGKLYAQIDQFDIEETAVCSCTLNLDNSVAYRAKIASLCQQSSDLREGMALQNVQARARMVLAYLHAQLTLTKERRKGSLLVLGASNVDESVIHSVPTAELRPLKDGQIVQTDEAEIGLTYRELSTFGKLRRPGCSGPYRMFQELVHIWHPARSYDEIADKVRIFFRRYAMNRHKATVATP

SEQ ID NO: 135151 - protein, 137 aa, Heterodera glycines
EQPVDYDGTEIQVVDDGAEEGPTMADGQQNVQYILQYADSGEMENSMVQLEDGRIIHATQIGQPIPLSSATEANLPIGQPLIMSIPGPNSHQQQMQQHFQVVGNSVAVPSSSAASLPPIASAPSPQFQHSPAEGEEQ

SEQ ID NO: 135152 - protein, 106 aa, Heterodera glycines
PKKPEKSSKTQQSMASKSTTAKAEWANALPSDVFSSGPAPPVVKKPPPSKTKPPEKGKKVPPQPPSSHPDYGTLHLVDKDLFTKEQQAKDAKRTPPKAGPLSVPSD

SEQ ID NO: 135153 - protein, 77 aa, Heterodera glycines
MQLMEPCLFQVRLVLVLNLCKLNSAVRLLNVLLGVVADGLQIASNHIRHFHMTTFVHFDQLIAGPVEHNLLNRKLIM

SEQ ID NO: 135154 - protein, 84 aa, Heterodera glycines
VSVIRYEAPILFHNAKHFKYSVLEAARQIKGQLLGIGIGTRTGSMKSMKSTNAGNVGSGAGPSAPTNKDSIQMKSTLLISGDIV

SEQ ID NO: 135155 - protein, 127 aa, Heterodera glycines
MTRYRRTGSIYPRSAQLIHRRPHHHQSAIPPPISFINDMEMADQDKLIENNMFDEHAILPSAFRPPPFSACVSAADHRLSPICASSDQSGLSGADQRPIVCHADGAVGQQLETELKHPYLVKRLLDC

SEQ ID NO: 135156 - protein, 149 aa, Heterodera glycines
TSSGHIIRQVNELLQQQLAHLNNGQVLLQQHNLIANCAAATASASAAMDNNNNDNIRNNDCMSSTVPVLAQADTVQRKETVVDNNDHTMHGTNMDKRMTVLSAAADQLESFSRNKLGRSYNPGRPLGMLDRQKILNLYQRGLKISHIAK

SEQ ID NO: 135157 - protein, 213 aa, Heterodera glycines
MSLAASETAATSNNNYNHHYEQLSDQFNLAQLLANQQQQEQQNESPLISRMLLEHQQHYQNQQHHLLLRAANSLSISGNNDNLPLLAPPNNGFHPLPMLLRLITMTSPQPATTTICCDVGRSNMNMSMDQLQMMMKTMIKVEDVNQLKLQVEEPVATNWQKSAFVAAQQPQFQQQQQLLQRQMIMEQMLWELLARVISINYMDYLIMLRMLLD

SEQ ID NO: 135158 - protein, 84 aa, Heterodera glycines
MHAFCARAIYHRAYQSKAKQQRWCFERIKGIESVNRLLEKYVCNLSTILRISCLHLNGMMLITAFNRQLTMETLCNFPSKANGN

SEQ ID NO: 135159 - protein, 104 aa, Heterodera glycines
SNQCTFSWLMSHSKKTGSRATSQERDEEINITIIDRNFWNGKTSVKVPDLERAHIEVLRLEESVNRSFRIVNRRAYANTRALNKMAEEVNTNMGVLNANGVWAC

SEQ ID NO: 135160 - protein, 82 aa, Heterodera glycines
MQLFVSQMKLLENSVGNPFISERRKADESMATRRKGNSYVRKGTQIPFVKMRFSSTAIFLLVLAIASHLNFFQSTECFYLRN

SEQ ID NO: 135161 - protein, 71 aa, Heterodera glycines
SSVVPCPAELALCRQAVLVNSDQQQQQQLHDYEQRPVIVGYDFNAGIQWEALLDSFLTTGFQASHMGIAIQ

SEQ ID NO: 135162 - protein, 95 aa, Heterodera glycines
MTRPIFTCASPAACAPMLYDDSVVGDDVGDGDDDGEHVHDVAAEFEALAIGIALGYRTIVGIRFIGQGQNVKFEPHISGGTQSTFSVVQSHQCAV

SEQ ID NO: 135163 - protein, 145 aa, Heterodera glycines
MPGAPRFTQKPSIQQTAQGDLLMECLLEADPPPEEPSASDGGAYKCTAANKFGESNANINLNFAGGEEQKSTSSGSAKGPTFVGKPRILPRDGGALILMECKVKSGTRPTVKWSKDGAPLSMGSLYQDVFADLGDGTYLCQLEIR

SEQ ID NO: 135164 - protein, 102 aa, Heterodera glycines
SIQNESSNYPPFLYVIHTSEMSSSPHGDEDEGEEAAAAWGQDSYETGDENEMTYYSSASSTFTLIRKHCGCCCFCCVDHLLDQQNHLLQMIPNTIAGQKNAN

SEQ ID NO: 135165 - protein, 86 aa, Heterodera glycines
MEVDTNGTAAQKKRRVPSSKKEEEKEEDQLVPEKRVQIHSPSPSESGATTPTKKGGKKYSGSRHSTQEDVGYCNSLNKFTVQFFKH

SEQ ID NO: 135166 - protein, 296 aa, Heterodera glycines
MSWKNADSRESFSSASDSPLSHPLDIIHEEAAGPSSPSSTTGGGVESHAESLSSVSPAFRSPTPSHDHDVIAHGGHAKTTISNNWTTLRNHTKTTTAPSSTTAATRNGTNNNTLVKPAAAAPSFRSATRAKQLREEAEEEAQRNRAVAQRRISAVHEFVLNRLPRRSVASNAILDNIIDFHAAQPALPTVEISQVSDDIPASGLKIPPERRRELLALSGGGGESEDERTSSISEQPPAKKATTTMKKPSVTIQKEEEKQPAQAKSKSPSPRPAKSPSPNPKECVLISHLSIHDTVS

SEQ ID NO: 135167 - protein, 122 aa, Heterodera glycines
MATSISTTSGINGDESGPSKPAKTARYSPVGSVANRFESRGAKSSVLTEINQTSLRVTSPQRKNAFPLQAAAAADQQAETSPTPEYVPMEEANGRTPTMIQVGRKKTGQALISEPTDEYRES

SEQ ID NO: 135168 - protein, 145 aa, Heterodera glycines
MVASSQTVPSCWPACTAPAGWPRAPPRSLAATRRASAPAPLPDAVTDCAAAQTSGASSLPLPAPPFGPPSWFWPFSSAAPGGTRAPPASCPLGRLAGVALSCASTVCHPGGETFKIEQTKGEQGEKQQINTKLEEVLLHQEGRNE

SEQ ID NO: 135169 - protein, 67 aa, Heterodera glycines
VSLIISKCRPQDEDEYTLMVKNAHGKDEVGAKLLVTPAAESNLDFRAKLKKRDTSISISEQEKQRQR

SEQ ID NO: 135170 - protein, 57 aa, Heterodera glycines
MECTLFLGLLFCATPTENGAEVTHKGTVGGEQYGPIRHHFGVPCTPQTVQSVTKKSD

SEQ ID NO: 135171 - protein, 101 aa, Heterodera glycines
MLEPRSASAAAAVHSLTNFENCHELEEMQQLIDTLAGSLRKQLDALVSVNRQKVQHCSVRWKNVKNSFLFADAIPGKERRKLESQTDECRLRSSLLTDKIT

SEQ ID NO: 135172 - protein, 35 aa, Heterodera glycines
WRPHKVSKPRNVQKSRKPTKCPKFFKIYNNKMSLI

SEQ ID NO: 135173 - protein, 70 aa, Heterodera glycines
LMEKRMFDYFCQRAAAEWLTNLPSRNLTAKSSKTPTASQHGKTRLRQGTREVGGTSLNGNGMQRARNCPI

SEQ ID NO: 135174 - protein, 111 aa, Heterodera glycines
MAKLILLALAFLSMFGIVSPFAVTSAAKSFWNAKARANWSIGQAMWNVQSTAISCWKTARAISVVSHAHVPEINTEKRVIEKNEFDGKSDGWKIVIKSMKELNKIYINFIY

SEQ ID NO: 135175 - protein, 75 aa, Heterodera glycines
MCHWNETNATNRTMANANTSPGPFGTRSCDSPLSLVNFMVKEAQKQLESPDYVIWTGDNAAHDEYDEKSEKEKQK

SEQ ID NO: 135176 - protein, 134 aa, Heterodera glycines
FFPSLAFVYPFTHYFLPFIIYVPDWHYYGTVFCAILPQFFGIVLPPYFPIYFLPIFGIVLPKFLTLYFANFAHFCAKFPYLFLANFWHYFATIFNPIFCQFLHIFVPNFPIYFLPNFCTFLCQISLFISCQFLA

SEQ ID NO: 135177 - protein, 29 aa, Heterodera glycines
FGSGPLSLSIMIVLQIVNSLLPSKCLSTN

SEQ ID NO: 135178 - protein, 83 aa, Heterodera glycines
MEATPRQIDLQKLYNDLIGLPGVIGVHSLRVWSLKSDTFAATAHLELAFNGGSIKDKYFADSVVAMAQQKMISRHHIRFVTVQ

SEQ ID NO: 135179 - protein, 52 aa, Heterodera glycines
MTTITMPMSMLIPITSTICSLVFLEIMKCAQKNQNITHVTQKQLARLKRPPD

SEQ ID NO: 135180 - protein, 95 aa, Heterodera glycines
MASSSHLSSQLQNCGFSGQDTAFAIEYETGAADELYCTTPKRRKSDLIAGIDISNPNNRREWSESRTFNRFYDCVLDNGGNLTSLVACKLCNQSN

SEQ ID NO: 135181 - protein, 31 aa, Heterodera glycines
VIGIAINRILGHNRNRRFNRNRILSGSAHPW

SEQ ID NO: 135182 - protein, 169 aa, Heterodera glycines
MTKISNVFLRRCIDRSVIAFLRANKQIFDRNGTNLQLSVSYAFKHDVIRPIRLVFVRQIWPIFATNIRCLYIQRIGDFVNLRRLISKTILTDLDIHMVDSNFISPDATFSTGQALVKWLHTPTKDGQPKRLCFKNFDEQLINKFKKCCTLNTPSQFWASSSINKLAFVR

SEQ ID NO: 135183 - protein, 161 aa, Heterodera glycines
MHKALHNLSEWANKWQIRISIKKTFVLHLGNKNPKEIYKIGGNIINVVDTIRDLGINIDNKLQFSNHVTQIIKNAYLPIFPNLSTSEEMSVLIARIAELNRAKTMEPSVASSEVFGQDGYGMNDDQFSLEEEEGKEQQEDRKTPTKDGNIQILEDIFRIIW

SEQ ID NO: 135184 - protein, 149 aa, Heterodera glycines
MPGGSKTNYKIHVQTISWKVEPLFDPIYEKDTKRMKALIGTLSEEKRRGFLRTRYAPEGTNKTLTALMLASVLGTGEMVEILLESGADPNQMCLRKLIDARGSPTMTIVTPLWVGAMDGHFEVCQALVKHGADVDLGAPQFAMSPLMAA

SEQ ID NO: 135185 - protein, 93 aa, Heterodera glycines
MADVEQSYMTEADRRALERFRRAERRLFSTEIELDKVLFTFQQYDMLRRRWAMEQARQMPHGRRKRQQAAAAAVAATTAQSPNVNSASHLAKS

SEQ ID NO: 135186 - protein, 49 aa, Heterodera glycines
MATTDWGQFDANGTDYDAIYDDTDDEAGTTDNGQGSGQGGSVLNHLLTQ

SEQ ID NO: 135187 - protein, 32 aa, Heterodera glycines
MRDCGLGSRKIPRGIPSRAGLYLAPCGGNDFQ

SEQ ID NO: 135188 - protein, 38 aa, Heterodera glycines; identical to SEQ ID NO: 130624

SEQ ID NO: 135189 - protein, 284 aa, Heterodera glycines
MKFAKKMLMIPEAEYLALRSAMNSGDYLQNEKASLDAKISQNLQDPGISEDLKAKRHDWLYKERRTVKGILENRPQKVVIENHVPGPNVAPYLGLNTQSKPQETDEPRKIIIPRKRLEEQTPDPESDNDTINELTPEPQTTSTLKPIPIKTIIHPTLLNGLFRDVLLYLAGKKDETPRGAKFLKDRLLKDPTVKDMVDKSKVMWGQKQRTYTIHKPIRKRFPRLKTIPSGFHTDWQCDLCIFDQLKKHNDGYKYLLVCIDVLSRMIFSAPAKSKKSEDMIEAFD

SEQ ID NO: 135190 - protein, 220 aa, Heterodera glycines
MLVLFNIISFLFFIAIFLTYPKQICGGPKSSKSSDSLMAPLLNSKRISGAKSSKSSVSPKVPLLLKSSLKSSTPKSTPNQSKSTKNSNSAINCEKINHSLESFKHSIIKSPNEYRFKPRNHYKLRILSGPIGKPQKQFHFVTDEKGKIKWNFTTDVRENKFTPKGFKNCKSKLPVTILVETTKESRLLAKYKNYAQMKKKMLARKGKLCKENIIKFNELE

SEQ ID NO: 135191 - protein, 454 aa, Heterodera glycines
MSTIDTKSNHADEMKPNMQKGTKRAATDRSDEPKRPRFLSEKCRHPRLIAFEEREAACHFQLIIIASNQIELLEMPSQLTPEMIFDKICNDGSTKMDKNTLQSLLSNGTDRSFNQDTCRLLIDLFDSNRDGMIDRNEFWPLWKYVDEWKISFKNIAAEGELTIGVDRLETALREYGYRFSVNFYCTLLRKYDRTMSDRLHFDDFIYLCLVLQQLTTPFRDRDFDQKGRIRQIISVFSPHRCVKMNNNNNNNLKRFQIKPKGPEEQPTLRTKTLSEVQEFDAAGSFFLRAKIASVLFSIYKACPMRSNGIPCRKKLDEEDFCVSCAHRAKKPSRNLYLRVVLRDCDDEECEQQTTAFSHVAIKFLGIASVDAFYNLSENAPDKLESILQSKIDQTVFVKLNIKEKNETATLDWIISSISEEKPVAVVVDVESSDDEAEDGSSSSNGSPKKRTKKN

SEQ ID NO: 135192 - protein, 171 aa, Heterodera glycines
MKKGEDDTATAAAAVPRGKRPNSNSVSAAHFSTESEEMKSCKKEEPMATGCRKGAKRQYPYSLMSARAQDVWSLKLDQLEEKYSRMEEELSEDSDDAIDFYEDGIDDIVEKINRFEAKVKKWSVNHGNTPVVKKPRYNTNADENSNDADDDAPTSTVYLNLHNDKMIEKTN

SEQ ID NO: 135193 - protein, 334 aa, Heterodera glycines
MPSDSDRKRRTTSEKSSKQSQTQPKQPRWDFRSMSYFEKYPTEPQMEEEMRQLRLATANDQIGTGDTHTSADSEQQQQQQKQQPLYKEITNHVHKLERFSVQRHVTEFMLNAQHDEPDEALRQAFDELIARAVQNAEKKSGRAVSKLGIMVSGKVLNDPVVIPMRPPIQNNVDVVMAELDKLGQSEGDDGGADKKTLLLSDPVEIIVTCLTPPVGSAPRLHPYQNWGYDESQRIVIRNKDSYCLFHALVAGRAYHDRDIFCLTHNPIDEQQPQFMANIMNRHDFCKDYEAFNRLVSNIGRMQTAVEELMNASGIQKDQTSYGIEHIQQVQQYWV

SEQ ID NO: 135194 - protein, 55 aa, Heterodera glycines
MRKKFFAFTIFLFIVLQLTDAEMSNEYKEACNDTCAALPKQNCGRGRQKVTVTHR

SEQ ID NO: 135195 - protein, 23 aa, Heterodera glycines
VEYAVPSEYQFVDYLGGGNYGNV

SEQ ID NO: 135196 - protein, 137 aa, Heterodera glycines
FFVFGAVPPNRCAQIYGETESFRNSFPIACTLILRWIFAPHNCLSTPNGHLKKSIFFVFGAVPPNRCAQIYGETESFGNSFPIACTLILRWIFAPHNCLSTPNGHLKKSIFLFSGQSPRTDAPRFMGRPNPSGVASL

SEQ ID NO: 135197 - protein, 119 aa, Heterodera glycines
LEKVEKEMNERTEELEEMREMLTHFQHVKEVDLKQLEQQIEQRQKRGEERMDKKEEKQREEKEKQREEKETKGDREEKQAQKRGDSSRRTVLMVDNSSEWAEQLQKVRERAKLCVDTYK

SEQ ID NO: 135198 - protein, 167 aa, Heterodera glycines
IVPPSMLSKPQKIGSFKPQPSPMGLPHPKNGVRTGIAVPTSIWAPNDDDMYKPKQYDQQEQPKQAERPAAAHGKLADDDIYNPKQYTEQKAGGGGRPTYEAALADDDLYNPKQYSQKPQQQKGADDDDLYKPPQQYNQQQQQRKMGRPKSYEDELDEDDLYKPKQYN

SEQ ID NO: 135199 - protein, 244 aa, Heterodera glycines
FIFSAGAELLPTKIPCLINLLSILRSGLINFCACALALADLGFRAIGCRIDSGGLAFLSKEIRRRFRQIATEYSKIEWFANLKIVGSNDINEETIITEYSKIEWFANLKIVGSNDINEETIIALRTQGHELNAFGVGTHLVTCQQQPALGGVYKLVDLDGKAKIKLSESKHKLLIPGRKKAFRLYSKTGIPLVDLMIPLVDLMMLDNEPDPTPHKEILCLHPFEPGKRAKVFPDRVERLHHIVS

SEQ ID NO: 135200 - protein, 231 aa, Heterodera glycines
CAKSKGGHDPAVSLAFLSLGKLPFAHFLLYSLVQTVGAFFGSALCFHVYRESFESFEKFDAGIRTVGGPSGTGAIFCSFPDEHIGHYTAFVDEIVGTALLLFFVNALIDPRNQVPKWVHPIGFGLAIFLITSSFGMNVGSPINPARDFGPNVGSPINPARDFGPRLFLLFAGGSESASDSSYSFLPVVSLSAGQGCSGSRKIIGSGFGSRKRPGFGSIDKFLICLKIKWHC

SEQ ID NO: 135201 - protein, 68 aa, Heterodera glycines
RLAFAATFIKGQGATYQKIGIDWTRQSFSHGQTYVALSRVGSWQQIKIKLSNENIDGKVDNIVWKEIL

SEQ ID NO: 135202 - protein, 125 aa, Heterodera glycines
MGCMVPAESASFVPMTRIFSRVGHNDDLVQNLSGFAVEALPPKKALEFVMRFARNCFPLGYHFASVSTIDQATRLEILTPSPQLHEGPYEGPLYGLELAELATLPQKITQEARQLAEKIRKAKEN

SEQ ID NO: 135203 - protein, 57 aa, Heterodera glycines
MTPQPFRDIMGETTILLEPRYLIVSNYNFFYLRFLKKNTNKHSLMKNYGLEIIKYQI

SEQ ID NO: 135204 - protein, 78 aa, Heterodera glycines
MRVWMFVQQQLPVCARLVRDNDFKERLLLPAVIRPVPEEDPRGLQPRPVPGRHSSKSDEMLGPNCGSRLPSTAIIHNP

SEQ ID NO: 135205 - protein, 149 aa, Heterodera glycines
MNKIVLFVLFGLVFGQTNPNCCCLSNEEKQQLNAARKTIEKAFRDTLRLNTEARDFAAVSNRAISEAEKIKVRHPEAPGMKTWFGRLLEWVRKVQGFSEKLNEEKQKIGFIRKEMDKCLDRKDVLMCRELADEAKGIFEIVKQYRQDVG

SEQ ID NO: 135206 - protein, 58 aa, Heterodera glycines
MCCYELDSHSRELRKIWAVKKESLRLLFKEFQKTNALTKLITETLNRGATLWYRLDNN

SEQ ID NO: 135207 - protein, 147 aa, Heterodera glycines
MANSGDGTVNGTELVAQIEQSAKNDTERVVDTFLHIIHEARRQNGENGGGQNVDKFIRTVKIYRQIYATLDQFMEKNSANEVIAKNDTFKSVWTKLRNFMAKSVAQLDHLAKQRVEFKPSDGPSEQQTDEVIRQRFRSDFIKKYCKI

SEQ ID NO: 135208 - protein, 25 aa, Heterodera glycines
LPIPSTIAFIHPIMSAKIIRVPKIA

SEQ ID NO: 135209 - protein, 87 aa, Heterodera glycines
FLPGGTQFFTLTTPALFFFNYFFHFITQRSRLIRSSPNFAGKLLRTLQMLINFLRIFCLEEHSSSHLPHQHYFFLIIFFILSPNVLD

SEQ ID NO: 135210 - protein, 66 aa, Heterodera glycines
MNTYIKVSPFILVSKPETLLVNVKIKYYPVLFFLLIKKLKFLQKFFLNIIYIILSLYLMIYLVTLL

SEQ ID NO: 135211 - protein, 496 aa, Heterodera glycines
MSEIWSFYKKSQTSETALCNLCRNSFSCKKSSTKGLWDHLKTMHNDEFEQWQKNKGNTNKEGQENKITKFFQQSDDQKQKADELVLKLMLRTNSSFLITESPELRELYSKAFPGFELHSREYFRKIVLPKMANAIKEKICSQVSNDYFTITTDGWSQPTSTPSLLSITIHHIDNEFNRNDFVLEAVPIESHSGDNIADSIYDALDENGLKIEKLISIVRDDAKNMQRMARVLGKSSHQCVAHFLHLVAHDVLKLGQIKELTDKVHEWVKFCRTRKGFEILRRHQEKQNTEKIKLVQSVITRWNSVYKMLDVFRRQKKALLSMEAERTEFHLLGSQAKRSRLDFVSDHLPPLIQSDFVFLRQLCPLLELFNRETERFSREKSTCSCILPTLKRLFDFLTKEEHPQQIMIIAQSLAESIGSRMHNYRENELLRISMLLDPRFAYDLNLFMSGFWKSIAEDLIDFAKEMVWLNVDLFPRLFFIGLLLPNLRTLALAKTM

SEQ ID NO: 135212 - protein, 68 aa, Heterodera glycines; identical to SEQ ID NO: 134199

SEQ ID NO: 135213 - protein, 100 aa, Heterodera glycines
MRTRPIWQVKQRLLTSQKVGAKLEATDQCEPNLVCPATICAIRGRLLQVHFDGWESEMDQLFDYRSRELFPIGWCEMYGYKLEAPKGYDLSKKKMRTIGE

SEQ ID NO: 135214 - protein, 259 aa, Heterodera glycines
VGPKDALTLETELLRTAETKEIEIKTETIQNENNGKPKNYGKIKIKKEENDEENIFIKNEAQPNEFDKIKSEQNDEHFGNDEQNLDEESSDENKSDEESWTASSDYEQTDEESDEKSSKKGKLATKSVKNSFKRTIAKRSELSDNEKIRIVKQYIKRKGSLNQKNKKREQIASELGVTIHQIKNWTRKFGLGNQKWLTDRQRKMLIKKFDKIKEKRTQNGLPAGEIRELEEKIAEEIGINIRTIYKWRKKFGISGSWQK

SEQ ID NO: 135215 - protein, 111 aa, Heterodera glycines
LRQETAEEAKRRFEIECEFVQALANPHYLNYLAQRGYFKEDYFVNYLKYLLYFKRPEYARTLKFPQCLFFLEALQSADFREAIASVDNARYIEDQQLLQWHFYIRVRQRLC

SEQ ID NO: 135216 - protein, 17 aa, Heterodera glycines
MPTSYHSSYNIPKIYYF

SEQ ID NO: 135217 - protein, 111 aa, Heterodera glycines
LLFFMGKDRDQLMVELVGGRISLSFDLGSGLGKLLSNGQRYNDGKWHLVQMDRQERSAKLKIDDTDKVEGESPGSMFEMSVSDVFFIGGLPSNIDARFIVHPFHGCMRNLK

SEQ ID NO: 135218 - protein, 54 aa, Heterodera glycines
MCNKLIIVTQTPPSSGRKGTDVRKMEDKINKEMEHTLRRYEQELWSSKAQQQAL

SEQ ID NO: 135219 - protein, 187 aa, Heterodera glycines
MPFPTNGRISDRKKGTLLMDIEKVSEFAREEVESSRYSEKMYINGLPWKIYAENDKDESTDNKLYIFLLCDVPEEDKHWNCKCSGNVRIVSQKNGVLGFKKVFVDLVFDNENSCQCVKSISFAELMDLNNGFYNREDDKVTLAIDVTVKDEKTENFLSDPNKSNGTISMEIEKVSEFVREVIGSECE

SEQ ID NO: 135220 - protein, 125 aa, Heterodera glycines
MELSIDNDQLIWDVFAREIWPIFATNIRNLGFTSANGLDNFCRRTSPTILTDLNHLNSINSNFLLPDAIADDGPNASAGQVLSKWLHTPSKNGQPKRLHCIDYYDRSNLEWVNNLKEVAGHILTD

SEQ ID NO: 135221 - protein, 34 aa, Heterodera glycines
MTKNDFAIVGENIFTAFLEEHDKLDPEAKFHSFG

SEQ ID NO: 135222 - protein, 49 aa, Heterodera glycines
MSSGNSGSSANTFFNSPIISSHSNEYLHNEKNTNAEKMQNKRAIFASIE

SEQ ID NO: 135223 - protein, 80 aa, Heterodera glycines
MSLFYESHHRLASELVTGMVSGSKLWQYAKVKKVQERLEQRLTDTFLGLTEEVEKNWGTALATIVRHHFVSLIISNYFIV

SEQ ID NO: 135224 - protein, 59 aa, Heterodera glycines
MINEIWDKCCLATISSSDFKKALVEANGGEANTDDDSQLKHVTVEEVISRINAMVTFVD

SEQ ID NO: 135225 - protein, 79 aa, Heterodera glycines
PSFLLQLFPSLILRPPRRCSESSSTTAGRLNQQQTDGATVTNANEPGATTATNTEAPAATTPATTTNADGATVTNANEP

SEQ ID NO: 135226 - protein, 159 aa, Heterodera glycines
MEGKGITDLEEVISSMRDEEAVDELELCCDSATEREGKKCDGQSNNGQDKGISSASTEHQNQSSKCQEGACRNWTSRTYTQCDRTREVHDVSGQSGGGANSDQFRTHGSPNSNKSKSRVFLAKMPEVLLLLITEFEIRSDQFLTHDRRVRTSLKVVFCP

SEQ ID NO: 135227 - protein, 326 aa, Heterodera glycines
LAPASVPLFCCNYFRLSFYALPAVVQRARRRQQGASTNNRRTAPVRGRSSARARVSAAVRRASRRQGNNNDGDGTSTRKKRGSAMRRPLKLKPLRGRPRGSRKSRAAPRTAGQKRGRGRPRTVKKGRARRGKNAAQQQTTTTADAATNTDATGAATVTTDAATTATTPPTTTTADGATVTNANEPGATTATNTEAPAATTPATTTNADGATVTNANEPGATTPPTTTTADGATVTNANEPGATTATNTEAPAATTPATTTNADGATVTNANEPGATTTTTTAIADGAVATNTDATGAATTPTTNAATNTEAPAATTPATTADVALD

SEQ ID NO: 135228 - protein, 86 aa, Heterodera glycines
ADLYADYEGDGDDDNEEDEQYYMHLIAHKDSLEFGSIMVVPPTEPLTTADGNWVPNEGNVSRLSSQMSFSADGLMTPLGTLDTQET

SEQ ID NO: 135229 - protein, 109 aa, Heterodera glycines
MIRRGTIVIKRGTTEIKKGKTVIRRDTTVIRRGTTVIRRGTTEIRRVIRRDTTVIRRGTTEIKKGKTVIRRDTTVIRRGTTVIRRGTTEIRRGTTVIRRGTKLLEEVQK

SEQ ID NO: 135230 - protein, 271 aa, Heterodera glycines
FCTSSDHSCTSSDLCCTSSNHCCTSSNHCCISSNHCFTFLNLCCTSSNHCCISSNHCFTFLSSCTSSNHCCTSSDHSSNHCCTSSNHCCTSSDLCCTSSNHYCTSSNHSYTSSSNCTSSDLCCTSSNHCCTSSNHCCISSNHCFTFLNLCCTSFYHYSTSSNHCCTTSNHCCTSSNHSCTYSDLWCTSSNHCCTSSDLCCTSSNHYCTSSNHSYTSSITVTSSNHSCTYSDLWCTSSNHCCTSSDLCCTSSNHYCTSSNHSYTSSITCTSS

SEQ ID NO: 135231 - protein, 170 aa, Heterodera glycines
YESIAKIGTGFKDEDLKSQFKEFQELRIDKPRSYFAFDPSLAPRSYFAFDPSLAPDHWFEPSVVWEVKAADMSISPRHLAARGLVDAEKGISLRFPRFIRISLRFPRFIRNRADKKPENATSSEQIDKKPENATSSEQIAEMYRNQDHIKNQKDGKVDDEEEEGEEKKEE

SEQ ID NO: 135232 - protein, 58 aa, Heterodera glycines
MQGEAEEGKLVEDDGGKTADTAERRRWNKYSNANEDDKQFSGRKRRREREQQDKDLYI

SEQ ID NO: 135233 - protein, 103 aa, Heterodera glycines
MGFHLFVRVRNQSLFRQPFGPFAYSALALVGSSNSKLSFSNKFTDGTKNMLNSQPFVVAGWGITKPWCSSGIHSATDQLMYGTMRMISMEECVGDKSESGRVY

SEQ ID NO: 135234 - protein, 103 aa, Heterodera glycines
MFNRFSPIAARKRNSNGTNILQGRPGNKQKIVMERSRIRWGKRGKKGKSIGGKIGGGKGGIEKGGKGGKGGKGVEETDTEERIGQRNGRQIGGQLDDEKQTKA

SEQ ID NO: 135235 - protein, 99 aa, Heterodera glycines
MSVMPFVALLLLAADLPPDPFLLTLGRAIGAFIGGPDNPSVVHPSVVNPSVDNPSVKDNPSVDNPSVKDNPSVMDNPSVDNSSANFFLSNDQKSCENDC

SEQ ID NO: 135236 - protein, 97 aa, Heterodera glycines
MNLPKNLAQLGPVRVARVAQGSSSVEQPRQSASRHLTTAHKVPSAVSTLALALAELRISFWKFFNFLRALFFVYCIFVKDLFENPLNRHIKHKNPEK

SEQ ID NO: 135237 - protein, 95 aa, Heterodera glycines
LFEYPKRTLEKINFFVFGAVPPSRCAQIYGETESFRNSFPIACTLILRWIFAPHNCLSTPNGHLKKSIFLFSGQSPRADAPRFMGRPNPSGIASL

SEQ ID NO: 135238 - protein, 446 aa, Heterodera glycines
MRAMRDANIGIDPQLLRTAYEVIKNVNPFAEAYMMMKEEEDEEVERARNENREPAEIKLLFETGRQLDRRLEYNVPRANEVAAVYVPGADGEVPNAKIVVRERGKELKILKGTDSMVTPMTYPLFYPRGTLGWHPEMKHRNSNRRVTRLQYVCYTLAIREREFNPILFGGKLFQQYCVDEYVKIEGDRMNWIKNNQKKILADAYKNVDNMLMKRAQERGLPLGRKVILPPSVTNSPRYVEKYFQDAMAVVRRFGKPDMFLTMTCNPQWAEISENLFHEQTSIDRPDLVVRVFNLKVKAIMNEIAKKKIFGEVIAWMYPVENQGRGLPHIHLLLTLTEQDKMINGEDVEKKGISARIPDKELVPDLFELVKRFMIHGPCGDLNPNCPCMEEFVDKNGMRGRKCSKGYPKAFQEETIVLENGLALYARPNDGRTVEVFANGRRHALDN

SEQ ID NO: 135239 - protein, 88 aa, Heterodera glycines
MGNIRRRNGKNLMQKLNKCLVLIIGQLKDGAEALYICEKTEKIKQYYQLKNQNPKLNDRQIAEILNITKRSLERYKSEFKRKSEGVTD

SEQ ID NO: 135240 - protein, 67 aa, Heterodera glycines
MDEEIKGRKISKELENYHELLLRLFKIKFKQLINQNDKFVEEMLTKEWVIELLCRQFKKRSIKKNDC

SEQ ID NO: 135241 - protein, 26 aa, Heterodera glycines
MNGAISKCHSTISIKQFFKLDFMAKC

SEQ ID NO: 135242 - protein, 80 aa, Heterodera glycines
MPKRKLLSKINARNSTQKREQKREERREKTERARQARWAKKTAPQPNTDAETPQPSEEEPSHQRHRRGTTTDDHHQLQHR

SEQ ID NO: 135243 - protein, 147 aa, Heterodera glycines
MFEQRFPNMTLDIPVDYSVNHAPRVNLQMVTPGGVVPDIVSLQTLQEFARWKRLGKLLAYKPRGWDKVYRAFRDPDGYFTGLYVMTLGISINKNLVSNSTNPPTYGDLLQSAEFANGTVGTADPNHDDAVLFIYKQVGGASVVKFAY

SEQ ID NO: 135244 - protein, 124 aa, Heterodera glycines
MKSFSIVCFLLITTLLCGQFAAAHLGFFDDFFDSDENFDFDELFKSKLHYAIGQRDKKQQQKKPHKHGNVDVENRSLDQLYAAALAEGGKLVVYAGGEAPRQQVIQWRELFPRLMLKLSPRLVT

SEQ ID NO: 135245 - protein, 92 aa, Heterodera glycines; identical to SEQ ID NO: 125147

SEQ ID NO: 135246 - protein, 74 aa, Heterodera glycines
  unsure (1)..(74): unsure at all Xaa locations
IILYPRKMSISFXEKFYTSQKRLRMRRRAVHNRHFISQRIFIFRLYPRKMSISFFDKFYTHTNALEHDREGGAQ

SEQ ID NO: 135247 - protein, 49 aa, Heterodera glycines
LLAKLDEERREKAMEMVGEQQHTDAEFEQKFVEFAKGFKRDEQKVDKKK

SEQ ID NO: 135248 - protein, 19 aa, Heterodera glycines
TFSFSSLALTNTHTIFEML

SEQ ID NO: 135249 - protein, 19 aa, Heterodera glycines
TFAFSSLALPNTHTIFEML

SEQ ID NO: 135250 - protein, 19 aa, Heterodera glycines
TFSFSSLALPNTHTIFEML

SEQ ID NO: 135251 - protein, 19 aa, Heterodera glycines
TFAFSSLALPNTHTIFEML

SEQ ID NO: 135252 - protein, 19 aa, Heterodera glycines
TFAFSSLALPNTHTIFEML

SEQ ID NO: 135253 - protein, 18 aa, Heterodera glycines
TFSFSSLALPNTHTIFEC

SEQ ID NO: 135254 - protein, 57 aa, Heterodera glycines
MGKGRTTGNSGGGKGGSGGGGDEKSGGSGAGKGTVAAGSGGVRGKGAGQSGPAAAAA

SEQ ID NO: 135255 - protein, 203 aa, Heterodera glycines
LLAKRLTELKMDLKTVAAIASVDEHKKHLQKLSSNLKREKNGLKRFHRELADEIEAEIALRTNYAQTAEHLAKLDAEVRSAAAEGRVPQTEAMLRRIELQMEMLKKQCRATRKFVEMSVDGAASTSPTRRRRIIFKLSSTVTTIIQAGRNRNYQALGEMKHLLSCCCFSKCQEEQEDQSDFLVQAEQMVEKSEMVRLKKEELI

SEQ ID NO: 135256 - protein, 307 aa, Heterodera glycines
LRPCVDFRPLNNITIPDPYPIPRMDKTILRVAGQTFYSTLDLASGFWQIPLDSESSYKCGIVTPWGLYQMVKLPFGLRNAPSIFQRTMDKALEGIRNVTVYIDDILVHTNTEEEHLETLEKVFCRLNEFGLKLKREKCEFLKNECTYLGHILNGKGYRPSLNNQEVIEGFPEPENAREVKRFLGMMSFFRKFIQNFAEIANPLQQLTKKSLNLYGKSRKEAFGKLKNFTECQCLRAPNYELPFYLFTNASAIAYAGALMQSQNGNDLYSVGYWSRTLSTTESKLQPTHGELAAIVHAVENFRHYLVG

SEQ ID NO: 135257 - protein, 273 aa, Heterodera glycines
EIKIGDSLALSGKNLIFGKEIARVASRNRDCVQLALCFRQHSSMPPLERLRLLQAQQQMPHELVLDRFPPQLVQSVHQLADTVERRYDRSANSRGFSPFPVFGPFITDSISGGSGATMAPQPRQKSVPPQATYDGTKPWAMAPPKEEMSVSMTTSQHRMPIFDKLPKQQQEQSTHFLPPPMTSSSGDEWQSAYECLPQWTKQMPKMPPETAPKPQQDLSSSFPSFCAAPFAESVQCSVNLCKFHAYSRQLAAKSIWPMSDSQAEMFQSVVSVE

SEQ ID NO: 135258 - protein, 84 aa, Heterodera glycines
MYYIQVTTISDASKCMLTFALGAFAPMSKIGFKFEFFSIREFYDSFKDADFPASFIAICAARALISFFGVILNGILLFVTLRSK

SEQ ID NO: 135259 - protein, 81 aa, Heterodera glycines
MFLKQYNLDQIDYTKRIFKALLVNVLFVSTVRIIELRSTNIFLDDKHSFYTRDSDAICGGNVMAKRQIDQRNGRVGNVRLA

SEQ ID NO: 135260 - protein, 88 aa, Heterodera glycines
MSRKISKKIAEKIGTNMHSIWDWKKKFQLNNRKTKTYTDAEKLEYVKKCEEMMKRNPMMSETKIAEELEIPRQNLRRWKKKFGTNEIN

SEQ ID NO: 135261 - protein, 177 aa, Heterodera glycines
MPSGSRDFDLPAESHEWAPPSINCEDLQKEIEHLRRLIVKSRSLVTFCHNDLQEGNILLPKAHSGNIRIGSESDEILSGIDGNMTNNSLTAFNPMDPRLVLIDFEYASYNYRGFDFANHFVEYSINYDNDEPPFYEMLPEKFPSEGQMLEFMYNYEKELRPNASEEHLWEIARSMVE

SEQ ID NO: 135262 - protein, 34 aa, Heterodera glycines; identical to SEQ ID NO: 125570

SEQ ID NO: 135263 - protein, 24 aa, Heterodera glycines
MHCLCVASWDHVLVRVLTLLAQLG

SEQ ID NO: 135264 - protein, 21 aa, Heterodera glycines
MRTRPIWQVKQRLLTSQKKGF

SEQ ID NO: 135265 - protein, 44 aa, Heterodera glycines
MSASLARQLVELQTNPTDGFAVRGLVDDNIFKWQVIIFGPSESP

SEQ ID NO: 135266 - protein, 131 aa, Heterodera glycines
LPSPFRYLCIRYPLNSRQICSIRNVRIATVCITCISIICGLPKCVDYHFAVYEGLLYVEGEWVPLRSCLSGFTFFVQLVGSCLSGFTFFVQLVGQNAFFNAYFWTRVVAFILLPSLLLICLNALLIQLVNI

SEQ ID NO: 135267 - protein, 671 aa, Heterodera glycines
MLLAHAHPSNPQALFDEFLDEMNPPVAANHPGAVPKPAEVRAAEVMLNLEYYLNCMGTNTKDVGLQGLPVGYDFQHQAQLLEEDNILDSFYGEDARQRCKPPQQVAIEQIGRLNPDQRAAFDEISTSILGGCDQKLFFLEGAGGCGKTYFYNTLIKWCIAGKPSLDGNANAQWVRNQELQRNSVVAAASTGIAALLLIGGGTAHRHFYVPNDVSQETPPMLNFESAKAEQLRHAQLIIIDEISMLSNTVLDYIDRLLRDVCANATPFGNKVVVLSGDWRQLTPVVEHGTREDQVGTSIKMGALFRLFKKISLTINMRTAPGEQSLRDWLQEIGNGMHRVGTDSQGFTNQLRIPPELLVDDLDHTIHFCFPEALFDDPLANADAIAHNAILCPTNNDVQHINEVALGRMSGCGREFLSIDEPLEPNEEMHNFRTDFNMEAVHNEMPSGMPPHKLTIKVGTPVMLIRNLDVTQGLCNGTRLQVMRTSENNLFCRILTGPRAGAQNIIAIPQIQFEYGRARHHRGLRFRRLQFPVRLCFAMTINKAQGQTLQRMALVLNGRQCFSHGQVYVAMSRVTQMDGIRVYAPFCQSGYGTHIENVVYHELLDLETQQSRIPNRGLMDVDNDPDAAIPDVGPRVPDVANDPDVERDNGHAAGANHQEPNDLDSSFDDFFD

SEQ ID NO: 135268 - protein, 421 aa, Heterodera glycines
MPSKDRRRKEADRLRWRAAIQTPDVANALGGPNTSEPSTSTGIRAQIRQQRNDGQAIVGSASKRTRHNGNVGTPNNAALSSEQHRSDTSDVESVAAANYTRCGYACDCPSYAQCQQNASSFLSSQKYLKQYEHGIKPAPVDYYDCGQFGDAFCGHCGARLLLGEFNNIKRARRQTPCCGNGATHTEQMITELDELKLPPPAYVHGLVDAVDERVREAFLNNIMAFNNLFAFASTHGEKAPPEQMGGRLDTCKYNGQFSFLFSDLIAPGVRLPSFAQVYTLPPEDALNVRQEALDTAVAPLIKQTIMERLEALMRQNPFGQTFQTIALLTDRDLKGGPLHGRTDVTVIERADAPTAKQVAVIWVQEDGLPPQISAFWLSDKAGKMRELKSGMPQIDPCCFPLIHPRGTLGWRWFMKKRGFEV

SEQ ID NO: 135269 - protein, 250 aa, Heterodera glycines
MPTSSSPTNLHPLLYVSQLTTNSNKAAEVIFSMKLHSVCVDFDKVAVSLQQRFKDGKGELPKFCDPLGLRWAEIVEEPISENLECGKDSNSSDAQNKILSILPANETVPPATEEFSMVDNKNQKEEKEEGRDKETPADEVFEGELGFSRQVGGVEVVLSRAELEKLRRLEKPGIVVIGFKPLHLLKDSHRMGATVFVYPIKSVISGSWPLVNADQVETAKQFVKKLTNTKFLPDDFANSMLQQHYKAVEM

SEQ ID NO: 135270 - protein, 48 aa, Heterodera glycines
MGLTRYSFVKWIINLEKYETYAFAHFSGRYDSHFVLRDLRIWDISSRN

SEQ ID NO: 135271 - protein, 61 aa, Heterodera glycines
MYFPNQFNKEENYGIILTTLPPFEDYFPDELSEEEYDKFKKWYYANYNSGFNVVKLKNFLY

SEQ ID NO: 135272 - protein, 84 aa, Heterodera glycines
MPLAVISNTVVRSVGVEQHEDSESVEKFVRYVAKCKYSLEIDYQQCSDLDNELATSAAETEEPAEPSRHLAAFDPKDVQQRHEG

SEQ ID NO: 135273 - protein, 75 aa, Heterodera glycines
PGLKCPAQAKNFFYFREKIEIFPKKIPVDRARKTMFWKWSQFLWEKSLKNPKIQKPENRFLGLARKIFKIFEILK

SEQ ID NO: 135274 - protein, 19 aa, Heterodera glycines
FGREILFFETKLKTYITYI

SEQ ID NO: 135275 - protein, 86 aa, Heterodera glycines
KNRFIFGFGAVPPNRCAQIYGETDSFGNSFPIACALILRWIFAPHNCLSTPNGHLKKSIFLFSGQSPRTDAPRFMGRPNPSGIADL

SEQ ID NO: 135276 - protein, 123 aa, Heterodera glycines
SERELTPFFSINHIFFIHFLSRSHELYYFLNLYRVNLIKDLNNINFLRFYTASETFKSVNSERELTPFFSINHIFFIHFLSRSHELYYFLNLYRVNLIKDLNNINFLRFYTASETFKSILHAN

SEQ ID NO: 135277 - protein, 234 aa, Heterodera glycines
MKRGQGNEHILQWFNDYETQQKQSQRKGENAKDDDGTTEENPFKFIKIHINEMANSLTIDAHVTEEKGAVVEICLCDEKYGICDGPFEATENFGGKINPKATECVKFDYKTINILNQIVKKENKLSVLAQFRMNYKKGGKNKAKNAIFGGLFKKVNTQNEKEMAQKMIDVRNWHIGNLLAANDERNSRRLDREFFLRISFANESKSNPKVILGEWAVQKSVKFEMIPSPNWSKL

SEQ ID NO: 135278 - protein, 135 aa, Heterodera glycines
MPKAIQPITTSNNSLNNAFRNDRRFFCWMPRSGLLITQLRDCPAMGVYFASYAFLRRSMDSENEQSQGMSNLQLLFAGGAAGMCSWLSNYPTDVVKTRFQSDDAYENYREVVKKAYSEHGWRTFFAGLGSTLIRC

SEQ ID NO: 135279 - protein, 59 aa, Heterodera glycines
FFSADRCKMSQQNEEALGKDQKELRAVQHDMERLFKARDAKGLSELYTVDAIFASNLNF

SEQ ID NO: 135280 - protein, 87 aa, Heterodera glycines
MEYLSVLELHLTGSILLAFVFGPKLYVLLFYEPVVVQFDTDGCAHGDKALDLFEAAEPKNIIPNDNIVIIEYLSHFIFMIHPLAIVP

SEQ ID NO: 135281 - protein, 293 aa, Heterodera glycines
MCTGEERLNVKGMGRLSKAGNLAKGVDRLLKAIDKAHKKLCIREKLCDEFIENGRKLTREYLRKSAKEESAEMFEVFEFVPIDHHGNFDYSLMANLSLPRTSIDSSAGGAFSPNNNPSISNIAINFLADYRPFAYGVPITRDSPSATVISRCKSPFCKCPLMMSDDFHFGADVSAWLGHNSVFRREPSRQRMAEISEDDEFLLRENMADEPEIRELSADAVDREVAWAIRAILLSLSALLSAIAVGTLLCILFKIWRRTIRGSQSLGILLLLGIITMHLSAFLFTTEGANEPF

SEQ ID NO: 135282 - protein, 22 aa, Heterodera glycines
MCHTRSKMMLTSAGKKSRVITN

SEQ ID NO: 135283 - protein, 92 aa, Heterodera glycines
MDGCVDVVEYEKRKAEVVKERLRASNRQLVAFTESPELMIQKILEEEANRKEGEAEEAQPKRGLEEEEEEEAESGEEEDEESFCMEYANNRY

SEQ ID NO: 135284 - protein, 63 aa, Heterodera glycines
MSAPPPYNPNMQQYPQQPQPNYGQPGYGGGGGGYGYPSQPYPQQPNSYGGGGYPQQQQPQPQV

SEQ ID NO: 135285 - protein, 53 aa, Heterodera glycines
MFGWTLSLFDRHQLGLKLALLSPHFELLVDKHVDDESELTIWRAIEIRRKYWA

SEQ ID NO: 135286 - protein, 99 aa, Heterodera glycines
KLWETYPTAFDTNNAAGFIPKLHWSLAHGPDFAKRWGWFAWISEQGIEHLHHVLNKQSERFFRYKGDELLLKIGEHQTLLNSIFDRHMDSFDTSKAKKH

SEQ ID NO: 135287 - protein, 30 aa, Heterodera glycines
MHPEKESSVYRVHVRKKKRNGHGTHGFVEG

SEQ ID NO: 135288 - protein, 91 aa, Heterodera glycines
MTRWAVMNFPANEMCLWPQALLYGTNDDNNNNKYNYRKLIRRREVLSDRVVYSLFNQHSAHKFVVNIYYSSESDLFKQMHCFTIRRHRPSR

SEQ ID NO: 135289 - protein, 103 aa, Heterodera glycines
VGEQKAQMTSLMVKNGRLCEKLGEHQKGLKAVQNRIELLEQCHLREFVAGLPPVHEDGSLVLSQFENGNYFAEMKILFQSGSRFCSGFAIKSSAHFRNYPSNL

SEQ ID NO: 135290 - protein, 134 aa, Heterodera glycines
MSNLFVASSAVVFLLLQLHFVVTFASSFEGAPPKANEEAMPTTGEQNGGAEFGGSKQKMARKMMRYNGNNFDKVSVLFIRREMALRKLQLQINVLEQQLANALSSAFAAGCPPSGVSSVSDGISHRRHLPMPRE

SEQ ID NO: 135291 - protein, 160 aa, Heterodera glycines
LFDWPLAELLPQQSAEDGTPISPISCYTQLDESFVDESRLYRLNNTEQLRERACLLRIPTGTRFTVERMHTKNQGTFVGVMAGSSQAYLPMWTGRIFEGHSDMYGPWHVQCQNAYLVFNSVAFPHLEWFDFRLTRETEEDRSTSNAEDCIAEELVDRGRF

SEQ ID NO: 135292 - protein, 190 aa, Heterodera glycines
MNSTIIRVPKIACDLSLAKNGVSKNRNYAQKASQTILAHPIPSTIAFIHPIMNAKIIRVPKIACDLRLEKNGVSKNRNYAQKASQPILAHPIPSTIAFIHPIMNAKIIRVPKIACDLRLAKNGVSKNRNYAQKASQPILAHPIPSTIAFIHPIMNSKIIRVPKIACDLSLAKNGRITYIFVNIIFARRYY

SEQ ID NO: 135293 - protein, 139 aa, Heterodera glycines
MIMREREMVMAQYSRVDDLPAWVQFPDIERIEWVNKGGLKVYTQNVGRDRVIMDMDVVYAGDAEFAVQACGFRGGLNQMVFSGKLRCTLQPLLSQPPMVGGVSSSFMELPKFDFNLTGMGEFVQLPGLIDAIRSVVNTQ

SEQ ID NO: 135294 - protein, 44 aa, Heterodera glycines
MTIHIKKRYFKLRVLHEKQGLIEQHFRIYCFRLTNVLFQLSEKD

SEQ ID NO: 135295 - protein, 88 aa, Heterodera glycines
PLKTCFWKIFVEKIFSLKNHVHPPLVPNLKITFIFIKILKKVIKMPNKIYIIEQKTADFCSILFFQNIFSEPSYEFFSENSNFSRNSG

SEQ ID NO: 135296 - protein, 385 aa, Heterodera glycines
ACVAVKTESRNVLDNLARCLNAFCKVDDLIGQIVSEGGVKLLLHLFKKCSAEGKGQIVSEGGVKLLLHLFKKCSAEGKLRAAHGLAKIGIRSDPNIAFSGQRMYEVVKPCIVVKPCIELLHPEVDGKANYDALLTLTNLASVGDGKANYDALLTLTNLASVGDSVRKRILKEKCLPKVEEFWFEVNNEHLRAAAAELLLNLLYCEEYFNTVIKAGTDRAKVWAGTDRAKVWLLYCAEDDRLRLASSAGFALLSENPTFCERILQELNSWEELFTALLSENPTFCERILQELNSWEELFTELAMSENPEVQRRCLIGIANLAVGGERVASQLFASQVFHVLVAITKLDEKGREGSKKEARRALEVAESRGLIRATERQIKEQIDSK

SEQ ID NO: 135297 - protein, 683 aa, Heterodera glycines
MDYFIPIFLLFNLCLFFAFTIGNPSMEDDAMVELAKGPEYFNKFCADKGLIINEKNQFVSDKYEAHLGVLYVMRMKWNHVTETRYNINVFNELDNFRQFAFILYEYFFWQYVAEYVKAVDPTLAEQISITKNPIKPKLESNGREIKFCDAILDWAFVWRNHWLGGNYSKTTRLINKETLIEKYGINLNNWYEQESLFDMPKMKLKLNANSKFDNSFPRLRKMFDFKMEKLKTMALEKVSRYDFFGAALIECSSITNEALISHINHKPFYGIDKAIEDNIFLIVLKEMRVEKFGAKLETAPLSANAKSLIHSQKLEIKLYLKIIYLMRLKWQCAEIENYRKECTKFRKYFNFLYEYLFRTYNEADNSEVPQQFAAVRPNFTFGSGNIIKSLIYVASELCGIAAFFFDPTYAKEFDYKLDKYFKKYAEPKLLNESEVSGEKTIGQKVFESVAKIGKSPKRVEEKAAAISPSEQLTFDLSRSNFDNLLRENFEKLQRENDYETANVIYKWLYLPTNKKAGRKTDNSEVPQQFAAVRPNFTFGSGNIIKSLIYVASELCGIAAFFFDPTYAKEFDYKLDKYFKKYAEPKLLNESEVSGEKTIGQKVFESVAKIGKSPKRVEEKAAAISPSEQLTFDLSRSNFDNLLRENFEKLQRENDYETANVIYKWLYLPTNKKAGRKSLQIEQI

SEQ ID NO: 135298 - protein, 190 aa, Heterodera glycines
MGSAHFLGPILLVAFAALILGQRSSPNHSSGSPSQRDKSHGLSQQGKGHGAKEAPGQQIKNKDNSMPTIKKGTSTKSQKKGKGRHAKNNDGIGTLGKSKRQKRFLTEIFGNSLDKSKNNAEESERKREGFGIVPEKVKGKAEKTNERATEKAGEKNGNGGRQKRFDERILGNNSFELPVLNLGPNWTPPQ

SEQ ID NO: 135299 - protein, 158 aa, Heterodera glycines
QKAFQEELEKKVTERLVTVQTEVDKMEIAHQQQKVIIDELDGQQKHQKQQWEKETNALVSQIRQFKDEQKKYLEKVNELEKQQKQRQKERDGRIDKMEIKQQQMSDSHKTLLEKIEAKHKEKQKMFKMVNKYLGKLGNLYDMHLIRSPNEQISIPKHY

SEQ ID NO: 135300 - protein, 83 aa, Heterodera glycines
KNRFIFVFGAVPPNRCAQIYGETESFGNSFPIACTLILRWIFAPHNCLSTPNGHLKKSIYFCFRGSPPEPMRPDLWGDRILRE

SEQ ID NO: 135301 - protein, 84 aa, Heterodera glycines
KRKQSKQQKNVLSFNLAHFRFVVFLLLVFASSLFAFCFLRPPPSLPHHFFLQLLLRLFAKVGAHQLAQSHRGVGAGRQIETDFQ

SEQ ID NO: 135302 - protein, 59 aa, Heterodera glycines
MSTHPGIYEYLPLYTNFEPNRTYELIGTYEPISQTDPPQFEMNFVILHKSEQTRQMMKW

SEQ ID NO: 135303 - protein, 153 aa, Heterodera glycines
MHYIICNNISFNSITILLFMLLCNRKLNVKNIIEGLCADNDIEKLFVKCRKIVGHFKKSNKALGKLNEIQELLAIPEHSLLQVYILIILNDCTFKEVSTRWNSALMMIERLYEQKKAINEYAYQNCDFGLTLTSEEWSILDELIAGIVLKKNW

SEQ ID NO: 135304 - protein, 63 aa, Heterodera glycines
MFEYSKRTLEKIDFFVFGAVPPNRCAQIYGETESFGNSFLIACTLILRWIFAPHNCLSTPNGH

SEQ ID NO: 135305 - protein, 184 aa, Heterodera glycines
MMRSVIKFVFNPINEDQRQELCETWFYRFSDAPIEYPVPFDFVSSEYGLGEVISILGDGNCGWRAVSLAMTGTESNHTEIRRDVIEYLQETINQNSYTENSWWSLFGSNIYIREHLEKAITPATGAHETEKWMNNLDLAAVIKMFRINIFVCEWLVEEIYRWQVYSPNLEQRLIVAVITMIYAI

SEQ ID NO: 135306 - protein, 83 aa, Heterodera glycines
MPIADLPMPRNDGTRTVAAAVTSKHLIKALQRHFAQCSFVTLAEWPKHVVAANQREAVETCCSKKITETIHKHMKKHVNKYVK

SEQ ID NO: 135307 - protein, 174 aa, Heterodera glycines
VTVRLSKDGTEHTALGPTLTTAKQKAATLALAHLRPELEQLKLLLKEAEGTEEEKQIVPKLVTKIDGTDQQQQQRQHLLGCDAASKFHHLSSSSPTDEMDQQQQYDGLNDDDDEEAVAAELVEPVPLEEAESCREERRQSANKNGKCCQILIKFWYHSVQNNKLLKKANFNSNN

SEQ ID NO: 135308 - protein, 39 aa, Heterodera glycines
MYLHVILPTNIHKQIINSEQRWIIIIRKWTSYQMIVNYR

SEQ ID NO: 135309 - protein, 26 aa, Heterodera glycines
MQRPFLSIFKALFSGALFSNNFGQQR

SEQ ID NO: 135310 - protein, 139 aa, Heterodera glycines
MILIGLIIIAFVTFCLLLSFIGFRARSHSASVYERFRRVSQTGTRAHVIDFDEPNTSAGANPVRGGGGGRFPIDDATWLSMFRRLNNLTRTVEAIKICLQSVLTNQQLNNWDLNNCNEGIYLYDYLLLAEHLSKNNCNN

SEQ ID NO: 135311 - protein, 115 aa, Heterodera glycines
MSSAISNCSILLLFTTMVFISTAKSLPLVTYNFNQPIQLLRLLKMDPRRQMALIRLSDSAFKHRYVPAERQTYSEQQPYEERTSANGDETISTEKKWDTKAMNWPKMLLDEEGKR

SEQ ID NO: 135312 - protein, 43 aa, Heterodera glycines
MFSSFLLYFFFYFIKFCNYFSFFEFISFFFFFFFPFFSKYFAK

SEQ ID NO: 135313 - protein, 68 aa, Heterodera glycines
MKNNSGKLESLFENITATISVKNKEPKQFWNLETMGVWDNPEEKDDEIALKMFKETVQRKNGRYMSCF

SEQ ID NO: 135314 - protein, 153 aa, Heterodera glycines
MKLFPLLFCLILIFIALINQIKSAKKKLQQKSFGEIFGEKWEEKEEEKRNELKKREIIGKFYKIKEKIKQKGRKYSTKEWGKINSKIAKKLGTKRQYIQKWIKELGLNQNKCYKSTTDEEKLEIVQKFIEMTNEFKQKGKYSLKEWNKNYAEI

SEQ ID NO: 135315 - protein, 110 aa, Heterodera glycines
MIFALNCGLMAMFCAAFDRLFAVISPFNHNAIFTKYKSLYLLGHLFICTIYSSFIQYCVIVYAYENAGKYGTIKILLIIEFQPVIKAWVFPGPGFSYIFVQDRSRPRSNN

SEQ ID NO: 135316 - protein, 373 aa, Heterodera glycines
MACKIRRWADVGLYERDGETGLGPRSGPRFIETCWNDLTQFLNDAFVAEYLAYLASISQRKVVVVDPMVWQEGMHRVTSYKNMTFGYDPNVQAEVILLPVHFPAHWTLIVHDVQCGTHFADSLPVPNGRLDWQRTDKIKNIISDILPSSVFTGIFNAEVTCQNDGNSCGYFVCLYAESWLINNRTFVLPDLSINYEKRRILWHINELYGSDNVPYHPREGVPTPCPILYRHADEAQSTSKAVGPMEVDDSDEITIIEPLTNGMNAILSQVQVEGENQADMFGLVSDSCVPQEPIAQVDDAIFVRPKTPPRRSLRIGRRQSASISRSPSPAPKRRTSANAVDQIRAFTRRCYLVHKGWCCAAAAAKHYPEYSDS

SEQ ID NO: 135317 - protein, 115 aa, Heterodera glycines
LFFCSIFSHIRKFHNLIGSPCYFSAAFFSHITKFHNLIGSPCYFSAAFFSHITKFHNLIGSPCYFSAAFFSHITKFHNLIGSPCKGNLNIERPFCDKQTNETEPMISYEELFLTR

SEQ ID NO: 135318 - protein, 258 aa, Heterodera glycines
NKMYGRQSNNHYFPQQNVMGIEESATTSSRNSAGGGEHRVIRSEVWSRFRLEGLNAVCLVCNEKLKVQPMAPSEAAQPRGGGPKPTHSLGLSPNPSAEPTVHPATAAANDAQQKQQRFCGIERWRLHNSTATKGRCPFACLAGTFSAPIPPPAAAENGGTSGSTRDGTASQQQFPTPKPPHSTATAAEFSPSAAPVLRLLLHVTVHPATIGFSSPILRRRNSAHASAAGDRGLQAGAEPGIGPTAGHLSRGGGGTAGI

SEQ ID NO: 135319 - protein, 168 aa, Heterodera glycines
TRTLSFVRTIPNGNRLHLQVYTDGCADRREQQVKYLEHVQAIVTLSAPRRGDIQIYLTSPRGTRSTLLAKRQRDTSRTGFKEWGTRSTLLAKRQRDTSRTGFKEWAFMTTHNWGESAYGTWSLEIDNDGNDDAELLKWELVLHGTDVYVGPTGFEPTAAVAERSVQQQ

SEQ ID NO: 135320 - protein, 123 aa, Heterodera glycines
MLKAMRHVFPSCERSGCNFHMAQALFRKARSMGIFHLFAENNAEALGQRKSVHKTFSVQCVPGVHNDRQWTNTIRTAFAITSTPTIPLSEESSLHGLVMQGFAEGFHVRGNSESGEETEADQN

SEQ ID NO: 135321 - protein, 22 aa, Heterodera glycines
VGLKSIFYNGGRAISRPFLGYT

SEQ ID NO: 135322 - protein, 341 aa, Heterodera glycines
RQAATSLLPLFDRCGPEDYTMDLCDYNRNLTTAFLQLIMALFAKLLFTIFTFGVKVPSGLFVPSLAMGAIAGRLLGIKVEGLTYALQQSYPNSELWTCQIGRDCAMPGLYAMVGAAAVLGGVTRMTVSLVVIMFELTGSLEFIVPTMAAVMFAKWVGDAIYRMGIYDAHIELNGYPFLDNKGEYPYSTVAGQVMRPSAEMRLIEQHKMTVGELETLLRDTNCNGFPVVNDQREMLVVGFCTRMDLSLVLRNARKMQPNVTTNSTVHFSTEAGLASQSLPPKIRSKSLLIAPMTVADQTPMETVIDMFRKLSLRTTMVTSNGRLLGIITKKDILTFMRECDH

SEQ ID NO: 135323 - protein, 136 aa, Heterodera glycines
FQSLGLNSPAFQPPTLNPPAFQSTGLNPPAFQSTGLNPPEFQSLGLNPPTFQSTGLNPPAFQSLGLNPPTFQSTGLNPPHSSHWDSILPNSNHWTQSHQSFINTITGTQFSDISITGTQPQQRNTELFKRNPEIEI

SEQ ID NO: 135324 - protein, 28 aa, Heterodera glycines
IFYRFLNIWIFFWLTKTSSNLALYILIQ

SEQ ID NO: 135325 - protein, 61 aa, Heterodera glycines
MLSFIYADDLSEFDGDNAMAVLYAAKKYCIDGLVNECLQIPIPQLSNVFLAFTQARLFDFE

SEQ ID NO: 135326 - protein, 109 aa, Heterodera glycines
MLFLSLPPMISTTTVVMAEIDAVVTVPLSLTLTLNSTKMAARLAEVLFELLVAGIKTANQLDLINTIFAIWAASRFPAKVFEFPITFVAIITCADHKNIIPVAWMIKAW

SEQ ID NO: 135327 - protein, 72 aa, Heterodera glycines
MLLSPPLLFVLSLCSLCVFGHKTPNASDGPAMPELPKALQKLSDAERNCLFTIYTMSKLFENKKVQKTLAKQ

SEQ ID NO: 135328 - protein, 321 aa, Heterodera glycines
MPMLPFLSCDSKDTSEPDISQESGEEQRMVEYGPVIMHAHGSIASINGARLFVKSTSGGIWIAIYQPECLKEKDESKKSEEDVLYTCTTDGKCVKIVDGKIQKTVPMTGHKNCDGKRQTLPYCGRPLGIRRYNANLFVVADAILGIFVVDFEKGSAELLVSSSKLVDGKRLLFPDDLDFVDNDTILFSDASTRFGISDFLLAFMEHAEDGRLIEYKISTGQLRVVADGLSFANGVQIHPDRQSVLFCESANSRIQRFYYAGPKKGRQEIFVDNLPGFPDNIRLSAARRSFYVALFGHRSKDLPDALDWLGPRPWARKFLGE

SEQ ID NO: 135329 - protein, 260 aa, Heterodera glycines
SSSARPSLVPSLSADVPNFFLRSVSWICSIGGFLFGYSASVINGSVFFMFMERELGLNSFTKGVVMFMERELGLNSFTKGVVTSSIIVGAAIGAPIGGHLADHFGRKRVMISLDLLFIAGVFATTFAPNFKCLIPFRAILGFAAGGFKCLIPFRAILGFAAGGHCSVGPVFLAEISTPENRSQNVTLNSLFIVLGELVAFAVCASLGNIFLQYVLIWRWMNLVLIWRWMNLVVVLPAVILLFCRCLLVRESPRWLVGANR

SEQ ID NO: 135330 - protein, 83 aa, Heterodera glycines
MALDQLGYPGTFLLLALLGLFALAFVWRFMPETRRKSLEELEKEFQHGDWQALKKPGEKRRNLRRKVERTLSKIEEEERGERY

SEQ ID NO: 135331 - protein, 35 aa, Heterodera glycines
MGVESDWASDRPQQHEQINHNDLLTLFMDQFLGPI

SEQ ID NO: 135332 - protein, 150 aa, Heterodera glycines
MEPVLSDQSRCIAALTDAIDELSLKGTEQSVNPSTDGGPAELAKEAPMNPQGGGPASELAKGRTSPARSTGRAWHGKQHRQPARKAGRLNYLMRQLEREVGGSQMVRSPHPYWENRRGNGYGGPRGGGRGGYNAYRGDRSERVGPSNNGR

SEQ ID NO: 135333 - protein, 80 aa, Heterodera glycines
MEYEREEQHPFKKAMCGKGIREWAFWFIVTFLACLTIKDVVNLIREYGENPKKSDMNEINGISESVATRVPRDRDLVADN

SEQ ID NO: 135334 - protein, 43 aa, Heterodera glycines
VGAEQRVFCGTNCSPQWRVKKAATSAFDRLVSERTEAKFWAKL

SEQ ID NO: 135335 - protein, 123 aa, Heterodera glycines
MEKNGKQSKDSVLCENGQDVCRAFFCVANHSLLFIQWDCATFSKKDKCPQKDGPNTANSVRVDHGLPQSDDWHCVCEFGQVGEEMGNEHIYKMDPTEPTPMAGVILPLSTALYRQLLSLTWAD

SEQ ID NO: 135336 - protein, 211 aa, Heterodera glycines
MDEKRFLKVPKEKRQLRNKKNYFSKTNNIPDGSYYTEISNTIKENRKFGIKENINNEDVVMESFYHIQQSFSEIDLLNEQISIIITTYAIPSGSRNQLNSTNYFKIKENGRILVANDDNYCLFYGIILSRFYQIIGANESFGISYDQFRRIYRNKKRQKIHVLQLIQETKIDSNRTNYGIDDLLTVQEFYDKEFPGKFLIVAFSKVKKEKS

SEQ ID NO: 135337 - protein, 177 aa, Heterodera glycines
LHRALGKALAIIKPDSNTFESKINFFSFGIVKLLITGASESITDEAAKLASKEPGFLYYTAGVHPHDAKDFDDGRTLDFLVHPHDAKDFDDGRTLDFLRSHLTVNSQCVAVGECGLDFNRNFSPRDQQLRVFETQVQLACDLGKPLFVHESEAHQEMVAILSLERKSLPPTVIHCFT

SEQ ID NO: 135338 - protein, 113 aa, Heterodera glycines
MFTHGFIKYFDRRVWVVEMDPFAYRNALSRANQYADRRVRHAWHSNFVSALDFWRNVGQRMPMFAAVIGTELLAQLQDEQQMLENGAQFATVEVLGTNQTQSIDDKKLKATLV

SEQ ID NO: 135339 - protein, 110 aa, Heterodera glycines
MTHCYIIVILITFVFCFCFRDDQKVLAGGCMSCSKADDGSGINNPSNGRRLVSIIDLPTPTMHEYINAGKEEARKSSFSTPSHELQQFRAAAAAAGDGQRRGKKTDRKNK

SEQ ID NO: 135340 - protein, 43 aa, Heterodera glycines
MRTDNLCQWLQIRRIGRRSIANVFDFQYEIIAYRKFTKIYDNL

SEQ ID NO: 135341 - protein, 76 aa, Heterodera glycines
MGLYVCRLLTVIGLLMLLGGAMAIIVGYCWPRQQNIEGELMKIAIDQDEEGNFYVLPERLTEILADPMHSWKITGN

SEQ ID NO: 135342 - protein, 129 aa, Heterodera glycines
MLTTLEELKATPCGTQLASFCGQIVSILPSEKKLTALLACASGENVVLTEFKSVSSKFSKICSLGIVVKFYMLKAQRFQERFDGKTIYVTPLDYEFVVMTFTRMEVIQCAIATADSFEKLTSGCIYCEF

SEQ ID NO: 135343 - protein, 91 aa, Heterodera glycines
FCLFSLMIMLKNSGKELHLKYMPGFVAYNKNVSDSLRDFDISKTADADAIRAKHIDNEYALFQKNQSSTMALRGSLVGEDGQAVYFSIWSK

SEQ ID NO: 135344 - protein, 175 aa, Heterodera glycines
NLCVQFRSVTCRSAKEGEEGKMLPAEACTGQMPPEERDCNLGPCKGLRFHTTEWELCQKCNDTEETREVSCVDKNGREYPLEKCLDGKKVTKIPEDTRPCASQAPCVYEWHTSQWSKCSTECGHGHKQRKVFCAINELGQTKRVDEALCGQSLEEKPVAREECVNEEKCTVNMYN

SEQ ID NO: 135345 - protein, 195 aa, Heterodera glycines
MRRRLVGHIGMDQSCRSRHEVRAGQCSVKRFGGQTFQAEEVVLRRVSYLYINEEVVNFLRTIRRLLTEDIALEFSTFFTEYRSWKVMAQHIWPLLKDGISTLCLKKCDLAMLRKHVSPTVLFDCAGLHRIHTQMLPECPSADGAVDEENVVVDTTCRELYTWVHSPREEGHGPVSLKLNKWKEGKWDNFVNNLNK

SEQ ID NO: 135346 - protein, 113 aa, Heterodera glycines
PIAEFGPVAIRQPPEVIEGMTDWCKETFSKNGLIERIKASDKGERETEKMVTDRGGEGTLKQNQCIDRLRSWTFCLAKRWYEHTEGWKKLPPKKEIHLALDDIRESINILKYC

SEQ ID NO: 135347 - protein, 34 aa, Heterodera glycines
MRGSQQLRMSLAKEEKDAFYWAVKVDWRKTGPFV

SEQ ID NO: 135348 - protein, 109 aa, Heterodera glycines
MKTLRSQAGRQSMPMVVNFGRTGDGQMFGQVGGRQSSMSPPVVPVNFGRRAAVPGTTKTNTFASIASISYSHFFFEKGLQTQQREVIYDVPTDGGGHEHAEDDEDDDSF

SEQ ID NO: 135349 - protein, 71 aa, Heterodera glycines
MSDSPTPETEISIAWDILENDKDVWYNWFTPTTAKQACVEALAFAREGGLKHENILKIMKTLEEREKRDKK

SEQ ID NO: 135350 - protein, 240 aa, Heterodera glycines
MAINISDTKSLFNQILAQSDITITTSGITVSGPRLSTPRFLPFDDCGRCRVCKATEAEVDTMVTKEGVTLWCTRINKPQFVPFDVVYDLPGHCFFRVKNKARVFNVPYGDLPSGTCAKSKPTDHQQQQQQQQDLKRKAKVALDLVEAGLMADAMQDGARWKKAKTAINVLGNLLLAESLDNTSAPPLKNDAVDIKKEEEEANVAEEHKEDDQQKEDLGDIDKTLDDFFKSLNASTSNVPI

SEQ ID NO: 135351 - protein, 533 aa, Heterodera glycines
PPRLPSPPRAKPKPPPRHPTTKREQHKPKKLELPPKIEPKFEPDSRPSTSKVAPRSKKEPEFPLDPRPSTSRQAGYIPPPAPKIVPKHEPTKRPVPYRIPKREPKIVEETPQRQQQPLPAAVVEEMPPVPPPEGDQTPPPPPPPLKRNKRDASPIPPPPPSPPHYEETPKETVKTTPKVSTPPPVSSPAKPTTVKPSAPPPSVTTPAPPTIAKPPVTTPPTTTKPTTPIPPPAVQTTTPVPPPVVQPTNIPKPAKPQATVTALTVKPTTPVPPPVVQSTTTPQPTKTPVTVPPPVTTPVPPPPKTTTTPTISKVPSPSVTIPAPPAQLKSSALSPKAPISTVKPPPPVSLSAKSKSPPSPPEESPPHYDEEKDITVKPTSPVKPTITAPPAQLKSPAATQVIKPPQQPTKPLAPPPGAPPRFPAAAVSPPPPTSAAQIDPSRLIHTLDPPKIYFKTPPANVDPLTYVPPAFPRPMASLRPKCLSCCLATLPPPENTYSAYLKNLTLSRQQQHPEYSYTEYLRSFKVSDYYDNN

SEQ ID NO: 135352 - protein, 107 aa, Heterodera glycines
MLICVNYASSFSHSLDSADSELQPHGKKRAKHYDDLPEQSYGPGSADYSQTPAELLEIAEMDPDDLSFKPKQTGQPQKSAKGKAIGFRKPGTSHATKSFRKANKTEF

SEQ ID NO: 135353 - protein, 611 aa, Heterodera glycines
MILIIALRDEFTDLRQKCLQRLEESRTSGRSTSLQELGEECRKYQILKESALSLGSNPCSTSAIRAKPQQIRDKQKPKTKPQQSHKGQNFLPKNSTAPKGKVDQRDQPCYSCGGKSHWQKDCWFKNSTCEKCGRNGHIAKACKSGTEIRRVRAVVTDSVKDTHIHTVSIKPKCMAIEGSSNKWWEVIIQINGMDHPMNVDTAAQITVIKTDSWQKLGKPKLGKTAITVRNCNEKAFPIEGKFKCQVSYKGRTASLIAYVSDEIHQDLLGMPWIEELEIIPKELMFPNSSQIVNSMPTKPISSQISDEKSLISALQTNYANTFGPELGHCTKFRAHLILKKEAKPVYCKARPVPHGALDEVNAEIDRLSKIGAIKPIEFSQWAAPILAVKKKSGKTRVCIDFSTGLNDAIELHRHPLPRPENIYNAVAGAKFFSRLDLRDAYLQLELSESSKNLCVLNTHRGLFQCQRLPFGVKSAPAIFQGLMDKIIAGIPGAFVYLDDFVIANKSLIDHTSTIFAVFDKISEYGLRIQLEKCSFLQKETLFLGHIISENGIRPDPSRAEAIEKMPAPTDKSTLRSLLGALTYYGKFIKPMRELRGPLDELLKKEAKWEWK

SEQ ID NO: 135354 - protein, 133 aa, Heterodera glycines
AILSNKVIWVVWLNAFADIVTAVFLITYLPTYVSKVLGYGVRETGIWSAVPALLHIPVKIGAGWMADTLTCMNELNRMRAFNSVALVGSGVLFALTGFVPKEMPFLAVILMTLNFAVVSTNCGGFYKCATLIS

SEQ ID NO: 135355 - protein, 28 aa, Heterodera glycines
MGKTTSETRLIEDTKCYRMIPTMLGKSM

SEQ ID NO: 135356 - protein, 136 aa, Heterodera glycines
MQRLDLDIKNAEKREQSLKEEARVALGRKDKKGALNIMRKVARVRKDIQDKDVQYQRLLAMLEQLAASKQTKEIIDVYKQGSNAFRETMARQGLTPDKVRHLIELLGNKMKFLPFFKWFQNSNGWCILLRFFDCSL

SEQ ID NO: 135357 - protein, 108 aa, Heterodera glycines
SPDGEKKIGQYTYRSKMIKFARSRIHGWGLFALEPIAQDEMIVEYVGDKIRPEVANVRELAYERQGIGSSYLFRIDDHNVIDATKKGNFARFINHSCQPNCYAKVGIN

SEQ ID NO: 135358 - protein, 156 aa, Heterodera glycines
MMLRNRDLNVQPAAGAGAPLPKRQSAHLVKVVGGASGRASSQSSAGSDRDSKYEPRPKRACSQKDKENSHYNNNNHNKSSHNKSKKNTSGGTVVPVTAFSRSLLIDSAKKDVTVVSTAVDAGGGGVLAAPIVGRKRSSALLSTRDSNVGEHMSSTQ

SEQ ID NO: 135359 - protein, 70 aa, Heterodera glycines
MKNRITATLHCCTQLALTPQWWVWSSRPSTKKIVPLVDPESQTRELPSVSVYLNHLGEKLRYRLFVRIRV

SEQ ID NO: 135360 - protein, 216 aa, Heterodera glycines
SIIGSVSTATPFQLSADSAHCATPFQLSADSAHCSQALCYHLAYRSIDGVCNNLARPTLGASFRAYMRYLPAEYSDGFSEPAGNSSGRRPTARSGRRPTAREASRLVLAKGAPSIHDQINSMFMQLGQFMAQEMAKTAYQPVDPCLSCAPLVGKCMPVPISEQDNNPIFRQFRQKGCLKVSRSASVCGTEPREQLNENTAFVDGSTIYGSNAKDLY

SEQ ID NO: 135361 - protein, 48 aa, Heterodera glycines
MGKGRAFGQRLVQKGPHNGKGKGGHSSRRGQGGHSHRQRAAKAGCSER

SEQ ID NO: 135362 - protein, 71 aa, Heterodera glycines; identical to SEQ ID NO: 124984

SEQ ID NO: 135363 - protein, 27 aa, Heterodera glycines
MEEHELEQYDRIINGRHTEWELFHYFS

SEQ ID NO: 135364 - protein, 96 aa, Heterodera glycines
MTEPTGWSIFVLYTDHFSCSARNRWTFFCSSGFVIVGTFSLDQGLLEWHFNAKTMYEYLENGKQIETNSFLLTTHLSLRMITIQLLTVGEHFGYKF

SEQ ID NO: 135365 - protein, 43 aa, Heterodera glycines
VKHPISALLCREPAGNGWLSICKKLDWQYVVVKNFWVMNYFLK

SEQ ID NO: 135366 - protein, 95 aa, Heterodera glycines
MQKPIIVNIIALANLGTGIKLNSLMITECEFKYNPRKFNAAVIKCTTPIKATALLWESGKMICLGTKSLIDCENAIKIFIEIIRARGVRGLLTPD

SEQ ID NO: 135367 - protein, 107 aa, Heterodera glycines
VPASPGPGFSGPGSPGPGFSGPGSPGPGFSGPGSPGPGFSGPGKSGPGFSGPGKSGPGFSGPGKSGPGFSGPGSPGPGFSGPGKSGPGFSGPGKSGPGFSGPGKSGP

SEQ ID NO: 135368 - protein, 81 aa, Heterodera glycines
MQFVSLSASSFALAMQLCIGLDRLAGVAFPIWYKIDGKYTVFKILIGICVIKVIVDKCIQFYGSSKHWETFVNWNISFSIV

SEQ ID NO: 135369 - protein, 77 aa, Heterodera glycines
MVSSNTVDGTVHFGERCAEMDNVHGPAFPPQSNFCIHYRSDQFFTVFATVSVRTMAFCAIIRIQIAPVLALVLMVFA

SEQ ID NO: 135370 - protein, 211 aa, Heterodera glycines
SCKDHEDKCQNGGYLNPNDCTKCHCPDGYGGEYCKELEESNVKLINSSKCVKIENLYAEKRRKGTPSTGTLRCYNPTKNQYYNCSCNGDKKCLAEEKWAHDAFLCQIIRVNGIQIQIDYRYNWTRLDVDCYKAEGGTVSFWGYSKPETKEIIRVDEVHCLTFEAAGVTPPSQKRFKSLQVEEQLSMKLNPSTLLDNASSLIHVFVPFVGHP

SEQ ID NO: 135371 - protein, 108 aa, Heterodera glycines
MGEPLKVAPVAQLVRARHGLLESWVRVPPADELPFIAIQTIGPFGLLGDQGPIPKIKTFQSWDNPSPPIPLWHGSSRLTVSTGWFDFRVEGKTIQRGDEIRLAQAAEA

SEQ ID NO: 135372 - protein, 76 aa, Heterodera glycines
MSSLADFVNEQRSKANSSSGRQAYFNVATLGSKVSNSFTDFFKPRNSNGIDDVQRLTEDADAAQNGQLPSNKNRHL

SEQ ID NO: 135373 - protein, 95 aa, Heterodera glycines; identical to SEQ ID NO: 125597

SEQ ID NO: 135374 - protein, 22 aa, Heterodera glycines
KSIKNLKMRIHARFSGNKLNWA

SEQ ID NO: 135375 - protein, 41 aa, Heterodera glycines
IFYRFLNVWIFFWLTKTSSNLVLSILFQIAPNFFYSLTRPY

SEQ ID NO: 135376 - protein, 90 aa, Heterodera glycines
IIFIQKIFFWVFGAVPLNRCAQIYGETESFGNSFPIVCTLILRWSFAPHNCLSTPNGHLKKSIFLFSGQSPRTDAPRFMGRPNPSGIASL

SEQ ID NO: 135377 - protein, 32 aa, Heterodera glycines
MSSSFVWKRGMVALRRGSTKISACGFHGRNFW

SEQ ID NO: 135378 - protein, 92 aa, Heterodera glycines; identical to SEQ ID NO: 125147

SEQ ID NO: 135379 - protein, 41 aa, Heterodera glycines
IYTLSQKKWLSLFLRNFIHIQMLSSMIGRAVRNRPFIFEGI

SEQ ID NO: 135380 - protein, 173 aa, Heterodera glycines
MRSENGEQNEGVAPLSAADQQQLKAPAKLLGWHRLPQRIGNHWCQTFDGPIQRKSLKRCAMIGLATKEMPLYGRVGTYPNSYGHRSDGLFWVNGSCQIGSQSAKFGIGDVIGCGIILATRQIFFTKNGHHSADFVALFPSEDVPLFTCVTLHDSEDKIEANFGPEFNFNLNTL

SEQ ID NO: 135381 - protein, 129 aa, Heterodera glycines
MNLKLLPKSITVENACDGGVLIGLAAKQKPFLSVLSRIGTYAYPNNGTFYINGSSLYGSSNQFYREDIVGCGVNLANRQIIFTKNGRLLDVSNSLVASFAVPLFSFVSLCGFGDKIVANFGPKFLLPDI

SEQ ID NO: 135382 - protein, 80 aa, Heterodera glycines
MEMQMKKEQQKMLFLKLQQNYWDVKFCQNELEITGDDGLTVVNKQKHSTGKWKENKNPWYALMSLAPPQDKPIKLKFKNA

SEQ ID NO: 135383 - protein, 105 aa, Heterodera glycines
MSISNDSTNDGFIPAEAADQQFQVIGDAFSLDDFGYKDENAEQVGDEQLRKEAKSKQQDDDEDGILKSLQTELKQQRLMAENIELKDKIDRLEKEKEKLQMEKYS

SEQ ID NO: 135384 - protein, 179 aa, Heterodera glycines
MDDGGKGGGWHGQRKNDQKLGGNKTAVVFVSDPDKFRLHRQFVPILNEAKERKKRKRNGSKWEKGHWLTVRVNASARFQSLLGFGGAFTDSATFNMDALSGPTRSTLLKAYFDRNIGHFIMMIEHSFVITPIFEGIRYSVGRVPMGATDFSVRQYSYCDTPGDLNLTTFALAKEDLEWK

SEQ ID NO: 135385 - protein, 223 aa, Heterodera glycines
MQKIKVKVEKDKQQIQRELEDATQTADSELRARQEAEKVIKNIELQLSELQSKTDEQSRLLNDFAALKSRLHNENADLEHQVEDLENQVRRMDEQGLGQCYHHGHLITGEFAASPEESVGQPIGGGETNRRRGKPRAANPRGTAEERAARERLIARTARRRAGGQSGMPASNQQTERGDPTVEGAVRVGRIGQDGGDRGGQAQLAEESAGANGRQRSGQHKGD

SEQ ID NO: 135386 - protein, 30 aa, Heterodera glycines
MFIRNIIFIDHLMSRLLKIITIDGNFTSYR

SEQ ID NO: 135387 - protein, 96 aa, Heterodera glycines
MKRSNTTKDTPPQPKRSMAFAPDSGPNTAALAEQERQRTLVLIGLPESNAVRPSQRVKEDREAVTKILDHLDVEAEPTAVFRLGRFNPQRTHLARS

SEQ ID NO: 135388 - protein, 24 aa, Heterodera glycines
ITGVSIIAVLFLVFLMPSQNLVRF

SEQ ID NO: 135389 - protein, 42 aa, Heterodera glycines
MWGAAQAATAAAGGGTPSSIANSSPFVTMSGNAAAADRVTKC

SEQ ID NO: 135390 - protein, 310 aa, Heterodera glycines
VEKILSKIYFNLKSPASFAGIQKILNEAKKIDPKITTDDVNKFLERQKTYTIHKPIRKRFPRLKTIPSGFHTDWQCDLCIFDQLKKHNDGYKYLLVCIDVLSRMIFSAPAKSKKSEDMIEAFDRVFEKSKIIPMKIYSDSGLEFQARKIKNILRKNFIKNVMYSPDLHAGVVERANRTIKERLYRYFTKKDTLRWVDVIDKIITNINNSVNRTLGAKPSSINLKMPVRSGKKKFKIGDIVRITKEKKFKIGDIVRITKEKGKFSKGYLPNFTEELFKIVVANSTTPDSYRIEDLEGNLIKGIFYNQELVK

SEQ ID NO: 135391 - protein, 51 aa, Heterodera glycines
MKRCATKPQLANVLQTLIYAMQSNAMTVNLPNNNLFHSEFGQNPFFCLKLE

SEQ ID NO: 135392 - protein, 18 aa, Heterodera glycines
YREATPEGFGLPINLGTS

SEQ ID NO: 135393 - protein, 96 aa, Heterodera glycines
MLNKIKIAPYKNICSEQIRNGENEEVENFMDTISDLVVGENITIDSANTNGEYQEGETDNVWRPNQDVVPYDEFQNALALNMDGGNNNLEEENSER

SEQ ID NO: 135394 - protein, 91 aa, Heterodera glycines
MAQSNANMGLKSVGSTNFMLLYFIETNTFSEGVRFYAFRWRKHPKNAMSNCIQSRTFTTKLREQMELYPLNQLFLKLEKYIYSFHGIIRES

SEQ ID NO: 135395 - protein, 334 aa, Heterodera glycines
GNTFVNQCFISDIDFNIIETQKLLKKLPNKNGTSPDNISYKILKNCHSSLATVITDLFRISLDSGSLPDIWKESIVFPLFKKGDKFNPENYRPISITCSLCRVMERILSQNIYNFLLKNNKISEYQFGFVRNRSTTSQLITVVEDWYEAIINGKVDCIYIDFKAFDSVPHELLLYKLEKIGIKGKLLMWIKGFLSNRTFRVKIGDSLSSSKKVTSGVPQGSVLGPLLFLIYINDLPDALPSGVKIKLYADDVKLYICYKARTDTEIMHKALHNLFEWANKWQIKVSMQKTFVLYLGSKNPKETYEFDGNTINAVDTIRDLGVNIDNKLQFSDHI

SEQ ID NO: 135396 - protein, 91 aa, Heterodera glycines
MTEEIFNDEVNFVKAIQSVVSADDNFICEKPSFCIAPLLNSALFEILFALAIRLGLLIGQNGFVEKYLPTFLIPLYEFPLHCVFRKSNSIN

SEQ ID NO: 135397 - protein, 72 aa, Heterodera glycines
QTHNLRTTEQHKTVQMFIRFIGIEKSLARHISALVLISQKIKPLFLRTHGCSMHPPNFIPKLHGHLQTFLCE

SEQ ID NO: 135398 - protein, 213 aa, Heterodera glycines
ITKFISKTHFINLEKIKMESQQFVELTRQFVETISIRDVLNADQSGFELELHQKRSLAPIGTKLVECVVQSVASTTHSYTIMPIITANGLLLSPLFIVIAERNGKFPQKGIFQVKNIFLENNTSHIMTKNLMVEWVNSHIMTKNLMVEWVNTVLCPVLRPGETVLLVDSWNGWKNFGSHKMSLQVKQIPKHGTGFSQPLDVYVFRYKNLIKKI

SEQ ID NO: 135399 - protein, 104 aa, Heterodera glycines
MMITVEKVVGAGGSGTIVGAASVDGSPARRVDKQELNRAYKMMLHQRRDAVSGQSGNEAMLRSTSPATKGGTNSSMGLTLASEDEQKQHKEVGELMTGPNGEPN

SEQ ID NO: 135400 - protein, 81 aa, Heterodera glycines
MPLLFVPACQRDFRNKQYPVHIKVEYFRNTLTVHVSDGMSATPRFEMCIRAEHIFLPKAGFFGVSAATGGLAVSFGVFRSP

SEQ ID NO: 135401 - protein, 38 aa, Heterodera glycines
GSTPSGQLRLSNVQKAITFFFVGQTSQSWYHSKDSRGP

SEQ ID NO: 135402 - protein, 59 aa, Heterodera glycines
GMGRGFAFRISPFALFAFFGVSHFAFRFLARKATFTPLRIGLNSHKIFQNFTYKLANFQ

SEQ ID NO: 135403 - protein, 33 aa, Heterodera glycines
MEAQFHFSKISGSDFEAQKRNLEDSRLSALVQK

SEQ ID NO: 135404 - protein, 162 aa, Heterodera glycines
MPKIDDIAKCLHLRHKRAAFQSAVLLLTEKASFLNPSTFLPDQRADETQQQQQLTQHQLQQLMNDIADWLGLYEQLPQETEKTKTEMFNTLVNRNGQQVDQSEQTTSSLIHSSVLRELANAKRCEENERLVRVVIDEDESADDQPPTTCSVGTQTKMSFANK

SEQ ID NO: 135405 - protein, 91 aa, Heterodera glycines
MHIKIGEAQAVTHKFKAVNFNQIQRGNFIDVEFELLALHSPFFRTLFFSESELNKISAVDHQHEISIEAPVTFEHLKLLIDLLHDKKASNH

SEQ ID NO: 135406 - protein, 19 aa, Heterodera glycines
GLLRSWVRVPPGELPFMFY

SEQ ID NO: 135407 - protein, 84 aa, Heterodera glycines
ANKQRTAPNGEKFYYLALLGGSPPHCRDHWTKESPSPSVKGQGEPEGPVFRGRRNVMPEGTECGRKWDKGPERTSKRGARSSVG

SEQ ID NO: 135408 - protein, 125 aa, Heterodera glycines
MCCESEHDPSKQHLKRPDKAQKEFEEPKIPFQPIPFSKKETPNQQRTFMEMYSICELDGNQRILNEDFEISQQKGVCEMFGGKSRNSQKTKFFLSSDSSQSKYFQQKHMSIPKTGTLTCFHQFKA

SEQ ID NO: 135409 - protein, 213 aa, Heterodera glycines
MDVGSVSAGFGWTSECSGGGSGHELCEKITLGSIDPVLDMSNLGSAVVKTPLQALLSIFLLRSGVASSLTAAQTLVQTIVGAEPKLELCMYTGKRGDQISTGKYPTEEDQRQALEKWVGSCFVARQALTESGYKPLSMQMPEGVNSLPDSEKNGTRSSKTVHGHSNVCGPRLCIKRAAFWHMTVFCSETRRQKCFPNTSTAPTALAERVRWQI

SEQ ID NO: 135410 - protein, 179 aa, Heterodera glycines
MAKRMHLNHPITFFGHSHSTVWVLSNGGIGFDNGIKQYKPNALPSMGQKLIAPFWNRNDLRNGGKVLFREVNGGRVLERGQSEIRYQYDREVKVVSAVVVTYEKMQAGFNAGDGTNHFALPTSGTGNIMYLEEYGNTGIPGEWMFILEEERVVRCKAGIKGDTCDEACSPGEWGEDCVK

SEQ ID NO: 135411 - protein, 94 aa, Heterodera glycines
  unsure (1)..(94): unsure at all Xaa locations
SRGNSKPKKSRNSTSRRRRVPCRHLRHKGNGRRPPRRRERHGHRQKWQQRRNRGKHQKGKLTKKRQXTQEHTSRSEPNIHSDHEQHEQAQFAVP

SEQ ID NO: 135412 - protein, 101 aa, Heterodera glycines
MNNWLQNIKGQITELATEVLNDATEEGQVSVSSELQVEKKKCAEVERQFLSEKAKNEALEKRVKELEEQLFNTNEENDAIKEKFTGIVSDREQQIQRLNVN

SEQ ID NO: 135413 - protein, 189 aa, Heterodera glycines
QKYLEQNESKVSKTHLYRRELVKRWRWFLRWLSNIGIYFVPWESRIKRIESVPWESRIKRIESQFGSVVSQFGSVVSSYFTFLRWVIFINFIITAIIIAFVVVPECAADATADAGRQNRTASRKRIPPEEQSHVDEWAVVWHFDVSWHNAKLFLTFYCFPSLPIKSNFNYYYLYLCKIFFITLFGIIDF

SEQ ID NO: 135414 - protein, 221 aa, Heterodera glycines
MAGPTCSIWSTGLNEAIARERFARDASLTVPRNNSGHAQLALEMAVPPGGILVPHHLWQQQRQRHQMQQQQQQQQQKQQIRQSVKSNIVTKINRRRKAAIIARCAGGGTEADLILMSALSTANANGGSTIGPPQPQAQPTIGAVPSGNCTNQFPKPTKQRTPTTAKKTITAVKEPSQNPRGATTDISESDDESDVEVFEVDEKEFGNDDLFEKLNRLEERK

SEQ ID NO: 135415 - protein, 15 aa, Heterodera glycines
QTINETHNLGCKLEG

SEQ ID NO: 135416 - protein, 50 aa, Heterodera glycines
FFAYQIFAINAHLFKKYSILLKCSVFCYILRIAVHLKASVIEQISQISRK

SEQ ID NO: 135417 - protein, 60 aa, Heterodera glycines
QAPKNKKIIIMILLFFSGHPFITRVSVDKRTQLKRWYNTFGDDQFIGQILSSFINGRHFF

SEQ ID NO: 135418 - protein, 265 aa, Heterodera glycines
MKIVNSDGKELPIPQNPLPNKVIGFKSISIGFINQNVISFLGRFDRFFASCTTMLSITTGNVRVSEFVVRTIWPMFKDTIYQLSLDIIAFRRMRQLAPSMLNDCPSLRFFNLSNGISLEFPPDDSANATDGQAVAKWLFTPRHDNFPKELICYMNSTMEEQWSATVEQIKASFSSASSPVSFGISVLIPPSSSLSAVVPFELTNEFTGEKLALSKEDEEADLSGFSIIRCPIVPDDKRQQQMNKELGDRWNQINIFIGDDGFGDG

SEQ ID NO: 135419 - protein, 123 aa, Heterodera glycines
MRREQEYSQFTRKEEEEKRYEKSKVESHLSGEFCSKMTNTQKSLKEFSEELSSVRLNVKELGKIVDCLQSSELAQSVDNYFRDKFSTLVELRQITSEENNKKMIAEVEQKFKTQTEYIANELE

SEQ ID NO: 135420 - protein, 240 aa, Heterodera glycines
FQACDFVVLAMTIELALKVVAHLFFTPNAVVRDVAGVMTLFIYASFLFLIWMPNHVEQNSLAQLLMIFRAMRPLRIYTLVPHIRRVVVELCKGFREILLVTILLVLFMFMFASFGLQIVGGKLAACNDVTITNKKNCTGLFEQQLFVTRMEVYGKNDEQMHNDEQMHPKMLVPRVWTNTNPRNFNFDHIGNSMLALFETLSYKGWNVIRDILWARQGPWAGPWAVFFIHVYVFIGCMIGL

SEQ ID NO: 135421 - protein, 834 aa, Heterodera glycines
MENRPKRPFPFTINDILTTPPPKKLRQGFLINQLLGLTVQEGEGATQTTSSKKIPSEFVEKLDCNVEHIAKFHYTKVKSRFVIRDVPADPEGLLSAIFKHCIDEAKSDSREKSSEPTHLGCLISSALLDGGDVFVPVRQITANTIDAILNLFTKVAQSKQQNGVTLWGEPFTITITTVDRSRLPTKRHLKGGARRRLAPIHNSDNFCLFYALQATMVSKTRGLSRSAFYEYIHGRYGQRGKFQEETRQLMRQIRAPFDLDTYDADTYVPLIIDHWNNEQQQHRLAVFIFGASGHYKPLYKYGNDDYDTPLILYFSNNHFDGVQFISGLFAGKKYCLACERPYSRPSLHDQSCKAHCMMCSRVGPAFPCSASPAGFFKKCDGCNKVFRNNDCHQHHLKSNFCNRSKKCKDCGVIWNVNDNKRKGREGHVCGEKFCTLCNNFHSTERGCFIQQLEPRMQPPYRIVAFDLETMQHLPADPLQPERRNHEPNFIAARVVCSGCIDNNKWRSATAGCSVCGPYRTAVFCQRPFNGTTVDKKVVTDNPMEAFVDWLVFKLPIKYDTYAYSHFGGRFDMVITFRELFRRGFNPEMIRQGNKMYEMNVQAQRKKNPKVVFRDSFNLMPCALGQLVPAYGLDVEEKPFFPHMANRPDNYGRQIYPTPDDYLAQGMMPEKRRQFDQWYEQHRHEPFLLDEALASYCKNDVDILTAALVAFRREFFEITKRQAVNETDDQESNAGIDVLRECMTIASACMKHFRSNHLPADHLAIVPERGYDNAQNQSLLALRFFKWYEEKHGVKLQTAHSAGGEKRVANYSLDAWIEAEKRAIEVNGIFDLKKL

SEQ ID NO: 135422 - protein, 39 aa, Heterodera glycines
MSHQIEDAFVCAFFRPFRKTSNFQLIALIVDLDAKQHKI

SEQ ID NO: 135423 - protein, 463 aa, Heterodera glycines
MRQPNHHNDNNNNDDDSGNDRGHDDDGNEVEEEEEEEEDDDDDDANSPKKAVRLCFFDAETSQDLPLQLRTKVVQKHVPLLIIAEIICEACINEGISVHSGVGQYANGCVCSPPVGPRGRRWCSPPFLNVPGDDSALPAYVNYNPRRLFFHSFDNANNDPVDDFINFLTGTGPHGVKTICLSHNGGKYDIHLILETLHRRNLPPKRICTTGLKIFSMTLKGNHQRHVVFKDSLNFFFCELDALPRTFGLNTEVATTKPFFPYLFIRRENLHQRLRGLPPKEFYQPDHMKAQKRDAFFHWWEAENRASRFQLREQLILYCMNDVAILRESVLQFRKIIAENTNGLDPFKVASTAAGLALATLRRCFLPMNKLVNAPEGGYLRGRRASAESARYIRYYEMTHPGVHVQSAQWSIGEANVEDTGYRLDGLVTRDPPERDLAIEYMGCFYHGKLVSICDEGILVSCW

SEQ ID NO: 135424 - protein, 44 aa, Heterodera glycines
MFKNGKQNQFAKELGIGKDTLRKWKKEFGIEISKNGIRYSMKKK

SEQ ID NO: 135425 - protein, 21 aa, Heterodera glycines
MAISFFSWGFDRKLGTNICLL

SEQ ID NO: 135426 - protein, 19 aa, Heterodera glycines
TFAFSSLALPNTHTIFEML

SEQ ID NO: 135427 - protein, 19 aa, Heterodera glycines
TFAFSSLALPNTHTIFEML

SEQ ID NO: 135428 - protein, 19 aa, Heterodera glycines
TFAFSSLALPNTHTIFEML

SEQ ID NO: 135429 - protein, 19 aa, Heterodera glycines
TFSFSSLALPNTHTIFEML

SEQ ID NO: 135430 - protein, 19 aa, Heterodera glycines
TFAFSSLALPNTHTIFEML

SEQ ID NO: 135431 - protein, 19 aa, Heterodera glycines
TFSFSSLALPNTHTIFEML

SEQ ID NO: 135432 - protein, 216 aa, Heterodera glycines
MAYPFLRYSILIVILCFVYGNDEENRQETIQKEAGIDHKNDDHIIGDVYLGDEFWDQFSPITDLPTIDGVEFVGNHLKYTDQTENDKTHETIDDNEWKGKKEDDKNNKLKRPNDQLKSLNAIHKSETSQIIKKKIRRPKKSEIWEHFMQNEHSNTCNYCGKEIKIQNKSSTFHLWEHLRSHQTQYEATKYAKMKNENENKKLEAQQKEKEEDTASN

SEQ ID NO: 135433 - protein, 41 aa, Heterodera glycines
MAHIGIEKAIPCIIVMISEQIEEAVPANRGFLGLSNNAKNV

SEQ ID NO: 135434 - protein, 30 aa, Heterodera glycines
MNERVKMLYDQEKDEDGFLYIVYASQHAFG

SEQ ID NO: 135435 - protein, 19 aa, Heterodera glycines
TFSFSSLALPNTHTIFEML

SEQ ID NO: 135436 - protein, 19 aa, Heterodera glycines
TFAFSSLALPNTHTIFEML

SEQ ID NO: 135437 - protein, 19 aa, Heterodera glycines
TFAFSSLALPNTHTIFEML

SEQ ID NO: 135438 - protein, 19 aa, Heterodera glycines
TFAFSSLALPNTHTIFEML

SEQ ID NO: 135439 - protein, 19 aa, Heterodera glycines
TFSFSSLALPNTHTIFEML

SEQ ID NO: 135440 - protein, 19 aa, Heterodera glycines
TFSFSSLALPNTHTIFEML

SEQ ID NO: 135441 - protein, 19 aa, Heterodera glycines
TFAFSSLALPNTHTIFEML

SEQ ID NO: 135442 - protein, 100 aa, Heterodera glycines
MDRQNDLRQQQNVPEFICQERLDTNSPIAFKEPLPGAWNLHSEYLSTKTKEEKERNASRFRTELDPEDVKLVNGHHQPMEYFAFYFSELGHLSADKLMEY

SEQ ID NO: 135443 - protein, 339 aa, Heterodera glycines
DQSSKESAKYPQSPTINPSRLHHRRQQHQMQLHSQQKGERGHTVNSKAHTANNKDATMAMTFMLGKDNGIGIVGVSSANAGTSLPIANNAIATSASESASCSSVTPSPSPSPIVAFNATNDALNSSSPFVTLRKQPQCQQSTPPTQPISSRESEAERKAKSRLKRSTRRSTQGVTLEQLGEVNMRNHSPKHHGRAEIGKEQKQRMAIGHDGSCELQMPASPCSSTSSSSAYLTAASHRAVDQHNSKVERVKENYNSTKNEATPSPSSTASLIDDLEKYKELYELERSESERLRTERRMFERRISALEYELEKSRQLQTDNEKLKDENIALVRVLAKLSK

SEQ ID NO: 135444 - protein, 130 aa, Heterodera glycines
MVNTLKTTVKLSALNLGAIAAANPKIVVPNFARDALSAGIVHFGALYLTELFNTGRDLDWAVVGVGMRASDERMRCYLSGQDFMTTVVSQDEHNTTVQIVASMIDFLPVANSAAVLAQLSQPNIRIVSMT

SEQ ID NO: 135445 - protein, 154 aa, Heterodera glycines
MDVTLPVSNSVGEWIGEERGDGSVVLYAPWTDVWHVQQQQQQHQQHQQQQQQNEVQQQQQQLVRRTGTGWTRFPAWNEPLVANDWREKEENLIQRKRLQRENPVYWARILEEEKRAVCCWGREDSGWKFWRRALVNDVGMGLKVLRLTMIGDGI

SEQ ID NO: 135446 - protein, 91 aa, Heterodera glycines
LFEYPKRTLEKIDFFVFGAVPPNRCAQIYGETESFGNSFPIACTLILRWIFAPHNCLSTPNGHLKKSIFLFSGQSPRTDAPRFMGRPNPSE

SEQ ID NO: 135447 - protein, 66 aa, Heterodera glycines
QSLSVDNCDKQRDEPREHFVQTGRRTIRLVTVHAEVPHEHFVQNLREDEAGTAVFVSILSIDQLEE

SEQ ID NO: 135448 - protein, 463 aa, Heterodera glycines
MEFQGRGGPHAHIVAQTDLDAVPDVIQQYIWAHIPLLPEKGDDTPIAEMHRQVRELMHLQLHRCSESWCGTRDQYYGRCKKGFPAPYSKCTILRPDRPALYYRPAPQDGGANIEVNGLIYDNSQVVPYNPYVLLRYRVHHNVLFAYGNKANIKYALKYPFKGLGHCYVECKEESGNKIGIDEPAQYAKMNFRGATEAYAVVNSTPYVRLSHHVVKLMIHLPNQQSIVYRAFQLVSKAQQIQQGTLPETQCSAYWKQWQNEWRHDPKFKDMLFEKVPEQFRWDKDKWVLYKRKPIKRPPIGRIVPVPPKDPERFALYSLMRHFPGDPDHLKMVNGQPCTSFTDAAIRHGLLEDDKIWDKTLAEAALSRWPDQMRWLFMSILVYGQPSNAVELWNKYKDQMYFPQGITTSAQRQAAELEALADIDWRLHSCFNLSSVHFGLPDPANCIAKIQMRQLMSFSLAMMI

SEQ ID NO: 135449 - protein, 62 aa, Heterodera glycines
MNNANHLDQCWQITLIFERTKSAQFLLVSRSEKSSKGLSTPSKMRKRSATGKSGPSKWHLHL

SEQ ID NO: 135450 - protein, 139 aa, Heterodera glycines
LVKRCNNNSSSSNKTTEHVPSAGAIDHAFVTVVPRRSVGGGPKIEPTSCGNVSVPENEAIPQLLRIRTLLDDLTTTDEFTAPPAVVYAIEGGHWHNANLFHIDPNTGWISSTKPLDRETMAEHLLMVSATDLNTVPKKV

SEQ ID NO: 135451 - protein, 204 aa, Heterodera glycines
MGLVNKWPNGPQTTPPLSPAIFPVDKEPTKKPQTRGKRSSSIAAKSDEITTTEVKKSSTPPLKKPKALFAPAKRQLPAEQIAELKQYFKQEEEAAKRQLDRAIKEVKKTIKFNKNKDLIEYTRALYSIKPGAPEKVEDFLDSFDPTTNTEVLDELDRVQTKKQQLFDAALTHHEKRIAKEAENCRHPHKFHSDFCGKGSKSLQF

SEQ ID NO: 135452 - protein, 117 aa, Heterodera glycines
MIGEDEQLRRLGDDPALLSFVLGDTDEVKARKKKKRQSVSPPPQQPQEAVAKQQFAASGMKVNNSPSPGPGHSADTSAAEAAMAQVVAEDAIIAAEMSIAAGSILASSSRRGGDRHC

SEQ ID NO: 135453 - protein, 240 aa, Heterodera glycines
MCESRFSVPDSGNFSGFSLPGLVVFWVANHEYGIHFDNCEARTRFRTKRDTIVAGADDLNAITGRKAKSEAERNVLCNRLVERSLRVAAQMRQLQDYVCIFFQQYFQHYNILKYAESSEAKRRLRWAVAQKDKQISQLNKDNKQLRKDVEHLEDCNNEVVLQVKQPGAPEEVEDFLDSFDPTTNTEVLDELDRVQTKKQQLFDAALTHHEKRIAKEAENCRHPHKFHSDFCGKGSKSLQF

SEQ ID NO: 135454 - protein, 44 aa, Heterodera glycines
MVAHAEQKWTTKAITFPCLCHCRHQRKKKKEKKKRIKATKMSSD

SEQ ID NO: 135455 - protein, 95 aa, Heterodera glycines
LFEYPKRTLEKIDFFVFGAVPPNRCAQIYGETESFRNSFPIACTLILRWTFAPHNCLSTPNGHLKKSIFLFSGQSPRTDAPRFMGRPNPSGIASL

SEQ ID NO: 135456 - protein, 170 aa, Heterodera glycines
MISQRPEFSELINDYTIEMAKPIRSNDNTLRVIYCKKDEYIKEHKCSNIMISICEMSKEYADSKILEVVCAGPKQYALKLQKENGEIWYKTKIRGMTQNKNNKIDYKEFKDMVLNYKEEKKIRFTHSNKFGPTRESYVISRNVTKDYKPIQKKGIILDDENLTVLPFGCW

SEQ ID NO: 135457 - protein, 36 aa, Heterodera glycines
MRCTQTENGQFDEPIQKGNKVPKEEFKMIPSVAMSP

SEQ ID NO: 135458 - protein, 218 aa, Heterodera glycines
MLFTGIDRLIGIAFSEFHDKLKTRLYLAMITVISVSFGCLFAVLNCQQANEDDDLMVTGSYTDALKGMPRFGPIILSITSMGFIIYLFLGITIRVKASGLSSADSFNRRTFRALFCIITVNIGGYFITTIAYFLLAPSITSPVTEFFCALMAAIPMNIGAVSNGPILYFTSTEYRQAFQKEFPFVFKQTPNQNQVVPRQNGPPIRVISQSRIIDSCQP

SEQ ID NO: 135459 - protein, 267 aa, Heterodera glycines
MADNEVKLSGHSLTGPVTSFQESTFPAPIVAQLSSVFSAPTAIQAISWPVALAGKDLISIAKTGSGKTLGFTLPAIVHVLNNQRPQQQRRPGEGPAVVVLLPTRELAQQVETVAREYGQLMRLNVVACYGGASKWPQMGALKRGVDICIATPGRLNDFISSNAVSMDRCSFLVLDEADRMLDMGFEPQIRQIISKIRTDRQTLMFSATWPKEVRKLAADFQRQPVHLTVGSLELSANHNIKQNVEVLTEHRKPQRLSELLQQILDKM

SEQ ID NO: 135460 - protein, 55 aa, Heterodera glycines
IKLGRRFNSVEMQLNTSNYHFFNGQPSPAGATQSNNKNFFSGQPNYSNNNSNWNS

SEQ ID NO: 135461 - protein, 122 aa, Heterodera glycines
MGQLYRLGQWIRHRYDGGFLSPDYNVNELYVRSSDFNRTLMSAQALLAGLYPPRPDRAFEPGLKWQPIPVHTEARETDRKFNGEGKELPKWANESVIERIWQLNDLSSNYLYKTTKLVRFRA

SEQ ID NO: 135462 - protein, 56 aa, Heterodera glycines
  unsure (1)..(56): unsure at all Xaa locations
FFSKIITIKKILLNYLVHIWGFLYTYFGIFLTYLCTYFDHFFVHIFGSPNYXILIN

SEQ ID NO: 135463 - protein, 87 aa, Heterodera glycines; identical to SEQ ID NO: 129152

SEQ ID NO: 135464 - protein, 86 aa, Heterodera glycines
FEYPKRTLEKIDFFVFGAVPPNRCAQIYGETESFRNSFPIACNLILRWIFAPHNCLSTPNGHLKKSIFLFSGQSPRTDAPRFMGTQ

SEQ ID NO: 135465 - protein, 95 aa, Heterodera glycines; identical to SEQ ID NO: 124528

SEQ ID NO: 135466 - protein, 104 aa, Heterodera glycines
NGLSKNRNYAQKASQTILAHPIPSTIAFIHPIMSAKIIRVPKIACDLSLEKNGLSKNRNYAQKASQTILALPIPSTIAFIHPIMSAKIIRVPKIACDLSLEKMV

SEQ ID NO: 135467 - protein, 160 aa, Heterodera glycines
MGLGFLDKNPGCRKWHGPGSGSRKNPGLDPGPGQALNILLLESVIIKNNKKNSMIINKKVSEENADHNAKKTNNNQLIIINLSAKKNSLKNELIKKEENEMETPKKEEIKLKKKEKLKEKCKNDLLKEWERISPVNICAFLDDSFLYGKYAEILSSPLDG

SEQ ID NO: 135468 - protein, 34 aa, Heterodera glycines
MIEKQNSFINKPRTEKKYFAIFDIGPCQNFVQEA

SEQ ID NO: 135469 - protein, 337 aa, Heterodera glycines
SSNRPIRSQRTPLKEIITLDDPTELNQFMARGNQFMARGEEQCIHAMRAFITQFSLRQTTVATMTGVSQPYISKLLNGNHRELSLRCRKNIYCWYLNCRRHPEKLAMFVQDPCTRLETSAEGMFVQDPCTRLETSAEGELVPQRRERYVFRPVLLRVLETYFQKCPFPDIAKRVEIANACNAHLQVDKRGVQLVQLMPKEVVTPQVIANWFANKRKEMRRRMGGTEGTESVEQFGKDGHALALGPIQSAGRSNSPSSPNSAAHSPISILTLTGRDDANPLSLSLPPLFLSLTLSPLPPFSLPSFSPPSLLPLSFFLSLALSPLPPFFLSFSLFPLSL

SEQ ID NO: 135470 - protein, 32 aa, Heterodera glycines
MLCSLPFRGPARAPSAPGPPCGQSAAVPPAIA

SEQ ID NO: 135471 - protein, 168 aa, Heterodera glycines
MAEAKRIGRADPQASSTAPKVLLCVWWCSSGLVRYELVPAGQTINADIYQQQLQRVHDQIRRPPFSAKFRGGVLLHDNARLDVAFSTQQKIEQLRWAVLPHPPYSPDISPCDYYLFRSMEHFLRGKEFADQNEVENALDDFIGSKNDQFYKKGIEILPERWGRIIDQN

SEQ ID NO: 135472 - protein, 52 aa, Heterodera glycines
MQDIVNEEFGKLREMKEENKDNEKVIGEEELMNQARPISHFTAILRFNDLIN

SEQ ID NO: 135473 - protein, 153 aa, Heterodera glycines
MSDRKDSVTGGKRIEQELAEDGRPVYIVVLTIFLKGFFFLYDLLVFIPFKLFADPELKKERSREQKAVPIDGNPASPWRHVDTIGTALYTELFEDCPTLGKIWDKAAELHRGHNCMGTRDILEVIQERQSDGKTFQKLALGKYSWMDYEHVDE

SEQ ID NO: 135474 - protein, 319 aa, Heterodera glycines
MDFTTTDSATNTDLTTVDKATDVDLAYEDAATQTDQLDKQLKEQEQVISFLRQQVRNRDAMITALRRQLEEKMAPPMETPTTSKTTPTGRPKMNVDHLQRTSRRKLADQIADVISRDRSRSASRASLEGISREVRHKFAHYTPKKKKQQLPRQNDSVDPEDALLILGLVGTQKAYRRLKGTIRLINAKLDVFPPLKKVLDIKRRICGPLQYAPIETNVGVGFVCTDVGAALEARLLSAKDNLITFGGEIYMKLSGDHGQSCTKITISFSQAARSNSPSNNFVCAVFPAKDSRENLERYGGTLWEQIDGIGTLAEKRVKW

SEQ ID NO: 135475 - protein, 37 aa, Heterodera glycines
MIMKGGKKGKKKAPVQRVCRKFARVENAKECRGNGRG

SEQ ID NO: 135476 - protein, 71 aa, Heterodera glycines
MSLRLFYCPQIYSRFKCTFIFLLLFLISIQKCCPKYEGTSTPIFCCVDEMFDKAPEFPQQMCKDDNVEMFF

SEQ ID NO: 135477 - protein, 127 aa, Heterodera glycines
FVGAALNSIVLLIGLLKVDTADKPRQIIVISMTLADLLTCLFYMLTRPYKFLFSASLCHPYYVCIVTPQLCSCLCLLWINVDKLIFIGRPLHYYQLVKRDRVLILIALSWLCLISLVITLYSFMEIK

SEQ ID NO: 135478 - protein, 120 aa, Heterodera glycines
ECICDIQPIASVGMFLNGYTTPLFGVFVELHDWRDTRPIMCCSEKVSWPLAGTFFCPDRCSCGNKQIYLPIGWYVCFGLIDIIFIYLSMLKISLLFLQTSAPFSPIIFLKSSKWLQIRAI

SEQ ID NO: 135479 - protein, 140 aa, Heterodera glycines
IDKLMTERATKSGLAAEAQQKIHSKFDLELSKQIFGWISQVTGESFTVSGEVEEFLSTLKDGTVLCKLANALSPNSIKKINTSNFPFKQMENISFFLGFAEKYVNKSELFQTVDLFEGQDPNSVLICLAALARKSEKSFG

SEQ ID NO: 135480 - protein, 19 aa, Heterodera glycines
EPVNSCIGCKYRRCCTPNS

SEQ ID NO: 135481 - protein, 18 aa, Heterodera glycines
EPMNSCIGCKYRRCCTPN

SEQ ID NO: 135482 - protein, 92 aa, Heterodera glycines
MSQCVAYLFVFIIVTVPFQISHDLNEDERQYALNYCQMQKQHYLAPEEDIPWDNWARNAHQPITYYYHAVFLFYTLSYCCNLISLTHLQQLP

SEQ ID NO: 135483 - protein, 242 aa, Heterodera glycines
KADVYANGSVFWEPPVVYNSMCVVYNSMCAIDIKWFPYDEQECYMKFGSWTYSWTYGGFELDMVHLDTDVVEHVSQENLDTDVVEHVSQENGTVWNVELGVDISEYQESVEFELLSVTGRRHEKRYPCVTGRRHEKRYPCCDYPVIDITYFLKIRRKKLFYTVNLMIPCVGILFYTVNLMIPCVGIAILTSFVFYLPSQSHNKNLCINILVSLTVFFLLVMFFSNFFAFPPFLILPPSFGLV

SEQ ID NO: 135484 - protein, 164 aa, Heterodera glycines
MAKRTLLRKRETKMHAIRVRTSGRRDEPKCKGDKSPMSQQKRSTAEPQCRNAKAGRSRAVNICCTGRRSDGVAATNSRTSADARDGRGNFGIWLFAAVDICHTNRRFEQDDQRKMLIICSAPHAANWLSPQTCIGNGTSLMAKDNLPSSYAFRPNPKISQKYKF

SEQ ID NO: 135485 - protein, 61 aa, Heterodera glycines
MTMEGALITNGILSSCFSQIESHTIQKLSFDLLMSIYRTFGYMSVCPLNLNPYYTYKSIFT

SEQ ID NO: 135486 - protein, 44 aa, Heterodera glycines
MARAAKSEKCKEEGTENRFNLFCYTRIKRTVEPGLDPGSCPGQT

SEQ ID NO: 135487 - protein, 199 aa, Heterodera glycines
MFIVCATIKTRIVFSLLLLLLINYPQCFVMGRHRIIAAEDMETVLNRLRPSVDRFDANFQRTFNEYGRVDSVRELLEDSVVPRFTVEEHGRVDFVDAFQQLQLRIQQFFDTKIRALHRLVGAAEKAAQKVDMDKVMGPTLGSEGRCRDQMRALNASSVHNPSIWKKSNGKTNSGIHVGILGMKVLGDDKQLGHGIFKTF

SEQ ID NO: 135488 - protein, 106 aa, Heterodera glycines
MQPMRLCRAAMRHGTGGKRTGTVADQCAVEVAAECKLKQKSDDWVVKRNCYSMRKPRLEKLSRAQARKDVPKKDVRAVMKEASGAMRGNARAGAGRRTVRRTVAIA

SEQ ID NO: 135489 - protein, 205 aa, Heterodera glycines
MKIVNRTVETIRTTLYYAVERRFFGLANLKEYALATFLDVRFKDKVLMENSATFRARVNVWIKNEVKECQVENDLDELQNEFVRPVISPQPENPPAKRRMSFFERLKHITGANTTEQGFQTSQDDDIEKENKEFLALEIANPEANPLDEWKKIAPRFSILAKFAEKYLSAPATSVPSEQTFKVARDVFDYRRSKLSPETAEQLIF

SEQ ID NO: 135490 - protein, 211 aa, Heterodera glycines
MPFSTNGRISDRKKGTLLMDIEKVSEFAREEVGSSRYSEKVYINGLPWEIEAEITKDTDEKKYLGFYLWYDAKEGPILITILKIYSTEKDSNWRCFVHSATFRIISQKNGTENSIGTFCDHVFDKKSNNLGFPNFVSFAELMDLNNGFYDREEDKVKLTIDLTTVDEPKVDKFNLDQSNSKGTLFMEIEKVSEFAREIIGSQRKSETVHIK

SEQ ID NO: 135491 - protein, 149 aa, Heterodera glycines
MEGTTHGKYGIRLSYLFRYFFAERSGKKLPRLRNEKWKLSERCEIDISSLNAAIDSLELLLAELEPNKFQSEFGRGKYDLIASIIARLRGVYSDLQKYVNEDFLKRVSTEDIARSVWHAKSIMGCRTGGAGTLSVLSDNSFISAYDEFV

SEQ ID NO: 135492 - protein, 103 aa, Heterodera glycines
LCLSFPSPCRPHTPRFFKIYCRKFKKILGFFIIKFQKFFITDFSKFNELLPLCPSLPSHTFAIVQHSQAHRVALLHALQRICHQFAPVSAVQIGDCPNGEPTG

SEQ ID NO: 135493 - protein, 270 aa, Heterodera glycines
MSDFEIGMLKAMRHVFPSCEHSGCSFHMAQALFRKARSMGIFNLLDEYDDEALVQIKQFTFGTPFQRFNAAPLGIQGWLAYFGRTYIGTIQFEIDRGAEAYEPQADVGHFLLRRIRSTTPFSVSQTSIMTGSGPIQFGLHSPQPSTPTIPLSEESSLQLLRRWEQEIVQPPRFPISFWNVHTRAQMEIERTNNGMEAAHGQFAKSRKRPQRYIIKEQSVVRILDEADFESEEGLANALHLLGLVMQGFVEGLHIRGNDESDEETADADGN

SEQ ID NO: 135494 - protein, 79 aa, Heterodera glycines
MACRCVRHFDDEKMGGQNAGGHRPEEIGRTFDWGTEVLREQREVFPSPATPLAHLFWVHPKITPGQNHAAKNLKKIFQT

SEQ ID NO: 135495 - protein, 127 aa, Heterodera glycines
MSTIRQLNDSSTRRFVNSAKMRRFVNSAKCQRFVNSTIRQLDDSSTQPKCDDSSTQPNVNDSSTQRFVNSTIRQLSQNATIRQLSQMSTIRQLNDSSTRRFVNPAKNSFKKQFQELLMALSTIIAFF

SEQ ID NO: 135496 - protein, 68 aa, Heterodera glycines
YQTILRYLKLKQKKFLTKNGYLFFLIFLPQTWYQQLPSLVWPYQTILRYLKRKQKKFLTKKWLSLFSH

SEQ ID NO: 135497 - protein, 132 aa, Heterodera glycines
INQWHPTVIRANGSEVMALATMLKQHSGGKIGTNICGKGPDSNVESAAAIGHAKDLALCSGSVVAMTGKTDFLIDPSCPSLMTQLDNGHPLMTKVTGIGCALSASVAAFLALAKSDEHKRRIACLTALAVRT

SEQ ID NO: 135498 - protein, 61 aa, Heterodera glycines
MNMSTHPGMYEFLPMYTNFEPNRTYELIGTYKPIIKTDPPQFETNFVIMHKSEQTRQVMKW

SEQ ID NO: 135499 - protein, 21 aa, Heterodera glycines
GLTLSVQLAPYSRARRHKAKP

SEQ ID NO: 135500 - protein, 24 aa, Heterodera glycines
RTLSTAVRQRSSKIYSMPQILWAG

SEQ ID NO: 135501 - protein, 24 aa, Heterodera glycines
RTLSTAVRQRSSKIYSMPQILWAG

SEQ ID NO: 135502 - protein, 165 aa, Heterodera glycines
MDNPSEEYMEENLGKEMARRMGERHWKKWENGEEEEEENGKEPGEEEGKTYRKKLEEEEQKWKKPGEAKEWKKPEKEEEKVKKLGEEEKSHRKKPGEEEEEKWKMGQEEGIRFLEESAASSSTERSAGREKNLNPFEDTKFDERFPIHNLCGPWNSGRQTSDFEW

SEQ ID NO: 135503 - protein, 178 aa, Heterodera glycines
MKKQKEERITAEDEEKQMEEGEKEDHYYYHNQQNDGTKTMEMNNNAHAAIRKRGQPKGTAVLPKSAVSATLPPKTEAFSSAEFGTPSEGKRRLLCRMSNIREEIMTRMGRNHSEEGILMGLGIMEGEEGMAMPTRKGGGEGQGEEGTSARDRPNPGRGGRHCQQCQWEDERRGRAVDQ

SEQ ID NO: 135504 - protein, 146 aa, Heterodera glycines
MPTVQKNLQKCAKIGGAPAHGAPQFCRQNVTGEAIDHFAERRFASRGECDEHGKREHCQLSTDTEPKCNKYLVLSHIRSGRLKQEEAEDEQPQEEEEEGGERAPQVKRPKMEEEGEEDEVAEQHHREDGVREVGEKTDIAGGVEEE

SEQ ID NO: 135505 - protein, 29 aa, Heterodera glycines
MMTRVNRMMQDFMSRDEKAKQVPMNKRRV

SEQ ID NO: 135506 - protein, 47 aa, Heterodera glycines
MSQILNEICDEKCADPQNVQATKCPSLEIEFFIIRMGLSRELNPSDK

SEQ ID NO: 135507 - protein, 46 aa, Heterodera glycines
SFFDRPQLDIIAPSNTMTVKQCKVYYLFLFDINEIVQNLLCSRGQL

SEQ ID NO: 135508 - protein, 169 aa, Heterodera glycines
MYKILYFSPSRSRRKGADLATGGRDLAPQRGESRANGVCPVPDTNGPSACTSSGQKKAVHIPSFSQSGSAQSARKVVQSVDNCVADSVDDQMLDKLCTLPKGLDRHEWLASHGQSILKIFYFLPKICYFPTRHTKKMQILGEGFWLCSNMSIVSVPLCLKCALRSAAQQ

SEQ ID NO: 135509 - protein, 17 aa, Heterodera glycines
MTCGNGLPLKKIYKGEI

SEQ ID NO: 135510 - protein, 373 aa, Heterodera glycines
MGLLDKIMQNETKKLKLLKNTNDYLGSTEQLDENVIRALRKAYAENEKVIKDAIINDKKLVAQKSKSDDKKMEERATEHYEKLKAFFDDPIKFYNKLDVKVFQKFREVMGVVNDKDSNEELAELDTEQYQQFLLFLENPNEYLANANFDDTLKDTVMEVLNKKSELLSSLTPEQIVQLKEFKDALKNETKFQGQLDSDIFAKYRKTLPASAKKGIKERTNEFFVGTKLRFLFDELKTERQFDQLMRFFKHPIRFYQPRNIEHNVWKPFRSILNKIVDQKQQDKMFDGLNYEQLMELAANPANRFAPSEMEGDRKLKKFKEAPGVDPEVLNLYTRHLKRNQSCANVKPLIELALYGMEDRQKASLDLRGRLGEN

SEQ ID NO: 135511 - protein, 334 aa, Heterodera glycines
MREYFIFLCSQIHDFFDDPAIFYLRGDKLDKTMKKALRETLIEMGLLDKIMQNETKTFIEKYKNIVKDEQLTKDQAYKIVKLLKNTNDYLGSTEQLDENVIRVLRKAYAENEKVIKDAIINDKKLVAQKSKSDDKKMEERATEHYEKLKAFFDDPIKFYNKLDVKVFQKFREVMGVVNDKDSNEELAELDTEQYQQFLLFLENPNEYLANANFDDTLKDTVMEVLNKKSELFSSLTPEQIVQLKEFKDALENETEFQGQLDSDIFAKYRKTLPASAKKGIKERTNEFFVDTKLRFLFDELKTERQFDQLMRFFKHPIRFYQPRNIEDNVWKVVE

SEQ ID NO: 135512 - protein, 378 aa, Heterodera glycines
MPKEVIKEKNATNGVVIDQRAGKKEINVQKKPEATDQSNGLDKPKEALTDQSNKNNINNEQPKALETDQTKQNKETNDQRTKTIDQTKPKEEINVQKKPEVTDQSNGLDKPKEALTDQSNKKEHDINKEQINAEKMLKDVIADHGKLKALETDQMKKNEEIDGQKTKMIGQTKPKEGINDQEKPKANSTDFMKPKEETNDQKEPKTIGTDQIKPKEDAANTSVKSKAVIIDLGDPKENNVNDRKKTTTDDKAPKVMPFAQTEKSLHKINDQIDQRIKPREENRDHIKQSRANTEHPLPGQRIKPTKFRKPFDPLSTVADTLERTMLGDDDRDQRQEKSRFETGVGNVNKNGIIPDQIAHLERIISAVQRVMGLGSETK

SEQ ID NO: 135513 - protein, 93 aa, Heterodera glycines
MLLAIDYANTLKPIADLHLAERLSLLRSTAMPFMVFAVACQSSFVHRPDQILLPNGLFVDEPTVAGTAVADGGGICDTEGNRRVGRPHARPQQ

SEQ ID NO: 135514 - protein, 90 aa, Heterodera glycines
MASFSPVFIAILIIIYTSAVGAQFGQFGSLLNGFGGANGGANLMNGMAANSRNFANMGSSFGGMINQFKGMGRNFKRQFGGNPSHHHHGK

SEQ ID NO: 135515 - protein, 135 aa, Heterodera glycines
MLFLQAMLFYLPNWLWNHLNQQSGIEFTKFIEEATKLKGMPLAPIEERQEQINQLREKLSEAVLNRDPYRRIVGCRFGQSMGAYVSLLYVGIKVLYLGNVAMQFFVLNSFIGRNYQLWGYEVLKALFNGQNWQVN

SEQ ID NO: 135516 - protein, 310 aa, Heterodera glycines
ISPIARFAFSDLVITVLRLDFYRTGDPEAIKFCKHSLDILLKWGELPAKTQQSLRHRIEVMICANKYHLTIVSPFLIPVKLDPVCQPQGLLHLLGSLLLCVLVDGDYDARFRVLLRHISALLGIHWDLFEEFESTLCDRLIDEYNETVDNQKVRESKSRLKKLKRYAMIGAASGLGGILIGVTGGLAAPVILTSIVTGGLAAPVILTSISALTTTILLPAAASAAIFGSVFGAAGAGLTGYRMQKRVGDIEEFRIERLTEQDELHCVLCVSGWIEDREESAFRHHWRHLWMSKEQYTLRWESKYLEELGR

SEQ ID NO: 135517 - protein, 259 aa, Heterodera glycines
SFVVSYAIQRSLMETMLASLVSAIAWPLVLLGSSCVIDNPWNIVLLGSSCVIDNPWNICTRRARQVGEHLAEVLLTRQHGRRPITLIGFSLGARVLYHCLLEMSKRTESLGIVQDVILLGAPVSASPRQWRQLLGIVQDVILLGAPVSASPRQWRQLCSVVAGRVINGYCKSDWLLRFLYRTMSVQFIIAGTGPVDNRTERKIVNFNLSHIVKGHLDYAKKMTQVLEAVGVRCTPLSRASCANLSEDAPMHAEAEEATE

SEQ ID NO: 135518 - protein, 222 aa, Heterodera glycines
MKAATATRPIKCRLIGQVQHHNESLIESIRKKLPNGGPKELILSLLYESAIYDAASLYNAMMAYVELYHEELKKHIDGDTSGAYNLLLTKLIAANRNESATVNIDKAFQVDATILFAVHKHGVDEETFFTKLTIESQKQLNETFRSYDRFYDDTIEQSQNERDLIRLVITRAESGDMSTVGAEFERVNGVPLTVQIVSETELATKLMLANLASAYGGDGDWE

SEQ ID NO: 135519 - protein, 85 aa, Heterodera glycines
MKLKCPHTLANLVNPLSLGAYIRPICLSSRTLDLSHRLGQMAGWGQILNEKNEASVPNKLQLLTVPIQETEECSRLSQLKNKFII

SEQ ID NO: 135520 - protein, 126 aa, Heterodera glycines
MHLIILIWLVIPHFIHATFSAVQLNNCLSKCGVMHDPVPEIEETRSMGGSGSPAHYSPWTALLFFETKCPNNEHIVDRCTGFVVSSTLLLTAAHCAFLNYTDMLLRCNFAEEMHENFHSQWYKKGI

SEQ ID NO: 135521 - protein, 185 aa, Heterodera glycines
MAAWMLLGAKVVLFVAVVVVAVVVINYASEQKAKYEKQYQSEQWAEWESESDGGNNGKEGKKKGMFGKFKDNVKGKKDKAKKKMKEKAKEKKKKLENRVFEEAVVTSDVRESRPRLEKSLGFFWSRTALTAGKGRFGASQSFWGKKHFIVGSVEKCGDDGGGEEANIWDGDESDGDGEKGTEEEE

SEQ ID NO: 135522 - protein, 58 aa, Heterodera glycines
MTDVPETKDQLIKLINVCEKARRGDEKVDQIGPQSWPGGPCFVVIGLQRCDVFTLAPN

SEQ ID NO: 135523 - protein, 90 aa, Heterodera glycines
QEAMDIATSKIAAINPTRLGLALSFSVFNFEILKSVDEARKLAQKAIDLAQAEIATLTVPLADDASINLRMMRENMELWTPEGGSHTKTT

SEQ ID NO: 135524 - protein, 195 aa, Heterodera glycines
ILSWNLLLVLTLISVFIGIGIAFFVRQFQPSQRTIDMIGFPGELFMNLLKSLILPLIAASLVSGLSQLDTRQSGRIGAFAALYYAITMVRENQTGICLVLLIHPGDPSIKEHFASENDSQNVSALEKLMDLLRNMFPDNIVQATFQQMETEYVEIRPPTNVSSTTAIVHAVHNTSTETLWVGKETGGKDGIFIPL

SEQ ID NO: 135525 - protein, 215 aa, Heterodera glycines
SEYKTNYMIHVLEAVSFMHDNGVVHRDLKPENLLYYNHELLYYNHEDDSKIMISDFGLSKTEESGIMATACGTPGYVAPEVLQQRPYGKAVDVWSIGVIAYILLCGYPPFYDENDANLFAQIIKGEYEFDSPYWDSPYWDEISESAKDFIAHLMCCDPEQRYTCERALAHPWISGNTARTKDIHITVVTHLKKSLAKRKWRKAYNAAAAIHHLQM

SEQ ID NO: 135526 - protein, 141 aa, Heterodera glycines
MSSKSKYLQYFNCDTIPSGNLWCCRSENCSYKFESKKLSGYPMASLRSHLKNHHQPKLKELEEKDKAAESLKNNEANPRQPTLKRIFATSTQWTPDGEMTKKIDKAINDLVCTAGLPFSFVEEPGLKNLLRILVPHYKTRY

SEQ ID NO: 135527 - protein, 58 aa, Heterodera glycines
MAPRDDSINNNNNGQPVIQFDQQIRQDPGLNAVFDFVREQGARQMAQHRLNERRAGNN

SEQ ID NO: 135528 - protein, 29 aa, Heterodera glycines
MLIKKGSNTKLIRSLLHGDLISPFWLGTW

SEQ ID NO: 135529 - protein, 116 aa, Heterodera glycines; identical to SEQ ID NO: 127487

SEQ ID NO: 135530 - protein, 99 aa, Heterodera glycines
FPHGTCSLSDSWPYLVLDEVYHLIWAAIPNNPTPRHVKMGRHRQLDRSCTFSGAPVKGNLNKRANPSSRSIRYTSQPQRSCDSALDSSQFTRRYYGNPR

SEQ ID NO: 135531 - protein, 219 aa, Heterodera glycines
MPTKTDSSDDESDEENSAAAESPGNKWMKLMLSTGKYADVHFLVGDGDAKMRVPAHKLILEEASDVFKAMFRFDAKKEKAENDSANCPADVEIPDVEAAAFKVMLSFIYAGDLSELNGDNAMAVLYTAKKYIIPGLVERSLQIPISELRNVFFAYAQARLFDFEDYCNDCLDYIDGNADALLKSDGFLQIDQKLLCEILGRQLQIREEFSIWEAVIFLI

SEQ ID NO: 135532 - protein, 29 aa, Heterodera glycines
MRTEPGERTGVFATGGRENPLKVWNLEEQ

SEQ ID NO: 135533 - protein, 152 aa, Heterodera glycines
MPKRKMPTELNVEIVAALPFDIRWANVRISFAFDHFLYKKQAQWIRNELIRQKIVEENRRRLGQAKRRIKLMSFRLFENRLRNMRDLIASHFRLDNCFGLTENQFRGELTPEIFEIQFDAIFETIDRNNLQDISWAQKCKKKCPLMSDNVDN

SEQ ID NO: 135534 - protein, 91 aa, Heterodera glycines
MDKGRWINVSKPIPFTGQAEYCHNFRPLSLVHNIEHTFRVITVFVDGQEEASETFTGRLTMNAVKKTFEVQNEAALAYLPSWFFTLICHFA

SEQ ID NO: 135535 - protein, 91 aa, Heterodera glycines
MINSDDWPTILATNSMNFVEKYKTFVAINCLGQNGAFVRNFCQFVEGRIRLQMTYDIGHRGATTNWHIYPALFQETCQITHKLEQIPAKFR

SEQ ID NO: 135536 - protein, 169 aa, Heterodera glycines
MRHVLMLKWSRPQSKVFQPLIDWLLINYVGQPRPNGTWYQPTFRPEQWNVYTRTLNADARTNNHSEAEHHRLQGAFNCRHPSIFHFIDVLRREQKTTDVKYASFIAGEEPPPKKRKFLATDERILNLVRLYVPMNAGNINHDHNYHNRNQFHIILEFLRGISRNYRMNP

SEQ ID NO: 135537 - protein, 89 aa, Heterodera glycines
ISSTCHFGDRWMIDDLPAALRGAGKKHPQQFGKSDLVRRQLQSGPIGFGFETPPPPPSWIFDGAATSKGCTPPIGTGSCGKHPQPTRNL

SEQ ID NO: 135538 - protein, 37 aa, Heterodera glycines
MARNKKMTEAQWQQLLNEIISEIPEEVANSDYHKNVK

SEQ ID NO: 135539 - protein, 158 aa, Heterodera glycines
MPSGEGPRNVHKFDFGFKEHQRIGITNADKLCLFYALVASKFYLELHVDSFRRFMKNIVRQRDAAIELLHNCGIDINEYSYGVEQLPNVQKYWDEIYPGKYRVVAFEKSADPRKSIRVLWKGQMGREKVVPIFLENGHWDGLKNFVCFFNRGRKFCID

SEQ ID NO: 135540 - protein, 56 aa, Heterodera glycines
MSVQQVQQPIPVPTTPATTTIEHKVLKELKHFQCLNSGQKRLEKQILNSKFRFLRI

SEQ ID NO: 135541 - protein, 88 aa, Heterodera glycines
MPQAFGEAIYSMNEGTPVKDKHRNNDTVKKLEAVEWAQKNSIHAAAKKFKVENFLFKMDFWMIFSANFRDLNRFKNRFKRFAAQFLMV

SEQ ID NO: 135542 - protein, 454 aa, Heterodera glycines
MRNRIPIQALQPSYVGEHALDLAFQPSNFGASTSDQSFQPNLGEHARDLAFQPSNLGASTSDQSFQPNLGEHARDLALQPSNLGESTANQAFQQLNMRNKIPIQALQPSNFGERTSDLALKLSNLGDMAFPQAFQTLNLEQPALMPFVTQKTNSTSKNALLKSGTTAISCQIRKNAKQFFGNIRRIAQILGPTKIAFGYAGTSSATVQIASVHCQTARISAASPTNRHFHAKLTKNAISTAKSSMQSEHQPTFTAQAMPFEYQTQAMAPEHQPTFTAQAMPFEYQTQAMAPEHQPTFTAQAMPFEYQTQAMAPEHQPTFTAQAMPFEHQPTFTAEAIPFKQLTQTMQSEHQPTFTAQAMPFEHQPTFTAEAIPFKQLTQTIQSEHQPTTFTAQAMPFEYQTQAMAPEHQPTFTAQAMPFEHQPTFTAEAIPFKQLTQTMQSEHQPTFTAQAMPF

SEQ ID NO: 135543 - protein, 37 aa, Heterodera glycines
MNFYGFQNKKYQWRFSSATVSGINLVKFALVRMGIRA

SEQ ID NO: 135544 - protein, 485 aa, Heterodera glycines
MADNFGWKVGKVFKRRNLNKQLAERCVGTDEMIYPWKWAPNFLFKAPTFWTLTSQRVQFDNKLNLMIESLVLMSSSSAELAEFQNALPFGVFLNDFDGAALGIIAFEIHCAIGTNDVNSCKTMATEEKSRKLTTRGIRTSTTTRATPPKTKLKIVTPFKTETPRVPNLFTPRDSTVKHFGTNCVQIDFPAEIAQFSLNVSAALFGIACKQYLKKYEIGQLPKNYDEKMEIKDKMEACGKVPTETNCKKSYELIGCYESKSQQKIANEEIAEVCRKHLANAKFSDGFRIRNCASRKPGTKNETIGHILGSIAEQSIDGGWAKSIHFIPPSDRFLKAFFQIWNPTFSRRINNETSWMPYQNDPNNVRVGKENRKRLNITRRFRLVAICWAKIVMRHAKFYGKFGKFWSAAPPLMLLAHVFVNFRSPTCSNSQSDDPLDWWDDILYTKEDAQQRYDYFMEVGDPTPQQYVEAVEQGIKLIMWDHFINH

SEQ ID NO: 135545 - protein, 190 aa, Heterodera glycines
MITLNRFYQRTMFHSTYELSFKDAAIINKIYCDENCKNVENKCQKGGYPNPNHCNQCLCPVGYGGETCEMVENDGNCQTDRANEIEADWQIRTLKPKPQDGKKVIIKLKWLHEKVLTCDDPCGTYRVEIKYRKDKRARGAFICCSKQIDKDETKNWIEADAPGEDILISAYPNQTNFETFTEIVRIDLRN

SEQ ID NO: 135546 - protein, 120 aa, Heterodera glycines
GAKILPASDCPDGVNWKPERSPGKVNMCNHPDTGKLVECCTKGHKCPLRANSAFGCKLIVGMRREGEMKSFWGYWKDKSKDPIRIDEMQCMSYEQAGIINPPDKTVIDYPLRFKSANTNE

SEQ ID NO: 135547 - protein, 38 aa, Heterodera glycines
FEYIDQLDSENKHEEAYCLLAKQSLNTGLNQQEILWRL

SEQ ID NO: 135548 - protein, 48 aa, Heterodera glycines
MAIKSAPTVIRRGTTVIRRGPSVIRRGPTMIRRGTTVTRRDEIYKFKK

SEQ ID NO: 135549 - protein, 195 aa, Heterodera glycines
MFIQHTYSSPFNINQCKFLIFLLPFLFYVTFNATKSIYWQKIELNSMFLNSNDRKMSEPKNGNEIPSKIDRLPNLDDMNINLEWHKLLINSSKIFKLPEIRTAVGEQFKKIETISVNPSSIISADRIDKFDDPNAENVDYVIIIQVHDRVKYLKSLIKSLSNAYLIGRVLLVFSSDFQSEEISAVIRSIGFCRGI

SEQ ID NO: 135550 - protein, 45 aa, Heterodera glycines
HHFGHHQRLIRRIKEVLKCERNYLIEELININLENVTIINYLLIC

SEQ ID NO: 135551 - protein, 38 aa, Heterodera glycines; identical to SEQ ID NO: 130624

SEQ ID NO: 135552 - protein, 40 aa, Heterodera glycines
MGPRGDQARDCLPTLAGHTISGFILGTTELRSLEKANVKY

SEQ ID NO: 135553 - protein, 170 aa, Heterodera glycines
MRRSSVSDFSDFYDEFLKDMRMSNNKFLAEGINQVVDDAKLMGTNNSGENHGHDELNDLVNDGEELKALLEMRTRLLFAAGPGRVFLRAISVLSKQMTANEIRKFTKYFEWFPACRVRENADTIEANGNGVKPPAAADDIKFDVEQAKMDDVADFEQFMHEVKKELLKDS

SEQ ID NO: 135554 - protein, 618 aa, Heterodera glycines
CAGIPGVFAYLDDGLIATKTLDQHITALYTLFGRIKEYGLRIQLDKCKFLQPELLFLGHIVSANGIRPDPSRSDAIRKMPAPIDKSTLRSFLGALNYYGRFVKCMRELRAPLDKLLQKDVVWNWTSEQQNAFEKAKETMTSDLLLTHYDPARPIVVSADASKDGIGATLSHTFPDKKEKVVEHAACTLTAAQQNYSQIEKEALAIVFAVQKFHRMVYGRKFILQTDHKPLLAIFGSKKGIPIYAASRLQRWSMILANYDFEIRYVNTTSFGQADVLSRLIANYPRPEEDILIANICADTENSVFENRMDQIPVTTTEITAAMANDQPLQMVLQFLETDGQPKSPIEISPYFPKRDKILEVDNCLLYEGRVIIPTSLRSRILKALHIAHPGIVRMKALARRHVYWPGMDSVIEKVVSTCEECQLGQKNPTKAPLSPWPTTDKVFQRVHIDFAGPCSDGHQYLILVDSFSKWPEVYRMNTISAYATVFVLRSIIFGWLGIPEEIFSDNGTQFRSAEFATFCKEFGIKHIFTPPFHPQSNGQVERFVDTFKRSMKKMSKSEDCIEKMLFSYRTTPHVALNGFSPDQLFFGRKLRTKLSLVHPKGELEEASLYFCKSPLSTQ

SEQ ID NO: 135555 - protein, 216 aa, Heterodera glycines
MKRTNASNITPPRAKRAMPPALDLDQNTATLEEQERQRTLVFIGLPESNAIRPLERVQEDREAITKILDHLEVEAQPTAVFRLGRYDPQRTTPRPLKVVMPTPTHQHVALGGWKRERVRLRSQQNLNRLFVRPALSKEQLKEEYEARLRKRQQNPAPPAPPTQLPKTTNDQTPIVAPNQKEASEDMSKPPEVFDQTIIHVQPSILIDDSQTHHAQH

SEQ ID NO: 135556 - protein, 25 aa, Heterodera glycines
IAEPALVEAGNAVLTRKDFTRTIAA

SEQ ID NO: 135557 - protein, 339 aa, Heterodera glycines
MALLSDRFDILVDKHFDGKSELTIWRTIAIHPGIEMPKLFVEGKFVAFPMPDRPLPNKILFHNLEIRYIDHSVIEFLHANKQIWDRSGTNLEVFVCSNNKEDEQPIWNVWARKIWPIFATNVRHLCIPNGAHLDNLRRLISPTILTDLDQLNSIDAGLLFPDGIADDGPNATAGQALTKWLHTPSKNGQPNELYRDACLNPRNLEWVNNFKEKFRHATTSVSYTIQLYTIVEPTPTEQFELVNGRTNEKLTLKHSKESIGSVYNWLLQRCPIIGEMATTAAVKWKNRENSGANLNNIRFDLRTCNYLCANLNNIRFDLWDGIHCIGPLSSPAVEEEELD

SEQ ID NO: 135558 - protein, 116 aa, Heterodera glycines
MSDSSMDAIRELQRALREQQRTIFFLRSQMVDHRAVILQNVARTEALEGYAANSRGGRFRPRYSPMVSLEMTHLGRRLEEREQRCRAQAETVDAPAATESAEEGTSSSSAPSNGPF

SEQ ID NO: 135559 - protein, 97 aa, Heterodera glycines
MTHVFFDPESVDWSSFITPQHGRGQKQYFVGSKYQRGFGFLGNVARFLTPIARNIASSAGHEGLAAGQRVLSDIVQGRDLRDAVREHSRQGLTNLTD

SEQ ID NO: 135560 - protein, 59 aa, Heterodera glycines
MVTICGIIREEMELIRWLSQRVTCMMEHANFVPDYPRSLFKGVINKQFVHDLIKDEKGI

SEQ ID NO: 135561 - protein, 81 aa, Heterodera glycines
MKFQNNNSTACLINYASCHYDFDGFDISVIIIRLKKPVMSFRIISILLDSVNNLKSYIDSKFAQTELARSALDGFKNAPKL

SEQ ID NO: 135562 - protein, 65 aa, Heterodera glycines
MPKAAKSNAVLNRHWISKFPEGTYSTDGKINPGLYKLIDIAKILIGGFLAHKNPSPSNSTLCIRG

SEQ ID NO: 135563 - protein, 160 aa, Heterodera glycines
SGVRLDQLMVLVQKTILFCQDPVTGLFVNNPDFCQDPVTGLFVNNPDFLAHAWVRDNVYAVQAFLAHAWVRDNVYAVQAVWAMHRAYQKRAEFDEDLVKAHELGLNCVKCMQSLLECMLRQADLECMLRQADKVELFKRQQKKSDCLHAKYSAKNKATVV

SEQ ID NO: 135564 - protein, 87 aa, Heterodera glycines
KCPSSIWWTRPGIDGFKPDVLALFRVYDQRYFQGRLTQSCVIINRSNKLLRCVGVTYNSTETRLMTIRLCVPILKFRTRRNRIETLL

SEQ ID NO: 135565 - protein, 40 aa, Heterodera glycines
MNIKYGVYLVNGDKMLFAHLEKQWGDEVKMDKLVDAVSKI

SEQ ID NO: 135566 - protein, 215 aa, Heterodera glycines
LLRFLPFPCPAFPAVAGFEFGCDDEDCRSLRLLVKFHSEKTEIAPNYSPTHPPTVQPRNSGPQKSVRKCRSAKVGPQKSVRKSRSANVGPQKSVRKCRSAKVGPQMSVRKSRSANVGPQKSVRKCRSAKVGPQMSVRKCRSANVGPQMSVRKCRSAKVGPQMSVRKCRSANVGPQMSVRKCRSANVGPQMSVRKCRSANGFDQYLDKSQEIKNGY

SEQ ID NO: 135567 - protein, 473 aa, Heterodera glycines
LACRLAVKTFLARELSCGDSSYQLVLIFELFVANGKAKCRQMVMDTLGRHSDMKEHSRRRGVDGVSSESLSPAESSDGVSSESLSPAESSASLLPRYVRVNTVRMAFTQAVELLERDGWCLCRLKKRITPSKYRRLVSTLESPKIYVDPHIYDLLIFPRGVDLHNNKLVTDGILVLQDKASCLSAFVLQPEPASCLSAFVLQPEPGASAMDVCAAPGMKTTHLAALMHNRGTIWAFDRDQKRVAVLRQMTIWAFDRDQKRVAVLRQMVKRSGAGIVTAQCADFLRVNLLDGRYKKVRFVVVDPPCSGSGMAVRFVVVDPPCSGSGMAKRSEHLDEFEADEQRIKALANLQVKPTANWDLISTRFLRVRASPHTFLSFWVMLLRHAFRLPSLQRLVYSTCSVHWAENEGVISEILSSSPLSEHFSLVDPLPQWRHRGQLGQSGNAELRKCLRASPKRDLTNGFFVALFQRRNST

SEQ ID NO: 135568 - protein, 34 aa, Heterodera glycines
EFIKTPAEDTFWSAQLKQPKIDERRHFDNISPCH

SEQ ID NO: 135569 - protein, 181 aa, Heterodera glycines
MPKQNEIVLKYSFLDLTWFLDIEALFYAISKTKKCLVVKTIFHISLHNFVSSARIETGIRPLERAARALQEVKKLFEFLQFCFHNFRKLFGIIMPKQNEIVLKYSFLDLTWFLDIEAVFYAISKTKKCLVVKTIFHISLHNFVSSARIETAIRPLERAARALQERMERKNSYFWDFFRNQN

SEQ ID NO: 135570 - protein, 105 aa, Heterodera glycines
PNSVDNRRLYVLKKSESPQWEDLGWAWGKRSLPNSEKSAQSSANWDDLGWAWGKRSSAGGGGEAMRRAKAHGTDPILSVVANRVVRSMSKQSPDWHDLGWALGRR

SEQ ID NO: 135571 - protein, 61 aa, Heterodera glycines
MECFSECQFVYYHPSVIPFSPIYRTHLSVHANISRFLLNLSNSPPPPPFLSIWLPELFINN

SEQ ID NO: 135572 - protein, 270 aa, Heterodera glycines
MLYLNAHFLITVVPLLITFVPLLITVVPLLISVVPLLIAVVPLLITVEPLLITLLIAVVPLLITVVPLFITVVPLLITLLIAVVPLLFTVVPLLITVVPLLITVVPLLITLLITVVPLLITVVPLFITVVPLLIAVVPLLITVVPLLIAVEPLLITVVPLLIAVEPLLIAVVPLLITVEPLLITLLITVVPLLITVVPLLIAVVPLLITVVPLLIAVVPLLITVEPLLIAVEPLLIAVVPLLITVEPLLITLLITVVPLLITVVPLLIAV

SEQ ID NO: 135573 - protein, 146 aa, Heterodera glycines
MTANYLGTFCGGGGGTTETTTAQLKVLKKKWRKKKKNKSASGGAKKSGKNKNIGILSSSSSSVEQQPEENGTVTTPQQQRHMAAASFEMTVTATTAGNTADTVVGVPKTTPPVLATSESVPSSSAASATKASAPAGGDASFERADK

SEQ ID NO: 135574 - protein, 128 aa, Heterodera glycines
MMNRKKIENLQKCRKRKFLDNNDSENETLSADHREQNENNNDRDDDFEEHAIVNFELGETKRGGVCIWFNGFRFTHKQNELWRCSVRDCPARVTITDKSDNGMAGYFGQKVHNHLPEPQKQRVSDNHC

SEQ ID NO: 135575 - protein, 270 aa, Heterodera glycines
MPKGRSSHWLMCWKNQPGNQSRPSGEPERKENNHAMLISGMDQPTHVTTSRDEPNSRDISETNAGEQRAFTAFGSRVPAQQMIRRVTAAAEEGEDECQTTLLFDPGSHLDCAETELIQHLGPQPIDKRPLTVQVFGGKKQRIRSATYRLRLKRTDGKWESIEVSEVPQICTLIRTELIESGATPDSDPRTITQTTQPQIMIGIRKFWDYVVGFRKIESGAHVIDTVFGQVLCGEGTQASSGATPAASILTTMQCGNIHQTRTNKQQQIGE

SEQ ID NO: 135576 - protein, 106 aa, Heterodera glycines
MLKLFPRGHSVSSSLLIALLEDGDEQSDNSSAVDEVTSFPIATVSKVMGPPLLRLAMPPPPLLRLPIVVALPVVLNLSAGASLSSLILSADAVVWSDERRPPPPRG

SEQ ID NO: 135577 - protein, 29 aa, Heterodera glycines
MKNSGCRKTVWTWTWMKKNLGQDLGQGRP

SEQ ID NO: 135578 - protein, 129 aa, Heterodera glycines
MSELSGQQFPQNVGISVQPKARVEVEEQNSQQNDVVAQKQNFSADQLDKLERKFGITKYPSAASRVQLAMETGIMEKQVQEWFQERQLQRKRKTMDQQNPQLPHIYDKIMAVVQKTVDDEVIALQNDDD

SEQ ID NO: 135579 - protein, 100 aa, Heterodera glycines
IYVAVEAMYYCTHFVYESGQNLCPPTDPPLTYYASVHLCCKEDSEFGTALIYRTFATEPPTTFPQGCRAALHEAAIGQYVCKSGEDAYSNWDATFADVIP

SEQ ID NO: 135580 - protein, 229 aa, Heterodera glycines
MEIEKGSEFAGESVGRSRFSDAVYINGFPWEIEAEIRKKTEDTDEKKYLGFYLLCDAKEGGPWNCVFSATFRIVSEKTEAENSIGTLCDCVINQSRFCWGFGFFITFAELMGSNKSFYNKAEDKLALAIDVITVDEPKIEKFVSDPNKSNGTLSMEIEKVSEFAREIIGSERKSETVHIKGLPWKIWAGIITKNGSTDKNEKWLGIFFLCDAPKEGAKLLIINIYINNN

SEQ ID NO: 135581 - protein, 24 aa, Heterodera glycines
MEKACKIWRDYIDFSALELLELAS

SEQ ID NO: 135582 - protein, 146 aa, Heterodera glycines
MPIVTPGHIEQNAAFNVNRSTATIIRREMQNAIKIVRNWPNLSISLNEKWKSLIKAKQFNEKVIINNSYLNWLSNFKIFPQFSHFIRIICKAFALADFYDFCGYVETRIRLQLIINVVPFDRVRLAHAKKVAEKEQENFGERNNKK

SEQ ID NO: 135583 - protein, 82 aa, Heterodera glycines
MLENTSHFFYLAFENSVCPQYVTEKFWNAFRALTVPVVLRRAVLRGMGVPDDAYIAADDFCSAQELAQHLLTLRHDTDRYMQ

SEQ ID NO: 135584 - protein, 178 aa, Heterodera glycines
SKNIAILPRRDSDLEAFSHNPSDGSFAPLVYRPSTTKCLNLRFLSYAGLLLATGLGKTNLSHDGLNPAHVPYWWVNNPTLGEFCFAMIGRADIEGSKSDVAMDAWPPQASYPCGNFSDTSCWKLYTLKDRATLSRSVFVLKIRIKAFAFLLYERFPSSLSSLGHLRYALTDVPPQSNS

SEQ ID NO: 135585 - protein, 141 aa, Heterodera glycines
MINASPYSIAVHKDNNHPFSNIPKSGRFRKNLFSFLIRDGDYRLSWDFFKHASRRIHCPVTKFYRYINGLVQIVSTDKKKPRIFIYFYQEGEGKFRAPSSYQGWLMRCEIDFDEIITTYLVKGRLSSFAQIIIESFICLFE

SEQ ID NO: 135586 - protein, 94 aa, Heterodera glycines
MFQFYLSPLYRVKLRSKTIVNLFSIREWLVSPVILIVYGFFSIVDREMQEAWKLLNIGLPSLKDICTKSISENEKALEEFRSFPFVFKKLFTRF

SEQ ID NO: 135587 - protein, 268 aa, Heterodera glycines
SPQPTNISITGHSTHQHSQSLGLNPPTFQSLGLNPPTFQSLVLNPRALQSLALNPPTFQSLVLNPPALQSLGLNPPTFQSLGLNPPTFQSLGLNPPTFQSLALNPPTFQSLGLNPPALQSLGLNPTAFQSLGLNPPTFQSLGLNPPTFQSLGLNPPTFQSLGLNPPALQSLGLNPPTFQSLGLNPPAFQSLELNPTSIPITGDSTHQHFNHWGLNPPTFQSLALNPPEFNHWDSNHQHFNHWNSTQNIFNHWDSTHQNSISATQPHSI

SEQ ID NO: 135588 - protein, 40 aa, Heterodera glycines
MARQIFGGHGKVGRKHSKNEWPSAEEAFKWNNEKVQNLEK

SEQ ID NO: 135589 - protein, 49 aa, Heterodera glycines
VHIRYSVIANCYSKWPLFSVFWPAVTFLCRPFCAKRRNNLPMNTSTKFG

SEQ ID NO: 135590 - protein, 243 aa, Heterodera glycines
MIMDWNGLEHVGMSDLNSDKQNVRQRMIDKISFNGDRYQTELLWDEELAAQLPTNYDMAFRQLMSNLGRLRKTPDLLRQIHEIKMEQVETGFIEECEPLPIEERYLVGNKVHYLPHHPVVKETSEHTKVRIVYNASARCRGGLTLSQVLEKGENDYNDLAGILIRIRIKPMLLTCDIAKAFHQILVHPKDRDAMRFLWVRDPYVEDSPLVEYRFTRVTFGVICSPAHLSLTIKLHLSKYKDKK

SEQ ID NO: 135591 - protein, 106 aa, Heterodera glycines
MDQIGGTFSDQIWLDTLAWIGRGEVGWHLALVNARFAALVNMQLQQRRWCLEEFHISERKPKRTGAEVLSLANNGSYFSLPLATSPLPDSVIGFNGTFNIWSPFNF

SEQ ID NO: 135592 - protein, 71 aa, Heterodera glycines
MAFRGPKNFRKSEFRGPKIFRKSEIGIPCHPWYTLAGLGLVSAPSQKLEKSNEPEMLIDDNQVYRMIPTKC

SEQ ID NO: 135593 - protein, 87 aa, Heterodera glycines
MVNFCVIYRAFLVFGSQSVIILLFIRGLLEGHFNAKTMDDYLENGKQIETNSYLLTTHLSLRKMTIQLLTANRASEGLSNDTNSVGF

SEQ ID NO: 135594 - protein, 176 aa, Heterodera glycines
FINWALIEHFYCIIPLFSDLSIKALIEHFYCIIPLFSDLSIKALIEYFYCIIPLFSDLSIKALIEHFYCIIPLFSDLSIKALIEYFYCIIPLFSDLSIKALIEHFYCIIPLFSDLSIKALIEHFYCIIPLFSDLSIKALIEHFYCIIPLFSDLSIKALIEHFYCIIPLFSDLSIGH

SEQ ID NO: 135595 - protein, 51 aa, Heterodera glycines
LQIYWLKLHMRYISKFFDSVRRFDKDGFRFAISRSTFGNWSRIFSAITRNH

SEQ ID NO: 135596 - protein, 78 aa, Heterodera glycines
MDFQNYSMVNLAFNRFGVGTFLMELFLSNSCRWLITLPGLMFNSALLYTTIREKLNLNYPEPDTRARFFENQIPGTRP

SEQ ID NO: 135597 - protein, 153 aa, Heterodera glycines
MGSPITQPKNRLFHRAILLDGSAMSPWAMAHTAQTQFMRLAEELKEHSEQNVSTAARHVASASPTFLSAFAPIVDGQIVPNHPRVLFNPQYGTLFREIDLMVGTVLNPAHHLLAKDDLENGITPLIETLRAHSLADANLGGSEEKKSSANTFL

SEQ ID NO: 135598 - protein, 49 aa, Heterodera glycines
MCTVMLLAGDEPYKRYLGAWTTYWKGKCIKIKLFINAQMLSIFSFKNLN

SEQ ID NO: 135599 - protein, 38 aa, Heterodera glycines; identical to SEQ ID NO: 130615

SEQ ID NO: 135600 - protein, 116 aa, Heterodera glycines
DCPQTSKEKKKPLRKTRGEGENQQTDRREKGRTKNKLQTKTTDATPAQRKTKRKAKERRHQPTRAGKAQDPPPKSDNEPRAQKPTQAHTKKPALSIEKDSLNIQLRNAPNVTYEVK

SEQ ID NO: 135601 - protein, 24 aa, Heterodera glycines
MEKACKIWRDYIDFSALELLELAS

SEQ ID NO: 135602 - protein, 18 aa, Heterodera glycines
LLINIWCVSEHVLKNIYE

SEQ ID NO: 135603 - protein, 24 aa, Heterodera glycines
MTNQFALPPLNWLILFASFLSAKA

SEQ ID NO: 135604 - protein, 352 aa, Heterodera glycines
MMMMMMIGWIMKIWVITLQIFNHPTDQSINQSSIVHWYEADHADPALAELIHQMDVAVQKNSLSLYRSHCFTQSFHPSSSDVIWGNCSTLGGSGQLSLRDVDDDDDALFKMPLNIPWATSMRDVDDDDDALFKMPLNIPWATSMRDVDDDDDALFKMPLNIPWATSMRDVDDDALFKMPLNIPWATSMRDVDDDDDALFKMPLNIPWATSMRDVDDDDDALFKMPLNIPWATSMRDVNDDDDALFKMPLNIPWATSMRDVDDDDDALFKMPLNIPWATSMRDVDDDDDALFKMPLNIPWATSTSTDSTTSSTISSRSRRRRCAENGDDDEAARQVIGKLAYILVLCLKKNGK

SEQ ID NO: 135605 - protein, 177 aa, Heterodera glycines
WINFLDFFFAKNGLNIFGPSISKTVFSFHLPFFFKQRTKCMPIFRSLAVPLHHHHHFRHTHHHHHQHPHHHHHQHHHHHHQHHHHHHHHHHHHHHHHHHQHHHHHHQHHHHHHQHHHHHHQHHHHHHQHHHHHHQHHHHHHQHHHHHHQHPATKVVHHHHHQHPATKVVDPPSVEQL

SEQ ID NO: 135606 - protein, 51 aa, Heterodera glycines
MFDRNIFLSESKPPSASLAEWSKALRSGRSPLRRAQVRILRLAVNFLTILN

SEQ ID NO: 135607 - protein, 150 aa, Heterodera glycines
MAFFLKGCHWHFGTTPRGALHTKHTSHIAAPCHLSVPAEVPCQSTLFSRKIRVPKMVPSSRAHKFCPGAIGDQILCPGVAGGGLAAFISFPAIIPAGGKRVKMPMPMMAHTENGLIGVVSVPMPSLSVVVSLMVCPEALFVVHLEDGMND

SEQ ID NO: 135608 - protein, 51 aa, Heterodera glycines
MPLLPDTSAPIIFLHFPSTLILLCSTCAVTGGHALLLNGEYPWTYDNDLFG

SEQ ID NO: 135609 - protein, 116 aa, Heterodera glycines
MGQFPLLTLATKNATTADTTGGGGGEKREEQKQQQPVLNIAGGPAHPYTYQMQQIIGDRTNAELHRLSQATKHIKHRNQMVRIKRFQPAALVPSTEHYVTYDGSMTYPGCFETVTW

SEQ ID NO: 135610 - protein, 936 aa, Heterodera glycines
QQQLVHQRHDVTLPPITLPKFSGEPREWPLFWKLFETSVESLQIEDFKKHIYLLGCLPEKSIARRAIDLYPPSDENYPRVVEILKKRSGDEKTMVESIQAELLHLPKPAESVQSLRQFSESIERICHQLLDYGENEQNKFMASTIKSKLPYHLLTQVVEREMRAGGAFNCTELRRAITSIVEVKEEVQRCTQVFRGEEKPRNFPPHPMGGRAHQGRGTPFRFSQPFRQERQWRPMERNEPVRRMSPQPNRSFSAINKPQTPISDRGSKRLCSLCETKGHAPSRCTKYTTPGARRKRLTDQDRCINCLMMGHNTKNCTSPRRCSHCGERHHFMVCFGEKSREGTSRVQPNNQMKREARKSSQSHLTMSEHAHKSVPSSECSPITTNVMTSVMAKKPHAFLMTRKILVRSKNNRRVWMEVPFLFDPGSQTSYASDPLIERLKPPKVTSEEMEVYGFGGERNGPMRFHSPVYSIQIRRTDGKWEEILLNRTERISTPFKMAEWNSEEFPLKGMDMADAMSFSREEPEILIGARHFWQFFQGKEEVSPGLFVIQTTLGPLVNGESDFGPELPNPGLSMMAIDESNQGQMPTVKEIEYFFNLESLGIKDDPNENDDQTAMSLFNKSIRREKDGRLMSTFGKLCNSPDLMEQYDATIRDQLQKGIIEEARKAPGTLEHYIPHQGVLAKGKKLRVVYDASAHTRGTNSLNACLYRGPVILPDLIGMLMRFRCPRFPLLSDIQAAFLQIALEPEDREVTKFLWVKDVSKPLTPANLITYRFCRVAFGVISSPFILAATLQHHLKGYHSPVANELAQSLYVDNTLLECESTEEALHKYAESKAILKEGHFNLREFVTNSPEVMKAIPEEDRLNKPKVKVLGLIWDTDKDEIVFEFPTHGLEKLATRRLVLSFLASLFDPLGLMGPCIQPLKLFFQNSLGRKERLG

SEQ ID NO: 135611 - protein, 22 aa, Heterodera glycines
MLYIPTNMTWIEVDGLIHEEVA

SEQ ID NO: 135612 - protein, 220 aa, Heterodera glycines
SNEKGMPNKEEVPKGSEEKVQNEAEVPNVEGVPSEAGSASQPSLYSQFVTMATRPQQKLPSLDLEGVAAFIREERPEIVFMVGAGVSTSAGIPDFRTPGTGLYDNLKQYDIPNPQAIFDIRTPGTGLYDNLKQYDIPNPQAIFDINYFRRNPEPFFVLANALFHESIMPTSAHHFIRLVADKGLLPTSAHHFIRLVADKGLLRRCFTQNIDGLEFRAGVE

SEQ ID NO: 135613 - protein, 56 aa, Heterodera glycines
IFLCKRTKEKQQARRKDGSQRFIHYSLSERNIKKAVRETIVGGRRNHRTVPLEPIK

SEQ ID NO: 135614 - protein, 199 aa, Heterodera glycines
MSPFSLDLNVDNIFLVQGTLRPDLVNISLFIYPISSLCQIESASQLASGCADVIKTHHNDSALVRELRDLGRVVEPLQEFHKDEEEHFDETQQRVKEYVEAFDDKLCAIVLPIKSVGVQGDRRSYSYVAAVFTKDPSLEDIPWLKLEELARLLPNECHFINRVVFGFNLGYNITPINDITVTHINEGTVFCDVAFPFAL

SEQ ID NO: 135615 - protein, 73 aa, Heterodera glycines; identical to SEQ ID NO: 133467

SEQ ID NO: 135616 - protein, 44 aa, Heterodera glycines
MRVVLTQPDDVTQVIYDAGFNEAIVMFVGHESTQIAFNKVKNRN

SEQ ID NO: 135617 - protein, 30 aa, Heterodera glycines
ISNTNEDAVNLGVELGDPNAVIIFDNVDRL

SEQ ID NO: 135618 - protein, 299 aa, Heterodera glycines
FNTLHANSKWAIEYWRNYGLPVSTGQGLANLADVQQSVTSFSPIQTSSFITTDKKAQVSGIRIEPEQGAGGFVGYADKGVSIVEPDMDVRVVLFGIHLDEIDLVGFTSTDNCSDAAVLIDRNEFAIQSERRVVVIYHFASNSLYKLCVRQKPHPDYPHELPIHLTDEAHCWVSTNIPPRKYYFSMPLQIVIIAVLLVLSGLFSGLNLGLMSLTPQELTLIKNSGSPKERKYAQTILPVRKSGNRLLCSLLIGNVCVNSAISILFDDLTSGTVALIVSSTGIVVFGEIFPQALCVKKGLA

SEQ ID NO: 135619 - protein, 42 aa, Heterodera glycines
MTILFTCNPMIENYNTIGTVSVQIGTFTASTLASYASFLVLF

SEQ ID NO: 135620 - protein, 48 aa, Heterodera glycines
MDELCEGKWIGRTVGDDGEGMFGGGMRNGKRGRSVSEQRETRPLLGKS

SEQ ID NO: 135621 - protein, 39 aa, Heterodera glycines
MNIFKSIKNRILNANTQSYENVDVILSFSNMRMELFWRI

SEQ ID NO: 135622 - protein, 127 aa, Heterodera glycines
MERKFARKKCNILIKNGNRLLEMKVKSRKKLNPNISFRDSWNLVPGPLASMVPMFGLDVQDKPFFPHLANRPENYGCQIFPTKSNYLADGMNPEKRKEFDIWYDQNRNQPFLLDEALASIVKMTWIF

SEQ ID NO: 135623 - protein, 173 aa, Heterodera glycines
FFYTRRFFPSNVNQCFISDIDFNIIETQKLLKKLPNKNGTSPDNISYKILKNCHSSLATVITDLFRISLDSGSLPDIWKESIVFPLFKKGDKFNPENYRPISITCSLCRVMERILSQNIYNFLLKNNKISEYQFGFVRNRSTTSQLITVVQDSTHSDGLINLFVLKSKGIPPP

SEQ ID NO: 135624 - protein, 384 aa, Heterodera glycines
AQQHHQQQQQQQQQQQQKQQVVRFVKIDEESDDEALRIDISESESEEEDDDDEEEAAAALEAAVASAAPSPVVQEVKKPRIQGPMEAPKTKRVAAAEGPFVKRARIVGPLNAQKSRCNKCGLLGHLSGDEARCPKTNALVKAEMDRKKAAAFAKRAEATMECSAPPIIQLPVKGGGQARAARAGGVAASMVAGGRASAEGAFRASKKRARQELMAAMEKPKAAAISVAEKKAAARPGLQVPMETNAVLNGLSEIGARIDRERDNHLSMAEELQQRGKRAVAAIDEVIAQGAQIGQMYVEWTRKLGEVLKANEQERADRDALEHRQAAAFMQSLRLKISVLRRELSSPPGVSPLATERVEIGGQPGGSLGGQPGGPLGGPPGGKK

SEQ ID NO: 135625 - protein, 67 aa, Heterodera glycines
MKQNLSVLSLLLFVQIFASNLSDKAGVDYFQVKYEEIEQKIAQLQKHNLTMDYYNNRIFFSDNLHKR

SEQ ID NO: 135626 - protein, 110 aa, Heterodera glycines
TISIGIWTKSDDTFYKYSNNGFIFGHSATGLGGYPSFAEGDTIGCGANLTSMEIIYTKNGQKLNTSNLFVFDNELLPFVQVNTLGDVIEADFGPVFEYKNVSDLFATQIT

SEQ ID NO: 135627 - protein, 42 aa, Heterodera glycines
MNSSFVICCCFHNFVLFLLLSCVVPHAFACCPHGNLRVKGKK

SEQ ID NO: 135628 - protein, 279 aa, Heterodera glycines
EGKVKETSHDIVRAPLAVDQGGYLSNPEQEYAKVKSVVQAAIDKCIEYAKVKSVVQAAIDKCIYVLIDWHYTSSEKYTDKAKEFFGRISTLCAGKCNCLYETWNEPIQNDWSSQLKPYHEELVKVIRQNDKNGVIIAGTPNYDQDVKAVVNDPIKEHNIMYTLHLYAASHKQELRNTAQQAIDAGVPLFVTEYGTSSYTGDGGPDLVETQNWYDYDFFNKNSLSYINWAIDDKQEASAALQNTQPPVGPADVCSTDRLTKSGKFVHDHLIGVNQKPDGC

SEQ ID NO: 135629 - protein, 124 aa, Heterodera glycines
MKEKKMGLNSNRKMSLIVPVWGHLGWQKAIWAYLRLIKVPKNSETSTKVPRDNKRGKVIGNIMPRLRAFLSKLLPVFEGDQKDANVHQNAGDDDSIEQRCREDEHWGMARVFVLDPQLTKHWLT

SEQ ID NO: 135630 - protein, 46 aa, Heterodera glycines
LPLITSLYHKTVIGLATVVLIEGNSVFDEFYLCTILISRLNLNYLF

SEQ ID NO: 135631 - protein, 44 aa, Heterodera glycines
MMKLSKKRKQLQHQEQSQSLVNPRPLNKWKATHWLITTGGYQQD

SEQ ID NO: 135632 - protein, 275 aa, Heterodera glycines
MEIVNSVREALPLFQNPLPNKVIGFRSIAIDFINQNVLTFLGRFHRFFASCETTLHINKEKSIKGRKAIIDGRILKFVVLTIWPMFKDTIRVMSFNTNTFRQMRKLAPSILDDCPSLRVVAFDGTILPKLPPYDSASASNDKTVAKWLFTPRPDNLRKVLIIENSSVENSAVDQWLATLEQIKAAFSSASSPVSFVISVNSNSESSSSLSSFVPFELTNQLTGEKLALSHYGNGIMLVRCPIGEGSDLEEEIEQLIDGRKNKIEISITKDCVDNG

SEQ ID NO: 135633 - protein, 21 aa, Heterodera glycines
MIENLWGQIVLIAYFIPIFAV

SEQ ID NO: 135634 - protein, 118 aa, Heterodera glycines
MMLSNWGGQCTKIFIICMSTWAIVGWGSILLVKTVLGLAWNSFPDLYKNLMELKVFQTAAIFEVSFLSESVRFGGTGPLLGVLSAFHSDFGHQYFICSKIVHNIVGLVRSLVFNTIVQ

SEQ ID NO: 135635 - protein, 647 aa, Heterodera glycines
MDAQQLQQILDAALKKSAEVFAAALNIQNQNPNPGSSTTASLAASINARLEKFNYNPEVGQTYDAWLNRYGKIVQQDGASLPEQSKVQLLVGKLDEEEYKRYVDSIAPKATEQFNWLETVANLKKIFGETRSLFLRRFDCFQIRQSQNQDLSSLLAQINSSCENAELDLKKEELKCMILIISLRDEFSDLKQRCLQRMEEARTNGKSITLQELGEECKKYQILKESTLALSTKQYNANAIRAKPQQVKDKADATKQYAKPKAVPKPYESKHKLPNRPCQSCGSTNHWRSDCGHRDAKCPKCGKIGHLGKVCRSNSSIRHIQTVNTTERHAQINTVIIDLNCMEINADHPKWWKIPIKVNGADYPMHVDSGAQITLFTIQTWIQMGKPPLTSANIRVKNCNDQTFAINGQFMCKVQYMDRPPMKLLAYVSPEISHNLLGMPWIEALEVIPKEIMHPNLHPKINTISTKTNEIKDTETLISALKSTHSDVFSPELGHCTKFKANLILKNGAKPIYCKARPVPHGALDDVNAEIDRLLKMEAIKPIEFSHWAAPILAVKKRNGRTRVCIDFSTGLNDALELHRHPLPRPEDIYNAIAGSKYFSRLDLRDAYLQLELSDESKKLCTINTHRGLFHVSVTVRRKSAPAFFKV

SEQ ID NO: 135636 - protein, 159 aa, Heterodera glycines
MFMKHSSSRHSSKATTPRLSLKFRGKDKTDGVFEWGKSKLSSKHSVVRRGKEVEVKLDGLKLGKEDVLRVPHPQTPFPIRVYDAGQIVVEDIVTEATVNDTVEFTVDAGRAGFGNLEMAIKDHDGIIIPSHVSQIESGTAKFLVTFNPATAGTHTVHIT

SEQ ID NO: 135637 - protein, 230 aa, Heterodera glycines
MKGCLLTSLFVFLISSLISINYVGSEKKKMEQKTFEEIFGEKWEEKRTEEQKRREIIGKFNKIKEKIKQKGKKYSKREWEKIERKIAKKLGTNRKYIYEWTKELGLNQKNCYKSKTDEEKLEIVQKFIEMSNEFKEKGRTYSKKEWNKNYEEICNKIGVGLRIIKKWKNQFGISRKFITEKEKTEKMKIYWQIKGENPKMSDKEIGKILKIHQNSIFNWKKQFGKEIMEE

SEQ ID NO: 135638 - protein, 54 aa, Heterodera glycines
MPFKNIPWSMRHSIFSALALSQWNCFCRIHFFDSFRCRDFLFNADLLNTIICEK

SEQ ID NO: 135639 - protein, 148 aa, Heterodera glycines
MAYFAPFPPICLFHLIFIFQLLGPVFCANVYLKKQYGENEFRIESWGKTNCSLNGIDIAQLGIGRPCEEWPDFVNYWGERMLFMRDSKHFVDRPLLKDAKKVVDEFKTIFDVTEWNKFVVSEMNEAQVDKLAKFVQQNFGMADGALIE

SEQ ID NO: 135640 - protein, 93 aa, Heterodera glycines
MAPFIHLFWVIVNDVNDNAPRFGHILYLSLNRSTPVGSVVFRVRIEDPDLAENARNWFSLSGEGVEEAERLFSIDKWTGEMTLIRELTGEKVF

SEQ ID NO: 135641 - protein, 177 aa, Heterodera glycines
MTENLKCHKTQIYKASKFMRGIQLSESDKGKALAVKVVSTGVINRTIHLAKPTVMIKHEMKMLEFMNQHEDENPIEEHSVVKLYGGGEVENGSAFAMIYIMEFGDSTLDKYLEQWDEKIGGLNFKEGKPFESAWATKIKNEAQELLPKLADTLLKFHKSEPIKHISYRPISTHDSIF

SEQ ID NO: 135642 - protein, 88 aa, Heterodera glycines
MSCNVTMWSFSPVTPDRTRRNSCICAPTPSIRPRWTIHLIQCLAYGLHRFNWVVQFENGDVFFASILLRLCQTSGAVDAHNENTGNLS

SEQ ID NO: 135643 - protein, 158 aa, Heterodera glycines
MRAERVVTMAAAPNHHYQPNNATDDDEAVDADPDVAGSLSQRAAEIEKRREWRHARLRSMDVESKRTDELVRMITAAAAAAGAAGTASGGNGAATDSNKNNNNGTGSATATTTTTRALANGGGGGAVNFGTTAPTSTPTVNPSSNNSNSTPSPIPIAP

SEQ ID NO: 135644 - protein, 32 aa, Heterodera glycines; identical to SEQ ID NO: 127531

SEQ ID NO: 135645 - protein, 57 aa, Heterodera glycines
MPGNSVIDFTTPSTPVANQTLIKIAILTAQNSTDFGLPRKNSALRDSGGAIPMALEQ

SEQ ID NO: 135646 - protein, 200 aa, Heterodera glycines
MCRQIGLGETGEHFWIPPQFLVKSKEELIDYVYPNFQQLLGNDKELLNRLILAPHIDTCDEVNEIMMANVPGQVREYLSTDKPLDDRPLDIDEIESEVAALNRRTDSGMPPHSLRLKVGCVVVLLINKSDKEGLINGTRIVLEELGDDRLIGRVINSNAIGGQVRFFLERTRNVYEDKSPGGIKYERLQFPIKPAFAMTI

SEQ ID NO: 135647 - protein, 158 aa, Heterodera glycines
RLDQTHNPKGFIAFSSSVRAMSELLRISIAPMVVRLKMYIETAQENLGKELTDQSVRADLIAERQNLCKTISLLEKYNGKWEAIFLRVKGQALQDEEQNYRDFKPEGKAFMHWVDQARGLVDTIEGDLGLSELGDAIPQPNQPAQMCSRHQWCISVMM

SEQ ID NO: 135648 - protein, 124 aa, Heterodera glycines
MGQDSGTNDVQLTLVNGCPYKIYVAGAVQVNLTVNERQTKNVPSVSTAQRLWANTDCDSEGNSRYWTNCQSQGNSHSWALSVSILGQFSVSTLETITCLGIIVGLFFGNSRSGLIVDLENNSLS

SEQ ID NO: 135649 - protein, 112 aa, Heterodera glycines
MDRDRQTNGQRQTDKWTETDRQMDRDRLGALEQRMANDCNGQAERDEHNEQNGDEQGEVDANGGSQLIALCQRPLLLPQRRRCALRRRRLLHPQRVRPERTHIEKSNLHRPS

SEQ ID NO: 135650 - protein, 75 aa, Heterodera glycines
MPKRGFRFAFELPPTAPPAVQTHWLQQHVAQLARPHVCVDCDAGFTTARSVACPQGNATRGKNGAEGTANFEQKR

SEQ ID NO: 135651 - protein, 262 aa, Heterodera glycines
LKKEFKSDFEELIISLMQTPISLMQTPAVYDANQMRAALSGSNEAVLIEILATRTNRQITALKQAYEQLDRRHQHNQLEEDIKAKTKLLPKSVGVFAQLLSRRKAPASIVLAHDEAMKLFREGEGRRGVNAVVFNQVLATRSFAQLRETFEFYRQAAHHEIEEGIKQEFSVHNETGFLALIKYVRNASVFFADLLFNSMKGLGTRDSDLIRLVISRSEIDLADIKHAFHTLHKKSLEESIKGDTSGAYRDALLALVKGNTEQ

SEQ ID NO: 135652 - protein, 143 aa, Heterodera glycines
MCEKSLVCFDSVMNIFGLLLLLSAGVNSQMETIPIRLTGQKSSWANIQLGLFDQCLPSEESKTFGIEFRLPKNGGSCDKEGISICYASTLSSRTLNVMHTADEFSVTSELFNVPEMVRVLTEHRTIADFKKGNLFYTWLNQKL

SEQ ID NO: 135653 - protein, 95 aa, Heterodera glycines
  unsure (1)..(95): unsure at all Xaa locations
LIRQVSCYTLLSGFRLPWPPSCCLYQPTPFMRSNERALWHLNSTFGSSHIASSAYQKWPTWSSNIQXPGFRVKQPWLHTHLEFENRLRTFRPQVL

SEQ ID NO: 135654 - protein, 44 aa, Heterodera glycines
MNNVQQLRVQLEKIYENMGGPNLDADSNKVLNNLQKKVGDHQII

SEQ ID NO: 135655 - protein, 191 aa, Heterodera glycines
MHDLDEESRAKVKERFQAWKIGGGIVGSGSSAGYGIPALGSPAGHSGTVYGRPHLDRAESSKSAEQRARAAAAQQKTESEKHKKVEMQESKKRELLVLKILKNLVQTDAEDESENGSELDDFEKDIFGGMNSDNYDEALLNAQLILQSEKKVAKVVKAWKKLQQKKQNSQRTVNDWNSNLFGWGNAEQQVN

SEQ ID NO: 135656 - protein, 75 aa, Heterodera glycines
MTNFYCLYGPTTCIGTANETAVGKIMRFHNIDDIEMGPVKHDFSRELDEMGKRNLIEKALRFYSFKTRVPKCAYF

SEQ ID NO: 135657 - protein, 78 aa, Heterodera glycines
MVLLLFEGCVVCANQKMTASLSLRQYMPEQCTVGGEAWQLCFGITLMERLCAERKTTEPEPKENATTPAPVYDMQQLK

SEQ ID NO: 135658 - protein, 38 aa, Heterodera glycines
MYGLNKTEGPEENFKNMTEFDKYGFMHGVFVTKCTQIV

SEQ ID NO: 135659 - protein, 138 aa, Heterodera glycines
MPKCLRRVVAAYFFRRAKSVPLTVFRAIANFASVQIQRRHLRKSAALEGCRVPNSVQWVFHPLARHFLSCPVRVGTILSQSGVQKTPNFPFSALTQPPKPLEVLKEAFKMHLLGQLLCRLESADGRTLRLADFVEQSQ

SEQ ID NO: 135660 - protein, 88 aa, Heterodera glycines; identical to SEQ ID NO: 124691

SEQ ID NO: 135661 - protein, 195 aa, Heterodera glycines
KNQAYKVKLPHFILFFNKFIRSLKERFDIILSQNLIDLNKLFFFQTIQVIIYVGAIVSVLYFYGIIQAVLKRMAMLMQLTLGTTATESLNACACVLLGNAESPLLIRPYIEKMTASELHAVMTTGFACIAGAVFAAYISFGACPRYLLSAAVMSAPGSLACSKLLYPETEKSSVKSEIFIEFNDKTVQQRKQCDG

SEQ ID NO: 135662 - protein, 23 aa, Heterodera glycines
MRVCDPLCSLNGPFHLVAEIFEI

SEQ ID NO: 135663 - protein, 46 aa, Heterodera glycines
MARLVQIAQVVHDEGIHQPLAVQLQRSDYMAHWDPSDGSMALKQVL

SEQ ID NO: 135664 - protein, 29 aa, Heterodera glycines
MDENAEPLHPPNPLEIGIIGSSANNSLSE

SEQ ID NO: 135665 - protein, 132 aa, Heterodera glycines
FAMSAAATQRLQAKRQTLDEAYAPPANFLEIEVVNPITHGVGKNRYTDYEVITHGVGKNRYTDYEVRLRTNLPVFKHKESSVRRRESSVRRRYSDFEWLRNELERDSKIIVPPLPGKAFKIIVPPLPGKAFK

SEQ ID NO: 135666 - protein, 177 aa, Heterodera glycines
DPRIPCFECIGLIGIGRNRKLLDYLLWIAGIGRNRKLLDYLLWIAHPTHTEMMLLRITQGLMHLGKGTQTLNPFHSDRQLMCPAAVAALLTTCFAFIDGEKLILNGRQHYLFYTLVAAIQPRMLITVLQEQWRSSKRGVLSPERKAGEFVAIFGNKKKANLHLGFQIHVFVYILYHC

SEQ ID NO: 135667 - protein, 1038 aa, Heterodera glycines
MAGGGGKAAFNLFASRQDQHGPAAAQMLTRAGIAANSDMYTLDDVQRLQQWLNNQHGVGQIRLAVFEKEQEYRIVFKGDGLAARFNLCLVLERGHFNYIGRVEQLFDVPNYCIDCERRADARYHAFGCKVVCRLCLRYGPGYPWQTEQLPNGGSSARKCAECLFIFPNGGCYDYHLSNHSPAPMDGRGQRQRRPICQWRRVCRACGRIAYVATHQCHMTSQPTMESVGAAMGPTPSMSLATSSPLTTAQFDNVHRLLLTTTILMTTTTMKNCRFLNNRTVQKHVPLLIVAEVICERCLQAGISVSDGLGRRAPGCVCMTGMVRGQLFRQWSSPPFANAPGDNSASPVGAPAFNQRRFFFHSFDNDGNDPVDQFLDFLLQHGPKKAHTVCIAHNGGKYDFHLVLEALHRRNRPPKHLCTTGLKIYSMRLSGRNQRRITFKDSINYFFCALDALVKSFQVPDHLATVKPFFPYLYIRRQHLSQRLNGLPAQEFYAPDTMKAEKRAQFLRWHADNNGNGFQLREQLIMYCVNDVAILRESLEHPEAQVQCASWSVGEAHIEDSGYRVDGLWRREAPLRPLAIEWLGCYYHGCPACFPDRQQQLAAGRTAEDLYERTERRLFELEHDHGCEIHKVWACQWTERLRHDPDLKRRYDAVFVPCPLDPRNDALRGGRTEPFKLHHVCSDDEEIMCIDIVSLYPYVMATGWPEGCVTDEQQKAFVDDFERTEGIRLDSTKMEFNPGLRLIAKTLANSLWGKLAQRVGQTEIRYTRTPAEFHALLDDPTVDKLDFVHVSEHMDRCVVRKRPEFAKAPLTNCLPVAAFVTSYGRLHLYDYMEQVSAIVGAELLYCDTDSIYYVSKMGGPCVAEGEALWQMKREHTDRRIVEFVAGGPKNYGIRHTARDGTDERANLKIRSFRLSYTAQQLLTFEAMKDLTLATYNIDGPIDDALDNDDLYVYGGGEHRAIRVNFPQIDRNVYADLYTHEAHKDYRPFYAKGRVRPGMQTRPFGYLEDDGQPNEGQRTHRRKRNFVEQDPTQPGHSGWF

SEQ ID NO: 135668 - protein, 101 aa, Heterodera glycines
MTSFIIITIAFSFCAISMAHVPFWWEQLSDAEEQWRINTTINECCPPATYCCVNNLFVPRELDEMGMDRCIDDGTMGKEQSYNTIKCAQRKYLGDESTDIC

SEQ ID NO: 135669 - protein, 87 aa, Heterodera glycines
GAFGCVNEAKWTLSCAKEAEKQQGKTGKASKSSKRVAIKTFTNFADMEKEAGLLKQLDHPNILRMFGVTKLDDKNAMVIELMNLGDL

SEQ ID NO: 135670 - protein, 88 aa, Heterodera glycines; identical to SEQ ID NO: 124691

SEQ ID NO: 135671 - protein, 108 aa, Heterodera glycines
MPYNFETLLPLCSNEMDAPNLMNAALFIVKSTADVVQKCAALSRTPMEKFKILQGSDKTDKHRKFCPILTVTPHLRPGHLRPKGKSDICARTFAPRHLRLRLLRPSEN

SEQ ID NO: 135672 - protein, 944 aa, Heterodera glycines
MFENVEEAEKSGTRISLGQIEEELKAMQLIKDSALALLSPPISTNAIQLRPQQWREPKSKKGNYNSGKTTANQHTTGGKANQRKPTYPCGACGNSDHWRSDCRFFSAICHKCQKQGHIAKMCPQRSASTSNSRRQNRAVHTVKVTSHCLNVGLNRGHWWKLQVKINDNDCEMNGDTGAQATIITIQTWIKLGRPKLELSDIEMHNCNEEPFPTEGMFQCVVSCFDKPPKRLTAYVSSAVNYNLFGLPWIMAFDLIPREVMFPKVQQKKMCEPISIHATLAPMPKANIKDEASLIEALKTDFSEVFEPGLGECSKIKAHLILKQDAKPIFCKARPIPHGATEAVNAELDRLLEIGAIKPIDFSHWAAPILAVKKKNGKTRVCIDFSTGLNNALELNRHPLPRPDDIYAALNGASYSSNLDFRDAYLQMELDEESKDLCVINTHRGLFQCQRLPFGVKSAPSIFQHLMDQICAGIPGVFAYLDDGLIASKTLEGHISALYQLFTKIKEFGLRIQLEKCKFFQKELLFLGHIVSSKGIRPDPARSEAISKMPAPHDKTSLLSFLGALNYYGRFVKKMREILTPLDQLLIKDENWNWSEEQQKAFEKAKKIMTSDLLLTHYNPALPIIVAADASKKRIGATIGHVFPDKSEKVIEHASCVLSNSQQNYSQIEKEALALVFAVQKFHRMLFGRKFTLFTDHKPLLAIFGSKKGIPVYSASRLQRWALIMANYDFDIKYTNTASFGQADVLSRLANYPKPEEDVLIANICVETDCYINTILQSQTVHLTVTAQEIAESTTKDETLQKIVNFVISGWPTKCREPEIAPFHPKRNEILEIGGCLLYKSRVIVPSQLRGRILKSLHFAHPGIVRMKALARQYVYFSKWPEVYQMSSITAKSTVFTLRSIIHRRTIKIGLKRCCSLTGRRQIMPLMVILPINYSSDENSERNWH

SEQ ID NO: 135673 - protein, 261 aa, Heterodera glycines
MSQLTSDRAQRLKYVESSLRHSKSPIETFFIYAENPKHHRKQHGATKNIQIQKCYFAFQNILKCYFANCQFPKCRITKCWARKCKILFRCEVDLPDPACNIFHRNCVICQVEIGKDKSKQCFLSATRCSCYYCCDKKYAAHCPQGCKNCINDGFYEEGGCPENHTPMARLASSNYSSEIGLTENSPFVHSLKKVETARKHFDTVDADKSGAISMKEAIAYLVETKNGTSADHLAKNSEWFGHMDSNGNSQIEPVEFDRSLI

SEQ ID NO: 135674 - protein, 80 aa, Heterodera glycines
VLDEARDGVLCLDANASEIVTGSADGNVRLYDLREGRLFIDYMKDSVISVHLTADNQCFLVASMGGTIRLIEKTNGQLLA

SEQ ID NO: 135675 - protein, 149 aa, Heterodera glycines
MSEFGQDYDLMVTLVSGNRSMPNNPSVPMPPVLFIFAQWSNIGGPSQQFDANATDWFKGIAAAFERGGSVRLSGDPRDMDWNVTTPLSQMHLRWTFRSVREFAMPYEKRLYLSNWDSAELQKRGWSDWMAEQWNKFVGARNECNLHDDE

SEQ ID NO: 135676 - protein, 227 aa, Heterodera glycines
VGADVTFCTCSVVTICIISVDRYLAVTRPLRYKSVVTKLKVIVVIVLIWSFSLGILLATVRWESQQHTVENTCYVGDEIRYLAHSVVFAFFLPASVTLTLYWRIYSLARNRQRALDRGFLMILGHNMNFLTNTLSQTVVNHHKYRYHIYNSQIFTIIFHTQTALRVHIGKNNGMVEHQRRVLRTHERIAKTLGVVSCSFLFCWLPFFTLYLLSASSLLALARIIFKL

SEQ ID NO: 135677 - protein, 226 aa, Heterodera glycines
MTIASACVKNFALNHLKPNSLAIVPEKGYTPQQNQSALAIKYLDWYSHINNVNIQTAHSRYGEYVFKREGEVYQVDGYIKGTNGRRDKIIEVNGCVWHGCEICFGNMDEESRMPNGKTLREIREREKRKHKTLRRYVDLEVIWEHEINEELRRNKQMRGFFNNWKDNSPIRIRDAFHGGRTDVKKLLHTAKPGQKISYKDFTSLYPWTNFTADYPLGHPKIISIQP

SEQ ID NO: 135678 - protein, 49 aa, Heterodera glycines
LALIMGMYKGDCRRNWKRKNCLRSFLSVITDFYFHHFFLGLDHMRFSAL

SEQ ID NO: 135679 - protein, 93 aa, Heterodera glycines
LRSKSFSNILTLPIPSTIAFIHPIMSAKIIRVPKIACDLSLEKNGVSKNRNYAQKASQTILAHPIPSTIAFIHPIMSAKIIRVPKIACDLSLA

SEQ ID NO: 135680 - protein, 244 aa, Heterodera glycines
MGEQRDELVQRAKLAEQAERYDDMAKAMKKLVEMDAKLDEEERNLLSIAYRKAVGARRTSRRIITSTEQRPTLTKKQKQIANELKKKVEHDMEQKGSEALDLLDKILIPKVDEPVAKVTYLRMKADFHRYMAEIKEAENDDPQKAKQSYEEAWDIAQQKIRPSHPIRLGVALNFAVFLYEFMKMPEEGRKLAQKAHDDGNADLLADTSGDSYLESIGILEKLDENMRIWASTQERDGSSERGNF

SEQ ID NO: 135681 - protein, 84 aa, Heterodera glycines
FLCLNNQNPVTFSQILLILWLIHLLLMAHFIHSLLCLTLVTKLRRILGPISNSIWQFSEGRINYSLMFSINLLFLIIFVSFFFN

SEQ ID NO: 135682 - protein, 125 aa, Heterodera glycines
MDQSKALVNQNEDKLTLAIDFTVDEANTELKPLEFQWHGRVSDWIIANANWGTLTMKIEKFSEFTKEVGNRRNSEAVQMKGFEWKISAEITTDKEDGTDKNLGFYLLCFPPSKNGENMRISNCIH

SEQ ID NO: 135683 - protein, 140 aa, Heterodera glycines
MSEAENSIGTLCDYNKQMNYSWGFGNFISFEELMDPEKGFYTKCEDKVTLVIDVMTVDEPKMDKFMLDQSKSKGTLFMEIEKASEFSREVFGSDRKSETVHIKGLPWKIMAKILTKNGSVNNEKWLGIYLSCGAPEEGVN

SEQ ID NO: 135684 - protein, 214 aa, Heterodera glycines
MAPALDLDPNTVALAEQERQRTLVFIGLPESNAIRPSERVQEDREAATKILDHLEVEAQPTAVFRLGRYDPQRTTPRPLKVIMPTTTHQHMALGGWKRERARLRSLQNLNRLFVRPALTKEQLKEEYEARFRKRQQNPAPVAPAMRPRQTNVPTPVKENGPKPKEASDDISKPPEIFDQTILVCYEALKSLPPNDKIVHQIQSLEKQYPRLFNK

SEQ ID NO: 135685 - protein, 52 aa, Heterodera glycines
MARKMQFFEVNRHYQAGMYGFIWTKNAKYGFIWTKNAKYGFIWTTKLTKSKF

SEQ ID NO: 135686 - protein, 91 aa, Heterodera glycines
ALFEWMNEMSNEKLTMTANDGSVCQWLMKRCQIEGTESIQWEDENLGNLNTVIFSISDLQSCIVPLSPPPPAAEEEEAGQSSEKGASSDNE

SEQ ID NO: 135687 - protein, 23 aa, Heterodera glycines
MNNFISGKKVKKDDETDWIEESK

SEQ ID NO: 135688 - protein, 114 aa, Heterodera glycines
MPKPNKCCFKVVVVVVGVVVVVGVVVVVVLVEVVVVVVVVVVVVGVVVVSSELSVVSFVAELSVFPSVAELSVFSSVVAGIVNLDREKRSLRAIKCGVGQNVVSRNVVERIFRP

SEQ ID NO: 135689 - protein, 62 aa, Heterodera glycines
MAFMLFCSIIASQIFYVAYAPQCVDEIFHNKWIKGSADEFNLCNEGVRCYSMICEYGTQLKG

SEQ ID NO: 135690 - protein, 277 aa, Heterodera glycines
MSGSLSVGSSNVGIPNCRVPKCRVPKLQIPKSRVASSRTQHALFACTAFMGLINEVKNEGIGWVKDQLKSYCRLVPFFSSDCYRLVADALLNTIVNKLNCIKLEKLNPTIICKEHGMCNEEQGNSTARLLHASMGPMAAPRSRHSILLPNDGPVMPPGSLEALAEFNYERLLMDQLGDDSIEGNYWQKSGGKFILRRGKNFKISCAIRFDRKLCFVPGDVITVEHPGVLKCQAECLFGSARFLIKHTYHSNKCFAWLNDGWAAITEKRCDQFQRSYW

SEQ ID NO: 135691 - protein, 181 aa, Heterodera glycines
MKKFLFLTIIILLLLNTHSSNKQRHRKQREVSALARLTVALSRISTYIKAHPYITASTILMEMGSVSLNIYLLIQEIKACEEKQILKDFFPFVLTLNSYEFSVNVDDYNPGYIFGKINTEIGRPVEEICFAGQPQKINSLKNSFKAPNKVTRKIRNRKDDLGILLLYAIRQQSRLELFECP

SEQ ID NO: 135692 - protein, 420 aa, Heterodera glycines
MSLEDHNYCGELGGNETPTKRRRRNDDDDGEGEPKFQKNCIRTLSADKQYSQKFKVQSVKSTFIIENLPANPESMLRALFAHCMSTALDESQQNGITPDQLGATISSDLLNPSIWIPIRRISDNTADSIMNRFLEVAQSKSREGSLWGSPFTVTITTLDVAQLPQRQQVRGSGKRTTNSVQHIVKESALLRINNSDDAYCLFYALEASRKYHIKEMSRRNFCYYINHQNGRRLEDVFGLMSSANIRTDLREYDAVVYVPIVVDYWNRKYATANQRFKVFIFGATGTYRPKFQYGPDNYNVEIPLYHHNGHFDGIRCGVGKAVFGRDYYCFSCECPYDNANGHTLQCKAKCINCGRIGAGRQQRQLLQRMHSMWQGFHEPRLFQSSFVEQCVSTVQKMQTVRSCVECQTKPTKRTQRTRLR

SEQ ID NO: 135693 - protein, 341 aa, Heterodera glycines
MYFKSATAILFFLIVFIGIGKCASANANKTKSRGAVSTTTTAITTTTTVNPQKIGVPRLASSTRMGKGSVTGKPLKIVTANTNTNRNITTANTNTNRNITTAKNNKNSSSKITTPTTKTAKLVVDEQLPVATLLPTLIHQMCKDRPGEENFYQQAVCWALFALYLMVFVSLVLHQLCSICWQSRETARVFRGCFPSDQLPAPDTLRYPAALVVNNDPHYKQGSHWCAIYAPSKMEEAVIYFDSLTKTIPPIVKTSFMDKFPKGFVTNKHPYQSPLTTTCAIHCIVFIYHMALGHPFDAFLRILDASESPDMYSLCVLNKMINPYLCARVPILPPFGKGHRE

SEQ ID NO: 135694 - protein, 346 aa, Heterodera glycines
MPVPLGALPGAFGLNVQDKEFFPHLANVEANYGHILQSLPPKADYLYGGMTPDRQRRFDQWYAEHRHQQFDLCEQLAAYCTNDTRILIEALVAFRTEFLTISDPLERHGCLDDDNDDEDEEEEVDDDNAFEVIGGGIDITWEPMTIASASMRHFRLNHLKRDQLAIVPECGYDTTNTQSLVALKFMDWYAKKNGVSIQTAHSPGGEKKIGQYTVDRYITATDTVIEVNGCHWHAHDHPRHRFQPQTVMANGKTAQRIREDDARRMAFITSQVQQVRVFWECEINAEKRNNDEMKRAFAQYKDSGPIRLKDCYHGGRVGPQRLHYEVPEGWRMKYYDVRSLTPTRMP

SEQ ID NO: 135695 - protein, 310 aa, Heterodera glycines
MAMKTHASGFPDEIGTTEEDQQQFIEECEEKFGIRIERENMVHNKAKRTIAKLCNNSLWGRFSLRNGLSKTIVTDSPAELRALLDNPAVEVSSVDQLTDECVLVTYAAGNEWVEEHECSNIVLSLWTTSVARLHLLRLMQTVARAPNSVLIYTDTDSVCFAHREADGCPLETGPHLGDLSDEWPDHELVEFVSGGCKQYALRMRHRQSGEEKTVLKVRGITLSADACQLLHFDTFKRSVLRYAMCHSNEDDDEEGDDIFSILIEYPNFLRPNIKDGTVISVKLSKRYRPIVTKGVVGMNAIVHDFGFIKA

SEQ ID NO: 135696 - protein, 221 aa, Heterodera glycines
MHLLIAFSRILDCSPDEVGARICCSVADREKLLKEFAHRKLITTYYDRNGFTHTLFFAGLTEEGANSVLAYGNLRRPYNVCVAAHYYSRHRIMLKYPHYPCVIEKCFGQRDDGPLHKYYPLELVKVVDDCFPPVYVNSLSQKRDGASSSSSSSSSSLLRNLPSPSSDDADYDDHGLWFGSMPTQNSVAETPPPPSCGFVKGIIWIEKEQIKNILSQAVKHD

SEQ ID NO: 135697 - protein, 145 aa, Heterodera glycines
MPEESNNNSTNYNNNNISNINYNNENAQLWKLVRKKYILTFNLCYGCSQKLFESTKNNNNISNNNNYAFETDQFGGVKVQFHMCKGCVWLNMKLSDLNSAPKSGNNHMKTTRNFPNTNNATYSTDNNFGSFFNNTNPQNNANEWI

SEQ ID NO: 135698 - protein, 175 aa, Heterodera glycines
MNSQQRQIEREQLRARLNLLVDEVDMVVQGLINNYRSDGLINEEAAIGQAPETVELQNVTIGSHLPAQQGEEWEIGPHMPLQQHYEHQPWELDPPMPEQHLEIGPQLPDAWELVPYQPPPQWDQVVHVEQQQQQQQHHQQQQQHQQGAWDEGWEEQLSPNAIAQIQDEADGCARD

SEQ ID NO: 135699 - protein, 43 aa, Heterodera glycines
MNSERRRNEREQLRARLSLLVDEIDTVVQGLITNYQDDGLING

SEQ ID NO: 135700 - protein, 238 aa, Heterodera glycines
MDLNTLHMDMMELASSAGDEGTVGKANALLERAGDKLDLSMEHIGILKRRVQLSNQLAEFKDRRANASEKIIQMETIRESIGDKAEQVKQLEQLIAATGCELSETERQLRTMERSKQAKIDELETTVQQNLRKMALDVDSINGTLGKITEMGEVFLLLLTAIVICECGAGRKNGQAGCERHTVGRGGGGATGRNGAGSKRGGGRGGGRGGGKGNGRGGGRGGGGRGGQALQQPQDEDE

SEQ ID NO: 135701 - protein, 299 aa, Heterodera glycines
ERTASGGGRRRVGSTAADRSAQAAAAACAAGEEATDEVDNNEEERQNMAVVTKRMAILDLETSGTPARIVEIPENVTVVEGELAIIKCVVEGNPAPTIVWKKGGRKMPLTDDRVRCQTDGDTGHVSLIISKCRPQDGGEYTLMVKNAHGKHKVGAKLLVTPAAESNLDIRAKQKKRGTGISNSEQEKQRQRSDAEPKSKAERRKRQVYVVEEPRDTFVVPLNSQHANEKENATFECEVNDKEIDVKWFHDGAEIGMDGRHFKFYLDFKDVNPSWSLIGCALIYGITPHLESFSIHLSLL

SEQ ID NO: 135702 - protein, 121 aa, Heterodera glycines
MKERWFQNNIHPSSGGFGLVVITTDPNKSILNFVVFNLLNFLYCLLVDSNDCDSIGRRLNLGVSRYRISGIFIPVFAKRRNGDPRTATPEDGDKNTPLRRRMDSTTKIVKLAVSQSNIGLF

SEQ ID NO: 135703 - protein, 458 aa, Heterodera glycines
MTSKNNRGNFRGNGNEKQRYRINMVGDEQTQSSSSRRSPTPTFTFLTISMVLSILFGTFSLSNAQYQICSERVQTTAILLPNITKCSIPKYQKVAENKITLFLPVRLPKQFAVYKCYQKLTKICTGNFLFLWKGVKSQETTVRGVSHETCQKFKHKMGGSMNRLSENLWATENPEKLTYAWTGEKCETTVNDFLEEGKGGILDFFLVTSFGHNLNPYKNWEELPRKTFIWEIPEPNEKYWATHFSVGEFKAEITENAVVIESEQSVFYFEKEANDEREGIIGVPENAYKMSNDAFIVLSKTEIREKRETPKIEPKRKESPEQNATVSVLPKSTVKLVKDSQQKISNPIKILPQSTQSTVITTSKPQVKLSTTVMPVTTSTTPKPITVQRVITSTSSPNVNYDGHFETISVKRPQNERIYQAKGREFKNLGSRSESTTTKKPITVTKVGTNISKKFDRV

SEQ ID NO: 135704 - protein, 64 aa, Heterodera glycines
MFSPISDLITSVTFSNPEKIFELIVGNTVISLAFCVTFVEIVVTEVLVTMGFTVEVVMVVVTIF

SEQ ID NO: 135705 - protein, 19 aa, Heterodera glycines
MAAANPALRWFANKIKKYM

SEQ ID NO: 135706 - protein, 78 aa, Heterodera glycines
MVLMKPNLAMKAIKRKEGWDDRKGIRVNAKCAGGKACTVITESDVAKQKFAQTKRQKTTLIQKLSRISLVKTEEPISS

SEQ ID NO: 135707 - protein, 179 aa, Heterodera glycines
MGGLNGFDVRLIFDQHNTQQEMAVHCWEDCMPRLANNIQCGQIVEFSRLKVREQGKNAKGFFPFNLLYNNESRHRVLSASGHIGANLASSSNTPIIVEAAVEQQQPGMNTLSNVVRHNSSSSGANNQHIHGQNSTGVVTADDGQSEGEPDEAAAATNLTNAGARDADVEEGTSETVSGN

SEQ ID NO: 135708 - protein, 71 aa, Heterodera glycines
MQIVPFELVNEWTKEKLTLAKAKENEWYIDWIMKRSKIIGETAAVNWKDGNWDNNCNCVFFWLDSDTNCIV

SEQ ID NO: 135709 - protein, 56 aa, Heterodera glycines
MDNSKNGETRKEEEKEGNSIREGGETEEKERKRKNSAEGRGENEAEKRKEQQQIGT

SEQ ID NO: 135710 - protein, 153 aa, Heterodera glycines
MAVMLAKLHQQQGSDIDSGGEGGGRASLPDSPIPSASAFTTTLAASGGLNLDDEFFAIPSSEDSPRKLLYFIGLVDILTYYGVKKRTEMAAKTVKYGSSAENVSTYAKRLLEFVNRNVVCPTQQSSSTADAFSPLTIADPPPSQRQIGRTELM

SEQ ID NO: 135711 - protein, 75 aa, Heterodera glycines
MSSAQPLQMRQQTAQMGGFAHNQQQMMQQQQQNMQQMHPQQQQQQMGMLNAQQQFMMAQQQQQQRAMNQQQHRQY

SEQ ID NO: 135712 - protein, 38 aa, Heterodera glycines; identical to SEQ ID NO: 130624

SEQ ID NO: 135713 - protein, 135 aa, Heterodera glycines
MEILNKLKSEKRKKAYNTFDSQDVSVPSTKKAQRCLTCQIGRDGVLSTWYGRKRKESNEKAVPAEKKTKNFSKKAKKIENLNKFTSEKRKKAYNTFDSQDVSVPSTKKAQRCLTCQIGRDGVLSTWYGRKRKESN

SEQ ID NO: 135714 - protein, 48 aa, Heterodera glycines
TFSNFHLINLRRILPFLINSLVKRQKNSSFKYAYLNYFHCFPFAYDHT

SEQ ID NO: 135715 - protein, 51 aa, Heterodera glycines
NRRCCKLFFLFSLVNLFKFSIFSFFSKNFLFVFFSAGTASDNVFYLFRKIN

SEQ ID NO: 135716 - protein, 35 aa, Heterodera glycines
LPFLINSLVKRQKNSSFKYAYLNYFNCFPFAYDHT

SEQ ID NO: 135717 - protein, 136 aa, Heterodera glycines
MDTFETKEKFIEVEEEIGKVSNHMERYETFTKVRFGKIVEKMKEEVRKITENLDALKGRVQLLEFEQDNPEGFGEWFDDGQSQEHNRLPDDKGATEGEDNIPIGDGSCEIMVADPFLGGITPLERVMMETQVYHSH

SEQ ID NO: 135718 - protein, 660 aa, Heterodera glycines
MRVPRSNAHYIFLMRAPNDMLSIRNLASQMFPREQGFLMDAYRQACALPYGYLLTTRRESFLPPKMVKREQKIGERVVHNYDYLKKLGKTTSEKKRRHLLNSAGCEELLTLVEICLNVLNGSFCLSRKQKQRLEPFAKDIRQLARVRSERARETKNDDDIAERTNLGFVKRQVTAAVQKRKGNVSERNAMYNQQLRRYLKMRKEHKERPVRVQLSNGAQLLNKTVETGVQVRPGPDEPKDKSVMVTDEDEEEEIEVPKFLTPTSQTQGSRRSPRTNKKAAKQQKLIEKKDHLLAIIMSDPQRFGATDRGKIINPKTGREFIDSDLAWSIERLVDPRPENAPSPSGTKELKRKLAQNPLASSLLNRLFVGSGFVGQGSDVQADLADFQALSRKNSGYRYLLLAVDVLSRRMFGAPVKSKRPVDMKRAFEELFEQMPRVPDTLYTDCGLEFVAKPLKEFYAEKGIQKFETSSKKKAAVAERAIRTLKTRLYKYFSSNNTSVWVDVLPKFLSAINNSVCRATGLRPREISDTNAREVWKRVYGEGLVQSNKTPKIRAGETVRIPEPKHIFEKGYIPNYSDHVYTVDEARSTNPQHYLLKDYYGTKLKRKFYLPELTKVQVDESTMYRIEKKYKEQVRDGKREMLVKFIGFPEKYWVTNEEINE

SEQ ID NO: 135719 - protein, 110 aa, Heterodera glycines
MDHLCCANPLAGIAEKGVWPCTSRTQGVRTVAAQQRNGGGRVQAQGARHHARLGCLRAHNFREDEGHGEEQAGTAGQQRPLQLPNEELSDHQEGRDFHRPLGQAVQPDRE

SEQ ID NO: 135720 - protein, 270 aa, Heterodera glycines
MKIIFISIFLIVFSSTTKNVRGVLIGGNINNRGTQIVGRVTVNGPSKDDIGRNINNGGFSEKFNRNDSDNEDTAEGNSSNDSEIEKGAKAKGVRHNSKNKGISESSRGSGDFGHWKGWKDFDQKFNHKDSDSEDDESNSSNDSGGGDVQEKTGQPTRNYWKYLKKVPVPFLNTFRNSFKGNSEHVAGEERPSRENVLVPNINTGGGSQHIAPVNFGEGAKGNQVGGNYCSGGSQNIAPVNLGAGLNLARVGNNKNSGGKQTIGAVTIRRS

SEQ ID NO: 135721 - protein, 77 aa, Heterodera glycines
FPTIPTHWYEEKANEHKQNTVKQREQKTRAGGARPVGWSNWEKERSERRNERDSQPKEWTKNASEWHREGQQRDIGR

SEQ ID NO: 135722 - protein, 60 aa, Heterodera glycines
MAEQFAQPETQEHQVKEAKEARVDDRFLWKITRGQFMFAIRLKGRRDQRAQTGPSGKGAG

SEQ ID NO: 135723 - protein, 35 aa, Heterodera glycines
AAGPGGPAEHRTGPPSSGAFVHWLTNWGAIDLVAE

SEQ ID NO: 135724 - protein, 125 aa, Heterodera glycines
KKKGTEIFYFQPLDAHSLLRPEAFEAWFYMYRLTGDKQYQDWGWDAFQAIERYAKRSNGDGYASVQNVKRIPVQHRDLMESFFLAESLKYSLKYLYLLLSDDQQMLSLDQWVFSTEAHPLPIRTF

SEQ ID NO: 135725 - protein, 51 aa, Heterodera glycines
MPRDEAENVRHCCCCCFTPLNILRTHQLFMLNTSNIEPYYNTLAKQHLVCS

SEQ ID NO: 135726 - protein, 94 aa, Heterodera glycines
MPKITDTTMTSSMTAARLPKRTLAAIRVHPTVSSSPMPCRKMSRPTMCPMSTQPWFWVYKNDGSTTATTMATTVFVGELGGVVVVVNCRQKCRE

SEQ ID NO: 135727 - protein, 25 aa, Heterodera glycines
SKSSLTTAQKNMFFVRFRPRGAQEK

SEQ ID NO: 135728 - protein, 23 aa, Heterodera glycines
MPLAAARHRNGAKDGGAAHLYTP

SEQ ID NO: 135729 - protein, 91 aa, Heterodera glycines
SARGSSDWRRQRAAIRARQRRQRQWAPRTEATATTMARATIAATAETEEVSGDCPVVVVGDGISAADAVLHCLSIEQPVLHIVRRTERELR

SEQ ID NO: 135730 - protein, 129 aa, Heterodera glycines
MVMVPESEYLALINLLKGSSGVSPPLADPLQGEKTLLDVQIQRNLADPKTNAEIKMKRHSWLYKRRHQLKDIIENKPQKVIVESGSVTAPNVAPYMGIQKQQTPSNVNAQHRNSTSIQSYGGALISPNR

SEQ ID NO: 135731 - protein, 26 aa, Heterodera glycines
MKASFGRWADRMKECFGDGTFSLAPP

SEQ ID NO: 135732 - protein, 101 aa, Heterodera glycines
MVAPQREQSVDDSGGPSAAETVPLIEHQLLMTDQDQLNNNIVQQQNLYQQHQHNFVAPSILVSSSSMEKSASAQDLAGTAAALIRRHRSASKVWTQQITEY

SEQ ID NO: 135733 - protein, 112 aa, Heterodera glycines
MFLYDGTQQWPELLPTLCQFLDQNQQHDANVFEGTLGALQKICEDSADRLSHEEINQVVARVLPFFNSQLARLRALSVSTVNCILLVQNESISAVIDPFLECLFRLANDQDQ

SEQ ID NO: 135734 - protein, 51 aa, Heterodera glycines
MKWKKEFGMSWKITEKEKMNKMKMYWQIKGENQKISDENIAKMLKISEADP

SEQ ID NO: 135735 - protein, 299 aa, Heterodera glycines
ERKKKRGGGTTDEKQTEGESDEKQTEGESDEKQTEGKSDEKQTEGESDEKQTEGKSDEKQTEGESDEKQTEGESDEKQTEGESDEKQTEGKSDEKQTEGESDEKQTEGESDEKQTEGKSDEKQTEGESDEKQTEGESDEKQTEGKSDEKQTEGKSDEKQTEGESDEKQTEGESDEKQTEGESDEKQTEGESDEKQTEGESDEKQTEGESDEKQTEGKSDEKQTEGESDEKQTEGKSDEKQTEGESDEKQTEGESDEKQTEGKSDEKQTEGESDEKQTEGESDEKQTEGESDEKQTEGKS

SEQ ID NO: 135736 - protein, 66 aa, Heterodera glycines
MRDVVVQRSGTVPGFCIRHQIYDSSVSYEVSGSLTDYEYDIHFDKFRKSGPEFEQTSRIFKVMLEL

SEQ ID NO: 135737 - protein, 40 aa, Heterodera glycines
MGYGNPSLFLLLWLPHEKKNIISFLKKKFYYPFFVHYLAH

SEQ ID NO: 135738 - protein, 47 aa, Heterodera glycines
MCHQIGETRRPLLLCGCQREMPPPQMLFCPQQSRFEFSLILLMQKRK

SEQ ID NO: 135739 - protein, 97 aa, Heterodera glycines
MYYCFGVTVQQDYDQQMEMVLVPFTTVLNKPKYQAIVAQLNTMPKSAADCATFGYDVFLVDPLIEYAKHFALEGMFKAYKKVQFNFCQFSKRNEAKY

SEQ ID NO: 135740 - protein, 103 aa, Heterodera glycines
MAPKIGIRVGLFFLLPSLLLLPSAGNAQYYSPPMMTGSGCVATGNKLYSHGKVDDAYASLEQAVQRNSTTLPTIPPRPQLPTFCTSNQVPILGTLSSRIFVYK

SEQ ID NO: 135741 - protein, 101 aa, Heterodera glycines
SADCKLSLCQCFSIFSKLFAIKRWNLVSTWSWDVECDTCAICRVHLMEACLRCQADSKAQECVVIWGECNHCFHLCCMSWVKQNNRCPLCQSDWAVQRVGK

SEQ ID NO: 135742 - protein, 159 aa, Heterodera glycines
MRGLQIPANLHNLSERYQLAENIRTGRQLAPTFLFHFINICGSVFTPFVVYFHLITDPILLNLIVFTYYSVLSLSNALIELTLMRRHQILKKNALKILAKFLPNRCFSNNRITDSGKSQKMVQRIDGQKRWEKPQQKRDNKSNEMTEMHFKKLKEQWQK

SEQ ID NO: 135743 - protein, 33 aa, Heterodera glycines
GLKLFLTFFSFSFIRQKSIIKWSNDYQNDQFHF

SEQ ID NO: 135744 - protein, 153 aa, Heterodera glycines
MATKSGTVQEVEEEQDEGRQQIVGLSADETAEHLAPPAERQKMPTAAARQTHFAVKVYRATLAGFRNRAEYVKDDFRFKNPRRVMKIWAEKEFLNLKRLKNANIMCPTPIKLRKHVLLMSMVGETYPAPKLKELEWVDDAMRRDAFERVRRGH

SEQ ID NO: 135745 - protein, 98 aa, Heterodera glycines
MAARHFKKKTPKEELPKGAAEGDGEGTTERMPSTTEEAEDLEEDEEERHNATEAGNSVVNTHYCYLESPFNDDLFAIMVIESYCPRIVFSNFSRTAGI

SEQ ID NO: 135746 - protein, 18 aa, Heterodera glycines
  unsure (1)..(18): unsure at all Xaa locations
LFYVRKIAKYVNXICIKN

SEQ ID NO: 135747 - protein, 52 aa, Heterodera glycines
MKREFNPILRGVKVVFRAKMRNAKAKVPKKRNMRMRNANAKRESESLSLIST

SEQ ID NO: 135748 - protein, 62 aa, Heterodera glycines
MVIRRGTKVIIRGTTVIRRGTMVIRRGTKVIIRGTTVIRSGTTLLGENFWNNFFHIDVRKPK

SEQ ID NO: 135749 - protein, 132 aa, Heterodera glycines
MDSTKPIVFLKVSLKGKPATVVGRVDTKTSVLSKAFASKIGDIDSNLRGHVTLPTADVPVVGWVDDVSVALLNAEPYVFAQRFGVVADHHMIAFCERKVDGVFGADLLKRMGILNEEQIDAIPLASGDVPEE

SEQ ID NO: 135750 - protein, 161 aa, Heterodera glycines
MSTNSQKYVSVEQFQNGQKALLERIGELEKQLKERPHKQEEETEPMAKKALVDEQFAQLQNGQKAILERIGELEKQLKDRPHKQEEETEPMAKKALVDEQFAQLQNGQKAILERIGELEKRGQPDNYVSVDQFKRRIEAIETFFYASICWGCCLNLKNKNT

SEQ ID NO: 135751 - protein, 96 aa, Heterodera glycines
FVAFIYFFFLLPNFLPIFLQVSLFSFLLQFQFVQLKVKNQTINIYSNEKNKYEEQLSEKLAFIMINHLSLLNNSFTSHFQTNFLCSFDPPFVETMA

SEQ ID NO: 135752 - protein, 27 aa, Heterodera glycines
MLRSFSRLTGAGECDSFAYIKANNFIH

SEQ ID NO: 135753 - protein, 79 aa, Heterodera glycines
GKVNVKYIIGQIQNMMLKHRISGSFLRIEFSYKKKQLHFLPFLFDFLVKKIIETEQLFFSSYFLPMFEWFYFLVYKILN

SEQ ID NO: 135754 - protein, 162 aa, Heterodera glycines
MEHLADLRTVRRTLEDVEKLSQLSSGTRSGTGDSLPAGDDLAIRRTPPAQQIHDPTDHQSDEWLFGQFPRRFEQLNIQEGRRAVTPVMRSVAQVAQYPVLNAGGAGANIREWVNQASDRRERRQAHPGLRKASSSPSLLKGGIPSQEGCRGLPSFGRELSRE

SEQ ID NO: 135755 - protein, 421 aa, Heterodera glycines
MGENIEKIRPKYRNIQNPLILKAGALFESDNVRFEETIREYRSKMNNLHTPILRLVEKPNITEAIKLVKSEANETLGVIIGRSGDWLEIVKKIPEKTKEAISYLKGLSYALIAIPLLILLVLMGYIGIKYRLIIFAGVRAGSVLARVLRAIMGTKKRSTRVLAVPTAPELDSIDEEAYVLDYLPPRRVAAITNDPRRLPSISVRLNDLLTAALVDSCASVSYCRERTARKAGLKILEQNDGKGNLTAANDSSIEILGKTMAKLRIEDNVTGNVREWEVVLLVSVDEHCPGPLLIGLPLLMELKGVISLGEKRVRLGDVWTNIVSVIGSEKPKPPSVILEKTEVLEPRSENILSAKVNECFPMEQNFLVKGIKLKYPGIIVGRTLVSPGNSKNVTIQILNAGNSAVKLYGKSHLADFGNRSN

SEQ ID NO: 135756 - protein, 63 aa, Heterodera glycines
MLIKKGSNTKLIRSLLHGDLISPFWRLGTRENVRNILSKWGIEPRRKIMKGRKFNHYTTCACV

SEQ ID NO: 135757 - protein, 17 aa, Heterodera glycines
HKHLFDLFYHIHNLIKI

SEQ ID NO: 135758 - protein, 25 aa, Heterodera glycines
TCTCGVVVKLSTFHNFSPGFNSPLG

SEQ ID NO: 135759 - protein, 39 aa, Heterodera glycines
MELARERLAKEQETLKERQIEEEQRGKTSQLNFNQSMAF

SEQ ID NO: 135760 - protein, 68 aa, Heterodera glycines
MSQMMASENKGLREEKGALEEKLNELRQRLHAKDSRVHRLAELLGEFLEKYRQNAQRARHQIGRQTEE

SEQ ID NO: 135761 - protein, 46 aa, Heterodera glycines
FEYPKRTLEKIDFFVFGAVPPSRCAQIYGETESFRNSFPIACTLIL

SEQ ID NO: 135762 - protein, 29 aa, Heterodera glycines
NGTFTSKNDCHGDELQKKITSQEQATIAV

SEQ ID NO: 135763 - protein, 110 aa, Heterodera glycines
CLPRLLPRHYTLCCYLSAQPHKQQQLRFRFVYSVLQMPPSVIIDEYHPKGAVQIPLFAPSFVPSPASMPSPDSTMVDQPDHALLLLNMPLMMVGPGTGISCNEWAAIVDE

SEQ ID NO: 135764 - protein, 99 aa, Heterodera glycines
MPDRTGLTLCQIDIFKEKRTNVKVFWLRPSRTGSGQKFAGPDRIGIFKNDRIRDPVSHNPVNLCNPVNPYFSKKSPDRIPDPGKSGTGSGPVRSLINIL

SEQ ID NO: 135765 - protein, 41 aa, Heterodera glycines
MILSFLPILIAFIAHFRLFSCLSPKGEKLTDKTEKEIPLQI

SEQ ID NO: 135766 - protein, 136 aa, Heterodera glycines
MEDPSNRNRLAKLLRFHSSADSAKQTTLEAYVERMKEKQQAIYYIAGSSREEVENSPFVERLLKKGFEVLYLTEPVDEYCIQSMPEFEGKKFQNVAKEGLKLDEGSKSEEQHKLLEEQFKPLCDWLKEKGLKDRVS

SEQ ID NO: 135767 - protein, 25 aa, Heterodera glycines
CFMSKVNGIIYALWIKGPSINSEAC

SEQ ID NO: 135768 - protein, 152 aa, Heterodera glycines
MANKLQFSLFVVLVLCYGSTAFPRLNQQQQHKQKQKHGENDGKQQQMARRVPFPHPGQAPEYFQEASDKAQMEYKQIFEDEKGQMPKGELKEKLKKWAENNGIKDEYEMSQEENEQKKESFHKIMSANLGGDALKVFKKIWEITHTDELSRQ

SEQ ID NO: 135769 - protein, 58 aa, Heterodera glycines
MNSDMDCDELTKQCIEDGGKPSKCGKCRGQRDIPCNHMESDQRSPVQMKCHWTDCASV

SEQ ID NO: 135770 - protein, 52 aa, Heterodera glycines
FFIFFFFNLITQRSRLIRSSPNFAGKLLRTLQMLINFLRIFCLEEHSSSHLP

SEQ ID NO: 135771 - protein, 40 aa, Heterodera glycines
SPAVSLMFRRCGRLLCSLQLLKWVQLRDQCRHVQQPCDAR

SEQ ID NO: 135772 - protein, 48 aa, Heterodera glycines
MILLLKPLIVQPNVRYHSFFIRTSRLYRTQRIGCPTAAHQVVVGTQTG

SEQ ID NO: 135773 - protein, 146 aa, Heterodera glycines
MLVGGGKATTNLTDSSGDDERQRKESPPQSHGLTSFPETLNSTNFDEKEMKDVQLYDENTPTSFDGKKDESQNEGGTEESLAVSINGQFGKTVVIHATDEDPSETFERLKEACINATLPYKDIIDSLFNTVRNGSIILSRKLQSNA

SEQ ID NO: 135774 - protein, 48 aa, Heterodera glycines
MKIWPYKTTVECVSCHCGRRVRSHSRDGHVGHGLEENGHNTLMAFLLD

SEQ ID NO: 135775 - protein, 159 aa, Heterodera glycines
MSAVVQSNNALALPTRLKQPLSPPPQIAQDFGSVDGRQLVAFVRKTNESGETAVLPVDAISFLRRLVAQFGGHHLEPDDLFLGTLPTADNRAMALECLQMDDDDTHSQQTKHSRAKEVIDRLGLVANCRHVFAGSNKWVKTRFFNFQLTLVFRISKKIS

SEQ ID NO: 135776 - protein, 42 aa, Heterodera glycines
CCAPPQSCCALPGRTYVPSQLAWTVRIWPTYPNKKNQAHPGT

SEQ ID NO: 135777 - protein, 22 aa, Heterodera glycines
MARKFQKANREFLGLSNNTKNV

SEQ ID NO: 135778 - protein, 42 aa, Heterodera glycines
  unsure (1)..(42): unsure at all Xaa locations
VRNTTSKYTIPPEYTSXWLIKTPFDQLLLLLILFFLQNLNYK

SEQ ID NO: 135779 - protein, 38 aa, Heterodera glycines
MAKVPQISIVSPAKIKQMEKGDQQIGEEGKKGTEAQIE

SEQ ID NO: 135780 - protein, 62 aa, Heterodera glycines
MGARTKEKRLKVSPTFAHFGALSGHLEVPVMLFSPGKYPHGFLGPGRAMWTEDGSEFVDFLT

SEQ ID NO: 135781 - protein, 192 aa, Heterodera glycines
MQQLMAYQIVVVNQAFPAGNETKDRFNRAKLLNVGFVEMLKQFCNHSAQCWDCVVFHDVDFVPENITNIYQCDRNAPKRLISATDEWDNYKYEFKLANKSVLFVHGPIGHYKSIELAHKDNDTTNAEMDCACRQLLINNLSNTWKMDGLSSLNYAHLSTTDEILYTNITVDLLMDESLKKGHPCGKKINGIY

SEQ ID NO: 135782 - protein, 24 aa, Heterodera glycines
RTLSTAVRQRSSKIYSMPQILWAG

SEQ ID NO: 135783 - protein, 24 aa, Heterodera glycines
RTLSTAVRQRSSKIYSMPQILWAG

SEQ ID NO: 135784 - protein, 65 aa, Heterodera glycines
MVVTPGGTSDNYCSSAAELEQYAEDGGDDCGDGDNDGGDSVIVHRRCSSGLSTEIVNDAMANAIR

SEQ ID NO: 135785 - protein, 24 aa, Heterodera glycines
MIAAVPFDLLLVETDSDEVSIFNF

SEQ ID NO: 135786 - protein, 697 aa, Heterodera glycines
MAEVGFRLKPEKCRFALGEIRYLGHLISEKGVRIDPKDLEPIQKIKKPKNITELRSLIGVLSYFRKFIYGFAEILQPIYELTKNESTTEWGQLHEQALEELKERLMTAPVLAPPRFGHPFVVETDASTKAIAGCLLQKNKKEEIHPICYFSRVLTKHEKRYSVVELEALAICASLKNFRPYLEGAGRSTVVTDNSALTSLFRRKDLEGRLSRYQLAIMAFDVDIIHRPGKRNQFCDYLSRYLHDKTEQEVNSLKLDQKIKREEMITAQKQDKESQRICELIKNADEKGNSEGTFGRWKLFEGLLCITDRGEWKVYVPECMRQRLMSEYHSDPFQGGHLGEKRTKEKIRRSLFWEGMDKDIQNQVKNCDPCQRRKIIGVNKSVEPICPIEPAARPFERLHLDLMGPLRMTKGGFQYVLMIIDSFSKLMAAIPLREQTATIINSAFVDKFLCLFGLPKIVVTDCGTQFLSATFESLAENWGFKHQTTVPYHQSANGQVERYNRTLVDMLVTTTGGKDWASALPMLCFAYNSSINSQIGHSPFYVIHGFDPRIPSEAIFDKKEEQFSDMAIYVQELTKRMGEVRKVVQERLNKCAGRMINQQKWTKEINWMEGMLVLKTKNDKKHKLEANYEGPFRIIKIEKPNLILRALNPDDESFAAHMNQCKPYYTEPEEATEKGVGPIPKGPRKIGDRNIEESDEE

SEQ ID NO: 135787 - protein, 171 aa, Heterodera glycines
HLKDIETFLKTMAEVGFRLKPEKCRFALGEIRYLGHLISEKGVRIDPKDLEPIQKIKKPKNITELRSLIGVLSYFRKFIYGFAEILQPIYELTKNESTTEWGQLHEQALEELKERLMTAPVLAPPRFGHPFVVETDASTKAIAGCLLQKNKKEEIHPICYFSRVLTKHEKR

SEQ ID NO: 135788 - protein, 249 aa, Heterodera glycines
MTEEEKEEKTKREEAQEAARKEREEVGKKANQKGPLIGADAKKLFMTTVEQPYDHGRVIGQVFDPRAEVEAPWDMTKALANREKEDEIRVKRKDEREEGWRNFVGGERRPETGNESWKERQRNEGNSGERWRERPRVVDAFARNTIWSAENDVSTNPGIPPEGFRGRRPTPNPCWNRFRKRRYMSPIRYNTEQHGVGTQTPTWPTTESSVEQLRSIRLMLDVAIAGLVQRNGKKEGEETENGEDSKGPK

SEQ ID NO: 135789 - protein, 109 aa, Heterodera glycines
MKSEKNDVGHRGSQTEAAKKTQQSRFIVLKFSPTAVPGSVSAPCRPLQNIFINLLGIYMDLIVRMRGRQFATGTEEGTTRVCTALAELARRWTTLCAIVSTDTQVGEAK

SEQ ID NO: 135790 - protein, 163 aa, Heterodera glycines
MKRGGKRRRIKGGKEESERKGRRKRRGERKEGKGGKRKDEEEEKRWRRRMKRGAKRSRIKGGKEESERKGRRKRRGERKEGKGGKRKDEEEEKRWRRRMKRGAKRSRIKGGKEESERKGRRKRRGERKEGKGGKRKDEEEEKRWRRRMKRGGKRRRIKGGKEE

SEQ ID NO: 135791 - protein, 281 aa, Heterodera glycines
VVQEEATPEAFCRGVQLSSEIAEFFANDQTDLVSHQIATGNSAPIRSRMRPVPYAYREKVAEMIQNYLGRGIIRPSSSPWASPIVIVPKKDGTLRFCVDYRGLNSVTVKDAYPLPNIDNILLALGGKKIFSTLDFISGYWQIKMSPESIDKTAFATEFGLHEFVVLPFGLCNAVATFQRFMSQLFEGLINDFVFIYIDDILIASESWEKHQEHLKIVFERIREAGLKLKISKCHFSANELPFLGHILTTEGIKMDVNKVRPIMELPIPTSKKALQSLLGFL

SEQ ID NO: 135792 - protein, 95 aa, Heterodera glycines; identical to SEQ ID NO: 125597

SEQ ID NO: 135793 - protein, 16 aa, Heterodera glycines
MATVLWRHRRVNFPRI

SEQ ID NO: 135794 - protein, 63 aa, Heterodera glycines
MHILKSLTVIIVFVMFGWTLNGLSTFYVPLLKLSPENSISFAAGLVQLTLVASASNTPVLYVV

SEQ ID NO: 135795 - protein, 66 aa, Heterodera glycines
MKNILSQWGIEPKRKIMKGKRSKIERNVKRYKIVLNLISFTYGLINNSIVYIGILNEFQNKLHLKF

SEQ ID NO: 135796 - protein, 42 aa, Heterodera glycines
MCPRPWGWPSDECTRHGQPNGGRPTEKRTKKLIVLALIIRSG

SEQ ID NO: 135797 - protein, 132 aa, Heterodera glycines
MGQTKRLESVGRKRMGAFGSVSSYGGYGVPSPIGTGEAEEQAQADGVTAFGPGFLSNQLGEGPLRVGRDPPGEKRASKKQFGRLFGLRDGRDSAAQSDGFAGQPSAGGYKCAKPAKDVPRLSDRPKDTFAWL

SEQ ID NO: 135798 - protein, 28 aa, Heterodera glycines
MFAFFLAYHNFIEPETVLKRTKIYLRVE

SEQ ID NO: 135799 - protein, 116 aa, Heterodera glycines
MDRIDLSQWLQQKCASDAASVHVVSRLCSNRAKVAEFTAFAFRESLKMSQQLRGHFCNLKMPTEEKGRFEEINESKQIEFIGGMSEIEIAKNKLLILVGGLHFIRFEEEFPEVLRI

SEQ ID NO: 135800 - protein, 348 aa, Heterodera glycines
MQADVITFCRWLHRQLVGERNMQILWDRMNKLFDLEHDALFVCLEEQNWDAMETILKLGRIFTKTEQFMDDEILGKKLGQSSNYEQEMLKSKWEKAIGQKGDEKGGEKATKMEGWNKFLNKIHQAEIFGLMGRHEHIMDKFREFYTEEIFSRFSLFVKISEFINEWETLYGMDEHKKNAKRNKTGKIGKIGKTEKSESEKEIEEEKIAKSNNSKGRQKEKNQNFGCPDRKTPSELSPFNEENFILKADQSLASDFIEFFQVENDDAQIIMNKIGQCFSIELSTILWALTNFLQQMEKEMEKGFTNQSKSVQICVAYHLIEYTVKSEAKTLDQWRQSLLYEEFIIDEAS

SEQ ID NO: 135801 - protein, 228 aa, Heterodera glycines
MQCFLPCDNLEKEDSIITDYKKYLSKPIIQGMVVVHVEKLLFYAEDDSHKIFEIQAVNWHFQALAMEIVEEALPNLNIAKLDEEHKKIVAKNGKMKGIDGTKKALCYHYNFVEEIVANGYKLAKDKTVNSFDTFEVPTIKWLDIICNSKDEYEKTVEELSSSEQKLSIIHAENLARAIRKSEQFRHFLCSKDMDDLQIIVKPRIEKLVGTLELMRLEEQFPEHLRIGI

SEQ ID NO: 135802 - protein, 157 aa, Heterodera glycines
MQNLLPAEADDGRDNNPIRDIRRRVHFSDRSQRVLDDSDHLLKSIRTRRAAPLATSMSMSTLPTSLERNGDQSLQDHARKTLIRAQRSVSPEEPLLSASTSRYLQHTPKFPRIDFDDWIEEETQAKKPAWKVLQENVKSSYNKVRNVVAHKTISLIL

SEQ ID NO: 135803 - protein, 37 aa, Heterodera glycines
MQSGGDSPDNAVLMIASKRDNYRREQRSTPNIGNELA

SEQ ID NO: 135804 - protein, 114 aa, Heterodera glycines
LGYVIGSSATSLAKSALGSVDCPFCWQWGIRVTPLLGFFCIITLLIFVKEPVRGQSEQSVAQLMPTNYETGTISPSSRRTVASAEAPNENIWKEYYHRIRTHTKSYCADIGHLI

SEQ ID NO: 135805 - protein, 112 aa, Heterodera glycines
MNYYFLADLRNALADLRNALADLRNALADLRNALADLRNALADLRNALADLRNAHSGGFTKRPRWRIYETPIVAEFTKRPSTISNGQTKCVFLLLSEAVERSVIKINIYSCE

SEQ ID NO: 135806 - protein, 277 aa, Heterodera glycines
ATNLAAATALATSAAAAAAAASSTSSSCANNSNSNSTAQQQQQQHSHSMKSIEQQMMLLQQTMALGGLGNSSGGTASSMMNHPYASFLYQQNPAELFDIKNGQQQSLFGTVASGGGGTSNTTNSLSASALLSSVTQQQQHNQQQHQASSSAMVEQQAIAALAAAAAAAGFPSIGSMVPSAAATTGGGGIAKSGASASAADMNALSSAAAALNSADLYLAAMASSFQSLIGGGSGGNAAAAAAACANPSAMANNIFMPNQQQHVRNSAAAMATNPASA

SEQ ID NO: 135807 - protein, 24 aa, Heterodera glycines
ITGVSIIAVLFLVFLMPSQNLVRF

SEQ ID NO: 135808 - protein, 192 aa, Heterodera glycines
YVFLFCLAHFMHGVGATPLYTIGVSYIDENVGPLLSSLYIGVFYAFAIFGPAIGFFASSKFLLWHTDFLVWPKITKIVWKASAYETDPKWVGAWYLETDPKWVGAWYLGFLLASILGLMAVFPTLIFPKLLPESLKWHRTRLQEETLGQKKRSPECCGIPPSAIEQQSFLALGAPILMSSALKPRSGPIWYQ

SEQ ID NO: 135809 - protein, 1074 aa, Heterodera glycines
MSNFNQNDFAITSVHQMRNRPRNTIGEIAEVRFAPLEEVERPDRVLERLVQRLFDRVLDGRPAPMLIGLQLHPPTFENPFTIPLRPPEQNNPAAIADLIQRLNDQSAAGIDLTGGTTVTKVLAVWPMQSDHSESGRAGACSLEEEHRLVNTVRSLIRIKNPNDRLCLARAVLLGLHDWRSRSPGGGGPTAFKSFANRQHTHGPEARNLLRRAAIPRNKHMYTIDDVQKVQDWIDQRYGPAEIRIAVFEKEREYRIVFKAASGEAAKFNLCLLFENQHFNYIGRIEQLFRVQGYCIDCERRVTRWYHPQECKVVCRLCLRFGAGYPCKQQQQQQSRADGSTGNRLCRDCQFVFPNDDCFAYHLSNQAPASMYNQGGRTFRPICEWRRACRQCGAITYANYPHKCPAQIGQTEWVRCARCSGPHQSGDPCFIQPLKDEPMRRRRRRRGQQQQQQNNNNDDEDDDDDNDGNEEGDDDHGHDADNEEEEEVGTNRSVRLCFFDAETSQDLPLQLRTKVVQKHVPMLIIAEIICEACINEGISVHSGVGQYANGCVCGPPAGPRGRRWCSPPFLNAPGDDNALPANVHYNPRRLFFHSFDDATNNDPVDDFINFLTGSGPHGVKTICLSHNGGKYDIHLILEALHRRNLPPKRICTTGLKIFSMTLKGNHQRHVIFKDSLNYFFCELDALPRTFGLNAEVATAKPFFPYLFIRRENLHQRLHGLPGKEFYQPDHMKASKRDSFMSWWEVENRSARFQLREQLILYCMNDVAILRESVLQFRQIIAENTRGLDPFKISSTAAGLALATLRRCFLPMNKLVNAPEGGYLRGRRASAESARYIRYYEMTHPGVHVRSAQWSIGEANVEDTGYRLDGLVTREPPQRNLAIEYMGCFYHGCPTCYANDRQQKLAGGRTAEDLYERTKRRLFELQNQHGFELEVVWGCEMKQRLRADPEFRRVYNDSFVPRPLDPREDALRGGRTEPFILQYTCSPDEEIILIDIVKKVRRNKKYFFIVKAWMNASFRDAFLRVLPFRKWHKNAISMKRKTTEGKARERDKGEKRGEDKTKGQTEKKRRGGTEKR

SEQ ID NO: 135810 - protein, 37 aa, Heterodera glycines
LISDHFAKFSSDRSLFPTPLLFSIRPSVLSARFPPLF

SEQ ID NO: 135811 - protein, 159 aa, Heterodera glycines
MTHPGVHVRSAQWSIGEANVEDTGYRLDGLVTREPPQRNLAIEYMGCFYHGCPTCYANDRQQKLAGGRTAEDLYERTKRRLFELQNQHGFELEVVWGCEMKQRLRADPEFRRVYNDSFVPRPLDPREDALRGGRTEPFILQYTCSPDEEIILIDIVKKS

SEQ ID NO: 135812 - protein, 209 aa, Heterodera glycines
MDAILATDWLHNAYPEQKMTTGNEEEDKATQEGQMSWLKIIEEEEERARELQNDQMELEQVKDNIELPKHPQPQTKCSCNEKQKSVPLIDFLCKHYKCSMNELHVLLQTLSKRREISEMLRSNLHLRTNHLRPAWKNIRVHCNELTIHPAQTAYAMRGYLGITVRVYYYVKHGIKLAYPQLPCVLQFGGGDHSSLFPLECLSVIVVKEP

SEQ ID NO: 135813 - protein, 56 aa, Heterodera glycines
LRGVGQGRAPNARFTTTHQPNGRTEKTLRRISVSIKKFSFAEKTKPTFGLQHLNGP

SEQ ID NO: 135814 - protein, 184 aa, Heterodera glycines
MVPEVFRQFTFHLGNKNNLSAYITVDEEVIEVEDAKVEQYKNKSLSGAKLRDFVGFWVLGLDMIPWDEQTMRLFVIRHCNCSLEAWFLRPSDSEPTDPKKASMGTGRFEDRYGQHLNNLNPACVKFELRNFVCLNDCLRGPVNWTPENWTPSGKMDTAGILDIKGKLDTGKVDTKFFLKNEPRN

SEQ ID NO: 135815 - protein, 249 aa, Heterodera glycines
MVQEGAGTSSSSSKTSKDYVRKLDNTIEHVPRFQYTKVKSRFSIEDVPANPEGLLAGIFQYSIDAAVADSHERGGHKCHETYCQLCNTYHNPERGCFIQPIEPKEHDPYRIVAFDLETMQHQPVNPREPEKKEHQPNFIAARVACPDCIESGKWRRATAGCQICGLHRTVAFCQRRFMDTQVDKQVVADNPLEAFVDWLVYQLPKKYDTYAYSHFGGRFDMVLVFRELFRIGFNPEMLRRVQCYFSKFG

SEQ ID NO: 135816 - protein, 36 aa, Heterodera glycines
FGFQFNVYPFYYKFVVNRLNGKITEHAQGMVSKIDG

SEQ ID NO: 135817 - protein, 82 aa, Heterodera glycines; identical to SEQ ID NO: 129243

SEQ ID NO: 135818 - protein, 50 aa, Heterodera glycines
LQIYWLKLHMRYISKFFDSVRRFDKDGFRFAISRSTFGNWSRIFSAITCN

SEQ ID NO: 135819 - protein, 76 aa, Heterodera glycines
MTSTSADISSDFDQPNQKQDPDDSGEFQRDPDEFVESIQNEVTQWLDELRRIKKPGERDGPKLGTLEKSLNDLQAA

SEQ ID NO: 135820 - protein, 58 aa, Heterodera glycines
MLENGNGMLNIRIFSSYFKSFFDQWSIAFVLFFETFMEKNIYFVMWSAGLNLITLRID

SEQ ID NO: 135821 - protein, 38 aa, Heterodera glycines; identical to SEQ ID NO: 130624

SEQ ID NO: 135822 - protein, 38 aa, Heterodera glycines; identical to SEQ ID NO: 130624

SEQ ID NO: 135823 - protein, 177 aa, Heterodera glycines
MYRAKNACEELSEILEEIKRKRVEMAESLQKIAVAARENKERVYVDFCTQLDIEAKINRAVIKKNEWQNKKEQLEDIFDINPQNSLNSTILTPRNQPIKRVKIPQIQLKKFDGSVEKWIPFWETFRVHVHEDDSVTKIEKHNLLESNLEGEAKELIEGIPISEDGYQIAIDLLLEKY

SEQ ID NO: 135824 - protein, 18 aa, Heterodera glycines
MLILEVKPANFYALVKLI

SEQ ID NO: 135825 - protein, 47 aa, Heterodera glycines
MNIIDKIGNNIVRPTLDFLSKTKLSLSHLSGGFDFDGKMPQKEIIGC

SEQ ID NO: 135826 - protein, 280 aa, Heterodera glycines
NLRIKPFRKSIYFMRSSRSDQFHFSPKVNFIKNGSIIKIRWKLNKFPAQIRRDLSCGELICTNENTAALLVALIVQSECGDFSPLDYPDAGAYLAGTHFVPHQTPTFAQAVLEQHRRLIGMEPAEADFVLLETARRCDFYGLRLHPARDIEGTEVALAVAHMGIKVFHQMNCVTTFSWAKVRKLSFKRKRMMIKVHVHPDSFQFYKETIEFSFENRDDCKNFWKKCVEHHSFFRCTQQQQHHQQHNLFTRGSNFQYRGRTQKQLIDYVREHRKRREPFQR

SEQ ID NO: 135827 - protein, 156 aa, Heterodera glycines
TSNIPRGVGGCPPPPGMDPRKGKGKLMCIKVRMLDDSVGVFHLGVGYSKAVKYKKSIMLIIQHKAAGQALFEEVCRYLNLLESDYFGLEFIDSYGNRCWLDKDKSILRQIMVAQSDARFFFVVKFYTPNPAELEEEYTRYLFALQVNIGKFHQKRL

SEQ ID NO: 135828 - protein, 189 aa, Heterodera glycines
LLSEKGVRDPNKVSVKFTAPKSLQELKSLLGALTYFRRFIKNFAHIARHQILTQEKIKEHWGNEQSEALETLKNVLTTAPVLQSPRFGKPFIIECDASRKAIGAVLLQENGQVAFASRALNRHEANYPSIEREALALVYSVKEFSPYIVGSGITKVITDCSALTGMMKAKGLKGRLKYQVTFQSYDIEK

SEQ ID NO: 135829 - protein, 33 aa, Heterodera glycines
WLSLFLINFIHIQMLSSMIGRAVRNRPFIFEGF

SEQ ID NO: 135830 - protein, 95 aa, Heterodera glycines
GGRCAIDLLFLREFLNLYSIPEKCLSLFFEKFYTSQKRLRMRRRAVHNRHFISQRIFIFRGYPRKMAISFFDKFYTHTNALEHDREGGAQFTFYF

SEQ ID NO: 135831 - protein, 95 aa, Heterodera glycines; identical to SEQ ID NO: 135830

SEQ ID NO: 135832 - protein, 34 aa, Heterodera glycines
KMAISFLINFIHIQMLSSMIGGAVRNRPFIFEEF

SEQ ID NO: 135833 - protein, 67 aa, Heterodera glycines
MEQYEHGMEQQQNTDEGAEPMAVEEHTNDGENEQLKGGAELDGEKPKQRPMVDEQNVVGAQLLFNLI

SEQ ID NO: 135834 - protein, 169 aa, Heterodera glycines
  unsure (1)..(169): unsure at all Xaa locations
PDLTPKWTPFRAHSRAYRLCKESRKVVEFHWCLEAPTYATPLMILHKVRLESSSTGSSFPAKFAKPVPLAVVSLDSRXGTVGISLIHSCASVVSXTRHLATLRETXVTPAVYPRLIKVPWLNIQSTEQKSDSDNVHKDHPSPLFXLDRRITRARASSKLVVQRQAKRIP

SEQ ID NO: 135835 - protein, 155 aa, Heterodera glycines
MKVFLMISLFVFLIIILININYVGSEKNKLEQKSFEEIFGEKWEEKRNEEQKKREIIGKYNKIKEKIKQKGRKYPRKEWSKIERKIAKKLGTNRQNIYEWIKELGLNQKTKKCYKSKTDEEKLEIVQKFIEMSNEYKQKGRTYSKKEWQQNYEEI

SEQ ID NO: 135836 - protein, 514 aa, Heterodera glycines
MSSSSKQGNPIERMKHLLSSGEDADIQFLLLSAHKLILKHASEVFEAMFRFDSQKEKTENDFLSLKIPSLAIITFQLASVESAIVEVPDVEPTAFRVMLSFIYSDDLSELDGDNAMAVLYAVLYAGQKIWSKLILIGQKYGIDRLVSPCLQIPIPKLSNVFLAFAQARLFDLEDFSHQCLRFICQNAVQLFGSEEFLQIDQNLLCDLFEHDQLMINDEFDLWNAALNWADEKCRQNAIECSDENRRAALGPALFKIRFPLIPPYAFVKAIVPSGIFTNDEFVGVYQFNFYPNFRGVPELYPLKLPWHGRISDWNTAKGNRGTLAMEIEKFSEFAREEELMDPCKGFYDKDGDKVTLVIDAVQDYLDSAYFPVNEQLFSSEFFMEILQYLCFGKYNKNLAPNDILIHTTNNDVCAAVSKLCGRVIEYVVGSSNPFSVRKRISLGTMQPTDLPACLKQPARVMVRGGIHPQIRSDENEVYHLYNSNLMKKVGYISMFYHVRIGDCVWLSIDLVLYY

SEQ ID NO: 135837 - protein, 139 aa, Heterodera glycines
MKAKEKQQQQQHNQPKIDDLLKDLARLQLNQSQQSAGVLMTVPSPQTTMSCWPKFNSIEFDGVVTVDSGSSTRQHCGGNRLRRGATCEKKNALLDCIALAEESAKLLSADARIRCLLDLGEELEAGFQRILSGFLKKEK

SEQ ID NO: 135838 - protein, 99 aa, Heterodera glycines
MSVSTPIFPTRPEWIIVQNCSGCPGLTCAVLAAILCVRRPRRRPQCSEPILRSYRRGKEDVVIELGSPMANRDNDEDGAKKEISEQELEVILEGNEKEC

SEQ ID NO: 135839 - protein, 139 aa, Heterodera glycines
MAVCKCKVCDECRRKQRLHEISERKKIIESCGGDHHYIKMIELRMRDLKLYKRAYRRIKSVIDQVVEGPFHVKCTSKCKEEFTYYLIKWECCTEDYGWGVGCTYAEISDIRQNELLAYYDQERVLGDIIVGRQGRDAPS

SEQ ID NO: 135840 - protein, 113 aa, Heterodera glycines
MRFEVVSIAEKEQRTNEDGTKIKLRKFLKDSFISSGFLLNRRGTVNFCFRLSLFYLYYRQITFSAEFVKAKSRYEIQEIVKVICDCPFDVVKLTKEEDAFAVCSSESSDGFSR

SEQ ID NO: 135841 - protein, 200 aa, Heterodera glycines
KGEGLSAPKYCASNVYYACSGGVSTKLNCPKGLVFDQANQVCNYPSDCGKKQPPQPQPPSKGYGKYGRGKRDASGAPPAPPPPPPPPPPPPPPPPPPPAYEPPEPPSYGAPPQPPSYGAPPPPPPPPPPPPPPPPPPPPPPPPAYEPPEPPSYEPPQPPSYGAPPPPPPPPPPPPPPPPETSQPKDERAVLPLPQPEPTA

SEQ ID NO: 135842 - protein, 98 aa, Heterodera glycines
MHESNGHRIAVEADEEEEAAIADEERIEREKERTTYKRKIAIEPPLKFTYVNCFKKLYYDYNKREWKEYVQQERAGQKLCRLKTVSPSHMQLFVPFIN

SEQ ID NO: 135843 - protein, 47 aa, Heterodera glycines
MAPFEYLFGSKVFINRGKLNKLMANSLFECADTPLAFLWRRAAPSTF

SEQ ID NO: 135844 - protein, 34 aa, Heterodera glycines
LISGIYFYQSPSPRPEFEQKFEKSNFMNFEFYIN

SEQ ID NO: 135845 - protein, 210 aa, Heterodera glycines
MNLIIFFCFIRLMPTTFSAKLWTNTENDSLIDSSNRSAADAHLSNVLPSANGDKIMAIQIKTDQKQIDQFLEEIYDECSEKGEKNSQIINKILIIQRKKSLEYNKMRTDEQRIEIVHQICEMRNEFDENGKRKYKNVNEIAKILDVSLANIYRWMDKFGLSHLKKDLPHTKKPRHRTSEVWTFFEQMPNSLNAPNVARKFEFSGTDRHRI

SEQ ID NO: 135846 - protein, 95 aa, Heterodera glycines; identical to SEQ ID NO: 125597

SEQ ID NO: 135847 - protein, 53 aa, Heterodera glycines
MESLDSPAFKLEADESDESGDYVQINKKMRESPYVKKSPDDAGPYVNSPITLD

SEQ ID NO: 135848 - protein, 63 aa, Heterodera glycines
WNWIWSSVHSTITRQCLGVDFHLCVALRGLQFHKIGVPAMVLSCDRNVEANESFFQQMHKLFM

SEQ ID NO: 135849 - protein, 73 aa, Heterodera glycines
MRGGSSRASTPLQSLVQSESKQPLHTQQIPAIYHGHIPTEATSRLRHHLAVEMEAEPRRYGLGMPTCNILKCD

SEQ ID NO: 135850 - protein, 92 aa, Heterodera glycines
MPMPFNAAIGQQRDRRYVGSANWPFPLEFVPVPMPSDGALAFQSPAFSTGDVVGCGDVSVPSTKKAQRCLTCQIGRDGVLSTWYGRKRKGSN

SEQ ID NO: 135851 - protein, 21 aa, Heterodera glycines
MRTRPIWQVKQRLLTSQKKML

SEQ ID NO: 135852 - protein, 95 aa, Heterodera glycines; identical to SEQ ID NO: 125597

SEQ ID NO: 135853 - protein, 408 aa, Heterodera glycines
MKTRPFPIGTPSVWTGEQLWHQQQPQTAGGHPHTDCAGPPPPVLRPPALPWCRPEDNPFRGFLFCRVLPPSADELGDREPLLPYRTQADGRLTFGLCARCAELRQQRTCRHTERERAWTAAYTHVEVNRAMLLGYRVLQVHEVWHYEQWASPESGNGLFSDYVNTFLRLKAEASGWPAGCDDEPARAEHVRQFGEQEGVHLRRDNIGHNPGLRQLAKDLLNSLWGKMAERPERDEVVYTDSARAFHELLMDARQEVVSFTHINEQLDRCVVRKREPFARAPEHNNLAVACFVTSHARLNLYEWLEEVRRVGGRALYCDTDSVLYVRRLGAAGVREGNALGDMKRELPGRRIIDFFAAGPKNYGFQHVDARTGQDLRAERKVRSFELTYAADQQLQYGRMRQLVINHFG

SEQ ID NO: 135854 - protein, 221 aa, Heterodera glycines
MSLPGGESHPKSLPLNWFPTVNFSIVNGLRWAITDAFVRLPFRATPKLASKCLLPGSCDPTDANSCDLRKRELCLRTTPQQSQSHPQVQQVRLPTAPPATDQSYRKKHRDTETYETKNPISYVSSQLPDYTCQCVSGEKRHPITGVCLRNECLRKEDNDCDTHAQCIDTDEGFLCICLPGFMDNSQDKLRKPGRVCTPLVDECSSGIAKCSPHAKCTDTPE

SEQ ID NO: 135855 - protein, 238 aa, Heterodera glycines
EPMCGGDGSADDQSQANSLQNDPKFYHRLIEAQKFAYAQRANLGDQAFVPEAKKLAKHMTSNTFLHNVHKKMLDKAMPDEHYTDDRPIKADKDHTGTSHTSILDADGNAVSVTSSINQWFGAVIQSENLGIIWNDEMEDFSFPDVKNWFGYAISPTNFVAPGKRPMSSFSPMVIYNKHTGKVKFVIGGSGGAKIPSSVAKTVLHVLCLNQTVKEAIDAPVLHNQFTPNHVIYENGTPP

SEQ ID NO: 135856 - protein, 52 aa, Heterodera glycines
KLIKDLNENFGHIMKSYDNNNVVVQAIHVADDGFIYANGDFRRRTYMHPAGF

SEQ ID NO: 135857 - protein, 111 aa, Heterodera glycines
MDEAQRLIKSELNVPHDCFTDENGKFKLEYEIENKSREVARWRLPPVHLYIFGASVWTKEYVHVTDWHHVHIFDLKNGKKYALSADKVAEKLYELMRSRSRVRFADSDSDY

SEQ ID NO: 135858 - protein, 54 aa, Heterodera glycines
RKGTHYEKKIRVDDWDNHYIVDLATNDVQDVLKQNLDLEFLKLRDSVASGESWL

SEQ ID NO: 135859 - protein, 75 aa, Heterodera glycines; identical to SEQ ID NO: 127026

SEQ ID NO: 135860 - protein, 108 aa, Heterodera glycines
MYVNQSRTEIRMEILSEKCQNFSIGEVWECDVREELKKNKEMKKFFESVPDKGPINPRDAYAEGRTMPFCLYAKATEEIEISMFDIISLYPFVNYGKNLLAFLILPFT

SEQ ID NO: 135861 - protein, 86 aa, Heterodera glycines
MVVPTQAPPVTAAAEGTFRALPLPAPADPDLQSLTFEASMAVDKALLKWKEIDPQVANWLNNFKEMLNRLGNDADKYRPRKPPRAN

SEQ ID NO: 135862 - protein, 211 aa, Heterodera glycines
MLAQIWQLADVNKDGKLDRFEFSIAMKLVLNCLSGISLPSVLPESMLRIGGGMPIPSTPSSYSLSNGGGPSTALPSSARGVLGESQLPTNILAQIWTMSDVNKDGCLGIEEFCTAMFLIEMVKEERRRAEIERREREEAERKEHERQELERRREAEMEEERQRELERERERAEQEQRLKARREEIRERMEQERIRELEKIRIRDLGVGIRF

SEQ ID NO: 135863 - protein, 62 aa, Heterodera glycines
MGPNPKPGQKNFVLNLRIATGCYGWKFSGEFGPNCWASCCAERNGHMYFMGVKMRDDHQGVI

SEQ ID NO: 135864 - protein, 67 aa, Heterodera glycines
LVGRSGDDKYKYSNDVSVAPPIALLPSPFPRELYEQATDAQQSLNELYYRIACDHEFLMEAYKDVIK

SEQ ID NO: 135865 - protein, 267 aa, Heterodera glycines
MNNFDQLKSEQQEKLDDQMAEMEILMNGAQEEKNNEGTEQWQTEEKQWQSVKEKIKFKKEIFENGKMLLTKASANDFDLIIKENLFNLHEAAIRKLTQFQPFIDKLKIIEIEPKRVELILVKNTEIFKQLSQKPVEIPKNEQKLFTEEAFELNLVHNYQKLLSEEGRPIAQSLLTQIGTDAIYFHHKILLHDYITNVSQMNAPNAQFKESFAAIRKKIDELALSEALNDNGEKQRKIFLMGMFIKKLSKVNLTSLAMSDELMHLKTV

SEQ ID NO: 135866 - protein, 82 aa, Heterodera glycines
MSDTLHFLFVRVADHESAINFDEFRIPDQDSNKNPNSKFNLKINFELNWPKLRHIRDQRLRKLQNACSHVFLHEICFKKSTT

SEQ ID NO: 135867 - protein, 266 aa, Heterodera glycines
MPQINFVIILFIFLFVLIDGIDEDLFDDLWKNQKPSTSKNFKKQKFGEINAIKEEIIVKDEIYNQQKANKIEIEDTKPKELQKIKKEKTLEEQNNNLNRKLKLPRKEMELLEEESYENEFNEEADQNVSSTDQSNSGNDEDYNNLNTEEINEMQIVNEFNLRNNELRKENVYNKRTNTQFECEIAKKFDTNPDTIYKLKKELGQKRVKTEESEETKMELIRKFDKMRKEKICGFKYDEKKRSVIEREIANELGIKRNKIYNLKKEF

SEQ ID NO: 135868 - protein, 47 aa, Heterodera glycines
MHAIRVRTSGSRDEPKWQRRQKPDGPTKTRDRIRTRSVYVLLRIRSP

SEQ ID NO: 135869 - protein, 46 aa, Heterodera glycines
MALAVNFAPCRTPSSALSPLSSVVTAIFPTTLIPTLNQSLSLKRNE

SEQ ID NO: 135870 - protein, 47 aa, Heterodera glycines
MGFIRKLILTNMPHAYVLSLQLGSSVAEDIGRGYFANMNDEVAAVCQ

SEQ ID NO: 135871 - protein, 17 aa, Heterodera glycines
MFDRARQEKATVCTKFA

SEQ ID NO: 135872 - protein, 61 aa, Heterodera glycines
SPLKIYYHGIAEKLLACTRSCMVNYVISITLKSVKRGVIGGYPTFGDLQLWDPTVDDLDIR

SEQ ID NO: 135873 - protein, 35 aa, Heterodera glycines
SKSSLTTAQKNMFFVRFRPRGAQEKNSLLPKNWSP

SEQ ID NO: 135874 - protein, 62 aa, Heterodera glycines
MLINFGGYIRILVRFHQLSSQQKKLKFNKNKRQASANLLILIGRQFDELERQTIYFFVVTTN

SEQ ID NO: 135875 - protein, 44 aa, Heterodera glycines
MRQKKLKFDHDDVPKLCDEVSEKMVKVYEAISAEVRTASKEAAH

SEQ ID NO: 135876 - protein, 56 aa, Heterodera glycines
SNKFVLKIFAIFLFYFGFHFLPCSVHPCRHCIGIYLIFLKKQIRNANLSFCRSRNL

SEQ ID NO: 135877 - protein, 85 aa, Heterodera glycines
TFLQVIVISLFNSIACVIYVSMQLVRISKTYIIVGTYAWLFSHALCYAETSAEMLLAINRCMELLRPQLAHAIFSGKVLSYTAFH

SEQ ID NO: 135878 - protein, 18 aa, Heterodera glycines
YREAIPEGFGLPINLGAS

SEQ ID NO: 135879 - protein, 104 aa, Heterodera glycines
MKLSILTTFLLLLLTIAFASFTATDGTENIGRRKLVISEKAKQTKDLNSKRTNQCFVISERLKKSKKTDQIGFWLVPSETVTERIAIPAFACWAVVRLAEQSTE

SEQ ID NO: 135880 - protein, 52 aa, Heterodera glycines
MPIVCRRKYLSEGIGPGNFKFGLRTGILQNPAQDPVLFRALVKISCLTVCGD

SEQ ID NO: 135881 - protein, 128 aa, Heterodera glycines
KIALGKLVGMQLLLLLEFENPLIFSLDIFCDKQLALDYAILFCTNPTVSSDAENRLSIRLYFAKIMAIFTKIFNFITTSTEKENKQKYLLVFVEIWNKFVRVFIQNSNRMTFHRLVAYCTTFGRELHP

SEQ ID NO: 135882 - protein, 84 aa, Heterodera glycines
MTSLYLNFKIFKVALPDLPVEVTNTLLSSVKKKLMNIKSHKYTFYPAGQYEIIVALGPYDFWASIQLENNYVLKKLKYFKTVDF

SEQ ID NO: 135883 - protein, 309 aa, Heterodera glycines
MSEFLNYADMTKTMEDTKGQLCNSKSINFNKLAVAPYDTFSPEKMNKKFGEVEQKLNNVHEQLILKQADIEELINREKSPLKLEGQNEQQSIEQSAVETQIRNEQTAEPKSFGLPVLVDVKDLTPTHLIEPPIDQIAASPNHKEPKLKPRYHKVIGDGDCFYRAICYSIFQVDEIENSDALRVAASRAIEKIVNNKEIFPRKLYETHAEFIKELELALLERPSTKDYNQSLSAYAKHIAKPARNGKGQWAQLEDARVASILLKRTVVILHPNEEKELLEEQRPKYDDPSIKKRINVYFPDGDTMVTIYF

SEQ ID NO: 135884 - protein, 44 aa, Heterodera glycines
RKKMLSKQFILQLTKCDCMRLSFFPAVRQVHQMHTQSAVEKAKG

SEQ ID NO: 135885 - protein, 353 aa, Heterodera glycines
PEIGDHNADLRQRCLKSLEENATFEQLLAECKQIIGLRHSTAALARGKEFNAVQLRPQILKDKPRVSKSPIRTRTFSTNTRHNSTSSPSQPPSACTRCGGNHWNSDCRFQREVICNKCGRKGHIAKICHNQNNTPQHSGFKYSRTGSNKQNANIIDCLHIMPSDWKTENEPYIERHVRLNGKVHKMVVDSGSKLRIVRKLIWVKLGQPFLTETKLKGRSFTGNIFTFMGKFKVQAALDDGMPLDLECFVIDSTDTLDLMGLPWIRAFERAYNQVVATTLSIENVPTVVGATDQTARRRNWRWIYRTHFQTFLRKHWDFAPKSGPISKLKKIHLPFFVQHDQFPSALSKKWTRN

SEQ ID NO: 135886 - protein, 21 aa, Heterodera glycines
MRMELFNQNMSSSAAKRSFPM

SEQ ID NO: 135887 - protein, 64 aa, Heterodera glycines
MFCVAMNSDNYDEALSMLPDRKSEAKVIEAYARRRSKKRNRRRMVEEWKRPMLFGWNRKSEEKV

SEQ ID NO: 135888 - protein, 263 aa, Heterodera glycines
CTAFSQTPRLTLSSARVGVARLNTKMDTLSGALPFYRLSKESMKVVVFHWRLAAPTYATPLMILHKVRLESSSTGSSFPAKFAKPVPLAVVSLDSRRDSGNLVDPFVRVGKPTRHLATLRESCYSPVYPRLIKFPWLNIQSTGQKSDTVNVHKDHPSPLFLDSRIPRVRASSKLVVQRQPKCIPRAYTQLKRSTSSSHHSTHHPRKNSTQPRAKAACFTQQPGPDLSQFFSRSYESNLPTSLTYIILSTRGCSPWRPAADIGT

SEQ ID NO: 135889 - protein, 67 aa, Heterodera glycines
MILLTAVYLLSLNETILFKSIITIKNLYSPSVTIITYQAIIKFFINEYFVANYAKTPRGANHNHERQ

SEQ ID NO: 135890 - protein, 25 aa, Heterodera glycines
IDGFLSVFLSRVERVRVQLQRLPFG

SEQ ID NO: 135891 - protein, 140 aa, Heterodera glycines
TKADLVEEDGVDVNHGKNDEDGEEDNGGGGSTPPAAAGGGGGAVTGRCRRRVDELEAEQLCRAHAMLAQLEVSSKTNVNIDTIFHELAHHLKRHYDELGHLDASGTGGGPKSTADAAFRLGYPNATNLSARWRRCCNYYA

SEQ ID NO: 135892 - protein, 138 aa, Heterodera glycines
MTDLLLDPAIRTWVFVPIVLITFLVGIVRHYVFLLLVTKKSADLQSVRDSHWLLKARLLRENGRFLPADSFAQRRWLLCDEQHGQLVKRQDKQNTQPNPDPSTMTEMVKGNMLNMVPMLVIGGWINWTFSGFVTTRVP

SEQ ID NO: 135893 - protein, 101 aa, Heterodera glycines
RRSAAEVPPPKLGRQKCTTTKPIRWTLTTRSTTCSSVVQRFKNGTYIEKQGTTIGVDFTMKTLMVEGKRIKLQIWDTGGQERFRTITQSYYRSANGIILSY

SEQ ID NO: 135894 - protein, 65 aa, Heterodera glycines
VNLSGAPGDGLGQRWRTPAEAVARDACDIVVVGRGITGAADVGAEAKRYARVAWDALRAARAWTD

SEQ ID NO: 135895 - protein, 39 aa, Heterodera glycines
MKVPISASAAPAAAEKKEEKKKEEVKEESDDDMGFGLFD

SEQ ID NO: 135896 - protein, 258 aa, Heterodera glycines
MLINSVFMIPFFISIFQQFLITFSIANSSVEDNMLIAFLKGQKEIQFSEYSRQKYEAHLGIMHFMRMNWQCDKIAEEFEEYERTECQKYRKYLDILHEYLYREYLGIPTVKPKFVFKERIEINGPLIYAVNCLAKISQFYFKLYWSNYCEYKLNKLFNNYFELKLLNEKRLNYKQKLPINEMILQLAIEKANNYKTNESLDGIIKQKFDENLEKMFKKAEERAKKNPLEINLINNDKHLIIKHSEFDNKWTWVRLNNQ

SEQ ID NO: 135897 - protein, 207 aa, Heterodera glycines
MAAVKKVGKGPGPFLPEMCWATWWERFEFFIQLKGVTDVATKRLLLFNEMGQVYEELRRMAQPDDVRTMDLAEIEQLMVERFGEAKSIAACRHELFSAKQQTGQSIRDYSVQLRSLIAKAEWSRDSIDMCLCALFINGISNDAIRVELIKKGDKDLKFKDAVESAVLLEQSNLDAQAIGSNAIPEVAKVGTQQRGPRTPTKSTRGCF

SEQ ID NO: 135898 - protein, 70 aa, Heterodera glycines
MLIGLLLLNVFAILFWNFVWKRRKLPPGPSPLPLMGNLHQLANFPDHGGAGTHGLYGITKTHGEVWLYLR

SEQ ID NO: 135899 - protein, 208 aa, Heterodera glycines
MGKRKLLPKIHGKNGVKERQKKREERKAQTAKATEARLVKKTAAQPNTDAEMAQPSEEEPSTSEAPARDNNGRPPSTPTPMTPQEMDVPSVEMMEIGVPFPSTPADGDQQAEPVPSTSTARCDLLSTPSTSKGAGNFGLDDACRQRKALSDVTNNQQMDIRLSAAKDLLITLDAGISFKAREALKRSFTGQGLDVWAPTRAVKRLKTE

SEQ ID NO: 135900 - protein, 48 aa, Heterodera glycines
MAVISAVTVAGNLVVLLSFVLDRAIRQPSNYFIASLAVSDLVSMIIRL

SEQ ID NO: 135901 - protein, 169 aa, Heterodera glycines
MGKMKIFILLINWMEKMEMVQLINKKEKQFKNLKQLKKGQNRQKIYKWKKELNLNKTKKKSFYEGKKNEFIERFDEFKSLYGQRKQKEFAKELGISKDTFLKWKKELAPNYRKIQKNYSNKDKLRKMKQYFKLKERNPKISDVIIAGKLGIGSETLRRWKKKFALISTL

SEQ ID NO: 135902 - protein, 177 aa, Heterodera glycines
METLKNFTLDDLFKVLALQDKEFEEWLKELKLLHTTRFCDCGNEMSYKWKQDRQQPLWICYSRKNHDGKRPTAGYFTGTFFEGAHLSPKQRLSHFRLNLFDFLQIASHPPIMSSPPTPNAALILEAQADFALNLLREVSTDDRSCVVSPFSVAVTLSMVYAGAEENTGEEMGQLLAK

SEQ ID NO: 135903 - protein, 82 aa, Heterodera glycines
MMQNGFGAERSWTNMKQGRKFANWREGPSKWRKPDGSSTLQSFSKGKRWRKNVERSASLTNSRGDDTEEAERTVEQKIEEAL

SEQ ID NO: 135904 - protein, 279 aa, Heterodera glycines
KPFILPSMPSATTLLSTLFCCVIWLICSNGLGTLRANDSINSRRVPGCPDLEAFQTSSSLDLLSSPQLTKINCLCGPEQSIDETLAQKELAYNEEIISITCIYGTKITDLRKTLEFVAKANKSVGRMILDHVDFSEEEMTNSEEHFHLSHEIAHLTHLEVKKCKGIPNLEFETNSTAKFDSLVELVIEECNLEKVPTKLLRKGPKLKKISLANNKISTLRKADFDGVEMTLNIAGNSLSSSIEKGSLSQLNNLKNLVIGDHNYGSLSLLTEIGQLKNLE

SEQ ID NO: 135905 - protein, 54 aa, Heterodera glycines
MTFQNYSLVNEAFNRFGVGTFSMELFLTHFFRWLVSLPGMLFNAALLNTIIREK

SEQ ID NO: 135906 - protein, 131 aa, Heterodera glycines
MSQRLTGDVPYFRTVPSSPSNEDDGLADEDEPVDHQSPTAQQQKAAQNVEDDEETILRRRLLEKKLEKEKTKAAATVGQQMTKERDGAEQKGAKDGSRKEHPQKVFGIFVGIYTLICGFGFVLIPSLGPKK

SEQ ID NO: 135907 - protein, 59 aa, Heterodera glycines
KSVGSIAHLVWFNSYHKCLLKILPLEKEGRFGVEEGHRKPEFTTQMDNGTIFGGKLTDH

SEQ ID NO: 135908 - protein, 47 aa, Heterodera glycines
NRGFNVQSFGSGNYVKLPGPKEDKPNIYEFDSTTYEHILQDLKQKDS

SEQ ID NO: 135909 - protein, 64 aa, Heterodera glycines
MWEKYAVNKFKPNKGVGGEYEVQRSSQAQVNAFNMTKQIFNDPLRGQKEAIEAIVDGTLITMHM

SEQ ID NO: 135910 - protein, 264 aa, Heterodera glycines
MSTHSKSCKARCVLCSRVGPAFPCPSSAGFFKKCKECNKKFTNNGCYQHHLQSGFCKRSKKCKDCGAVWDVADNKRNGRKGHVCGERFCKMCNNYHNTERGCYIQPIEPKERDPYRIVAFDLETMQHMPSEKPEKREHLPNFIAARVACPDCIENESWREASGGCEVCGPNRTVAFCQRRFTETTVDKQVVAENPLDALVSWLINDLPLAYDTYAFSHFGGRFDMVLVFRELFKRGYNPDMLRKGNKMYEMRIRRQKKRNPNIG

SEQ ID NO: 135911 - protein, 45 aa, Heterodera glycines
MKSAPMDIVVLWYHHNILSFYIISYIYKISVSITKINEICGDKKC

SEQ ID NO: 135912 - protein, 16 aa, Heterodera glycines
MRSLRAFFHSRHGEVN

SEQ ID NO: 135913 - protein, 16 aa, Heterodera glycines
MKWNKLIKMEKNKEIN

SEQ ID NO: 135914 - protein, 145 aa, Heterodera glycines
MMIILSTKLLTMSVLLLPILLGNANAAGIGDRQKRAVEEEEQRIKFKELFNAENGSAEKEVLWMENIEMKADKEEEKEQQKKNEKQEEREKREEKAAEVTMDAKNEASLSTLLRNLTHSYHFGFCLSSFRLTKMLFWNMEKKLQP

SEQ ID NO: 135915 - protein, 48 aa, Heterodera glycines
MDLRHGLRLLLLFCLAHALAQSNDSQQSADCADGEFCALNDPDSSHFI

SEQ ID NO: 135916 - protein, 20 aa, Heterodera glycines
FTILRIFNSSIASLINFVSE

SEQ ID NO: 135917 - protein, 57 aa, Heterodera glycines
MTTYLFDKLKKKEDLLGMVRTIEQYADIGVLDFKEFMPSNQFSTEGLKVNEIHDIVS

SEQ ID NO: 135918 - protein, 117 aa, Heterodera glycines
PKMVISFFSFFLPQNLYQQLPSLVWPYQTILRYLKRKQKKFLTKNGYLFFLIFLPQNWYQQLPSCLALSNNLTIFETQTKKILDQKMAISFFSFFYRKIGTNSCLLLSGPIKQSYDI

SEQ ID NO: 135919 - protein, 51 aa, Heterodera glycines
TANLVPTVAFSCLALSNNLTILKRKQKKFLTKNGFSFFSFFHRKLGTNSCL

SEQ ID NO: 135920 - protein, 154 aa, Heterodera glycines
SIIIYLCLNFFLLWHLFTHLPINFRHLLFMCQIGIIMVPFFVPFCRNFLALFCPLFPNLFLANFWHCFAQIFNPLFCQFLHIFVPNFPIYFLPIFRIILPQFLTLSFANFCTFLCQISLFISCQIFAHFCAKFPYLFLANFLHLFSPFSHLKNI

SEQ ID NO: 135921 - protein, 114 aa, Heterodera glycines
MAAEVERLKDAIFAQDEFIGMLEGDLLVYEAHVGILRDSLGATKREDRQHIKSKAFSAKLNALEMEKREIAKRNNGGVQVYYFFNSKKITNFFLIACHIPKIANKIPIQIPIIS

SEQ ID NO: 135922 - protein, 109 aa, Heterodera glycines
MLVVTVPPPPQSPSAVAVTTVAAVFGEWSSTVAVVSTVFPTTNTKLLLVLLLPQAFAAVAVPPPPPPPPKPPPPPQLGPIENVPAVLIDGRCCAVSIYLMRLNDYFFKH

SEQ ID NO: 135923 - protein, 46 aa, Heterodera glycines
MPIPNKLHIFFSRIFIEKFRWATGNWNSELKKKTGFRHIPAENKTS

SEQ ID NO: 135924 - protein, 177 aa, Heterodera glycines
CICVFIMFPQFPCIEAFITGFCDESRLLARRREIFVACVIAVHYVGSLPATTYGGSYVIPFLDEYGVSLSVLFIVMCEMIAVCWFYGIRRFSEDIHSMLGFYPGLYWRCCWTLCPLFIGIIFVLALYSTSFSPMQIPNYTYPAWSVWLGWLFRLLSCASVPAYALYLFIFSRGNVMQ

SEQ ID NO: 135925 - protein, 297 aa, Heterodera glycines
YALVLIDKSSIRNFLASERLSNVKTVKIFSAEAKELQSYKNKIMEIWEISKKEGTTKGLMFGGFQLTGYLALTFQLTGYLALTSMLYYGSVLIADGCLTYGDLSSFMLYSALCFGGITNFQLFYTELMRGLGASARIFELRDQKPSISSEGGLVINALNKEVRFESVGLVINALNKEVRFESVAFSYLNRESIFSDITFRIPKASVTAIVGASGSGKSTIAHLLLRLYSPTAGRIMVDDIDLKQLDLSSWRRMIGTVSQEPILWRRMIGTVSQEPILFSTLIRDNILYGGENSHLIT

SEQ ID NO: 135926 - protein, 32 aa, Heterodera glycines
ESASRSGTRLRRVARKCVNLAIHRSLRTGASR

SEQ ID NO: 135927 - protein, 95 aa, Heterodera glycines; identical to SEQ ID NO: 124528

SEQ ID NO: 135928 - protein, 58 aa, Heterodera glycines
MEIKQDKCQNLLQCLENVAFELTEHVCQLPDVPSSSSVEKKFLKNIRKELRTTNFFKK

SEQ ID NO: 135929 - protein, 53 aa, Heterodera glycines
NFLPGGTQFFTLTTPALFFLNYFLHLITQRSRLIRSSPNFAGKLLRTLQMLIN

SEQ ID NO: 135930 - protein, 201 aa, Heterodera glycines
MPVNNFLQKDDISLSGESAGEEYEVDQILGVRVLEDGTKEYKVRWKNYGSNDDTWEPMDNLVGAKDALDKFLKANKQAKKTPKASRTPVSTFSRTNKRKAQFKKATKLGRKRGGGDISQEAEDGENNRSSNEDESDDDFSVSSASKKKKTTDKKSKKAPVRRAVTASSGRPSSRPTPHNGDSLVPTDSALPPAFVVTSLHP

SEQ ID NO: 135931 - protein, 100 aa, Heterodera glycines
SKASEHHLKFDGIYFDKNGVLKLVEKGGTQRVFTFEEAKDKNSSALCDYMCDMVTFTEKGKPQIQVAPQEMETEEGQHEEEEEKVLERTHDDDGKLNFDD

SEQ ID NO: 135932 - protein, 51 aa, Heterodera glycines
MAFIGLEVPPNPNFNPALLGFDDVGLQPPLDQQNGDFVLSNDTKKIGFVRT

SEQ ID NO: 135933 - protein, 210 aa, Heterodera glycines
TNSPLFMLYTFGVGFLVPALLITFFYLRVILKLRADAISVRKHSDGQNWALSSARFHKVTKRIVAVILFYFVTKRIVAVILFYFLCWTPYWTLNIMSQFGIIIWTPYWTLNIMSQFGIIIVSWSTLTLSSVFFVAHLLVCFNSAANPVLYALINRELRQQNAQALQKRRRSLNAKRGRRLFRLRMAVFLRSAASGAGRKSGGPFVRMEKK

SEQ ID NO: 135934 - protein, 20 aa, Heterodera glycines
MRKIIIKIKMKKCILLKLLK

SEQ ID NO: 135935 - protein, 49 aa, Heterodera glycines; identical to SEQ ID NO: 130195

SEQ ID NO: 135936 - protein, 38 aa, Heterodera glycines; identical to SEQ ID NO: 130624

SEQ ID NO: 135937 - protein, 38 aa, Heterodera glycines; identical to SEQ ID NO: 129423

SEQ ID NO: 135938 - protein, 94 aa, Heterodera glycines
MKTVSVALVLCLNIGPRPAPTCRSRSRARARRQTGRDRDPAGFLRDPAGLNSGSRPRDPSRTIFKFIGIDRDFIGIPKRDPSRPFYQSRGIPRD

SEQ ID NO: 135939 - protein, 19 aa, Heterodera glycines
FGREILFFETKLKTYITYI

SEQ ID NO: 135940 - protein, 308 aa, Heterodera glycines
MDDLFENLFENNSQNLKRLKSDEQPEKQQQKLSVKAEQNKKWDESSQKMTKKLKIEIKEEEEEEEEEWHTDKVPMGEQIHKIKSEPNFDQNEIANRTQKLKFVKKEPKMENDDHFISNDGTVQAENESDQQQNECSSPSQNDQNASSDQSMDEKQDESEDERKLKQIEKFDKMRKAYWAKNGHKREERMKVERKIAREMGIYRTQIYKWKKELGQNAYDKRESEETKKRTIYLFEEIKQQMKDNKLYICKYRRKIEQKIAIKLGTYHCQILKWKKEFVISRGRKVIEESDQDDQSSSADEVLMVLGPG

SEQ ID NO: 135941 - protein, 80 aa, Heterodera glycines
FLPGGTQFFTLTTPALFFFNYFFHFITQRSRLIRSSPNFAGKLLRTLQMLINFLRIFCPEEHSSSHLPHQHYFFLIIFCI

SEQ ID NO: 135942 - protein, 87 aa, Heterodera glycines; identical to SEQ ID NO: 129152

SEQ ID NO: 135943 - protein, 74 aa, Heterodera glycines
MSIAMVDDASVHSESVELRSRNTKMHGPIGGTEMAYRNDNCTTSGGNGGRMPLIEHVVKNGESLMQISLQYSVP

SEQ ID NO: 135944 - protein, 97 aa, Heterodera glycines
MGLDPKVLTSVINSSSGRCWSSDTYNPCPGILPNTPASSNYEGGFGCKLMAKDLGLAQNSSTQFKVPTPMGSLAPNLPFALRSTKIREQRLHRGLKN

SEQ ID NO: 135945 - protein, 17 aa, Heterodera glycines
LIRQKRLPGVFGVADHE

SEQ ID NO: 135946 - protein, 59 aa, Heterodera glycines
QGWAEVSLFAFRLSHFLAFRISLFAFRFLARNATFTPLRIGLNSHKIFQNFTYKLANFQ

SEQ ID NO: 135947 - protein, 45 aa, Heterodera glycines
MNGWEEAIMDYEKRKTKRKNWFLEFERRWIRMHIQYEKKYNLVDE

SEQ ID NO: 135948 - protein, 25 aa, Heterodera glycines
SKSSLTTAQKNMFFVRFRPRGAQEK

SEQ ID NO: 135949 - protein, 66 aa, Heterodera glycines
MKIINKVQKMCQVKTTGLIEYEQKIGYFYLNEEIFNSSELFLFLCFVKCFKNYPYGIILLTAYCNV

SEQ ID NO: 135950 - protein, 46 aa, Heterodera glycines
MGIANHEEYSLVRRWAASFKTFTLDFGDYKDGYYSVQTLEGERIGQ

SEQ ID NO: 135951 - protein, 193 aa, Heterodera glycines
MLSEEQWEQLLMRRDTVFGRRARIFRDSKGEFGTINLFAIVGAADLIVRRGGSSQISDITEYFNNLGEDEQGRILRRAQLIGAIWNIAFGSGSAEFSLQEYLGDMDLLGLWDVYFEEGAHQDQEFDEDYPIPPGIVELIAQQTQGVPPNPQSDEEQLNVGIATPNCKGVRKSRTPVGTAMNLCAVGIVALDIG

SEQ ID NO: 135952 - protein, 62 aa, Heterodera glycines
MVHHTDRIGNYNELPLYEQGRKLNKAQIVGLIWNIWFGTGSKPFSPEEYLRGLKIEKRNGPS

SEQ ID NO: 135953 - protein, 56 aa, Heterodera glycines
MCKDFADKWALRGQAELIPLAQKMNKAKYKNQWDTLPAGAIRKRMRLDSDKDLMVV

SEQ ID NO: 135954 - protein, 369 aa, Heterodera glycines
IYKVNLSIQFPSVGASLESQKLIKLLTIMSKGERYAITTIFISVFVQLLNGTVLSAASTGIAALLLIGGGTVHRQFSVPNDIDDDSPPKIAFESARAKQLRAVELIIIDEISMLSKKVLRYVDEISMLSKKVLRYVDRLLRDVCAVDKPFAGKVVVLGGDWRQLTPVVEHGTREDQVQESIKMETLYDVQRINDLAIDRLAGAPILYESIDSPLEAQEEFHFSLGLSEAIHNETPSGVPPHKLILKAFAPVMLIRNLDVAPVMLIRNLDVTCGLCNGTRLQIKTMTDENLHCRILTGSREGQDFLIPRVKFEYGQGRHHRGLRFRRIQFPVRPCFAMTVNKSQGQTLQKMGLVLNSQGQTLQKMGLVLN

SEQ ID NO: 135955 - protein, 102 aa, Heterodera glycines
MEKGGKVCDFWCQTAKKGRTEMATKGRTEMATKGRTEMATEGRTEMATEGRTEMATEGRTEMATEGRTEMATEGRTEMATEGRTEMATKGRIESAEEMVPCH

SEQ ID NO: 135956 - protein, 118 aa, Heterodera glycines
CLQPIAAIGVPFGLTNEEKAQIRATEANGERAEGYSCCRCGKVFSYEYYRDKHLKFTRCVDSGNRRFPCSLCSRSFEKRSFEKRDRLRIHILHVHERYRPHECSMCSKAFSQSSSLNK

SEQ ID NO: 135957 - protein, 24 aa, Heterodera glycines
MEKACKIWRDYIDFSALELLELAS

SEQ ID NO: 135958 - protein, 220 aa, Heterodera glycines
MQHTKRYLLVPEEIYQSLAAPPPSDGTPIGLVRTRIKQIKNDDAINEAERAVKYEQEVKRLNKLTKDEDERPVGVKLENLSDVVDAMPKPVNVTRPIVVSTRRHLKVGRARKENVEQLEDTDDDDYQNPRSSSSNKRQPTQTEILKLIYKNAQSLGVSEEGQVLRAGGRPFITSSVDDIVSHLFNKDKRENKEPTAFKEFVERARQNPLLSRHLFPEGQS

SEQ ID NO: 135959 - protein, 49 aa, Heterodera glycines
SENPFLIFISSLENPNSNKIRKFIPQLEILFLMLTSSRRAHLYTINYPQ

SEQ ID NO: 135960 - protein, 287 aa, Heterodera glycines
MPAPTDEQTLRSFLGAINYYSRFVSQMHEIRAPLDELLKKDVQWRWGPDQQQAFEGAKKIITSDLLLMSYDPAKPIVVAADASNKGLGATISHTFADGSEKVVEHASQSLTPAERNYSQIEKEALAIIFAVQKFHRMFIRYISTKNFGQADVLSRLIKQHRDTLQEEDKVIASAQMAQNLDYSENANIEFCAAAVDYMFQTTIDQLPVTADEIAEHIERDEEMKKVIEHCRNGWPKTANELTMAAFYTHRLRISEVNGCLLMGDRVIIPSALRFRILKALHFTHPGM

SEQ ID NO: 135961 - protein, 50 aa, Heterodera glycines
MADFNNDTFYLTFKDANPSWSLIGCASVLGLIALFGIISNSSVIYVTIMT

SEQ ID NO: 135962 - protein, 264 aa, Heterodera glycines
HLVELLRKLIQFRATKYPIWADIEKAFLMVSLKESDREFSKFLWVKNIFAPLSGENLLVFRFRRITFGIVSCPFLLAATLQHHLEAFPSELAEEIRDLLYVDNLLLLADSPEEARRKAAEAQKIFAAAQMRLCEFIAADPSSLDEIPENDRLRNEAPLGLKWTICEDNLSLTFPTVPVRTVPGVASFFDPLGLCSPCLVGAKLFFQKLWDGSKGWDDPIPAEETKEWDEIKALWAAKTMHIARFTPRINLEKIQLHVFTDASPN

SEQ ID NO: 135963 - protein, 681 aa, Heterodera glycines
MAMERGLGEVKRIFEGHFEKGIAEAGAAPEERQDFFYDSIAAPLPAATKYLRLREHPTPAELLQIAAEHLGDLRAMRQTFEDEERESISRSSRSVETENNQAEEELPRAMPRRSMQEWETSFREAYVRQHDELFGQQQPLVNQAERVATPVMSNMAALIQRRSNAPSVASVRVNNPVREWMARNQGVGNGPPAQAQQPTQAQRPLQAVQQRLEQLTLNDPRANFPRAAPHFHVRREEPPTRDRTRAQGVFPSRPHRPDESAGMLTTFEAVRLQPPTFSGRPEDWTTFWAYFQRAVDDKQIPGFEKQLHLLRCLKEGSPARRAVEVYPPSDGNYPVVVQLLKERFGDTNDLQRAIRAQLLHLQPAKDNVSSLTAVIDEFERGVCQLEQLGANVDDESFGPLLEAKLPVHILTELRIRESTMGAKWTVREFRKAVGVQVKCMRAAESALAAMKGPERRHEQRSEPERGGRNARTGQGFQRAFMIRDQPPEKRTTNEAHTRTEVAMPPTRPANPNRVPLGSYSRPMGAHSQTQNGQEGQPRQGCSLCGQTGHQPSRCGKYGSAQAKRRRLIEQRRCLKCLGSDHTAQQCTRKTACRTCEQMDHHWLICWKGERRNEPPSHSRTEDAQQNRTMIIREIEAKHVRTPPPTESSKDGMGAKGEDPPLLDGEQRAFTTVGQQLPAYLM

SEQ ID NO: 135964 - protein, 66 aa, Heterodera glycines
MEGQLKRRKILKTLMHLIKLTEDSWDNRIILRYFVLKFGFNYNFKRGTGPQGRRGTGPQGSRLSAN

SEQ ID NO: 135965 - protein, 368 aa, Heterodera glycines
STSTNTQRNDGLKAPGKSGELNKRVKRSLKKQFEQIGDSIELNKDELEVNDCLFKRRKVDRELINLDEVSNDFFVGTSNKQNSDVKFYELSDFNFKCLHCPAVHFLEERNTSKINVEFGNCCSYENEDLPTNGQLYFIDTDQSLNYRMQMCNENPKEKEKMGFLMSYIENYLRENYIFAKSYEMMKDVIESSKKTENEFEIPDVTMLFSVREGVDLRRYNIPRSNEVCAVLFRDANEEIPAANIVVHSKGQKQIKNIYPLDKLVEPLIYPIFYPNYYEGWHYKLKDQKGNPISLCDFTKYKLFYRNEGKFLPHHFARKLFQQWVVDQAARIEWNRLNYIKIHQKEICKESYSNIGKILESRAIEEGIS

SEQ ID NO: 135966 - protein, 95 aa, Heterodera glycines
MFEYPKRTLEKIDFFVFGAVPPNRCAQIYGETESFGNSFPIVCTLILRWSFAPHKCLSTPNGHLKKSIFLFSGQSPRTDAPRFMGRPNPSGLASL

SEQ ID NO: 135967 - protein, 28 aa, Heterodera glycines
MLPNWDPVLQALFASLFTWGVTALGASL

SEQ ID NO: 135968 - protein, 55 aa, Heterodera glycines
MSTSFFVCQHGKEKGQGKIAQQIEHAQPYVLRNTQMALENVRRIVDGSAKNASFI

SEQ ID NO: 135969 - protein, 169 aa, Heterodera glycines
TSTLGTASQKTAAAPAGGTSPLGTASQKTAAAPAGGTSALGTASQKTAAAPAGGTSALGTASQKTAAAPAGGTSALGTASQKTAAAPAGGTSALGTASQKTAAAPAGGTSALGTASQNLTYDFPLDYLNMSSQWGGGRPVKPAAAPKAGQAPHGGGGPAQTPSEKMPKF

SEQ ID NO: 135970 - protein, 61 aa, Heterodera glycines
MSLLRPQSLLLLAALCLSFALLFVTSSEEGGRVKRGGWPWDWAGKQLCKTSANCKCNAFIF

SEQ ID NO: 135971 - protein, 205 aa, Heterodera glycines
MKNILLSILLALLVFSVLADDKAQKTEDGQKNPAIARPKRGHGYGYNNWGGNGGYGYGGGWGNNGGWGNGGWGNGGYGYGGGWGNNGGWGNGGYGYGGGYGYGWNAITLFDSLALAICRCFAQLFAGPIPRPSAALHSPSLFRRSDKEQRKGQAKSGQKKQRLRTEKGHFADWQMKRMIGWMDGFAFEGMNAFALLLRLFIRPKK

SEQ ID NO: 135972 - protein, 117 aa, Heterodera glycines
FYFFISYFKTFSTFAPLKFYLSFHKFHLKFSPFSVFLWHPFIFGPLFLNWPRRLRLRRLPQHLLFGCSKTFCRRRKVRRRLSRRRHRRRRLCPIGWQSAVFPAQVAHCSQLAQRRLR

SEQ ID NO: 135973 - protein, 126 aa, Heterodera glycines
MPMERMCRRKRGKRRGEDMARNTSDGEVTSDGGMPLVKKRMVTRRQAMKEATTTAARPHRMKRFPSPTSPVAFVSSNDLLHQLDFGIVSIQPPLFSLNDAATFSVLKRIGEEQKLSLEERRLISDD

SEQ ID NO: 135974 - protein, 114 aa, Heterodera glycines
MDGEETTSTEEEEAEEAAGETEEEHEEEEEEEEDEEEDDTGEDIDMLLNSSEGNKATNLSLPILGTVGGSVSEDGRVNGGNESLFIKNRVIGLKFLKSVWENPLLLFHPKEPHY

SEQ ID NO: 135975 - protein, 95 aa, Heterodera glycines
LFEYPKRTLEKIDFFVFGAVPPNRCAQIYGETESFRNSFPIACTLILRWIFAPHNCLSTPNGHLKKSIFLFSGQSPRTDAPRFMGRPNPSGLASL

SEQ ID NO: 135976 - protein, 98 aa, Heterodera glycines
LILRWIFAPHNCFEYPKRTLEKIDFFVFGAVPPNRCAQIYGETESFGNSFPIACTLILRWIFASHNCLSTPNGHLKKSIFLFSGQSPRTDAPRFMGRP

SEQ ID NO: 135977 - protein, 105 aa, Heterodera glycines
TSSIPMGPVLPCIGQNNKKDEVMKKKEKNDEKMTLETNKMASEKRKRPPSLSEKSFPYNAGLEKNKLFVKKLDWSCTGEELKKFFEKFGTVVDARIVTKWNGRSE

SEQ ID NO: 135978 - protein, 33 aa, Heterodera glycines
MTNEKDSIWFYFDKIHNSSYAKWLPFLSIKNHE

SEQ ID NO: 135979 - protein, 73 aa, Heterodera glycines
MKLCLIFSLILFLLIIFDQIGAEKKKLQQKTFDEIFGEKWEEKEEKERNEKKKREIIRKFYKIKEKIKQKERK

SEQ ID NO: 135980 - protein, 72 aa, Heterodera glycines
ATSKGCTPPIGMGPRAATSKDCTPPIGLGSCGIKGLRPSHRHGFVRGGNIKGLRPSHRHGFVRETPVRNRAL

SEQ ID NO: 135981 - protein, 77 aa, Heterodera glycines
MDGGIAWPGMAWVTECHGEKGVESGTHAGKSATAWHGSAAVGKGVELHGLLSWHNSKGFNGAEEMPNDRPKGHTEMG

SEQ ID NO: 135982 - protein, 138 aa, Heterodera glycines
AVNPFPLADNGQIQLWQFLLELLSTGDSCITWEGTKGEFKLLKPDEVAKKWGERKSKPNMNYDKLSRALRYYYDKQFMSKVHGKRYTYKFDLDTLAKACEAAAEGPKEMPKEGRKGTAETMAEDERAANWGGTTAGKN

SEQ ID NO: 135983 - protein, 101 aa, Heterodera glycines
MEVKFEEEEEADGRVAMALAFWALLSCCWTEWCREDERDKKLCPLMLWFILALKKAKKINPKNGESDSPQLRLVPNVKTEIQSAETEEGTQTETERQKNAN

SEQ ID NO: 135984 - protein, 409 aa, Heterodera glycines
MDRDGGKGGDGEGKEGGTEWTMPNGTKLIGDEQRQHGTDQKETKDESAKNVAAATNASSAGDPIEVRPSSPPTDQSADLRRRVQLRSPPLNRPSPSMPISTNGAQMPRPKSRIQADGEQLRFEVLVSEDSGNYTCRVNGAVVVLRLLVEKPVIELSAVEIGSHYVALAWNDSLKIRAAERVHLSLEVRDAITQQRRTIQLSLHNPWRSYNVVRLRPLTNYTFCLEYHLVHFLLHLADSSSSIFKTCIDVQTEEPLGFWTSLSPISIGILLAFCFCLSALLCFRALYLRFYIWHEAKLRARMNQSMSGQSFLSRSSSLHHSVQQQLNSAQNANAIATRPSASSSSSNFTSIWEERSSPAQCLQTPGNEKRIKKKRKDKTTALRLGAKKSADNDARGDGEGMGVAESIVLC

SEQ ID NO: 135985 - protein, 100 aa, Heterodera glycines
MAKVQFFNCRTEAQNMFTDSLKKAKNGEKIREKGKANQKAISAEGKAPQAKQSKGLPFDANDAIGVQANFFGIRKGNETVPGNTLREKSDRSLNIQSYRN

SEQ ID NO: 135986 - protein, 64 aa, Heterodera glycines
IKNAIGKCQEVTDGQSEQINAERIDKTTSRRNSQFEDEERENEQEIRKALLPKAQQKDIYLSEI

SEQ ID NO: 135987 - protein, 280 aa, Heterodera glycines
MTDIYYKIASFDHSYLNKINQSELFSMIDEIVENFQLCNVEETRSLSRWVYCMLLVLLWIALVMTGIFLYFNSLIRNLSGNTKTRELYLGCFPCDKLPNIINKYPSTLVANNDPSNKEGTHWIAMFIVDDRTVYYFDSFGRKPNRCISQFLRNYEKVISNKPAIQSVFSENCGYYCIYFIYYTIIASLLNCPARNLCDCLNHPDEIQKVEKYLKGKTLQTTYKNQLDEYKDFEYGGITRESARKQMAYNGFKNVTVDQHFYVRHRICLRYANNPCVIEKR

SEQ ID NO: 135988 - protein, 116 aa, Heterodera glycines
KLFKEFIINSFIKMDRLDTIIASLLNCPARNLCDCLNHPDEIQKVEKYLKGKTLQTTYKNQLDEYKDFEYGGITRESARKQMAYNGFKNVTVDQHFYVRHRICLRYANNPCVIEKR

SEQ ID NO: 135989 - protein, 71 aa, Heterodera glycines
ITAQINENHLPIVLSFFLFSHNPISDSAPSSGFIECACLSHFLLSVPPPQKGASAVVVLPKPSAGQSICDH

SEQ ID NO: 135990 - protein, 122 aa, Heterodera glycines
MTSASQYVRDKANRTRLSIESYYAQAVVHLAEREQRAEKLEKQMAEEGLNELEKEDRRKIHAAKENDFLRQRRTKLSANDFQSLKVIGRGAFGEVRLVQKIDTGHIYAMKILRKSEMLEKEQ

SEQ ID NO: 135991 - protein, 91 aa, Heterodera glycines
LLDPEARQREVYQAGYKDPNAPKPMRVCEVCGSFLIIGDVQQRIDDHMQGRQHLGYAKITATLAELKVFNLNVMWRNAWIYYFGKDLYHSF

SEQ ID NO: 135992 - protein, 136 aa, Heterodera glycines
TFLRATTSVSYQMNFKLNNSTQIELFELVNERTNEKLTLIMDDGEVINYYGMLKRCPIIVGEMAAAVQWENDEHLDDNLNSVQFFLWDIAVNFIGPLSPPADEEEKAGQSNDEMFSTTPGAKWNSGGMSDYFENVV

SEQ ID NO: 135993 - protein, 19 aa, Heterodera glycines
  unsure (1)..(19): unsure at all Xaa locations
TXAFSSLALPNTHTIFEML

SEQ ID NO: 135994 - protein, 19 aa, Heterodera glycines
TFAFSSLALPNTHTIFEML

SEQ ID NO: 135995 - protein, 19 aa, Heterodera glycines
TFSFSSLALPNTHTIYVML

SEQ ID NO: 135996 - protein, 19 aa, Heterodera glycines
TFAFSSLALPNTHTIFEML

SEQ ID NO: 135997 - protein, 19 aa, Heterodera glycines
TFAFSSLALPNTHTIFEML

SEQ ID NO: 135998 - protein, 19 aa, Heterodera glycines
TFAFSSLALPNTHTIFEML

SEQ ID NO: 135999 - protein, 19 aa, Heterodera glycines
TFAFSSLALPNTHTIFEML

SEQ ID NO: 136000 - protein, 19 aa, Heterodera glycines
TFAFSSLALPNTHTIFEML

SEQ ID NO: 136001 - protein, 19 aa, Heterodera glycines
TFAFSSLALPNTHTIFEML

SEQ ID NO: 136002 - protein, 34 aa, Heterodera glycines
KIEEQSKKEKKLKILLIYKKQHRCKKILLTLEKF

SEQ ID NO: 136003 - protein, 444 aa, Heterodera glycines
MTLNTIPNLDGSRGSDSVNAIFKQFDIATEEWPEQKRVRALRSKCFGKAERAFNSAVAENRHDYQLIRTSIIRQLDDTDAKQLTAFDQLMKGVWLRPNEGIDQLGERVSRLVRCAYPGLSEQLYDEYSAMHFIRALPNSELAMNLEMTRKPGATFDEFIAQAARAEAVQNAARNSWRNSQNNGCFQNQRRHIVCYNCGRVGHTSRNCYSQPTHQTHQISKNCNLQSTPPPLLNQQNDEPPKKGNLLVGAINLEHRPEIEKFFGKATNESDKGRFLEESPAVGIILTTKVSVFGRKLDAMLDGGSQISLISAKFFSQIMDKVSKKDVISRSESQVIDINGKELGTTENLGRGKASPTTASSANGRLDLCDRRPDSRPQSSFHRGETNTKFGQRIFYRGGKCRKEPDRGMLGDGRRHKLNSPTTYWMRMSIKGRGRLFLGGSGCVN

SEQ ID NO: 136004 - protein, 44 aa, Heterodera glycines
MENRSNLRKNWAFTEKHSENGKKNLASKLAKKQMPIQMKKKQSK

SEQ ID NO: 136005 - protein, 211 aa, Heterodera glycines
AYARGGRGTGGGAAGGRAPPGRGPAPAGGRGGRGKRRAGPAAGAAPEKTFAGFYRSGGPSRRSKTHESDVQELLTNAELANSTFEAERGDIKFNGNGNVAISSTKQMDLANSLDRLNADYGHLLRIPRRPRPNTYEDAEQLNALEAEEFVAWRRQLAKLSEERNIVITPFERNLEIWRQLWRVVERSHLVVQVNFYFKGHFITYQILFLLL

SEQ ID NO: 136006 - protein, 68 aa, Heterodera glycines
MPRYLFAFYGGRAVAEPKGTERSPTRKNALLQPAEAHNDVEDEERSPTDEKGREHDDEHLKGADSLPA

SEQ ID NO: 136007 - protein, 87 aa, Heterodera glycines
MCLKYVCGELLVGYSARSPLIPSPLPPPHNRQQRVGWGQRTLPRLRMPMPDPECNGHGESTCPAETPCHRLPFLCQGEKLGNGMEKN

SEQ ID NO: 136008 - protein, 29 aa, Heterodera glycines
MAIYFFEKFSMQQTLSNMKRSAKNGYLFF

SEQ ID NO: 136009 - protein, 29 aa, Heterodera glycines
MAISFFEKFSMQQTLSNMKRSAKNGYLFF

SEQ ID NO: 136010 - protein, 73 aa, Heterodera glycines
MAIYFFEKFSMQQTLSNMKRKKWLSFFEKFSMQQTLSNMKRKKWLSIFLRIFYATNALGHETKCGAPWPFYFQ

SEQ ID NO: 136011 - protein, 103 aa, Heterodera glycines
SLDPCDEYGADCVPIRNLLLKIEALANCGKNESENNAIFKKPDWAPLPPEMPWKKPSETLICDGDMACDKQTLREQYNRLREMPKDGYQQWKDAIGIGAALIM

SEQ ID NO: 136012 - protein, 36 aa, Heterodera glycines
MAVRKRRYENGGTKTAVRKWRYENVLARNIHYGYRN

SEQ ID NO: 136013 - protein, 17 aa, Heterodera glycines
HKHLFDLFYHIHNLIKI

SEQ ID NO: 136014 - protein, 29 aa, Heterodera glycines
MQKKFVGVSNFHYVITRAAFFFCALVSIY

SEQ ID NO: 136015 - protein, 28 aa, Heterodera glycines
IKVNVEASNQVENVLFMLNISKLMRRKK

SEQ ID NO: 136016 - protein, 60 aa, Heterodera glycines
MVGGCWSAKFNGDEHSLGWHCSNDVRVARVSDGQHGHSEQFAASGAQLDVVAMVLVHARL

SEQ ID NO: 136017 - protein, 22 aa, Heterodera glycines
  unsure (1)..(22): unsure at all Xaa locations
SGRGVNSHLVTAWPSDALXLSS

SEQ ID NO: 136018 - protein, 23 aa, Heterodera glycines
ITGRSIIAVLFLSFDALANLARF

SEQ ID NO: 136019 - protein, 45 aa, Heterodera glycines
MRKGKIQTQQHEVHMRMGLRTDIAKGRDRLLLSVRGKLRKSAQHG

SEQ ID NO: 136020 - protein, 54 aa, Heterodera glycines
INLNFFKFFEFLKFPGWSRFPVPDKNRGPGPGFSGPGKSRSRFCSKFPVPLYSS

SEQ ID NO: 136021 - protein, 158 aa, Heterodera glycines
SARVLLRLFGWSQDVDVAAANPITGYSNLMYTFHFYTGTYTFHFYTGTHTVSGLGAKLKTAYTKSLPIFLLPIFLTEYGACESSGDGTIATSSMNEWWSFLDGYKISYCNWSVCNKGESCSALTTSASASNVGSSSYWTTSGKLIQAYYKEQSNGKFF

SEQ ID NO: 136022 - protein, 227 aa, Heterodera glycines
MKSVVSPTPFRRPLSLRCVCSVLVLLICAFDVSLAAKDKEKNGKEEPGGPFNTLSIILLIPLVIFTGAFVYLLFMKPKSEGTGDDDGEGEGDADVEKGPTEETKTEPRIESPATLLGVTVPLEQDEEEQKKDDEGGDQTAEKKEEDAAAADEQPKEGAAEAAEAEKSATKEETTEDTEETTEGSTTETSDSGSGSGSSSASGSEGSSGTSDATSEATEDASSSSEGS

SEQ ID NO: 136023 - protein, 33 aa, Heterodera glycines
INLRIDPSFFAALLSILQPLHDHNSFTVVINRK

SEQ ID NO: 136024 - protein, 46 aa, Heterodera glycines
MGFLLYMFVAAVAFGGGAYCGMIYTTKGARASAGGGGSKKDKKQKA

SEQ ID NO: 136025 - protein, 56 aa, Heterodera glycines
MGFFFYLIVAAAMFGGGMFVGMSLGGKKSSDGASGGGAKKEKKHKGSKSSSSEKSQ

SEQ ID NO: 136026 - protein, 232 aa, Heterodera glycines
MKSVVSPTPFRRPLSLRCVCSVLVLLICAFDVSLAAKDKEKNGKEEPGGPFNTLSIILLIPLVIGTGAFVYLLFMKPKSEGTGDDDGEGEGDADVEKGPTEETKTEPRIESPATLLGVTVPLEQDEEEQKKDDEGGDQTAEKKEEDAAAADEQPKEGAAEAAEAEKSATKKETTEDTEETTETTEGSTTETSDSGSGSGSSSASGSGSEGSSGTSDATSEATEDASSSSEGS

SEQ ID NO: 136027 - protein, 256 aa, Heterodera glycines
MFFTIFLENFKKLVITLYAHYKKVLSGLNFNLSVPYSMQFLRRYRFYDLPSKAENYGTVLDTMPPIENYYPGGLFPADRAKFEQWYDENRETGFELTEVIADYCKTDVQILAHGMVKMRQLFLSETRHDITDSVTIPSGCMKYWVQLAHHDKERVAIIPHLGYEKRGKQSSIARKYLKWRAEEELRENGRVQRHVESPGGEFKFGNYSLDGMMERPDEDKNLAIEVNGNMFTNYPVGQTGRCSPSVGRVRKCTRAA

SEQ ID NO: 136028 - protein, 391 aa, Heterodera glycines
LKMDKKINKIYTDPANPGGYAGASALRGGEEEAPKLKRTEFEDFLQRNTTYTLFKPKREKFRRLRTFRTIQGSDVQADLAFRTIQGSDVQADLADFQALSRKNSGYRYLLLAVDVLSRRMFGAPVKSKRPVDMKRAFEELFETRVPDTLYTDRGLEFVAKPLKEFYAEKGIQKFETSSKKKAAVAERAIRTLKTRLYKYFSANNTSVWVDVLPKFLSAINNSVCRATGLRPREISDTNAREVWKRVYGGLAQSNKTPKIRAGETVRIPEPKHIFEKGYIPNYSDHVYTVDEARSYIPNYSDHVYTVDEARSTNPQHYLLKDYYGTKLKRKFYLPELTIVQVDENTMYRIEKKYKERVRDGKREMLVKFIGFPEKYWVTNEEINEKYYKFNE

SEQ ID NO: 136029 - protein, 45 aa, Heterodera glycines
LNLKKCQRLLFLKFFEILTFSLIIYYFAKLIHKYFLERALKLTKC

SEQ ID NO: 136030 - protein, 22 aa, Heterodera glycines
LDFLFISLFDSKSIREPYLTFN

SEQ ID NO: 136031 - protein, 30 aa, Heterodera glycines; identical to SEQ ID NO: 130616

SEQ ID NO: 136032 - protein, 64 aa, Heterodera glycines
MNVQLRRIDPSVVPDDYSLGYELSYASDTNSQNSVFFRPDFQNPAQGIRSDSGSFLSETWKTNT

SEQ ID NO: 136033 - protein, 90 aa, Heterodera glycines
IIFIQKIFFGVFGAVPLNRCAQIYGETESFGNSFPIVCTLILRWIFAPHNCLSTPNGHLKKSIFLFSGQSPRTDAPRFMGRPNPSGIATL

SEQ ID NO: 136034 - protein, 89 aa, Heterodera glycines
MSAVAMYINRPFQQRFSFLSRFYREANRYFAIKITDLEAVSDRFKHKFVPRELKVWRELSHPNHVRLYKDFMKNDFLFEIIDLAVGGDM

SEQ ID NO: 136035 - protein, 26 aa, Heterodera glycines
MKASFGRWADRMKECFGDGTFSLAPP

SEQ ID NO: 136036 - protein, 76 aa, Heterodera glycines
MIISQCFSSHSSPFFFFSLPLTRPTMPMSPPPPVATNATSRSEIVSASVWTISRRIWCACRTAKLPWEIARPTNAD

SEQ ID NO: 136037 - protein, 30 aa, Heterodera glycines
IKYTFIISLTIFHFKWRVANAKSWSTIRQL

SEQ ID NO: 136038 - protein, 119 aa, Heterodera glycines
MGQGRKEKEEGKEEEKEEGKKEKEKGRGKGGGNEEERGRKRKLSKRKASSCPTPPTFPGEEHSVPSQQQQQHPQALCSLLFFSAASFIRIANSQRMRPPWPPFECPPRTAESVAEQNDY

SEQ ID NO: 136039 - protein, 309 aa, Heterodera glycines
MANLTFLNEASVMSNLKQRYGSMMIYTYSGLFCVVINPYKMLPIYTESVIKAYIGKRRNEMPPHLFAVADEAYRNMVQDRENQSILITGESGAGKTENTKKVISYFAIVGATQQAAEKEKKEGQKGGTLEEQIVQTNPVLEAFGNAKTAELTIEGVDDKDEFRVTQEAFDVMGFTDDEINNLYKNVAGIMHMGEMKFKQRPREEQAEVDTEDDAKNASFCFGIDHEAFLKALVKPRVRVGNEWVNKGQNLEQVSWAVAGLAKAIYARMFRWLIFRCNKTLDQRSTDRKLWIGVLDIAGFEIFDLNSFEQ

SEQ ID NO: 136040 - protein, 91 aa, Heterodera glycines
MAASGLTGNSTGTNSHVVAVVNFALALFGWMEEFNENSFGNFNLRIGINVGPVVAGVIGTEKPHYDIWGNTVNVASRMDSSGIPGRIQVEK

SEQ ID NO: 136041 - protein, 52 aa, Heterodera glycines
MSNNVLVFLRVRIPLLTCVYAQFFAVTANINTFINLFWISVDRFVALAFPVL

SEQ ID NO: 136042 - protein, 31 aa, Heterodera glycines
MVAELKRRLRSSQMQLRPSQRRHPCHRLRLR

SEQ ID NO: 136043 - protein, 59 aa, Heterodera glycines
MFDHAGLKYIIFKMKFFLIIFLFGKLDQWIKNCNSKLLMKYLEKNGKKKKKKIWKKKEK

SEQ ID NO: 136044 - protein, 179 aa, Heterodera glycines
CFMMVRKGDYPQARAANSTPIRFISALANIKLGDFEGKFPILVSEDDSCPCTAIIGTDLMDFISEQGEEEIGLNFKRGLLRVGNTQLPMIAAVSIEKQPIEVQLIETQTLPPLSDSLVWGKINRSLGLDEVFITVEREHDYFPLRVGNCLTSPGSTRIVPLRLLNFGNSVIKVYEGSRL

SEQ ID NO: 136045 - protein, 17 aa, Heterodera glycines
MEHFYRFGIRGRAGPIK

SEQ ID NO: 136046 - protein, 494 aa, Heterodera glycines
MGEAQDQRDEAVQEEELGAVAGTEAEGQPGEDNNAPRGLSGSEGEKTVEAEEVAQDEAEEGPIPPSFVQNEVGSTSPVSQTNEQIRETVNQKTEAEKADSPEGSNSMREVEPRRSRRVRRTREVWSPERCATKRRGIGGPLVSLAMMTMLVYPTLTSGCQPTIRPEIVGQQSQELPTTMLPCHMRCTERGVKVLSGQRLEKMEICCPDGCWAIVPTSTEISYELPTELLVHDYQCSGQCWRGSGPPYNITQRCPARAECDLINCSFCGKQLANPTCNPRWASSLFGFGAAILLAIIGCFCSIFGRFLSGAKLLSRAVAWGVRCPIGLINWATGRDFRKPTTEQIERKVRKGARKARTEIRELQQQLQLGRRARAMARAWQNPDGTRKAFPAKAVAALIPLLLIIGPATANKPLSVMVRSEDCSRTAAGLKCAGTAATVLTLLPADQTNSFVIRTQQDELLGAVRLRLASLTMVCVPKTESWLRSYSISTTAVKR

SEQ ID NO: 136047 - protein, 142 aa, Heterodera glycines
CARKFSQVRRDHRLSAAPQRQQAAAPYAAAPRYYAAPYYHAAPLAGRQLQAALLPAAPQRQAAAPYAAAPRYYAAPYYHAAPLAGRQLQAAPLPAARQLQAVPLPAARQLQAVPLPAATRLSAALLRDPAGIMHEYFYYWQL

SEQ ID NO: 136048 - protein, 50 aa, Heterodera glycines
MCRFFCYQWFCVIYAILFLPTQIRCCHPEGRAPREGRFLGVVFLVFIVFS

SEQ ID NO: 136049 - protein, 94 aa, Heterodera glycines
MDLLLFQRDKYALAYNCTNFDANLVPIGQRIHTVHGIILIIMFFVFELSPKRRHKNDLFICHMGMSIFFPLVVVHSLHDVHVPQFDNWYHRHGK

SEQ ID NO: 136050 - protein, 73 aa, Heterodera glycines
MSSFSLKNYMQIGLITLKKMIALYCFLDRIVLKFAKLNQYPNLYVKTQNHSNFVISKKSGLVSVGNGFQRENE

SEQ ID NO: 136051 - protein, 139 aa, Heterodera glycines
MPSPSVTIVNIAYLILSFEMFTDLSVLAIACLNLAVIVPNKLLHTNLKSILITQSFAVLYFGILRLVIICQRLIYVEPLMSDDVILSILMNFNSVFRRLLGHMLIIERFLATFRTNSYEKFSKTYFTVTWFSITVFILI

SEQ ID NO: 136052 - protein, 49 aa, Heterodera glycines; identical to SEQ ID NO: 130195

SEQ ID NO: 136053 - protein, 24 aa, Heterodera glycines
MRIERARFDEVLVSQKNIQIFKNL

SEQ ID NO: 136054 - protein, 38 aa, Heterodera glycines; identical to SEQ ID NO: 129423

SEQ ID NO: 136055 - protein, 383 aa, Heterodera glycines
MDDYLQFFRENYEQILLETSQNIAKAQAIQKAQFDAKRNVNPEKYKIGDRVMVYFRPSVKTDHKKLDPEETSGMCHNSLCSGIEEHSNCAAITLADLHPALAVMDKLRNVKIEMLGELISLMIAKDVPIAQIRNWATNRNTHGPDFLLKFSSNLSPSSQEFISIISLWIDRCDFAFHNLQASGCKKIKFLIPKENKSYPFQKAIEIAIEDVKARSVLGLSKVIRSPFIVFSDSVGEVMKNKLEAEIFLERSYTALSNEIVTTYFGEEVKKILIMAGTDDIIGNVPIEETKKAIKKISFHLSKFSIKTFIIPLPFISKKSMAHEKFLDLLDEIVPKSGNVILALTRGHRSIAEITRYGDKEENRNVDESGKLKDGGAKITLKFL

SEQ ID NO: 136056 - protein, 294 aa, Heterodera glycines
MCSDVWMDILPSFDHAQLGLKLALLSPRFNVLVDKHFDGKNELTIWRQIRIAKNGTKAKFYIDHSVIEFLRANEQIFDKGIDLDFYVEANDVQPIWDVFAREIWPIFATNIRYLTVSDLHDLDNLRRHTSPTVLTDFNIISIHSGDLPDAIADDGPNATIGQALSKWLNTPTKDGKPKQLSCRVGTSETIGFINNFKEAFLRATISSASYIIRLVLLFDESTPIEPFELKNERTNEMLTLAKEKYDESIDEEDDDDDDGKHIYLVLKRWQIGKTIQWEDEKLNKITFELFENCI

SEQ ID NO: 136057 - protein, 343 aa, Heterodera glycines
MWMRVWSSKIAEFREELYDKKFFGTILGYGESMEFQGRGGPHAHIVAQTDLDAVPYVIQEYIWAHIPSLPDKDDDTPIAKMHREIRETMHMQLHRCSDSWCGPSDPIYGRCKKGFPAPYSKCTILRPDRPAMYFRPSPSDGGAQLEVNGLIYDNSHVVPYNPYILLRYRVHHNVLFAYGNKANIKYALKYPFKGPGHCYVECKEESGNKIGIDEPAQYAKMNFRGATEAYAIVHSMPFARLSHHVVKLAIHLPNQQPIVYRAFQLVSKAQQIQQGELPETQCSAYWKQWQNEWKNDPKFKDILFEKVPERFRWAKDKWVLYKRQQIKRPPIGRIVPVPPSDPE

SEQ ID NO: 136058 - protein, 190 aa, Heterodera glycines
MEEEKRQQKEREEQSKYVYAEQFNAILEKISDLEGTKQKEEEQQKGMMKAAKNFIVEKCEATNGRMGEIEKRLKSEKGKYVSAGQFEKVLDRTEKLEKQLKQMQQQQKQEAKAAKYATVEKLEETFGQFGEMLKQQKQKLEQLDTAQQKLCEKMASMENFVVDLFSQMQNAQQTEIYAKIDEVKIILKKN

SEQ ID NO: 136059 - protein, 134 aa, Heterodera glycines
MQRSRRDPTPPTSPKRMRAPTPRPIVGLPIPVVESNRPAEDVSSDDDDGYGNVAHQNIVQRQELDIGARAVQRPIARVPPAFRQGPVRRPFPPLLLPRQAPPIVNPLGQNPQQMIRWPRQQWIGRPIDPRSPPH

SEQ ID NO: 136060 - protein, 100 aa, Heterodera glycines
AGCMALPANTGQGLRRDWEAYVDSHTRTDRPSGCRHWRVIEKIEKVWWRHETTPTKDRLSSGVRLKLSKSNEGQYHSVCEAVARTRTNSNYQFLFFQAFP

SEQ ID NO: 136061 - protein, 109 aa, Heterodera glycines
MSEFLIFLLGFSFAMLLMLCIFYALEFAKLYQTVGREISRDKFRHIMKTGKKQHELALVFMEKAGINTQEKTFGLKHLEFVQNFWDKEFPDIFRIVAFDMVNEHFLNFV

SEQ ID NO: 136062 - protein, 190 aa, Heterodera glycines
MGSSVSAPFFSAMTILANSKLFPLFFVLAIGIPSAVLYCSLLLAIVTNFKHFSSPFFILIIIRAILEINNSELAAFSALIFFIVCLLINLATLLAYKLRSYYQQNGQDLAIERKMTIYAVATFFGQLLMAIHMFFVDITATNFVDEHNNRFSYVQAWFSVSLEQNEILFFANLNQNPWVNDLSTVVIPAW

SEQ ID NO: 136063 - protein, 312 aa, Heterodera glycines
GPGFLIIHFLIYHTLSQLHDAGLGSPHCSADREEWRTMLENSQDTSMLCQGNCIPFIRSSTPPATALGTMPMPSSDHGTVVGDGAVEHDQQQQMMYTREELSNPNLDSVQILGIALMQLVHGIRRDCFYNTFMMTIKKNNGTVLKRPTPSFMEWQKGLKACQSPSAVALFETTLEFAINWDFKAEDGTTVSQQQKAKSGGRRRQMPRDGSAKTDDENTENENNASTSAAMAQKQQQRQHTRQREVNNLLVEAGFLGGMAIGARTRKPVTKYGDVEMDVDKLNFDEAEEEEDEQQQRREENAEEMEEEYKEEQ

SEQ ID NO: 136064 - protein, 67 aa, Heterodera glycines
MLYMTYAGAAPTLLKCGQHVFPDAEKANKRCEALAGMAKSNQANCTSQNAEWAIQFRTVNVEFDMHW

SEQ ID NO: 136065 - protein, 18 aa, Heterodera glycines
YSEAIPEGFGLPINLGAS

SEQ ID NO: 136066 - protein, 49 aa, Heterodera glycines
MNSRNSSALRVATFSLVAMAIGLCFVTVANVVQMHLLTALFADELTPTP

SEQ ID NO: 136067 - protein, 119 aa, Heterodera glycines
QTLATEENGATRLLGICNLWTRHFGTRLLGIPTFGDPTFGDPDIWGPDFWGSQHLGTRLLGIPTFGDSTFGDPDIWGPDFWGSGHLGTRLLGIPTFGDPTFGDPDIWGSNFWGSRHLGI

SEQ ID NO: 136068 - protein, 404 aa, Heterodera glycines
MAAMFLPADGQYQLCPSKPTEGITVTMSFPEEQNCTLPVEKPPLTVKSNLYIPIRISRVFPTFKCWNVTTVTCTESFLRIMTLDHPDKKIEAEASVEDCQASIHHSPMNRVSETRWESLAPIRKEYGWYGVNCFNNVQTVIEEGKAEILDGKRLITSWGDSLKIDKSLGEDGSWIRLPGAVELLMWKIPSDEFWHSHFVIGPVITEIWPKKAVIVDELQYTFPISRNQERKFPVFGVPEDALKTDNNVFVHVIGKVNSTKGARPRRETASLKPGQRKPNVPRIEPTRRPNLRRGQIAEIAMTTRPTITTTNIPPTIRPVSTTRIPSTIPIIATHTPPTTRPIITTNIPSTIRPITMTNIPSTTRPIATTNIPLTIRPIAITNIPPTIRPITTTNIPPTIRPIAI

SEQ ID NO: 136069 - protein, 109 aa, Heterodera glycines
MTEESVILSFSCLYSVDVQSGLLRTLLADAHVLLLALLCAGSKPVAVPLALHLLQKALHQQSLVLAEAVQQEEASGSAGGTQRNIGQFLCPWSERRTKQLQVEDFPENV

SEQ ID NO: 136070 - protein, 95 aa, Heterodera glycines
MGVDGGKLRAVMRHIEIMRREEAQLRNQRHYQLPERKNHTPSVSFLVDRDSFHRSVDVIDSEKVQSKSPFAANTNSHAKFQRNDDGSTKLMAREE

SEQ ID NO: 136071 - protein, 70 aa, Heterodera glycines
VLRRSLKLCRAHLLLSLTISSVFVGLFLGFALRIFQLSPETVRLVNFPGEIFMQVLKMMILPLIFSSLVS

SEQ ID NO: 136072 - protein, 44 aa, Heterodera glycines
MGVLTLNIECREKGVKKTMQFEPRTLVHDACRLIRDKLGHMPGN

SEQ ID NO: 136073 - protein, 81 aa, Heterodera glycines
IARCIAGEVPPLKKPKHRAADARILRLLQEYNAINNNPAIQNDHNYHANVNPDNIINLLLTLATFFPIAENGEYSFTYVSA

SEQ ID NO: 136074 - protein, 113 aa, Heterodera glycines
MKRCAAEYERKYCVETDTKLKQQTTKNKEKKQQQQQDESPEEYYPTNYEPAFNYDKLHVSDIILPLTIHQKDKYQAQNGPTKYEPKAEGQHVTSSVTTAGVQYNNILTFQNIF

SEQ ID NO: 136075 - protein, 168 aa, Heterodera glycines
MVFRQRSSPTEAQHQQSAEDQQKAIEEKKEQTRPEQAKNVPPDQQKEEQTEAISKQEQQQQQKKGTDNEQQHQTTSSSATSSSTSTEVPKQQSSSPPPPPPFTQLTDNGSARRHRRPSRCVRKAVEKCSSFSRWPSFVGFRGSKTALTPRPSCAVAYGCCIRGTRRDA

SEQ ID NO: 136076 - protein, 115 aa, Heterodera glycines
MKSFGLSSADQINRRTLRSLFCIIAVNIGGYFINSFYMNLIKSSISSPITAWFDQYGVSTGIPNAVPICLQTNFQSKSSDTTPAAEWTSTQLVTTNSHLISIYPDIYIKNREKVN

SEQ ID NO: 136077 - protein, 16 aa, Heterodera glycines
MKMIIKKPWKNRENLS

SEQ ID NO: 136078 - protein, 37 aa, Heterodera glycines
LINWHELSAYKIEKNKKTYLYIVKKSSYQVDCSNYNE

SEQ ID NO: 136079 - protein, 273 aa, Heterodera glycines
MTVGHSDPLVFDGWAEADADALGVIADTICRVIPQARGEQPETAISWPTRATSAPSSATTVEKKYPDLIWHFIKLRLNCAIFQKSDGASRDCTRIEHALDLVLVVDSSTFSAEQFAKVVEGLATLVDESFDLAPDVVRVGLIVYSEMVAVPVALGHYEDKIELLSKMVSATHKINVARAARCAKSGSAADQRQTQVGGWTFALAHVVLLIIILISRIQNHFLIDRGNAAPVAAELREQLGVQIVAVAVAPSLDQLNTLTRIVADPTSVAAATT

SEQ ID NO: 136080 - protein, 41 aa, Heterodera glycines
MKSTFFQLTFSVKKGFLNFLQQNSFVWPEISTLSFLRCGRF

SEQ ID NO: 136081 - protein, 30 aa, Heterodera glycines
LLQKSEQRLERNGRRLNERRRWRSVVVPIG

SEQ ID NO: 136082 - protein, 35 aa, Heterodera glycines
VCNDPFGRVRNCRRLLSQKWNYLNANTRPLRRNAK

SEQ ID NO: 136083 - protein, 82 aa, Heterodera glycines
MSSADSSILSAASMFAHNIWKLTIRPEASEREVIIMMRFGIIAVSILATVMALTINSIYGLWYLCADLVIILMHLIIIDWIS

SEQ ID NO: 136084 - protein, 208 aa, Heterodera glycines
FQYLCNQLKKVKKQRKKAQLKKKKKNNTEKDGAAAQQQATTSKPQADTHAKEESDEATLVRNMVDELAPLWEELSNCLSLLEKAEDSQPAVLYFQNAAEAFFLSYSLVIPQTAQLAPSALPETAPTGDSSPQLASSAAGGNSGEDELGRYQKEMFTFAGGLLREWYSLITREIFHPDYALFITAPGDRVTYMINKNSYVNPEHLGFFR

SEQ ID NO: 136085 - protein, 153 aa, Heterodera glycines
AKFAKPVPLAATARLTRPLEPILFPKLRIFADFPYLHYSRLEAVHLGDLLRISVRSGRRFKLPSHFQGPCGAHETPQEPRCFTGATSLSQAEPLPGTHTLNEKRTLARTPHDVCEFICVTAQNSSCEPSFLAWRGNEPTSLSATGWTNCASTE

SEQ ID NO: 136086 - protein, 55 aa, Heterodera glycines
PGMCLGFAFRISPFAFFWRFAFRFLARNATFTPLRIGLNSHKIFQNFTYKLANFQ

SEQ ID NO: 136087 - protein, 376 aa, Heterodera glycines
LFTSSAGVPLPPSVSLKKANQLDASALNLAMQMHPFDAFASGTFLPPNGPSLSNGGDGGVSPTSALSIPALLMACASGQLPQGCLACTYRLKDGQLCGSIFPTEEQLFAHYKNAHIGKQSSPNVVSSTTSQGEQSAGTVTVPSTAVTTSAGKKGPAGSPSSSRSTPTHQTNKVSQNSAKGATPNAKPHSNPGAMFNNNGTAWPSVGLPPGILPMGPPLCLQQQTAQQWKDSSPLPCQSAGGGASASHRFHPYAQQPNGGKQSSQTHQQGVTPNLQQMAMAINNLGLFANLGALPTGGFFPPGVDFAMLAQQQLGQSPAGAHPATPPATTVHQQQSQLAALAAMANSIGSKGGTSNGTTMARQQQTGGIATLEAVDG

SEQ ID NO: 136088 - protein, 373 aa, Heterodera glycines
IRLPNGDAVEFSYSNAKLGNPLLDNSKPRLEVGNRLEVGNEPIFPAECRQRGITYRSPFWVNISLMVNGRCIDNVEVLLAEIPIVNGRCIDNVEVLLAEIPILLRSNKCNLHGLSKEQLIQKGEEGLERGGYFVGGYFVVNGSEKVVRLLVANKRNFPLALRRRAFRDKGKLFSDCAVMMRSIRGNHLASMMTLHYVENCSMILAIQFRRELFYVPLMFRRELFYVPLMYILKCLVDWNDAMIAAQLTAGRPDDVFWEGCVRNMLMMAQEENIVPHGIALRALGNRFRVALGDRIAPWEDDEQACACHFLLHQCLAIHLETNEQKFFCLTLMAHKLVGLVKNEVQAESLDNPQFQEASVTGHILEASVTGHIL

SEQ ID NO: 136089 - protein, 29 aa, Heterodera glycines
MAISFFEKFSMQQTLSNMKRSAKNGYLFF

SEQ ID NO: 136090 - protein, 29 aa, Heterodera glycines
MAISFFEKFSMQQTLSNMKRSAKNGYLYF

SEQ ID NO: 136091 - protein, 29 aa, Heterodera glycines
MAISIFEKFSMQQTLSNMKRSAKNGYLFF

SEQ ID NO: 136092 - protein, 53 aa, Heterodera glycines
MAISIFEKFSMQQTLSNMKRSAKNGYLFFWQMLGTENWTCQVGKHIFKQKLPV

SEQ ID NO: 136093 - protein, 64 aa, Heterodera glycines
MSNNENENVMNGEAVGGVEIKVEANEEVNTESQEDGEEAKIPQFSKEQMERSVMCCTNEGEIVN

SEQ ID NO: 136094 - protein, 74 aa, Heterodera glycines
MDKSAEEIREMLCLEDDLTEEEKAAITREYDIPRDFPTIPLPDQPELSDVPGTSGTSSNSSNNEGKKMNGYAKR

SEQ ID NO: 136095 - protein, 237 aa, Heterodera glycines
MANFPPNSDEEFDRGNFSSLSGMVGMNQRHLDWLMKNISREDMAELQQRTGQCARKCAVTYGGPIVVVTIGFLEFLRRKQNLPITAPRFLIGYPIMCLTSVALGSSIGFKRSGCGAEMRLFLDKLYAKYDSQMNAASAQMAPGVGGGTSPTKTYAQLREANRAGRPIELGQLKQQQTRQQQKKMDGRKATTEGTEGSGGVPSDEWGRFGLDGVFAPSPPASSSADGTAPSPPRPKSF

SEQ ID NO: 136096 - protein, 198 aa, Heterodera glycines
MAAIGDEKERAHFERQILNNSEFRGELKTMEEKEKAISKGQRKMEPNEIAELVEKHFKVMGEHKMEGEEEEKAETKVRLLLLMLFGIMPKNKHMEGKKIWEEKIWGKKWQKHLKDLIKKRQVKVSNTKQLGTDNLEKVKNTTVHLSWAVTFGPARLGPACFSSITFFNFFRCHPSSNIVDIIRKHNMFRSFSKLLSRD

SEQ ID NO: 136097 - protein, 27 aa, Heterodera glycines
MHRIIAAVKKLVVGSVLAVRCTLCVLL

SEQ ID NO: 136098 - protein, 159 aa, Heterodera glycines
MPAPGQCLCRRLPFALPLLLLLLFPPPLIPHLPISSASADQCQAPPLRIGVLLPDAYRRRVEPWLALAQRHIRQFSAAPTPKCRKWGSVLRINSLISQLFLGSSSAHFLRAHCLQMIPKNTDCRPSLGLKALFDLMAVSENDKALVGMGSDQSAQNHQN

SEQ ID NO: 136099 - protein, 72 aa, Heterodera glycines
MPETWHILSCRPRRRRCFIFLLYKAYVAVWRPAAFPLLIGMERQLGALLLGCKSRFSRQKAKCEMRNAKKCE

SEQ ID NO: 136100 - protein, 69 aa, Heterodera glycines
LLIMQYNAFKPRREAGQFQNFVPHFTVESPSTLLDNYVSISTVAFGQLWNGKMGISDGVRSFLKIPLFV

SEQ ID NO: 136101 - protein, 76 aa, Heterodera glycines
GGTVPNFCTTFYCGKSKYLIGQLRVNEHSRLWPVVERKNGNIRWGALFSKNSSFRLTIPPFCALFRFKIESFFFVF

SEQ ID NO: 136102 - protein, 107 aa, Heterodera glycines
MSNRVYIGHLASRATDRDVEHFFRGFGRIRDVVLKNGFGFVEFEDSRDADDAVYELNGRELLGERVVVELSRRGGPYGGGGGYSGGGGGGGGYSGGGGGFGGYRGGG

SEQ ID NO: 136103 - protein, 370 aa, Heterodera glycines
MALARCPPSPQQQPPPLARYGAPPTLVNGGGGGQHGQAVVAGGGGAGGLHGHTHSHHGSSGGGGTTPTVAGPPTAMAPPPQLHHHHQHQHSLHAQQQHQAAATMGIGGGGGGGGHAALLVNNNHHHAAPAHNNHHHHQLHHHHGSAGALSSMATSSNGINSNGTIMPSLTNGIVSGTGAGGSGAVVSPSLMQQQSQQQHHHHLMPVQSMPSFLAQQQQQQSTHHHQQQQSQGSSAGAAAASTLLSAAMMNGLGGSQQQQKPLFALFDLKMDDHHHQLTSSIHQDGAASAASAGASSSLRSATTGAAAASVPSITTASLPLSGANGSALNGIGGGGSVVTTPTNVCGGGANNIWTYGPSWGEENRNIKCQF

SEQ ID NO: 136104 - protein, 105 aa, Heterodera glycines
STNSRFLFPPTPALTATRGDNLAESTVPPPVREAAPLPPAPAPPPPPPPPPPPIPMPPPPDEPWEWVWPWSPPAPPPPATTAPCCPPPPPPNPPPATPPPGPFTL

SEQ ID NO: 136105 - protein, 446 aa, Heterodera glycines
MYKKEYRLAEIDRQIQLMIDAKAKIQEEEEEEEQIKERRAYSEKIKRERKRKEKEQMEAKSEAKRKEAEEKAKEKAKAEKEEWKRALRRPAAKPEEKARKEAENEARKEAEEAVRKELEEEARKETEEKARKEADEKARKELEEEVRKEAKEKAAKEADEKAQKEAEEKAKKDEEEKKKSEKQQQNVEKRAEEKAEETIIARGIKKRRLTEEEKEKKQSMEKVEEAHREIREIVKQAEEDAKKREIRKKIEKLTAKLSGEQNGKRDEKDTAELEREREAFENPPAPPKDRMPFYSSSVARFECQSELDSAPKPREREERSNRERMSLGTSGKRLFENTLKSATQTVNEKPCIPPEGLGLKRRESAMEEAPRGRRPTPVPGQRQLERSPIRKNNSYLKRALALEKPEETIYKIRKLLLEAADRLSELADLLYPYDGQKTKKEETAEE

SEQ ID NO: 136106 - protein, 21 aa, Heterodera glycines
MRTRRICQVKQRLLTSQKKML

SEQ ID NO: 136107 - protein, 22 aa, Heterodera glycines
NLLKNLKMRIHARFSGNKLNRA

SEQ ID NO: 136108 - protein, 27 aa, Heterodera glycines
NSALVLIWQKIKPFFLRTHGCSIHPTK

SEQ ID NO: 136109 - protein, 166 aa, Heterodera glycines
MLSNSTKSSFQKLKKRKTQKTETVSSGSSDDHHQRKDKDRPKGNGASANADQQQRRKDRGPMVGDVEQRIRTTTEVAVELAEAVPEGDEAAVTTRRKRRHHQLLESGEVEAVSAATIEEQQIVELPPPPQPPRTMGSTTTTLETSALGLFFISIIGRPIRLTGISN

SEQ ID NO: 136110 - protein, 194 aa, Heterodera glycines
MRKENNKSSAASADSDANAKSGGDASLTAPTEEEAEEISANEQQKEQRKSLDALYAAAREEFDLDMSPLDSAMKTLREGREIQKLSVLRNLVELVEGEPDEALHRLLPMMQGLLSVTPSNLDIHCEAAIAYKNCIKEKKLQQKCPELSDRFLVAILENIEAQKENVTATAWLESLVDIADCVSMQSIVNMVKQK

SEQ ID NO: 136111 - protein, 72 aa, Heterodera glycines
VVPLAVAQADSGKRVQRRVISTRLIEKLALLVPKEILQRELSPCAQMLCQDPSAAVRTSIAQKLSMLAQSLK

SEQ ID NO: 136112 - protein, 392 aa, Heterodera glycines
LQLCRTLPKIKQYLMFPNNDESLSNLERVVRELLASEQNALSRQLIQQFACELSRTEMDKKECRANRAKLAEEKRLWTEHEESTDETDEAEAGQQYSTEHTVTGSDAIGSPESGIFFEEDCWLGTGVGNGARPNNHQQMGGRLCRSATTTSISQHMETEAHSNLITAPSASSEMLSAMAIEPFAASSPKAARRRPPPPPPKSWRTTTTIKSANGPKLAIVRPQPQVKVVNQRSSSPMPFVDAEQQRKISNNKLPNETPSAATSKAEANNEQISDKKQHHQSDTDRHYSTTTALGERGKAPAESIRKSKLPLSTNGGRHRSSSSAPPVPPPKPKLPLFTSSSGNSPPSPYTTAASGTSSVTDSIKLKKYRPRDISTTSNYLYIEMDQLPMPSK

SEQ ID NO: 136113 - protein, 79 aa, Heterodera glycines
MVPSPVVVPDVEAEAFRTMLVFIYTDDLSGIDGDNLFDVLYASKKYNIVGLVSACLDFPIPSLPNVFFAFAQARFLEEK

SEQ ID NO: 136114 - protein, 294 aa, Heterodera glycines
MKPPELQYHHILSRGGGLGQRWILDQAAKIDWQIATFLRRPDMDLRISTPKNLLQYLVNQYNRQQARQNPNAQQKTVDDIGSVVRLSEHNVNSLQYWKKMYEDCNTVFARCHDAKKARLFITFTNNREWPEFKENLHKNGQVFTDRFDMWMRVWSSKIAEFREELYDKKFFGTILGYGESMEFQGRGGPHAHIVAQTDLDAVPYVIQEYIWAHIPSLPDKDDDTPIAKMHREIRETMHMQLHRCSDSWCGPSDPIYGRCKKGFPAPYSKCTILRPDRPAMYFRPSPSDGGAQLE

SEQ ID NO: 136115 - protein, 18 aa, Heterodera glycines
MAIRNACDRAGIDHVWGQ

SEQ ID NO: 136116 - protein, 58 aa, Heterodera glycines
SFLDFLGIPVMMITYIDPKRGQYPLYHTRYELPFVNEHIFDNNQLAVHKAVGEYWAEL

SEQ ID NO: 136117 - protein, 78 aa, Heterodera glycines
MAICACPAFPIEMAIYMPNSVLTSNKIHISKETYMLLHNNFDGYAVESRGEVIIKGKGVMETFWLLSNAEIRSNNQMM

SEQ ID NO: 136118 - protein, 16 aa, Heterodera glycines
EAIPEGFGLPINLGAS

SEQ ID NO: 136119 - protein, 254 aa, Heterodera glycines
MPMIRRQLSDHQLHNASSISDLSNPGIMVVGGPSQTPFCPTRGTANGPCYAPAATPADVIYEYVDQGSLSLASTLKAGDFLRSRSKFNVYDPVPPMSNGQQQQRQQQQQHRRVESTSIGTQQIADNDHQQQQRREIYGDNEYLQPKSLTSNESDDNNLASSSTVRHQKALIVPVDVGTFRAISRECPVVPTTTTTSSSLSSPPSMASAYEHVMPQIPLNTFPNQTPPQRQWEAEILAELKQRQQQKQQQQQRQN

SEQ ID NO: 136120 - protein, 130 aa, Heterodera glycines
MADRQQQQPYLINPINNRYSRNLSKKRFSGSYNKKCFFKYHFYNIVDNASSADWRRGTLQSEAERSLGSSRAATTFLGSPPEAAATDFGQTVTKTFGQNGGMDNVGQSVDQQFGRRKFFGQNDVSPGTDV

SEQ ID NO: 136121 - protein, 117 aa, Heterodera glycines
MRKRTTKTGQHGAWIWVCPNICHEIRVSVSSSSELNRDKREEDDDTPMHDGEELDEEGDKSDVGLETTAKNDTETTGEPSTDGEGAEEQQQQQQQETVQENLEIARKKRDENQTGEI

SEQ ID NO: 136122 - protein, 669 aa, Heterodera glycines
MKRKLFNSIVLHDNSIHIVKTLNLLFSQIDSINNFRCFGEGNLTIGTPIYCREHDCFKNNSFKQINGTKFCFYDPYEKIYLVKSDEELIQIKAWGTIEKIFYLPNNLNQPFIENRRNKREENSSITEESTIECLKGGIIIKAINDIQELQISIENYTIIKKNPQKEEIIYLPPKLTSFEYKPVIKFISNPDKSNEKQITCQSSPVCELINCRFCMEYLKNPQCVDQIHWALMLVIIMIILYVISLSLQIIRILTRFIHWILQFIFNCFKRKPKVNRIRISRPKLKRPLIYLITSSLILFKMIFACDEVTNLVAGTNDCAVTQEGKIECSYDQTTQLSITPEHLTCLKLDNTKTNTTMETLQITIETLTIICTEKSDYFTRGCELSSTSQKRCSGAGKCTGQTCQSVKISDRNPEVNDHANNQPGYSYCVPSCGGWHCQCFLATDGCLFYRTYAESVGDEIFEVVNCPSWTIQATIKLSINPELTYSVDLKPGILTHIGDESNSSISITLTSTSIPPTPLFGSTFIIVREELKAAIVANGNLLKNILRCKNKEEAQSFSCTFPPEACQCHGGDSVVHCECEKSPLTEIFARQENLLPIKTQGSYVYFDSQIKAKIQQTTSLQMQVTLKGHKVKAIYDKIFVILLPYHWKDVIPVLVVLIGLYHAKTCPHG

SEQ ID NO: 136123 - protein, 94 aa, Heterodera glycines
MPVSDFLRASSQIPQFDQHRKQSYDDPKNCPSNFWGPPKNWTSATVWVGQTHALTNGKFTADTHLKIVAKFNTGQMKGDLFTEEKLLKKKRAEE

SEQ ID NO: 136124 - protein, 99 aa, Heterodera glycines
MGCVYPYDEMCQQQRMNEQMRCYTCDYDNCNAISNPYGPGNSPYSNGGYDPYNNAQRYGPNGRYGYYWNGAMKQRQQQTANLLMALTVTLMTQIVLSIF

SEQ ID NO: 136125 - protein, 218 aa, Heterodera glycines
MVTFSAWISVCTSRIIWSINNCHGSGEREAGDEVEADEGEKEEQDEWGDEAEAEVEDEEEAEVGGGEEEWKREEEEEGDKEAEEGKREEEEEGDKEEEEEGKREDDGDPSEKPTDAGKRRGAPCAAAHQANSAPSDAAHFSHSENAQLEAEKRHSGGGFMSGRALTLMASEAAMMTTLRAQIGAAQQHGIGVAEDVQQGGISVHVFANLFHARHFWMV

SEQ ID NO: 136126 - protein, 91 aa, Heterodera glycines
KAAAPRRLRTGRSVFLSSSPQPPTPCDGAQFAQMPCRCCKMDCWYSVAGSAMHQLGHVPGEAGEREALATLRLIRACMIAECTPLCAHNLM

SEQ ID NO: 136127 - protein, 185 aa, Heterodera glycines
MLDSLQLNVPVSGTNGNAIYGVGIGILNGQKETDQQQKRSSVFARQKSSSEEADRKKRLTMPLIYRMYESQSDELCGTVRGPDDDAFHPEEASKRLRHALAAGIQSDDKTLIDVLLEHNNFQRQKIATAYENMYGRILADDIEEESGGHFMESILQLGVIRDTYQVRFTREYRNNPTTTVTLFTE

SEQ ID NO: 136128 - protein, 102 aa, Heterodera glycines; identical to SEQ ID NO: 127888

SEQ ID NO: 136129 - protein, 116 aa, Heterodera glycines; identical to SEQ ID NO: 127487

SEQ ID NO: 136130 - protein, 115 aa, Heterodera glycines
FPHGTCSLSDSWPYLVLDEVYHLIWAAIPNNPTPRHVKMGRHRQLDRSCTFSGAPVKGNLNKRANPSSRSIRYTSQPQRSCDSALDSSRVHSPLLRESSLVSFPPLTDMLKFSGC

SEQ ID NO: 136131 - protein, 108 aa, Heterodera glycines
MRKNTAHFMTFILIAVAPLLITFVPLLSLLYLLSNLYLFIKFVPLLISGVPLLITVVPLLITVVPLLITVVPLLITFVPLLITFVPPIITVVPLLITFAPLLITVNLF

SEQ ID NO: 136132 - protein, 88 aa, Heterodera glycines
MTTCIFGMNESDGIRQDPATDDEVLSGDEKDSMRRKERPVGVVGRGRGAKWTVEDEEGEGMGTEKEQDGAWPSTGSASAAEGRGRCIC

SEQ ID NO: 136133 - protein, 130 aa, Heterodera glycines
MATRRQVRVFTRVDDAIRHIRDTTPRPQEHDGHQNANNSANLNCGTNTDQSLADQLKQHEKPLTNQKRTALRQILEKQHLVKERTSINLLAHLREAAARGQRLELDLAEIRPDGCISMSIDLNQLRPLAN

SEQ ID NO: 136134 - protein, 77 aa, Heterodera glycines
MSSSSSPQSRYDYLDFAGKPDQPQQHQLRRQQQRAAPQQRVAVPPPALRRAAASADEPLYATASSQIYSLGGSEDPY

SEQ ID NO: 136135 - protein, 185 aa, Heterodera glycines
MKKELITVAENKDIFDKIKFRTKFEVSHAVWNPKISLIALGSLDGEVVVKRYLWKTGLLDTLLKISADHPAFDPKEILDENCANILNDFEKTFQVLNNYGIHSLVRQPINKNKCYVLAPDEKEAIIQQIGHQIEENSEEETSDEEKMSEDENGVGHRELENDPISLHSFIFGHSEQRITEERMEC

SEQ ID NO: 136136 - protein, 75 aa, Heterodera glycines
MVESGESENDHNKWYLIFCVCPVSFFSLFVMVVPSAITSDGDDVVVPYDCDDGHGWMPELKKRRRHHGQWKCPGK

SEQ ID NO: 136137 - protein, 38 aa, Heterodera glycines
FLLLALWTNVPFLQVSFVIFDHFQYLPAFVSFTLLSMF

SEQ ID NO: 136138 - protein, 30 aa, Heterodera glycines
KEIVRQNERNVFFSALSIYWFMSRFLKRCV

SEQ ID NO: 136139 - protein, 122 aa, Heterodera glycines
MPACSSSSSTAANVPQPSSSSLSAAEEFAKQKKRNKNNKNKFNKKQPPPPSIRIPKGKTPKKVRPRHPEPDQPDDQYELRAVLATAEVVSGGTTHLCLLSRARGLVFVNEKRRPRTDALPRH

SEQ ID NO: 136140 - protein, 74 aa, Heterodera glycines
SLGVDVQAFPRVGPPFNAYLGAVKGGRQAFLRVGPPIVFCFSFLSFSLTFPNIWVLMGRPSLVLVPPSMLISEL

SEQ ID NO: 136141 - protein, 133 aa, Heterodera glycines
MSEQFPSFYMAIIFGVFLCLGFVKIYEVHGLTCPHGLKSETETRKPISESKNVQCYMMKNWLSMSVICLTARMKFSFYSCPIRLPPSKLNDNKYLNFKYYFNDIKREKNGDALQISLPIWRRLRKNAVTGRPV

SEQ ID NO: 136142 - protein, 92 aa, Heterodera glycines
MPNILFQLHFLVSSLCSAHNVTSPAELSAIAPVNLEESRKWGWPNTNDERDEGNGSELESTVDDDETEEDLEMEDVETAMARQHSADGEVIF

SEQ ID NO: 136143 - protein, 74 aa, Heterodera glycines
MFLLVPNLGLVGFTGASARYGGPFVTLSELKICLANYFVSGLFRVTRYPKPGIFLDPKPDPMILGRVSGRNKHW

SEQ ID NO: 136144 - protein, 47 aa, Heterodera glycines
MSTFWRLALVQKRLSDYFNAICEFNGKKADDNTIGTMRPQQLSAASA

SEQ ID NO: 136145 - protein, 119 aa, Heterodera glycines
MSQRYRFFADKHLELLRRYHEWMKDSLLLLEKELNLGGGVGDELDNRRRNGQTERQISKFGRKDGGESEKSQRDKWQQKETQREQNGEETDKRGRKVRIIRPNEKVIKREEGSENDQTK

SEQ ID NO: 136146 - protein, 102 aa, Heterodera glycines
MLTRDLRDSQVWKTVVTVDGISGGQAERRGQRSTAKDEKRHGDTEAVALRRHFYAEKPTNEQWQQNGRVALDEDGHNANQQKLDRGENCLPLTHKFNPLAPN

SEQ ID NO: 136147 - protein, 196 aa, Heterodera glycines
MFHSSLLYGADSSVRTAAVRAYVAFVCDNEENDAVIRQLSDLVPAVIKVCQHVVDTEDDDGGLEVMVSICESSNIMRKKGALYLPPLIQQCLQLMTELDDELDEWLQMDDAEDELEEETATIGETSLDRIACALGGKAVMNHALQCINELLNNENWKCRHAGLCALSTIGEGCKRQMEPLIPDIVNNFVLPKMADP

SEQ ID NO: 136148 - protein, 276 aa, Heterodera glycines
MQSAAVHFSATEDCEIPDAPLAQVDELEMVEGSFAAFSSSLTDISAGDCEKSQSDEGPGEDLSNCSVNLSSSLQDLVESFDDKVAVVLKDFEKDAEKIAPIKIRSQEEIMSESQFWWTLTGNYGNLPPIDFDNSQIRRKQLEALNFNSPKQGTPTDRSVVSDCDSSEDTERIDFHRLATAQTHNENGESLSFNADKVIEEIDEILQAGDLMNQSLATNRTIESVDSMYSSMRSPNVYSDIEAEFKSKEREGIILQAMIDDSVHLPSLLTDYILNGR

SEQ ID NO: 136149 - protein, 171 aa, Heterodera glycines
MGNFGRQIASCGFAVLLMALRCSVGDGTLDRLVEMGKHFGITYNGELFSADWMCEFVQKHWSNACELRVAQFPSPNSIVRHLISGKKAHHQCTTTVLVPYDCDKNFEPCNRQGVAAHWAIIIGFVIFDVTAQNGPENQNAKVIAFDENDFRCDGFDNEHLLYLIALQGKSR

SEQ ID NO: 136150 - protein, 125 aa, Heterodera glycines
MDYGRNEGILQIREFQRGGAVSNIPGLVIAAQEGLEAQHAKENKGGDKVNLPTNDITRQPRVNIKEGRKLVTLLVNLLVGISQFFTITFMFVGWFWSIAWGGLIIIHAMQYREALQQRRQEAVAT

SEQ ID NO: 136151 - protein, 310 aa, Heterodera glycines
ALCLEGVVADRGKERNDKMPTGDIEVSVPFSEVLNSDAPLPVDESSNEYTRITHRYLDLRSEKITHRYLDLRSEKMQRAMRLRARVVSKCRRFLELRARVVSKCRRFLEDSCGFVEVQTPTLAHTTPGGAAEFPIPANKNGDCFSLPQSPQIYKQLLMCGSIDRYYQQSPQIYKQLLMCGSIDRYYQVAICYRDEGAKPAKPDRQPEFTQLDLELSFTSQEMVLSLIEQMIVNSWPDEIKTPKPTIPFPKTPKPTIPFPRMSHREAMDKFGTDKPVSFFSWVTMDKFGTDKPVSFFSWVTDGNGNSEFEI

SEQ ID NO: 136152 - protein, 78 aa, Heterodera glycines
GGHSETELARASPAALINNLLGRNNGNSAQQQQSEQLTMGGRGTNVIGHQIAQHSAAGLNGALLQGIDFAANQLANYA

SEQ ID NO: 136153 - protein, 89 aa, Heterodera glycines
MSNKTKEPLAFVTGVDDKCVFIWSSEYPLEELRFPVKLGAQRPELGQRVQYVCTKPPHEVQYSGILKRIANPSPIIILRDGEFVVILGF

SEQ ID NO: 136154 - protein, 55 aa, Heterodera glycines
MTKFDEFSLYSIGIAVPISTSSTICLDGDGGIKIEEDKQPNSFKLLFKPVSIQSM

SEQ ID NO: 136155 - protein, 171 aa, Heterodera glycines
MPPSRVTFRHFAGAHGCWNVIDLFLMNLDVFDGEHGEPQITHKRTFIGAISLRNVLKCVKNYAFVQNPYPILGDHLLIPSDDLHTKPLPSPQQLKHKVLLRGKTAGGATTADINGGGTHVETTAATMAPASVAANNGTPCTAAPPMGTDYDTREEREDSPKQSQRNLPVDP

SEQ ID NO: 136156 - protein, 289 aa, Heterodera glycines
MAAAAADGQMMVENNKNNNNNNRGGGDGENVGATTTAGNNWGGKSGTMTTTTTPLGNHRTEKNNINGGGGVVVPFDLPVRRVKNGRISGVSRVALDIYEDMLSYGATRSSLLSSISGCRKGSAGERRKKVILTDVLEIRQGYRTDGLHKAAKDYKFQRMAPEQRCFSIICKHPRFVCKSLDFVAVDLDQTTNWLNLLQEHFANVLHLSQNTVTNFNEQKWLLQNFRQADLNRNGALSDQYVEALFKFKDVDQRKAEAVIAFCEPANFQQENQKDGEPSSSSSPKVLSVS

SEQ ID NO: 136157 - protein, 19 aa, Heterodera glycines
MKTILLAADHPTIFMAQYA

SEQ ID NO: 136158 - protein, 18 aa, Heterodera glycines
MLHSKSPYNLEINEAGKK

SEQ ID NO: 136159 - protein, 39 aa, Heterodera glycines
MKRVIYNLPFPNYRQKIACKRTSVCMLLIAHALHMFLDG

SEQ ID NO: 136160 - protein, 64 aa, Heterodera glycines
MGSPDDMDQPLVRGELSNKLKGGVDVGIAGVQLLAKMLNVRPNERISASDALKEAYFQNAESDA

SEQ ID NO: 136161 - protein, 86 aa, Heterodera glycines
MPGVNHIQHFARVIDAKNGALLRSGERIKIKIPIDKTDGSLEEFKFDINLMYEGLSSHPIIGKTVMKMASEQHRKIPFQQFCQSKI

SEQ ID NO: 136162 - protein, 244 aa, Heterodera glycines
MNRRWICNDVWMDIFPSFDRPQLGLKLALLSPRFNALVDKHFDGKSELTIWRPIEISKDIGPEPKLSLFWISSPHTTDGQRIWDILTREIWPIFSANIRHLCFSHRDHLDNLLRQISPTILIDLNQLVSIHSFGLLPAAFGDGFDGPNSTTSAGQALSKWLHIPRKAGQPKRLRCEDYNAQANTDWINSFKEHFLRANAISSVSYEIHFSVRAPSMEMVPFELVNEWTKEKLTFAKAKGWDKAK

SEQ ID NO: 136163 - protein, 173 aa, Heterodera glycines
MQIVPFELVNEWTKEKLTLAKENENEWGIGWIMKRSKIIGETAAVHWKDGNWDNNCNNVIIWLFSTTNCIGMIDRPIIFIRDQMHFMKKKLSISLNTSRNNNISRSKNIGRRRDGREREEKEGEKGAATEQVLLMDVGNPPPKSRKIIVTFLKGKFIHSIDSKPFYTPDLFSN

SEQ ID NO: 136164 - protein, 137 aa, Heterodera glycines
MDDEDEYEEEEEEAEGMGVLAYQTVEGAQSTDNVQLIGTSSNTGTNEKKNEDRVLENGTFGQRSSVQESDYVIRQIRTDNNPRLFNEVPTVPGELFLLRHQNEEIPHYCIRPQGIEGHICGYRKSLSWRCLLLISVN

SEQ ID NO: 136165 - protein, 17 aa, Heterodera glycines
YREATPEGFGLHKSGRI

SEQ ID NO: 136166 - protein, 117 aa, Heterodera glycines
MATLVDPRFKNNPNIFSTKERAQNEVLLLDTVEMLTNPSRRGSESEQPKINSDSPNLLESFIGATQSIDFTDSQTNKILDTSTVGIGPTAFLEGKLAISYNKKACPKIFMSTSKQRR

SEQ ID NO: 136167 - protein, 155 aa, Heterodera glycines
QNAHSQCHSVEDLLQCLADCPEYEEIPVRHNEDCPEYEEIPVRHNEDQINSEIQSFLPIRLSTSDWGSPHVKAHLLYQAHFSRMKLPVDYTTDQRSIIESCIRIIQANRSLSFLPKWITFRINVLINVLVLLQQIYQARWYSDHPLLCLPHFSSH

SEQ ID NO: 136168 - protein, 63 aa, Heterodera glycines
MKQRDETADKGGKGTNGSDKKRKGICVVPVNECADETLNDCDQKVISSKKANKSNGSDLGTMH

SEQ ID NO: 136169 - protein, 84 aa, Heterodera glycines
CVLTRFIHQKKHEMNEVFEKRKAPAHKTISISETKAPNVSGKLSYLCSSDHASLPLSLSSDDDAPTRPSPSSSMLPLGAVDVLC

SEQ ID NO: 136170 - protein, 175 aa, Heterodera glycines
GIMTFLLGPKWRSFFDMIIVDACKPSWFGEGTEKTTGWHTFLVVPELSRELAVWTDNRELYEQLQQLESELVELHKRDKPTEAVTDPVFKAIQARSYTVNGTTVRRFRLSVRKRNAHLLFRLSTGTVCRFVCRLLLQLGPLFGLLFLPRSNGTDAAPVDGGPWGRNAGHRVTPKH

SEQ ID NO: 136171 - protein, 383 aa, Heterodera glycines
MNAAQEPAYDPVAASRIQKLYRQSRPRAYREITEQSSPFCQIEGNDLFNQFSQVFEENAPIDEEMPPEIPRHGPPTERNPLGPQFTQKEVWERLKRCSNTAPGPDGIRYSVWKKYDQGAHILTTIFNCVKRSKHIPQSWTKSVTVLLHKKGDRNEVSNWRPIALSNTIGKLYSSVLANRLAMWSIAFNRVSSSQKGFMPVDGCAEHNFVLQSIIQDARRTKKRCSIAWLDLTNAFGSIPHQTIFTALKWSGLSDQSIAVIRQLYATNSTQIRHSNGLTPEIPIRAGVKQGCPLSPIIFNLGIEPILRTIGQLRTGYKLQKKRIDVLAYADDLVLVAESAEELQRMLDATSTIATWAGLSFNARKCATLDIDGRRKAALNTEFT

SEQ ID NO: 136172 - protein, 167 aa, Heterodera glycines
MAYTISKHMLKLNGTYWMQQPRVTTVQTSAPMVNAIKQALLAFLDQNGFFPEHIFVFRAGASEGEYKKVAHWEGGAFMTAFAELMAEQQSMAKKPALTMVVCQRNSNYRIIPTNVQPGGRAQEQNCQPGTVLDKQVMHSSLTEFLLVGHRTIASGLRLRLTLIPAQT

SEQ ID NO: 136173 - protein, 111 aa, Heterodera glycines
  unsure (1)..(111): unsure at all Xaa locations
SFAXHQXXSFGSFSTCTNFTSQFVLKIGNISQPFAEATFKFIRNFDGTFGRIADFLLFFDWRRSAEIRLAGQSHRKQNSVFVCLNISAFSFFSRSFFVNCKRMLRLSIFIY

SEQ ID NO: 136174 - protein, 151 aa, Heterodera glycines
MSSARCRMALGPALFRLRQHVTTAENLLDEPVSNAETIENLEQERGHITRILSRMEVELEAWGAIMNGLQGPAREAEEVLFTAFIRDDRHLTEWLEHAREMLAHIAAELADDKIHNGKNHRLLVFPFLFVLYVSLQDYNVYLVISIFFYLY

SEQ ID NO: 136175 - protein, 206 aa, Heterodera glycines
MSSSSSPQSRYDYLDFAGKPDQPQQHQLRRQQQRAAPQQRVAVPPPALRRAAASADEPLYATASSQIYSLGGSEDPYRVPPATTMLARAAMNKNNANNFAELDQLYAKINRKISAADQQQPTTSAAIAKQLLRQQSFQHQQSTTTTDFGGESGSGSICSSTQPSYRYLTVREDAAVIRERIRLREEQEQQQQSEQQHQQRANLWVK

SEQ ID NO: 136176 - protein, 47 aa, Heterodera glycines
ILFLLSKSFLLIAVANQPFHTHSRWLNNMRHHGPVVPTVDPLKNAPK

SEQ ID NO: 136177 - protein, 64 aa, Heterodera glycines; identical to SEQ ID NO: 129150

SEQ ID NO: 136178 - protein, 76 aa, Heterodera glycines
MQLCVLLVLPDRADAVLLRRRHHHQLGTTTIAAATTQHGVNGVMMRWKKVGQIFGEWAPFNDMVNQLVILPKCHKL

SEQ ID NO: 136179 - protein, 87 aa, Heterodera glycines
MHTFCARAIYHRACQSKTKQQRCCFERIKGIESVHRLLEKYICNLSTILRKSVHRLLEKYICNLSTILRSELEMINFTIQTNFRCSN

SEQ ID NO: 136180 - protein, 15 aa, Heterodera glycines
LKAIHCLPVLGTAKH

SEQ ID NO: 136181 - protein, 43 aa, Heterodera glycines
CFAVPRTGRQWIALNLQEIRLAISGCKKLLGNELFFEVSQTPY

SEQ ID NO: 136182 - protein, 169 aa, Heterodera glycines
DTDEPIFPRNDQNKPIVPVDENDQPIFPVDKTGTFIFPVDESNCPIPALTVYGTRVVPKDEFGNAVIPRDRDGKALIHIASDGVTPLSMGEWKQWKKYYKEQAQVRNFYQQRQQQPVAVEPAAAAGIGIGAMFHPLNLEQQSAYFAADMEMLQRVRRVRPEDVDLPGQM

SEQ ID NO: 136183 - protein, 130 aa, Heterodera glycines
MAHVLHINYNGGRRKTSDERHRRLTAGARRGPVNQKLKNDQKLKNDQKLKIDQKLKNDQKLKIDQKLKNDQKLKNDQKLKNDQKLKIDQKLKNDQKLKIDQKLKNDQKLKNDQPSNYGEPSLAGDFDFKN

SEQ ID NO: 136184 - protein, 184 aa, Heterodera glycines
MPTVGGGGRRQRAGLRGRRRASRAIAGRISRRRGGRPPRQQSSTSASAAGRPKRPWEGSEDEEDELSKRYGFGRSFLFSEEEEDEEEEEEDEGMGSDQTDLDTDDDDRGSEAKALPSSAAVAPSASSPFGPFSSLDDEDDDMEEELLAQLPPDQIPPLVLSDSSVDLLIYKEHLMDTLEVMGSL

SEQ ID NO: 136185 - protein, 95 aa, Heterodera glycines; identical to SEQ ID NO: 130684

SEQ ID NO: 136186 - protein, 77 aa, Heterodera glycines
MSALISEQDTAVPESIPDQIATLLPWKAADEVFERIHLDSAGPCEDGQTYLVVVDAYSNWPGVWEMSRATAKDRRYA

SEQ ID NO: 136187 - protein, 71 aa, Heterodera glycines; identical to SEQ ID NO: 134376

SEQ ID NO: 136188 - protein, 65 aa, Heterodera glycines
CHWDDVPFIQPDSATYICAENDAVREPGIRQQLDTLLREKKYESRMLLAKTYLMVQNRPTAAGCL

SEQ ID NO: 136189 - protein, 221 aa, Heterodera glycines
MNQWILFFLIVLFLIIQIEIGAEKKKLEQKTFDEIFGEKWEEKENEQKKREIVQKFNKIKEKILQKERKYSTKEWNKIELKIGKKLGTNRQYIYQWIKELNLQKIKSYKSKTDEQKIEFVQKFITMKNEYKQNGRKYSRKEWHQNYAEICKKIGVSYGTIEKWKKQFGIRERMTEKEKMEKVKIYFHIKRENPKISDEKIAKIVKINRRTIDKWKKRFGEE

SEQ ID NO: 136190 - protein, 103 aa, Heterodera glycines
MLLAELEDGGQSDGAVPATQQHQHQQQQSQHIVAMLERALRERDEFANGMMEMAQEMDNDENGGGGSSAALTTCSSSCNGDIGPAAGGKSVKQHNAIASTFGP

SEQ ID NO: 136191 - protein, 90 aa, Heterodera glycines
MTLGLIEHREMTLELIEHREMTLELIEHREMTLELIEHREMTLELIVHREMTLELIEHREMTLEFDRTSRNDPRVDRTSRIDPRLDRAEN

SEQ ID NO: 136192 - protein, 135 aa, Heterodera glycines
MTLELIEHREMTLELIEHREMTLELIEHREMTLELIEHREMTLEFDRTSRNDPRVDRTSRNDPRVDRTSRNDPRVDRTSRNDPRVDRTSRNDPRVDRTSRNDPRVDRTSRNDPRVDRTSRNDPRVDRTSRNDPRV

SEQ ID NO: 136193 - protein, 130 aa, Heterodera glycines
MLVDLQDELERQRVEIGRLQAERLELVKDARAAKDLRDEMECMQHKLTRLERLETEAEKMRTKLGELDFYKSRMNSLKEDNRLVQETCRVMEEQLEQCQRKLTAHLEVETKLIESQANNKSLQLDLTKVN

SEQ ID NO: 136194 - protein, 171 aa, Heterodera glycines
QFFGCVLICEIFYIYSLKCEGRSYNAKSDMWAMGCCLYEMCTLRKPFDADNLTILIHKIINCEYEPLKGPYSQDIRLICEYEPLKGPYSQDIRLIVRELFRADPEQRPSASDLLEQVDKQTQRRRGANGAAAKAVYSALYRFDTEKFTLLAMSELPDRAQIKQVAKPMNER

SEQ ID NO: 136195 - protein, 404 aa, Heterodera glycines
MNAEQIQQLLTALLQGNAASSISQANLASSIDSRISKFVYDPENGQTFEQWHKRFGILIEEDGKDLTEQAKVRLLLGKLGDEDYTKYRDTISPELPDKASWAESINRLKELFAETRSLFVRRYECFRIRRHPNQVISSLVAQINAACEHANLSLTKEQLKCMILVISLRDEYHDLRQKCLKMMEEAEKSGTTVTLKKLEEELKAIQIVKDSALSLLSTPASTNAIRTRPQQWRESKSKANSANAVQQNHPAQQKPATGGKAIRGQPTQPCGSCGGTDHWRSDCRFREATCHKCQKQGHIANVCRKGAFTTKNQRRSFHTVQVKATCLQIGTTQGRWWTILVEINGTKIEMNVDTGAQATVLTIETWTKLGQPKLLPTDIETRNCNDVTFKTKGKFICLVSIVGP

SEQ ID NO: 136196 - protein, 87 aa, Heterodera glycines; identical to SEQ ID NO: 129152

SEQ ID NO: 136197 - protein, 67 aa, Heterodera glycines
SPSSFFTLFFGCGTHGLSQIIISLNSLLFHFLLIILKILILFTFSCYKFSNKFSHFIIYKQKKKKNL

SEQ ID NO: 136198 - protein, 88 aa, Heterodera glycines; identical to SEQ ID NO: 124691

SEQ ID NO: 136199 - protein, 110 aa, Heterodera glycines
MFFAVSISLKKEYKCKKREEHSASCKRCRLNKCLSVGMNSLRVSIKSKRVSGQSAPAKSSNLGEIGTDLSAITTLNNAPPKWAVPNSVGCPRQGMFLGSEGARRTYCKND

SEQ ID NO: 136200 - protein, 121 aa, Heterodera glycines
MFFNPSSQFRMHVNSIKRWHCAVHLRQRVLILLELVLCAVVPLPLLRLPCGGDAFACALMFLRLYWLPRVLHLRSRLSTDAAAKSIAGLNCVKTDTRFLLKRMLFLHPGPTLSAFVVSTFI

SEQ ID NO: 136201 - protein, 12 aa, Heterodera glycines
KLGFAFGFGFEC

SEQ ID NO: 136202 - protein, 96 aa, Heterodera glycines
MTDGKEGWEGGGGHHASTTGRKTKEELEMRNERMGKNGNGRKDGEKEKRKRKRKREEKEEQEEEKLGRTMKKEELRERNKEGRSDAFDQFLGKHSS

SEQ ID NO: 136203 - protein, 35 aa, Heterodera glycines
MAESWSLCRECWLSLPCWWSCLFCVLALPNSSIGE

SEQ ID NO: 136204 - protein, 165 aa, Heterodera glycines
MEPKSDVCADSDNSLVSGMGTPQTEVIRVGGLANEGRTEAQLNGAGGGGGADRLAAGSLDAQPSPVVMVNHILVWSSICSQSPPQKTFIMCNFLDSDHHHFGLKPGTSASLTFVLQKLSAKTEPSGCISTPYSVNVVLDELSALGYRAIGMVNKRADEVLWTLAK

SEQ ID NO: 136205 - protein, 146 aa, Heterodera glycines
KKETVKIKSNFSFHSPTMHWPLPLHDCLMLEPTESEDKAEMDRYCEALIAIREEIEDIARGELHIDLNPKNAPHTLSVLANPKNAPHTLSVLAASVWDRPYSREQAGWPKPWCHTSRKVWPTVGRIDDSFGDRNPFCSCPPVKGDE

SEQ ID NO: 136206 - protein, 213 aa, Heterodera glycines
MSTRCEPIGAELRPIDNVSTLAVGDLSAEAAAIIIQYPNTEGKLYDHLERLIRAAHRHNVTKLILSLSSLSLILVILVCDLLSLTLIRSPGDLGADIAVGTSQRFGLPLGYGGPHAGFICVKDLALARQMPGRIVGVSRYAVYHGPRRLVQIAKIVHKSAAYLAQKLKANGIEVEHKEFFDTIKAKPKEMDDFRKRCEEQQINVIHSCSSDLN

SEQ ID NO: 136207 - protein, 91 aa, Heterodera glycines
MGSPTKFSASLTRTARRKWSSCRVALSRLFAVNWQRRPKLGMEFGEQYNCAQRRIRGTIPASEQEEERREQAAEDRTNEESDQDADIDVVD

SEQ ID NO: 136208 - protein, 45 aa, Heterodera glycines
NHRNTSIACTGYRTWDPPFGDLLTNHFATHTNLFWYSSSVSGRRV

SEQ ID NO: 136209 - protein, 24 aa, Heterodera glycines
MKNVENNGMSPTRANRTMPMCESE

SEQ ID NO: 136210 - protein, 283 aa, Heterodera glycines
ASATIVDYKLSLLGVDSESAEYKERIWQCHQRGADRLLSLARRNGGVFIKVGQHIASLQYLLPEPYTSTLSILHSKAPESSLDDMKTVFYRSLHKNFDDVFDEFDPRPCGAIPKIHYNYSSDKVLTMEFCEGGQINDLDYFQVHQLDRHKICRLLGALYSEMIFRRGYVHSDPHPGNVLVRRSANTGREEIVLLDHGLYCVKSPFGNANVKTSANCQTLPDELRIDYAKLWLALMKPDQDEIRRVCERMNIGQNYGLFACIVTMRSWKSVTAGIARTEIDDRE

SEQ ID NO: 136211 - protein, 152 aa, Heterodera glycines
APSAQLPAKAPQQPQAPKAAVAPAQQQQQPKAAAPPPPKAAAAPQQPKATAVAAPPKPTAPPAVAPQKRAPPPVVREVQLPEAPTQPILRHAEYTPKLVDASVNKLPPGQEPDEEQLEASAVPRNPIIKSIVPEAVGYSKTKWNEFPEEEEK

SEQ ID NO: 136212 - protein, 67 aa, Heterodera glycines
SQSTALSTSAEIDEENIYKCVGYPHPNVVKDIFRALLDNSIEIAYKSKLKILNIFLFMSFFVARFIF

SEQ ID NO: 136213 - protein, 60 aa, Heterodera glycines
MVLSKIPIRRSLHTSAPLCRGAVSQPGWYPRDHMPGPYPRNEEERRAAAIKYGLRPEDYK

SEQ ID NO: 136214 - protein, 41 aa, Heterodera glycines
  unsure (1)..(41): unsure at all Xaa locations
SLFIKGRIKQRKIRRQSSALVHRLLIFFYFFXFSMPDDFFS

SEQ ID NO: 136215 - protein, 47 aa, Heterodera glycines
MTFYASLVGYTGRNNKILSVQSGILMSKSVTEDAILCFSCWIRGQVE

SEQ ID NO: 136216 - protein, 48 aa, Heterodera glycines
MTFYASLVGYTGRNNKILSVISAFGILMSKSGTVNEILCFSCWIHGKK

SEQ ID NO: 136217 - protein, 204 aa, Heterodera glycines
MFMCHNSLQTDSRKTHGMFMCRNSLQTDHRKAQGMFMCHNSLQTDHRKAQGMFMCHNSLQTDHRKTHGMFMCRNSLQTDHRKAHGMFMCRNSLQTDHRKAQGMFMCRNSLQTDHRKAHGMFMCRNSLQTDHRKAHGMFMCHNSLQTDHRKAHGMFMCRNSLQTDHRKAQGMIMCHNSLQTDHPKAHGMFMCPHSLQTTNRKTME

SEQ ID NO: 136218 - protein, 51 aa, Heterodera glycines
MSRNRLPPELLLEIVLCVRRGHNTPNICFSSRILRTFMEPRVALWRRVWIS

SEQ ID NO: 136219 - protein, 107 aa, Heterodera glycines
MQTALLPVGKRSQFTSIKCVNCKQELDAMDGYALVDCSHKWHFEKPFADWYAESSIKKCMNDACKKKFTKVRCRECKENLGAGVFETGCYCSVTSASHLHADELEIK

SEQ ID NO: 136220 - protein, 107 aa, Heterodera glycines
GGYLSSKILNFLLLRYYQPDEIAKVGLPLGDIEIAELSSEEEKEAPTNVLPTVRTDAPSSLLSQSPKVIASPVDRRLIREYGIDTVGLTGSGRDGRILKEDILNLAH

SEQ ID NO: 136221 - protein, 63 aa, Heterodera glycines
MLVWVLSSFPAKFGELLISLEENALKRTKFYLHKLIRSAPNFAGILKGREITYFKYYLVSSFK

SEQ ID NO: 136222 - protein, 109 aa, Heterodera glycines
ADAEHPTDAAVVDNFETRARRFFDLINDGNIQQLRVLIDALDADELNILLRWMVDPVERDYTRSRSALWSAFFRQHIDIVDLLVLEKGADPNEPVVGRENDINTSGWCC

SEQ ID NO: 136223 - protein, 421 aa, Heterodera glycines
MFNHPSIAERQINIGLFSQKGQQNSVQFDNPSAKKTKSYAEAVRFELADGGNSDEPMMEWEGPQNQREDSTHDDGTLSDNVHSLQPVAPPVTEFGIDLFPIVSAKQTGDDFGARNVQQQDQSRRNDGSDIGLFEKKKCVASLEIHRMDNPNERCVVKKYEFFMVTDNEQHQMNSAAFATSERCNPTVGQMTQKILSEHFETPIDKLIAQFDMQMQIFDTDFADGRFVDMEKNWSAELVQNNGAYKVLLHSKMDARSGRGYEDVSTSQMANRGPRQQREMFGNQTYNEYESDMFDQQTVGNRSKCGRPIGDPSFCDSNLEQIGRFLLSEVKAPLANLYDVSTDNFVTLNDHGFVNKMAKNDENLTMQDRPNMREQLIEIESFDDLKERTKILDFDQKVANTILTKAIYAFVIVECDQPTCAF

SEQ ID NO: 136224 - protein, 184 aa, Heterodera glycines
MTPLFLAVRHANLPLCRVLVARGANIDLGTDFATTPLMHACKRSQTEIGFHFALKSAAIGGSLEVCRLLVEEWAADVNQQTIQERYTPVICAASKGHLAIVNFLIEHGADLQHVDVVGNNALMWAVISGKTEMARHLVAIGADINQRDTADSKMISNRCDSSTERANRWPKAADGFIRKTLIDH

SEQ ID NO: 136225 - protein, 76 aa, Heterodera glycines
MSKDEMEEKKEEREGNRECGRKKWTKKKKGIMEDRGEEERKKKWKMKKKEREDEEAKIKWKRKKRMNYRRWGRGEW

SEQ ID NO: 136226 - protein, 92 aa, Heterodera glycines; identical to SEQ ID NO: 124679

SEQ ID NO: 136227 - protein, 65 aa, Heterodera glycines
MPIVGSDNNQIILGFIRTDYPFGEQKAQQNGGAKCDAKEEKENGKKEAAKNENVSKKSEMAKEFT

SEQ ID NO: 136228 - protein, 109 aa, Heterodera glycines
MRNGSYENKLTLAIDVTLKEAEAMDKKASATEQNNSFGTISMEIEKVSEFSREILYSDRISETVHLKGFPWQLMANFNPDPNGVSSTDGSTELYLGFYLWCTSLKRGEN

SEQ ID NO: 136229 - protein, 127 aa, Heterodera glycines
MNCTVINKLTTLSKVRDAFRITNLLICIAFMILCAFPMYRLARERLTLYMVISKLFPGILFFLSKIISFPSTGFIIPNVVLDIVAKIAFICQNYGVICIRLHYVVMAANRAHAVLFPFNYAQNITKK

SEQ ID NO: 136230 - protein, 63 aa, Heterodera glycines
MWHFSIGIAVIFGTLCCSNGNVFNDVEGFVSEFASMTDAGADVLEKLGHIGKGTFSLLKFAGC

SEQ ID NO: 136231 - protein, 83 aa, Heterodera glycines
MHLNYKNIFHILSEAEQFDKVLDMLQMPNINNITTNSLSSGTDCAAVGGVLGFYSNKFYVHGKNVNTLIINTLLTRLFAHFES

SEQ ID NO: 136232 - protein, 32 aa, Heterodera glycines
MPTLSKMIVGKFFKADQFKARQIEYQNKYSKN

SEQ ID NO: 136233 - protein, 59 aa, Heterodera glycines
RDVPRFRFSHFALFAFLAFRISLFAFRFLARNATFTPLRIGLNSHKIFQNFTYKLANFQ

SEQ ID NO: 136234 - protein, 133 aa, Heterodera glycines
MTPIIFRKVREEFKNSANYIKELQIIMRRTNTKNFLSVLIEINQVELAGISLAEFVHPDDATLLHNQLALNLPASALLVLQPELRFTLRFRCTPGRRAMMGCNGIGMQPGYKPIHFVGTLHADDDGRFLVKAW

SEQ ID NO: 136235 - protein, 24 aa, Heterodera glycines
ITGVSIIAVLFLVFLMPSQNLVRF

SEQ ID NO: 136236 - protein, 57 aa, Heterodera glycines
MTIEQLKQCMEDAKRFLAEVIVVGQSTDEATQKMLKAIRAKFLPMATLIFIDKDRPG

SEQ ID NO: 136237 - protein, 36 aa, Heterodera glycines
FLCLSVMRYFVAISAAFSWPLSVDSNHSSGIFMPPP

SEQ ID NO: 136238 - protein, 195 aa, Heterodera glycines
MPTVTVPTVSQPTVTPRCLFGPDGKCLPTPSYSTADPVTNTYSTQPVTNTYSTADPVTNTYSTRPVTFSTQPVTTYSTRPVTYTRRTYSTTDPPSSRDDENNKETVTPAGIASNISANLDKVAETNFHDSPIQVQLDDIDDIELQTGPDNYDVKLRSPLENGVCLQQIDKDRMAPLIYNAHQPGITTVSASLPSE

SEQ ID NO: 136239 - protein, 114 aa, Heterodera glycines
KGRAVLIGAAERQKLVYILNRDAHANLTISSPLEAHKNYSICFAITGIDVGFENPTFSCLEIDYEDSDHDPTGDDSDHDPTGDAAKQIQQTLTFYELDLGLNHVVRKYAEPLAD

SEQ ID NO: 136240 - protein, 29 aa, Heterodera glycines
MDNQQGKDDVLSSNAFAYQQIVGPQNITA

SEQ ID NO: 136241 - protein, 94 aa, Heterodera glycines
MEKQRIGEKCDDEREKRISGKEEEAEMAIIKAELCRERAEKNRRHSELSKVHQELMQSLQKAEQLQKKLDREMRERTKEREATDILQKANSNGQ

SEQ ID NO: 136242 - protein, 95 aa, Heterodera glycines; identical to SEQ ID NO: 128210

SEQ ID NO: 136243 - protein, 87 aa, Heterodera glycines
MTNEAKGNHRNEQGEKVISKKRRVLLHLQSTRQAATLRVIRKTMAVAVTKALALEDGERAGDEVIECETIHVADSNEQNDKFMCVYY

SEQ ID NO: 136244 - protein, 43 aa, Heterodera glycines
FFFLGDLCSLLRDFSSFSRLIPRPRSSRSRRERLVDSSTRALT

SEQ ID NO: 136245 - protein, 408 aa, Heterodera glycines
MENANNAATNNNKMPKTAGAPEQKNGGRKTKTTTKGAKNLSGSSSPDGLYPKLAAAANNKSSPDRGELCVSFKVLKTRDELLVDEEHEEEEEDTNTLARLFSEDDVHFSDSFCAKLNLADANEQQQKQQQQQEEDEEGEEEDDESDTSDSTAKAGPSTGGLAAKDTFIKWASFIHNPYLFIFMLDPNEMKKNFVINEWVKDIMNKQFPNVVGSLAPINALVQLAQGFHDLFALPYDELRKENGQLIRGIQRGTTSFGLNAATAAIDATQRNVAELAFDIVNPNFQRHRRLLSGPQRVQVAGDLREGFSLAYNAVREGVLDTAQTLQAAAAEDRALGGLGMGVLRHMTPSAIKPFVIASKATSLVLGRGEGNENWTTKEKLFGEKSGRVWLNFMPRKNPEVAENGLGPA

SEQ ID NO: 136246 - protein, 323 aa, Heterodera glycines
KEFAIDRATTCVATIAFGMGIDKKDVRRVIHYGAPGCIESYYQEIGRAGPGCIESYYQEIGRAGRDGFPSRCLVFYAVSDIMMQKRRIMNNNLSKEYENHKLEMLRRMKRRIMNNNLSKEYENHKLEMLRRMEQFLTTTSCRRYLILSYFDNSIQHPDVPNSDCCDNCEKRCQIGGNDDGEPTTVDFGEEAKKLFNALELFNGRSGLKKPIDFLRGSENVKKKRKELMTIKLFGSGKNKSENWWTEFGKLFGSGKNKSENWWTEFGKMLRNNGFLSESKSTFAQYCYLTKLAPKAIEWLSSGSKVGGERGIHVQGVSRHTPSS

SEQ ID NO: 136247 - protein, 32 aa, Heterodera glycines; identical to SEQ ID NO: 127531

SEQ ID NO: 136248 - protein, 271 aa, Heterodera glycines
MRLECSTFTNILALYLKTKGDVVLVADLMRSVTVLGYKAVDSTFEELARDYSTEWTSACEIIDSETFLAAENNHNIYCCKIDVNAESDEDRSRLKVSQVGLYYLGEMINVFRRGSIVSAQQRERDCGTAHGLMEIEDGGAATFCENGGKTGRNGTPTATSAPLFSNPIIYVFSMNCKRQSQQKHTIGNLRVDHNIYRSFFTERRNEQPIGFIDGDLVETVTEMVGLSFPREMLEIVVDGLRLWREPDTMDESVTARPEDVLKLVEDLAQIR

SEQ ID NO: 136249 - protein, 50 aa, Heterodera glycines
LECHGTGNFCQNRDRDLPGPEKPGPGPGPRFFFGTGTNREILKIQKNFKN

SEQ ID NO: 136250 - protein, 244 aa, Heterodera glycines
MLFLLFIFVFLIINNSTDKTLSVNLCKKCRPTFAEIFGEEWQNEIRIGGDENENETDQNANFHQNDQNELTDRTDQLDVQQKIEIIHKFHAIREAIKKGKYSAKNWNKIEQKIAEKLGINRPKIYKWKKEIGLNIKNDQNYYEMKKKEFIERIDEIKRTSENGKQKQFAKELGISKVTLRKWKKEFGIEMSKSRIRFTDEQKMSKMNDYYEMKKGNPSLSDKEIADILKIGTATLTRWKKENNS

SEQ ID NO: 136251 - protein, 211 aa, Heterodera glycines
VYLKTLAVMSQQQFAERKVMPKREYQKELTMVPSWMISASTTTTAAASSSTSAASGQSSPGPDSHLPPFHQHGDVGFCELPLEVEGTSKLGSALLKHTATRSYSSNPREFFKFGRKPTIAKSRGVIEQQQTDAVTGGAVGASVGDSAAGPSGSSGGVSQLRYRKSGGSGMGAGRSGAVSKDAESRRKSLGAAAAANAVAAGTILHRDSPVG

SEQ ID NO: 136252 - protein, 210 aa, Heterodera glycines
DELAQAEHHEPDWGERALRRMFCQVWTSPAEQIVHVVAQIVDRIGTSGHHTDPSPVDALVLRLNSQFPGGDIGVLAPFFLNFFTLRPGQATFLGPNEPHAYLSGDCVECMALSDNTIRAGLTPKFKDVPTLCSSLTYRMYAPPIFEPMLPDGVIEYGPPVDEFAVHKIDVIFGKRALDLASIIYCVALHIDFIFAQKLSFFSYNFCPKNM

SEQ ID NO: 136253 - protein, 177 aa, Heterodera glycines
MALTRKWPRENGHAKTTPTAILKLRTLQEVSSKSNTVVRASVVLLGNERCGKSLLANRLTRGERSGQSSVLEYNYLQIQADTDASYAYQLGGGAANGLLGPTDSTDLPLWILDGKDECAPLLRFTFPPSLSKCVVCLCASMEQPGNIMPALSKWYRLLDEQIRLHYQPEEIVQARQA

SEQ ID NO: 136254 - protein, 68 aa, Heterodera glycines
MHAFCARAIYHRACQSKAKQQRCCFERIKGIESVNRLLEKYICNLSTILRSELEMINFTIQTSFRCSN

SEQ ID NO: 136255 - protein, 48 aa, Heterodera glycines
MHAFCARAIYHRACQSKAKQQRCCFERIKGIESVNRLLEYIFAIYQQF

SEQ ID NO: 136256 - protein, 196 aa, Heterodera glycines
PEFPKPEFEKPSFPKPPPPPEVGLVTEGRRSDPNPPPEEKSLLEKPPPPSLSRFCRPNPPPPPPPRPPPRPPPPPSFQRLPLPPRRLPSDFCVSPSPKPPEFPKPEFEKPSFPKPPPPPEVGLVTEGRRSDPNPPPEEKSLLEKPPPPSLSRFCRPNPPPPPPPRPPPRPPPPPSFQRLPLPPRRLPSDFCVSPKP

SEQ ID NO: 136257 - protein, 40 aa, Heterodera glycines
VDILLLFAVLMSDTRAYRICSNYSPVSIKPAVSNYPPVYE

SEQ ID NO: 136258 - protein, 143 aa, Heterodera glycines
MGQNGSEMLGKMTVLTDHSTKKNQGITKFFGNEDPQKKADEQIARLMIRTNCSFLFVEAPELQNLFSLAYPKLQLRRKDYFRRNVIPKMADEIQQKIVQGIGQDFFSVTSDGWSQITKSPALLRFYNPFHGLYKQTLALPYII

SEQ ID NO: 136259 - protein, 145 aa, Heterodera glycines
NGVSKNRNYAQKASQTILALPIPSTIAFIHPIMSAKIIRVPKIACDLSLAKNGVSKNRNYAQKASQTILALPIPSTIAFIHPIMSAKIIRVPKIACDLSLEKNGLSKNRNYAQKASQTILALPIPSTIAFIHPIMSAKLSECRKS

SEQ ID NO: 136260 - protein, 197 aa, Heterodera glycines
MSSMTKSFTNKLASEKSPYLLQHSGNPVDWYPWGDEAFKKAKELNRPIFLSGKYQTFLHKVSLHLVGYSTCHWCHVMEHESFEDEAIGKLLNENFVSIKVDREERPDVDKLYMSFVQWNNNSQEVKEQGRELAEAIREGIQQAKSSQLPIADEAVQKSYARLVRQFDKENGGFGSAPKFPKAGPLKTFNSTVIEHFS

SEQ ID NO: 136261 - protein, 182 aa, Heterodera glycines
WKGAPICDEDIDECQDESVSCPNEQPDCMNTPGAYLCLCYEYDNSTGKCMGSSEEADDDNAALSLSSQRRIPVPIPSMVLTPQLGPLLDKMSHQISTQMPTKVTRPSAPKLLLLGTEKAAPMQACFLNRRILKNFILLDKSRMRRTISKPKILVKEKKFVGGIMCIKCAEILGICLKRILIF

SEQ ID NO: 136262 - protein, 15 aa, Heterodera glycines
MKKIIKKNNAGVKML

SEQ ID NO: 136263 - protein, 18 aa, Heterodera glycines
MSSTKLKNGREAPVLRPG

SEQ ID NO: 136264 - protein, 24 aa, Heterodera glycines
VTGVSIIAVLFLVFLMPLQNLVRF

SEQ ID NO: 136265 - protein, 40 aa, Heterodera glycines; identical to SEQ ID NO: 126546

SEQ ID NO: 136266 - protein, 286 aa, Heterodera glycines
ITVNAIFECPLSNLCCTSFNLCCTSSNHCCTSSHHCCTSSNQICTPSNNCTSFNHCCTSFNHCCTSSNHCCTSSHHCCTSSNHHCTSSNHHCTSSNHHCTSSNHHCTSSNHHCTSSNHHCTKTCLNALFECPLSNLCCTSSNLCCTSSNHSSNLCCTSSNHCTSSNHSSNLCCTSSNHCTSSNLCCTSSNHCCTSSNHCCTSSDHCFTSFNHCCTSSNQICTSSDHCFTSFNHSCTSFNHCCTSSNHSCTSSNHSSNHCCTTSNHCCTTSNHCTSSNHSSNHCCTT

SEQ ID NO: 136267 - protein, 78 aa, Heterodera glycines
MVVRRGTMVIRRGTMVIRRGTMVIRRGTMVIRRGTMVIRRGTTMMRRGTAVIRRGTTVIKRGTTVIKRGTALLEGVQI

SEQ ID NO: 136268 - protein, 230 aa, Heterodera glycines
AAEAAHVAKEREIEERLHQKKEREHTVCDQTPTVQSTEVEEKDAATELTGSETDRPSSKVGEEKDKEETSEEATTRGNDGGASPSATTAAQRAKALFKFNIADGGFTELHSLWVNEERVAVPGNEYEIWHRRHDYWLMCGIVTHGYSRYNEHGYSRYNEIQNDPRFAIVNEPFKSEQGKGNFMEIKNKFIQRRYKLLLEQALIIEEQLRRAAYLQITPKSEEHLPQKESG

SEQ ID NO: 136269 - protein, 129 aa, Heterodera glycines
FGVSQSLLTILYNIILQTAEEFKEIAEPNITRRFLTFLMKLFANMLHFLPQNTKASLADHKVLAHGWDWTFHFLTTAGQQLAQLDHYLAASAKQSQNVAKTDTEQSAKRGFWHKNCTNFASGSGTKQQN

SEQ ID NO: 136270 - protein, 124 aa, Heterodera glycines
MSGPIQKGIINALKALDNAKSATSLLLHPDPDLSNWESAVNLEAQFDRVVKEIRTMEMQMDSLRDSSNAWIELLARLIGDDKDNGEKEYVKFDKNEKIAGDTTQRLFLSAENTINKIEFKLYGL

SEQ ID NO: 136271 - protein, 67 aa, Heterodera glycines
METLVEQIDELKQLQREGVTKLKGVKKGRTCGRKFEGIRNKRAGLRWKRIKRWTKRTHCQQNGEDDE

SEQ ID NO: 136272 - protein, 148 aa, Heterodera glycines
MSRVIVSYFRQYSLKDWRNYFLSTHFWGPVANWGLPLAAIVDFRKSYCKISGPMSCALTIYSSVFMRFAWQVQPRNMLLFACPRNMLLFACHLTNFVAQQIQIVRFSNYHFLIVRFSNYHFLHLYTDPFATVKKLRGQNTKVEQRHCA

SEQ ID NO: 136273 - protein, 324 aa, Heterodera glycines
MGVESPPHKRGHRYIFVDNIGPNFFDDDPNAWGAQEDIHLLNSLIKAHLDQWAELSKDFGRKKPLMEALERLDRCFLRNEIGKCVLATKNRGIVNICGDDSDVKEENANGWVKFTILFHFFLEFSCNGYQSEFKKATRKEQLLAVAKNAAVEAFRGQRKTSLELSEAMNSVENAGKVSCDGVHNNSAICDEKLAELYASSACSPYFYNAKVPLMKPQTVAKFDEEDLQLLTYLPFRDEFENVQPTFCFLLISRIVFPREGADLGEVDKFINEVIYARFDRYNRIMRIRTTKKAIIREHNLLNEYLNIVKTNMSEKGKYAVFEGK

SEQ ID NO: 136274 - protein, 186 aa, Heterodera glycines
AAIQTPCTPNLYAEEQTKRKCRKDKCQTAYYKNKYAADKRKGSFAYTLFPRKMSVDQAGNDRVLLPSVVGHFNKTSSAGPLTMEQIRTIIRKELFLYGPTTLALPLTEEFLHYDSGIFHPFPRQHFDDRIIYWHVVRLIGWGHDEDDHLFWVAVNSFGEQWGENGFFRVDTSLLEDYGLEYEAGMP

SEQ ID NO: 136275 - protein, 122 aa, Heterodera glycines
MTPPHPHHRRQQQQMPSAQSVGSAAQFGRQPFGAGGGPIMANNAIANRKKRRFADKMVAPEIRSLMPELDAYVGLLSYEQKLDAIISRKKMEIQEALKRPMKIKRKLRIYISHSFIQAREPE

SEQ ID NO: 136276 - protein, 25 aa, Heterodera glycines
MEKACKIWRDYIDFNALEKASESLI

SEQ ID NO: 136277 - protein, 62 aa, Heterodera glycines
KFSDAAVAQNGDDEPQQSPADPEQADGESEQAQQHNPLQYRPRTHRRRIRMAAMAAGAGGNE

SEQ ID NO: 136278 - protein, 58 aa, Heterodera glycines
MFKMYEGEVLKKFPVVQHFLFGSLFSITERKDGKKTDSSGLDKISHGLHPAKLGIIPE

SEQ ID NO: 136279 - protein, 226 aa, Heterodera glycines
MDTKKLQQLASNPTVVAQSNGPNEGTAKDTNNDNTSITSTREKMLEVVYGNKLMGKEKQPKFMCFVVDAQERKIRIMSREEQKKQESSAIILEDLTDDQFSRFGKSVKDKEADNSDAFVHCEKCSLFYEFCCLDHPLYQCKDRVPSSSPTEIEDRAAATLPAFLFIQNSSIPSAGKGPYEGILTQNLSEMEFGAYTWELRVGYGKPSYYIDAKDPRYSNWMVKFIR

SEQ ID NO: 136280 - protein, 267 aa, Heterodera glycines
MSGQMWNHIRGPPFVMTHPQTRETSLVHGSTQYQLIAETYIVLSLYAAVTLGVVVLNDAASSKTDPGKRKHRIAAISFCDQFVEQALVGERDLATMERNNAIEKACDWDLSLLIKKSVGERDCSNAIRVGALLSRLIRWAFESDLSSQSRTLFAEEPFKFLNSFDRVGASRLFSGWLYARWVLKTDLDGRFPVPPARPTVSNPYFSVDQSLLQAERLSQVTLEVRSRMGEAVNFLRRIVNDRRLGDDDKVEVPGMMCFFQNFDITTK

SEQ ID NO: 136281 - protein, 89 aa, Heterodera glycines
  unsure (1)..(89): unsure at all Xaa locations
YQLIAETYIVLSLYAAVTLGVVVLNDAASSKTDPGKRKRGDLSPFGTVFYXFNSVMACIGIGLVVVFFSLLLSVFRSKHHGYPYHFLFS

SEQ ID NO: 136282 - protein, 26 aa, Heterodera glycines
LLLPLCYCLCHLSNKYLPMRNMISLD

SEQ ID NO: 136283 - protein, 72 aa, Heterodera glycines; identical to SEQ ID NO: 125063

SEQ ID NO: 136284 - protein, 223 aa, Heterodera glycines
RRSVDYDTTETGADGRLLINAGKPDSDPEVFVAEHLTNVLQPHQIGGVKFIIRITGKRHVLLICPVNVLQNWHNEFNRWMPETDAETARPIRHFELFVIGDSVKTLENRAQMIENWYQSGGVLLLGYEMFRLLVHQCELLGEKSAQRKKASKKQPLRTMYDLADDLGKTNEQEKAQMTQKDELQRNIRQALLSPGPDLVICDEGHRIKNLNTEVSCALSAINT

SEQ ID NO: 136285 - protein, 26 aa, Heterodera glycines
MSLFYQGKISAKLFLFFISKKTLKHN

SEQ ID NO: 136286 - protein, 151 aa, Heterodera glycines
METRHAYPLPCDLRFARFPREERERYRLHKNFIFEGTCCLVVFDHNVFSTDRNGEHKLMERTNDLVVCNRWVRRCQIVGQSNGMAMVQCVDYPYIGLVDLKNIFQVTIKIPPSLLGIYQTGVYAVLKDCQMASQIEVARHLSQFLFTTVIC

SEQ ID NO: 136287 - protein, 19 aa, Heterodera glycines
AEIDPNGCHNRVQQPQNPL

SEQ ID NO: 136288 - protein, 215 aa, Heterodera glycines
MNRGPLASVSDPVSPAFRNCFLFLYSPTISNVTCIQLINCSASPNEVVDAAHRRHAAHNDPDPHPFQLESAHVQTGNALPQQTVSVESTQPVASQKMEKIPRLSSEVLNAFIKTDFTPFFDYTSDIWMDSIKEKEKEEELEEGDKENAPIGGCAKLAQTKCAKGGRRRQIYEKDVQRVILADKKMREKKKRKERKKRRKLLSNLWGKRKVKIKIN

SEQ ID NO: 136289 - protein, 90 aa, Heterodera glycines
MRFCCRRSRRSGGRVNGKSQRYSDKMQKAKQKKQKQKDKLRRLKTQRAQGHIDDEQYREKKKNYKQKKDKQKLKARKNKRKLNNGHQQMW

SEQ ID NO: 136290 - protein, 174 aa, Heterodera glycines
MDDNFDVNNFGQVESGIDRTFADQELSPSSNESIEKYDIWAQRKSPCGISIPSTISGDPDSDFLSKIEAELACFKAGQRMEVNGDLFSWWNENTGRLPELSKLARMVHSIPATSVSSERLFSKAGLIFANSLRNRLSGNTVRQILIVKANLDALLLAPTNEYESDEESKEKDDF

SEQ ID NO: 136291 - protein, 256 aa, Heterodera glycines
DGRDADAETIGRLAFRWHYDITLSALSNRNYLGFFGRVINRTRGWPFYCPESDCGNVANGSIYSLLLYDAIYNYGMALNESFRQFGIRPEVYRNGTLLAQNNRKPFMGLTGFVTVETSQNTRVLTGFVTVETSQNTRVFVLSNRKSSDKGNALRILMQFAWVEGKLQISLRNGSLSMWSSRGGSIPPAVPICGFDGKGCAASVFEMYKGYLLLGGYLLLGIALFVVTISGSTFTVGFLIHAKFVAKFVEGRRSNMS

SEQ ID NO: 136292 - protein, 15 aa, Heterodera glycines
MWGGYGGGYYDGYGY

SEQ ID NO: 136293 - protein, 92 aa, Heterodera glycines
MPMEHRALHFYLWCFSKWLAWRGDSILFICCLVMYEPLRYPTGVDYPFWAEAFGFFLSACSMVVIPGYALYYMCCAGQDGDRRLSPLQVIKN

SEQ ID NO: 136294 - protein, 193 aa, Heterodera glycines
MPIKWFTKNRKAINEEISSTDGKENTAALEGKHDKGQFDFLMSMIAYAVGLGNVWRFPYLCFKNGGGVGIGNVMIAFMCISYFCVIVSWAVFYMISSFNSTFPWETCHNWWNNGQCVTGKETHSEIMRIASNLSRYGMSIESSVEQFWERRVLKQTPSIDDIGGIQWELLGLMFLAWVVVYFALWKGITQARK

SEQ ID NO: 136295 - protein, 69 aa, Heterodera glycines; identical to SEQ ID NO: 130685

SEQ ID NO: 136296 - protein, 21 aa, Heterodera glycines
MDAAAYGTHRPFRSASAFSTS

SEQ ID NO: 136297 - protein, 45 aa, Heterodera glycines
MPSLWGSPSAGGREETNNEIEEQMDDEEKGKEEEEEEGDEWEEEI

SEQ ID NO: 136298 - protein, 56 aa, Heterodera glycines
MCPCLNGASTLQSLCRVGRSESYSVIVPIKQRGIGRHIVCHLRVYLRIHTVGTCPQ

SEQ ID NO: 136299 - protein, 242 aa, Heterodera glycines
FNKGLSTLFPLFMTPPKMKRKDTSPEDHEEFCCSVVDALLFSCNPTNCTSPEDHEEFCCSVVDALLFSCNPTNCQRVLQKFVDHCFEKIDRAVELFLKYSEKVRRFETKMERRMASLAEKVRRFETKMERRMASLAEEEKPDTEELYLEKLNNGLYTLQRAALILAEICSKGAPGCHERVEKLFRLRLGDGSVGKQLEPILREFHRYLDSEILREFHRYLDSEADTQKQRVELLIAHFTQKT

SEQ ID NO: 136300 - protein, 27 aa, Heterodera glycines
MAINSKISEKECNFLGSDKPFLNLHIV

SEQ ID NO: 136301 - protein, 466 aa, Heterodera glycines
MKLLHTAKPGQKISYKDFTSLYPFTNFTTDYPLGHPKIISIPPNEQTVNWRSPSDNPYKGLLKVLLLPPNNNINVTVMPIKFDQRLLFPLCEKCAKYITAKYPNGLKDNDYSCPHFNPNDRAFVSTCTHLELNAALEAGYTVRKVFHVLQYDQWSNNVFKSYVSEMMALKIHATGFPSWCESEEEKSEYIEECWMKFGIHLEKEKMKAEPGKRYIAKLCLNSLWGRFSMRNLLSKAVINNDPCVLRQYTDDKKIDIMDIELMDEDNDVFMLTYKPKEEFVDENKYSNVVISLYTTSMARLYLYEVLKKVADTPGCEILYFDTDSIIYVHPEDNDPLPTGKGHLGELTDEKPDHDILEFISAGCKNYGLKLERKDNGEIEYDLKIRGITLDEQTVQTIHYDSVKDQIMRYGSDDPADPIIVTYPHFIRPNLIQGKVYTQSLTKHYQPVFTKGIINDSFQVLEFGYRK

SEQ ID NO: 136302 - protein, 606 aa, Heterodera glycines
MKRFSLSQNSSSSFPKKSQPNKCIRKIDNLTSKSKKYQLVRSKSKFVIEEIDKCADPAAELRSCVHHSIEEAILDGQNTLGAANKVGVIISSELLDQGDIILPITPITANVVDAVFNQFCKVEQSKSKHVNLYGAPFIITVTVLNTNGLPRQRTTKGKGRPPVSSQSHIFKVNNNDNYCLFYALELMRYYSLYKRGIITEKRWRWINNNQTTVLRQKAQQLLRDAGIPTTETEYDAEVYIHQVQGLWNVKYPGEYKIFIFNDYQMRPITKSDITDYQFPILLYHNNNHFDGIKTLSKFFNKRYYCISCESAYSHKFEHSSKCSSLCHRCREVGVDYPCDPQQGYVKNCEHCNNTFYNNNCYGRHLHKDLCTKFQRCEDCGVIYNIKVHGSVGHKCGEQFCKLCKQFHIKEDDDDGMNPCTKCFIQPLKQQRIKSYSIIAYDFEATQDKKVENRFEHEVNFAAATIICTDCIINGYWNKSLQGKKCQICGPHRSITFSPFDYTETTVDQKIITQQPLREFVEWLLFDHNKKFPTVAFAHFGGRYDMTMIIKEVLAQGIHNPDIIKQGNRLYELKIRENEHGPLTIFHDNYNLMPIKLSGLIKSLGFI

SEQ ID NO: 136303 - protein, 66 aa, Heterodera glycines
MKLLFDSIKNSLFMVKISKNFIEYEPVMHRYNCSKTNIAGQSSTNGDLAGSHKAETNSEAKSDYKK

SEQ ID NO: 136304 - protein, 110 aa, Heterodera glycines
MRKRRNSSWPCHLCSLLVPISLFWFLSLFAISPPLTMALSLFPRQNVPKMLHSPFLQQHDNNNNNNNNVRGPLGYSDQLELLAHSGRMAKKCRHDCSISDPNAEKCWWLF

SEQ ID NO: 136305 - protein, 23 aa, Heterodera glycines
MEGTIAGANQNNDQTSDGRTAPK

SEQ ID NO: 136306 - protein, 184 aa, Heterodera glycines
MKSLLWPFLCLFSFFSLNIFPFISSASLANKIGEDSHHNSSCSTKVQQKCQCGKHFRNLTTTRMIAGKTYDTLVPLGDGMDGKVEHAFSQSLGRCVAIKTCTEDPTRLSKCTRELKVLERMRDMAPHIVRLENYETKSGQPCTEGAVMSDFIRTVLIGSEKRRKRRNVGEESEKKRINIMEKEK

SEQ ID NO: 136307 - protein, 105 aa, Heterodera glycines
ISERRSPSKRREKRRKRGRTEEEEEEEEDEDEMDEKEGKEKEEEDEDEEGDEKEGEEEGKEKEEEDEEEEEEGEEKEGEEEGKEKEEEDEEEEEDEEEGEGTYDE

SEQ ID NO: 136308 - protein, 164 aa, Heterodera glycines
MQWQKKNLTVFHERIKFIGEMKQIWTIYSENFWFNEKTIRAKIEHLDIDMLWGNGPEDTALFRALFICIGESFTECAEKGGQKSAEHLEEFSATEQLKAINCVAKIVKRKARKDEIVAKLHLEKMEEIIGGEFKEKLKKNTKELAKLLDGNGINKMKELLTEAY

SEQ ID NO: 136309 - protein, 41 aa, Heterodera glycines
MPNCHFFTFFVIVAPKVLPEEVRHAVCLKSNEFLFSQFIGN

SEQ ID NO: 136310 - protein, 85 aa, Heterodera glycines
MLKLNLNEKIKNSNMKAASAPQLNPNAEMPPQDEAGPSTSAASAEEAMEPPPPTPAPVPTPEMDEEILEFGFSLPSTSVTPIGDL

SEQ ID NO: 136311 - protein, 37 aa, Heterodera glycines
MAFSLMNTIIFGGNGINLSKCPPKEETASANLPKEQK

SEQ ID NO: 136312 - protein, 49 aa, Heterodera glycines
MVAFFLAYQNFIEPGSFYSLSNCPKFFLQPRGREAAENCSETHQNLFTS

SEQ ID NO: 136313 - protein, 49 aa, Heterodera glycines; identical to SEQ ID NO: 130195

SEQ ID NO: 136314 - protein, 145 aa, Heterodera glycines
MVCREEWHRQLDGARLPPFLYQQIGRFAGALITSLSAPGGSSSADLLGTERVRQLLDPLMATTAQLEQLTTESCAELGLPECLVHGNPIGRNVFFDLTIAEQQQHQAVVAAAVNHSTDDDGIKQQQQQAKGGGGGTTVRALIDWT

SEQ ID NO: 136315 - protein, 239 aa, Heterodera glycines
MSISLADRMKLLLTNGDGADIQFLVGQGEEKEARIGKKSRNSLNFLNFSFIRPSKVSQIVNIVVFKVLKAHKLILMAASDVFKAMFRFDAQNAKTKTSSSAEQLQSVEITDIDANVFKVMLSFIYAEDSSGLTGDNLIAVLYAAKKYHISLLAKACADFPLENELPNVFLAFDQAQLLDEKDFAIRCLDYINRKAETLFGSEEFLQIGQNLLSKIFASDQLKISGEIALWKAVIIIMFK

SEQ ID NO: 136316 - protein, 61 aa, Heterodera glycines
MFLKVNMPMNFRVSQKAKQEMNSRTVSHAILSLLNIKITLNLLFFSPKLLKMIMGGGKYNI

SEQ ID NO: 136317 - protein, 34 aa, Heterodera glycines
RPFGVLKQLWGAKIPRRIKVQAIGKLFPKDSVSP

SEQ ID NO: 136318 - protein, 137 aa, Heterodera glycines
MVQLTRNKSLTSGGGDDGKNGLLRGVCFELIKFVHDSTQGFGQAALEIDTEKVQGIVRDFLRGSPVKIEFILSGTHDIIGAGRLFKRQICKELEDGIVTREGIAKGVRVIDNNGEPKAALFADGLLCILLVECLRIA

SEQ ID NO: 136319 - protein, 51 aa, Heterodera glycines
MENQLISQLQGYIRNRSQIRNNQVCNQERSGSDSNVRIFQGCSYRHRVQQL

SEQ ID NO: 136320 - protein, 36 aa, Heterodera glycines
MALIWSKLNKDITDAPSVDSFKKVYFGVPDHHEGVI

SEQ ID NO: 136321 - protein, 76 aa, Heterodera glycines
MRYIICREMKNPTEAKNLLSRVSEYLQQHHNFGPTPPLDVSFPNYLNENVTFAARLVTQFAAQPTTTVEQMRNIGI

SEQ ID NO: 136322 - protein, 47 aa, Heterodera glycines
MPPIHDQSRIEWCQCKANRKHIDLSNDIIEVGPGREFPVIRGPGPGF

SEQ ID NO: 136323 - protein, 117 aa, Heterodera glycines
MSGYLRTKIAIELKALEKAKTATELYAEPDQTLTSLENAILLESAAERIKSEVEAVNAKIEQIWITASKWHDVIQKMDKDERKSEQTAYEQFQTTEKLNTKMEAANTKLTELKDLWR

SEQ ID NO: 136324 - protein, 106 aa, Heterodera glycines
MSKSNAEADKGNSRARGNEMTAALYQLPTLRIKPFGGDKREWPMFEEAFKVAVDQKPGSKTEKLNLLKSLVEREAALLIGGLRLEEKNYEIAMKLLKDTYGDKGEY

SEQ ID NO: 136325 - protein, 500 aa, Heterodera glycines
MSRHNKSCKAHCVMCSRVGPQFPCQPTDGFVKECSKCYKRFRNYDCYQHHLHSNFCMRSKMCKDCGAVWDVADNKRNDRKGHVCGENYCGLCNNYHNTERGCYIQPIEPKQHTPYRIVAFDVETMQHMFIGESEQRNHLPNFIAAKLICPGCIENGDWQRGTKGCEVCGPNRTVAFCQRFTETTVDKQVVADNPLEEFVDWLVFQLPLKYDTYVYSHFGGRFDMVLVFRELFRRGFNPSMLRKGNKLYEMKVGNQKKRNPNVVFRDSYNLMPCALAELVPSFGLDVEDKPFFPHMANQPDNYGKQIYPTPEDYLADGMMPDKRQKFNVWYEQHQHKPFLLDEALASYCTNDVEILTAALVAFRMEFFDVSRREEGFVAERAHEGIDVLRECMTIAGACMKHFRINHLPAEHLAIVPERGYDNAQNQSRLARRFLQWYTEEHNVEVRMANSPRGEKKFGQYSVDGWVEAERKAIEVNGCVWHACSECYPDDNMMDANGKTA

SEQ ID NO: 136326 - protein, 327 aa, Heterodera glycines
MENRSPKRPSNSPFVELLPKKPRQDLVINQILGVVQQGGGETSPSKEAPKDYVQKLGSSVEHVAKFHYTKMKSRFSISDVPSNPERLLAGIFQHCIDSATKDSRERGIEPTHLGCLISSPLLSEGAITIPTRKISDNTIDTILNLFLKVAQSKQQKNVSLWGDPFTVTITTVDRSGLQFKRRVKGGTRRKIAAVHHRINDQCLIKIRNNDNHFCLFYALQATMVDKTCNWPRWKFFDYVNDRHGQQGQLHHDAVELMQQVKAPMDLDGYDADTFVPHVVDYWNNAQRQHRFAVFIFGSLGQYKPLYKYIDNTYDTPLLLYFNEDHFD

SEQ ID NO: 136327 - protein, 31 aa, Heterodera glycines
NRSLSGTTTQKNEFPSAVSLVIYQNTTHSKI

SEQ ID NO: 136328 - protein, 34 aa, Heterodera glycines
MVIDSQINKHIMSDQKQLFLFGQTLPGNQSGLLE

SEQ ID NO: 136329 - protein, 301 aa, Heterodera glycines
MIHHPQRHFAGVTALWKEARKKIKHLRKKDVQHYLEGHRTYTLMRPRRVHFPRARTVAAGFMTDVQVDLVDFQALSRHNRGHRYLLVAVDVLSKRLFVVPLKNKRAEEMLEAFKQLIDQMPMVPHRIFSDKGTEFKNRLLREFFEEQEIEKHEPVHSFVKASVAERAIRNVKQRLYRYFAEKETLNWVDTVQQIVDGINSSPSRVHGMRPIDVNFSNAQRVWKRLYGHPALQRRTPRFHNDQFVRMSREKGQFEKGYLPNYGDEILEIDEVLKAVRPIRYKLRDEHGEKFKGSFYEQELAR

SEQ ID NO: 136330 - protein, 116 aa, Heterodera glycines
VKYPQLQVDQTNECDVYFERNEFVDIILSNVLSNAGRRRIVFSSFDADICTMLSVKQKKYPVLFLCLGDSSRHVQYADERTRLPMSAVKFAHAIGIVGVNFNTEDLMKDASPVANR

SEQ ID NO: 136331 - protein, 92 aa, Heterodera glycines; identical to SEQ ID NO: 125147

SEQ ID NO: 136332 - protein, 33 aa, Heterodera glycines
WLSLFLINFIHIQMLSSMIGRAVRNRPFIFEGI

SEQ ID NO: 136333 - protein, 581 aa, Heterodera glycines
MGEAEYKRYCDSIAPKTQNDFNWDETTAKLKHLFGETRSLFLRRFDCFQIRQDAHQDVQSLIALINSSCENADLSLSKEELKCMILIIALRDEFTDLRQKCLQRLEDSRTSGRSTSLQELGEECRKYQILKESALSLGSNPCSTSAIRAKPQQIRDKQKPKTKPQQSHKGQNFLPKNSTAPKGKVDQRDQPCYSCGGKSHWQKDCWFKNSTCEKCGRNGHIAKACKSGTEIRRVRAVATDSVKDTHIHTVSIKLKCMAIEGSSNKWWEVIIQINGMDHPMNVDTAAQITVIKTDSWQKLGKPKLGKTAITVRNCNEKAFPIEGKFKCQVLYKGRTASLIAYVSDEIHQDLLGMPWIEELEIIPKELMFPNSSQIVNSLPTKPISSQISDEKSLISALQTNYANTFGPELGHCTKFRAHLILKKEAKPVYCKARPVPHGALDEVNAEIDRLSKIGAIKPIEFSHWAAPILAVKKKSGKTRVCIDFSTGLNDAIELHRHPLPRPEDIYNAVGGAKFFSRVDLRDAYLQLELSEARKIFACSTRTEACFSASVCRAFVYLDDVVIANKSLTDHTSTIFAVFDKI

SEQ ID NO: 136334 - protein, 137 aa, Heterodera glycines
MNYQQQQPQFFSSYPTENSGDINWAQLAQRWIQTQHSQQQSFPPQPPPPPPPPPSRLPYSQDTQMRKKLPAWILEGLEKAEREKQKKIEKEEYEKKRKEMEEEKQKQREAKGIGKFVYFYLKDIPSGGIFLYPFMEY

SEQ ID NO: 136335 - protein, 382 aa, Heterodera glycines
LKLATVESVMAELPFSVLDRLFFVGVPIVDAEVRERFRRLWYDRPYWKSSGNFEGEEQNEEPKMPNEKNVVVDTLPMFLNVPQPVLHEPVGRASIRYQQHQMPMPSFTSADMPHFPPPSPVANFAQLTVPTSVTIDEHYNVAAPPAAQRSRGLCAECNGIPDAMASLSNIMGSHLAGPLMPKANAIENSADADQKNENDQRTEVAELAQHHQLKHGNAAERSPIFKMPTFGKGKRADQRNEQDGSGSEHMVHLQHQLNKHVDRVQHLGTTPFGGGENAADGGRRGTQIRVPSFVPESNGSVQQPAAPITGEETGNVILSVPSSSEAKPSHNKNDDVMVKSNGDEKLEQSEEEEEKRQQIGTKIGKRELLTIDGEQQRGQLST

SEQ ID NO: 136336 - protein, 18 aa, Heterodera glycines
YREAIPEGFGLPINLGAS

SEQ ID NO: 136337 - protein, 95 aa, Heterodera glycines
LFEYPKRTLEKIDFFVFGAVPPNRCAQIYGETESFGSSFPIACTLILRWIFAPHNCLSTPNGHLKKSIFLFSGQSPRTDAPRFMGRPNPSGVASL

SEQ ID NO: 136338 - protein, 95 aa, Heterodera glycines; identical to SEQ ID NO: 124813

SEQ ID NO: 136339 - protein, 49 aa, Heterodera glycines
LNLKKCQRLLFLKFFEILTFSLIIYYFAKLIHKYFFRTCSETHQMLFKS

SEQ ID NO: 136340 - protein, 225 aa, Heterodera glycines
MRHAMRMFLVPEDVFQSVFVQPQAATAAADGADGTPIGLLRSRIQQIERSRELNEEQKAAQYHQEFKRLNKLVREQEEQPINVRLQHEKEREKNAATPPPPQTIDHSTPKRLEKNIVPSAFGLRRQRHHYTQKAGALSNRRPAQKQQRKAAAAAETPNSSGNGETEKEEGDVDDGEQWDDAQSSSSTASTGGVAPKRMLRARDGEAGKGGGGETADRLQQNTTTR

SEQ ID NO: 136341 - protein, 41 aa, Heterodera glycines; identical to SEQ ID NO: 133620

SEQ ID NO: 136342 - protein, 199 aa, Heterodera glycines
MPNIRRHIYAHHPAAREALDKRSLVKMISRKKPKRNDITSGIAGVLESPSARHQTRIVFATPDDVFALLEHLSVRISSSSPSSSPPSPPALFDAVVLEDVAALKSAEDWRSFLPLSTVFILDQQYRSNMNAQIWSGRAFYAPLYKELDLARPVAHAQQELRLNHLMDRLVLDERTVNTDTLTLVDTGALEGHWTETMFK

SEQ ID NO: 136343 - protein, 131 aa, Heterodera glycines
QQSAQATTPQVPCNPSLCSVEKFAVKVCPRTCGRCVDYLRSMEQTKYCDDTENVDNCMMLKESGLCASADAAEMCALTCNDPANNQLCEQYTRKVSAAVTAMTGQPGGAAARVNGDLSDDCPSNKNLCNNE

SEQ ID NO: 136344 - protein, 92 aa, Heterodera glycines
MSAHQSLLDKLSDQQQNKKAAPSPSSPERKVSPNAFPKMEIEMAKTLCTLPTNVRDEMAEPNVKEEESKQTKSEGMEVVKLGECERDDGICR

SEQ ID NO: 136345 - protein, 429 aa, Heterodera glycines
KKELTALNKYLMNEEQKRNFLRKNVDHPEKNKGNCYIDGPGGTGKSFVQIALFHLARGFGKKVTNMAFSGIAATLLNGRTVHNRFKLPLDLNSNSYSSIENGSNEAIEIRNTDVFIFDEAPMAPKYVIEIIDKKLRELHNNDIIFGGKILILSGDFRQCLPIKNKATKEEILDLCLQKSDLWIHFKVFHLNQNIRTNSEALNFSEQLLEIGNGKRNEQNYIFLPEVCDIKEKDLIEEIFGEIINTKEFSKLCSHCILAPYNREINIYNEQILEKFQGEEYVFKSIDEAESKEAPILPEILNKLQTNSLPDHELKLKINCVTKLIRNLNVNMGLCNGTRLQILDIEKNVLRVMILTGDRTGEIDFIPRITLEDKKLPYVLKRHQYPLKLAFCMTINGAQGQTFEKVGIDLTRDVFSHGQLYVALSRTRSW

SEQ ID NO: 136346 - protein, 26 aa, Heterodera glycines
MVTNIFNAIKNFFFVPHSLTNICLMH

SEQ ID NO: 136347 - protein, 1022 aa, Heterodera glycines
MVRTKQLFPSELQCSSSSLQNNSSEISENQTGSKLPSKKAVKPVQSSGKKRTRTMFDSFERMHMNEKKNIGNEMNLENVINLDMIDFEEVKESDEIERKRKKIGKDMNLESVINLDMIDLDGVNETTQTQKSQPNTKRIPTGFLFKSAAELNNVKKFSLQEFNIECIFCKAVHFIEEQSIKNSKVNEFHSCCNFGKSKNLLELFDEYPFELKQLFTEENETSKNFTNNIRKYNNSFACASLACNRFGFTTPGPSCFKISGQVYHKYNAVAQPTEQKFLPTNGQLYFLDNDDAQNIRLHSHNLNINILDKIELILRKIYPFAKAYEMMKNVIDEQNKSTVRNKNEKQEVKMLMSLRNGFDPNRYNVQQSNEVAAIIVANASDEIPAANIIVVEKGSKQMKNIYPLDPNVEPLIYPLLYPLGTKGWNFDIKDQKGKKISFCDFIKFKLFYRENFFLPHHFAKRLFQQWVVDQAARVEWDRLNFIKTHQKELRACSYKGLEDYLFNKSEQTGAVIGKQVILPSSFLGGPRNKDQNYIDSMAIVGENGKPDLFLTYTINPEDSDIKKCLLKNQKAEDRPDIVARIFKLKSDKLIEEVVKGEIFGKVVAYSWVIEFQKRGLPHLHFLITLHPKDKFKNTNDIDQFIRADLPNKEQEPILRSLVRKFMLHGPCGESNKNAPCMRNEKCRFKYPKKFREETQLGEDGYALYKRPNNGDFEFVKGQRLTNQNVAPYNPYLLLRFQSHINVEICSEINAVKYLYKYIYKGYDAATVECVKEEPNGEKTFLKYDEVGQYLEARYLSPVEACFRLLKFELQGKSHSIERLEVHLENEQTIYFDHDANNDNIEEAMEKDSKLTAYFIFLKKIQLLQNSNTLKCQHIALLTKKNRKWKWPRKGPHKVIGRIYTINPKNKELYYLRYLLIHKHATGFEDLKTEYTSYSDACLALGLTRDDLEWDKCLNEASQFKFPRGLRSLFANILINCEPKKPGLLWDKYKDALSYDLKKLHSENTAYQMALSLIDKNLLDHGK

SEQ ID NO: 136348 - protein, 138 aa, Heterodera glycines
LDELRPTEAYMSIKLKADDPLAGVWWNLYINEKNAKRISERFNKNILKKHPEIFRKFPMQVFYGRQFSHCYSKFMIAWAAGKLKECPGPHHCEIQPIAGLNCTISKRIFVPHKLSHGVTLYVAPNEGVFQLSTTGCTF

SEQ ID NO: 136349 - protein, 87 aa, Heterodera glycines
SMECKFPRAKNSSPKQCHRRGGGKCRTSKIEMDERVVLNVGGIRHETYQATLKKIPATRLSRLTPAQSNYDPMLNEYFFDRHPAVFE

SEQ ID NO: 136350 - protein, 44 aa, Heterodera glycines
LVEVVSRRFGPARRASVPMACNLLAVCTKIVNTAVAANTAPNGG

SEQ ID NO: 136351 - protein, 53 aa, Heterodera glycines
MLPPVVFYCTFVLGYCVPLVLIIYFNSRLIRKLYRHTKCDVEIIELFLFLKQI

SEQ ID NO: 136352 - protein, 230 aa, Heterodera glycines
MVHSHNQKVGRGVKSDPNCQRQCFVTRFHEISNKCHPNSPSTVAINKTQDQIAVQQNYSAQQKPVTGWKANRGQPFQPCGSSGGTDHWRSDCRFRETTCHKCLKQGHICQRLPFGVKSAQICAGIPGAFAYLDDGIIASKTLEERFSAIHQFFTRFKAYGLRIQLEKCKFLQTELPLRSFLGALTYYSRSSKSHKLIIFPSLPPTQKDESLQKVIKFTKEGWSPNKQPLQ

SEQ ID NO: 136353 - protein, 23 aa, Heterodera glycines
PIMTSESKNFNAEMRFLSSFLQI

SEQ ID NO: 136354 - protein, 206 aa, Heterodera glycines
SDMEQPCAEGCCTSIFGFWHQMSLTSDTAKLAKEKRTPFSMADDDGLDSSGHSSSSASAGFIPKVQHGGGGGTVGTAAAAAQASASSTGVAPVHPLTVTYMKASWTIDNRDICLVIAEDVQKAHIFYKILNNEALKMFKFGDGGFSSSTQCSSRTGGSGGLSANSNSNNQQHRHAYASSTQRAAGKKHSTSAAAVRKMTANNNTEV

SEQ ID NO: 136355 - protein, 49 aa, Heterodera glycines
LNLKKCQRLLFLKFFEILTFSLLIYYFAKLIHKYFFRKCSETHQMLIKS

SEQ ID NO: 136356 - protein, 31 aa, Heterodera glycines
HKYFLERALKRTKCYLKVKQGSLMLFLSKGR

SEQ ID NO: 136357 - protein, 115 aa, Heterodera glycines
MDYLLFSSNKVVRAIYPEIMQNALAEAILPISPSSQRRIGYFFAVECDVHGGSFFYADIMDNTLYRVKPDGEGAAPILVTHNDGLVSMAFDWMSKQLYYVDNVRNSLEVVKVEEQ

SEQ ID NO: 136358 - protein, 92 aa, Heterodera glycines; identical to SEQ ID NO: 125147

SEQ ID NO: 136359 - protein, 60 aa, Heterodera glycines
EIYTSQKRLRMRRRAVHNRHFISQRIFIFRGYPRKMDISFFDKFYTHTNALEHDREGGAQ

SEQ ID NO: 136360 - protein, 209 aa, Heterodera glycines
MRHQISWSDEAVLHVLFPVLLPLLLLTGVVRSGQPISGLPDDGGFDMPERSDGAKVGHLRHAFSILEPELAQSVWSREGLKNPIRRTTTIPMNDRLDIGNTGELQPKGRFSDQRLRAITFLITHSLSAGANKPMKRRPRKAETVSEYDTLNDDFLTEYDLLNLDFSLDEPQDGKKSAKEVEVPEKEFEWEEGEKRKGEENFPPKASNEF

SEQ ID NO: 136361 - protein, 108 aa, Heterodera glycines
MPLFANCVKASFCCSFSYKISQQTEEGVTRGDIMEKIVNFKLMQFVLTLAFIWQLISMRQFCGTFADPKAFIHENISVGHCKRFTLIGKDSKTGDFGAVFDQDKWHNQ

SEQ ID NO: 136362 - protein, 87 aa, Heterodera glycines; identical to SEQ ID NO: 129152

SEQ ID NO: 136363 - protein, 282 aa, Heterodera glycines
MEKWYNLQPKVTPNKYQEGERVMVKFPGTNQRSTHKKLRWNIFGPYEITEISNSSAKVVPIDKRTAEPLSVPLERLIHAPNGIPNICTAPRGRNAYKNVINVMAILEILECGNFENVEAENLVENSNSSETMKILVAGDRMEIDEAKISWTSTCEGGEHVLCKKLLAADLDPILDKSQGIGAMTIQTPLQGLLTLFILRANIAMSASKELLKVLLKWKRTDGISKLQAILNSDPDFELIKYVEERGDAIRSGSCPRNEEVKTIWQKWTNCCAMVHGNLKMSG

SEQ ID NO: 136364 - protein, 18 aa, Heterodera glycines
HNTSALLENLEEHNTSAL

SEQ ID NO: 136365 - protein, 211 aa, Heterodera glycines
AIKDEFKIIKIGNECTIQKYSLLNGLLYFNEANSEKFSVVPQKYRQKFDRKGHEGKMAGPFVTKSYWPSSPKNIFWPNMRADCVKAVLECRICAHTRNPRSNTPELRPIITTEPFELVCMDILSIGMSERGNKYVLVMVDHFTKYLITAAIPNKNVESVAKAFVEQLILVFGNPKKIHSDRGGEFVNKTVAEITKTLGIERSTTAGYDPNA

SEQ ID NO: 136366 - protein, 94 aa, Heterodera glycines
FEYPKRTLEKIDFFVFGAVPPNRCAQIYGETESFRNSFPIACTLILRWIFAPHNCLSTPNGHLKKSIFLFSGQSPRTDAPRFMGRPNPSGIASL

SEQ ID NO: 136367 - protein, 98 aa, Heterodera glycines
MVEERIKEQMFKDEKIKNDNLLRHIFKKIQKQAKDMFGHLLFENQSNETDNEKKNNAHAEILFFFMHLYNKMVKLLKGEHYGNNKNAVNTHTFLNLNY

SEQ ID NO: 136368 - protein, 102 aa, Heterodera glycines
MGTYVQRAEERSGGGGGRRNGGGQSGRGGRRTADGGRDGAAGGGAELHHQSAQGGQQGQKHLQTNGKNDGPNRAKFAHIGKSGSHPKGKPDPGFPRENSLNL

SEQ ID NO: 136369 - protein, 77 aa, Heterodera glycines
FLPLRCPRQRQALTAPPAAQPPYPTPPPVAAAIAAITARDPAVLGAVPHRVPHPGRLPRRGRRRGRPFPPPWPHCAA

SEQ ID NO: 136370 - protein, 120 aa, Heterodera glycines
MLDLDFLDKNPGKSRSRKNPGSSRPGSRPGPGFFETHLKNQKKVFRVLPGPGPGFFFHIGPGPGFPGQKSGKIQVQEKSRLPKNDLDLDPGKIQAWIQEKSRPGSRSRPSSMFTLKYDCN

SEQ ID NO: 136371 - protein, 83 aa, Heterodera glycines
MTQLGNAAASVSRNRPNFSSAKTPTALSSNASMASSSSNTGECVKVAEEIRDLLNRSANKRLELKERPDIGVYVKDLSSFVTK

SEQ ID NO: 136372 - protein, 318 aa, Heterodera glycines
MLVKDAQVKPDISKPRWDQSTFSGRARHFFTVVNPLNLLASNNQLENSRKIVTDYETGNYSEDLSVDELWRAKHLYDSAFHPDTGEKVLLLGRMSARVPVVTLMSAPAVFGWQFVNQTFNAITNYSNRSGDALNNSQLLQAYLMATGGATGVALGLNRAVTKLPAIWGRLVPFAAVAFANCVNIPMMRRKEFIDGVQVVDANGVPLGQSRKLAWIAVPQVVFCRIAMVTPGMVCTPILINRLDQKQWFRARPWLSPLIQAAVCGFLLTFTIPLGCAVFPQLSPMKVAKLEPELQEQIRQKFVAKNVPVPELVYYNKGL

SEQ ID NO: 136373 - protein, 27 aa, Heterodera glycines
MPPIWGSLMPFATVAFANCVNIPVMRR

SEQ ID NO: 136374 - protein, 29 aa, Heterodera glycines
MAISFFEKFSMQQTLSNMKRSAKNGYLFF

SEQ ID NO: 136375 - protein, 29 aa, Heterodera glycines
MAISFFEKFSMQQTLSNMKRSAKNGYLFF

SEQ ID NO: 136376 - protein, 29 aa, Heterodera glycines
MAISFFEKFSMQQTLSNMKRSAKNGYLFF

SEQ ID NO: 136377 - protein, 29 aa, Heterodera glycines
MAISFFEKFSMQQTLSNMKRSAKNGYLFF

SEQ ID NO: 136378 - protein, 185 aa, Heterodera glycines
MGRKEEEKRNEEKKREIISNFYKIKEKIKEKGRTYSKKEWNKINAKIAKKLGTNRQYIAEWIKEFGLQKQIHKNYKSKTDEEKLEIVQNFIEMINEYKQKRKYTRKEWHQNYAEICKKIGVGHGTIENWKRKFGIRSKLTKNEKMEKMKIYSQIKRKNPKMSERAIAKKMKIDRTNISKWKKLFG

SEQ ID NO: 136379 - protein, 60 aa, Heterodera glycines
MTKSKSSSGTTRTKKRTADQVVKTVFRRKICLFCFMASLIVFALVLGLAITLTVITVNNW

SEQ ID NO: 136380 - protein, 46 aa, Heterodera glycines
MSTQQQQRKTRSPIVLERGVSGRVKWFDFWKGITPSIANFQFCHYV

SEQ ID NO: 136381 - protein, 121 aa, Heterodera glycines
MSAIGDGTHSDGTQMEKSKKCKKDHDDDSVIKAENCGWEEMRCDHEIEADLTLNNRPIEDENGRTESQGQRDKGENRDSSSPAADQLRHTHSFECQQCNSQLDSFEQFISECLQRMINAWK

SEQ ID NO: 136382 - protein, 104 aa, Heterodera glycines
MPLTNLAKVLGPTVVGTNSRLLTVQDKHQQQGTAYMTEATNQIQIMQALLSLDHAYWTEMYDGPAARLDNNGAVPVVPKHQWQTTPTSTRGAERGGHLVQSIVR

SEQ ID NO: 136383 - protein, 40 aa, Heterodera glycines
IVRSENQTRKKTERKAIGKIMRKLNVYEFTANDRMDLKLG

SEQ ID NO: 136384 - protein, 343 aa, Heterodera glycines
MSESNVYEPPTSENLQQQQQQHKAAMSAKQISTLNIHFGPPRPCVGRGWTKGKPINQCVHTYVPVSNLFSAAFSCCGVHEHCCQLAPPLCVPMVPTPQRCNNRHRPTLGDLAPVLPPRIPGQIIRCVYALEQGFLDTVGLYRVPGCDSEVKKLKDQFNSKFVPKLDQTDSETITGYIKKFLRDCRAAIEGDEAQLKTFIEELPMPHRDTVIGVEDGDKLDKKAFLIFDFNAADQFGQSARPNGGGHQLAAADRAGQTPATGHRVHDGGHQSDPNHAGAAQPGPCLLDGNVRWAGCSVGQQWGSAAGGAETPMADNADVHPRGREGRTLGAVDCQMNGARKRSK

SEQ ID NO: 136385 - protein, 64 aa, Heterodera glycines
MPPPEQRKPRMPSPRAHTPQQENAALNRLLTGTFSLVGGSYTFDSDIDRFFVRRPGTAFDGRLR

SEQ ID NO: 136386 - protein, 142 aa, Heterodera glycines
MSDDKKSPKFYATVLDDIGSYLVRAVPLYIKKIADEPSPPADNENDTITRKRELRTSLKMHGAIQQWGGDKKVAHKFVAELGQKLETNQEEEEETDDEDEEEEEGDVELGEESDDEMEDEEEEDDDEEEEEAMDDDGEEDDE

SEQ ID NO: 136387 - protein, 18 aa, Heterodera glycines
YTEAIPEGFGLPINLGAS

SEQ ID NO: 136388 - protein, 127 aa, Heterodera glycines
MFRFDAQNENAGNSNKNTSKQLKLIIFNIYGNYPNYFQLVSDNCPVVVVPDVEPAAFKVMLSFIYAGDLSELNGDNAMAVLYAAKKYNIPALVAPCLQIPISELRNVFLAYAQARLFDLEPNLGATT

SEQ ID NO: 136389 - protein, 125 aa, Heterodera glycines
MKYVWDYFESGLAGNSILLGDSGYPLKKWLVVPFRDPKSVAEKRFNTALCKGRSVIEHAFGIFKRRFSIAKTSCRLQLKRIATSILAAAVLHNIAIEMCLPEPPAVEESNENDDLNEINEDENRN

SEQ ID NO: 136390 - protein, 101 aa, Heterodera glycines
MTGFVTCLGLLHLIFVLKYIKDEQIRTDLYWLVFMPSLNGSRKAMCRKLMAKGKRISIRVCPLGCCLFCFDKFEPTECVWRGGGNWQKGLIRECPNLDNVC

SEQ ID NO: 136391 - protein, 49 aa, Heterodera glycines
FFASVPSRRLLPIVLVRAEVHRRFHRPPQFDPEYGRRFHAVALLGGGTM

SEQ ID NO: 136392 - protein, 118 aa, Heterodera glycines
MLFASLLATVCFRPSRCAFFDRHRSANAIANANSLEECAVDGGAHSVASLSACGGAEDGDESRNTSVESIHCRWRNFDGDENGDEAIRGGKGQRMANEWHGKTADREQKYFCTKICSN

SEQ ID NO: 136393 - protein, 172 aa, Heterodera glycines
MPSSSSTLLFLLLLQFAVILRCNFVARPSSAPPDFRDARSIVRSEGEWTRRMGEEFVRHNVLPFIRQFRRQLKPPRNLQWAPGAGNLLPFGPNQRNNRNSAKWGDDESVQFTHVDLDPAEQRKYRKNHSVASLFDLGGLVARELWKQTKHRCIHCENGACELADPQCGFPYQ

SEQ ID NO: 136394 - protein, 140 aa, Heterodera glycines
MSSNGMVGYGNGGNRNFNNVGGREWDDRGREWEDGRGGRECANGGVARWRDGQRVCEGAESGRERNGKRNDRNINGDRGNQNGMDNFAYDNPYYGGGGNGLFDEGGENQRNYYDGNANAVNNFNAKAKRYEAIGEDFKGN

SEQ ID NO: 136395 - protein, 16 aa, Heterodera glycines
EAIPEGFGLPINLGAS

SEQ ID NO: 136396 - protein, 47 aa, Heterodera glycines
MHRRCPEGTFKIFKILCENQIQKDFKGRGSEHRSHCTEHGKNVNSDF

SEQ ID NO: 136397 - protein, 97 aa, Heterodera glycines
GSQGVQLYHSPFAYVPLDPDDVAVQRQSLSRLEFVDILYAGYDSTTKNVTPALYVEGVPPLMNGIRVERSAYDGIYFWEPEGPVLIANSTISHNRGH

SEQ ID NO: 136398 - protein, 21 aa, Heterodera glycines
MRTRPIWPVKQRLLTSQKKGF

SEQ ID NO: 136399 - protein, 95 aa, Heterodera glycines; identical to SEQ ID NO: 124528

SEQ ID NO: 136400 - protein, 29 aa, Heterodera glycines
MAISFFEKFSMQQTLSNMKRSAKNGYLYF

SEQ ID NO: 136401 - protein, 29 aa, Heterodera glycines
MAISFFEKFSMQQTLSNMKRSAKNGYLFF

SEQ ID NO: 136402 - protein, 29 aa, Heterodera glycines
MAISFFEKFSMQQTLSNMKRSAKNGYLFF

SEQ ID NO: 136403 - protein, 22 aa, Heterodera glycines
MAIYFFEKFSMQQTLSNMKRSA

SEQ ID NO: 136404 - protein, 106 aa, Heterodera glycines
RCARLGVHPFVQARAGPTPSPGSAAATGRVGLVTGAAFDGQRRGQCEEQTTYGFGDTIYRPLIPRLENHRVLTSFIGEISGAGQYFRYDDDSGRFCVVSINTHEAN

SEQ ID NO: 136405 - protein, 151 aa, Heterodera glycines
MPSVEDVPLIRETCLAIEAILSCARDERERVFVSLIVRSLVQFLCADDDELFQQKGPLRELHEFAFGRLNAIFAQHPETFKALLQAAPDIRQKIETATIKQQQQKGRTQQKRVSRSGEGGAAQQQQPTIKLSTDFSAFAASGGGSGKLPEG

SEQ ID NO: 136406 - protein, 399 aa, Heterodera glycines
EFALVLRGQIAREEGELRESVAWHFNFQLLTPPFPPPLKELGKSHYLLAEHRKAIELFTKSLEQNEKKWQRKLGEQRKKFEFRGKKAARISTKRQLQLNHSLISLMFLARLLDEQNEIGAAVEAYKRSIEMEPENVDIIHNLGMLYLKVGDQPNAFTQPNAFTTFGKALSYDPNFVPSVLAIASIMQTNGDWDVALTKYKAATSEFDHSCALWNNIGMCFFGKGKLLAALVCLNKANYLCPLDVCLNKANYLCPLDWKVLLNLSLVYCTLHQFASVLLNLSLVYCTLHQFASAYHFVSAAFAITPQNPLVYKLFSVILTGLADFRNAKSAYKRALKLGPSLWAVRFNLAIFESRRANYAEATRRLTELESDGSLAMGSTHGTAYPEVCQVAQNTHGGMI

SEQ ID NO: 136407 - protein, 95 aa, Heterodera glycines
MLLQFEYEILMARDASKAQHSQQSVKNTDIKKSESQPHNKTVDGENCTKIVQVKNEANEFSPPDTFLATLLKKKRKKNNSKGDEWADWDAENGAL

SEQ ID NO: 136408 - protein, 329 aa, Heterodera glycines
MCRGSQSGGRRTRRSLSSSLAAEYAPAIEFDDELVGPELFSRMAREAAPINEFNETTAIPLKGISVVGGDINGEHDKNLFGGTSMEDSQQNITEQSVSAPTTDRDEYEDLCKLVNPISKDKRVEQEGAKKGSDEEDIGDEGAEKGSDEEDVGDEGAEKGSDEADVGDEGAEKEDDDGVEKEGGGDEEGVQGEGVEKDGDEVEKEGDDEEGVHGEGVEKDGDEVEKEGDDEEGVHGEGVEEEGVEGDKDKKAEFEDEDEPKLIRVEPAEEDVEQDSLGRTWDFDVMLAKKKQERRRRRRKDGSIDLMADADDQIRELVEAMNEAANVSKK

SEQ ID NO: 136409 - protein, 199 aa, Heterodera glycines
MNRQFKLDKTHRQDTVQLRIIVKKPLVKFIDPIQKDVFRRKNQHFVNIFGDACVRQNRRKKKEISHWMVRKMPNSQKGKTPLRERRNCTKGTDKLPRQAITLQRALKRGENLGTTANAKQSADRPGHVADGGGKQLHGQQVYDLPIRVDCRGDEKAEGGGEPMFGQIEEEPNNDQSPARQTWTGDGGIGKEKHLAMTFS

SEQ ID NO: 136410 - protein, 392 aa, Heterodera glycines
VVLTNGCVATEVISGEGSQPALKAIILDPDSGNDSPDPVRVHPSLVRVLKKHQAEGIKFLYNCTIESLSRLNEPGGGAILGHCMGLGILGHCMGLGKTLQIIAFLHTILSHTRISENIHKVLVFAPKNVLLNWINEFDKWLFDNDPELDGVLTSEIDSLSEIDSLTDNSDRLLAIKRWAKSKKPSVLVIGYDMFRRLTGSDEDRNVPKRGGKVRSQKPKNKSKTEKELDTPHMIICDEPHMIICDEGHKLKNYESAISKTINRIVARRRVCLTGTPLQNNLSEYYCMVMVNFVKPNLLGNIKEFKNRFEHIINRGRTADASREDVVFMKRRCHVLHDRLRGILDRRDYTVLKESLPPKQEYVLMIRLTQATFSLKLSFTDIFLGFAERNNTL

SEQ ID NO: 136411 - protein, 1309 aa, Heterodera glycines
MPSKQQMLKKRKKEEHLRRAEQSVSPGRSPIPNCPPQGNQNCPLQDNPLSADGNGAASPRGFNTPNISALQLSTPASSIGSRRGIPPKAGTESITTSQNSVSSAGTQNTSATQNVESPPNSKKLKVEDVDRPLSVIEAITSTPVSTQKSRGGRPAKKRGGPGRGKTNDSMSESFSMDQGSEAGINAAVLPNVPEKINFSTVQINFATTRNLACKIWKWGATALYECDARRSGPRFIETCWNDLAQFLNDAFIVEYLAYLASISQRKVVIVDPAVWQMGIDRVIEYKNMTFGYDPNVPAEVILLPVHFPGHWTLIVHDVQYGTHFADSLPTPYGRLDPQLTDKIRKIISDILPSTVLTGIVNAVNLTVQHDGNSCGYFVCLYAESWLMNNRTFVLPDLSINYEKKRILWHINELYGSDNVPYHPREGVPTPCPIVYRHTDEAQSKSKAAEPMEIDEHDDIMIIEPQTSGQAANAILTQAQVDGENQVDTLGLVSESCVPQEPIAQADDAIFVRPKTPPRRSTRIGRRQSTSISRSPSPAPRRRSSTNPVEKVTAFTKRCYLVHKGWCCAAAAAKHFPEYSDSGKLGEKKCAHCGALLFPHEDSSHCCRQGRVVLPKLNPHPKELEELIVCDKQPRQGKEFVRNMSRYNNLLQFASVSAGNKPCPAGGPMAVILNGEFHRRISSMQAGTTQIPGFGQLYILDPVEAMEQRRKNPTFTGEKITNDKEFVQGHQLNDETLEILEQMIQENHPAASAYKQAREQLHELLRQQRTEELRFFRMTLLNERSAPGGMKDPKLHPHQIITPSTGEGMFAIHADPTGAPAPKGIWVENKQGQLNEIAPFSPWTDSLTYPLIKPKGDDGYHIGIPYAKPAQKKRRSDQCVDQMFDTDAMSDDGSCETESIAASDAESVASTESLIDRIDKTRKFISLRDYCKYHLAIRDENLEWQYHHILSCGGGLGQRWVLDQAAKIDWQIASFLRRPDMDLRISTPKNLLHYLVNQYNKQQARQNPNARQKTVDDIGSVVRLSEKNINSLQYWKKRYEDCNTIFARCHDAKKARLFITFTNNREWPEFKQNIYKNGQMFTDRFDMWMRVWCGKIAVFHQELYEKGFFGTILGSGESMEFQGRGGPHAHIVAQTDLDAVPEVIQEYIWAHIPSLPCKDDDSPIAQMHREVRELMHMQLHRCSDSWCGPRDPNFGRCKKGFPAPYSKCTILHPDRPALYYRPSPTDGGAQIEVNGLIYDNSQVVPYNPYILLRYRVHHNVLFAYGNKANIKYALKYPFKGPGHCYVECKEESGSKIGIDEPAQYAKMKKG

SEQ ID NO: 136412 - protein, 870 aa, Heterodera glycines
MFETDAMSDDDSCETESIAASDDESVASTESLIDRIDKTRKFISLRDYCKYHLAIRDENLELQYHHILSCGGGLGQRWVLDQASKIDWQIATFLRRPDMDLRVSTPKNLLQYLVNHYNKQQARQNPNARQMTVDDIGSVVRLSEKNVNSLQYWKKMYEDCNTIFARCHDAKKARLFITFTNNREWPEFKENIYKNGQMFTDRFDMWMRVWSSKIAVFHQELYEKSFFGTILGSGESMEFQGRGGPHAHIVAQTDLDAVPEVIQEYIWAHIPPLPDKGDDSPIAQMHREIRELMHMQLHRCSDSWCGPRDPNFGRCKKGFPAPYSKCTILHPDRPALYYRPSPTDGGAQIEVNGLIYDNSQVVPYNPYILLRYRVHHNVLFAYGNKANIKYALKYPFKGPGHCYVECKEESGSKIGIDEPAQYAKMNFRGATEAFAVVHSMPFAKLSHHVVHLSIHLPNQQPVVYRAFQLVSKAEEIQRGELPETPCSAYWKQWQNEWQHVPSLKDMLFEKVPEQFRWAKDRWVPYKKKPTKRPPIGRVVPVPPTDRERFALYVLMTHFPGDPYHLKLVNGQQCNTFTEAALQHGLLEDDQIWHKTLSEASLHRWPDQMRFLFVSILVFGQPSNALELWNKYKDQMYNPQGITSAAIRQAREQQALADIDWRLHYFNLSCVHCGLPDPPNSIAKNTNLAVEEFFFGDDDLNTPPGQPNQRPQQYPPPPLNSDQQKVFNAVVRAIKSDPKDQTVPRRFFIFGDGGTGKTFLFGQIIKRLRKPPYTYKVLATASTGCAAILLPYGKTAHSTFRLGREVSLDKLPSIPLESFFARRIREAQLIIIDEITMLHNTVIEVIDRVCKEMAVRQHKDLLFGGKTVIFS

SEQ ID NO: 136413 - protein, 47 aa, Heterodera glycines
MAPKCLPLELLFEIVPFIPAEKAVPNALSSCRLLHKLLLPRVIKWKE

SEQ ID NO: 136414 - protein, 127 aa, Heterodera glycines
MALACPGAAAELLYHAGVDATVPASIRVCEEAVGGAALQQETVGRGKSRAAFATGVVPFCRRLIPVLLITLITVPGLIKIQLIMMLIARVVGVGVAAVPSWLRAAANPNGTASVAASARCSVVMVNC

SEQ ID NO: 136415 - protein, 30 aa, Heterodera glycines
MMDFSIGSNQIKERRSKEWKERIITKLFVN

SEQ ID NO: 136416 - protein, 246 aa, Heterodera glycines
MKEARGHLKTDIAKRLELPVLEREKCYLTSFGERNPRHYSSNVVKIGFLGMNGDAYVCSLNEMEFMVKAMPIVALNSVDEEQLRERKLRFPTKLQQPDIMLGMDIRHDLNIRDEVEKLPSGFTLSNSRLGRMISGIGQWEKTISPWAQVTFIGSLASAVLDQREEVHEPENVLEDQMKSFFGLNIIGMDDDNTQLDRDEVMKTFRKNLTLKKTAVMNADSHGMRESMSSRPTTSKHEQGCAARYES

SEQ ID NO: 136417 - protein, 147 aa, Heterodera glycines
MKKPGWINFEFVISNDRCLEEPRFFLDLDFCPGNPAKSFITATLMGTNRRRKKRMDNDQNIRVNEIYRQSRRIHKQRRVAIVKCIWIAIFFVFWVFVMHLILVREQLWVKWVIVSTVGLCYVRFFVFECRYTIYNYEPILPTVITGP

SEQ ID NO: 136418 - protein, 174 aa, Heterodera glycines
MVSFNLPPKLLFFFAMAMLLARKSTQKVPNSTKTHAKIDYFKLAHELVDKASKIENTESEIAWWKKHTFGLLCDANFAKFELEMDGNFGKLRKNFCELMRKDFSNENLLKMFVNDKEALGDLMGFVSNDKQIIDTKTILQKIKNSSILSNKNEQNLATMFEYLNAGIAIITTNN

SEQ ID NO: 136419 - protein, 199 aa, Heterodera glycines
TPIKCILNRFPASLDPQQFHHPRSTVKRPPPIAPALAKSGPLPANKLPFSTGRSISDRLPDSPSSSRPPHLSITDCGKDKVVHDDPGRRPVHNDDPAFDNKSSNPSNSENSSSRSQSSKTIKETDEILDTLKDINLEVKRRLKVIKAKPSSDTDQEDESNDDEEENEDEEIEEEDEEEKEYDSDQEDDSPELTSNDQTN

SEQ ID NO: 136420 - protein, 891 aa, Heterodera glycines
MSGFIRSKIPLLNRVLRKEIQSTKTKIEENKFEFDQNKLDECTRVFNKTKEIIQKIEPNFEKLKTLHKKWQNLMRRMDKEEWNTEWKIQKIFRKKHDYLKTIKETDEILDTLKDINLGVKRRLKTIRAKSLSDTDQESDSNADEQEEEDEEMEEEDEEEKEYDSDQEDDSPELTSNDQINRKQTPFVNYRSRIKLPPQTLTHFSGKFSQWPSFWDDFKSSVHNDQNLENIQKLKYLRGLLHDEPYRIVSPIRLKLREKFKLYSTKELMNFLNSHTQAREDIERMEDSNRQIRNFPPHRPPQNRPQRQSYPNYSQPQLKANHRNHQNLPLSPYPITSALTTKSKPVRLAEFKPKPSQPKPQTKIIFCRFCERDNHLSKECKIYSTTEKRSNRARELKLCLNCLKKGHHLKECKSPFSCFNCKSKHNTLLCTRKTNQFNQREQFTNVNVTQNPEEFEETQNFMSLDCDQNDEILQNSEEELLMTTEAPVLNPDQNKTQKEMIFFDNGSQKSYITDECADSLQLPTIDEKLLAISTFNQNKPKIISSRLVKIGIKTLNGEIEYVTLQTVEKITDVTKMVNRETVDIRKRKIPINHACPQILIGIDHYWHFMLPNSQIQILPSGFYSIDTKLGKILSGKGTIEDTNINLVKEKRKKDETNEILQKFWELENIGITDSPHLTDEDTALIHFDKNVIFEENRYYIRWPYKRETPNLPTNFGLCLGRLRNVVKQLIKNKQLENYNKILQEQMDTNVNEIAEFKSKNLIHYLPHHPVIKESSNTTKIRPVFDASAKLRGSNFLNDEIHQGPKLLPDLCGMILRFRLKNFVLIGDFEKAFLRVGLNEIDRDTTRFLWVKQSYLDEIKQNYREIEMRDVELRRFTRIPFGVNAYRFLLTSV

SEQ ID NO: 136421 - protein, 27 aa, Heterodera glycines
PQNPQSHRDSDVFTMSKVKSDHVFVIS

SEQ ID NO: 136422 - protein, 95 aa, Heterodera glycines; identical to SEQ ID NO: 124528

SEQ ID NO: 136423 - protein, 195 aa, Heterodera glycines
MVLLTEKIAKILNCRISELRDRLNHPSDCETVVKALKGHRVKTTYKDRNGYTKSFAFGGITAQGAAITMAYGRLGRPFNVNVAAHFYVRHHIKLRHPFLHCAVESFPEGQEDRFYPLELCEMEDGPNEPDWLGRIFTEIRNDNYTDSMSPANREVLTPEDTSMSREGRDECSQNISYTLCQKVLFPILNFFENVF

SEQ ID NO: 136424 - protein, 117 aa, Heterodera glycines
MSTSSNKNYLPKNQCPNCDDEEVDNDPSPEEVEKWTPEEVIEWDRRCEGQMPAEEELWQEFLDKGEANVLREFFGGKGALEVEKSLREYAKKKERRDAILIEKRNEYKKMMEKKDKN

SEQ ID NO: 136425 - protein, 36 aa, Heterodera glycines
NLFKYSIFLAFFRKIFCLFSAGTASDNVFYLFRKIN

SEQ ID NO: 136426 - protein, 46 aa, Heterodera glycines
INKKHCQRQCLPKKRQKIFRKKAKKIENLNKFTSEKRKKSLQHLRF

SEQ ID NO: 136427 - protein, 46 aa, Heterodera glycines
INKKHCQRQCLPKKRQKIFRKKAKKIENLNKFTSEKGKKLTTPSIP

SEQ ID NO: 136428 - protein, 48 aa, Heterodera glycines
MLTALTPELRGTLSKDLIFSGLEQLLRDPDEDVRVQTVSAIALLYAFA

SEQ ID NO: 136429 - protein, 182 aa, Heterodera glycines
MSERGRGGGFVPKRRNVVKEIVIDESQENLVMIVQKKVEESEKTKDHQSEEEKKKESEKGDGAEKEGQTVGTGTMAQQQPKKEPYHAQHHHFTRKPSWTKDPKGMPTLPRVVNYTFRHTKSDQRHQQKAKEEEEEHVELETYKVKMGEEFSNFKGGQNKQVGFGIEIRIWVGIEVEIGFSFH

SEQ ID NO: 136430 - protein, 57 aa, Heterodera glycines
MIYPIVQSGPSTALENVCGIANPPDMPRCSRATSLMSRSARGDAVGVPPVIGPKIAE

SEQ ID NO: 136431 - protein, 89 aa, Heterodera glycines
MPKRHYYFDAIRHCSRFINNYPNGIFTIPSPCLSYKLCDLPKAKVECTVTKSKYYRSTIMPIQVYRVHVLKRTLFVKRKGGCFARKLRF

SEQ ID NO: 136432 - protein, 130 aa, Heterodera glycines
WLREIDRCAYSTMSDVWSYGIVLWELLTRAASPYSDVPSTEIRHFLETGKRLAQPLHCPDILFDLMFDLMLSCWRSRPSERPDFVTIEHQLRGILQAKKAWKCSRFVRIKNLLAPKFPKKSRNFPENPHN

SEQ ID NO: 136433 - protein, 77 aa, Heterodera glycines
MASLGTTTTEQIAKRQPETVALRAAFAEPRYGTLAFWSTVWACDRRQLVSNCTKNRERRKSDGSDCKKIKTWIREIP

SEQ ID NO: 136434 - protein, 148 aa, Heterodera glycines
GAWPFLVRGAICLVYSDNERDSSLLNSWLIASGHNFLEGFSVFSRTKLSNNRSVMPLDVRGCTRATLAKSACLPSPKGVGKPVKICRDWDRTLQLLSVNEEFLVGASHQLALNTSLPFVHTARRCPGLSHFEKFGDGCSGRSVCRLEP

SEQ ID NO: 136435 - protein, 37 aa, Heterodera glycines
MVTEMGSTSVGGISPSLSANAAKSFLEATDKEKKEMQ

SEQ ID NO: 136436 - protein, 669 aa, Heterodera glycines
MSTALDESQQNGITPDQLGATISSDLLNPSIWIPIRRISDNTADSIMNRFLEVAQSKSREGSLWGSPFTVTITTLDVAQLPQRQQVRGSGKRTTNSVQHIVKESALLRINNSDDAYCLFYALEASRKYHIKEMSRRNFCYYINHQNGRRLEDVFGLMSSANIRTDLREYDAVVYVPIVVDYWNRKYATANQRFKVFIFGATGTYRPKFQYGPDNYNVEIPLYHHNGHFDGIRCGVGKAVFGRDYYCFSCECPYDNANDHSLQCKAKCINCGRIGAGRPCRADDNNDNYYRECTACGKDFMSQDCFSHHLSSNVCRQFKKCKQCGVVWNVKQNRRKGRSGHVCGEKFCYTCKCYHKPERGCFIQQLKARRPKKYRLIAFDCETTQNTRIEGDRRVHSVNFISCYVVCTKCINENLWRNSLQAPCGICGRQRTVTFSHRVYERTQTDAQFITPCPMAAFAQWLLSEFDPRYPTMLFAHFGGRFDNIMLFRQFFLNGFCPQMIRRGNKLYEMKISRGEKNPEIIVRDSWNLMPVPLGALPGAFGLNVQDKEFFPHLANVEANYGHILPSLPSKADYLYGGMTPDRQRRFDQWYAEHRHQQFDLCEQLAAYCTNDTRILIEALVAFRTEFLTISDPLERHGCLDDDNDDEDEEEEEQQDDDNAFEVIGGGIDI

SEQ ID NO: 136437 - protein, 35 aa, Heterodera glycines
MALNGTYLFNLSLYCSNSLHEVRAVQMFAFYGHFS

SEQ ID NO: 136438 - protein, 146 aa, Heterodera glycines
MVYIERFEANSYEELNTVLERLARDSIANLRLALSTQQSTTLIVWPKPFAGARHCVHSLLRWSLERVSSKCQNKPMPFQIVRVWAVPNSPYKIDKTLGLRQLPTLIEYSLTDRRRIEGRMVYLDEQFLSVDYITRFFLKQPLNVFQ

SEQ ID NO: 136439 - protein, 74 aa, Heterodera glycines
MVYIERFEANSYEELNTVLERLARDSIANLRLALSTQQFDEGGDFHMEWQRIRRDLAVFGLGNRIKMPKIHKKL

SEQ ID NO: 136440 - protein, 255 aa, Heterodera glycines
IENIRRTEVGAVPEADPKDIHACILSCPFCEGYGGECPNTLHFWVCDDCCQTLTFVKIEKQFGSKASLDKELDRLNNKGMLNILLLGETGIGKSMLINALIAYLKHGTLQKALEVTEFIEYCIYNWHYLNPKQAKEIDWVIPARFCTGRYDSKKIRHRIEVQLGEESKEERLEAGESQTKWPNAYVIPSKDGHKVRIIDAPGIGDTKGVNEDKINFDKTLNFISTLPELHAVCILLRPNTTRATPAITYCIKGLL

SEQ ID NO: 136441 - protein, 18 aa, Heterodera glycines
DGKPSIACRFSAQQSNNR

SEQ ID NO: 136442 - protein, 124 aa, Heterodera glycines
LRIALGLLVLILLIGFFPSTDAIQCYSGNQFSIVECPSLYCIKQTLGLDTVRYCDGTGFSSICSTYRIIDSCQTVPSLGYVCCCPDQLCNSAQKVPMNALFGITLLGIALASLNVAMRTTERMF

SEQ ID NO: 136443 - protein, 44 aa, Heterodera glycines
MEKILAKAPPRGREAAENCSETHQILFASYFRHSDAFTIKKGDE

SEQ ID NO: 136444 - protein, 50 aa, Heterodera glycines; identical to SEQ ID NO: 125301

SEQ ID NO: 136445 - protein, 250 aa, Heterodera glycines
GDKWGTTNGEWHGSRGGLNGGQPMGNGTGAEEGMGTTNGEWHGSRGGLNGGQPMGNGTGTEEGMGDKGNGTGAGVKWGTTNGEWHGSRGGLNGGQPMGNGTGAGGLNGGQPMGNGTGTEEGMGDKGNGTGAEGVKWGTRGLNGGQPMGNGTGAEEGMGDKGVKWGTTNGEWHGSRGGLNGGQPMGNGTGAGVKWGTTNGEWHGNRGGLNGGQPMGNGTGTEEGMWDKGNGTGAEEGWGTTMGNGTGAEEG

SEQ ID NO: 136446 - protein, 129 aa, Heterodera glycines
MPRSLTGVLAYNALNHFDCYDLNEVMFRMNQWIARRLTQIMSRPNDNVKPSRRKKDIFRIVVANSAEEPPPASLFNKEIHSQMPLNSNKERFSTQQDIDYSVGVVLHKKFFRVEVISVRLFKSSSHRRR

SEQ ID NO: 136447 - protein, 108 aa, Heterodera glycines
LSVCSFGPKSERLREESTLSKCTMILKQIQFILSSSHFSSLALFCCRSPPSAAFVFLVVVKKCHRFGSHFLHRFARRMRRGTKRAKGTVHIAIPCRTDGTARVVRRRQ

SEQ ID NO: 136448 - protein, 247 aa, Heterodera glycines
MFAAEPISDRLLKSSDQQTNELTQNGGDGNKGEVQVIVKGFPTTFNKFQIASLFPDFRPLHVEYLSGGEAVVQFANKYHAAQVVRNYNGLSFENENFILETGALNFRPPLSRSRSVPRLCSIDEEEARAEEQEDECDETVKDEDEELQLSSSDLDSLNTADHYQPVPIPTATTTMANAMASFACVAADQQTITDSSCRSSACGDELEDEDDDAEDEERRHFWAEHHHQFHRNDDHHHANTAPGRGPH

SEQ ID NO: 136449 - protein, 30 aa, Heterodera glycines
MQIFGNSNSLQGWTINSGNLRFFRKIQNAF

SEQ ID NO: 136450 - protein, 87 aa, Heterodera glycines
IALCSNIAMPLYSLFKNFYSVQQNCDIVCNPSGVLTINIFANTYYNEDPVAMGMGDTLLCKAIEPFRRLKLSTEEFVLIRAIIYSHM

SEQ ID NO: 136451 - protein, 176 aa, Heterodera glycines
VLSEGPHGPPVYYATVGQMIYHKWTCEANGPNIYHKWTCEANGPNQFCMTVHSCFADDGNGDKVQLHSCFADDGNGDKVQLIDEKGCARDKYLLQNLEYVSDLMVGKEAHVYKYADRQNIYFDCKISLSVKEPFCEFCPVPNCADPPRRKHYNFIAENESYQRDIWRKKKRVIKTK

SEQ ID NO: 136452 - protein, 132 aa, Heterodera glycines
MSLQFSLSLSDVAVSNLNEFHRRHEKRQFAPVGKVIDGVKVLILDGQTMKRVPIGVPGEVNGGNCKESKELTDLRRGSDFGKGLYQPPRAEQRPFCGSAGRTAQRSGRRANVPDGRLGLFDAELSAGNMRTL

SEQ ID NO: 136453 - protein, 29 aa, Heterodera glycines
IAKLHHFLETRRSRVPEREALSPQQQNSI

SEQ ID NO: 136454 - protein, 67 aa, Heterodera glycines
MALPFKKRFYINSAAWISQIEPVQDHVMKSSIQSEPEEDSVNYFMFVFCYFFFPFIQRTLSFSHIIR

SEQ ID NO: 136455 - protein, 100 aa, Heterodera glycines
MNFSEVKALNLFNNYLFWCKTSVPNSAYFENLFKKVQHFQFFPRRRLSAPPEPRPMFPKELLKITFACFLQNISNSCNMPYTNFIFHGKVLLMKLLITSP

SEQ ID NO: 136456 - protein, 16 aa, Heterodera glycines
MTLSKKFLPRPYVSAS

SEQ ID NO: 136457 - protein, 15 aa, Heterodera glycines
YRQWLISSVIDFVSE

SEQ ID NO: 136458 - protein, 136 aa, Heterodera glycines
MEQLQSSHQLEYPPLLVSQYFDLWENLIVLHCEAVHWLDFSCRCLDYIDQNAESLIQSDAFLEMEQNLLYEIIERDQLKIISGELIIWNAALRWADAQCLQNGTECSAENRRVVLGLALSKIRFPLISLSGLADYV

SEQ ID NO: 136459 - protein, 129 aa, Heterodera glycines
MNLDRVFQSDFSNGVENDELLGNENVFVIEDENEILEQEIDCHVLSEHNYAKRARVLNVASQASLNSDIGVAGPSRVSDSQFEEMRRDEYLKRKRERERLRRENEAQSQRALRLERNRNRMSSQRSEEN

SEQ ID NO: 136460 - protein, 34 aa, Heterodera glycines
MSLFLFLLNLLFRHFRLGVLSLPYINYSELFSFL

SEQ ID NO: 136461 - protein, 79 aa, Heterodera glycines
MTNFFCPPVLICVLSLLTAVVSSLKVLQIAPNFLDTNFELSVRFANLLGENGHHVHFLVPLSKPNNLPALEQFNSNVHV

SEQ ID NO: 136462 - protein, 54 aa, Heterodera glycines
MKQHIASSSNSVDKCDEENIKNYIKNCTYFAMNALRATQKRHSKRNHSRAVGWD

SEQ ID NO: 136463 - protein, 122 aa, Heterodera glycines
MPLAKGGLGLRCMAADCNNPITLQELQAFVPSSTVTKLEERCAELSVVQANLKFMERCPDCRLKFCRLCDEPWQDEHKGVSCEQFAKKQNRERLLEKRLSEAVVHCCAKCKMSFVKHDGCNK

SEQ ID NO: 136464 - protein, 504 aa, Heterodera glycines
MNAPILMNDKSIDFVLDSGTEIIVVTNQTYKDIGRPPIQACQEEGKFFDGTRCKFLGRGVANFQFNGIRTELPYYVAKSGTINLLGLTALDRLGFLEEMKRLIGTKNINQIWSTDSTKIRDTIANFENKYEQIFSEGLGLCTKMKGQLMLKSGANPIFKRARPVPYATLPTINAEMDRLEKLKVITPVDHTDWSAPILVVKKANGTARLCADFSTGLKDSLQLNQHPLPLPSDIFATLNGGKYFSKIDLSDAYLQIELEENSKKLCTIATHRGHYQYERLPFGIKSAPGIFQSIMDNMLSDLSFALAYLDDLIIVSPTLEKHNEHLDQIFSKIQEWGFKIRIEKCSFFQPKIKYLGVIIDQNGRRPDPSKISAIAEMRMPSNISELRSYLGMVNYYQEFVRNFRTIRQPLDELLKKDSKWDWSPKCQNAFSKIIAMLQSDLAFTHFDPSLPIVVAADASQYGIDGVISHKFSDGTIKAVSHFSRSLTPAEQNNGQIEKEALALV

SEQ ID NO: 136465 - protein, 57 aa, Heterodera glycines
MQCLCKVLPPLILGHLQGVTQPIKTTTETEPIISPTENYTEEPKTAVTLLASKLFFC

SEQ ID NO: 136466 - protein, 109 aa, Heterodera glycines
MKWGLAIDAKRRPAMSPHVHGSHVVPIISSSHAARQSRRGLSALPDSHVLFPKCSWKRIAKSGKKVVAIWLKIPKTGLYRKIPKKYLGLIGIRSGSRVSVPVAFQKSTG

SEQ ID NO: 136467 - protein, 34 aa, Heterodera glycines
MQEMVQLLGHALLENQKFTYFLQFIGHFLIILVD

SEQ ID NO: 136468 - protein, 104 aa, Heterodera glycines
MLRRSAVLCLKSGTYLAKGKRVQKGQINKIKDPYASADEETCAEFFAGPTIEDRKSKFQAYVAKVESKDQVDFLLTKIKGVGKIARATHNPYAWAFSDHSSIEK

SEQ ID NO: 136469 - protein, 90 aa, Heterodera glycines
MALPELVLKRLSSLRKKDGNKIMPASPSSKDGKSLVGSAELPKIALLRSLSKQRSNSVRRESEKSPFDSPKPQKTKLARSLSRTMLSLIR

SEQ ID NO: 136470 - protein, 49 aa, Heterodera glycines
NIFREYTFFIFTIFLCLFIIFGLKYMPETKNKTLAEVEEAIGQKKQNEN

SEQ ID NO: 136471 - protein, 47 aa, Heterodera glycines
MLSRSDEHIAHAKKLREIYLDRPIPPMDEGVFAVEHHIFGQKHGNGW

SEQ ID NO: 136472 - protein, 184 aa, Heterodera glycines
ERFLMPNIAKFGVPNFNWFEFLWHSEMFFFENIDRMGMPLAVGAEMIATGAHCEMKKNLQKLPGELSTFMEKPNSKGVLYVAFGTHVDWKYAPEHLLNAFFDAFNQLIDYQIIFACKGCEEKPKNLNQNVMIVKWAPQNEILAHPNTNAFITHGGFKSVREGICAAVPLIIMPVLAEQVENRWT

SEQ ID NO: 136473 - protein, 87 aa, Heterodera glycines
MSNKDFGLLLSNHSEQVTEIVSTDWDLIVVDDIFWSFGFALTTMRQRLWESSGGGQGQRKRPHYLVYATSGTSVTVHNSIRATGGKN

SEQ ID NO: 136474 - protein, 111 aa, Heterodera glycines
MNQLKLFCSYLLITTVLLLQNVVNAEKILFTFFHDSGSHFQSMLPMIEKFASRGHSVAILDTILPVEKQKPFIHHIRAPLPIVPSNDEAKLNNNYYKTIRYIQYSRTAVSS

SEQ ID NO: 136475 - protein, 321 aa, Heterodera glycines
SILVSSLRYYTSNLYHNRSWREGFFKYGKFVRHLPEGVKPTHIVVGAGSAGCVLANRLTENPDNRVLLVEAGPQDNCVLANRLTENPDNRVLLVEAGPQDNWWNWKIHMPAALMYNLCNDKYNIHMPAALMYNLCNDKYNWMYFTMPQENMNGRVLYWPRGRVWMYFTMPQENMNGRVLYWPRGRVWGGSSSLNAMVYIRGHPKDYDRWEREGAKGWAHKNCLPFKKAQNCLPFKKAQAHELAIGPDDPYRGHDGPLFVTQGKCEHPLHQAFLESGRQHWIGVTEDMNGYRQEGLGEMDMTIKDGRRWSASSAYLTNVRFF

SEQ ID NO: 136476 - protein, 31 aa, Heterodera glycines
LLLKTESHDISNLIISSHDDQSDRKWEHHEP

SEQ ID NO: 136477 - protein, 76 aa, Heterodera glycines
MAEDRKGKQKANIASAVVWPATIVPRNLWVSRVLTEKKIQLLLGQNRTAAQHERVLKRTKFYLHVSLGTLMLSSFK

SEQ ID NO: 136478 - protein, 37 aa, Heterodera glycines
MIALLLRRPYFFLLKIMEYNIKIEKSYAIELDKKLWR

SEQ ID NO: 136479 - protein, 38 aa, Heterodera glycines
FYKKCLDFFLAYQNFIEPGSFYSHSNRPNFFYSLTRPY

SEQ ID NO: 136480 - protein, 41 aa, Heterodera glycines; identical to SEQ ID NO: 130306

SEQ ID NO: 136481 - protein, 27 aa, Heterodera glycines
MSAIWESKSNKLAQSIIEWISMAVDVF

SEQ ID NO: 136482 - protein, 148 aa, Heterodera glycines
MPDLYFFRDPQEQEKEGTEGEAEADITVKEGGWGATGGMDTMGGDFPGVQAEPIKLDFEVPHITDWAAASSDWNAPPAEQQPPQAQQMVVPSQPAAQAPSAVPPSAIAPPQAAAVAPPPPQPIQQHQPMPTQVKCLVNCSENCSTCIC

SEQ ID NO: 136483 - protein, 375 aa, Heterodera glycines
ALQQIRQFVKNTLPEPKNFQQIEGLDSDKFTQFYRRRDDISIVKDCLMFGDRTIIPKSVQKQILKMLHQGHPGVKRMKSLARMHVYWPLMDAEIEAFVQKCTSCAAIAKNPIKTTLQSWPKSDGPWKRIHIDYAGPFHGKMYLIVVGSFSKYPEIFEMNSTNASATISKMRSLITHYGIPETIVSDNGTQFSHQFQNFVKSNGIEHIFTAPYMPQSNGQAERMVDTFRTFAKIKGEGVDGNVLDTFLLTYRTTPSELLGKCPAELFLGRKPRIGLDLLRPPPSDQFNRKHGAKFRSFDIGQLVFTRLRPPPSDQFNRKHGAKFRSFDIGQLVFTRRHNTADWRPGKIIDKKGVIYTVELPNSSRRFHANQIRTRQ

SEQ ID NO: 136484 - protein, 43 aa, Heterodera glycines
CFAVPRTGRQWMALNLQEIKLAISGCKKLLGKELFFEVSQTPY

SEQ ID NO: 136485 - protein, 360 aa, Heterodera glycines
MITNFGSCSSVKHKVGPTTKRKNVQVVVRTRPLSEMERNERCKNIVSCDSVSKVVSLKTNTCDKYSTGQRQFGVFDKVYGHESTQIQVYGDVVAPLMKEVLNGYNCTVFAYGQTGSGKTYTMEGRHDESGAFSWDSDPTSGIIPRALHQIFTELSNEDIDFTVRVSYVELYNEQIYDLLSLSETSHRSHSVFTVSVMVRESGLVNGEEMLRQGKLNLVDLAGSENIGRSGATDKRAREAGNINTSLLALGRVINALTTNAPHIPYRESKLTRILQDSLGGKTITTIIATLSPASSNFEESVNTLEYAQRAKNIKNNPEVNQKITRRGLLKEYNEEIERLRRDLLAAREKHGIFLDKENYE

SEQ ID NO: 136486 - protein, 108 aa, Heterodera glycines
PVGQLTEFIVDVLPSDEGDDTASAPVIEQLPKVQITDPRGDLLPVDVAAYEEEPSRSVVRYTPQTVGNHQISVQFDGQSVPGSPFTVKAFDAECVKLTLDQPAKAISH

SEQ ID NO: 136487 - protein, 53 aa, Heterodera glycines
FLKRHYFIFLAKLIHKYFFRNCSETHQILYTSYLGTQMLSLSKREMNKKSKNF

SEQ ID NO: 136488 - protein, 181 aa, Heterodera glycines
MFRMIIDAWPAFSPASITMDFEQAAMDAAAAVFPGAQLRGCLFHLVHNMHKRLISEGLQNRYRSDPIFAETARMITALAFVPIQHLTGAITALNDVVGQELDQILGCCRYPSIWRFIDVLRMDQRARDADYVSCVNGEEPPMKKKKFRNADKRILNIIENFDAQNIVEFLRGISNNCVMDP

SEQ ID NO: 136489 - protein, 129 aa, Heterodera glycines
MNNNFVKMVTEHTHEANIANVKAKKIVTGIKRRAAECMELPSQLRANAMVNVSTPVLAQLPSANGIKKIVKRVRHEIVAAPAAPNSIHDLQIGQAYQVYKRSEGVEEEQYLLSDSGVFSLNADNSQHRY

SEQ ID NO: 136490 - protein, 26 aa, Heterodera glycines
MTRCSVFVLTLLGVGMAHSLLMSGGS

SEQ ID NO: 136491 - protein, 27 aa, Heterodera glycines
TKIISVIIYKFLMFYCVFLTILPFSIP

SEQ ID NO: 136492 - protein, 89 aa, Heterodera glycines
MGLAKQLKQELKYYHNLALIRNWNFWSSSATITLGVTPTKINSVRAEKGFNNKINPVDIANAQIFHVHMLLFFAYFAIFRQIFSDLNIP

SEQ ID NO: 136493 - protein, 83 aa, Heterodera glycines
MIEDLALEVREMKGLPADHWKASDWRRRTLDRHHDAMKIGEAQAGDNSRGRHSHAADEEEALQSATIVDERDTWHVMPRKTAR

SEQ ID NO: 136494 - protein, 57 aa, Heterodera glycines
SHLSQCVHQRRDGIPGLDHPMGPFLREFMSSFPMFPICPPKLPSPNASTSTAHGRAT

SEQ ID NO: 136495 - protein, 18 aa, Heterodera glycines
STTRVLYWRILKSTTRVL

SEQ ID NO: 136496 - protein, 102 aa, Heterodera glycines
VLFALLKFPTPPFCCCCNAAASRARCLVNGGERLIIFTTRVLLENLEEHNTSALLENLEEHNTSALLENLEEHNTSALLENLEEHNTSALLENLEEHNTSAL

SEQ ID NO: 136497 - protein, 319 aa, Heterodera glycines
MCNSIRSETAIPELAELNNRPGHSFCMRSTSFWQNACGLPTASCLFYRWAAVPTTTTVFEEFTCLEWDMQISAWVELETNSGQVDTHRLTLHPGVSEQWGNMTIAVVPTSLPPMPALSAHFITDGRAVAMGKSLPSDLHCLDEEMARSFDKCQLSIGACQKCAPDHDNGTIHCHCRDLDVGRVMNNPEQRLPLDVARLHLHNNGPNVRGEFQYSPVQVHVQLNGLELISEYSNTKCWVTSPKLSGCYRCVSGATFNATCRTDYGTALAKIKCADGTLFAFHCGGNESTTTEAIPFDRAEVFAECKSEVPRRGTDTHIRT

SEQ ID NO: 136498 - protein, 281 aa, Heterodera glycines
MTIVRPMVGVDTGEYSCVAQNEFGRDRCACKSICGDAPERPSRPDVELSSDTEVYVCWEAPERLPVTLEGVMYRLECRPAGEKDAFSAWTVVSNCVEDEAAVVKHLIPMGVYQFRVTAHNEFGWGTPSITSRIIRTHPRGIPKLNLDVLRREGRQFTVEQREEEGREEEEENDEQMGDERAEEKNGNENNGNGKQRTVPLNTTEDPLKRFQLESELFRGQFSVIRYAVDSKTGAHCTVKIRAAPSHGSLMFAAPAERMRAARAEYETLAECQSANVARLIA

SEQ ID NO: 136499 - protein, 153 aa, Heterodera glycines
LEQTKGTLQTDMWGLGLCTFCLLAGFHPFADDDDTEQDIRRLAGFHPFADDDDTEQDIRRQVLEHRCDPNLIPVQASEEALRFVTWALKKDPRRRMRRMRPDEALDHRFLASDAAMVRRRENIRYASHRLMRTVQRRVRQQTIREERRSGTGR

SEQ ID NO: 136500 - protein, 118 aa, Heterodera glycines
MDIPTFAANTTAEPAEPNEMSTVVEGGAEKTLGLPKGIQKAMPKYFAFTRPKSKQCHSSDDRFCVATEAKPTKTATECVCQQKMINGGKEAVAKTDQRMDQQLRAKSDQKFIESIWDK

SEQ ID NO: 136501 - protein, 177 aa, Heterodera glycines
MDFVALRLSRLSESLHIFNHKLGVAIFRDEIPPKFESVENLSGGIFQLYFHGTSGRQSAVTVQKLDALFIQTVRSLFGMPSPIACHVHGLFYRCEINPGNRRDPISYGNLLDLPFMAKFEIWIDDVVNRRLIEQSFIAEFKNQIKAEEIPIRLPFRFNPNNLRAKKIVKSVESLSKK

SEQ ID NO: 136502 - protein, 66 aa, Heterodera glycines
MYIQKTFEASNLNELEKRNNAIQDTHVDLNRAIGQPLASVLRSLAQIAYSKMQKNIVDKLNKQIKL

SEQ ID NO: 136503 - protein, 95 aa, Heterodera glycines; identical to SEQ ID NO: 125597

SEQ ID NO: 136504 - protein, 219 aa, Heterodera glycines
DSDSGRPRTELESEPIVGQDEEEEGEEENHLFVEDDEKEEEDYPEEPEELRALRREAEEEEEEREQEREEEEARAEEGGESSQKKEEGKDEEEERKRGKGEEEQNGEATEEEKGDQNEMEGRTELDEAAADQDGTNMEIDAKKEALVEHEQHGKEKKTERVADEHGKLGHEKSAHQQQQQKPFMLGVYSDELEQILYGEAAVKIQSAWRGYAVLDFRHD

SEQ ID NO: 136505 - protein, 231 aa, Heterodera glycines
MTQMVANIVTVILAALKVASRPTLRERKKVGKRGGKFSQKFVGDGCRIHPVNTKQCRKCGARIFAGSASDMDGRRFCSSAREHPPNICDPIGWEDLKITIVRPGEPSPDSICANALPSDDFISARLPPRSRFYEIHPAICLESDTRYEIRLYFGEKRRNAPDIRAHVNFITSTIYPPTCPGSIIFIQKFFWIRILITDCEELFDIFFDHSSTFRHWIVPKRFLATSFLWIG

SEQ ID NO: 136506 - protein, 202 aa, Heterodera glycines
IEVLGKFQVRSVQRTDSQSGIGATISHVFPNGVECVIEHASRTLTPAERNYAQIEREALSLIFAVQKHRMIYGRNFTLLTDHKPLLAIFGNKNGIPIYTASRLQRWALILSNYDFTIKFKSANFGHADVLSRLISEHRTDEVIVAHTSDNDVDSTEEVEYALLVNLERLPVDAKEVSELTISDDLLQEMAQFVRSGWPNKCP

SEQ ID NO: 136507 - protein, 63 aa, Heterodera glycines
MLLSPTVRRDSSKICTTFYCGKSKYLNWTITCQRTQSPLASYGTEKGGYQMGIFWGVQIVMKD

SEQ ID NO: 136508 - protein, 46 aa, Heterodera glycines
CQKLIENIDLYSGYSSVKNDATLAIRPRKKSSFEWYLQIKKRLSGS

SEQ ID NO: 136509 - protein, 63 aa, Heterodera glycines
MANVKKWLDVFGSTAFYASNRLLRVQSQFARPIDFYASNQKFTRPIDFYASNQNFPKSNILLT

SEQ ID NO: 136510 - protein, 68 aa, Heterodera glycines
MIKNGRGTESGRESRRVTESGKGTENGRGTENGIESGRGTESGIGKENGRGTENGRESGRRTEGVVLV

SEQ ID NO: 136511 - protein, 19 aa, Heterodera glycines
GPGSRSRILKSSGPGPGRA

SEQ ID NO: 136512 - protein, 50 aa, Heterodera glycines
MDLTRPATVLGTIATMRMFFRIFSSVQMVQWLIFLLVFYFFPLVQSLFCN

SEQ ID NO: 136513 - protein, 88 aa, Heterodera glycines
MPRGDAATFAERRAQLAHVKDKRTDRENCWKRVIIIVFFKFVRRAWYALWAFVFAIALLIWLLIVCAVCHWSRRHNGRSAYDNIVVNR

SEQ ID NO: 136514 - protein, 202 aa, Heterodera glycines
MAFSDFALETWPICQTEFIPVAQQQRTRFQVDAYVASGVPAFVYSFDFVPRGDVVEEDRRFYPMFGERPVGVRRRDRKRKGFLSNISMPIYSTDQLMDIFFVIVQINTDLIIKICLQFDSDDHKFCGHRRSVDEEFQLATMRQRHNATRFTEHAAKPANYRMNRGPIHFPTPTFWNDEVRMLSKYQMADPSGRANEQAVNEL

SEQ ID NO: 136515 - protein, 318 aa, Heterodera glycines
MRQLLANILIFGATENCLIDGALLWDKFLHHMCDLRCTDAERPARIDRALVLLEKLLVRLGKQCKDYGLPTPTISIMNNPQLGLDEFFFPQHANDDDADDIDTSSYERGKLNIEQQKFFDLVKTAFIDSRCSRLFYLYGDGGTGKTYLLNYILYHLRRIGAKIIPTASTGMAATRFYAGGTTVHSAFKFGINVEPGKLPSIPFDSFFGRRIIECDIIIIDEMTMLERTVLENIDALCRLMCLQKQHLPFGGKCVIISGDWKQSLPVVTDSYGSPAQVSACIQSSPLYSLFTKFKLTQSMRVNPKEIEFLKWLDDVGKR

SEQ ID NO: 136516 - protein, 74 aa, Heterodera glycines
MLILSFFILFAFFGFADGNNSFCTDNFESNCLEFAKLVAKRADGFDECLLAAGATNCAGRLACCEKYGQQSCIC

SEQ ID NO: 136517 - protein, 87 aa, Heterodera glycines; identical to SEQ ID NO: 135209

SEQ ID NO: 136518 - protein, 103 aa, Heterodera glycines
IIFIQKKFFFGFRGSTMNRCAQIYGETESFGNSFPIACTLILRWIFAPHNCLSTPNGHLKKSIFLFSGQSPRTDAPRFMGRPNPSGIASIYLYFIFTLDFCSP

SEQ ID NO: 136519 - protein, 153 aa, Heterodera glycines
MKKELITVAENKDIFDKIKFRTKFEVSHAVWNPKISLIALGSLDGEVVVKRYLWKTGWKVLLLNSISLNFSLFNFREIFLVMILPNTLIFLAMFRPFRRPPSRRISCCFCVGPPMAKCFSLFSKVAYSIIWTLKLATLFSLKNCHIRLFALNG

SEQ ID NO: 136520 - protein, 380 aa, Heterodera glycines
ISDLQYIVIAFNPNYTNLENPKDGIESCSMSNCFNFSKCSKSMKIYVYSDGSPVRRSPLFTKMLKVIKESHFYTERAEEACLFVLSADTTDRDRSKQTANDNAKSHFKVLPALWDDGRNHLVFNLYFGTFPDYANTDVLPALWDDGRNHLVFNLYFGTFPDYANTDLGFDFGKAMVAWASSNLQNFRPNFDLSFPLFNNEHPFKDDKPWHFQHFQPHFPNHDKYLASFKGKRYVYGVGSKTRNILHHLNDNRSIVIATTCKHNTDWKKFEDERCEVDNANYGRWDYEQLMANSTFCLIWDYEQLMANSTFCLIPRGRRLGSFRFLEFLEALRSVCIPVILSDEWVLPFSEVINWSEAVILGKKRTALIVSRLLKPLKRIL

SEQ ID NO: 136521 - protein, 32 aa, Heterodera glycines; identical to SEQ ID NO: 127531

SEQ ID NO: 136522 - protein, 225 aa, Heterodera glycines
MDVGPMIEELEKLAYFCRSQEKWAFGNGLGWKKSKIQRLCDEPFAGNARWPFRAATVRHEAKVNGIRSLPFKKFLALSIRVERDEKNQKGIAHYLVLRNEHGFRIKGSKRYFQSLPMLITHHSVITDQLPCRLLLSDWRWTRGDANQRRRQSSGGSTLAVLRATEENKAGNPSGGGGQRQNAADGTTIRWRKDALYSMARRQNGGHRRTNSSTLISSQSSTFLSA

SEQ ID NO: 136523 - protein, 154 aa, Heterodera glycines
MQISLGKCFSHLQAPPPLLSHSLRKVCCAVCRVRTAQLAYITREQHSHHGHHVPGRKLCHVFRVSTPLNAQHIQTALADAFRQQKQWEEAAGEADEMANCHMENGKNDDGTTTMLMAWHPPDNAMAICRGKANFGSDGGTAAAGEHLLNTPTKR

SEQ ID NO: 136524 - protein, 33 aa, Heterodera glycines
  unsure (1)..(33): unsure at all Xaa locations
VAISTNFXAAVPQRQRSNLLMXERHAVQQRNDD

SEQ ID NO: 136525 - protein, 26 aa, Heterodera glycines
WQHGKSYSELIAFSKPLNSFALLICT

SEQ ID NO: 136526 - protein, 56 aa, Heterodera glycines
MPRISAFNSWRSERMSFSRLRTSEQRSWLALSKKPPKRLSIQTKVSQIPKPKPEFE

SEQ ID NO: 136527 - protein, 1224 aa, Heterodera glycines
MYVDNLLIECETEEEAIDKSSNAKQILKDADMNLREFLSHSPNVMGRLPEDDRLDKTPAKVLGLTWDTPRDCITFSLPKDTDITATRRSVLSIIASTFDPLGLVGPCLLPAKRLFQRLWGEGTAWDTPLPETEAETWIQTLSLWQNQTIVVPRHSILGKQSRLQLHVFCDASEHTFAAAVYIRSETADNSQANLIFAKNRLRPRTANQRFTIPRLELLAILVGIRAMRFAEKELRRPIEERHLWSDSQIALSWVKSEEPKAQFEQRRLVEIRQGPTTTFHFVRTDQNPADIATRGCTPAELCTRQMWWKGPEWLTNLETEWPDELTFATPASHPSPDFPCEDSEPKTLLVKQSQVPPPLVDPARFSTMLTLLGTTILILQFIGRCRPKWLTIGASTIPKSGPPTGDAFRAARTFLIRQDQHRLLNGYDKHPTVVNEDGLLCLKTRLIYATGPPTLASPVLLDRHSPLTRLIVQEVHADLKHAGVDWTLTEFLGRYWMPQARRTIRGILQGCPSCRRITAPPFARPTMPPLPPMRVKPANPFEFVGLDFAGPTSSRLSDGSLTKTYLVIITCFVTRAVYLEATTDLSAPSFINVLRRFISRRGRPKRILSDNAPTFVQTSKALDILTGPSAKTDPVTFAARRGIQWDFIPAYSPWMGACYERLIGLVKSCIKRTIGRRILDYDDLSAFLAEIEASVNSRPITWVSDQPDSSKALTPKDLVQPGLLNDLDIADSDLDYDGGISGPERLAALWKAYREAADHFWLKWSHEYLIAIRERAGWTHKGPRLRAPTAPRVGQVVIIEEDFRPRNLWPMGVVAALNGSPPNVRSVQLRLPNGQTITRPISRLCPLETENEAPEPALDATKSTPTNQRSRDFKTAEVSVPEMPTVPAPSGEPMVHPHHHGMLTRRKARLLGIAPNTTMAFAFLVTFLWAQVSPTQGLWPFPDHPKPSPGSDCVGNHLNCTLRGVKISSNSAVQKVTICCFDSCFDRLAAATIDYELSSDLLVNEYSCSTTYSLSSTRNCIDEITCPALDECELIDCALCVEQLVNWRCNPRLALALFLLTGSLISCLIGWVVCFCSSVRLGIKLGYRIIALLLSWPLRVAFFIAGHPWTREDRERVAERLETGVQRVRRQTRQRIQNARQHGKRAQRAAIRLIGILLATPALLCNTETISVITQTESCLKGPSGLTCRINTATTLTLLPAGQTSALLLRNSRETPSGPSNYAY

SEQ ID NO: 136528 - protein, 61 aa, Heterodera glycines
PNVKLFNATAVEDLIIKRQQQSETGEGPGKSVQQQQHVVGDSGGTESSQSKLYGPKHSDGQ

SEQ ID NO: 136529 - protein, 109 aa, Heterodera glycines
PGLKCPAEAKNFFYFLKKIENFPKKLPIDRARKTMFWKWSSFFWENSLKNPKIQKPENRFLGLARKILKIFEILKFGKIGLLNSTISLLATLRSGQTLMSYSAGTEVGK

SEQ ID NO: 136530 - protein, 54 aa, Heterodera glycines
MDSFDHKTALPTNGPSAADQQHQPPAEEVKPSAEEAAANASPPSPSSSADSAKG

SEQ ID NO: 136531 - protein, 74 aa, Heterodera glycines
MPANDGVLAESNVTKTDDDCGGSDEDIQIVETDEQRKTHDELRQKAAEALIREAKRSAKGEKSNIRKNSALVKR

SEQ ID NO: 136532 - protein, 85 aa, Heterodera glycines
MCGFSAAVPDKGDQRLFISGPGVWYWQHGFRDPVHILGHDQWGRFGHAVAAAGDLNGDGFQGKKSLSFTTQTFISLFGSVGGCTI

SEQ ID NO: 136533 - protein, 173 aa, Heterodera glycines
ASAKCAREDCGKTVYPLEELKCLDKVWHKTCFKCTDCGCGMILSMKSYKGYDKKPYCQAHYPKTVPSAVAATPEMEQAKRNTAYQSQVKYHEAYEKQMKGTKVKYHEAYEKQMKGTKMEVADDPETMRHKANMVNQSLAHYHGELQKKEKQDSQRDTTAGSPRLVSQSFAVLT

SEQ ID NO: 136534 - protein, 88 aa, Heterodera glycines
MINDENANNNANNSAEQSGENAAASELRRRRNATRSEESAEEQRETANTARDAANGARDGHGEVADADQLSEPEQEEEHQQQQQSMNK

SEQ ID NO: 136535 - protein, 69 aa, Heterodera glycines
MVGAEHENSAPPIDDEQHKLVEEEEEEDNNDEDEDDNNQQPNGSDQALNRPSPTDRRHPTAQSPQKDSA

SEQ ID NO: 136536 - protein, 87 aa, Heterodera glycines
IFICSFFGPIYFATQNNFKIQLTSLCMAIALIQLTSLCMAIALSGTVALACFFCPKVYICLFQPYKNVRTRSSAVGKLVNQQMRFIS

SEQ ID NO: 136537 - protein, 206 aa, Heterodera glycines
LGYGDVVPTSYCGRFLSITTGIVGAGVSSALIAVIGAGVSSALIAVISRKLELSRAEKHVNNFMADSKLTADSKLTNACKNAAASVLQHTWFIHKYQQRKQKGDELRLRQHQRKFLNAINEFLNAINEFRRIKWDQRKLQDKGNLLLDVGKLHAEMHETLWEMHRTQETLHAEMHETLWEMHRTQETFAGMIEVLTKRIVELQNIV

SEQ ID NO: 136538 - protein, 131 aa, Heterodera glycines
MPFVSFIEIAVCAVCPFPALNRISMDFRFVIKTMMADHPMTVLVSLHLKTYIRRPFAIHSIVPSFSIIFTASYWVCMSWMFTQCERYNEGYTGSTEMVYSNSFWFIMVHPQIPAEKWTKGRRTQTETAPEK

SEQ ID NO: 136539 - protein, 82 aa, Heterodera glycines
MEEKKIEGCSIKRKWNEVKKITEEKEEKRKKEEEKKKTEDEKKKAEEKEEKRKKEEEKKKEEPKKKKKAEEEKKKTEEEKKK

SEQ ID NO: 136540 - protein, 49 aa, Heterodera glycines
MLHRRSSDSRLNAFLRGELAPSIVPDFCDTSVFKTIVERARKVCEIYLS

SEQ ID NO: 136541 - protein, 45 aa, Heterodera glycines
MIYKACAMFKAPKKPHNDRFSNLRTLQQLKGIMSKKKQLSNKPSS

SEQ ID NO: 136542 - protein, 63 aa, Heterodera glycines
MRTILFMAMVCLVMAVLMEMAAVAASPAKGKASPKGFETAKKAKPAKKVKAAKAIKGEPKTGN

SEQ ID NO: 136543 - protein, 102 aa, Heterodera glycines
MANAYIWMIFCVIYGITSSSLPSRSFSPGCTAWFFNPHFGYINDPKREIYRNKLLTIYDYTMATVLTSYICPFCLFSSSKLALNTAKLAYRIQPMAYKRRKW

SEQ ID NO: 136544 - protein, 43 aa, Heterodera glycines
MQRNENPIQQLIKCMGPAKLVTQIYEHIWGSRPLGTQQPGSRW

SEQ ID NO: 136545 - protein, 45 aa, Heterodera glycines
MVYCEPGDMVQGEVFLVASLIVVIFTLPTIVIYIIMGIMLKQRIS

SEQ ID NO: 136546 - protein, 153 aa, Heterodera glycines
MAFAQGSHTMSNKKCVLPDGSQRTQKKSYESIYVPPLKPKPFGENEKLIEIEDLPKWARPAFQGYRTLNRIQSVISQKALHTDGNLLICAPTGAGKTNVALMCILREMSKHMNEDGTVRKDEFKCIYVAPMRSLVQEMVGSFKQRLEEAYGIT

SEQ ID NO: 136547 - protein, 108 aa, Heterodera glycines
MRYRMMTDKSLEPISSEFPDAALWNNEIDQLNKVREEGENCIFMIKKGRKETQSKANESDGSANWYGSPWMFVECYMYRRIRQFFQQSQFLREFDPFNEDKEKSYKDR

SEQ ID NO: 136548 - protein, 50 aa, Heterodera glycines
MANKVAADGIEMKRTPPDLSPQSLRVLSAARGTRPGQAGTTRDGKHLARR

SEQ ID NO: 136549 - protein, 73 aa, Heterodera glycines
MALDPGKNPGLDPGLGRSLILMLLECQQFRRVQKFVPIFWLSFACSPVPFGHFAKCCKLKWTKCPCQFHWIVC

SEQ ID NO: 136550 - protein, 29 aa, Heterodera glycines
MTVFDHVPILCSLFCSFSTLGIIIMHLMH

SEQ ID NO: 136551 - protein, 149 aa, Heterodera glycines
MKFKIIFIFMFNKKFNSEFASLKLFLALNVTQNLNISSPADFTVLNESFVIPHTVPYSSVEKSRLLYAVGLASMVSTFPFSALYTRYGARYVFFAAGVISTLATALLPLAAAHGMAAFMVIRLAYGANFAAIGFVCHRWATLRQHGFFL

SEQ ID NO: 136552 - protein, 68 aa, Heterodera glycines
MSVVLLVANIFFWFFADDQPAKFTKEKMKIRKQNHQNNLEAPAKLASAEKAKDGGEPIGRKRIAQHWI

SEQ ID NO: 136553 - protein, 69 aa, Heterodera glycines
MLANIFFWFFADDQPAKFTKEKMKIRKQNHHNNLEAPPKLASAEKAKDGGEQMGENELHNIGFRTNKIN

SEQ ID NO: 136554 - protein, 84 aa, Heterodera glycines
MFRFDEQNETRPPAKKVAKIANSDTDATPRGPILIEFFKIFTNYLEFPKLNNKLSTVTFRCLATPHKNVMIPIKENSFLGSFRR

SEQ ID NO: 136555 - protein, 92 aa, Heterodera glycines
LSRLKTSEQLPFPIVLILSVPAMLIILLTIFGNLLVLFFKARVGRTNTTLLVWNLGLTDFMVGILVLPMGAYYLLNRRWIFGPMLCRIWVRA

SEQ ID NO: 136556 - protein, 168 aa, Heterodera glycines
LISHYGISSTPVIALWQDGFPRYRLYDDYARLDTLLRVLRTHTDLTPAAAVGDSNSSSPSPYHGTVGQQQRKMLPREHQQQQINEKEAEEKSAVIVDGSGGDDSVQNEPPQQQQNDGGGEDGGGGATTTAPSEEAKGAGSSSNGQQQPPPQQQKQQQKHQWQQHSPLP

SEQ ID NO: 136557 - protein, 39 aa, Heterodera glycines
CVWGTLTIMGSENPPQNYSTGYMEDIPEGFCLPKIWAHL

SEQ ID NO: 136558 - protein, 101 aa, Heterodera glycines
MHPIKKFLFLYLILYQSVKVEQKPVHRRAILTVLAIGGIAALVLIPIVVGSAVVGYLISYSIHGVNGKYHEGNRQRHARSAQIEMFLYFAVKKDNLKISMC

SEQ ID NO: 136559 - protein, 52 aa, Heterodera glycines
MNIMKALFFIRQFVKICCRLATVGALDSARGAAARPGKIIYYIYIFYKQTHN

SEQ ID NO: 136560 - protein, 31 aa, Heterodera glycines
FVAFQNFAQHFLVNLQKSLRFDQSVGILVNV

SEQ ID NO: 136561 - protein, 31 aa, Heterodera glycines; identical to SEQ ID NO: 126976

SEQ ID NO: 136562 - protein, 93 aa, Heterodera glycines
MHYFDIACLLGYIMDKIHTWLVNRRLDPTSLAKNAWSKFKQYKVTKAISRITEHTVENDDDGGCAICLGAYEIGDKVRTLPCEPKISHGMHKP

SEQ ID NO: 136563 - protein, 51 aa, Heterodera glycines
MVVGQQNLLLFCIYYAVFLITKKSTTEWALFCQSTYIQVQKGSVQRLAICS

SEQ ID NO: 136564 - protein, 146 aa, Heterodera glycines
MHPGIQFPEPLQNFSPEPLDLMYGLVMLKDLSLEQLLLYVQPGSYFYPDSPTDEINEMVQQSKWEEKEGRRYNWTDSNSMPFADWEVGAKVPKTTKTPPPAQPPPLPIFAESQKDKLRHLMPSPVPHFTISKFDPKYKMAFNYKNW

SEQ ID NO: 136565 - protein, 154 aa, Heterodera glycines
MAVLIETTLGDLVIDLFVDERPNACKNFLKLCKTKYYNLCQFFTIEPNYIAQTGDPTNSGRGGESIYGTLFGEQARFIEMENVPKLRHSQRGIVSMVNNGDGMVGSQFFVTLGDELDYLDGKHCIFGQVGEGMDTVTKLNEELVDRNNRPYRDI

SEQ ID NO: 136566 - protein, 119 aa, Heterodera glycines
MPCQLPNEIATVTDDVFSYMCNLAMEKCSKKADKKKASCGGAAMRKRLLIKNFVAQMLAQDRHSRELSSPTSDCSSHLNQTFDESFDFPSCQSGANAVDQFGDDMEMDAIGEEVSERFL

SEQ ID NO: 136567 - protein, 174 aa, Heterodera glycines
VPSNATNDAFLCLDQPSSLLTDLDDVSCDPQQQCHSSRNRKRPWSLVFSADATATADSMPMPSLCSMGVVVDQYNHHHLSNTNNSVVDMFTAATSAQHHHFINSTANNINNNGVLHSSAPPLLSPLCCGMLQMSPFGSATAAGEAMLFNGAGGGAGGVGTGGRVEQPMLKRVKL

SEQ ID NO: 136568 - protein, 185 aa, Heterodera glycines
MPQFTKRPFRVPSAHSVDKFVDEFLKSDGLFILRLVATNAGELVVVDIVKCLWREFSSRQFHIRPLVYENELSEERRREDEDSHHSLLLNVYSSRGNGPTHQQQQRKQSQQLRLVVQNIWKTKFELLSDIPLMATASAFHSRQCLGRLLWSHWTILSAHRRPSDEEEKEANGRRHSQRMDAMPSD

SEQ ID NO: 136569 - protein, 169 aa, Heterodera glycines
MKKGIALPPENLSEVKARVDLAKAKELLGNLAAHMLPVHLGQLRNFLFALYETFATFNQLAIDRTDSQNQNVAVRGENAGLRALNVGLRDENVSLLAEHVSLRAENVSLRAENVSLLAENAGLRDEKISLRDQNVAVRAENAGLRDENVSLRAESDVLRAKIETLQSMI

SEQ ID NO: 136570 - protein, 28 aa, Heterodera glycines
MAKKGIDRACRKVAFKTIGIFKNDFDSV

SEQ ID NO: 136571 - protein, 40 aa, Heterodera glycines
TISRGGKTGEEIEKALVEMWKRLESDIPRADRQCSNSVID

SEQ ID NO: 136572 - protein, 349 aa, Heterodera glycines
MGKRWRKNFNHKHQNNGNDRSGPAATCWSSKDAAHSLLSVTCHFIYEGQLKFVVLAAKPIKGRHNATVLKDLLMKVFVEFSLEKSKNFVVLRDAAEAIWDGVRKLNDDESTKSLLERIKKFVRKLKKSPVQKEQFENLQKLLELPKLSLTKDTEVLNELYISKIILSQIHSATNDLQKRGTPISAMIPLFRVICFALEEEGDLKHVKKAITDGLKHRMDAKIDASGNVKRFSWDESRELVLSTILDPRFKLSFLNAEKHDRYKIWLTNEAEMSKTLRCFDLIITEVCETDQIQSQGSSEFHDLFSRCEQNIATECGLDITAQPLPSPETLNNRQKAEVIIIKFSKSICF

SEQ ID NO: 136573 - protein, 103 aa, Heterodera glycines
MLFLLLLFSSAPFALLFLPLDIFFTQIVPAKGGNGGGKGGCYGYCEKFNALEDDLEKMKQIKANAECFVDDMGKVIKGFEKKLNKLRTSVTKLEEENESLTGD

SEQ ID NO: 136574 - protein, 64 aa, Heterodera glycines
MELCHLLRSFANVRPDGLRPTDRMHDAIQCPRGQPTEFGDRGESVAGEERNEGMGVGTEHGRSE

SEQ ID NO: 136575 - protein, 23 aa, Heterodera glycines
MEPISGKSAFQANGRAFGESLCR

SEQ ID NO: 136576 - protein, 85 aa, Heterodera glycines
MFVIQIIFIATIFTLWVKKFTKILSNKELVAMNSASNTTTLAPSLIVSTKMGCTSASVTAVTNQPYNEHTVQADYISLVTKVTTK

SEQ ID NO: 136577 - protein, 124 aa, Heterodera glycines
EYLSQKGFVHRDVAARNILVQDKTYAKIGDFGLCRFIYADSSNYKSRGGRLPIKWMAPEAIRHYEFTTSSDVYRVMCSCWTGDPRMRQDFAQIRQQLALQLENVSDEYAYLKLDAKKDYYNVSY

SEQ ID NO: 136578 - protein, 35 aa, Heterodera glycines
MSEVGTRNSVPSLIAFFSFLPSMMQGLSPIKDASN

SEQ ID NO: 136579 - protein, 280 aa, Heterodera glycines
FYKSLNFCEIGFSFSITLSVACNLELSLYPMDSQKCRIEMLSYAYVERQLLIRWFDHAYVERQLLIRWFDHVDPTRHNPNIQLPEFRISNIIQLPEFRISNITSGYCSGNYQYAIMEHTYRRDNFSCLVAIIHLNRQIGYHVVQTYLDNFSCLVAIIHLNRQIGYHVVQTYLPTGLIVMISWVSFWIDRRVSFWIDRRAVPARVTLSFTTAVPARVTLSFTTMLSLSTLGNGLRFGLPQGNGLRFGLPQVAYAKAIDFWFGACMFFVCMFFVFLSLLEFA

SEQ ID NO: 136580 - protein, 17 aa, Heterodera glycines
MALSGFWTELSTKNADT

SEQ ID NO: 136581 - protein, 90 aa, Heterodera glycines
MRKADGSLQKPVAYLTCNFNRPVNGKPALFTHDEVITLFHEFGHGLHHMLTRIETAGVSGISGVPWDAVELPSQFMENWCWEPEALAFIS

SEQ ID NO: 136582 - protein, 43 aa, Heterodera glycines
MPQDEFTVKLPNFTATLTDWYKLYLRIRKNAYFHLFLSGRGKK

SEQ ID NO: 136583 - protein, 74 aa, Heterodera glycines
KPIGNLEEQCAQLSTDLYRLVHKYQALRSAVRELARAYQHTRFYPLVPRYNLLKAMIKRLLRTPAVVELDSNFE

SEQ ID NO: 136584 - protein, 38 aa, Heterodera glycines
MYNSLKLMWFTIKTGTLGVISEVGHEKCRGTARKSIFV

SEQ ID NO: 136585 - protein, 583 aa, Heterodera glycines
MQCTVKRGNENTTIEKSVCKSSKKCVDCGVLYRVADQDKKNGHICGQKFCKVCLGFHAPRDCYIPYRPKVKKVKRFVFFDFECTTNFKPDPQLMRFKHQVNFCFAHVTCTRCIEKGIWDQELEMACALCGRFRTYAWSPFEFWHTDVECRKVVEDPLAAFTKWLLNFETEVLGMEPGAKKRRKRKNAENTDGEAMECEEEEDAVDEDAENNWMLGYEEAGEKPESVTTYAYAHAGSRYDHVLIYGEMLRMGVRPELIRQGNHLLEMKARKTGVYTTTVFRDSYKLIPIKLANFVKTFGLEIEGVENKKYFPHKFNKAENYGTVLDTLPPMEDYYPGGLFPAERAKFEQWYDENRETGFELSEVIADYCKTDVQILAHGMVKMRQLFLSETRHDITDSVTIPSGCMKYWVQLAHHDKERVAIIPHLGYEKRGKQSSIARKYLKWRAEEELRENGRVLRHVESPGGEFKFGNYSLDGMMERPDEDKNLAIEVNGCYWHGCPSCFPDDAAIVGGGETAGALRARDAKRTRDIAREFEVEIIWECHLNAMLEDNPAMKAYFDNCPDSGPIDFHDAFFGGIFGFKFAK

SEQ ID NO: 136586 - protein, 223 aa, Heterodera glycines
MSQYSDNSLPPTLDGPYSPVGDDGTELMDEAPPLDEVMKRLPISVVPSDNNERKAQKEPSITRELEAELFNGDGFTCLSAEQAEAGRFKAFRFIGQFLMSLTFGAVFPEDILRNLFTMCLSYASEGAKSMKISADHFIFLLTSKHLDYEVAVHFKKLDNSATEKILTRFEMVDQSNKAKERPSLLEEPFIIDITAIESKCAKPKMAGKGRNDFNIDYRIADGA

SEQ ID NO: 136587 - protein, 42 aa, Heterodera glycines
MAGAQLARAHLAALKWLALSWPCTPPTPMGGYRNPVKSTRHH

SEQ ID NO: 136588 - protein, 57 aa, Heterodera glycines
MSTECSEGKENENRRKSAQTAEAVAEKIGGEPDNGILSIEVVPSLAGNPLHGYRFVD

SEQ ID NO: 136589 - protein, 84 aa, Heterodera glycines
MESDFVRKFLDFFVMTPIPKVTPTPSRRTSAFLHLQRRRQCRRLGVQMDSTDFYRAPEYRRGTELTRTGLAQMANETFENAKQS

SEQ ID NO: 136590 - protein, 22 aa, Heterodera glycines
SVWGTQTFMEEQKSNAELKYRL

SEQ ID NO: 136591 - protein, 16 aa, Heterodera glycines
EAIPEGFGLPINLGAS

SEQ ID NO: 136592 - protein, 31 aa, Heterodera glycines
EPISEDKIVDTNGAGDAFCGGIVKVNALSCG

SEQ ID NO: 136593 - protein, 56 aa, Heterodera glycines
MKKSFYEQKKVKFIERFGEFKELYGQGKQKEFVKELGICKETFIKWKKELLPNYHK

SEQ ID NO: 136594 - protein, 36 aa, Heterodera glycines
FDFTNRLIICKNQHFEKQSFYHDIKRNEKKVRVSTK

SEQ ID NO: 136595 - protein, 246 aa, Heterodera glycines
MNLWPLIFIIFCIAYKIESGKIRPNFDEIFGDEWEINESVENGEENVIKSIGQMQNDQIFKNDQNTKEEPNDEQKRQIIRKYEAIKEKLKQRGKFQRKNQSKIETKIGKLLGESRYKIYKWKKDLNLNKKKNNKMKKSFYEHKKREFIQRFEEFKSLYAHGKQKEFAKELGICERTFWKWKKELAPKYHKSQKHHTNEDKLMKMKHYLQIKEANPKMSDELIAKKLGIGSATLKRLKKECSHPIDQ

SEQ ID NO: 136596 - protein, 60 aa, Heterodera glycines
MPDADQILQQLEHHFVNNWLLDTGKIDEMKQRQSDRREEHDEFDQSEEETDEISLINVIY

SEQ ID NO: 136597 - protein, 105 aa, Heterodera glycines
MECHAVAGQPVPQRGKGGAIFGALWEHQRRMDTANGRGETSQNAQQTENPANCIWRSGEETCQCWQFLTCPSDGGGRTEEFGAQKPMGLNNPSIQFPCHFNKSLF

SEQ ID NO: 136598 - protein, 252 aa, Heterodera glycines
VWGGGGNPWNVHVPQFPSNGPPQSPWNVHVPQFPSNGPPQSPWNVHVPQLPSNGPPQSPWNVHVPQFPSTGPPQSPRNVHVPQLPSNGPPQNPWNVHVPQFPSNGPPQSPRNVHVPQLPSNGPPQSPWNVHVPQLPSNGPPQSPWNVHVPQFPSNGPPQSPRNVHVPRRSSTGPPQSPWTVSRPDHLIEHAHQLNVVPSASLPSDQGGSKQKLRLAGPVQAPGTRSACAGAHFCISEKRRLRCCDHICDVFL

SEQ ID NO: 136599 - protein, 90 aa, Heterodera glycines
VPNYVQGSQTIEETVPNIVETTPERKRPLMTIQCQMAPKLRTLKMPLMSIQYQMSSKLWTLKMPIISIQCKMLAKTMDNENAIIYNKNEN

SEQ ID NO: 136600 - protein, 119 aa, Heterodera glycines
MHWFIVLVLILNSIYNSNAFFHSLDSATPGACPLLVPAPWVCVCGCQKSDIKKISSSYGGADHSSSDGDGGYGGNESGGGGEENLKLKIGKVKEYCGCQTVNVTCKSCESEQENPIHIE

SEQ ID NO: 136601 - protein, 86 aa, Heterodera glycines
MIAQSVPNIGHYYEEEEEVMEDEEEYSYEEIDEEEEEEEEEVEKEEKRTVAARALPAAQLAEDGGQNGTAQGNDQLANLADECRRK

SEQ ID NO: 136602 - protein, 19 aa, Heterodera glycines
EPVNSCIGCKCRRCCTPNS

SEQ ID NO: 136603 - protein, 97 aa, Heterodera glycines
MAINISDKKSLMENILAAVEISQTANGITVSSERIAMPRTIQFDILGKCRECKGTECEAEWCVTKEGVTIWCTRFKISPRFVPFDVIYDLPGYTFFK

SEQ ID NO: 136604 - protein, 467 aa, Heterodera glycines
MYFCVLPGPGFFFTFDLDLDFMTKTQEIQLQNVNVSTIRSIEDALVPLIKFTFQFDQNTPIDFDIGLVTFDPNEQIFKSKMPLKYEQSNALSAKIAKEIGELSEQRKHFGGGEVGEKNIDEKLKKKLRSLSSFEVSSIILKRILATENTENGNGNILQIYRTFLLMIKFWAREHHIYDNKLGFFNGISLSLLVAKVMLLYPMASLPFLIEKFFFTFSTWPWPTPVKLTDLPSLSILRWNASDESDKRGVIYSRRGLMPGLTMPIVTPGHIEQNATFNVNRSTATIIQRELQNAIKIIRNWPMDLQNLQEEKWENLLKDKKFEEKFSHFIRINCKAFALADFYDFCGYVETRIRLQLLIDVERFDRIRLAHAKQIVEKGQILGENEKGDENEAFPVSKSEHYQKIWLIGLELDDKIAAVGDEWIQRLNSMLFHQFDATIEKAYRIKKNLANELIQIELKSKYEKDENY

SEQ ID NO: 136605 - protein, 71 aa, Heterodera glycines
ILSQNLSLFNDLLRMGQSNAIKSFDIDQQLETNSRLHVAAKVVKVGQSEGFAINANEMGKLREKIFGILIC

SEQ ID NO: 136606 - protein, 53 aa, Heterodera glycines
CSPICLCRRWHCLWRWRNWRRRHRFFSHHFAVVEEVQRRAVEETQAQRRRRRL

SEQ ID NO: 136607 - protein, 178 aa, Heterodera glycines
MVKRRKRKNRKEQAEPNHEKEEQKERDEEDEDDNLPTATFQPRNSVRPGPNGRVHPPTEGVCVQRGNPSARHARPPAVAFLNGRRTSPPYQCAQSDTFLNFFLTFVLNRHKPTTEPTIVSNFHQRVEAADWQFNNSKNGGRKGRKAAAEANSSTREHEEEQRDRNGRADTDNSQKGAY

SEQ ID NO: 136608 - protein, 76 aa, Heterodera glycines
MEQKAGWNATVVIPESPRIFGIPFVDLFAGEFNFEFLLETEGKEIAHLEVPTNLAFVPIGMQNEEDEDEDDGKGQC

SEQ ID NO: 136609 - protein, 96 aa, Heterodera glycines
MRRLLEADQLALGCLDTWLMMKLSGCDDQSFVTEPSSASSTGMFDPFTLGDSQAAAFGAGCIRRGDLKISLGTGTLFDYVSGPEIHSQCMVGREWY

SEQ ID NO: 136610 - protein, 89 aa, Heterodera glycines
MLYLPIIKNMIKKFFGPLFFDLAASMLFTGLIVLVLIKTNFEWLLFYDVSPIAIPHPTFICAFALTICVTIGYCYIFVIFFRYSNINCL

SEQ ID NO: 136611 - protein, 137 aa, Heterodera glycines
MALYGCDKAVEAQHWHNYDLGLRVTLNNFCVRFGFVHLHNPTQFCRDNTEMDSVIKNLCPPYIKNGFHCNNASLNKQQQIWYRLHYGLLKSAIVTCAAELVPVLLVGHWIACGHAKKIAQQNLTHRAISKFKVKGEQ

SEQ ID NO: 136612 - protein, 197 aa, Heterodera glycines
MLTLIVSKCYKNVMKWQSVLICVLSIFLWLLCFHNYIKDDEQSVAVLSQDIAEVFTGLVQLCFFINLFILTREIPKEGLDTARAAQSRADHVLLLGSTILLTVECVCECIEILHFSHKKQMRFLTKCLDIFYSIFTELANWFEIYCLKKISALNDDLVRRLRDTLPFVAICGITLNLSVFVMTYFYIEAEKHHLQVN

SEQ ID NO: 136613 - protein, 70 aa, Heterodera glycines
MITSLPNDYFVLVGVVARILDTANYVYTFTSALCWLEVLLRYKKNNNFFMVGNNFVKEGNANHAFEETAF

SEQ ID NO: 136614 - protein, 67 aa, Heterodera glycines
MAQKPIFNKTKNILGLKIFSLLVRLIEHVKSFRVIPTMLYLDVKEKSYRGKRAGAETRAPKRKIFVF

SEQ ID NO: 136615 - protein, 85 aa, Heterodera glycines
MNNFLSKIFNLILFDSVQFGFAEKPLPIRRRNGTYAYDSDGQFLIDGSPQGPKANSYNAGDVVGIGINLATQQIFFVKNGLRLGW

SEQ ID NO: 136616 - protein, 182 aa, Heterodera glycines
EWGAGLCNYHSFSQIEDAFSRAFSEALTAFGDGSNYHSFSQIEDAFSRAFSEALTAFGDGSLLVEKFVERPWHIEVQIIGEHFVERPWHIEVQIIGEHYGNLVHLYERACSVQRRHQKIVDLAPAPVLDPAIRQMLDDPLKLTRHVGYNVGHVEFLVEFLLDYKGNHFFMEVNARLQVEHNV

SEQ ID NO: 136617 - protein, 16 aa, Heterodera glycines
EAIPEGFGLPIILGAS

SEQ ID NO: 136618 - protein, 116 aa, Heterodera glycines
MDLSLVLRNARKMQPNVTTNSTVHFSTEAGLASQSLPPQFLVADDGTVLNGGGATVLPPSPSFVPDDIGTAASTYAAGVSAPLQLGHIMDVAALTAPPYPILPLFFGNLTPFRHKL

SEQ ID NO: 136619 - protein, 358 aa, Heterodera glycines
MPNSSIARYESSPWHLMPRPRPHNQKYHGQDHISRKCHDTAMTRSVMDELGVTHQNSWNMPKTVVFLTDCVGTEIENATADPKPDTIILLENLRFHVEEEGKGKNSAGETVKASKEAVNAFRASLSKHGDLYVNDAFGTAHRAHSSMVGCAMEKRASGFLMKKELEYFAKALESPTRPFLAILGGAKVADKIQLINNLLDKVDEMVICGGMAFTFYKVLTGKSIGKSLFDEEGSKIINDLMAKAKDKNVKIHQPVDFVVGDEFKEGTPFANVDAKDGIPDGKMGLDIGQETLKQFAEVIGRAKTVVWNGPAGGGDTATAAEKWGAEDKVSHVSTGGGASLELLEGKVLPGVAALSDAP

SEQ ID NO: 136620 - protein, 101 aa, Heterodera glycines
MRVTVCITAQNNGQKLKPYVLVNRKRSVPQIVNQFAGKLVINFAGSVWMNDETTEDYLYKIIGAKLFVGEHLLVWDAFDSHNQGAKCVSPDYIPTMPIVNA

SEQ ID NO: 136621 - protein, 206 aa, Heterodera glycines
MCAALFCCAFALFILCSHLRKCSSPFVCVCPFWRQFGAGGQLIGLICGQLISLIYGQLIGLICGQLIGLIYGQLIGLIYGQLIGLICGQLISLIYGQLIGLICGQLISLIYGQLIGLICGQLIGLICGQLISLIYGQLIGLICGQLIGLIYGQLISLIYGQLIGLIYGQLIGLIYGQLISLIYGQLIGLIYGQLIGLIYGQLIGLI

SEQ ID NO: 136622 - protein, 28 aa, Heterodera glycines
KVKPKLFGLFKKELKIFKNFIHLPIDRK

SEQ ID NO: 136623 - protein, 92 aa, Heterodera glycines; identical to SEQ ID NO: 131693

SEQ ID NO: 136624 - protein, 86 aa, Heterodera glycines
LLCGSLAFNRTFSTMTDSVLGQKECLLYSVISEGRVSGRIGCLSLLDQADVAVLLQPIQQLFLHMIILNDTSSAQRSVQFLTSDHF

SEQ ID NO: 136625 - protein, 110 aa, Heterodera glycines
MPPNFFYKLLLERLSRSKKWEQVQLNLGMNPNNSFAIDGPGGGGGGGGAAWDKQTEAKTGAGGQQISGGFQSITGGSNYSTLSVAIESRQYDQSGVSGLNGGGGGSEMVV

SEQ ID NO: 136626 - protein, 97 aa, Heterodera glycines
MALGISDIGLQFNRKGLALIHLSFSTTQEFLGISLIAPIPVLFPLINLLCLKEFRNITSQIVLCKIWMRKKRQERAAAERKAQENIDEDLVSASKNK

SEQ ID NO: 136627 - protein, 17 aa, Heterodera glycines
MCTSYPYNTVAFGANRG

SEQ ID NO: 136628 - protein, 210 aa, Heterodera glycines
HFKTVTAHHHDAMRKKHEAEVTQVIAPAEVTQVIAPISNEQRQALALEFKKQFGTDRQALALEFKKQFGTDLIAMLKKEFKSDFEELIISLMQTPISLMQTPAVYDANQMRAALSGSNEAVLIEILATRTNRQITALKQAYEQLDRRHQHNQLEENIKAKTKTLPKSVGVFAQLLSRRKAPASIVLAHDVIKWQIGKNIKSINTYINNII

SEQ ID NO: 136629 - protein, 62 aa, Heterodera glycines
MPIEEKEDKDVYRIVVWDSETSQDSIYKGDQKEHVINYISVRVTCTECCDDKNRTNCKICGE

SEQ ID NO: 136630 - protein, 47 aa, Heterodera glycines
MPLHLRYAYEIFREKTVITFFDTTKIKKQLPENGIKLISFGCVYEKL

SEQ ID NO: 136631 - protein, 79 aa, Heterodera glycines
MLRTDKDELKEEKQRLKEVFLCANQQGWASPNAVAHVNRCNVSLGMDIWLHCWLGQMLNQFVLKFIIFFITIFKKKIKN

SEQ ID NO: 136632 - protein, 174 aa, Heterodera glycines
MNAEQIQQLLTALLQGNAASSISQANLASSIDSRISKFVYDPENGQTFEQWHKRFGILIEEDGKDLTEQAKVRLLLGKLGDEEYTKYRDTISPELPDKALWAESINRLKELFAETRSLFVRRYECFRIRQHPNQDISSLVAQINAACEYANLSLTKEQLKCMILVILLRDEHHD

SEQ ID NO: 136633 - protein, 385 aa, Heterodera glycines
MQSIPVLNPRKQFASSYFSPSEKKQNCTRQSGKTVRTAATIACSKSNDMVSDLASSLRQQRTEDNHISINGQNYAVDGPNVNVGVEGHDLSVNGRVYQNRATEQYLEIIQDKNIRNVIVSVPLSLFSRENIIDGQINAKCNGNLYIDQSSDGCSRIICVDDKKNGVENNFGQTRDIFLTGDVNIFESANGIIYNSMMGGTLHMHNSSLECANIECDASLNVTHSPIERNAQMKCGGSLSIDESPMGNIRLNCDGSLRIEKSKMESSQIDVGGSIGIVKSPMANIRLNCGGSLRIEKSKMEIGNLDSGGSSTIVESPAQSLKLNCGGSLNMNECSMKNVGINCGGSATIKKSKMESGRINCGGNFSIDSSPTGSVRIDYGGRRINL

SEQ ID NO: 136634 - protein, 162 aa, Heterodera glycines
MKARRIPFIQLQILLLKLIGDIVTTDQQREEATDANGTTEGEAAEEAKDMALALAMSSRQFWHQMTDEWNYKNGKFQKPKEEMFSKVSYHDFEGLSRINNSLEGWHYIWGSVLEPKPLFSKFARWQHIVDDYENAPANGIRGKGIRRNPSLLIRTTICVRFC

SEQ ID NO: 136635 - protein, 25 aa, Heterodera glycines
MCAKTGRISKFPYIFGCPDHYEGVI

SEQ ID NO: 136636 - protein, 63 aa, Heterodera glycines
RNAKRQCLRHKRWPINRLTFAAAGGENLAVEEYEPLTPTLEGIVILRELAKKSGGASIGPTTE

SEQ ID NO: 136637 - protein, 71 aa, Heterodera glycines
MVCLRRKFPGGHRLDRHLDVAQAACPAVASADHLQLQLGDEPLTPTLEGIVILRELAKKSGGGASVGPSTD

SEQ ID NO: 136638 - protein, 122 aa, Heterodera glycines
MITSLAFLPVHHLPAGLNALEAQLPQQLIGVFDWFTDNYTGRPRFNGGLTAPRFAPDEWSIARCIAGELPPQKAPKYRAADARILRLLQSYNAINNNQAHQNDHNYHALINVNPYNIINFLL

SEQ ID NO: 136639 - protein, 82 aa, Heterodera glycines
MALLFTRLIRNVILVIVFFNVVSYYLRWKSYNIAARDFKTASVNSATQNFRHGQFESYVYEFKEGTHVVCYWRGFIPASGDL

SEQ ID NO: 136640 - protein, 100 aa, Heterodera glycines
MGARAAYIYIRGEFYNEACILQESIHEAYKALIESLEGKQGKPRLKPPFPADIGLFGCPTTVTNVETVAVAPAICRRGGAWFASFGRERNRGTKNYCITI

SEQ ID NO: 136641 - protein, 143 aa, Heterodera glycines
MENEREFGREFTKEFVERHNELRKLHGCPELTLCEELSEMAKEWADRIAWQGHVSFAEMSGNKWAVGKEWHCQTTIKEAIVGMPNKHLFGNNGTDEPPGMMAKRLSQPPITPPLCLSIKSRNGMDISSSTVVGSLTWPEMQYN

SEQ ID NO: 136642 - protein, 355 aa, Heterodera glycines
KVWECIYNENCFKPDPKFDKKFLLQPPDPKFDKKFLLQPTPTGMCLEKRVFYRLISGLHSMCLEKRVFYRLISGLHSAITVSIAAHNYRPVIFLLAPGGFGTGTIFLLAPGGFGTGTWYRNVEFFENRFGTKWGKEGPERLRFFENRFGTKWGKEGPERLRNLYFTYMLELRALVKATPYIRNELRALVKATPYIRNQLFYTGNEQEDRETQQSLEHFLAVLKEFPNQFDETQLFSFQESHARLLKEEFRQHFWNISRIMDCVGCDKCRLWGKLQTHGMGTALKVLFSDLPRNGRRESERKERAKNDLVALFQSFGRYSSSIWEIDGFRKEFRPAEKRQGNAQFGAPSAKYPIAL

SEQ ID NO: 136643 - protein, 89 aa, Heterodera glycines
MAKPCPFWEDEAGQCSSKECSIGYCDDEVPPALKEPIAPLSASNSNDSCGGSESNKFDPLDDSLSEFDRAQLRELDMFEDNSNKFCEVE

SEQ ID NO: 136644 - protein, 46 aa, Heterodera glycines
MAANFPKLVFGVMLPYPMVDATILPMLDLEGLNWKCDRQWRSGFFG

SEQ ID NO: 136645 - protein, 181 aa, Heterodera glycines
MLIRKKEMVDREEIQILAEVLLVEQRIREMTGHYNLANSQNRDRLETFASISTLKKEMRKYKQFAMNRIRKTIYWYVLLVYFLTDQQTYKLAERCWELGVELNSTDHKKTKLTKSIREFNEFVGLRHTLAPRIIRGTFADDDGRICGGRRTNGGRNNRNDEAEDEHGRPVESLAAEKATKE

SEQ ID NO: 136646 - protein, 326 aa, Heterodera glycines
MQTDVYCEGGSVGFFRGDIRLLADDIKTLRPTVLPVVPRVLNRIYDKVLGEANKSVFTRLLFDAAVGLKTRELNNWIVRNNSLLDQIVFKKVREGLGGRVKLMITGSAPLSETVLTFMRCATGALVCEGYGQTECVAAATITIEGDPVPGHVGVPVPCCAVKLIDVPELNYFATHGAGEVCIKGPNVFRGYYKMAEQTAETLDTDGWLHTGDIGRWTEQGTLKIVDRKKHIFKLAQGEYVAPEKIELIYMRSKYVAQCFVHGESLKTCLVAVVVPDFDVLPEAAKKQLGIEGKTMEELCRNQQVKAMVMEDIHEVGKKAGLFTFEQ

SEQ ID NO: 136647 - protein, 107 aa, Heterodera glycines
MDASVSFDIQNNFVLVFCDTVAKVNGLLERKSACPSLKYIVLMAPAYDELTESARDIAAQNGVKLFSFDNFERMGLHEEVASLSDVPPSPDDLATICYTSGTTSVSK

SEQ ID NO: 136648 - protein, 137 aa, Heterodera glycines
IADISDWNEQNNGNTSLLYSIGAAATIGAMGLWWVWSSRPSAKKMVPLVDPESQTRELPDGSRVCKYLKTDALMRFTHANAKTIYEGVRRGAHVSKNGPMLGFRNRQCDGEPYEWLSYGDALHRSALLARAIRSLGL

SEQ ID NO: 136649 - protein, 32 aa, Heterodera glycines
ADPQNVQPTKCPSLEFEFFYYSDGPKVRQRVI

SEQ ID NO: 136650 - protein, 47 aa, Heterodera glycines
MSSPRNVQVSNLSFFIIQMGLRELGVLIEATGIAQILYFYLFRWPLH

SEQ ID NO: 136651 - protein, 108 aa, Heterodera glycines
HLSQGLPAVTIVGLPEAAVRESKDRVRSAIINAGFSFPNRRLTINLAPADLPKDGARLDLPIAIGILAASGQLDDSQLAGYELIGELALNGELRPVTGALAVARAIKS

SEQ ID NO: 136652 - protein, 117 aa, Heterodera glycines
FLQFSFRWMNNLLMREIPLRATIRLWDTYLSEHDGFSQFHTYICGAFLRLWSKQLLNEKDFQGIMLLLQNLGIMLLLQNLPTKGWNDQQICELTADAYSLMQFFHHAKSHLQTCLIM

SEQ ID NO: 136653 - protein, 113 aa, Heterodera glycines
ICAKGLSAKDKTGTGVPYVTAQVGKALKRTRTIHQQQQELNHLPVWNEQFTFECDNITDRIKVRVWDEDNDLLLKSSSKLRRKLSRESSDDFLGQTIIEMRTLCGETDVWYNL

SEQ ID NO: 136654 - protein, 242 aa, Heterodera glycines
MTFQSLGLNPPAFQSLRLNSQAFQSLGLNPPAFQSLGLKSPAFQTLGLNPPTFNGIPISGTQPTSISISGTQPTSISISGTQPTSISISGTQISGIPDTGTQPTSILISFQSLGLNPPAFQSLRLNSQAFQSLGLNPPTFQSLGLKSPAFQTLGLNPPTFNGLPISGTQPTSFHGLPISGTQPTSISISGTQPTSISITVTQISGIPDIPLNENQATSIPILGLNSPAFQSLGLKSPAFQTM

SEQ ID NO: 136655 - protein, 250 aa, Heterodera glycines
MSEQQHAGSSNTAKCGRKRDLAAVRHAFEMNKIKVEKRKLRMRRMEEVVQRERALIKIRHEYRKAKSAVLSGQFRFSCSASSMVITIPQMAKVDGQAAESFTIVIAYGPAEQGGPNVASSHAQPAAQKTVTQDSRPTDPRIARGVCKSTVHVENVFFFDNNNNVIIACANSAAGCGPVTGNGRDGEATHHISLPAPPKAPVLRSGGPTRPSKKQKIYSSDDSSSSDNGDRSASKCPLRILVSDDDEKVEQ

SEQ ID NO: 136656 - protein, 206 aa, Heterodera glycines
MSGLKRFQIVPSSQKRVTEDFPTNPKDLRAIIQFNSPGLFYVRARIADLQFSLYKACPLKNFGTFCKKKLDEELYCASCAHHANKAIRSIYLRLELRDCEDPEICQTVTVFSTVAEHYLGLKVERFAKMVEEQPEQLEALLKSKIERTVTAKLSIKVHKFTTQRVSSRRWTGLFCPYSMRTGKTMEMMRRLLMNKRKLTMITKMEK

SEQ ID NO: 136657 - protein, 185 aa, Heterodera glycines
MSINTHLGKEQSRRDDLEALGHMFMYFLRGSLPWQGLKADTLKERYQKIGDTKRATPIEVLCEGFPDEFAQYLRYARRLDFFETPDYEYCYGLFKTVLERTGHTYDYEFDWTHKLNQATTPSGSIHTAVGVEGGELRKTRTDYAKRASVPKPRNSDGLLRSGQQVNSTTTGGAIGHHGPGFGSTQ

SEQ ID NO: 136658 - protein, 93 aa, Heterodera glycines
VMCEQSLCLSLSNENACETLILADLHSAEHLKTQAVEFINLHANEVMESDGWKILVKEHPPLLEQVFKALATQQTPPIILNQPPRKRPRQFDV

SEQ ID NO: 136659 - protein, 253 aa, Heterodera glycines
KRCQRQSNANALPLPFAEAQLMKRLRAQLMKRLRHPKLLQLYAVCTREEPFLIATELMQENLLHFLQGHGRVCNVAQLVDVAVQIASGMRYLEVAQLVDVAVQIASGMRYLEEKNFIHRDLAVRNIEKNFIHRDLAVRNILISHPSMVKIADFGLARLIRENEYEARVGARFPIKWTTPEAANYNWTTPEAANYNKFTVRSDVSFGILLTELVTFGRIPYPGMTNAEVLHKVRMDPMTNAEVLHKVRMDPNPS

SEQ ID NO: 136660 - protein, 45 aa, Heterodera glycines
MHSNNVKYEEIKQLMTFPLTVAEHFMKRLSKFVQSNWPITFSRYR

SEQ ID NO: 136661 - protein, 58 aa, Heterodera glycines
EACEFDDQPLQLATVAVVVTAQFMLKRLQKQRTHATGECQRIVAMARLHKVKLDKTVA

SEQ ID NO: 136662 - protein, 165 aa, Heterodera glycines
MVRERGTERERRDRERVTKIFLTLLTQYPKTNRPTQEHGVRCVHRRWNAAPALRLRCADRRWPWHFGRCGGRRRSKQLELLGRNGGRMLIIIQFKKDAELDEQLDRRKAEEEEQQRAKGREYFCDICGRTLWFADNVQAIKHKKGHQQKEEEKPKQDEDGERTDG

SEQ ID NO: 136663 - protein, 267 aa, Heterodera glycines
NWLCGANVVAQFSMSANSAAAAFAPKWRHLMSRHKYLIVIGTVLFVDILFLFPYSGIQMVALLHLNNLLATSQMTTLIRWCLQILIGVHSVCQPLCYFRMTLQILIGVHSVCQPLCYFRMTEFRRLACCLGEFRRLACCLGQKRRWGQRKQRGRIRFWWGDGRHNQSNDKREQKRRHRRAPADHEEKHRIEDSVLPGNGPDRRNSDDGRTNRAKGRERRLGKRERERNAKPNDGKGKEELQTIPTGAANVADHPKTEMDAQSELIVQ

SEQ ID NO: 136664 - protein, 123 aa, Heterodera glycines
VKLDYKFEKILKEPNYDLKLLNEHEFEQLGKIGQNLVKKFKEIKFFGSQNQTKHLTAEKGNKKELTVALLTTGEEKSVINTNEEAISTLNEEFDAMMKEKAEKVDSDEEYGKMNKEALKWLVQ

SEQ ID NO: 136665 - protein, 31 aa, Heterodera glycines
KKQIYKSKIIQLRNQLKANCDEETKVLQDFL

SEQ ID NO: 136666 - protein, 276 aa, Heterodera glycines
MDNSENHDNSFDQSNCPSQKNQTNYSADTSTDLLMLPNTVNHYIHSNPMMTLSQQNYYNQENPSTSTNQSTYPDHANTMALNNQSIYADQANTYALNNHSTFSDQTNSLALNNQSNYPDQANSLALNNQSNYPDQANSLTLNNQSNYPDQANSLALNNQSNYPDQANPLALGNQSTYPDRSLFMANQNNEVNGLIPTIDSDQADQTILQSNKGSTGQQLQQNVQVQQGNLPTMLSMTTPVPEQPFDGTHSMVSQYRIFLYPFFLRVFVFYLIITKT

SEQ ID NO: 136667 - protein, 126 aa, Heterodera glycines
MGSLKKYSMVLNHAGLRRELEQKKTHPRAQSRGAANPKQQQQEEGRIRVQLKGDDGENRGRRGGTAKVHDPTTNDGIRCGNGAQTEDTAAANPSRTERRDGEAEEAEVNERTDIQPMTSNVQLIQL

SEQ ID NO: 136668 - protein, 73 aa, Heterodera glycines
MIGRAVRNRPFIFEGIFKFILYPRKMAISFFEKFYTSQKRLRMRRRAVHNRHFISQRIFIFRGYPKKNGYLFF

SEQ ID NO: 136669 - protein, 92 aa, Heterodera glycines; identical to SEQ ID NO: 129648

SEQ ID NO: 136670 - protein, 110 aa, Heterodera glycines
CKAAGAHFNPHGKRHGSKESEERHVGDLGNVKAAENGVAVVDIKDYLVALNGVNSVVGRALVVHEKADDMGKGGNEESGKTGNAGKRIACGVVGVIREEPMKVTTDQTNG

SEQ ID NO: 136671 - protein, 82 aa, Heterodera glycines
MRRFGAAGPRNRFEADAVLLMIVMTRVRHFEKDCDMDSMLDLDKNPGPGKIQVPRDLDFLKLILDLVPGKIQAWIQQVQVEL

SEQ ID NO: 136672 - protein, 118 aa, Heterodera glycines
MDGFRFWRSGYWAQHLAGRKYHISALYVVDLVKFRQIAAGDRLRGQYQGLSSDPNSLSNLDQDLPNNMIHQVRIHSLPQEWLWCETWCDDVSKDSAKTIDLVNTIISKITQILEYSII

SEQ ID NO: 136673 - protein, 167 aa, Heterodera glycines
MAYFEFPEADFDSLEALVEFAYTARLRIGSRRVKELYRHSALRAAGERVDAHIESLAEKTHLLVTNSEEQHKPLANNNGGASSAAPTMANNGNGQQHNNGRLQDANELDEKVLIINTEFGFFLFVRLLSSKTDQQSSLHVMGATPIKLNGADMGRLSTKDAIKFASW

SEQ ID NO: 136674 - protein, 249 aa, Heterodera glycines
GVFAVCGSNGNNDLSSCECFDPTTGRWNEVCPLEPARSHNGCACASLSGLLYCIGGSTDHATLGDCRCYDPATNEWREIAPLKAQRSQAGCTAWRGLVVCVGGCDKWNCLDSVEAYDPQMDQWHHLARLRTPRRGCAVAVLGNSLFAIGGHDGHNVLATVEVLDSPNAQWRPGPSMQQSARVHHHAISASGIGIFVVGGFDGTHFLASMEVMESEESGETDVMKQILINFKGWHFSLDDRKVEVDPTLT

SEQ ID NO: 136675 - protein, 302 aa, Heterodera glycines
QISPTLPTDHRKEAAAESVLQREAEAKQKGEDQRIIVVHAEREGTETAERTTVHFKRNWTSHASALTTSAPIWDGRIEIDDMSSTDDEAEIDAVLADAQRLRKIALERELPPTAAMSRPLLYNPLDFSLSSESGLISPSDAALLPAVTYKQLMLLTGGGSGPSEKQQQSNSVSGTGTSLGSPTVIGDDGVNTVSGTCTSSSASAEGAQPPLQQRPHATVAPTTTIQAAPATMYKMNGQQYQYHHQNPQLRPRSHPYSQGYVPPPVGHAYRYQVSRGSVSKVYTGGNKMQFAIQQQNVPLGDR

SEQ ID NO: 136676 - protein, 43 aa, Heterodera glycines
MLLSLDYVVLKLCDFGTIAKHRTDMASTCGTAAWMAPEVFRGE

SEQ ID NO: 136677 - protein, 54 aa, Heterodera glycines
MTTESLVIPKDIANKRLCLQMKSFPCSNKREKLLVQTVLYLRLVCLFRTQNAAM

SEQ ID NO: 136678 - protein, 438 aa, Heterodera glycines
MRFKGRHSQIRRLEARSLEFNPYAMPRDNKKRSADGKWMTQNERIKLPPFGHFTSEQQMHFREIQKSSAINWVFDELLNLTEAGDGRFVTLEGDAELVLSAKKRLAKLITEIEDSHLHSSSVRLANSPTTGRTLYRTVVKVPSPAWRLVIGGGGKTIKGLKERFGVSMRFLGDNFVAYPHFRSLSIFGHDQMNVHSAREHIEREFVAKNDEYLGQNTSQAKAKGRRKFLSTTDDPNNNIDLIDANAYGHKTEIGGWESDEESWAVDEPHVCSDFTMNEQKTDETVSNSEEELLKWDDEDKEEDKEEEQKDEKKTKSNIFGGERGQNGGDGNTVKELGKEAESAKNEDSGIVGDGEEDELFLLIEGKGTQKDGDDDEPLDRNALACQLERAKATLLGDEHLSRELARTQALLRARERECEQLRLENQRLKLQLSSSTVA

SEQ ID NO: 136679 - protein, 71 aa, Heterodera glycines
MAKATKARWAKKTAPQLNPNAEIPPQDEAGPRIGARREQFRKRDLTGNSIRKILAQILSPNDPRPIFYSST

SEQ ID NO: 136680 - protein, 75 aa, Heterodera glycines
LRMCHCGSNSFPLGVRLRDCTHLSCVQCFVAYAEELLSRMSLKWHPQVGYTVGCPFYGCTAVVTDVHTLYLLDKH

SEQ ID NO: 136681 - protein, 25 aa, Heterodera glycines
REKKIMFFSGTLYLLVHISFFETVC

SEQ ID NO: 136682 - protein, 44 aa, Heterodera glycines
WYRSVHFLWDSVVPVLRWHWFEFIPCFLDLAHQALSNDTKFVRI

SEQ ID NO: 136683 - protein, 126 aa, Heterodera glycines
MAIELNNNNACASTEEDTSSSPNAANLTGTPSGEAMSGEESARLKRSYVLQELVESERTYVQDLASISDGYIASLREMELSDEDREKVKIIFANIEQILDFHKTFFLKEIEKSLNDYEAAGIPSLI

SEQ ID NO: 136684 - protein, 58 aa, Heterodera glycines
VISLCFWWGAWNSGIMRTRPIWQVKQRLLTSQKVRCRDETNQHCLPRGTRHGPPKEWI

SEQ ID NO: 136685 - protein, 48 aa, Heterodera glycines
KNLKLDALFKVLALPDEEFEEWLRELKLLHTTRFCDCGKEMRYKWIKG

SEQ ID NO: 136686 - protein, 181 aa, Heterodera glycines
ANSKIVWQIYSWASCQGYYWYRKPINSLSMYISCSVVFFAECLKLLITLFFIFRDCDFSTEKCKKLLDREYFSKPLLDREYFSKPMELLKMSVPSIAYAIQNNLDFVSLNLDFVSLSNLDASVYQVMTQLKIPSTAIFMMLFLGRRFSTKRWIAIFLLCAGVASVESSGATDREGGPRRRT

SEQ ID NO: 136687 - protein, 44 aa, Heterodera glycines
KASQPILAHPIPSTIAFIHPIMNAKIIRVPKIACDLRLAKNGVS

SEQ ID NO: 136688 - protein, 50 aa, Heterodera glycines
YQLRNTGRKVIALTGFSPVQLNLQIEGLQMALELHQSLCTILPLNISGCY

SEQ ID NO: 136689 - protein, 59 aa, Heterodera glycines
DPIYQQLAEQKYAIDNFPGLDDIFRKTRFFLVNSQPEVDFDNYRSVKGMDKSNSSEDLI

SEQ ID NO: 136690 - protein, 103 aa, Heterodera glycines
MVEKHKKLVQQTRPLGVEIIDTAKKVASGCVTCIVRLLNERGEECAGRPKPDHGTFPTLLQQIPPNYTLVKNDQLFILDQYIKEAQHRENVRVTTKKKVEKFS

SEQ ID NO: 136691 - protein, 90 aa, Heterodera glycines
MGARALLRPLLTLHPVKQAEAMRRVHLHSEALRLAEKRRIRADLVATMEEMRARRKADATRDGEAKSEAFGTNYQQESICACPCPKSDQT

SEQ ID NO: 136692 - protein, 80 aa, Heterodera glycines
MSSASSARFVPSLLFAPRHALRHRCALLVAALLLLFGLVTVCADQPTQIGKQPMACGENGPSSLRCNKWAKRTENESDDD

SEQ ID NO: 136693 - protein, 56 aa, Heterodera glycines
MCPFVFLVAPIALGHCLRHRKKKNKKRDKAAKKGRRLLTISDGQKNKNSDQPQKKK

SEQ ID NO: 136694 - protein, 125 aa, Heterodera glycines
MAQHGAFSTAARTEDQCEVGTSKIATEIWGEQLSYCFCAVGDVGAHNSNVKVAFPEELSYGCESRHSLSLGPFFGADDAEKDFRDYWTWEPGSRSRTGRTLMLMMHFGPLRHGYFVDKLFITFIT

SEQ ID NO: 136695 - protein, 54 aa, Heterodera glycines
MRTLLRGDPSDLEALTDFLRANGVVENAAAMAASPLLTAEISLGEGTDSAKSTA

SEQ ID NO: 136696 - protein, 169 aa, Heterodera glycines
TDLCRVAEGIVPSLIIAMAFAAHWYCVNFGFIPFAYRGLETGSRKTVAYAVKQDKIVFVFESALLPNNGEMSAHLIVFVFESALLPNNGEMSAHLAKHGDGTKDVAFEVDNLDWVLDTARRAGAVVAEETAEERDQNGHIRRASIRTYGDTIHSLIYGDTIHSLIERHH

SEQ ID NO: 136697 - protein, 152 aa, Heterodera glycines
MPSTTEEAEDLEEDEEERHNATEAGNSVVNTHYCYLESPFNDDLFAIMQNRWNLSCACASADGSIDNSKVHLGRDRFIVRNLFQIYRFDVLQCVDLDECLYEECPKGQQCLNMNKGKICACPVGSYKSKDGRNCIKVPVSGNLKELLEAPFY

SEQ ID NO: 136698 - protein, 47 aa, Heterodera glycines
MSTKPPADNESNNEGQQKSSNSLARDGNYEDGNMKNRDKQKEFGGPA

SEQ ID NO: 136699 - protein, 37 aa, Heterodera glycines
  unsure (1)..(37): unsure at all Xaa locations
SKKNIKLKIFKKKRKKEFNLSSLFFYHSVDSANNLXL

SEQ ID NO: 136700 - protein, 719 aa, Heterodera glycines
MESVPLRYFVGITHSGHSVTPFRGDDCWAKHHQQEEHVEQHQLNPEDYHLAAATVCFEPLQRVERANELETYPRRAYCRDVKMPKSADERGEPLPFATRIGAILHLKSTNRTTNQWQPPPISVYNGPHKLLAPAEQLTQTDIEASICQNLPPNSVMPIKSVKKEEEEATDNVAINAANANIVRHGSKKMAKIFVTLKSVTTMREDQAATASAGNVNALQIIITPTAQIVHELCPTSELLSVPIGSCIDKQQKDDDDAKSADNNQINGGGGKKFVAKITVTTSAITKGTVGPTSSRHNANEEARDGQLQQLHLLNRKDEFMGQPIEQIVAMANKRSTQVGQDDDQQQKVKTTSRKKYAAKIVLKTTQTNGATTSKEAEKMTNKQFEAPAAEWHVLNRESELKCHPIGEFVALTKAAEQKRTDVENDEPKPANCKKYNVKIVMKSPSDDHVVCPPTTDEECHLLSRHSELKCRPMGEFVAPIKNKLMEEGRSDVQKAAPTNGKKLTAKIVTTKTIAAVEQTQQQLLENEPKNLQQQQQMHSLHRNEELKCHPIAEFVTCTASTSATVVDDDEASKKEELEQQGQQNGGFPAVDEEGKRLSRKRKRPSAKMALLGGFWQQIGTSKDKQKKKGKKKKTDHEKKAKKQNGQKATATAATTTSASSSSSSPSSSDAEEIHVLVQDEEGKQQQQMPAINVSIEKASLKIALIDESFSTEQHKRFFL

SEQ ID NO: 136701 - protein, 51 aa, Heterodera glycines
MRVHRFAWPGIIKFSHRRHYFSIKLKAGEVDPKKETSLTYTLVEPIYSNVV

SEQ ID NO: 136702 - protein, 51 aa, Heterodera glycines
SVPPQSRSPALGLQGLLVSGIGTLPSPVIWGWLVDSACLVWDNECELGSCQ

SEQ ID NO: 136703 - protein, 210 aa, Heterodera glycines
MPIEEKEEKDVSRIVVWDSETSQDSIYKGDQKEHIINYISVRVTCTECCDDKNRTNCKICGEERTKDWSEAEGHEPTKDFVEWILMAFTNYDTYIFAHNAGRFDGHFVFNYLCRTGKNPLPLINGLKIYEFKVRNSKKHSMLIWRDSCLLMPVKLESMKATFNLGCEDKAFFPYYYNKKENYGIRLEHLPPMEDYAPGSMNKEKYAKFEK

SEQ ID NO: 136704 - protein, 209 aa, Heterodera glycines
MDRFNRANHQSQNAEQRRLKKEKAERAMRDIELYEELQKLKNETTAISETVKKRKSHSMFLDAQTVELEAQNAEHIKTINRQKLQMKEKDEDIAKVRKQNEEQTKMVGTLQTEIKELKAKVELRDTNLEIKEEIIKIHEQKIGGMEKANVQLAETNKNLHEEIAVLTETNQNQEELIAGQGETIKNQQEKISKLEGMLITTGHVEQSIG

SEQ ID NO: 136705 - protein, 287 aa, Heterodera glycines
DAQTVELEAQNAEHIKMINRQKLQMKEKDEDIAKVRKQNEEQAKMVGTLQMEIKELKSKVELRDTNLEIKEEIIKMHEQKIGGMEEANVQLAETNKNLHEEIAVLTETNQNQEELIAGQGETIKNQQEKISKLEGMLITTGHVEQSIGMNLSQIQSGHKVLTLADELADCEPKAELDKAAKDDKQEELELEKNCKLPAPTESVEGNQLESIQRQQEKDEGGKQEKGTTDECGQENQQQEKGEKDTEESNKNLATSEDSGNPLKSSEENQKQQQMDEGEEKEEEECKE

SEQ ID NO: 136706 - protein, 34 aa, Heterodera glycines
MAISIFEKFSMQQTLSNMKRSAKNVFQKNGYLFF

SEQ ID NO: 136707 - protein, 29 aa, Heterodera glycines
MAISFFEKFSMQQTLSNMKRSAKNGYLFF

SEQ ID NO: 136708 - protein, 34 aa, Heterodera glycines
MAISIFEKFSMQQTLSNMKRSAKNVFQKNGYLYF

SEQ ID NO: 136709 - protein, 82 aa, Heterodera glycines
MLFGTDHEIQFVFVSTDFAGIMYRNKFVSFFLFFNLCGNLFIVKLAIVVLYIRVGSVRDITGILPGFRSRLISKKVRVRDLG

SEQ ID NO: 136710 - protein, 18 aa, Heterodera glycines
YREAIPEGFGLPINLGAS

SEQ ID NO: 136711 - protein, 23 aa, Heterodera glycines
VIIGTQMLSLSKREMNKNLKIFN

SEQ ID NO: 136712 - protein, 150 aa, Heterodera glycines
MKIWAEWSDENMPSSIVQCLISFSLEVKTRSSNEFPLVNLFISDPISSQFSLSVSINCCRKLWTSSGGSQHPHKLSILFHPSVVFRRIVNTDDDVPPAGPWSAIHGPEHSAERLELRTAADFFCHATKASFWKARDDKRTFSGRGLFWAG

SEQ ID NO: 136713 - protein, 84 aa, Heterodera glycines
MYTAVDNLNIAANIKNEPDKKNKRNRRKKRFVDLASLGFLAFLIVFSLIIWYISGKIGTWLANQDFVPNWLVVSICRFLGPEMQ

SEQ ID NO: 136714 - protein, 68 aa, Heterodera glycines
MKSILFCRFSLIAFAFPLFLFPKECFSMDGQKMMAQMAEDMKNEVKMGEWGNNIIGNLIHKHSLIIYI

SEQ ID NO: 136715 - protein, 165 aa, Heterodera glycines
MGVFYFMLFSLVLLNGIQNPSYRCFLQKVTWICTLGGLLFGYDTGVINGALPFMRDELELTDLTIGLVTSSLLIGAAVGAFVCGKLSDRLGRKRTLIILSSILPFRFLLGFAVGGASAIVPVYLAEVSPAKRRGQLVTRNELMIVTGQLLAYVINAILGNIWSDQ

SEQ ID NO: 136716 - protein, 121 aa, Heterodera glycines
VSRGLASITFCEREIGIEESAVIDCAHYMREVCASFILLQQQHQIGGNNMTVEIDEALFTNKNNVGRVLPEQWVFGAGLGEARLSTRSRSRRRSPIFIRSRSPKLEAQKPEVFEGFEAEAE

SEQ ID NO: 136717 - protein, 33 aa, Heterodera glycines
QSNPGTICEGFANPFEPMRTWAPTFRDSHMACV

SEQ ID NO: 136718 - protein, 120 aa, Heterodera glycines
MEPNDGITDQPTDQDGSDTEATDSTTVGSDPGPNDNDQNATGPTDEDETGTEATDSTTTTTESNAIDEEGTDQNATNSSDQGESDAEAEATDSTTNGSDLEPNDQDENGADADSTTTNGI

SEQ ID NO: 136719 - protein, 144 aa, Heterodera glycines
MATVPREKKSRIAEAVSPSLANISTNIELHPHNNALGGSSSHKFIKRPLNAYMIWTRQERKRILTDDPKMKMNEVSKAVSFFICFSIYQFVFVMCCADILTITLLDSDGRKMEENVGQGKGDLSQISQKRLFSETLLRNGKKIL

SEQ ID NO: 136720 - protein, 98 aa, Heterodera glycines
MVLQPIEAVPIYRVRSLWSDVGITAETVVEYFAVNVPLMQSLFLSLVMTEGFEFAIYAMKIGCDNTIPSPAIKNMVRFGEDGETANALADNGPTTAGP

SEQ ID NO: 136721 - protein, 93 aa, Heterodera glycines
MKIKEAMETIGTDVKVENAHEEASSARGKDMQNIYEAEKKQKREEEPSEGGREEGAPARPPNSGEGGRTTKKGGRKGKRLTDLDIGNASESDT

SEQ ID NO: 136722 - protein, 84 aa, Heterodera glycines
  unsure (1)..(84): unsure at all Xaa locations
KCFGTFLWLFAKSPRRSPXXGKILVLRWFWVLFIFICTARLPFVLIFYVSGMAFLTNRVRLGRIANVQVGQSFALSSAFLRRSA

SEQ ID NO: 136723 - protein, 231 aa, Heterodera glycines
MASLIQKGITFTLKALDSARTTTALSLHPDADLSNWEYAVKLETQCTRVNREVQTMEAQLDNLRNLSNNWIDLLNRLEGAEKDKGEKEYVKFDTHEKIAERHDAATTKLRDLGDLEAMLSADAKLYRGRAEREARADQQANPPPQAATPPMAAPTFTAPLYQFQPIQLDKFFGQKRKWPEFYESFKSAIGSQTISKAQKLNLLRNLLGGEARELIAGFRLEDQTTRRSSSC

SEQ ID NO: 136724 - protein, 1938 aa, Heterodera glycines
MLEKKLTPAFLRNILNKKGEDPANWTTTKFRDVLNEAVRKEVQIQEVMGEYGHHHQPLNRPARPQAQAHQVQRARMPTANFRNRNASPANRERTFMSSTIEEVQQRMNHRPQLRKSQQRGSRPTQAPYNVPIRNGTAQAGSRNPPSPCIFCNGTHWNEKCQKLSTVQQRSAFVREKGLCFKCMKTNHRANECPRPAKCYKCKRSHPPALCPEGNNSMTQHAAAVVTERPQGESESTNQTAQLCNAIQSKDTRALLMTAKATIYNPAQPCLSMMATVFIDPGSHRSFVSCNTAKQLELTNLGTEECFLTSFGEREPKRYVSDRVAIGFLCPDGDRFIFNLNALKFLLNNLPVLQLNEMDNMQLQQKKLYIPHESRQPDVMLGMDVWHELQVQPVERLPSGFTICQSKIGKIISGSGRIELSQPSNVTFVVTVTDENVFTTEEDLKADDELNKFYGLNIIGMDDSSPPIDHDEVMKNFKRNLSFVNDRYQIALPWNDKVTQLPTNYHQAKARLISLVRKLRTINLVDEYQVILDEQLQNGIIERANPDHSCGPVHYLPHRAVIRTDRATTKIRIVMDASAKPKSTPSAPSLNECLHTGPLLLKDLTGILLRFRQMEKVVLADIEKAFLQVGVREQDRDATRFLWLANPKEANLDQLRKEDIHILRFCRVSFGLTVSPFLLNATIREHMALYDTDVAQRISNNLYVDNIMMEVKPGENIREIATEAKNIFESAGMRIREFYGSHIEELKELDSSDLANELEDTKVLGIKWKPKYDQLVFSMPHFDSPITKRNILSHIAKVYDPLGLISPALLPAKHFLQIVQNANYKWDDPLAEDLKLMWLKLMRAWDGFGFNSLVEFPRHIIAGISEEFHCFCDASKSGLGIALYQVAETHYNKRESNLIFGKSHVKPLKVADHDSTIPKLELQALTLGVKATKFVQTQLNFADSQVILWTDSQCSIERLKENRTHDRFVVNRLKKIREANFKVRHIRTAENPADIASRGTDPQSLQASLLWRYGPAWLTKTHKWPETNVTYTPGEETREETEPPIVEWSATLQEEQKFSPSIQFERFSNWNRLKAAAAYAIRFALALLQKRNVVPAIDSLLYQQERQAGLLTAKELENAETWILLETQRLHSPTETATNNLKLSSSSSIEPLRCQGRLENADLPYESKHPTFLPTEAWTTKLIVIHYDRALKHCGPRTLLSKLREKYWIPKGRQTVQHILNSNKFGCLKCRRERLKPYAYPDAPDLPKERVTETRPFNHTGVDYFGPLKVKQGNTTVKVYVALFTCLVIRAIHLEVAEDYSAEAFLRAFRRFAARRGIPSLMMSDQGTNFTAGAKTIQENWTTQLFPNEIRGQLAHQGVTWLFNTAHAPWRGGAWERLVGITKNALRRSIGRNLLTWEEFCTLTVEIETIVNYRPLTFESDREPSPVIRPIDFLIPYWSAETNFPVIDVDPEDPEYTPTPNKLTEMLHKTDKRLTRFWDLWRSEYLLSLRERPSLNQNHGAHMPQEGDVVLVEEDGTPRSVWTMARILKLQRGRDGETRSALILLNGKEKWRATNQLFPMEVQSEIPETQLIAFIMDVDMDSVSLPGSEDEASERSAPNFKIPKKRRAFLRPIGQQHSPLQGPRRKKMELGDSGLRKLFAAISEEQGGSKATTNAITESRQMEKAPERVRKEHDKEMARRQREKVQRIPTEEIRQKLAALPHITVSSENAETQRKERKENEVRRKNNQQSTSEGWKQLAKQLDYDLKDQPDEPALERRKATEEQSVKGREVERRQIARKKGIVQMKKRAKPLKFPTEDETLLSYVKRFYDKDNWVLSWKSRRILDELHDLENEGRWFLYHAANGAQLTISRTFDGTRPFAEFRYVEEGHLVDLTPNQVIFRQTVPDEPEESPASNNKKLEEKAEKPARNDKRTTLATRKVEEYCTAEMKQNSYCYDIFE

SEQ ID NO: 136725 - protein, 1091 aa, Heterodera glycines
MSPGQECRPRQSQQHAPGRSNRQNETSGSTEMAMTFSGVRIAEARPGNEVSRMHEELIKPTTELEEVAKLFHDEQIVKNKRGLGKDQQVMKVIEIWRNSCDRFGELFTKPAMQQIKFRPILIEHNGQYNQWINRQNTRMAELFSKMRTKAQHPTYLSYNCTTVIVGDNVAELFTPLFDDAKWFTHFPADTCRLIPGPNVKHIIMGYQATDENMAAQLAPMIHKLARTEIQTTLIIGKEDNAKWIMNKKHLFDVCRQLKAGFIVFNREMGEARKISDRIRQRMEEPMEIDNEIVPSTSSVVSSSQASRATMASSSVITLMLLSLLGLLLVPSVSAAPLRIHRASLSLTAQNYLKAMHNYYNTLTTTNSTDTTTATSLPWTSTTSNWPISTLPTLTTTMVTRTAPPGTTTTTQRTTLATRARTRIQYVTRARMQTTTEPTTRTRPVKSSKRDLGINRDGHDIFWCSDRGSTIWELKGTENSPFCRPPPSLTAQWHNLAIELFVKVIKPEQITFAWHCSVKRTTERYYTNLLADKFVTIEKEFPPVNKRICKQMAIHQEYPFAKSEMTNHEGQLWSTNDEMEVNFPGPIAGLFKGEQISTATNCFTQPATLFVKRHNLQMFSPVHHVQNCQYATEFCQLPDNTTLIWKSTCNGNECQTCDYEKAEIINGKFTAAYGESMATWISEDHQKALTFVKNAPEFIACDGTRIVMSEQNFGIAKDQYEDIVSTTTRWKRGIRPEQLASQLSASQVATSVALNQLYTRECQRNTRAANPTLQARRLLRQPNVQARWIGEMTMEVFPCVNVSLQDISYRPMNDCRVYIPVTVHFPDRAIAAFLDPELRIISLTAQFASCNNHRFHHLQLRSNPNIWLLIDSRTGIARQMPKDYTHELYETTLNQSNSNIELHPLIFHAWQLDNESDATRFPHINEFINLEQFKEKLEQHITARTEALGALKGGIEGLTMRWLKSMIDEVITWWIRIACVYSTFLFLRDIVLPCTLAYLFNPVRVTFFSLMGVRRQPLQPMLGKTLRQEEVPLREVLRSPQPRTSPHRSLSPVHLDVIARSARYQQTRAQSDANLAEVDTPFGRRTRRREEH

SEQ ID NO: 136726 - protein, 121 aa, Heterodera glycines
MNMVAHQQQQQQQFVQQQSKQQQQQQQQVAVRVWVIQTYKSIIGLCYQIYNPIIPHELMEIDSFQHQAGGYLVDPLFQELSTGDLNPHEFDKYLIINDTARAAAQQQQHHQQQQHQQNMAQ

SEQ ID NO: 136727 - protein, 74 aa, Heterodera glycines
MCQELAEEAKQSIEIAKNYRQEIGHIYRTAYSQPDLGIGDLANKLKETMRENQIRFEKQRPQEEFRDEFIAYKI

SEQ ID NO: 136728 - protein, 58 aa, Heterodera glycines
MSAPQVLAPQMSAPHMSAPPMSAPQMSAPHMSAPQMSAPRMSAPQMSAPQMSAPQIIT

SEQ ID NO: 136729 - protein, 105 aa, Heterodera glycines
PGLKCPAQAKIFFYFREKIEIFPKKIPVDRARKTMFWKWSSFFWENSLKNPKIQKPENRFLGLARKILKIFEILKSGKIELTELYNKSAGHPALRSKPNELFNGD

SEQ ID NO: 136730 - protein, 68 aa, Heterodera glycines
MHAFCARAIYHRACQSKAKQQRCCFERIKGIESVNRLLEKYICNLSTILRSELEMINFTIQISFRCSN

SEQ ID NO: 136731 - protein, 32 aa, Heterodera glycines
MGEAKIQRRHSSTGYREAIPEGFGLPINLGAS

SEQ ID NO: 136732 - protein, 73 aa, Heterodera glycines
MSVRQRNCPFYSRPILALTVALRRGGFVSYQHGDPRTPMGQGQARNVNQNGSPSDVGEEDDEDSPLMNRGLFA

SEQ ID NO: 136733 - protein, 193 aa, Heterodera glycines
MPNLVAVLASDDMERRFAVKSNFGLTNPAHNHWTCEMRLMIGDFGEHVKLESNGGSKAELVDGEQYRKLFIGGLSLNTTNETLSDFYSQFGSLVDCVVMRDPQTKRSRGFGFVSFSSLEEVDRAMTARPHTIDNRVVDPKRAVPREMAGKGESNVSTKRLYVSGVRDEHDEDSFNRYFSEYGPVIKVYFKFIL

SEQ ID NO: 136734 - protein, 197 aa, Heterodera glycines
VVLRGPSKDIINEVERNIQDALHCVRNVLTNPRVVPGAGALEMALSHALLEKAKSIPALLEKAKSIPGVRAGPYKAVAHALEIVPRTLIQNCGGSSTIRQLTALRAKHAQQPDTNWTWGINGRDAGGELVDMAQPEGVWDSLTVRLQAIKTAIETAIMILRIDDIVSGTAIMILRIDDIVSGTKKRDKDENGGGGGG

SEQ ID NO: 136735 - protein, 122 aa, Heterodera glycines
MEISAQGVDVLALTAADFAAMDEAHRQWETERRQRKEQRQREQQNRPKWKRSGEWMVLQREWEEEKEEEEKDPKNGKWKRTSKLKNGGGETMNFGRNRQVRVAAAATTKNRTLPNTFGIGPN

SEQ ID NO: 136736 - protein, 84 aa, Heterodera glycines
MREMNQKSTSFSIPIRLWQKSGARPTRPAIQAEAMTGGAEKAEETPEKERKAELEKEGKSDAGSRKGREGAESGKGGDGGKSGE

SEQ ID NO: 136737 - protein, 224 aa, Heterodera glycines
MEVELLSATNTSGGHERYAVCNALLTNSELARVLVVAWRNRAQPAEQVFLAQSGNHQQQQQHQPNVQLGQIPTTIGLVVNHQQQQSLVGAEIQQGQSEEPPPGPMTNRHQSQRREPIHGSTIAAAAVAASVEEANTNQPVFRRRRNNNNNSGRGTTNRENPVELIGGGLTAQQCDSILPNLEVNQQMLQNDERCVVCQIGFTLGSLNATELPCQHFYHLTCARE

SEQ ID NO: 136738 - protein, 92 aa, Heterodera glycines
MTSYKKWTRTKECEQTAYEQFQTTEKLNTKMEAANTKLTELKDLEMQVEAGAKLQRSKADRDARVEQREHAKAMSKSNAEADKGNSVREAMK

SEQ ID NO: 136739 - protein, 62 aa, Heterodera glycines
LLLLDEPTNHLDLATREALSMALNEFEGTVMLVSHDRALLRAVCDEFWMVGRGAVGPFDGDL

SEQ ID NO: 136740 - protein, 179 aa, Heterodera glycines
MAAAAVTPWAPSAWQWSAAATETAALLNGTYGGGGGAAGTTTATSSAQSNGGWNGLVSNQLGANIGNACFFSNSQPQFTPTTTHADSGLKNKSSTTVTAAQRNAKKGSNRTPEKAKNGTMKQQMPLETNNGSVSTNSHREAFKSNAKGQKQRVKAGGKTKSKSGGGKTGRNCECPNCKA

SEQ ID NO: 136741 - protein, 235 aa, Heterodera glycines
MKLWRFPPLLLPPPLSMFRKRLIPPRRRLCLSRWPQLPPLHHHQHRNNSRTLRLSPLPRPTTPNNSWAQRPKSVVAGSYAAIAAAARGNGPNNVDNIVTVHVPAAVAATNGPTAPTPSKEIPQHNNNIAKHNPEHQIAVKQQQQTPPSLPPVLNIAPRREWTHRIYFSQLTKPGRFVDFKLGQQELMREIQAITDGVEFVGIKPNSLRREYRTAFGFIDFTTAADMQAVYDACKQ

SEQ ID NO: 136742 - protein, 326 aa, Heterodera glycines
EANQEQLYNRNIEDVELWLSELEGQLASEDFGKDLISVQNLQKKLGLVESDYNAHQERIDAIGHQTREFHDTGHFNAPLIGKKFEALRARFEALREPLQRRKQKLAESLLGHQLFRDIDDELAWIREKEQIAASTNRGRDLVGVQNLIKKQNALHTEIANHEPQMEQPNCATNWRALKTKADKRKQDLQDSLQAHQYLADANEAESWMRDKEPLVGSTDYGKDEDSAESLLKKHRAMMSDLEAFNTTIDELRREAGQCKYQEQLDGQLGKECVVALYEAIHRKVAARSVYEKGRRADAAERVQQGLVEGGGQRPPGLRPGRLCEAD

SEQ ID NO: 136743 - protein, 115 aa, Heterodera glycines
YQRFLSDYRDLMQWVDGMVQLVSSDELANDVTGAEALLERHQDYRTEIDARASTFHAFEQFGNQLIRSEHYAAEDVRQRMDEVNDARRRLEEAWVERRKVLDQCLELQLFHRDCE

SEQ ID NO: 136744 - protein, 137 aa, Heterodera glycines
AFLSQEDTTGDNVESLIKKHEDFDKAIASQQEKLNNLDMLARQLVQAGHYAAPAITAKRDQIFERWDQLKAALIEKRSKLGESQTLQQFSRDADEVENWIAEKFQVAQEETYRDPTNIQQKHQKQQAFEAELSANAD

SEQ ID NO: 136745 - protein, 44 aa, Heterodera glycines
SVHFHWDSVVPVLRWHWFEFIPCFLDLAHQELSNDTKFVRIWAF

SEQ ID NO: 136746 - protein, 44 aa, Heterodera glycines
HLKKKTMENAMRKMSEGIPNCQHQYGECLSQQIRSLCHFKYLSP

SEQ ID NO: 136747 - protein, 76 aa, Heterodera glycines
MELEVSAALAELDGLIELVHQVDEQIEAQENRLFSIKKQLAKMDEQAKLVGERMRTLEKRAERMGGKGTADPTPII

SEQ ID NO: 136748 - protein, 83 aa, Heterodera glycines
MFLIFLLIILLTILLSVFGQNISGQGKSEEKLDSINAMGKFDKVRLNEKNYGLVRNLHTNWYAGGIKAIMGKMGRDLFRKLLP

SEQ ID NO: 136749 - protein, 68 aa, Heterodera glycines
PKASRIEQRERSSSSASNERLENALGDEYFDSSFYAPASSSYRQSFVVVVNALFNLALLALFLAMIQH

SEQ ID NO: 136750 - protein, 154 aa, Heterodera glycines
MTMALKKSAQPQQKEQQASVILKNRKILPFFPTPSIKSPATAVRPTTPSKSAPSLAPSAASSAAMPKPSNSSSKLLPLQNSTVQSEYDRHNRVHVIHICGIGTQSFCGAGARGINPANPAISKKGVIADWDSVKSHAGIGIQIFAGRDHAGLIP

SEQ ID NO: 136751 - protein, 41 aa, Heterodera glycines
MPSLSTIIWTVTNLSATFAAGVLAVPIATRPKIRSCFMRRL

SEQ ID NO: 136752 - protein, 174 aa, Heterodera glycines
MATGVLDNDHSVDTVDLSNEMFNIDNMDNNPIAEECQNRAKKHGNSMAKLTWHGISIKLNRQSAGINTAILDTSFCEKSYIVPDVFRQFNIHFGNKSHFAAYITIDEEGIDIEDGKVAQYKKMALSGAKIKDFVGFWVLGLDMIPWDEQTMRLFVIRHCNCSLEAFVKNAKIKN

SEQ ID NO: 136753 - protein, 50 aa, Heterodera glycines
MGFVEPYFHCSTRGIAGIQKGSRTFGQWTLRQWTFGSWTEADNWTVDTST

SEQ ID NO: 136754 - protein, 78 aa, Heterodera glycines
MRTDQTDQNCICHNRVLLSDYYSDHFRHFPNNSEHDQGGVAQGGLRNVAADTRRFAPLALLWSGLANSQTISYIIRID

SEQ ID NO: 136755 - protein, 61 aa, Heterodera glycines
FKQIYFYATVRHSAAAKETKKNSKNNKSAKFHVKKDKVNQIFLGADFSPRFSASLFYCRVQ

SEQ ID NO: 136756 - protein, 417 aa, Heterodera glycines
MSELANKEKKSLTAAVSASSIGERAWYPLGRIVGGTVYPGLMLTSGFIHYLLSCLHIPVHIRDICVFLAPTFSGLTAIATYLLTKELWSTGAGLFAACFIAISPGYTSRSVAGSYDNEGIAIFALQFTYFLWVRSVKTGSVFWAALTALSYFYMVSAWGGYGYIAPWTGRFYSLWDTGYAKVHIPIIASVSEHQPTTWVSFFFDLHITAAVFPAGLWFCVKNVNNERIFVILYAVTAVYFAGVMVRLMLTLTPVVCILAGIAFSNIFEKYMLDDGDARRGGEWREPKDVKEGDRRLYDKATTKGGKPPKVPQATTASFSPSAQQETVDHIGMNTRSIVLVALLFILLMYVAHCTYVTSNAYSHPSVVLQSHTNDGGRIIMDDFREAYYWLRKNTPEDARVMSWWDYGYQIAGMANRT

SEQ ID NO: 136757 - protein, 72 aa, Heterodera glycines
MSELANKEKKSLTAAVSASSIGGYSTLLVFVVLGLAWFVGFASRLFAIVRFESIIHEFDPWFLLFVIECSPI

SEQ ID NO: 136758 - protein, 180 aa, Heterodera glycines
AKMAKITQIKNGEERRIESITRRKNELDERRRLINKSLTGELKINKQTRFADSDEEESTQNSKPFSFLASIGRIYPEQNEKSKNTNVVDDSPEQFLKKTRLTNETEKSAPKLKNISLYKPPNGDGDMWQCFFVNEHTPEIRSSFSSFRRHQKEETLRKEWDKKRAPIVKFYKKERKSALR

SEQ ID NO: 136759 - protein, 86 aa, Heterodera glycines
MGPQAKYAGQTNEYKEDWGKQFSKTNGRRYYGPLKAIDRENEQTNGREDTDINPPPEGTRIKMDGRNDGKANERERQWHRKDGTIS

SEQ ID NO: 136760 - protein, 69 aa, Heterodera glycines
MEISSSWSFLKMTLQLVLYLIYIKKSVFCHPRFFETRNFGPKDVEVEFHDLLVQSTFMGFQKNFKALNR

SEQ ID NO: 136761 - protein, 42 aa, Heterodera glycines
MATFNVAHLITLIGVGSIASVKTVEIPLMEIEASILGIKAKI

SEQ ID NO: 136762 - protein, 174 aa, Heterodera glycines
VKRKNWSKKHLKKYLEKNGKKKKSEQQKREIVEKFIKIKAKIKQKGRKYSTKEWNTIEQKIAKKLGTNRKKIYKWIKELGLYKYQCKLKTDAQKIEIVQKFMAMKNEYKQKGRKYSTKEWDKNYAEIVKKIGVNYGTIQKWKKQFGMGERMSEKEKMAKVNIYLLNERTKPKNK

SEQ ID NO: 136763 - protein, 95 aa, Heterodera glycines
FFEYPKRTLEKIDFFVFGAVPPNRCAQIYGETESFGSSFPIACTLILRWIFAPHNCLSTPNGHLKKSIFLFSGQSPRTDAPRFMGRPNPSGVAFL

SEQ ID NO: 136764 - protein, 405 aa, Heterodera glycines
AKIAACAIIVVIGFSFGSLKAHSNNFAQPFANSNFEPGKVVLALFSGLFSYGGWDILNTGIEDIAHPHRTMPFAIIAGMAIVILLYMTMNVSYFAVLTVTEMRTSNAIAMTFSERVFHGFQYLMPFLVCIVLIGSLNATLFGGSRMLWAIARDGYFIGSLNATLFGGSRMLWAIARDGYFPSFISCINRQHGSPRAALFIFVVLAMLFTVVLAMLFTFLGDLDVRLSLSFILFVVRCCTMVALFCIRYRADRIHPEALRVPLVLPIVYFFVCLSLVVVTVVRNFTFDLTIFPNLRKYGNWGAFFGNFLHRSAMIGLSFQAFGLFVYLVFIWPPAISRFSNYRNDSMQRETLKIEFLLKKAKCPPSLKLFLTVPSKKIGDKMRTDCSVSDGDNDYLASTHKENSIS

SEQ ID NO: 136765 - protein, 231 aa, Heterodera glycines
MIATTRCVVLLLVGATMADAFLSAFDNISFSVAPGALRDRRQCGCGCGGGGGGGGCGGGCSSGGGGGGAVQLAVSCGAAQQAAPASSGCGCSSGCGGGCGGGCSSSCGGGCGGGGGGGGGGSVQLTISCGAAQQAAPASSGCGGGCGGGCGGGCGGGCGGGCGGGCGGGGGCGGGGSSGGGSVQLAVSCGAAQQAASSGCGGGGGGGCGCGCGRRKRMAMRRRCVRALGRF

SEQ ID NO: 136766 - protein, 26 aa, Heterodera glycines
GLHFCRRHSPKNSFIFCENKGSNCST

SEQ ID NO: 136767 - protein, 15 aa, Heterodera glycines
TWLRPQNHCVIGDSE

SEQ ID NO: 136768 - protein, 95 aa, Heterodera glycines
LFEYPKRTLEKIDFFVFGAVPPNRCAQIYGETESFRNSFPIACTLILRWIFAPHNCLSTPNGHLKKSIFLFSGQSPRTDAPRFMGRPNPSGVASL

SEQ ID NO: 136769 - protein, 46 aa, Heterodera glycines
LFTLPGVVERFFPRPEEAHMVKAVREVLTKSWSIGEGDEEAEEIIK

SEQ ID NO: 136770 - protein, 19 aa, Heterodera glycines
EPVNSCIGCKCRRCCTPNS

SEQ ID NO: 136771 - protein, 105 aa, Heterodera glycines
MDLGTIEQNIKDHRYTTIAAFRRDIDQVKRANQKKEGGMIHFSDLHQILINSRIFNGPQSAYSLKAEEIVELTNQLLNNSQRHLAELETNIQKALTVSTNEEEKI

SEQ ID NO: 136772 - protein, 50 aa, Heterodera glycines
MKIVAIGCAPTSIGFAYRLQQLKADGIEEAADIELLVLEQNPTPGGLSCT

SEQ ID NO: 136773 - protein, 47 aa, Heterodera glycines
MGDGFSSSKMGQNAWPFVRLKMIIFEKLFFHPFGFSFLGLPLVTMKD

SEQ ID NO: 136774 - protein, 83 aa, Heterodera glycines
MRAGAELQLGKPHNHAPSPTRCEAAQINRSVRNTALSSRGNMPRTVVNGEPCRLYPAPFGIRGGPFADGRTVDGERIRVQFHP

SEQ ID NO: 136775 - protein, 59 aa, Heterodera glycines
APIRAAPLAYNHSLHGHTPTQRQPLARPFILPLNDLDVATRCPMTNDDVVDRNGTRRFE

SEQ ID NO: 136776 - protein, 115 aa, Heterodera glycines
LPYDSPWTWILCFLTQDLADLAYYFGHRAIHEIGFFWGVHTIHHSSEYFNYSTSFRQAAIQDAGLAAHDILQALSPSGLALSPSGLITNLGHFRSAFPMNENEIKNVEKKGMKLK

SEQ ID NO: 136777 - protein, 18 aa, Heterodera glycines
YREAIPEGFGLPINLGAS

SEQ ID NO: 136778 - protein, 85 aa, Heterodera glycines
MVAKTRGWPRWKFYDYLHSRRGQHGQFRHDTIRLMQQIEAPMNLEGYDADTFFLEFWIFGTTANNIIVLLCLFLVRLVNTNQGWT

SEQ ID NO: 136779 - protein, 264 aa, Heterodera glycines
AEDLFGTLRSHLNNLPQITFDKSSNNSAFEWMQKDGIAILCNEKMGEISEKIQENKLNEQLFFVVKSAEKNRKHFCSMFKDGKSIKLIAHNNLVNKAKKFVQILENIPPQLMEKFGKIAENDALFNEGNKQEIAKIIGTFSNGLNFFRKFVAGNSDRCLTDQLQTSNTASIITLLKKPHGMARRKRRFSTMNFLKCVVSIVIGSLTGVFAVIFGFYLFQHVFLVFLCNIHFNFGRGLVMFLWIFCILSFVVCFFLFYSNCFSFA

SEQ ID NO: 136780 - protein, 118 aa, Heterodera glycines
MILRSGIAKGVRVVRNDDRTPKAAVVLDTKVAAFFESKNLVDTVMEILPQRRKGGRPSMRDFTPKDWSEVETVIKDVRVEVSSVLGYGDSYNGITKGLKKLTTQKRPRDLGLSKNFIF

SEQ ID NO: 136781 - protein, 59 aa, Heterodera glycines
FGPRGRLGPNPKIEKCAFLKNKILKTKPEGSLATWHKLGLINIRSFLQFYLFQILLFFN

SEQ ID NO: 136782 - protein, 271 aa, Heterodera glycines
LIKPIFNYLIRSDECPSSGQLCTQSDGSHCCQDAMQSHCCQDAMQGIPVSHIKAKSGHCPPPIGISGIPVSHIKAKSGHCPPPIGISTLQDGNVGCWLDTNCPGIQKCCLEPNPGSHVAARRICRDPEGVSSQLSESICTLPLVVGTCTAFVTRYYFDASVGTCTAFVTRYYFDASSGKCKPFQYSGCGGNENNFQSIQSCHSTCGLLGIKGTPSCPIKGTPSCPGEANAELNCLLPHADACHTDSDCMGRDGGQQPVSLKSQIDLLKNLK

SEQ ID NO: 136783 - protein, 77 aa, Heterodera glycines
MLVDSLRPATLSSSKKRSAHSMDDTDQFIDHSPPHKKQLMDEENDQILTQNTPNDSLDRRRPIAFATKAIHAGNRPE

SEQ ID NO: 136784 - protein, 178 aa, Heterodera glycines
MENAATGGKRVPRFSHSAGTEGAEGEKEPQAEEPPSAGTAGADRPAEDHSLLLAQLLAAFALFGLVTALLFQLPAFRVRSRIGTDGPVPIHQLDPQMAECAKTCRIELVESIPQNVSFHLSLGNSPALAIPTFSAWMQLISEAKHSLAIAAYKTSLRGKHVLGEDQGNYSTQGETVFD

SEQ ID NO: 136785 - protein, 15 aa, Heterodera glycines
MYCFSKNFMIIILKN

SEQ ID NO: 136786 - protein, 83 aa, Heterodera glycines
MKHFSRAFLLFCLIFVVALNSFNEASLIIDECKSVCPKTNNKCATDCVKCASGKCKKECKKPAAPKCAECGKKAVNECKAMGK

SEQ ID NO: 136787 - protein, 29 aa, Heterodera glycines
TRVQRYREIWARPGPGLFGWDNREKSREF

SEQ ID NO: 136788 - protein, 20 aa, Heterodera glycines
SKIIWQHIILVPSVTARTLR

SEQ ID NO: 136789 - protein, 84 aa, Heterodera glycines
MDWLNVWEKCVRTAHSPINQWQANKRLNVIRRDRHFEKCLDLDLDLDSMLDLDLDFLDKNPGKSRSRKNPGSSRPGSRPGPGFF

SEQ ID NO: 136790 - protein, 73 aa, Heterodera glycines
CFYVIKCKYTNVIESVRTQICEYAKLTLKNMSFYVMLSDLKFLSPFILCLLRINKRQWQLNQGQCAPREVGPS

SEQ ID NO: 136791 - protein, 132 aa, Heterodera glycines
MNGFVWHHFVLGAVLLISNCADCLRNVDWTTGKQLNSEELKKAPIVISDGGEIITFCFLGQMDPANARLNSQYHMENYEEDNKIATKCKMAQQTKWAKHFEQDKVLHGFQIVMSETDEEKVMDLYTSTHQEK

SEQ ID NO: 136792 - protein, 252 aa, Heterodera glycines
MKCKKGTVLDTLDLGMNPKMNISVEECKAGYEYCAAFTCTKAGRAGFSRIQWYCARIKSPPYECAERFTKLVEEYITHSNGHWCECHFGEMGKEMDNEQFVLPPIPDGMMCKVGQFDENEIGQVSEGKCLHDDHYCYIAKCTKDNEYFKTVWDCTDRPKRDHITDQIGQKASVTLYCDAMFGKKNMAMSNEHFTIEKLEEHVEMMNMMTTKRRRRRKKSTTITTPSTDLATTTMPTVTEQTVPATVEEATVT

SEQ ID NO: 136793 - protein, 186 aa, Heterodera glycines
MDPTVATKGGRFSLENYKQKNSIATSCEQQLQQSGGSETLAIGKVLHGFNIAFAEDKLLLTSSTSQKSPSYAIRNAQQCFDIHLGSEKNLDGFLKDYTDNKKLEKDNDFFTELSYDILSGIPQKGGKIGIIAAGGACNIKIILVPWAKKAMDWANVLTINVPKAMCKQAIKRRKNERIKKKFIFLK

SEQ ID NO: 136794 - protein, 97 aa, Heterodera glycines
MSIYNFFLLFSSLLVVVLQQCSAANATDKNNEENVTKAISSGKIVPKSDAIVHSGPVIESVFAAEPVKKWTNWQNGKQLEVKEAMEMPLVINPDGRV

SEQ ID NO: 136795 - protein, 29 aa, Heterodera glycines
MIPFCLELGLEVMRPTPLMCRLALLFQFF

SEQ ID NO: 136796 - protein, 384 aa, Heterodera glycines
LKQLTSLIQRKAEEQKNSLEEGGNERREEKRTNEEKEKEEDKRRKEEREQQKEEQQQHQQRKITEEEREREKKEEEEKGGEERKRGTTRSKTNSEVSSGAKRREEAVGRVEEGEEAGEGKEGKTWDGRGGDDEAERKARDLEQLAIYRSRVRQQLNRKLTALLERVIRRMDKCHLNLSPIGGTAEFSQKGWPWKKMNWEEIHRRAEARGEEWMMPTMAKGRGRKRKSGREEDEGKEEEVSVGRRAGEKKRVNGERSVRDTKRERKVKKRNSEEKHGEEDQTKKRVTRKRRGREEDGETEKQTKRMHDERGGQEEKREEPKKEEKQEKNIQEERRERNEKREEAGEREEKQNTPPIILRIRPPTAKPTALTTIKRMTAPRAATGK

SEQ ID NO: 136797 - protein, 49 aa, Heterodera glycines
MVFHQVRKSLKIGAGGGVESSRGLNFCWAGFIGNTGCNAAIGFDVDIAC

SEQ ID NO: 136798 - protein, 80 aa, Heterodera glycines
MLCAVLLFSGHTLIMMVATLTVDRYIPSAFRLLRLLPRLFALIGVPCMVISRTHYTCDVVIAYLSTIAIFSRELRNPMTN

SEQ ID NO: 136799 - protein, 180 aa, Heterodera glycines
MAQVGVCVGVSGAVAIVVLAKKIDPEIKTDDVNNFLEKQKTYTIHRPIRKRFPRLKTIPSGFHTDWQCDLCIFDQLKKHNDGYKYLLVCIDVLSRMIFSAPAKSKKSEDMIEAFDRVFDKSKIIPLKIYSDSGLEFQAGKMKKYFEEKFIIKNVMYSPDLHAGVVERANRTIKERLYRYF

SEQ ID NO: 136800 - protein, 237 aa, Heterodera glycines
MTEEELRRRLLVVSIERSQPPANGNAGNGENAEGLRNAIRENDGRPNFGVNGQTFAHQRRPHDTFLSNLMNNGIGNFPQNLVHVPRTSTPTRNVEFEQQIGPFPFVVDRNNRAPTPPLNIRQQIFHPIPLNTHRINQMSVNAQRNIDVQYVPNNCVNAPPNVQRHCDIQYTAPNPVAAPSNAQQIQAGSRLIQNIPMQAQLWQGPDGKMTLVYPQDQQQQVLIEQPNLAQIIKNHSP

SEQ ID NO: 136801 - protein, 1153 aa, Heterodera glycines
MTEEAMRRRCWWSALNVASRQPTEMPEMEKTPKRHCDIQYTAPNPVAAPSNAQQIQAGSRLIQNIPMQAQLWQGPDGKMTLVYPQDQQQQVLIEQPNLAQNQQKFTRQAFQIPETNQEPRHFPTYPQPNVAPSNLEFNLILERIPDLNGNEGTDSVRRFFKKFDAYTDGWPNAKRISALESKVYNKAERAFEAAKSTQPYRYEHIRKDMIQQLEETDSKQLNAFDDLMLGVRRRQNESIDELAGRISRLVKSAYPGLTNNLCDEYSIKFLIRSMGNPDLALNLELIRTPGMTLDHFVSLAARAESTQRAAKRFSTHPNDGFQQREQQPKWRQNFGGNSSQNMAKGQNFAGNINQHPQPKEDTRNQWKCYNCDEYGHLSRNCSRPRTFMQNQPINQQKNFVATGANRTQIQPPNQNRNFQTPKPNSANFLKQNCLVVQREEVLAEARVNKIELAPEVSEFYEKLERITESKNEIFLPTIGKVMSLKLEVFGTETDAMLDGGAQISLISSDFLHKLLIEKAITLETLEIFKTKTQIFDVNGKLVKCLGTIKLPVNRHGFYEPVTIPLHITNAPIGFGLLIGTNALQDLGFKLYDERNKALVEFEKVEPEKKDFLTVIYRTIIEAGTVKNLEFSVNTEFEGQEIVVTSDETSAIRVEPTIGIPEKGKIVVPVTNSSFLPITLFEKSSIGKVERVYSIGETENLLSSPIICSTKYEQNAAPECYEKFFESLQVRIGELNEANDKEVRKMICTFPEIFALSDDDLKQTNLVEHQINTAENSPVKMKMRLVPYAYREKIAEMLQNYLARGIIRPSMSPWASPIVIVPKRDGTLRFCVDYRGLNSITRKDSFPLPNIDNTLLMLGGRKYFSTLDFMSGYWQIRMDENSIEKTAFSTEYGLYEFTVMPFGLTNAVATFQRFMSRLFEGMINGFLFVYIDDILIASKSFDEHLKHLEAVFSRVKAAELKLKFEKCHFCTTELPFLGHILTREGIKMDADKLKPVMDLPMPTTKKQLHSLLGFLTYYRKFIHSFGTIAAPLFKLISEKAEFKIGEQEKQAIEELKSKIIRDVVLHFPDFDAAQNDLTRQFIIMTDACKTGIAAILCQPDPEKQIRPIYFASRQCNVHESRLQCYRIRSFSRQIWCKKVRTIHHYDSDSGHYGP

SEQ ID NO: 136802 - protein, 138 aa, Heterodera glycines
LPSPLLKAFVGVSLCLTFIFLIVHFFTLHQTLLYFWPWAESDFLFSAVSAFVFLVCSFIESFYSTGAWSNNCNDIGGDSNNCNDIGGDGVIHNGCRLIWEWAFAAFLLFTLCVLFFTSAFFAKQNGRTTHLFAREKCW

SEQ ID NO: 136803 - protein, 23 aa, Heterodera glycines
KEFERTIRTYKSPYISFTYFHSQ

SEQ ID NO: 136804 - protein, 43 aa, Heterodera glycines
MSPLRFLLALFLITLAVMAGTNGFFENSVDGGPNVASPLIRER

SEQ ID NO: 136805 - protein, 23 aa, Heterodera glycines
CPFGGTQTIMGEQKSNAELKYRL

SEQ ID NO: 136806 - protein, 258 aa, Heterodera glycines
INGHQSQVKNSRGKPPPPPTPPTVINQQKEVFYNWVDGRFEFSHNQQSPPAPPQQFPPVPTAASSVASPQQRQSVLTAAMPSTTESKASFVDPTNNKRSDLLQQIQQGTKLKKVGPPSTERTPVPTNAPTLRDNMMEQIKQGTTFKHVDQSDVENSRCSAGGSAQEIGVLTGALAKALEEQSRHAMYSIENSALASPTPSTSMSSTTFSTSALSPVKLQFKSLDKALPTNPWESELDAFLELCGQSAVFSWNEFEDST

SEQ ID NO: 136807 - protein, 327 aa, Heterodera glycines
SGIVTQQHSSQTDYGQFYLSTQGEQSQGVPSTVDASQSQTEPDLNFQDEEEPLVDNLPTHACKYCGIHDPSSVGQCTVCGKWFCNGKGNTAGSHLINHLVRAQHKEVSLHKDCPLGETQLECYHCGSRNIFILGFIPSKTDSVVVILCRQPCATQNSLKNANWSAEDWKPLIQERQVLSWLIKIPSQQEQLRARQITASIINRLEELWKDNPEATIEDLECPGKYTTDPDHVLLRYEDASIYKRIFNPLISLEAEYDKKMKESISCPVGQVKWDVKSANKVHATFQLPGFRDGNMKLMIGDDLRLKHYQTVDGSEWSCMGRLIKIPD

SEQ ID NO: 136808 - protein, 94 aa, Heterodera glycines
KFQIRKLVSSYVGENEEFARQYLGGELELEFSPQGTLAERIRAGGAGIPAFYTPTGYATMVQEGGTPAKYSVAENGKIEISSDPKEVKKIFLMN

SEQ ID NO: 136809 - protein, 87 aa, Heterodera glycines
MPYRLVYNKKITYAYCIFVSKREHVARIFADCDQPFAHGTAEEGGAHPRHGGVHGQTDHQGGHGIQMGASFASVTRGGFASEKAETI

SEQ ID NO: 136810 - protein, 82 aa, Heterodera glycines
MPKPTSTEWRQSEFIIHSLSCLSLIFTLAFCRPLALIFRCFSPLLSVKMDGIFHSVKRVFAFFSAFCAIMTLAIYEKSQPNL

SEQ ID NO: 136811 - protein, 146 aa, Heterodera glycines
MPPKRKHVYLESYEKEFRHIKKSRKGEEFALCVVCNDDINLLSIGKTAISLHQKTGKHQKAAKAANRSIPLQEFLPNTSAPSTEDRKVLAAEGTIAYHTAQHCQSFRSVDCLSSDGMLRTIFPDSTIAKKISCGKTKTAKILTGIA

SEQ ID NO: 136812 - protein, 28 aa, Heterodera glycines
KINKNIHVAQRTRTTTLCPFTILQKPLR

SEQ ID NO: 136813 - protein, 244 aa, Heterodera glycines
MPGHFKNSTKRMRELKGFCEELEKEKAILPELLLEMDKFRAKIERRKQERFYGADLAMEKVGKCTREALEEQFQSFYTSVLAYLNKWHRIDRFPEKLQWVALASRKIPHDDALALARQIAPELTNDLFDDVSEANQILNSFPNDEFQKLTPEQKWKKLFEANLPHLLKLVSIVLSIPVSNAFVERVFSLCGSQWTDTRNLLQVETVKALVQTKANFDLSCPQMYQMLISNHKLLEKIGGWEKYF

SEQ ID NO: 136814 - protein, 57 aa, Heterodera glycines
MTEAELREIFMAGTTANERNTTNRPLGGAVTTTTNANNRTTGGNATSSSSSSISDSD

SEQ ID NO: 136815 - protein, 196 aa, Heterodera glycines
LNLFIYFINHEFFFWIDLAPHWFKTETKNRIFNVDAVYLKHEHQSDAYDFRHLQHLQVGLSRRFRALKIWFVFRAIGIQRIQQFLRMQNELAKMFADLLLQNELAKMFADLLLRDDRFELFVPQRLGLVCFRMKETSNELNESLYLAINDDRRVHLVASFTHCTFFLRFVVCSSKTRETNIEKAVEVIREMADKVT

SEQ ID NO: 136816 - protein, 33 aa, Heterodera glycines
LCSSELAPAAHLQTLHYWHTHRSANGDSETIAL

SEQ ID NO: 136817 - protein, 65 aa, Heterodera glycines
MSQKSISDFISNVTFQQSPSTQISSAEEAISDLAVSISSDEFGVTSPKRKKYSHKKPGGGLSKKG

SEQ ID NO: 136818 - protein, 32 aa, Heterodera glycines
MDKKFKICPLFWFHELKCNIWYSAEVDEPLLM

SEQ ID NO: 136819 - protein, 28 aa, Heterodera glycines
GTASVGASAQNEEVGLGQIGKAQAPNHT

SEQ ID NO: 136820 - protein, 34 aa, Heterodera glycines; identical to SEQ ID NO: 127275

SEQ ID NO: 136821 - protein, 67 aa, Heterodera glycines
MGCDALVLVTEESAGPSNGTKENAEMDETSDGKEKEPMASANSKVMQRNPKPFRLRHRSHPRGSVFH

SEQ ID NO: 136822 - protein, 377 aa, Heterodera glycines
MNTRVNYAMYRLDEARKQQYDQIYIQACESTKFQMQLARAILQINPNEGVRRIFDRDDLVAHWEGDNLEVGFCAPLTPEKIFWDKKIGNECYEWTPVFAENTIFFVKPGTRELSILGKKSECVENGSVKEMHNETQRGIIQKMGENIEKIRPKYRNIQNPLILKAGALFESDNVRIEETIREYRSKMNNLPTPTLRLVEKPNITEIIKLVKSEANETLGVIIGRSGDWLEIVKKIPEKTKEALNYLKGLSYVLIAIPLLILLALIGYIGIKYRLIIFAGVRAGSVLARVLRAIMGMKKRSTRVLAVPTAPELDPIDEEAYVLDYLPPRRVAAITNDPRRLPSIRVRLNDLLTAALVDSCASVSYCRERTARKQDLNF

SEQ ID NO: 136823 - protein, 407 aa, Heterodera glycines
MRLQNILSILIILHICEVKSFPILSSLFPSKNDSGDTVTIFDNIKEQEVQIRKKRQAITLLNDGKSITLTITGQSVTVTEETLSDGTIVLRITGQNPTVLTGTDNLSSDDQASTTEESSASANEEVSTSDDPASTTEESSASANEEASTSDDPASTTEVLSASANEEVSISDDPASTTEESSASANEEVSISDDPASTTEESSASANEEVSISDDPASTTEESSASANEEVSISDDPASTTEESSASANEEVSISDDPASTTEESSASANEEVSISDDPASTTEESSASANEEVSISDDPASTTEESSAYADTVTSSSSSLITSSISSKSSTTTTILRPPSQQKPRSSSSSSCESEENKFGKRRPSHHKNKKSKQTKNKQEGKDKNEKENFAKRVYEWFHNLPRHFG

SEQ ID NO: 136824 - protein, 89 aa, Heterodera glycines
MINFIESKCIKSYQDGSLKIKNDYSAEEEEIETKVLKTPRRIFTLNKRSKTNANPVPNYEVDAEVEITGRKRVKTTAHKKAQRVKTTAK

SEQ ID NO: 136825 - protein, 303 aa, Heterodera glycines
MSQRERDNLRITDQKVIQKIRLQNLVKDNKLSSTPKRLKTFGIFKENNSYKIHENELENNNVLWTSRKITANAANGQSKIEQKYLKKKQNAKNYKEKSQRLEKELRERDVEISNLKRNEVHYKIKSEQLEKELAKKEKQIDEIKKNMQKELDNKESVKIFKEKSQKLEKELGQRETEIYELKRNEVRHIVKSEHLEKELEKKEKQMEQLKKELEKKEKEIAKLKKEVRRGGGGENKTNDRGEGNRAKTIDSKLTVKERELYNLDRNISMKVRQLQNFESLIDQQNKSTNSAIRNSEKFEALFI

SEQ ID NO: 136826 - protein, 50 aa, Heterodera glycines
MSVCATKYYLDADSLDAVFKQLESDGVALRTRLYEEIKRAGLLEDKGGQG

SEQ ID NO: 136827 - protein, 174 aa, Heterodera glycines
MLLRRHELRKPRFSSSEAAPVNMHKKNIGKSQLSKMSKNNGETVEGDKMPKIGTAASLAAAKHQLAPSAFPSSAFSYALPNFSKSKQQISPIRRQRPIGKSASYDSLIGQSSGQLSSFHQGPTKHGKSSELDGVSKGMRKVPSWDGGLASRLMDEMPKINFSKLKGKNKPLFDS

SEQ ID NO: 136828 - protein, 25 aa, Heterodera glycines
MVQKAFRRRFGRRRFGVHRPQTPAA

SEQ ID NO: 136829 - protein, 77 aa, Heterodera glycines
MPNNEAEMFSENWAISAGKSIWTQFVPKCFTEIITTVEVSTMIPASGYPTVSRPGYPASRLGRSESNWVQKYTLVIM

SEQ ID NO: 136830 - protein, 547 aa, Heterodera glycines
LINYLICKCFLKVAEVFEKNGTSDEYLTEIRMPLNQGIVGHVATTGQMMNVRDVYSHPNFYPKVDERTGFITRNILCFPIKDSSGTLVGVAELCNKIGRDAFTRHDEQIAATFAVYCAFAVYCAISISHCLLYRKLQEAHRRCLLYRKLQEAHRRSHITAELLVQSSTLSPEDILRLTVRDIPSPDSFHSESTFHFVPRSIGGADIYVEASLSMFKSLGFIDRYRIRRRTLARFLLMVQKGYRDVPYHNWSHAFAVAHFCFLLLRMPSVKSSLQELERFALLVACLCHDIDHRGTTNAFQLQSKTPLAQLKTPLAQLYSSEGSVLERHHFAQTVSILGMDECNIFDQLNQKQYQQIMDCIREVILATDIAAHLRKVERIAEMAKVGFDSRSDEHRYLFTCLLMTASDLSDQSKDFRHSKAIAENIYKEFFSQGDLEKEMGNRPIEMMDRERACVPKIQIEFMDTVALPVFSILSDYLITFPLPLRALLHNRRCWMKLDHILQEQGLPLTSGEDNVSKNGEDNVSKNGQTDDDDTLGIPINVWRRLSN

SEQ ID NO: 136831 - protein, 88 aa, Heterodera glycines
SNDLQIHKMGPTDHSDQFFVLINTRLSNRLSIALHTFIIASFPAFLTFLPSTKKDRPPFSVRRRWEGIGADVPDQRPFPGDKRSKKSL

SEQ ID NO: 136832 - protein, 37 aa, Heterodera glycines
MPFPFDDVLLAFEDSTVCVFNLATKSVVDAVRIHLFK

SEQ ID NO: 136833 - protein, 50 aa, Heterodera glycines
MSDSADESADPLDALVFMEQAEENGSDFSDTKEGKGMAEENSSDESEYNE

SEQ ID NO: 136834 - protein, 30 aa, Heterodera glycines
ARGNIKGIFVFSDPENPKNPKLDSFCFYKF

SEQ ID NO: 136835 - protein, 53 aa, Heterodera glycines
MKRHIRALPIVCLMGPGKMLMSNFFLAMLSDAALIWPPNKFSSPKMAIDCVRK

SEQ ID NO: 136836 - protein, 36 aa, Heterodera glycines
MLIGIAAIKAQKKALTGEAIEGISRSMELRNNLTIL

SEQ ID NO: 136837 - protein, 96 aa, Heterodera glycines
MAVSFLHFSSIILCSVLALLLLAMFCEVRAAPAVYQMDRNAFRMSFGKRSQPMETESSELNGANIAIPLLYDMAEAETAAQKQRHRVSAPWATRWK

SEQ ID NO: 136838 - protein, 29 aa, Heterodera glycines
MGSRSKPANTTRVRVSCCSTGSSRSPVPQ

SEQ ID NO: 136839 - protein, 43 aa, Heterodera glycines
MSDRMQMFLQFITKKIQGKATVPKKINNCWAIFCSISSYLTWK

SEQ ID NO: 136840 - protein, 234 aa, Heterodera glycines
MLKTDNGNGLGETEQKQQQMNREGKGQTEEEEEEDGQREEQKKGGKKAKGNWENEKEGKKEEENNKSSNSRRRNSSKRTRKRSKTTPTAEGGGGGKAAQNERDKRRLLGPSLSWDPQQCEQQQRKLSRPRFPLFTTNGTCGTQCATAADLRGRIHSDGSAERLAHTNKKLSIFLTAKIMPTKGGHSEKKPKGKRRKKSGGLTKGANGTAEKIGLELNWSVLLENWHFYLSSAGA

SEQ ID NO: 136841 - protein, 63 aa, Heterodera glycines
SVSFSFLFFKFIRPLNFQNNFCPFLFFKLFIFYFFLLDFGISFGIIFLRDRTAECAVLSPNGA

SEQ ID NO: 136842 - protein, 71 aa, Heterodera glycines
IIFIQKKFFFGFSGRPPYRCAQIYGETESFGNSFPIACTLILRWIFAPHNCLSTPNGHLKNRFFCFRGSPP

SEQ ID NO: 136843 - protein, 57 aa, Heterodera glycines
HTSIIFFNYFFHFITQRSRLIRSSPNFAGKLLRTLQMLINFLRIFCLEEHSSSHLPH

SEQ ID NO: 136844 - protein, 214 aa, Heterodera glycines
FLFQGCVIDLFRIRKSAHQAVEVTAESRLFYHVVSDDRVAMKLLERINQRGLPGEVNFYPLNRVLVKDRRPVSDADASPILDHLQYDPNFEPVFRSIFGNDASPILDHLQYDPNFEPVFRSIFGNCVFVRDLAAGSRVAKQERFDCVTLDGDQVSRRGPMTGGYIDRDQVSRRGPMTGGYIDRKRSKIDLAKKLRNFERERINLEIFLSCSANI

SEQ ID NO: 136845 - protein, 58 aa, Heterodera glycines
MTLKTNAKVFYNNAKNKTEEFVICADEAESEECAGKYWALFDLSGPFSAEHLPNDPKK

SEQ ID NO: 136846 - protein, 38 aa, Heterodera glycines
MTTTQNATALSLLTISVGIGWGANYECRRVTDLPCRYE

SEQ ID NO: 136847 - protein, 113 aa, Heterodera glycines
MSDRLLNRTVSDSTRHSNKPLVPSSTKGIDLCLLFYVYVIVQAGSRRRSAERPVTSLHEAAHAIAIREGDLVAPAVLQMRGLEVNDAQVANLVEQAAMAALELLQQNELALMR

SEQ ID NO: 136848 - protein, 75 aa, Heterodera glycines; identical to SEQ ID NO: 135273

SEQ ID NO: 136849 - protein, 231 aa, Heterodera glycines
MDGQPIWDVLAREIWPIFASNIRHLRFNGDDHLDNLRRRTSPTILTDLNQLDSIDSFDLLPAAFGDDFDGPNSTISAGQILSKWLHSPRKDGQPKRLSCYNYNEQGNTNWVNNFKEHFLRANAISSVSYQIHFSVHRSIPMMPFELVNESTKEKLTLAKAKELGNNWIMKQCKIIGEKEEKQQKNENLDNSCNNVVFWLYICNNCIGPLSPPPAEEAGQNIKKVAFSADNE

SEQ ID NO: 136850 - protein, 68 aa, Heterodera glycines
MCPLMKLRTVPTVHHFRYGQYNTFRLVMIMHPFIRLLSPVTRQNDVLSQHPIIPICLWNFPRRKETIE

SEQ ID NO: 136851 - protein, 116 aa, Heterodera glycines
FMKFAKKLKKEKVSVDFVLFGEATAENNKIIADFVDILNGTEEGGASHLLVVPVGDTKLYDALLRSPICAGAGAAVGAVGEFGINDEDDPELAMALRISLEEQRLRQQQQQGGEGR

SEQ ID NO: 136852 - protein, 475 aa, Heterodera glycines
MNKIDEISLTLTNKNTDLLLITESWTNENEEIPLSPWTRENYNCIFASRKSKSCSRGGGCGDFNFSKRDLVWKEGHPFSKSKFGEIFCHFFSKLSLFNATNGPTRENSWLDLVLSANDQIVKQCNIEGGVFSSDHLAQFFTMSIPKTTQKPKFINIRRFTPSNVSLLNTVISSRISTLSQGHFSVNEKYNAFNKTLLETLNECIPIKRLTKNELAPKYPTHLLASIKEKAKLYKLCKIDPTKRALYDSISLHIKIQTKKFHSQLEQKAISKGKNSIFKYIQKYDVNPFEISNLVSENKCYHNDQEKCELFANLFVNSFNNSEVDPGFLSLDNTFVNQSFISDIEFNIIETQKLLRKLPNKNGTSPDNISYKTLKNCHPSLATVITDLFRISLDSGSLPDIWKESIVFPLFKKGDKFNPENYRPISLTCSLCRVMERILSKNIYNFLLKNNKISEYQFGFVRNRSTTSQLITVVED

SEQ ID NO: 136853 - protein, 199 aa, Heterodera glycines
MDNTAPKKFLTSLDQLQIPPEIDNDSAIPDYAKLLIKQLHSLLATASSLVQSQVTANDAIEEDRRQRTVVITNVPEFQSGKASERGEADRALVNLILDTVDLDQTPVVFRVGMRTPNRARPLKMEFPTRHAARHVLRMKGKALALNALHGARIRESMTKEQLAERRKLIEQCAKKRKEDAGDWIIYANQVILRSDIDTI

SEQ ID NO: 136854 - protein, 338 aa, Heterodera glycines
MALLSPRFDALVDKHFDGKSELTIWRTIEIRRKDKGPEPKLSVRMDRKFMEFPLPDDRPLPSKSRFKSLEIVYIDHSVIAFLRSNHQIFDKRGTNLHLWIPYSNTTDGPRIWDIFGREIWPFFSTNIRHLRFSHRDHLDNLLRRTSSTILTDLNQLTSIYSCGLFPAAFGDDFDGPISAGQALSKWLHTPRKDGQPKRLRCEDYSEQGNTDWVNNFKEHFLRANAISSVSYQIHFSVHVPSMPMVPFELLNEWTKEKLTLAKANELDNRWIMKRFKIIGESAAVQQQKKDDNWDNNCNNVFFGLVAGTNSIGPLSPPPPAEEDEAGQSITKGPSSADK

SEQ ID NO: 136855 - protein, 44 aa, Heterodera glycines
ITIITSQPATEIQSIGRCHPSEHFAVHARGTAKSAAPATGARTA

SEQ ID NO: 136856 - protein, 97 aa, Heterodera glycines
MPMVPFELLNEWTKEKLTLAKANENEWDNSWIMKRCKIIGEKEEKQKKDKNWDNNCNNVFFGLFAGTNSIGPLSPPLEEVEEQTGQSITKGTSSADK

SEQ ID NO: 136857 - protein, 105 aa, Heterodera glycines
MASYWRLKSIEEYELEMSTKSKETRRYVFNCLDDIGQVHLPSDLDDIDRMCERNDRLEFVDILKQMLSMDQDRRLTPTRGLQHKFVKMTHMIEMGRTKYCQVINS

SEQ ID NO: 136858 - protein, 97 aa, Heterodera glycines
MNRRWICNDVWMDIFPCFDRPQLGLKMALLSPRFDALVDKHFDGKSELTIWRTIEIRRKDKGPEPKLSVRMDRKFMEFPLPDRPLPSKIRFKDLRIE

SEQ ID NO: 136859 - protein, 33 aa, Heterodera glycines
MLTIMYAFESCRDAANHHVRDFGLSLMALRRNR

SEQ ID NO: 136860 - protein, 573 aa, Heterodera glycines
PFAFAYLDDMIVVSRSHEEHRKHLNEVFKRIGNFRIKPYKCSFNQKQIKYLGFVIDKNARPDPSKTKAISEMPVPTNVSELRSFLGMINQYQQFVKNMRFLRQPLDELLKQDAAWVWSTDCQNAFDKVIEVLKSDQLLTHYDPEKDIIVSADASDYRIGAVISHRFPDGSLKAIAHASCSLSPAEMNYSQIEKEGLALVFAVQKFHKYLSGRHFVLQTDHKPLLTIFGNKKGIKACTANRLQRWALILLAYDFEIEYQNTADFGQADALSRLIAKAPVPEDEFIVATITESPNLATVNAFTHFPVVHEDIVKATEADKLLQEVKGFVLPMAKQMKSLARQHYWPGIDQVRKCEPCATEAKAPKKTELHSWPKAEGPWKRVHMDYAGSFFGKMYLIIVDAHSKWPEVFEMRSTGSAATIEQLRSLCARFRLPETLVTDNGTQFSSNEFKEFVKENGINHLFSAPFVPRNGESFEVFVNRLKAALRKFRFSELTKRNSNAWFSSRRSHQATPNYASTSSHVSQRRTQRRRKRPNYSTKSLRTIHSKRRRKQKFWRRQSPKSMQFNTAKHRQISTK

SEQ ID NO: 136861 - protein, 50 aa, Heterodera glycines
MGRDYFLKKYLNKTNRVHKPHQASSFFNTKNIKNREVRASPLYNALMKAA

SEQ ID NO: 136862 - protein, 200 aa, Heterodera glycines
EFRVKRHSFYGDPTDALKAIRRQDARIIVGLFYVTEVRPDICSAYLHGLYGRRYVWFMIGWYSDAWFIWFMIGWYSDAWFIPPEEEALNCSRAQMERAAQFHFTTESVMLSRDLQPAISGMTGEQFQTRLRRRISTDPHETGGWPEAPLAYDAVWALALTLNCTALALTLNCTMGSLPFGVNSLEQFTYNSTGIARKMFK

SEQ ID NO: 136863 - protein, 116 aa, Heterodera glycines
EVYAEKLQKDNHAFVGTYRINADDCSHDGSLSVENVLWANTVLASGTAIGLVVYTGRETRSVMTTLPDSKVGLLDREANNFTKIFFLFVLTLSTVMVLMKGHDDAKYLYDDAKYLY

SEQ ID NO: 136864 - protein, 136 aa, Heterodera glycines
MSGKRALATIIKIYIDEKRDKKQKSDQQWSKSKWQRFLQLFLKVVEDENGTNGNLALEFDNKKMKKKRRGKRFADIVFSAVLLILLAFAFSAIFHKLKRQIGKCFGSQQPNANGQNIWAQNGEGWTSGEEQIIRGK

SEQ ID NO: 136865 - protein, 101 aa, Heterodera glycines
QLIHGQLIHGQLIHGQLIHGQLIHGQLIHGQLIYGQLIHGQLIHGQLIHGQLIYGQLIHGQLIHELIYWQLIHGQLIHGNSSTGERTHRKIFRNIIIATNF

SEQ ID NO: 136866 - protein, 19 aa, Heterodera glycines
MDLKLKMQILYCRPLKTPP

SEQ ID NO: 136867 - protein, 262 aa, Heterodera glycines
MCNAVNGSDTRALLMTATSTAFNPAQPHLSMTAAIFIDPGSHRSFISLKAAQLLDLPLVHTEECHLTSFGEREPKRYISDLVKLGFLCTSGEKLIFNLNAMKFLVNDMPMIQLSELDKTELRQQKLNPPHEQRQPDIMLGIDVWHELQVQPIEKLPSGFTLCRSKIGKIFSGSGRIEMHQTPNVTFVMSVHGTEQEEANQSVTFESTKEETEVFTTEDDFKKDEQLNNFFGLNLIGMDDTSTPIDQDYVMIHFKKNLTFINN

SEQ ID NO: 136868 - protein, 112 aa, Heterodera glycines
MEGTALTQFRTVRRGGGTRRQSAEYEDGKETKQKEEGDEHRHQSSSSSANFGRSSDSEQILREFNKEFSGFMRQFVMSRDKKPGEFDERMKAFIRDFNKKMPPEFEVERSAF

SEQ ID NO: 136869 - protein, 58 aa, Heterodera glycines
YWSDIQIPDDHGQFHYICPFCKETLVEAKKFIKLFITTDEQEEAETSAAGKGKSVVHY

SEQ ID NO: 136870 - protein, 41 aa, Heterodera glycines
MSIINVPNVQIRQCLGNCTGYKNSSFEKSGKRILNNAGPSI

SEQ ID NO: 136871 - protein, 90 aa, Heterodera glycines
STSLKEADGSDGAVENVQTKENMRPILEAERHQQNDDGTGEIRSPPSSSPTPWHPSHALAEPTWQKLLRKEFQMKYMTNICCFLEEQAKQ

SEQ ID NO: 136872 - protein, 91 aa, Heterodera glycines
LFEYPKRTLEKIDFFCIRAVPPNRCAQIYGETESFGNSFPIACTLILRWIFAPHNCLSTPNGYLKKSIFLFSGSPPEPMRPDLWGDRILRE

SEQ ID NO: 136873 - protein, 208 aa, Heterodera glycines
GCCSQSLGPDQLHPQLQIGIGPRRPLLLHAGRGSRQNDVLSRPAPPGKHFLGLSAPSKISPMLNGKSGDDQWKAGEGIKQSVCPPQISISQQSPYAKGPDSVTSKASSDMSKDSFHNAAPTGGKEKTRKYTKFYGGREEHDDMITRVTSMEQEKNALETQNSVLRRELERLNFLLQERESRCVCKANQLQVGVSVLDESRSPSVGFMN

SEQ ID NO: 136874 - protein, 44 aa, Heterodera glycines
SVIFSRLIEPVKSFRMISRLFDSVNNFKSYIDSKLAQTELARSV

SEQ ID NO: 136875 - protein, 39 aa, Heterodera glycines
MFKNAEERAKENEAWRANSINDDKHNIIVYSKFDDYLNW

SEQ ID NO: 136876 - protein, 19 aa, Heterodera glycines
EPVNSCIGCKCRRCCTPNS

SEQ ID NO: 136877 - protein, 198 aa, Heterodera glycines
MAKFSQFKLENEALQLDFKSGKSAKQKNKRLKTDGKANGIEFEQKMEKMFRKIIIENAKLANGSSSSAFSSSTFPSSAFPLPISMCTVPIYDAALRVPIYDMSDAIEEELFPKFVNGSADFSTHFAAVPSNKIKKYETHLGLLYAMKTNWRCANAKNKIDNSCTKYRRYIDILYEYLFMMRYGIKSVKADVETLVGPR

SEQ ID NO: 136878 - protein, 134 aa, Heterodera glycines
SEFAALPSEFAVLSSEFAVLSSEFAVLSSEFAVLSSEFAVLSSEFAVLSSEFAVLSSEFAVLSSEFAVLSSEFAVLSSEFAVLSSEFAVLSSEFAVLSSEFAVLSSEFAVLSSEFAVLSSEFAVLSSEFAVLFS

SEQ ID NO: 136879 - protein, 49 aa, Heterodera glycines
PITDSDHTARSLIASMLRLNAALRPTSSMFVHVHLFCVVSIFGMHISAW

SEQ ID NO: 136880 - protein, 438 aa, Heterodera glycines
RAVLGRGCDGTFVYRGQFDGRDVAVKRVQALLSADNNWHRIIDREVTHLRESDSHPNVIRYFCSESDSYFSYIALELCDHTLEDFINHQRGKMERRLKLELLRQATDGIAHLHSIKIVHRDVKPKNILINGVNILINGVAKGPPRVKISDFGLCKTVKLGHNSISKVSGVVGTEGWMAPELWDSTASVTKTYAIDVFTKTYAIDVFSLGCVFYYVLTEGEHPFGDSNVRLYNISMNKFNLSKLDGERHSDHTARSLIASMLRLNAALRPTSSILVTLVTHPIFWEPGKQLQFLLEVSDRIEKLESHDLIMRRLEWRRAVVVGTWLNRIDEPLKIDLLKQLLKQRSYQNNVRDLLRAIRNKKHHYQELSLELRTLLGRLPELSLELRTLLGRLPDEYIAYFTSRFPELLMHAFMALTLWAHENVFLPAFNPFMPPPLPP

SEQ ID NO: 136881 - protein, 24 aa, Heterodera glycines
MEKACKIWRDYIDFSALELLELAS

SEQ ID NO: 136882 - protein, 47 aa, Heterodera glycines
MSAGSVLRTSVLYKIGVDHFLLRLTVFRVQEKRRPLPKHSFSSSIDW

SEQ ID NO: 136883 - protein, 52 aa, Heterodera glycines
QSPFYFTEGFLYLEVIAEKRLSLFLINFIHIQMLSSTIGRAVRNRPFIFEGI

SEQ ID NO: 136884 - protein, 92 aa, Heterodera glycines; identical to SEQ ID NO: 125147

SEQ ID NO: 136885 - protein, 36 aa, Heterodera glycines; identical to SEQ ID NO: 135037

SEQ ID NO: 136886 - protein, 237 aa, Heterodera glycines
MISSTAVPRPLRSSNQQKQQPNALTKQNGAHQQKTPIKAREDSRNRSDALGAQKPNGHSPRTPSVPPVNKRYAHVKRQLITFISIDSLVILQQTGGNVTIENKKLNFREAAKPRVEDKSEVPIPKSEKKVRKWGMASPTKGKECFDRLRLKSWNGKPSPKSVRWTIPQRSPRPVEMILTPKEIPPTDDDEQNDANRGHIGQAEEGGGEKRNGERATEEETPQGTKEAETGQLINFGD

SEQ ID NO: 136887 - protein, 253 aa, Heterodera glycines
MSLNTPTFQSLALNPPTFQSLGLNPTALQSLALNPPTFQSLALNPPTFQSLGLNPPTFQSLGLNPPTFQSLVLNPRALQSLALNPPTFQSLVLNPRALQSLGLNPPTFQSLGLNPPTFQSLALNPPTFQSLALNPPTFQSLVLNPRALQSLALNPPTFQSLGLNPPAFQSLGLNPPAFQSLALNPPTFQSLALNPPTFQSLALNPPTFQSLALNPPAFQSLGLNPPTFQSLALNSPAFQSLGLNPPTFQSLGL

SEQ ID NO: 136888 - protein, 182 aa, Heterodera glycines
ASIRSKQMSTFPIRRINLSFSESGRGNCLRDPAESIASHDHLKDGRLPGQRFTADFTADQQCSYFWGRDFQVEIPNGRSFEDICRILWCGNSGSTISTAHDICRILWCGNSGSTISTAHPALEGSWCGPQRWCHRGQCEEWWCHRGQCEEWHPQMGDFPTEVDGICSDTSAEKQCPITQRQI

SEQ ID NO: 136889 - protein, 136 aa, Heterodera glycines
MIFENERAWDVVDRWLNAHYFSLEYGNTRGELEKIEQMLLIAKGAIVEDAYFDIHKILSVPQFFDAPQRVESDEDILKSKYLLNSFNPFKRGVYSREGSIRGWGSIPGSAAKSQNMDFCGVISHRNRTAEEINTNT

SEQ ID NO: 136890 - protein, 27 aa, Heterodera glycines
MHATQLTNLVGSYYHYYFNSLFVNEDC

SEQ ID NO: 136891 - protein, 129 aa, Heterodera glycines
MVLPLTAALSKLLNCKPENLAEYLNNPEAVNKANAYLAGKKLKTTYQGRDSKTKEVKFGTFSVKAAAETYAFEGFLGKFPKILFRSNTMRSDVKVQQYFYMKHRIRLLYPQLKCIVEYHNKGHCKYYPL

SEQ ID NO: 136892 - protein, 633 aa, Heterodera glycines
ENLEDWSITGKRRTQKALFHYTDRRAGKGYSDFATTLYYGRPYIWPPTTLYYGRPYIWPPVREINRWHFFICVTFALVILVDCKWAELVVFRTSPFKPKMRQKEAAVTRRPIAVPLGKHKKKRKVGFREQRVVQYENRIRAYSSPDKIFRYFATIKAVVQYENRIRAYSSPDKIFRYFATIKALPTNYEDGSFDIFMTPEDFVRSLTPGVLPTNYEDGSFDIFMTPEDFVRSLTPGVIQPRKYGLDKYKVYNVEEVKEHLPVKEHLPSGDGVFNWMSDSGGLINFGDYLFLMTLLSTSPSEFKLAFHVFDSPSEFKLAFHVFDQNGDGVLDQQEFARVQELVLSQSNIGQRHRDHKTGAGAFVKTKNSMLSKHFFGENGQNMLSKHFFGENGQNKLDIGTFLQFQQNFHGDILKIEFERRQNFHGDILKIEFERRDPETGPEGIISELSFAELLMILSFAELLMIHSDLPEKRQKRMLKRVRRRQKELADKGGVSFEEVDSFFAFIYHIDKVDLALHFYKLAGKPLSKQLLQRVARRVARKVTGVDLSETVVDVVVTLFDENADGELSQGEFVAIMKKRMQDGELSQGEFVAIMKKRMQRGLERPKDTGLFRLMDAYWQCATRFARDDGQSWG

SEQ ID NO: 136893 - protein, 202 aa, Heterodera glycines
VQVEIQFSAKKAPIMVLGGRARFRLHGKMDFVRPENATQRRELFVRPENATQRRELVLRSETTMTSNVNLWIERSQILGNRSQILGNATVENLDFKLVSTNVRDVDQSSFADLGLFGAEFLEKLLTEILQIGLLLPSMRGVVLRSPKLTVHDRYIRVQTYFKLDELTVHDRYIRVQTYFKLDEQYAEKLVQGAVRQTLLNIG

SEQ ID NO: 136894 - protein, 461 aa, Heterodera glycines
MPTGLAYLREIGMKVVNDEILKISLPTITESIDAGQLPTITESIDAGQVSIFNAYVSKYWPPVEYTVSIFNAYVSKYWPPVEYTLDLLTPDTFTWRMSKMHLRSNGNSNGNFDARLNGALLLPTVPIQGEFEALEFEALLGHLGLTISVRMLRSAIGAPQVQMIFCRAAVGYVDLSVRNSGVITDFFINVFKAFLIAHFKVFKAFLIAHFKPTVEQRICQMIPTVEQRICQMIEGVINGDMNAVLATMPLKVVRINEDNLDLIGRNFGISPDQSKNSGSKKLQAPRNFTLLNFVSKKLQAPRNFTLLNFVSQLRDRNLVLDFSLIDDPFVSQGTVLMKSHGEISYDGLGETPFAPPNVIIPQAQGVFMAEFFGVFMAEFFGTDFVANSMLYHAFKQKYMDVVVGPESSPQLKDVSSPQLKDVLLTTCSSGFCIGEYLGSLGQQFPGRQEAVCSLELFLNLR

SEQ ID NO: 136895 - protein, 39 aa, Heterodera glycines
MAENIFDQFIVIDEKAFTDFISEMDEMDCYRHYNNSCAD

SEQ ID NO: 136896 - protein, 126 aa, Heterodera glycines
KNRFIFVFGAVPPNRCAQIYGETESFGSSFPIACTLILRWIFAPHNCLSTPNGHLKKSIFFVFGAVPPNRCAQIYGETESFGSSFPIAWTLILRWIFAPHNCLSTPNGHLKKSIFLFHKYFFQKVL

SEQ ID NO: 136897 - protein, 62 aa, Heterodera glycines
MFLCLFLLIAISIIPTTNGYKMLVYSPSVSNSHLISNARVADVLANDGHDVTLLESRMMAPL

SEQ ID NO: 136898 - protein, 50 aa, Heterodera glycines
VRLYACCGLLLCPAYPQHFAHGYVDKIPGYPGRAGTLTGLHPMQVCRCRR

SEQ ID NO: 136899 - protein, 240 aa, Heterodera glycines
MGETSAGQEEKPSSELDDMQKYLEQLPRTIEQVPETPREMDGMPKDPKQMPRELNEKVAQTPRDAYDIQQYLDQLPRTIEDVPETPREMDGMPETLKETGETPKDPKQMPIDLDNAQQELNQLAIENAPETRRELDGMTRAETMGMLGIMPKELPKKPKKTRKMSLPEQLAIPPKDLEGMQSEHVDTPRPDQKYIPDMEFMKYRIPYGTETPKVDDNKQEEKAEKVEEKEEMEEMAEKHK

SEQ ID NO: 136900 - protein, 379 aa, Heterodera glycines
MENYKLIDEWSTICEKFGFTKNITEFRINSDVRRPDEAMRDAIDTMIKAAFKTTEERMKRKVRMFGVAITGAGLASPVWVPYRAYPQNNADVIMQEINKLGQSGDGDENKKTLLLSEPIMMKITCVTLPSGDGPRNVHKFDFGFKEHQRIRISNVDKFCLFYALASSMNYLIMDRFAFNRFMNNIMRQRDAATELLRNCGIDINEYSYGVEHLSRVQNYLDEIYPGKYRVVAFEKSADPRKSIRVLWKGPMGRENVVPIFLENGHWDGLKKYVCFFNRGRKFCVECECFYDQDVYHTMDCRARCYYCNRAGGMPCQKESGVKIECPKCRRYFYNWECYTYHQGHQTCKLWRRCVICDKTYRFNPKKDHECGETYCQLCS

SEQ ID NO: 136901 - protein, 124 aa, Heterodera glycines
MHTFTGCTRRFALVSSAGCGGKLSSEQFNMTRYPASAHQSATGGAEPVEAVPLPTPAVVATIRGRQHVHGPGGWASLTSRPFGTCHWQPQQLFGAIARRQPDGGCTVGERRVQLPAARPGPDGP

SEQ ID NO: 136902 - protein, 70 aa, Heterodera glycines
MFARTYHEELTNRFGGDYSHSVLLNKTGVCSFAIRLLQFRKQMDKLKTVQAKDLIFSVGYFFGNSNIFFL

SEQ ID NO: 136903 - protein, 78 aa, Heterodera glycines
MLLYHWQLQQVEAVRRLLLSAGWCLRSSSVAVGGGQCVRPFATRGGGQKRVSDDEWKTEREQYQKYEQHNQQQQQQPR

SEQ ID NO: 136904 - protein, 66 aa, Heterodera glycines
ILLYQLQCSETIGNYNKLKQFGDSFLVEASVLLPGHGLEHLQQAAKSVKEFADQLHPLCKLSYVDY

SEQ ID NO: 136905 - protein, 50 aa, Heterodera glycines
MGKRKANQTKRTQFLGFTYLSFYGYMEIATIFPFWLFGPILCFEAFPQKS

SEQ ID NO: 136906 - protein, 32 aa, Heterodera glycines
MARLFHAHRLYEWRLSQRGTAHALFSERKGIA

SEQ ID NO: 136907 - protein, 19 aa, Heterodera glycines
EDQVGSAGQNFRDRNLFDL

SEQ ID NO: 136908 - protein, 155 aa, Heterodera glycines
MDHPFVVQLPNCFFEGRVPTRAARNCGLRIADYGNCGLFGPPVKAKQLLNVTPSPSALETRQKAEVEVNEYLLDPKIKSRADPSLYWEVNSQKWPMIGDVVRKFLSPPATSSESERLFSTAGLISDDLRKSLLPENLAKLLFLHHNLLLTGFSIE

SEQ ID NO: 136909 - protein, 148 aa, Heterodera glycines
STDYKNTLFVGGSGILNGACDVNNDKLKYLMTLKNGVTIKNAILDTPGLGIYCEGNCVLENIYYKRLCYHATGFGYKSTSTSYTYQVIGGAGQGSPDKANTANCGVHAGIVRSKRLVPYKFPTPSLRGPDFRLSRLIPTTVTKCHFRD

SEQ ID NO: 136910 - protein, 42 aa, Heterodera glycines
AISLFTPLNTPSKWAPGHPRHVAVCQRQLRFGPGRHKVAGSP

SEQ ID NO: 136911 - protein, 44 aa, Heterodera glycines
MGLDVEHWAQCELLKKAEKVCRRVPNSIHFRGLLMKKYGFTKKI

SEQ ID NO: 136912 - protein, 152 aa, Heterodera glycines
MIKKTKEDDNCKKLLCALHCRYNCFGYLKKIVVLFERVCLKYEQRKLEPSFLFELCVESVLPTKNQQQILSSLSLRQLCLLNCLVKLESSGYKQRIDFTYQEIAKGYIKFTNDYEKSMRVCSFVLYRDLDELAASGALSLAKGSDFGQIQFK

SEQ ID NO: 136913 - protein, 18 aa, Heterodera glycines
YREAILEGFGLPINLGAS

SEQ ID NO: 136914 - protein, 19 aa, Heterodera glycines
MGDRIPPANGADKEPVTSR

SEQ ID NO: 136915 - protein, 60 aa, Heterodera glycines
REGFLRALNESGLLLEEPEAIPHTHLNDPNLVWETFPIQHNRADKLDELDLSLEPGKGVC

SEQ ID NO: 136916 - protein, 88 aa, Heterodera glycines; identical to SEQ ID NO: 133373

SEQ ID NO: 136917 - protein, 88 aa, Heterodera glycines; identical to SEQ ID NO: 133373

SEQ ID NO: 136918 - protein, 114 aa, Heterodera glycines
MPFRGPLATNGTELTQQRNHHQQQHQMFMQAIRCPQHQQQHNQQCPPIYSPVQMNEANNENGRETNGNEMRNADGMDRATQRQSDDELLELLRLRRQPTDGDGERRGGGTDGGP

SEQ ID NO: 136919 - protein, 207 aa, Heterodera glycines
MSKEFRRFDDVQLRLRSFDERMSKVGTLDVPPAQIVSSTVRPISAKSTNGDSAVLVPSTTMAPPFVSSTAATSVERHSAESSEEEETDKRHRKGKTPLRGNGGLSISAVWEGVKRMMGFTADCHNVDVFSLSLPGGRLLNDGTCHCVDGWYTGQFCQFYTSSWLIAFGIPLLVIAAIVFCCVICRLDLCALRRPSPPPSSRHNRSSS

SEQ ID NO: 136920 - protein, 156 aa, Heterodera glycines
MKRQKSLAHRRRSQKVSVSTVLQKPLKLPVKQVVIPSSVKKETKIQSLPKETTKSQKPKKESQTQPKSQKKSQKEHQQPQKKSQSPQKESQTPHPPPMEGPSVSALVPNTADCKRRVNFGNVEVFRFEFAQGHDTVPAKGGVSLGIFTFYWILLNN

SEQ ID NO: 136921 - protein, 289 aa, Heterodera glycines
MLHNTVIEVIYRVCKEMAIRQHKDLLFGGKTVIFSGDFKQSLPVVPHEGLTAQVTACFQTSPLFGQFTTMKLTINQRLGKGQQAYLQMCRQIGLGETGEHFWIPRQFLVKSKEELIDYVYPNFQQLLGNDKELLNRLILAPHIDTCDEVNDIMMANVPGHMREYLSTDKPLDDRPLDIDEIESEVAALNRRTDSGMPPHSLRLKVGCVVVLLINKSDKEGLINGTRIVLEELGDDRLIGRVINSNAIGGQVKFFLERTRNVYEDKSPGGIKYERLQFPIKPAFAMTIQK

SEQ ID NO: 136922 - protein, 266 aa, Heterodera glycines
HQHFNHWGLNPPAFQSLGLNPPAFQSLGLNPPAFQSLGLNPPAFQSLGTQPTSISITGELNSPAFQSLGLNPPAFQSLGLKPPAFQSLGLNPPAFQSLGLNPPAFQSLGLNPTAFQSLGLNPPAFQSLGLNPPAFQSLGLKPPAFQSLGLNPPAFQSLGLNPPAFQSLGLNPTAFQSLGLNPPAFQSLGLNPPAFQSLGLNPPAFQSLGLNPPAFQSLGLNPPAFQSLGLKPPAFQSLGLNPPAFQSLGLNPPAFQSLGLNPPAFQ

SEQ ID NO: 136923 - protein, 112 aa, Heterodera glycines
MYKKEYRLAEIDRQIQLIIDAKAKIQEEEEEEQIKERRAYSEKIKRERKRKEKEQMEAKSEAKRKEAEEKAKENAKAEKEEWKRALRRPAATPEEKARKEAENEARKEAEEA

SEQ ID NO: 136924 - protein, 168 aa, Heterodera glycines
VFLTNILFLKSHYSLSLQAISSLVKAAYQVAVDSGVASVDEKGTPQTFILSTVYPNMVQELIKTSDRTDSNATDSNANNLRISAYEALMELIKNSPADCYPVVQQTTMVILGKLESLLSIEDALVSSNERSQLRDLQSQLCATLQSVLHKIKAEVMPPIVHLIGLESL

SEQ ID NO: 136925 - protein, 16 aa, Heterodera glycines
EAIPEGFGLPINLGAS

SEQ ID NO: 136926 - protein, 54 aa, Heterodera glycines
LSHQNADDDEQQQKVTLGVERFALPELLIRPGDVEVQQMGIPEALCAAIERLPK

SEQ ID NO: 136927 - protein, 636 aa, Heterodera glycines
ILDFLGTRVRLKGFESYKGGLDTRGDTTGLYSIYTEHHSAQIMFHVTIIFQEPDALPFSPITVRSHFQHVFIVIRACNPLTEGVTYRVAVSRAKDVPTFGPPIPASATFQVVPTNKTNKVSHSYAFKFSQKSAEFHDFLITKIINAENAVHRSRKFASMAARTRREALKDLVENYAGTAHSNEGASRIASRLLGGSVKRKERVVPRPVLDAAVRAALSCVKIFFDHGDLLLLWCASPDGSERELGLLLKRLASVTNGEEAKEVILHKNKALGESFGFHVQEEGIVTDVDMNKLTMIAPASDGNPRRGCEDPNCPAVRGLECQQLLSPDSFARQPLAYQQMFALRDQQRRVGSKLSSNLSGDSWGNSTPSPTSLTAVTERKKYSAMRPLTPSKHGAAPIGHSTRHSRGRVNNSHRWDCLNQLAIPFYSSPQNQSACSSASTFSRARSDDVATKPPAPSASAKVSVSNLAMSLEESLLSSNSAPFVQSTSFCDGIALPSTTKTAATLFAETNSGREQQQRRRVSTDGELSRYQWCLQKVVAEKRELEAELEHCRNQLVAVSPPKTVDDHQITLPNSGTACPREHEAATPHAHGVLRTLLNCPTSVRGGGRGIVIKKKACPSPGPSNLLTFVLPCTIFY

SEQ ID NO: 136928 - protein, 46 aa, Heterodera glycines
MGGRGEHGQPGGYGEEDERVGGQTEHGRCTLAGGMVKHVDLPKGGR

SEQ ID NO: 136929 - protein, 302 aa, Heterodera glycines
HKCFTKAVKEAANEPKKRTKSAEFGGSESQKRSEGSGNIAGHWPSFGHPNSKQMIPPVAVPSADVEHSKIAQTTNAKSNVCAELAIDVTAADAPQQHRNLPPLPPHPPPPSSASANSSAAVVSSSNLLQCSLSQPTIHDSVVVGGAFASSISSGNGGQLAHSEWHPTSAHLCAYHDCRSLAYAWGLGTSTSSLETTRPTGASQAQSPSEDDPGDGKCNDLLANCPAFRNELGEEPIRRIALSRQTFPTTSSGQCQQHNVKQQHHTNGRRRTPPEELAETWHREHMAAEVPAEDRSIVMYVSF

SEQ ID NO: 136930 - protein, 439 aa, Heterodera glycines
ILDVKDSDYELVIKIEELFEEYNLFDRAIVCSFFPWIIYWIKRRNSHILTGFTFRRRNISYTDLKMTIPRFSSPFYHCSAVALDALYRWSIKVCLPHFLGVDMLLIERPDATNVNNWHWVEKNATPWSRERLRVLLLGQTLEKGPVRIEFSDFKKLEGEATANNRKAKLIFFFEWSIDVNFIATVSGSETEYKGSVEILNLSDENEAHEIEISVHIETAGPHENEIRHILSTDGLSFVRSKVGTYVRELKEEFSKGIILPVDSKGAIRPQAVATQGKTVVDKKRFQNDIIQKTEEKVTTAETQNALKTGGFELTETFKVPPERLFEILTASELVSVWSPNSSIDAREGGQFSLLGGVMSGHFTKLANAALISMAWRLKSYPSGHFADVTFTLKDKGDSTDLELKADQVPEQLIEDTKTGFSRYYFQNIGKKFGISLNLF

SEQ ID NO: 136931 - protein, 138 aa, Heterodera glycines
GEVKIDDHKVVPPNRAEMKDSMESLIHHFKFFTEGYQVPPGAVYVPTEAPKGEFGVYLVADGTSKPYRCYIRAPGFAHLSKIHDISYMFAHLSKIHDISYMHLIPDIVAIIGTLDLVFGEVIVAIIGTLDLVFGEVDR

SEQ ID NO: 136932 - protein, 76 aa, Heterodera glycines
MALGELRKYVNHLELFADDRQKIFFKIDIDISSVPESTPEARPALRGWFVLPLILLALVQFMRPMDFYASNQLTIP

SEQ ID NO: 136933 - protein, 23 aa, Heterodera glycines
IKLLTKFVNRSDKMKWTYKEENS

SEQ ID NO: 136934 - protein, 270 aa, Heterodera glycines
SKNIAILPRRDSDLEAFSHNPSDGSFAPLVYRPSTTKCLNLRFLSYAGLLLATGLGKTNLSHDGLNPAHVPYWWVNPTLGEFCFAMIGRADIEGKSDVAMDAWPPQASYPCGNFSDTSCWKLYTLKDRATLSRSVFVLKIRIKAFAFLLYERFPSSLSALGHLRYALTDVPPQSNSPPDTVIGAGRRARVARLNTKMDTRRTPVLPIKGIDESSGISLAPCGSHLCYTSHDSSQSQTRVKLNRVFFPAKFAKPVPLAVVSLDSRGQWESR

SEQ ID NO: 136935 - protein, 77 aa, Heterodera glycines
MGFSGRVWTTHHQIKAIFQYSNLSHKTRVERYRYRYRPHLFICISGQVAKASYFIISRLGSIPHWDRIFFIFSLPLF

SEQ ID NO: 136936 - protein, 83 aa, Heterodera glycines
MIASTLEQFNSLDDQELDRRILNAGLPIGLGEEQTAKGETSQEEMEILYQQLMGEEKKKFTELADGIFHDELANQMNCFVKKK

SEQ ID NO: 136937 - protein, 23 aa, Heterodera glycines
HSQTSEYDGRGRGMYSFHQQDVK

SEQ ID NO: 136938 - protein, 224 aa, Heterodera glycines
MQWILTIIWRMMSKCRRIWTLTINNRRPGPQQQKRESNARHKQRKPQPKPTGTSMLLGTVHFARPISSYNVVLHSCGNNWLSILSGGGPMHVTEFLPQSPRRDNIFMALELLAKLQSFAVADLLSADQIADFRATADQFRVHMLEHLRRHCSTSKFHHLVHHAPEFAENHGFWCLLSEQPVEKFHALFNDDLARKANTKDLHDILMFCARESAIRNAIFDSNEL

SEQ ID NO: 136939 - protein, 81 aa, Heterodera glycines
MSRNIAHSATLNNGVFLSRDIEQLRMSMSSVEDEGSDGRADEMAKLQKWLCDGARLTPALRCHDGRLPAAADTRQDSPPRH

SEQ ID NO: 136940 - protein, 135 aa, Heterodera glycines
KFHCSFRELDDGIAEAVSSLLWVAPRIGHEIAEFKVINDELTHKYGKQFAEAARMNQLPEPSRVSPKLVQKLSVSAPSKLLVEKYLVTIAQSAGVDFAPDAKVMREDDDEIARAERNLINFMNGVMPWGGDGPLN

SEQ ID NO: 136941 - protein, 163 aa, Heterodera glycines
MKFAKKMLMIPEAEYLALRSAMNSGDYLQNEKASLDAKISQNLQDPGISEYLKAKRHDWLYKERRTVKGILENRPQKVVIENHVPGPNVAPYLGLNNQSKPQETEEPRKIIIPRKRLKERTPDPESNNDTLEELTPEPQTTSTHKTPVPIKTIIHPTLLNGLF

SEQ ID NO: 136942 - protein, 116 aa, Heterodera glycines
MSGCTNAHNMGCDIHTNPMTELSICDEPASDESVNSKFSNRLMKSSEFSTFGFDLGDFLQAMMTLLHSILTSSYPDPAGFSLDSVPSITISTPTLVYPSRFEATFELSMLNASNDS

SEQ ID NO: 136943 - protein, 411 aa, Heterodera glycines
GTQPADSSSQASASDMENQQQIMRQLPEESKREIQKQIDVFKITQRKFEYEVGKWDETGNDIIALAKKMCQIMMNMTDFTKGRGPYKTTMDVIKAAQEISENGGKLNELARQIGNESVESNTKKDLCAYLERVTLFCHQLNVTSKVLNRTISFATHPLLVQVKADIQVVGDELRVSGLEAATSLIQNAKNLLNAVILTVKSAYIASTKYRRKENTNPNVVEWRMVAPQKQPLVSASATKAHGVIRRASIYNLLGMLSSFPLLLSLVGLIAVHAEVFFKEEFSDDSWTDRWVTSKSKDDSGKFDLSAGKLFGDKVRDQDAMGNQRRAFTKQGWPQKFDDIKLSPFLPKRAQIPEIEGCLAYGERIIIPSSLRNNILKSLRFAHPGIVRMKAIARNHVYLPGIDSEIERVVKQ

SEQ ID NO: 136944 - protein, 223 aa, Heterodera glycines
MPSSCCVPMPISAKERFPANEIGKEKSVEAVKDPFEKESKASRDEPFLSSKYATAPGGSAVLPPVIYPTSAALRQSFVPQQQSPSAYNFQPPFQQQQFQQPQQQQDRFPFPSQSYGQCQCPQIQSSRPFATPQMPVQNCCIGRSQRQCRLGMERKKVFGLRTLLDKGTEKGKRDGEKGKCDAKLGKIMEEVINGGRRHGNQLRRPNEINPFRIRTWKWQRQKK

SEQ ID NO: 136945 - protein, 94 aa, Heterodera glycines
IIFIQKIFFWVFGAVPLNRCAQIYGETESFRNSFTIACTLILRWIFAPHNCLSTPNGHLKKSIYFCFRGSPPEPMRPDLWGDSNPSGIASSIAL

SEQ ID NO: 136946 - protein, 109 aa, Heterodera glycines
MQLEFVALLARRLNISSDGTHLAVIQFAESAQLEITLNQYACESQLEWAIQRIRYLGGATNTGKALNFALENGYQNARGGIVPKVAIVVTDGQSQDEVEETGHIFLFFI

SEQ ID NO: 136947 - protein, 149 aa, Heterodera glycines
MEEAKSNFNILWTNVRLRLIMAKSTKEIVDKYTQKENNEMEKRKGLLPPLSVPKCPSPQLTLGKWTLWGYECGDFPVHINAKEQCPFCLVLCKFRILFKNAVFEGKDRWENYLRKGQSFVGNSHALPTENELGDLLPSKLATEICEFRC

SEQ ID NO: 136948 - protein, 79 aa, Heterodera glycines
MLVISGWQTLVQGRQDGEESVWSTDRCPPPRSGSSQATRDQPATLGTIISTINSEQAMRLPLEFGTGSPAPSTLTWPTT

SEQ ID NO: 136949 - protein, 44 aa, Heterodera glycines
CNFIKNGKNLNLIGNVPPLRRSIQKIFVCLHSILIHFSHKNVLI

SEQ ID NO: 136950 - protein, 26 aa, Heterodera glycines
REKKIMFFSGTLYLLVHISFFETVCL

SEQ ID NO: 136951 - protein, 177 aa, Heterodera glycines
MEEEQKEKAEEEQKGEQKVEEKWKRKWKRKWKRNGRGTERESGRGTERGTESGREMEEEQKEKAEEEQKGEEEVEEEQKGEQEEEQKEEEKWKRKWKRKWKRKWKRNGRGTERESGRGTERGTESGREMEEKVEEKWKRNRKRKRKRNRKGNRKWKRNGRGTERESGRGTERGTEEG

SEQ ID NO: 136952 - protein, 77 aa, Heterodera glycines
VASVCDGFASPCGPTTDQNGKKRMIKTHKIHSSAIYYFRPYFCTENEGVENLLVFSEKFKSKKLRQNAVPSVPNSSA

SEQ ID NO: 136953 - protein, 137 aa, Heterodera glycines
FFITPRASSIGTSNKANKVRSKSTPRRRPRFKVIGNGNCAQSRQMIIDAGQKKIGLEQCIKCGMVYSLNDPKDVEQHAKFHHRFTETRSFQVSISQLSAWKEVLFTEHVEIPIGGCLFLVDAFSTSTLRRKMESVIS

SEQ ID NO: 136954 - protein, 26 aa, Heterodera glycines
GDHSQRNVPGTNSVISMPGLTGSHKH

SEQ ID NO: 136955 - protein, 33 aa, Heterodera glycines
MKKSKLPALLKQLFSCPNKTNMQIPRIPSPELY

SEQ ID NO: 136956 - protein, 169 aa, Heterodera glycines
MSGIQTLVCVQQRELDQALDQALDQALDQALDQALDQALDQELDQALDQELDRCDLITCPAGRTCGILIGFARLGTGPFEPFLYPKCVSNPLELTRNTEQNGNEKILTNGPGCNCGTTQCAAGFQCQVRSSIVRLGNRPFAQIIGGFPQCVGNYSIYQNPFTIVPYGPG

SEQ ID NO: 136957 - protein, 79 aa, Heterodera glycines
CNCGTTQCAAGFQCQVRSSIVKLGNRPFAQIIGGFPQCVGNYSIYQNPFTIVPYGPGCAEIPACLEGITCVTAVGIAKY

SEQ ID NO: 136958 - protein, 85 aa, Heterodera glycines
MKSKLSSILHNHPDKEGTLSKKEVFSNEFQPPFKIGNLSDAKNVEKLEKKGFIVDILPKSDGNRAGVMNELKNMKLKPTKQISIF

SEQ ID NO: 136959 - protein, 118 aa, Heterodera glycines
LDQKNQSVRGNKRQNQNCFEVRQFKDINGSYIIRLVNPSGGWCDGADTLHKAQRAKAQGMAIMIDFHYSDSWADPGQQNIPAAWKSHSLAQLNTDVYEHTYGILNYLKSNGISVAWVQ

SEQ ID NO: 136960 - protein, 95 aa, Heterodera glycines; identical to SEQ ID NO: 130684

SEQ ID NO: 136961 - protein, 82 aa, Heterodera glycines
MSMSKSSYTYNRKTFEDANVDRALEQTDGTVPYGELAKLTDAGTNEMLRKLARNQPYYNRNLPHICSFFVKGECTRGEECPY

SEQ ID NO: 136962 - protein, 128 aa, Heterodera glycines
MSSQQRQAERAQLRARLNLLVDDVDFVVQGLINNYQADGLINAAPDDGQLMVMDHGQGLQHEQQQQPWELDPPLPEQHLEIDPQLPDAWELVPYQPTPQWDQVVHVEQQPQQQQHYHHQQQQQQQGVG

SEQ ID NO: 136963 - protein, 231 aa, Heterodera glycines
MAEAAIRQLSDVFQQFLTAQQANVAAPAQPIPMQIWQISTVLVLVTMAKATSRDDLKVKLLLTKLSETAYAEYSKHCLLKKPTEFDFAKTSEMLKSLFAKQKSVWINRYECLKAEKQDEEEFRGFINRHKRLLSDFEFKKLNEEQFNCLMLLVALKSPKDAELRKRILSKLAADGDRATYENVVNDLQMFLSTISEAKAMERPSNSNILAVKRRQQPKKDNFGEKGKKQQS

SEQ ID NO: 136964 - protein, 226 aa, Heterodera glycines
MDGTAQPSSFIVEEEMLESVADEMAGKEGHVEFTGETSGKEEVQQQHLVLLKSPEPAEGGGGSSATMATSRQIGTNEAFDRPADAALLFEDIDDKDVTYAPEIQSLEVPPDQLSQADSLNLVDEEQFSEEHQRVIVTDGEDEVPPKEAEKQRERHEPEKLEEQEAGEAPQRELTPHEEENLQRIIDRLRRTPSPRPHRMDQAQVPQAPQFLRSYFNDESTSSLSST

SEQ ID NO: 136965 - protein, 150 aa, Heterodera glycines
VRTAFLFGKNNVLAFSGDREAPGYLSLHHDQNRMLILKWIPNSLLLSKPGGSTTNAVKSPSHSSHCVPVSIKFETVSHLHLHKNEGTLSSSIVLIDSDGVQQFCFSFSLEQHCFSFLKTLEGALFPLFKIDPPLNSIKIECGATGRPLMG

SEQ ID NO: 136966 - protein, 111 aa, Heterodera glycines
AMQFKKYAKPAEIVRFVENGMTALVLDYRENQTETIEYKSTHGTIKVVHISRRDIMPGSLLHSLFKALDISVRPLLENISHVDLVALLGDPNDITDEKGTKTTILMEALTT

SEQ ID NO: 136967 - protein, 146 aa, Heterodera glycines
IFSLGCCPNDEWVAVGMENNNVEVLHMNRQDKYVLDDHQSCVVLHMNRQDKYVLDDHQSCVLSLKFANSGKWFVSTGKDYVVNCWRTWFVSTGKDYVVNCWRTPYGYRLLKSKENSSVLSCDISHDDRFLVTGSGDKKASLYELSF

SEQ ID NO: 136968 - protein, 250 aa, Heterodera glycines
AIGRLLPLAFSSALNSLTISQCQLNKAIGKVVERACEAIDGLREVRSDDAIPPFEIDILRKHAQFWFLDSFLSDLLSVHSSIVSRQGDPGPVLQLFRLLLNDRQLQEIEENPDGYFEFTALCELPIKVKWNDFSFRCHQIFLKLSVGKGRPKVKTLAVSVLGSLLQLNKQSQMYRRVLRLLISLLDSPYASLREQAAEQLFEFFSCESDDSEHGTEMALKLLTETDWGRGREGLGENRRRISAILLANAR

SEQ ID NO: 136969 - protein, 103 aa, Heterodera glycines
MTGGAVPPKPCRGPTIPMAQTRKPLDSNWTTFAHRRTNPPATNTTKAVPQAKTIRNLTYLRICISSRLSLDCWPVVKCAIWPITVWAATRITAKNGKRKITEF

SEQ ID NO: 136970 - protein, 258 aa, Heterodera glycines
GNRVPADCRILHILHCSELKLESSSITGESEPIEYQAEEVAESVSVFEARNVAFNGSLCVEGDAIAIVIRVAAQTVIIRVAAQTVIGQIAHLTTGQQSNESRLEMQIRKYVKFLIVLACGTAFVVFVAGGFVRRWANVVQLLSNGFLVCAIGMVPCGLPATVTSVPCGLPATVTSILTVIARRLASRNVYVKRLDICEALGQVAIIASDKTGTLTKNEMHVTALWHCNKFISGQIEGEGVRSIRELENGKKKYELRNS

SEQ ID NO: 136971 - protein, 231 aa, Heterodera glycines
MYKFVHCLFMEMYKFVHCLFMEMYKFVHCLFMEMYKFVHCLFMEMYKFVHCLFMEMYKFVHCLFMEMYKFVHCLFMEINVQIRPLSIYGNVQIRPLSIYRNVQIRPLSIYGNVQIRPLSIYGNVQIRPLSIYGNVQIRPLSIYGNVQIRPLSIYGNVQIRPLSIYGNVQIRPLSIYGNVQIRPLSIYGNVQIRPLSIYGNVQIRPLSIYINVQIRPLSIHTVRKNEMCTNK

SEQ ID NO: 136972 - protein, 140 aa, Heterodera glycines
MSGGWQLEQLLSAFQIISAQRGGTNENGIFPFQIIRIDAQTKKHFWDEIKANSAREPQFIENFNFLLKLGEFTLSYYEVYKVLEAILMRWSNTEKSSADNNGEQPPELYTFMEQYFNSKLNSQILQKKDKKQIGSSSKRR

SEQ ID NO: 136973 - protein, 22 aa, Heterodera glycines
MVEDKSLVGTVKYDGAKQCFYD

SEQ ID NO: 136974 - protein, 127 aa, Heterodera glycines
MSEKKIIADIKKMAKMGQMFIMMRANIQAVSLKVQTLKSQDSMAQVLPLGLKIGMIRLINFKAMKGVTRAMRSMNKQLNLPQIQKIMNEFEKQSEIMDMKEEMMDDAIDEAMGDADEEEETDKVVQQ

SEQ ID NO: 136975 - protein, 82 aa, Heterodera glycines
MELEEGEYVEEEELFTRNQRQKNKFQLNREHLNSSVLKRRREEDDYETVSMELESDPGSNEESEEANNERTRLRNAKRNGGK

SEQ ID NO: 136976 - protein, 163 aa, Heterodera glycines
MVVMKKLNYLLTYLQIRLTILRLTQAAINWGNTFANQCFISDIDFNIIETQKLLKKLPNKNGTSPDDISYKTLKNCHSSLATVITDLFRISLDSGSLPDIWKESIVMERILSQNIYNFLLKNNKISEYQFGFVRNRSTTSQLIAVVEDWYEAIIKWKKCDRSC

SEQ ID NO: 136977 - protein, 111 aa, Heterodera glycines
MPIVKPWFLPYVSTRTISNATKLIEVVRIFNHISMELSERLTNKYYFYQLNLLNEDKLSNYKANFGNLNAIRKRFDEKLKIMFKNEREIEEGYTNDSNYLQSSPFYDKIIK

SEQ ID NO: 136978 - protein, 105 aa, Heterodera glycines
MFRSHSHSVLLNILLNYTSSIEAKIAYSLDCRKPFLWHSVFPQKILPNSTLDGHHFPFRYRFPSVPCPVGNKSAELICVDGGKWRAIGCQEEGDENENYGKTVKH

SEQ ID NO: 136979 - protein, 189 aa, Heterodera glycines
MKILLILLCALIFENTINQIEAGKINQEKSFAEIFGQRWDERTEENMYRIGPIIYEENADQNNQFGQNDQHIDQIVDESLEVKEEQSEEMSTDCDELGGQLPMSTNIGQICEDFSKAIDKKKREIVEKFQKIKEKVKQMEKKYSTKEWQKIERKIAKKLGTNQKKIYEWKTEFGMIKKHYYTDDEKYKK

SEQ ID NO: 136980 - protein, 96 aa, Heterodera glycines
MLLSIFVFQMRPFRPWGVKVERVEMKDVRLPVQLQRAMAAEAEATREAGAKIIAAEGEQKASKALSEAAHTVAQSPVAIQLRFLQTLTSIRQKAWK

SEQ ID NO: 136981 - protein, 86 aa, Heterodera glycines
MPAESPHKAIANCLRAQPALFFASVDGIPWHKIICRTFEFEKRESVVNFDQQQQTRPSSFCNTTDDGDDIALDTTPTPFPSITGIF

SEQ ID NO: 136982 - protein, 34 aa, Heterodera glycines
PNFVEFMKDRPDLLHKWHTMENFMKECIKQFEEN

SEQ ID NO: 136983 - protein, 18 aa, Heterodera glycines
YREAIPEGFGLPINLGAS

SEQ ID NO: 136984 - protein, 56 aa, Heterodera glycines
RKKLQQKSFDEIFGEKWEEKEEEKREIIGKFYKIKEKIKEKGRNIQQKNGVKSMRK

SEQ ID NO: 136985 - protein, 116 aa, Heterodera glycines; identical to SEQ ID NO: 127487

SEQ ID NO: 136986 - protein, 141 aa, Heterodera glycines
MHLVKVLKIHCWKEKGPNFGSKNFSRLVGAILHYMSKWLKNKDDILMDKQAEVLKHLELYELLMDSVPNLSQNEINNDMIMQLLYEQRKELFPNLNIVKFSNFDSPQGGETDAKSAQQFLHGKILQKLVLNSEFLTQLKGL

SEQ ID NO: 136987 - protein, 157 aa, Heterodera glycines
MHLVVQSHSFVLGQVAKDCAEFVQFVNQNGIGILKNLYCENIAFNERITYYKTILGSPNSEERKVAEALLVIKMTFSEILQIEKANFKASKFDDQIGIFRAELIALMKMLQIVLGETKAMFWMFCPILTYFHFLKTKQGHSSEKLDYNLLNMCFKNT

SEQ ID NO: 136988 - protein, 95 aa, Heterodera glycines
MFEYPKRTLEKIDFFVFGAVPPNRCAQIYGETESFGNSFPIACTLILRWIFAPHNCLSTPNGHLKKSIFLFSGQSPRTDAPRFMGRPNPSGIASL

SEQ ID NO: 136989 - protein, 131 aa, Heterodera glycines
EKPDEFEEPSNGEKKPKGGAEDQADPKKKPDGVEEEPKSENKPNEAVSKEEENQAEEPKKAPELKTAENSEKPPVSQEKAPPNGTAEDDVQVGKQGEEHQKQEQMQQAGDQQPQSDEVAPARGNRRRRGAK

SEQ ID NO: 136990 - protein, 241 aa, Heterodera glycines
MQECHDWIWTQPLINGHPVKLAADSCSHLTIIQEPLWISLGSPKLRKQVANTDAPNIMGLDWIVPFEQATQSPIATTLDLSIATTKVNAIEPTDEPTNLAEQMKNSFPQVFRPGLGVCTKMEATLHLKPGAQPVFCRARPVPHGVSEAVNSELDRLVEIGAIHPVDFSRWAAPVLAVRKKSGEIRVCVDFTTGLNDALELNRHPLPRTDDIFHALRGSKVFSQLDLRDAYLQLELDEKSNR

SEQ ID NO: 136991 - protein, 94 aa, Heterodera glycines
MKIALGKEERRKRKRGKGKIRSKEGEKEEEKDENSSGEGGETEEKERKRKNSKQGGGKEEEKDENSIGEGGETEEKERKRKNSKQGGGERRGKG

SEQ ID NO: 136992 - protein, 34 aa, Heterodera glycines
MISKIKILEELSNKNEWIYVNNSLDNYPKSTMTS

SEQ ID NO: 136993 - protein, 234 aa, Heterodera glycines
MEQQQQRQQQHMEHMVAAAKLLSAAAQQQNQQQHQAVQEAAAAAAAARMPSLEGLLNQQMVLSTLHAQLPAHMRRSTPNLFSVPDYQQPSAFRPPPPAAAAVANLLQSQQPPQQSPSSVAANASATVAAVALSNALSSVQQLLQHQQQQHQQQQQQQRLAAMAVAAAGAATANGLFRQHSFGGIGFTEQQQQQQQQQLVQLQQIAATQPTPPPLPQQQQQQQQVAHNQQQNPPK

SEQ ID NO: 136994 - protein, 124 aa, Heterodera glycines
MRQRVPTVGAVAEPPEADLRGRGRRVPAGPNPLPMQPVRGTIWHTGRVPSTLSSGLAQVQTGQQQQRCQQCRLGTGHGGLSDHWLLINMVMPQLIARFFLVLSIDQKWISWSSFDFNFQGPDQR

SEQ ID NO: 136995 - protein, 653 aa, Heterodera glycines
SVLTTFRTEQWTPVVCFFFVALPLRHTECQNQTATFGTGPPRLPPVSPSYPTSDLGSSPRSSISASHYTALGINASNWQAFRDAYVARRRSGECELLSVDEAASAKAGGAGGGGGFLTPHQLLSPAPFSPFSDYGVADLHMGGTSVTGTPFSSRSPNLSPSPVHRAGTNLHFSFDQIRSRSSLSNPIAGFYGLDAFGAGSECHLRIPSQSRVLDAEVRERSLSDGETLHSGGGGGGSEHQRLLQSHQHQLDDEDERMDTSDATSSSPLVVAMTVSRPSSSNGTQQQLHAGQKRRLLHQHKRAAGAASAEGRHSPVPPASVCVLKQQSPPVHAASLLSSRPPESGGDGEALASAIVANAQVSRQPTIEEPPPSPTLAELFQPGDLDKDRKRQVEDWIRQQTAALEAFRHSLIPPQQEANLLQASGVVPTIVPQNSLEHLWPSPSATNSSAGPIRPATMWRRSRSESDVSAATEAAAATASAESGGGGCGDASATTPATGTKMHQRRTSQQHTVPLLKVPLNEATHVCEHCGQGFSMHDRLAKHIASRHRDRSSSMNDENSRVHKCTLCPKSFGRSDMLTRHFSQVVKGSTFSTTNNPSKAQFRWHRHMRLHTGIRPYACQLCGQVFSRSDHLSTHQRTHTGEKPYQCPQCNYSA

SEQ ID NO: 136996 - protein, 96 aa, Heterodera glycines
MLVRLQQSLVLAAAAAAAAVQRLAIGQRALAHLRVKHTRLRRNTEVAFATGTKRVQPVEAGDRIGEGAARADLIKTEKMDPRVNECDYPAPIESIT

SEQ ID NO: 136997 - protein, 35 aa, Heterodera glycines
MVEIEVNLVNNTNNNCTNDVLRKYRVEITNYVFFL

SEQ ID NO: 136998 - protein, 293 aa, Heterodera glycines
MNDPLYTRQRFALIVSVMQGHTEIAALLLEKGADVHQTTLGQVNNVTMAVTPLWIAVNMRQLELCSVLIAHGANVDLGSDASLTPLLLACDKGSTEIVTLLVENGADVNLGDSEGATPIMITSRAGRIDLASFLLTHGANVEQIDYSGTRFALLDAAAHGHLEVCRLLVEEWAADVNQQATDGITALMGACIHGRLDITVFLIEHGAHIDHADMDGYNALMWAVKQKKTEVARHLLAIGANADQVGIDGKRARDLARESRRAELIDLFRTTANNEQREDGNAQQDEQPQQQQQ

SEQ ID NO: 136999 - protein, 26 aa, Heterodera glycines
GPVLTSFDRDREIPGFFPGFPSQKVP

SEQ ID NO: 137000 - protein, 41 aa, Heterodera glycines
MLSNINFLFDKNQAFMLFYILQVNVCSYKFITNTKYILQRI

SEQ ID NO: 137001 - protein, 90 aa, Heterodera glycines
GGRCAIDLLFFEGIFKFILYPRKMSISFFEKFYTSQKRLRMRRRAVHNRHFISQRIFIFRGYPRKMAISFFDKFYTHTNALEHDREGGAQ

SEQ ID NO: 137002 - protein, 164 aa, Heterodera glycines
MQCDRSETKNTYGVSAMPTFIVLLNGQRVDLLRGADKTALQNLAHKWSKNCPTQMVSPIPGQCELSPLFNKVQCECLNEDDSNNLNNLLNGVGPLISDCDEQLLISVSFIQPVKVHSVLFNGPKEKAPKTVKIFANITNTLGFDQAQSTEPIQVQKMCQPMLID

SEQ ID NO: 137003 - protein, 138 aa, Heterodera glycines
MVHESVTKGLIKGTHKCPVRLWHFHTEIPPPPPAPLKRCMPTEQQQKQGDASHSHPKTFRQFVFPGIENWSDGKDTSPSEGERTELGLVMGAFCEFAVAALAMLTDANVRDNGTAANIQLLTSHLKGGEKGGRRKKIL

SEQ ID NO: 137004 - protein, 91 aa, Heterodera glycines
MARQQLNIRRRSVVSYVGISEHGQCGYCKFTKRAHDKAKFAASTSECNASVDASTVASSTNNDGQQQANPPNAHEENANDDTNGGGDSAVF

SEQ ID NO: 137005 - protein, 32 aa, Heterodera glycines
TDHLSQIENQLKSDGSDSSHSRPFTGKATDER

SEQ ID NO: 137006 - protein, 125 aa, Heterodera glycines
MANALASELIERVVSRQFHLCANKIFSQRMALEMAVSQSESLLDQIVPKLLHSTVHRIRANKARHINEKMHNIRNGTLTLSPSQPLFRPNAKKMTPERMKQMATKKMQQMENERKKRREQKAMQI

SEQ ID NO: 137007 - protein, 30 aa, Heterodera glycines
MKRPGLKLLRNHPNSPIPGKKLPEAVEHPQ

SEQ ID NO: 137008 - protein, 63 aa, Heterodera glycines
MKENGKHCDDVKDSTNMTADYEKMFAKRPPIALGYQGLKKLVEPDIGANVWAIVKIIGPEIFN

SEQ ID NO: 137009 - protein, 179 aa, Heterodera glycines
MDDFMRHSDFQEEDGDVFTTEAVEIFVMRILEDEEGEVIIKVLRSCNSEMLLSAAKIRNSQYKRLLYIFRLAVRELPLPKPKEKETIIESILDGDEEDGETGGGRGTCGMPKKMKMNGIEEGRGHCGDSHQTLTIGDEEDSKVKKTIPFPSFEHTFAIELGTKRFRRKFNIPSTYFVVR

SEQ ID NO: 137010 - protein, 357 aa, Heterodera glycines
RVRRLPIFGHLTQRRIRAAERHVERLPVLTSWHRRPYFTYWISTVHLLITFFMLIFHGIGTDYSNGLNVIERSGDVMGSSLSPLHIVVWEQNNIWMGPRFADLVHTGAADLVHTGAKFTPCMRRDDKIYEQITEERKTEAESSCCVGLSGCFQTSECSVRKCLIVSIFVQKQFATLLKWTNGKMNYSRVVCGQDPRYCARPRSVHPYVWGLNISNWPICEKICEKHSPSIPKSEKHMHCTVTGRPCCIQMHGQCRITSREYCDFVRGHFHPNATLCSQISCLNEVCGMTPFLISCLNEVCGMTPFLRRDIPDQLYRLFTPLFIHAGLVLSTLVETINLTVISDPMRSLTLYLTIMCR

SEQ ID NO: 137011 - protein, 110 aa, Heterodera glycines
MEDLGTNFIRWPHIYANKFLPEFDLGATVCWYESLYNRTQFDSREEQLAMLDKEFYLQLPNVRFQKFKKQLLLSKNQSNGLTNLPSHKELMQFECVIEKNLEYPLNEKYH

SEQ ID NO: 137012 - protein, 19 aa, Heterodera glycines
SPYRDRDLSFSKSGTGNRD

SEQ ID NO: 137013 - protein, 127 aa, Heterodera glycines
SLYFKNDYILKWINVQKIKHSFLTLITALLYGSDTLSAKVIILSDSTTASSSSCSFCCTRGAVDQVNDAPVQRVRGCLLVGKRSYYGQICFCDDNVLITTNKHSYSKNIHSIESNLIITTLYNNYLA

SEQ ID NO: 137014 - protein, 50 aa, Heterodera glycines
MIYLKINFLFTFLFVNFCFVIAMDNDELTKIVKSSNKATKNKQKVNHVIL

SEQ ID NO: 137015 - protein, 85 aa, Heterodera glycines
FIRALLRISLKISGRQFYILAIFYFICDRKFLHTSHFLFYCDQAYLSSYFWDFFQNVVIELNYLYFFYEYYVRIFSTKHNQFRVS

SEQ ID NO: 137016 - protein, 189 aa, Heterodera glycines
MAAGVKTIIGGAVEAVIATIMRTTKVEVIRVKLEEDQWMGQNGLKGEEEEEKEKGEQKGVGGREGEKEEEKEEEEQLEEQKGVRGKEEEEQLEEQKGVGGREGTEMHKNGKKEQQQQQKEQMEPKQYLAVYTAQTCIKRAAGGRISNCLNNLFNKSQPQFKRKAENGKRNKTEQQKRGMKTNCQFTATH

SEQ ID NO: 137017 - protein, 91 aa, Heterodera glycines
MRTRKLEEGAAAITDEQMETMRQQMEQKFRQNLLEAEQRIDHKWATMLNKEQQRTQRIAAQSATVIGQLMSKRVTERGEEKENTRETEEKS

SEQ ID NO: 137018 - protein, 22 aa, Heterodera glycines
YQGQEANALFEAFKVREGLNED

SEQ ID NO: 137019 - protein, 19 aa, Heterodera glycines
AIVEATPEGFGLPINLGAS

SEQ ID NO: 137020 - protein, 106 aa, Heterodera glycines
MYKKAEERAKSANKINADKYLLIINSKFDDQLTWTEDALFSEFVKGLATNSETFFKMAEEYSNYLCRRKEEGSIYGNDRPMISHGLYEIEKIKKHLAQKYEAHLGV

SEQ ID NO: 137021 - protein, 168 aa, Heterodera glycines
MLCYISAFSFIIIAQHFLVPISNANPSVENKMLIAFVRNDQKMQISEYSMQKYDAHLGIFYFMRMNWKCDKIAGKFEEYELTECQKYRKYLDILYEYLCREYVGIHTVKPKFVFKHKIEINGAIIYAVNCLAKISQFYFNSSLSSFLNYKLNNFFTYNSEPKLLNEND

SEQ ID NO: 137022 - protein, 166 aa, Heterodera glycines
MLGLLFALVEVSLFALLVSPYLSKLPNSTVALLDHAIHFNPGGLAQMEHRFGCIFDQNLYETFKRQINPRVRPSLCPFELAELAEHLRPVPSVLLRAAASPLRLRPPPTSTHFCFLFLNTRTIRRQKQLLASKRMCQSFPVTLRHTNSTKASAVGLHGSQKKVGTK

SEQ ID NO: 137023 - protein, 76 aa, Heterodera glycines
MPFFFPSFSFSFHHILNFVTKINCKTANCANYSKINEQTLDLQRRVDGHCKLTIWRDITIHKDEGTRKIQKKFVLS

SEQ ID NO: 137024 - protein, 50 aa, Heterodera glycines
MEEGSEEGSTHTVINRHERISEDEHRTRSLYGAFAPTDQEDVHLKMPKIV

SEQ ID NO: 137025 - protein, 31 aa, Heterodera glycines
VNIDHRPQTQKCLKTVRIDVKRFEMGWKNRI

SEQ ID NO: 137026 - protein, 108 aa, Heterodera glycines
MADKSADNNDKTITGTKWSKTSVAPNLALEHELQMEDENVVKKGNMTCSSSSSSARKLTLRKELTSANDDNFRTFHLIGLIKRVVRFTKVRFCAESRRIQSAMTEILI

SEQ ID NO: 137027 - protein, 18 aa, Heterodera glycines
MRTRPIWQVKQRLLTSQK

SEQ ID NO: 137028 - protein, 252 aa, Heterodera glycines
MWNIMQSTTATATFQSKSASRRRRSTHSSIQSFTSSQRHHHSQETGEGLFAHLDEWLRLDQYKSKEKEHKTARALTLGALPSGVIGLTEEWFMDKLRLLVSYWTTACCIYVTFIFGRDVLIPLVWVYLMGPVIVTVRNLVTGNQWTQRNRATRGTRRAPAISRIEAIELVPPPMPQEMRANETASSQQEDPEPSPLVMDLKRQMVASRSAQNDVFKVVGMSRLNVSRECPSSGQMGRTGRNERSSERGVIDG

SEQ ID NO: 137029 - protein, 55 aa, Heterodera glycines; identical to SEQ ID NO: 134944

SEQ ID NO: 137030 - protein, 156 aa, Heterodera glycines
MADTNDNFLTTIYSKTLQQLSHKNDHTKRYEHLAQCFGTISFFYGQIYKALIVAQNWLKPSVKFDQKLTELKQQCDDATNELAKTNPKLAENNSIKNLLLDNDGIKNLTKTFHDIKSIVNSPKSKSAKNRLTEENGGAIEMIEFDDDLKNMGNQRG

SEQ ID NO: 137031 - protein, 45 aa, Heterodera glycines
MNTINSRKRDAKTVFIAIKNLNNNNLEKLIEVISIQFIYIFLNDE

SEQ ID NO: 137032 - protein, 34 aa, Heterodera glycines
GFLVHIEAQDGRFAPVFKFVGLGRALRARYSNFV

SEQ ID NO: 137033 - protein, 27 aa, Heterodera glycines
MHKIKSKFKWMREWVKTLAITIGWVAW

SEQ ID NO: 137034 - protein, 71 aa, Heterodera glycines
PSFAVSAAPKKANESGQAINLRQLRSHADIEVDDEEEEKKNRRPDGRRRKVPKVPRRCDKCPMEIPRSVEA

SEQ ID NO: 137035 - protein, 251 aa, Heterodera glycines
AREALLQWARHVTSGYPGVNVANFSGSWKDGLAFCALLHFYHTWLINSEEISPQSVKKSVTIIARHKLIRRGGFLARIDQFEPSKYSDSLSGDNNVYQTSLLLYHTPTSNQGNLDDLVSRLTRGIGITNEKLDHLLTRIDSVDAAERGERIELLERQVRQIGDDLKMLKPPIDELFLDVDTLRQHRHADAADFNKQVIGLEQRRTAYLHRESLALAREHATSLNATRPHRGTRGNAFRRVEDAIQWIRDRM

SEQ ID NO: 137036 - protein, 77 aa, Heterodera glycines
MSHQTHHSITNPLDGILNSTKSVATRAGRCGRVAFSDVACSLAKAKLSDGGARFKLIYSGEKSLSPSDQFMSCDYGD

SEQ ID NO: 137037 - protein, 94 aa, Heterodera glycines
MVKVQKGTECQPVLPTAGKVGNIDTGVSGRNMASPLEQCFTCSQQCKWEFGAVSAAAVDSALACGVPLLNQRISELCSRRTQETGFEPINYSDF

SEQ ID NO: 137038 - protein, 87 aa, Heterodera glycines
MVKILNFSPGGFPYFGFLLHILCACFVISLLSIIDSPNDKTTINLLIAFCRRSNFLIEEREHSHARKNPPNVINFTVEQELFISRPV

SEQ ID NO: 137039 - protein, 58 aa, Heterodera glycines
MTNSYSSIGLSKFAQLVGLDESSGTVQELLQKCNWTVSEDGFISPIDSTMFFDAMAVQ

SEQ ID NO: 137040 - protein, 148 aa, Heterodera glycines
MATLDDDTKIGVDLRCGAEESERRPDAIPYNAQRIDIIEMENVGHANFTEVKVNFIREQGKGKAPRQPSQLFRAVFGDAATADDFVIRIEYTTPTSDSDDFTAKKETLAQELNQKIQKARAGDSDQIIQIITLISTLTLVQVWIFNYD

SEQ ID NO: 137041 - protein, 217 aa, Heterodera glycines
LWITSPHNTDGQRIWDIFVREIWPIFSENIHHLDFYDSVGLDNLLRRTTPTILTDLNQLTSINLYGRFPAAFGDDFDGPNSTISAGQALSKWLHSPRNDGQPKRLRCKDFKEQPNLDWINNFKEHFLRANAISSVSYQFNFSVPVPSMQIVPFELVNEWTKEKLTLAKTKGWDNRWIMKRCKIIGETAAIQQQKKDENWGNSCNNVFIWLNSYTNCI

SEQ ID NO: 137042 - protein, 327 aa, Heterodera glycines
MKPSWKSTVKNYKHEVCVIFIDGEGGVEGHYDPVKNVGKLFSARNYCFGAENYGTVLDTLPPIENYYPGGLFPADRAKFEQWYDENRETGLELTEVIADYCKTDVQILAYGMVKMRQLFLSETRHDITDSVTIPSGCMKYWVQLAHHDKERVTIIPHLGYEKRGKQSSIARKYLKWRAEEELRENGRVLRHVESPGGEFKFGNYSLDGMMERPDEDKNLAIEVNGNMYTNYPVGHPTVVQFDKDVEWRSPADIVGDDGIRLEGIIKCYAVPPRHCHYDIPVLPYRVNNRTLFPLCRTCSEMYPRGLIDPEYNCKHFEDSERGGFRNF

SEQ ID NO: 137043 - protein, 47 aa, Heterodera glycines; identical to SEQ ID NO: 133285

SEQ ID NO: 137044 - protein, 47 aa, Heterodera glycines
MKNYIFFGFTVKRLMYESISAYDSDGLARNNGEIKKNAKHSYGVGDT

SEQ ID NO: 137045 - protein, 21 aa, Heterodera glycines
MRTRPIWQVKQRLLTSQKKGF

SEQ ID NO: 137046 - protein, 79 aa, Heterodera glycines
CFFYQKGRWRKIFLKIFPYILVISFCFWWGAWNSGIMRTRPIWQVKQRLLTSQKVRCRDETNQHCLPRGTRHGPPKEWI

SEQ ID NO: 137047 - protein, 89 aa, Heterodera glycines
MRRILSILQEAQTDCTDTAYVFHAACFDAFRRKRSRKWPNRGQTVVSSERTQQRCESGTSNFDFGPEILGNGKSAVRFVTGGLEMALII

SEQ ID NO: 137048 - protein, 87 aa, Heterodera glycines
VAELSLRNVVRVVGLADPVTPVSAILRRCSVKTLMLHYGIAEFGDCDQFLAHLSRRFGRLKKGGRPDHNAAARQVLTDWNSKLRYYT

SEQ ID NO: 137049 - protein, 78 aa, Heterodera glycines
MPKFVWTAKRLATDLWHWANKKEKKRAASPLRVIEKKLGISIWLYKHKTHDEFVKKHPEELEPVPDPCEEAKLKLKKK

SEQ ID NO: 137050 - protein, 103 aa, Heterodera glycines
MGGGAGRKLEQGQHLPEVERKRREPWRLFANLAKNAQFAAAKPPLGMPSAAIPTDWSPRSAKLAYHPPSIGSLDEAESGGRQLDISAPREEYESRLSTPDELR

SEQ ID NO: 137051 - protein, 139 aa, Heterodera glycines
MATFFGTEVPTAKENKKRKSNEEKSLYEELHSPKFIDDSARTEDEGDNEQKEPKRTAGDGVAVGTALSATSKSRARVINYLINNSQFQKALTTKSRPSSAWCPPAKHSLAFRLEGPLAPLGRPIIHSPRLMCVSTAWRE

SEQ ID NO: 137052 - protein, 78 aa, Heterodera glycines
MTQKAKAEMEEEEQKTKQEQQREFEGEEEEENCEENGSEENGVPKEATAKCHQQNGRRENGTGKSHGVKEKSFAKTGR

SEQ ID NO: 137053 - protein, 96 aa, Heterodera glycines
MPQHSPPGSSANSSSSSASLLRFRAALDTIFGRPIAPRQWRRSRGSPAAFFGTAVALPSCRAVPRRQQRAAAAAQSPLADHATAAGVAAEFGGGCA

SEQ ID NO: 137054 - protein, 67 aa, Heterodera glycines
MDNFPLHRAVFSNEVQMVKQHMTEMNKKDKQGNTNCADFVGEGAKLRSRTTVNGTRWMRPSRMATLD

SEQ ID NO: 137055 - protein, 67 aa, Heterodera glycines
MACHWAATAVFGKVPLIATMLPSVLAKGLTSNELSAGDRFGDALAPIGESATKELGDELPLMAEPLL

SEQ ID NO: 137056 - protein, 68 aa, Heterodera glycines
MAMPSQEKRIRRAKKREEEGRRMATTNDERWQRNRNRNTFGPWQRPTKKKPKLIRMRFSKYPGQPGGP

SEQ ID NO: 137057 - protein, 113 aa, Heterodera glycines
GSGGICIGVGGADAVDVMADFPWELKCPNVIGVKLTGRLSGWKASKDIILKLDDIKNSNDIRFEAAEKITNNIKQSADDRYNSIEKVSREAINGQLQGFGLKVFAFNAGLAGS

SEQ ID NO: 137058 - protein, 139 aa, Heterodera glycines
MWNGILADLKIFLGLARGGNPNVNAGGTRMEQIQDLDRERITGLTQMQQNLQKDSKFSVQMVPVPQQQMMTMGGGAMDGPARTYFTSRNPTSIAVPGPAQSKASDCDEKGTGNFGNIPPLDGFMTREIRKFRHETCETM

SEQ ID NO: 137059 - protein, 53 aa, Heterodera glycines
MFGTFILSATFYIPLNSSPVLCAWSAAFCSPGQRHNFSKFISGSSITRDAMDT

SEQ ID NO: 137060 - protein, 51 aa, Heterodera glycines
EWYDGQTQMLNEWLTERLQQSLSNTQLTSLLLIVKKIYSDFELHGIDEERL

SEQ ID NO: 137061 - protein, 499 aa, Heterodera glycines
MWTNCFYEPIRLYKSVGDLDEEDRLLIKQFISASISSISLLLDQFVDIRATLFIHLGDLHRYSYTTVEQNMQHLTAAAEYYKKALRLDPKNGHPFNQLALLLKEHNLEHSLSLRVSFEDERKRFDGLFDELLKQSHYLFAVRLIHSFALASIYTLLNEEDDEKFRCSVSFLFRKWALLLVEVEKHLEEHTLKEDEQQLAKKRRQNRKSSSSSESSEENLEFKNGTAGEESQICADFAWQFQNLLKTLVDILNELLPKLSAKMQKNDNEMETMEQIAEWSINGPFTEGNEEEQCEIAASFIRHVVKKQKFAIVFDKFFQMSSNLMEEKELKPIEAFSKMHLQHVTNENEKTSKVPVYVAPDSSVFLHKLDLVKHLLLSMNQTIIIARSVLSRLDKVKRENNNAREAIRQKAHEQQPMGHFWAFPLFRWIQSRIPEGRVRMLPHTGEKFINECLQFVREKGLLDKKTLFCSILTTGEASEEYERQKEEMRQYNCQFRRQFN

SEQ ID NO: 137062 - protein, 634 aa, Heterodera glycines
MAQVDDDYEANKRVAESLREYMGRRLNVANAFETPILEGLMAAVKVEPLQRIGTVLDEKIAPFQNDDWQNDRDEVETVNANDEGGDKSGTIASGEDGEGSGEGNKRDKNKLSKPLDSSRKAKLLTRETHQLAEGLWKRFASAQHFGDTEDDLHALFDQLSTDVTGTVMKRRLGAVHGSLDRKDNQFSIEDAIYRKISKDFEEGSARSFVSNQILMNDHGNFLILHTNWPGDEPSNPLPSLVNHLSAASAQCQTKALDQMTSAVKRAQSKRPSEFALLTQICADDGQNLPTIDFQEENSYEQRIDCVVDVFENDGGDEHASTLESGDGAPLHSCRMAVDETIANSPFADSAIAPLTNGINVPHGNLEEDGLIVETFSQNIDEGTDNESKATTAYLGRDGEAFGTEVGDQNVDHGLAPTDEIRPKKGKTKRLIHEAGSAKAKRRLQKGNDFEEISGIADDMCWIPKRVVSSFVKRAIADIQRTSLAKRSEIKQIYYQTNLNVAKVKKAMLRVISSHKKCAPPAVDFVMGLDDEADAEDHLSSCPSEDNDSEQIESDVESMAAISDDGTPTAEGVQVGTAESLVKALWTALSEHRSESPGDQQQRVIRECPAFFEWNDKAKFDCHKFIRCSAASMQR

SEQ ID NO: 137063 - protein, 234 aa, Heterodera glycines
MDGQGTADTEAADVISLDNGEENWQMDDQNGTLGDEVPIDAEFAVSPHMASDDGSPKRRRWGSDCTDEEDDDQLDTGFGFLNNITLSEIKQIYYQTNLNVAKVKKAMLRVISSHKKCAPPAVDFVMGLDDEADAEDHLSSCPSQDNDSEQIESDVESMAAISDDGTPTAEGVQVGTAESLVKALWTALSEHRSESPGDQQQRVIRECPAFFEWNDKAKFDCHKFIRCSAASMQR

SEQ ID NO: 137064 - protein, 202 aa, Heterodera glycines
LLIVLGLIMIMANCGQAMRQQAVAVRGQLRCGNRPASGVKVKLWDEDDLWDEDDGPDPDDVLDEAFTDSSGSFQMRGSLDEAFTDSSGSFQMRGSTRELTNIDPVLKIYHDCDDGHDCDDGIMPGQRKVKLRIPSQYITNGGLQRKVKLRIPSQYITNGGLARRTFEVGVLNLETVFAGEERDFIGVLNLETVFAGEERDFI

SEQ ID NO: 137065 - protein, 49 aa, Heterodera glycines
EEINKCQMSNARTIKIPICRLTFGNSLSVSGIGQLSTDCWDASPTQTNT

SEQ ID NO: 137066 - protein, 148 aa, Heterodera glycines
LLIVLGLIMIMANCGQAMRQQAVAVRGQLRCGNRPASGVKVKLWDEDDGPDPDDLWDEDDGPDPDDVLDEAFTDSSGSFQMRGSTRELTNVLDEAFTDSSGSFQMRGSTRELTNIDPVLKIYHDCDDGIMQVRGHDCDDGIMQVRGGG

SEQ ID NO: 137067 - protein, 60 aa, Heterodera glycines
EEINKCQMSNARTIKIPICRLTFGNSLSVSGIGQLSADCWDASPTQTNTSRHPCSNCPTF

SEQ ID NO: 137068 - protein, 331 aa, Heterodera glycines
MDRTVNDFSFQHFSATSTPMPTSTCQYLKKRPLLKEKNNTISASPASKKTPISAEESLSNETMPDLFFYDKKSSDGFSFEEEGQENRQKKVLSSVSEVTSCSNSSQKKEIIECSLSPIHVKNDHKYKAKKIISSDVEDSIVSSSSNGNENRQNEQNSIVAAEEDQNRKRVLSDSSGTDEGRQLQVQSEDESGRSSEEEAQVEHNSSETTAEEETEEDIETVGDSQSEGESVLIDEDEESADKVGALPNRIEGRKNLPGESLRLYIHHLQRILGNVPRTILLSQPTIVSEQNRAEIYNAMPVQPGRLFGGKMTDERFMKISSVSNDVINAMH

SEQ ID NO: 137069 - protein, 44 aa, Heterodera glycines
MRARWTMTKARTEAQDSQIGLTLFFYRSCKDYRENPPYLLPLEM

SEQ ID NO: 137070 - protein, 49 aa, Heterodera glycines
MDKRTEKEPNRPTDGRTETKTEDKMPRICVIKLHGIGSGIPGPPGPGCP

SEQ ID NO: 137071 - protein, 66 aa, Heterodera glycines
MALESATAALGANKHCECEHCSEWISALRRSRTDRPMDGRRRKLRTKCQEYFSCYYFFDICRIAKQ

SEQ ID NO: 137072 - protein, 264 aa, Heterodera glycines
MEIVNKFMEMKNRFYESGEKRPFRQVDKEIADKLDVNARTIYKWKKRFGLKLGENRKIGILKKINELKSKNPQITLAQIEKELPTLGYYRKDFKESYKQLETIRKFDKIVAKKLSPLSFEEKTKIAAELGVKIRTLYDWKKKLGINEERGYGKKEKIAILKRYDQIKKENPQKTMGQIVKEMQVSQSMFYLWRKEFKVKIKPHFLSEDEKRKIVAKFNKIKEIKGQSIKREDKKKIAKRLGFSLNAILRWKNQFGQKGRLIAEN

SEQ ID NO: 137073 - protein, 208 aa, Heterodera glycines
AGLSRSDAALVFEQLAAGCCSTAAYMAVHNMVPWMIDRFANEELKQRYIPELASFTKLASYCLTEPGSGSDSAALRTNARREGDHYIVNGSKAFISGSGVSSVYLVMMRHKDAPPGPKGIFALIMTPDMPGFQLGKDENKFQLGKDENKLGWCTQPTRILTFEDVKVPVTNQVGADDEGFTIAMEGLNGGRVNIEKCSLGAAQMSMDL

SEQ ID NO: 137074 - protein, 114 aa, Heterodera glycines
MFTTVHYNFFLQKRALRFTADQLGYFSLKIRLHWFSECLKFVHFWVDASELPKDRRFWLPLATCLAHSYPMLLPLDANCYSDQTAFKLLTKNIKLPTEEEEEGKSEGMDEDDRR

SEQ ID NO: 137075 - protein, 56 aa, Heterodera glycines
MWQLGVNDEAPQEDEEDVHLIKQDTSRLVKKNSCDTGETLNCTSTESGDEKDEILM

SEQ ID NO: 137076 - protein, 74 aa, Heterodera glycines
QLHFFTKNDQILAVLRQKTCKNSGKGRSGGADRRRRENFWKLECYLLRKLPIKLFNFRLGGEFEKNFHYLLENF

SEQ ID NO: 137077 - protein, 267 aa, Heterodera glycines
AANYGIVLDSLPPLDDYYPGGHFPEELKKPEQWYEENRNTPFDLREVIADYCKADVQILAHGMVKMRQLFAAATSQELTDSITIPSACMKFFVVLSHVGKERVAIIPHLGYEKRGKQSAIARKYLKWRAEEEMRDNGWTLRHVESPGGEYNHGNFLLDGMLEERIGEDKNLAIEVNGCYWHACPHCFPEDDAIVGGGETAGAIRARDEKRIRQIARDFEVEIVWECQLGRMLEVDPQMKAFFDNTPDSGPIDFHDAFFGGHFFPIFG

SEQ ID NO: 137078 - protein, 212 aa, Heterodera glycines
MKNLKLMAQIPNSFFSRKTWINAFPHRQCKITLYNVLVTKTYMQKRRGNDLPKETIGKPKDVPKSKIEKPFNMPKTIIAKPNDVPKQKNAKKKASKNDGGQKKEKLVVSRPSSPNGVPIEFELEINEYTNGQLINKNTISGQWDKRNEKIIDEMLKNKKVGVTQLGPIQSKADILPLKPGQFETEFHFFSDNHANSQQSTVASTSKNQVRNF

SEQ ID NO: 137079 - protein, 86 aa, Heterodera glycines
MDFRPVRIVATYFVPPRRLVFRRWRRFRRRCLRAIDANDEMSTARVNGHQLGVLAAHRQNSDRTGRDADAGQWSTVTVGSYGAGET

SEQ ID NO: 137080 - protein, 278 aa, Heterodera glycines
MADEDGKRVSRSENGQHIKKMFVNSALGSSVMIENKSGGDNEPNYEESEPKSLSESENRKSETISTDDKFIVIQTGINWTLASRLTEVSSWPHFLLMKKKSQSDEYFRLGEIIDIKEFVENESNSLNASNKFATNFTLLPEDGCGSIERILKCEKTGKIIAVDVCFDVGESLQRFYSHQFGSDVDVSAIVDDAWVELITLGFRIQGFEDSLSTLTGLNTLSDKPTQIVPHQYIGTSIDLVIKIVRQIDPVEEDYRQWCEFLAKQRSTSNHDQDYHHRR

SEQ ID NO: 137081 - protein, 55 aa, Heterodera glycines
MYLSIFISRKSPYLDGYKSDENQPKKYLGDDSIVLILLFRMSIYLFKTIKISETS

SEQ ID NO: 137082 - protein, 75 aa, Heterodera glycines
MPLATVLPGEKKVDVKWSAIADKKCCGWMTGGRGGGAGGRSAVGEAEEMMPSPTTAVPEDETDFCGWRGEAAADE

SEQ ID NO: 137083 - protein, 57 aa, Heterodera glycines
MNFLTTRICLRNVIENEESFVDQADCNTGTAADDWVRDPISANCRNRPQSNSLIVNT

SEQ ID NO: 137084 - protein, 74 aa, Heterodera glycines
MSDNPKDVEKEMEKAIFIAADCWLKVFDLLPRSQLGLGIALISRRFDYFVEEHFKTRKWKLGETIYAMEIGQKI

SEQ ID NO: 137085 - protein, 36 aa, Heterodera glycines
MLRTATVHDWPEYPVRGILLDTSRHYLNKNVILRQI

SEQ ID NO: 137086 - protein, 257 aa, Heterodera glycines
MYKLKTGRHFEKNVAAHIASLQAAQAANGGEEKALIVPVVSHAVADVELCLDSRQLLVASRSGQVTLFLFAKTECCQEIATLVLPQLCRSTISTTFLPTTAPPSPKNGGQEVPKGYQPELVCQIPWINGIRPELVTALALNSAHGLIALGTRVGFALIDAHTAAQVYAWSNDELFGREPIPYWSSALNSQIDEMTISPATEFIIPIITHITFVHRERSDQFGLESRIPSFIYGSGNSVFYYHKFPGCAISTLNYRNP

SEQ ID NO: 137087 - protein, 88 aa, Heterodera glycines; identical to SEQ ID NO: 124691

SEQ ID NO: 137088 - protein, 219 aa, Heterodera glycines
SQSLNTASPFGRIELALLYLRQKRELIISLSGAFDLFPRTNGTPRNAYVKLFLLPDRSENSRRQSKVIADTENSRRQSKVIADTLAPVWNEHFFYEALDERAIAERVLEVTLWDFDAFGSHVTLWDFDAFGSHSFLGETLIELSKAPLNNRTLVYPITDLDDDDLIRLVSLSFLFHSPVNQQLRQRRFSSMTPPMGQRSRSHWPGGATEHNSRGGGGGG

SEQ ID NO: 137089 - protein, 103 aa, Heterodera glycines
LFREFNSSLVRVMTFSTTYVEVEVVRAGLSMLPFLMVGFAIMATCTSVSVLLSAVYWRQWHVQKLALALMACVCPFMACGTALGLLFLAGVRYGKFVKILKIK

SEQ ID NO: 137090 - protein, 66 aa, Heterodera glycines
MMMKQVLKAKGKQEKDVIPWQKTVQKIGNTEKRRKEIKWNLEEESVESLDQLTYRGLKRQGAIEDN

SEQ ID NO: 137091 - protein, 34 aa, Heterodera glycines
MSFRARKVPLKKLEQKVPKCSLEFYFADSALSCS

SEQ ID NO: 137092 - protein, 183 aa, Heterodera glycines
MFAFYLSKCGTIALRWADEKCRQNAIECSSENRRAALGPALFKIRFPLIPSDAFVKQIGRNLIVFRPLRFFAVPSGVLSNEEFVGVYQFHCHPNFCGVPGLNPLKFPWNGRIFDWNTAKGNRGTLTMEIGRFSEFTQKEVGSKCFSDYEIRINGFGWKILAGIKPKSNQKWLGFYLCCTAPKE

SEQ ID NO: 137093 - protein, 62 aa, Heterodera glycines
MTFKINFSRLRIMENLGGLRISVTENTFTPAPFNNINGKKVTKKKVHFQFFDTRRNWAKRVV

SEQ ID NO: 137094 - protein, 221 aa, Heterodera glycines
GPNQLERFAFDVQAQQCVPFAYRGLKGNRNNFLSQEECEVACLPNSCPSGSPFVGADGRASPFVGADGRAQSCAVSTAMSTCPNGYWCHVGANAATTMCCPEANASPCQLPMSTGNASPCQLPMSTGEGPFRLDRFYFDLGSKSCKSFIYKGLKGNQNNFLSLRACQLSCLRACQLSCLPLDNPCIGQPAKSTSGQVFFPCIGQPAKSTSGQVFFCSASIA

SEQ ID NO: 137095 - protein, 20 aa, Heterodera glycines
MIYIKQFLLTGRFTEFFCCS

SEQ ID NO: 137096 - protein, 117 aa, Heterodera glycines
MSGETEEQKMEKDEEKEEYKEENKEEGKRKMKKNSEEEGQKGEERERGEENEEKRGREEQNNDEEREEQKETGRGKGDDGRKKRKRKEREGGTESDKQKKRAQLNYSPNFLPISRID

SEQ ID NO: 137097 - protein, 59 aa, Heterodera glycines
MSDADHFNAHESFNDTMWPGSIGGGDLVEKSAIPWWKRMEFWRNSLIILLILLFGLIFL

SEQ ID NO: 137098 - protein, 47 aa, Heterodera glycines
MTKQRMVVNIYKSKYAKRKTEEISLISQVKEIEEIERLTFDENKSIF

SEQ ID NO: 137099 - protein, 173 aa, Heterodera glycines
MHSIFIKTFPYLFNFKQYCTSPNNVVPLLITVVPLLITVAPLLITAVPLLITVVSLLITFVPLLITFVPLLITFVPLLISVVPLLITLLIAVVPLLFTVVPLLITVVPLLITVVPLFITVVPLFITVVPLLITVVPLLIPVNPFTVYVENLLKSQVLFPTKYPTTHAPPIYYI

SEQ ID NO: 137100 - protein, 289 aa, Heterodera glycines
QNLRQRRYKKILFANLLISTLIVSVLSPLSSQCSAASIFHSHIVEVPFRYLHKLPLSGYEVRDFTIQTSEFRSLGIDIEFSVDCNGERLTGRVCRVRPEERLTGRVCRVRPEQKISFYAKVTLSDCSRPNLAAVSVGIYGYNTVSAIFVTPLCGCECEHGRERHSPRCSYMGNLERHSPRCSYMGNLICGQCQCDQGKGGEKCECDLDKYGEKCECDLDKYGVSSADELVGLCREHNKAPHNKAPICSGKGQCSCGKCQCHANYLSLSGRYCECENTNCPLSVEGRMCA

SEQ ID NO: 137101 - protein, 131 aa, Heterodera glycines
MAETDAIAILCDPDIKLNAGVGRAIRNTGGQDFMKIQIVDTNDFHMRSLHKFIIAKLRAQSQLQNGSSASSNSENNQSDDSRLTVSTPTGNTDSEQSFRLVGSGTSQSPIELFCSTGAGPGRNLREFYLIN

SEQ ID NO: 137102 - protein, 115 aa, Heterodera glycines
MSSAKNKKSIENVIISVRNEFGYLNQLWDTVYMDLPTREFRVEEACEFMFNLLQVIRKSEEKVVRNIVSDLEIRREAVTNLRKFLGLPSFDESLFPPQSIALVPHIFSNILTAFF

SEQ ID NO: 137103 - protein, 43 aa, Heterodera glycines
MIAEPEVPSATNVDNDGNGDEQTKNDQPVIYSPDDQPIELQFS

SEQ ID NO: 137104 - protein, 115 aa, Heterodera glycines
NISIQTSDNPKIFYRVFASDKMPKLKDRHFPYCFVANTDRAGTIGEHWVACFVNSPTEIEYFDSLGDYPNEDLSSYLNLFERILINDRIVQHQFSDACGQFCIYFLTQRCSGIPY

SEQ ID NO: 137105 - protein, 850 aa, Heterodera glycines
FGETCLLMPVKLESLKATFNLDCEDKPFFPYYYNKKENYGIRLEHLLPMEDYSPGSMNKDKFIKFEKWYNENKETPFYLDEELRNYCRYNENKETPFYLDEELRNYCRNDTEILLLSIIEFRRILINDITKGFDPLPRSCTNAGVAMNIFKAMFLLTEQLSIVPEKGYERCDRASVMAIKYLEWRSKRDGIEIRHAGNGREVKIGNYKLDGFIDNGASDKCIEVMGCYIHGCLNCYDPAAELIGGRTAQELNDESQVVELRKTLDVEEVWGCQIEKELKKDEEMRGCQIEKELKKDEEMRDFFDDRGREGADDPRMAYEGGRTGPMKLFAKSDEKKKISVYDIVSLYPSVNYGTAYPIGLPEIILPKSDEIDKYNGLYKVRVNPPRGLRVKYNGLYKVRVNPPRGLRVPVLQLKCDERLLFPLCWRCVSKFKKETTRCNYKCPHDGAQRRYVATYTSVELAKALECGYTVDRAKALECGYTVDRFYRAWHYEEEANDLFKGYVRLFLKLKEEASGFPKGVETGEQKDMWREEYKEKYGIDIELAKVKKNPGLRYISKLMLNSLWGKFSMGKFSMRNCLNKNAVIDRASEFYKIACDHKIELCDIVEYSEEAIRLIYRDKEDFVMEHKSSNIVISLWTTSMARLKLLELAESHGGEILWTTSMARLKLLELAESHGGEILYTDTDSIFVLHDRDVEPITTGKFLGEMSEEGGHEIEEYCCGGAKQYALKMKNKQTGETEYVMKIRGITFDVDNRKTLHYDTFREMVLSYGKGEVDPAFFVYKNDFGYVFQTFDSLKNQYLHKMYRPVCQKGIIDEELNVMPFGFQYLHKMYRPVCQKGIIDEELNVMPFGF

SEQ ID NO: 137106 - protein, 33 aa, Heterodera glycines
RKELKKRISALKFFHLDVTFRHYKSLFWGFVTK

SEQ ID NO: 137107 - protein, 34 aa, Heterodera glycines
YCSSINIYLLIVFLKPSDRTIGAVTKIWTLLTSS

SEQ ID NO: 137108 - protein, 68 aa, Heterodera glycines
MDLPFVEIDERGVERHYSRAVVDEWGLRRAFRNERRKNGAKHEMVDKKHEKLALRNAAKNNEIAQYTK

SEQ ID NO: 137109 - protein, 241 aa, Heterodera glycines
MGTKLTLWPYRTEKDQSIWDVFVREIWPIFAPNIRHLGFHDGDYLDKLRRRTSPTILTDLDQLNAIDSGFLFPEGIADFDVLNPTAAQALTKWLHTPSKNGQPKRLYYFNSPRNLGWVNSFKEAFRRATTSISYKIRFNLYLEPMPIEPFELVNKRTKEKLTLTKEIDEFDVNVCNWLLQRCPIGETATVPAIKWKDSVNPSANLNNVTFDLWSFDKSIGPLSPPTEEEKEEADQSNGNVI

SEQ ID NO: 137110 - protein, 104 aa, Heterodera glycines
MKLCLLFFLIVEIEIGAEKKKVQQKTFEEIFGEKWEEKENEQKKRDKIELKIGKKLGTNRNKIYKWIKELGIYKKWHNKSKTDVQKIEIVQKFNAMKNEYKQNG

SEQ ID NO: 137111 - protein, 82 aa, Heterodera glycines
MKAKNEKSVQLKLEVPSPPPLPNEFELKNVFGISPNPLRQKNCTKDIQSQNADVQQQYDDLEMQFMIQSTIGMLNEFEDENE

SEQ ID NO: 137112 - protein, 45 aa, Heterodera glycines
MALNWTFRKECVIIFVMNLVNYVSLMAMVHFLYSRRAKNRKRYCI

SEQ ID NO: 137113 - protein, 83 aa, Heterodera glycines
MQRSTKTAILKLGGSRRADPFKSNRFRVSPMLFKSDSQISRLGTSFHLDKNLNSHVFSPTVKLIKKSLLPIKLMSPNNGLKTQ

SEQ ID NO: 137114 - protein, 132 aa, Heterodera glycines
MVSDQNRIIFNLRSQMIDQRAVILQNLSRIERLECFASNNRGGRGNFRLRYNPMAAVELTLLGNRLEDRARRHRVAIGASTSASTVNEANGGEHGEGSSAQNQNVPSFGPTIERHMERSRHRLLHDEMVQRS

SEQ ID NO: 137115 - protein, 78 aa, Heterodera glycines
MPIQTKREMETPNEQQQQNCNEAIELPCVNEKGGQSNGSERPKQTIKRKPQQMAKGEECDLLSDEFLFENGNSIDLEW

SEQ ID NO: 137116 - protein, 243 aa, Heterodera glycines
MLGRSGEALTKTLRTEAFRNLMRQDIAFFDDERHSTGKLCTRFATDTPNVRYVFTRLMVVISSVVTLLGAIAIGFVNGWQLALILLAIIPLILASGYFEMQQQFGKKMRDTELLEDAGFGKKMRDTELLEDAGKVASEAVENIRTVQSLNKQLFAVENIRTVQSLNKQLFFHRKYASLLSAPHSANMHQVHIYGFVANMHQVHIYGFVFAFSQSLIFFMYALAFWVGSLFVLNGIMRPASVFR

SEQ ID NO: 137117 - protein, 162 aa, Heterodera glycines
MHVWLLENIDYSANGTEGVQLENVEEVRRGGFFRQNIYGIYKLMSIFVYAYNNNHLMMAKRINWTNESIQKKEQNEEDTQNSGEQQQREEEKDDEMAENNWEKGEEEEEGGRGNGGEEDPIEVLLKDIFGGHGGTAAVAAETAAEEEPTTSGEMQQNATNEK

SEQ ID NO: 137118 - protein, 86 aa, Heterodera glycines
MARIVHNDGTSNLFNQIPSIPVDNELECAICLDQIGAGILAKRMPSCEHIYHENCIITWFRVGHNTCPICRQQIIEMPMIQPQNGP

SEQ ID NO: 137119 - protein, 55 aa, Heterodera glycines
MPGPGPGPGFHVGPGPGFPGHILAFSDFYFILYNFFDIIYVVLNTLSIMDFKFYI

SEQ ID NO: 137120 - protein, 71 aa, Heterodera glycines
MFLFGITKSKTGGEFAHYVPCNFDISLLSIEKAAIPHHLKTEKHKKAAKAANSALAITAFMPSKSAPTEEG

SEQ ID NO: 137121 - protein, 78 aa, Heterodera glycines
MKKELSVNGDKRPYGEKYKEICAKLGASSRSIYKWKRKFGFNCDAKIKVCPHSEAINVFSDLSQSTQRWRKAVRFQSM

SEQ ID NO: 137122 - protein, 78 aa, Heterodera glycines; identical to SEQ ID NO: 128403

SEQ ID NO: 137123 - protein, 213 aa, Heterodera glycines
MPNGTQELRFDIFLLEHWFVIMVSGKQLGDVFWPNEWWHGEAWKNITAIRLNGQMLLLYGPELDAYGIENENFKFSVPLPFSTGINGLHENSSCFFRVQMLNVYEAKLLIVNFTNDKSASDLATFSIILGKSFNNDTSFNNDTIVFEVELRVFYDGKWLENEHRNATITFKNISVLELFFGITNGNDVIKLNGVQMFEEYSNSAPYCDMKKIE

SEQ ID NO: 137124 - protein, 75 aa, Heterodera glycines
MISAKVENILCNKSVMLSEINSIGFDMDYTLAGYISPNTEELIFKLCIEYLQKHKGFWIEAIAFCVIEQRMAENS

SEQ ID NO: 137125 - protein, 40 aa, Heterodera glycines
MYPRNMVQLNGEVKVMNTFYDLPETDLLSQLVHLFDKNSG

SEQ ID NO: 137126 - protein, 182 aa, Heterodera glycines
HSDFKRWKIIVAWILPIILLNFNLLFALKSTENDTYTILVSSSSEERVKCQYNYSLHEAYYFFYWPRSFFTFLLPTLVVLVANLTIIIKLRGRSILTGNVNSSAVARANNVVLFAIPVVYIVLNIPYSVRSLMKFVMDSVSNEKLYQNHYLLYAGSFYIYCFNFSVNFIIYALSRSESKNKI

SEQ ID NO: 137127 - protein, 55 aa, Heterodera glycines
MRFALLEEKMALVRLLRRYSLAKNEQTEKFLKVNSQVVLNPGAVMVQLNLREENF

SEQ ID NO: 137128 - protein, 218 aa, Heterodera glycines
MAEASSNVTEISGTVIFAAYAMAFLELGTLIPTIPILAFCSSIVYKTSILHRNLKGILLAQLFGIFMSLWPRVFLLVDKIFVTKNFFLLVPNFIAGASTAALTFINIVGHVLIVERICATVYVDTYERYRSWAFTVVWLSITLSALKIILSLGLTIYQTLVLDSMFSLTNIFVGIYNGAMIASLIEIFLFSIITKFNQKMFDLRQGNCKNQQLSVRYQ

SEQ ID NO: 137129 - protein, 180 aa, Heterodera glycines
MFIVLQKGVKLDGSNPAILDGYGGFGSSQTPYFSVTRLMLAKHFGIVSVIANIRGGSEYGEKWHEAGMLDRKQNVFDDFIAAADFLISEKYTNNKKLAIHGGSNGGLLTAVCSQQRPDLFGAVVTRVGVLDMLRFNKFTVGAAWATEYGDPDKPDDFSFIYSGCSNSNGRRFDFVMLCKT

SEQ ID NO: 137130 - protein, 165 aa, Heterodera glycines
MASETTPSSLPLPNSSQSIYPLTTQSETAAVCFSSTSSPKLAVYNNNHSVKSLQPPQKRIKTAILAKKLLAAAADSNLIDSIGVGQPNGNGTPKRMSSDEHFGNENLSIFEGTQRETEGIGEGLFEEDEEETEEQEERELDERPDGGRTDAATSVVVQEQKKNNN

SEQ ID NO: 137131 - protein, 58 aa, Heterodera glycines
MARIAAETVRRTIESKQRNGGSAPPGQRTHSDDDAKRSDKNGGSAGTDGRKADTFHNG

SEQ ID NO: 137132 - protein, 21 aa, Heterodera glycines
MATKRTALASAATTTVHDQNL

SEQ ID NO: 137133 - protein, 139 aa, Heterodera glycines
MEHCFHLAKIERRHRRADSETNKNIPSFLELNLNNNTYEQYKTNFSAADGNVTTNSTNNYSNNKKATTEFDIEKPPVFKTKTEENAFRRKEVEEKRKKEEEEEQQKGKKEEKKERKMGQEKEENPKSEEEQKKKNEEQK

SEQ ID NO: 137134 - protein, 132 aa, Heterodera glycines
MSLIELLAKTTSAARAVKKRQRLQKRPKPWLNCFNTQTSLQQIWKINVRAPPLLTIFYYYFTSPTTSKNDGPPTADGFTFTAAAQEECPSSSSSKSIATLITDRFRPNRGTFYRYTPAPVVTPAVVHKLLLN

SEQ ID NO: 137135 - protein, 2721 aa, Heterodera glycines
MSGFLRTKIAIELKALEKAKTATELYAEPDQTLTSLENAILLESAAERIKSEVEAVNAKIEQIWITASKWHDVIQKMDKDERKSEQTAYEQFQTTEKLNTKMEAANTKLTELKDLEMKVEAGAKLQRSKADRDARVEQREHAKAMAKSNAEADKGNNRARGNEMTAALYQLPTLRIKPFGGDKREWPMFEEAFKVAVDQKPGSKTEKLNLLKSLVEREAALLIGGLRLEEKNYEIAMKLLKDTYGDKGEYKKLYKPFLREILEEKAKNPDFWDTSSLRKALGSALSKELAIKEVMREYGFEGKEANPEHGFKRQLRRNRFGGSVNVATTHFGKPNGERRKIPEQKMPSPRQGQRSFQQTPQNSAFRERKGQGRSPKIQRNPTAVNTQGELFLCVFCGGKHRHDSCEKARTVQQRFAVLQEKGLCYKCLKSNHIGRNCPCPMKCFKCQQAHPTALCHQTNNPQRATEWRNMANKVMNVRKEEKPDKRDEFKEVSFTPSQCNSVQGNSRVLLRTAEVTIFNPSNPKRSMVASVFVDDGSERSFIRANVAKQLGLPVIETEECHLTGFGEKEAKRYVSNVVRVGFLGVNGDPYICALNEMEFIVKAMPIVTLNSMDEAELSKKKLSLPSRPRQPDILLGMDVRHDLKIRDETEKLPSGFTLSTSRVGRMISGYGQVQGPMDMSVQVTYTGALISALQCANSRRDADEEIEEQIKTFFGLNIIGLSDNPEENDKEEVMRTFRKSLTFKEGRYECGLPWNERVKDLPTNFQQARARLCGTVKKLRELNLVDEYQKIFNEWERNGIIERVPDPTQTTGPVHYLPHRPVIKMDKATTKIRIVMDASAKPANRKGAPSLNECLHTGPLLLNELTGILLRWRRMKDLILADIEKAFLQLSVREEDRDATRFLWLEDPQKTEISSPTYVRTVVFRFCRVSFGLTTSPFLLNATIREHLSFYDTVLPQTIMENLYVDNILINVKKNEDMAQICHESIELFRQGGMKLQEFFCSKPIAIRSLPAELLAKNQKEIKVLGIPWTNEDDEICFRFKKFAGKHTKRNILAHIAKIYDPLGLVAPAVLPAKHFLQKRFEAKNGWDEGLEEELIHEWNQIMETWQTKEGTEVQIRFARRVDNEDEVDKEMHCFADASGKGLGVAIYIRESTEKMSVNLVFAKSLVKPSNISDVAATIPKMELQSITLGVKLLKYVLQHLKLKPTQTTIWTDSLCSVERIKEHKKCDRFVSNRLAKIRGQFEVKHLVSADNPADVASRGTTPRELSRNLLWKHGPKWLSEEKALWPKPAKVYHPDEEKLRGSAEDEEVKTAAVMNEVPFQPTIDVNRYSSWKKAKTVGAYVLRWIHSVAKNGYNGNLLPILSKMGPKKHGNQDKGVLSVPELCASEHLLIWEAQRQFPTEEKTKENLRLFKDKEIWRCRGRIGEATVKEDTKFPIFLPPEAWTTKLIVLEAHWKMKHPTHSTLLGYMREKYWIPKGRRFIRNTILSDRHGCLNCRKERLKPYAYPQMPNLPSERVAMIRPFEKTGVDYFGPLTIKGGVKVYIALYTCLVIRAVHLEVADDCTATEFLRTFRRFSSRRGLPSLMWSDNGTNFIAGAECIKEEWRREILVETSHSGVSWKFNVPRAPWQGGAWERLVGITRSALRRTVGKSLMERQEFDTLVCEIEAVVNTRPLTFQSEEEFTQPLRPVDFLLPYKRVETSLPLSDEDPMDPDYTYQPRKRGELHQLMRVAIKRIDRFWKQWKTEYLLSLRERDRTNRAEGSLPREGDIVLVEEEEDPRSIWTMGKVEKLLKGRDGLVRTARVHTKGKTLVRAINLLYPLEINTSAEDEVSQIQVTAIMDSPSAVMEGGDPQAATTESSLPPGTVMQDSQIVTTESSLSPVRGRKERQAVKERRIRKRQPTEEVRGKGKSKKNGPYDPLRPGNYRIPRRNPFFPSQVAYNEQTRTYRRRRGRTIDLSGLRKLFAGLGGTEFVRRELQEKANPALREERLRKDKVKFMEDDARRVAESERKAAEEKLEKSMKDSQRQTNVESSSGGTTRNPFEPMEVLPGDPEPEVPLEELARQEKFDREMALEQRKMYEKRRAERNAEKDRRRWGLPRGMVRRKGHYAPHQGINKRQKWHRGRHINEIQTGRKYRHPRAHDISPLRQPNGATTELLALSSEMEGQIRNDKRARDESQSKEPVRSQRRFKARDPLDEQLKRRQKGQQAEENPGRIKLAPASPGYRRTINYSLFTRCEPGVKGHEGCQRNCTMGSLSHGRLTKIPQAESKAVCLAQAFAFDWLGRMHAKKFNENWCALLGSGSEIEDSLKNWWTKVLQNNEKTIPQKQLECVLMAWDNSCQVFGQEWKGKIYGPVGLEEVPVKTNVISAEAQFESWLRNLTERFGQTLTKLRAKEYWKDCHLQSKRVLVVSNQEAAELVAKEFEEEGSSWFVHFGDKPLREKMFPANWNIKIIFNLELRREEREELEVFKEDIKDIARAGLEVHLATRKNARLPREFEEFAEMQGCGIYQYEKIGELAAAIRGTPANTGTNPESGESAQKSTTGWRRAVTKSLTGLTMLVMLLITLLQPMMINGQVIRPERNGRWIPVNPFGRPLRMEELVGFTEPTVPRLSLDKRGQITPTLPTTAADMSIAHIREWYKKARMQTSGTTQTSAATTTVRTSTSASTEMTTLRTPETTVTTRTTTKTKGVTTQPQRKTTNQEPRTDSRRRQWTQTPSRRWTDQI

SEQ ID NO: 137136 - protein, 45 aa, Heterodera glycines
MRGGNAKGKMAQLGGTKVGCCICNKIVDEPQHTKLFFVLYLQQNC

SEQ ID NO: 137137 - protein, 101 aa, Heterodera glycines
MSNPPNPPNSPYHFLKEFQIPWQPPSRSPSPLPCPHQPPSTPTGATTPPGCEPLITWPPEDWSPEECMQTNNFDLLWNSKINIGSSSQCMPEEPQIVQTDV

SEQ ID NO: 137138 - protein, 62 aa, Heterodera glycines
MAVRSILGNYNWSEVSFVYTPDDQRIFAFIIGSMRGLGMTQPGEQFFKQILETIIIANRIVY

SEQ ID NO: 137139 - protein, 78 aa, Heterodera glycines
MHPQFSAPIHHHLITGTQPTNIPINGTQSTNISITGTQSHQSFSNTITGTQFSDISITGTQPQQRNTELFKRNPEIEI

SEQ ID NO: 137140 - protein, 154 aa, Heterodera glycines
MTDITFSSQETLSWQIGYFVFTFCTLGPSSSASGSTSSSSADSEAMVAPKSNGIEAPPKISEPFQLAHTANGVNGPFHPCKLLNEPPIVMLGDGISCSAIGGGAGCVAGSARRRSRSPGARRNAHSVQQPQPIRAAQQLQHQQQQQQYHGANNG

SEQ ID NO: 137141 - protein, 143 aa, Heterodera glycines
MPAETANSNSNVNSSATANNNAISTHMLREKNSDEAMSVLEFAFGVSIDDNNGIAQEFSSSPELLLQLQDSVRTILTSLCLKTDEVSQSLLLDELIFTAVNLIKPSNGFSSSNSIPNSDDSLAVPLIISLEHGNDANVCSTNR

SEQ ID NO: 137142 - protein, 256 aa, Heterodera glycines
GLKVAQNAAAQAKLAEQQRQTANSTQKTTPTTQTTPTVTAAKVGKEKVREQRDSSKQRTTQQTDKEMDSVDSASVNSAPRTNPSQQQAPPKKAVAPPPPPPPPPPPLFVQPKKVVQNGPKAAGGMPPPPPPLGLFVSTAEAVPKKKIAKIGSKMPMINWTALNPNQVKGTVFNNMNDEKLAEELDLSKLEAMFSLDEKKPSSESQQQNVDANAAVKPRGQPSPNATVNCGKNTVLSTKRLQNIAIIRRKNREKGNG

SEQ ID NO: 137143 - protein, 74 aa, Heterodera glycines
NSSSNDLMRGVCGLQNLGNTCFMNSAIQCLSNVPELTTYFLEDNYVDEVNTSNPLGTGGRLVKQYADLLKDMWS

SEQ ID NO: 137144 - protein, 218 aa, Heterodera glycines
MGTELLRSLVWERQCPDEFGMYRYKKYNVHRLIVRFYVFIGYFFLGICFNQLMVDIAKYTIGRHRPHFMDVCKPATQMPIRSPDGSTQMVLKEYRSNCPAEEHSYVTDFECLGDNKYLIHESMLSFYSGHSAFSFYAAWYTANYSIFCCFFVPVVFASTHLSSTGQQIGAACCPICAVRRCRVCGVHAGQQLQTPLVRRVGWHTDRLSDRPDQCMCIW

SEQ ID NO: 137145 - protein, 208 aa, Heterodera glycines
MSTTLSTPFIPSTVQTKPFAGQKPGTSGLRKRVPEFQQPNYTENFVQCVLDGGLGEAKRGAVLVVGGDGRFLCPQAVNVIIKIAAANGVRLKKTHLGALGFSDGGIILTASHNPGGPKNDFGIKFNCENGGPAPDNVTERIYQLSTNIAEFRICPNLDIDFGQIGTTIATIEGIGQFVVQVIDSVQDYADYMEKIFDFPKVLDSKWAI

SEQ ID NO: 137146 - protein, 35 aa, Heterodera glycines
NGWPRNRRDSPSDNALNSRRRPECSAPSNTFGQQQ

SEQ ID NO: 137147 - protein, 18 aa, Heterodera glycines
YREAIPEGFGLPINLGAS

SEQ ID NO: 137148 - protein, 18 aa, Heterodera glycines
LIPDHNYYSLIMSAWANG

SEQ ID NO: 137149 - protein, 34 aa, Heterodera glycines
CPFGVLKQLWGAKIQRRIKVQAIGKLFPKDSVSP

SEQ ID NO: 137150 - protein, 28 aa, Heterodera glycines
AYQNSSNLALSILIQIAPNFFYSLTRPY

SEQ ID NO: 137151 - protein, 86 aa, Heterodera glycines
MKDNEFWIKGVSIRGKGADEPDDGDKAEIWRDLVPMKKCPKNRKSLFKMHYLNVIQEILNFQFAIESCLKFAHLNMSMGIIERKSI

SEQ ID NO: 137152 - protein, 33 aa, Heterodera glycines
MYHGQIQLPVQTTTTTTIATDTKTQPNVNPVRF

SEQ ID NO: 137153 - protein, 58 aa, Heterodera glycines
MAIMATVWKTKAPNPVIAVRPITTLNVVWDKQTAATELQPSPTTTTVFYHKIYFITKT

SEQ ID NO: 137154 - protein, 93 aa, Heterodera glycines
MLSFVVFLLFAVGLAQLPSGIVPACRETVEMFCQCGAVCVPKAGWAGDKCCPDGFSILCGCPVKERNGSQTIGQLTIRQRTIRQKWIRLLDSE

SEQ ID NO: 137155 - protein, 229 aa, Heterodera glycines
SIYHHALHDRWHKAKNLLLMSHLQALVDHSDASTQILYNRTICQLGLCAFRHGFVRASTQILYNRTICQLGLCAFRHGFVREAHQNLSEIQNTQRAKDLLAQGIPPRQSEKTAEQELKELKERSLQVPYHMHINLELMECVYLICSMMLEIPNIACYEYDVRRRLLSRSFHYQLKFSEKAALIGPPENTREHVVAASRAMLRGEWIKCRNYIINDKMNAKVWNLFRNSD

SEQ ID NO: 137156 - protein, 182 aa, Heterodera glycines
MAFSEDPLIKIEEDNPRADASTHNLPTNEKLLPQNNHFASNVLKAQTDWHSQTEQQQYQIINFVDNNAPPHSELTSSFNDFADLLSNTKTNDVVPDFGMTQMRKIEPKHFNEPKILNNVTHLNQTAASQVSNNSKQFHELGMYVAKLLSKTPQNGIAEAIRLKGQIFSMCTSKQIDLMSESM

SEQ ID NO: 137157 - protein, 65 aa, Heterodera glycines
MRLIRMKLNSLEKGKMDNAYDEAVKRVQSLDEMRKKLEDLKCNMENGETEASGEGTTKAQLELEE

SEQ ID NO: 137158 - protein, 145 aa, Heterodera glycines
MDLDPKAHATLSDMTTQDKLGMARELIDRINKGDLYSNRALVSKLIESYDGLMAQEKEFIALMRDIIKSYHEAIDAVTSELNSIQQSQQKQQIAENNVSTQLDGLVNGFTSLENMVTEMEKTSLMDEQFKICIELHYEQVKKHFV

SEQ ID NO: 137159 - protein, 526 aa, Heterodera glycines
TFQGISQTFVFTSVTGHLMNYNFHESYKQWVESRIYDLFEGQVVLDIDSGMRDIETNLKRESRKAHTLLIWTDCDREGEFIGNEVVKVCRKENSLLTVRRARFSEITDQAISRAIQNLTAIDQNWVDAVDCRMELDLRIGAAFTRLQTLYLKKNFYQFLRDNDPKSVISYGSCQFPTLGFVVERYRENKEFVSQEFWKLSGKDGSTNIEFLWEREGLSTQLFDREAILALYEACTAVVHSARVKEVDSHPKTKWRPPPMDTVQLEKLGSKFLKMNVKRIMESAEKLYQHGLISYPRTETNCYSADFDLDSIVNRLTENDQWGDFAMNDVQMCGGAKPRNGRKSDKAHPPIHPVKNANRNEIASMDEWKVYELVCRYFLASVSRDASGRETKVKPPPLLTEADLIALMDKKGIGTDATHAEHIERIKFRKYVVLNNANRFEPTKVGLALINGYDRMEHRHKVSKPNLRAELEADLVKICEGAKTKQTVLREQINIYKELFRNTELKVHKLGESLRAIYQQNNNGLIR

SEQ ID NO: 137160 - protein, 17 aa, Heterodera glycines
MEKACKIWRDYIDNYWS

SEQ ID NO: 137161 - protein, 96 aa, Heterodera glycines
MPNKNEIVVKYSFLDLTWFLMIEAVFYAISKTVIPNREIFESGFQKKCLVVKTIFHISLHNFVSSARIETGIRPLERAARALQEEIRINSPMWPKF

SEQ ID NO: 137162 - protein, 120 aa, Heterodera glycines
MAPKVCADGIIGSDDSEHTLPTGPTHPLEEQLDTQTVEQRRAVLELVVSRLLFFVGEVVLKFLSYAECTFSVHIKDTILRRGLNTPNPKRPPSRHSELNFENTNKNNNGDEGGNDDELCQ

SEQ ID NO: 137163 - protein, 89 aa, Heterodera glycines
MEMEMMQRSQNAKLAAVRNLHDFLLNGPKEPRSTKDQKRVGRIQKALLANFVSPFSRIVSAKCRKSDQKWAERHTEAKGGEGAAENDER

SEQ ID NO: 137164 - protein, 168 aa, Heterodera glycines
MSVHFIDRQDAGQKLYKALAQLDLQQQRDKIVRKIGAPDNDDSAIGAIAEGLARPILTYFGEHRTPIPLDGRVAIVVDDGIATGATARAALAVLRHKNVSRIILAVPVGPPETIDQFRAEGIEVICVATPPTFNAVGSFYVKFCQTTDEEVIRCIEKAKEWMHGERSK

SEQ ID NO: 137165 - protein, 194 aa, Heterodera glycines
MSIDKQSNIDIDPSSNEIVKMSIDDEENDPTSSYKRSKNHQTSKNEFIQQIDSLLEAKENLTQIYMDNWYVVDDMAKEYFSIVIKMLGQMPPKIKNLFENDIEILNFKFKNKYQQNIGGGGGGTINLDKILVENAMDYDEDTLRQTHRSLIERFAIKIGRMLEITINNAFVPSNGIMAIIELHIYQTFSEGLKK

SEQ ID NO: 137166 - protein, 40 aa, Heterodera glycines
MREWVASGCCPVGTASTMLCHGKINAGAEIIIGLRENCCY

SEQ ID NO: 137167 - protein, 65 aa, Heterodera glycines
MNLLSALNLYATAQQDAVHALVNYTCEPKDGEEEEEKPKNEEKHEVEKEEKESEKKQEKKNISSK

SEQ ID NO: 137168 - protein, 132 aa, Heterodera glycines
MTFRCQLRVEKPLNVVVEMDETEKKRMERELAEEGQNILEKVICGRAANALEEVAQQKQRDGRELTKGGGIKPRVKGDEANPSEWGGSDGKGEGRINRRFALLPTKMTLSNLNASYVVEEVMRRMRRVRRQK

SEQ ID NO: 137169 - protein, 73 aa, Heterodera glycines
MASEPWEQQAKLSEKYYPNTPMLHYLVKMLKLHGLYFDEHLVWREVQNEIRISKGKIIYPPIGAGKQKMKAKI

SEQ ID NO: 137170 - protein, 732 aa, Heterodera glycines
MDTVIQNLDVAQGTDVTTLSVCFRSHSALVRCTEAVFYKPHGEQLTARRDDAERALMTDQTAFKLPKKGVPLILVHQNTPAQRDEVSTSSANPGQTDTAMRALWRLAQTFPGILIRCICFYAAQALEIERLVAQQEIPDILVTMADATQGHESSLVVVVTTCSVFDSAADSQPFWADAAQGGRRHLPRQPWNDHHWRFAAAQPDGYVAALPGPSDNGDDSGRPGVLRLRAVQQPRQLLRQGRTADLSQRWCGTVRAFLQQLVDNVGLFGSVVTNMPSILCALNPQKYMYQPMNPGSQSVKETALLLKPGRLDISSSRVGSKILRKPSRLAKFVKSRQQTQINQLINVQRNNQPNPAIIQTIPSMPDVAIFEQCDEKHRITEWLERFTFAIDSCAPNAADDIKVKALINKLSETAFSEYSKFVLPAKVTDFDFDETISKLEKLFAKPQSIFVDRFACLIATKDDGEEFHQFVNRHKRLLKDFQFDKLNEEQFKGLMLLTALKSSKDAVLRQRILAKLTKDGDAVKYDELIEECINFLSTIHEAKLIETTSVSSRTVNAVKPNQRRERPKPQSKQGQPSATPNQLQCWRCGKTNHTHRECSHKSAKCPKCRYNGHLENQCEKVQEWRRKNFKVKKVGTLSIGIALKSINSASLIKIKVMLNGRIVKSILDSGAEINVIDEETYRQIGQPKIWKCAERGRMFDGTEKSFIGKGEGHFEFQGVQVKNIFMSPRRDR

SEQ ID NO: 137171 - protein, 350 aa, Heterodera glycines
AGKESRGKNAPINPTKVDGTPNKDAEKQISQLKQEYTNVLKNELGLCTKVKAHLELKPDAQPIYRKARPVPYNAKNAVDGELDRWEKMGVIGKVEHTEWAAPILVVKKVDGSARLCIDYSTGLNNALKDHQHPLPLPEDIFATLNGGQYFSQIDLRDAYLQVELDEASKKLCAIATHRGNYKVKRLPFGIKTAPGIFQSIMDQMLADFDFTTAYLDDIIIVSKGQKEHSEHLKRYEIKYLGQIIDKNGRRPDPSKITAISEMPEPTDVSSLRSYLGMVNHYQQFIKNMRFVRKPLDDLLKKDTEWIWSDKCKNAFDKIKGILSSELLLTHYDPLKEIIVAADASDQGIGQ

SEQ ID NO: 137172 - protein, 86 aa, Heterodera glycines
MNLVSTKPIIHHEKCIGDPIEKLSVEQIDRQQRLKILTCTENIKTLWREGFQKAEEFDIATVAETDTEESLTYNYPTFDSIRRAYN

SEQ ID NO: 137173 - protein, 62 aa, Heterodera glycines
PFPSTSTDPSTIDLTIQKHVHSIVEEQSEQLIHQFTGVTVNQNVVIAIAGMAKVFTGELIEE

SEQ ID NO: 137174 - protein, 115 aa, Heterodera glycines
QRHGAETEQARIYCPGSGLRTKSEIEEEFKCARDGKYPEENLEDWSITGKRSLTQKALFHYTDRRAGKGYSDFGFVSSPLIPNRIRLFQPPPFTTVALTFGRPFAKLTDGTFSFV

SEQ ID NO: 137175 - protein, 99 aa, Heterodera glycines
MDKILPCQPSTSNTSFTNNENNDNNIKIDSDKCTVTEMEEDEEEDEEFQPNETDLSSDDVISQPNVESDQLDSVYHTPNCETQWPKENDEQVAMLIKKM

SEQ ID NO: 137176 - protein, 53 aa, Heterodera glycines
MKNNEKVEELTPNKSSQEENFEDELFGQQDSDLSFVTTWDPIERFGKKKIATK

SEQ ID NO: 137177 - protein, 29 aa, Heterodera glycines
MALALAIAKCQKGVNQRGKDELIERHKSN

SEQ ID NO: 137178 - protein, 18 aa, Heterodera glycines
YREAIPEGFGLPINLGAS

SEQ ID NO: 137179 - protein, 23 aa, Heterodera glycines
VPAPQTQSVCRKSNNRGTCPMSF

SEQ ID NO: 137180 - protein, 92 aa, Heterodera glycines; identical to SEQ ID NO: 131693

SEQ ID NO: 137181 - protein, 92 aa, Heterodera glycines
MIGRAVRNSPFIFEGIFKFILYPRKMAISFFEKFYTSQKRLGMRRRAVHNRHFISQRIFIFRGYPRKMAISFFDKFYTHTNALEHDREGGAQ

SEQ ID NO: 137182 - protein, 48 aa, Heterodera glycines
MIGRAVRNRPFIFEGIFKFILYPRKMPISFFEKFYTSQKRLRMRRRAV

SEQ ID NO: 137183 - protein, 116 aa, Heterodera glycines; identical to SEQ ID NO: 127487

SEQ ID NO: 137184 - protein, 144 aa, Heterodera glycines
MMLIQRHIRGCRWSSRSGRLSIGRRIRRRSSRRSGWIIVSRRRSIRGRRRSSRSSGRLSVGRRIRCRSSRSGCVSVSRHRAIRNRRRCRRSRRSGRLSIGRRSRRRRSRNGFVGVGHRRSIRVRRCRWSSRSGRLSVGRRSRTG

SEQ ID NO: 137185 - protein, 176 aa, Heterodera glycines
VTTTAGNTAITPPTTTTAGPERRPTPTNPGATTATNTEAPAATTPATTTNADGATVTNANEPVATTTTTAATTNTEATAATTPATTTAIADGAVATNTDATGAATATTDAATNTEAPAAATAPTTTADGAAATNNDPTGAATTPTTNAATNTEAPAATTPATTADVALDHHGTTTE

SEQ ID NO: 137186 - protein, 144 aa, Heterodera glycines
PAPITAIRKTLEAKMEELRKIREQNGAASHGQGVDYKQIADNALRAAEELQKQYREYQRHYTAEVQRLSGQLVKLEQELATRQQKITVVAPTETVAEHKQDGHNDDNDAVNVSAVIKMPTQHQAQHVTRPQRGYEVKQCRKRPI

SEQ ID NO: 137187 - protein, 97 aa, Heterodera glycines
MGPTQKKARLNFTIDQLIVRPLRDSQRVNVVPPPTVTNAAQQTQQPPLAALQQQTLQQLTNAEKPFECPRCKKAFKVKSYLTKHKKSCGKSESKFDD

SEQ ID NO: 137188 - protein, 82 aa, Heterodera glycines
MSNKTNVLDANSNAKGNTLGFVLIAGGVFLLLLLLINSVVLLIYRRRRQRTFVYNVNSEGKRSTKTNSPPADLTLISYKAFQ

SEQ ID NO: 137189 - protein, 140 aa, Heterodera glycines
VLPLVPENRPCVVFRALRHKNLTLHETPKRSNRKRGLTNGTRFIAAGDDSTKAECEICHKKFGRPWLLNGHMRTHSGDKPYSCEKCDKTFADRSNCRAHERTHGAEKPFGCPRCKKAFKVKSYLTKHKKSCGKSESKFDD

SEQ ID NO: 137190 - protein, 82 aa, Heterodera glycines
MSNKTNVLDANSNAKGNTLGFVLIAGGVFLLLLLLIHSVVLLIYRRRRQRTFVYNVNSEGKRSTKTNSPPADLTLISYKAFQ

SEQ ID NO: 137191 - protein, 34 aa, Heterodera glycines
LRFCVLTLLFFPFFPIDHVNSFSIHLVSYFMKLY

SEQ ID NO: 137192 - protein, 81 aa, Heterodera glycines
MRTFWLLRRDNYTFFLKPPGEENAEHNQHQMGNTEEWEDNNNNTNDNNEFKPILDPEIFPRPKQNAAARRHQQPRDFCSSL

SEQ ID NO: 137193 - protein, 60 aa, Heterodera glycines
MDDSSTLIDRDEVMKNFKENLSFVNNKYQIALPWNDSEAPSRGREEAEKGCETLQILFTC

SEQ ID NO: 137194 - protein, 87 aa, Heterodera glycines; identical to SEQ ID NO: 129152

SEQ ID NO: 137195 - protein, 296 aa, Heterodera glycines
PMNTSLQTNSESVESTDGDESSSELRDPHSALGVEEIVNEEEARRRREQLNRRPSYRMILKDLETVGDKPMKKEMHDDGNNNTANTFNHDRNDRNTGTTLHQLGQLNLIGNPAASIAHQQQQNRLMATVAEMPSQPQPQQLSAATNSAPPPQPLLAAVNNLEMLGLKAPDALGTAAFGPNDWQNNLLSSYGRTQQQQSPQVSLMQQQQQQQNNAAGAVVGTMANSPLGMNNIGVVAGHAAALQQHHQQQHVTPPPHGLAPQTLGQRAAMTTPGKDKEAAKECRRKKKEYVKCLENR

SEQ ID NO: 137196 - protein, 24 aa, Heterodera glycines
MEKACKIWRDYIDFSALELLELAS

SEQ ID NO: 137197 - protein, 84 aa, Heterodera glycines
MYSPFDLFLVSSGRQLSSFAHLFVPINCRIFAPNVRTMSTKPPADNESNNEGQQKSSNSLARDGNYEDGNMKNRDKQKEFGGPA

SEQ ID NO: 137198 - protein, 25 aa, Heterodera glycines
MTSGATVKVTVFENFFTFFALLSYS

SEQ ID NO: 137199 - protein, 110 aa, Heterodera glycines
MDEKIEFDAKQAHFKRKLGPLRYGNRIPKAEKAHYTPEQREADRWLSNHAWPPPAPFKGILFPAKIWHWKKGAAAYASHWRDEFLGSKNPDVKAAADAAAKGDFLKLGIN

SEQ ID NO: 137200 - protein, 20 aa, Heterodera glycines
MTEKLSGLSSSVSSYLSDRY

SEQ ID NO: 137201 - protein, 436 aa, Heterodera glycines
ISKSWRIFHFFITCDIEKAFLQVAVHPEHRDCARFLWLKDPHRPFSKSNMQIFRFTRVSFGLTSSPFLLAATIRHHLSKFPSELSQEVALNTYVDNILLSVQSPNEAQIKAKSIISLFQRAGMTLREFASNSENALSKLPDDIKLSGSEQKFLGLNWNTQTDSLEFNLSPPNNDFIPSKRSILSFIASQYDPLGLISPLILPLKIFLQSIFQNGSDWDQTLPTQIQNDWDCAIKNWKNAEKVSIPRCPVTLPLEGRNYQLHCFTDASSLAMCATVYLRITHPSFSPEVFLIFSKTKVKPTHNTPLTIPRLELIAVEIGTRALKFTQSHFSSLNLDPELTIWSDSSIVLSWLNSPQTLEIFVQNRIKSIKSTSNLVIRHLPGSENPADIGTRGLNSAQILSNASVWWSGPKWLPLLPINWPDKLKSKPITRPRTETL

SEQ ID NO: 137202 - protein, 193 aa, Heterodera glycines
MRKQRRANGEEKGDKSTKGSKGKNEKARRSNRREIKVFYGQSAVGNGSGGAEGGNTNYFANRDKDEEQQQNVINGEANDGKSDVAKELLICHSSSPTASPQPSGCFLTSANVVAESDGILREQNRSGEADGQSTAATTPNASRRPSNSSAAAVSGSVEDELAKIKVVLRQHERRIRLLEDQLADANMANAYGI

SEQ ID NO: 137203 - protein, 98 aa, Heterodera glycines
MAEARNIAALSFTVTHDGISVSYDQEVLRDIWHAFSRSYKKRIAKFENDFFAGIFPANIRSLAIVIFLVAALNVSFGNDKTPFNLADKLNYYVFSNIT

SEQ ID NO: 137204 - protein, 58 aa, Heterodera glycines
MSHPIWQIGLFKCIKEDSVDCLEYDEESIDKYFAAIPCILSQWTIQSQSHLAISVPGL

SEQ ID NO: 137205 - protein, 48 aa, Heterodera glycines
TLTHEIGHLLGLEHSSDPRAVMYPRKKEHQPGFELSDDDVRAIRFLYN

SEQ ID NO: 137206 - protein, 1013 aa, Heterodera glycines
MENLERTLNHTRLTRQRAQNEGILLDRDGNVFFRENPPNRTLGVMNQNVVVADPNLENSEQLDSMEMRRRLLNPNNDSALGQLRQNERASLDENEEEEANQGFMRNRTDWTQNLGERAGPTQQIFRNFVFGHSQNEDDFFDHPNIRRTSTPVNENRCVGVGPQNLNEIGLLAEQIGRVIVGQLNSAHQNPNTNPAPNLTQHGVEIHQQIHHSAVFARRANNIPFRMPGQQNPAAIQQNFGRPQSQQIQPPNFQPRQPYAWQMNEQCVQVQQPPMPQMNYQPPPTFNTHQNQPNFGMGNFDFGIVLERIPDLSGTEGSDGIKKFFKKFDFYSLNWSDAQKIRALESKLYGRAERAFQTAQSTQPFRYEPIKREMLNLLDETDARNLNAFDELMQGVRRGPNESIDELANRISGLVQRAYNGLPQHLSNEYAIKFLVRAMGNPELALNLELVRTPGMTLDHFVSLAARAESTQKATQRFSRPDNRERTWRTNTPQHFSQTNNGPSRSNFEERGQQMQKFGTQSNRSWSCFNCNSPGHLARDCPQGKIFRAIERTNSSTTMNQQGKQQMGYNRQQMPEPNENPPNRHYQQKNYLKQNCLVLQEEQVHQNNFIVGELKQDLEDFFDEIRKCATEDKNSNFSKVGKVMAVLVEVFGTKTKAMLDGGAQISVIEAKFLYNLIRDKKLDVRNLSVLKAENRISDANGNPLECLGVICLPIKRHENSSEVKVAMHIAKSSIGFDLLFGTNALNELGYKMYDAISDTIIDFEKAKQNKINSLAVIYKTVLEPRATKFNGYGEPDQYEGREMLLPSDQGNDQIRLEPTIAISRDKQVMVKKEGKGGDKPPKKGQLQKRRTPYDVREDEGEQITAITKCKRVKNVSNLLPAVVPPPEGMSYNPPIDGYLRMAVINANEERQIEKKRRRTERRIGIGTDEVSALPALREEVTYSVRGGVTVRMKEEKVKEMAGGENEKVSPNELRLQKRKTTKGKKRQKLRIKKREKENGGKGSGGKDEKTIGQF

SEQ ID NO: 137207 - protein, 127 aa, Heterodera glycines
MYIEQIGRAQLSTVSIQGGWTCRCCNRHKWQGNVGSGGGGREVTHFAEKCVKRGYVKSESGVAAAAIFMYIIMYICLFEDFCVYFAIFLCLFRCLFRDFLCLKKEVLVIKKTNRKKYGQSWRIVSLI

SEQ ID NO: 137208 - protein, 136 aa, Heterodera glycines
MMLPSFNAAPIIGICLLLVFIPCSTAALTSQQPHTKNNTNNDTDNNGSSTESSVLGPPSRPPSSSAAPSSSSSSMMVMAAQKSQLTVTNEDKLCVMRKICGKDGELRQNCPYPYQPFPINLTMEIEYKELCPQLFK

SEQ ID NO: 137209 - protein, 64 aa, Heterodera glycines
MPTNYLIHAEMVTYKCNEVPDKFDHSCACIDCQHACTSSAPFPLLFHESCKVAGMDCKTAIRVL

SEQ ID NO: 137210 - protein, 85 aa, Heterodera glycines
KKKFFFGNLCHFQLLFRTNSNFLFLKVRTSSTAFVLSILCGTSIELCTPKKFFQYIGTYSKVTHVPFTINVVMLNDSHQMQRSAG

SEQ ID NO: 137211 - protein, 73 aa, Heterodera glycines
MNYIATGPGPGREFPVLRGHGPGSRSRILKISSPGPDRETGKNKHWYFNHQEDMQKSILPSLIVEFKNDNCTN

SEQ ID NO: 137212 - protein, 399 aa, Heterodera glycines
MYTSYFLISILFLQIINVSLRHLVHCYWAWNGINPWLPSVLIYKICPYLEGPLLQAHKLILKHASDVFEAMFRFDANKEKAEFALIIDYSLLINLINFELASTNCPVVEVPDVEASAFKVMLSFIYTEDLSELDGDNAMAVLYAAKKYDIPALVDQSLQIPISKLRNVFMAYVLAGLFGLENFANDCLFYIDKNADTLFESEEFLKIDQKILCEILERDELQISGEISIWNSSLRWADAKCRQNGIECSAENRRAMLGPALLKIRFPLLSNEEFSKKIVPSGVLSKDEVIGVYQFNSLLNCREISDVLQFPMQFPTNGRISDRKKGTLLMDIEKVSEFAREELESSRHSEKVFINGLPLKLLAQIKTKTESTDNEKCLCFFLLCDSPEKGANYLFINAN

SEQ ID NO: 137213 - protein, 142 aa, Heterodera glycines
EIDLQIDVRDCSGSSSAGDIFSRFEKDAEFEQILNTATSPSPSALETRQKAEVEVNEYLRDPKIKSRADPSLYWEVNSQKWPMIGDVVRKFLSPPATSSESERLFSTAGLISDDLRKSLLPENLAKLLFLHHNLLLTGFSIE

SEQ ID NO: 137214 - protein, 29 aa, Heterodera glycines
MAISFFEKFSMQQTLSNMKRSAKNGYLFF

SEQ ID NO: 137215 - protein, 29 aa, Heterodera glycines
MAIYFFEKFSMQQTLSNMKRSAKNGYLFF

SEQ ID NO: 137216 - protein, 28 aa, Heterodera glycines
MAIYFFEKFSMQQTLSNMKRSAEGSGIY

SEQ ID NO: 137217 - protein, 474 aa, Heterodera glycines
MQQLRQNKTSDKGNFVEQPQRQEGLQIGALEFVIAMERLPELNGTEGPNQIRKFFQKFLLATEEWPESRRVSALESKISGKAERAFDAAMKHRPENFNEICCGMKEILSEWDWTEMRAFNELWEGVKRRSDESLDEFAERLYGIVECAYPGLPSNFVDDFAVKHLIRAMENPEISVGLEIARRPGMSFDSFVALAVRAEAVQKATKSAGFGKEHRPNFQQKSTVPPQKIFAPRTNRVVCYNCNKIGHTSRNCILSPGLKHFDRPPKSPQHQKFVKKNAGFRKFSPAENKPNVFRLDNQLAAQRTNAEAGNKLKAPNRQRNSSSLCSVKRGKMEEKSAEIPKWFLNAIFAALVVFAGVFSKEKSKCGQIWKSKGSMSRTDEVKGRKAFGKLGTIFSPKAGEELADVAAANLENLLKIGLTLQRDFMPNRSTADTLAAPFNAECTTDEPKALRTSLLRGRGCANIVILKYIWRFVI

SEQ ID NO: 137218 - protein, 234 aa, Heterodera glycines
RFRPVSFSLCTRLFSDAYDINHLLIEWVDNAPITKNMNITMSDMDIVKLVPGTCDGNYSSDMDIVKLVPGTCDGNYSTGIWSCVTAEFFVSRELTHHILQTYVPTTLIVVISCFWLVISCFWLDVEAVPARVSLAITTLLTLSAVPARVSLAITTLLTLSTQANSVKNSLPEVSYMKSLDLFLAVSVLFVFGVLIEFTIFVFGVLIEFTIVNYTQRNGNLGEMPKPNIVWTVHL

SEQ ID NO: 137219 - protein, 63 aa, Heterodera glycines
MNRCKNLLIKSVFRVFGETKTSTRRTKEGPSSNLNYARSARSTTAEPLTFLPRSNQRNNQNEE

SEQ ID NO: 137220 - protein, 86 aa, Heterodera glycines
MSKRKVLLMGKSGAGKTSMRSIIFANYIARDTSRLGPTMEVEHAHVKFLGNMVLHLWDCGGQETFMENYMTAQRDQIFKNVQVMLF

SEQ ID NO: 137221 - protein, 30 aa, Heterodera glycines
MTEIKTDIGFARAFVRLALERKLLYLYLKK

SEQ ID NO: 137222 - protein, 237 aa, Heterodera glycines
MDNKTRSEKEKEITMTFGVSRTTIAKWKCQLRKRGDDQWSEEEANEHTSDEGTENLDGGEDGQQPMAHEDNANENDSENANSSENDSENANGRKNDSENANYSENDSENDTKIGAKESLGQNYPKRRDEWEKIVKIFDELKEKLIRKKSKLCNRLEIENKIAKKLGTHRLIIYKWKNKFENDKRKVYYSEKEKRKIIKIFYQIKDEKRETEEKVAQRMGINRELIYRWKKELGVGQN

SEQ ID NO: 137223 - protein, 52 aa, Heterodera glycines
TKAHHSAQTYAIYLGSKRNLDEIRAKYFKGGERTVKETARMVGLEVPEEQQW

SEQ ID NO: 137224 - protein, 76 aa, Heterodera glycines
MPQDQTIASVKKEDDQQRNAVPKDEGGGDDVSGAHQTDRRMPVKAGTHRNILVKDVTGENVIGQAEQERNGPNGGH

SEQ ID NO: 137225 - protein, 495 aa, Heterodera glycines
SLTGNLFAILVICAHRSVRTATNFFLANLAVADLLVAIFCIFQNMFHLVGTNDGRWLFNMFHLVGTNDGRWLFGATLCKLYAFVLHLFPCTSIGILVCGATLCKLYAFVLHLFPCTSIGILVCASVEKYIAVLHPLLALKVFTPRFLHPLLALKVFTPRFRVLLMASIWAVSLLFSLPYYIFTSYIFYKNVAVCTRFHWHSPISLSFVLWYCVPLLIILFLYTRNGLVLWHSPISLSFVLWYCVPLLIILFLYTRNGLVLWHSDSETHGSEEEDGGKGMKKHYLGKRGRRRKPSERRHSRETREWYHGMGQSSCQGLAKAMRNNEMLALPRQRMTLPRPRWAHPTAQCSWARWSLVKRCWEKQDRSTVAVQVIRLWSAIVFSFAVLTLPHHVRLLYTVWTEQIICSNSVWTEQIICSNSLEALVQPLTYLLLFLFSSCNPFLYAFMSQQFRSAIRDIFKCRIFMSQQFRSAIRDIFKCRIEWARGTDSAAEIETL

SEQ ID NO: 137226 - protein, 73 aa, Heterodera glycines
MHEMPKYAQICKYAHKSRNMHKCAKYAHIISQNSPLFLHLAAIFIQFLPSMRKTFDDSRFLSMAIFIMVNTVS

SEQ ID NO: 137227 - protein, 94 aa, Heterodera glycines
MCRDAHHAVALTCFFWCQFDVAYGTNSLILNFFRVMDPEISDNFPAENEQSEEVFIDENENNLSKLEPTEPSASFLRYYQFNKGDKNAKCRIFV

SEQ ID NO: 137228 - protein, 57 aa, Heterodera glycines
YVVSWQCLDIIRKDMVDPLSGKRMAESDIIELQRGGTGYAATNKLDAKLIRPQLELQ

SEQ ID NO: 137229 - protein, 92 aa, Heterodera glycines
MNRRWICSDVWMDILPSLDRAQLGLKMALLSDRFDVMVDAHFDGKSELTLWKEIVIFKNVAGVRMGSDPHAIEELPDYALRNQIIFHSLGIS

SEQ ID NO: 137230 - protein, 58 aa, Heterodera glycines
LEHDEDFESPPHSSDEEAPEDEVDSDFDKDEEEDEPTPAEEDPEQIERRRKVFFLEGN

SEQ ID NO: 137231 - protein, 69 aa, Heterodera glycines
IKIVPSPKSGKFPKTTTTNNMKYLPPELLDEMTFYIYPNQNYSRILTSSWLLMEFLRPHIERWQKIFKL

SEQ ID NO: 137232 - protein, 132 aa, Heterodera glycines
YCRLVAEFPLNLLFNAYFEIIILKKQGDSGIGTIHFGLWAKKENASYQYWNNGIIIGTSFGIVGGFPAFGGGDTVGCGVNMTSKEMFFTKNGIQLNTTKIDVSETELVPFVGLLTPGDIIQANFGPNFVYNL

SEQ ID NO: 137233 - protein, 115 aa, Heterodera glycines
MQKYFLLTFLIICLIQPIKSHLPPAEAEEFAPNEQSAVGQLATKEMKVAQSLTDEKVENNAIMKDSRNGSGIGQILLNSRNYVKLIIIIFTAAPVSAEEMQKLRDQFAEMVIENL

SEQ ID NO: 137234 - protein, 299 aa, Heterodera glycines
MFACRFGPILPIAAFFFDPTYATEYGNKLDALFKQWPEPLLINETEVSGGKTLGQKIIGSVLQRGKSPTKKGKEKVNEESSSAAEQEAFVMNRANFENLIKQNFETVKALMEQNSAYQVNRIYEWLYSTTTNRQQEMPKSQTETAIPLDDDYVLMPKSQNETAIPLDDDYMLVPKSQTETAIPLDDDYVLVPKSQTETAIPLDDDYVLVPKSQNETAIPLDDDYVLVPKSQTETAIPLDDDYVLVPKSQNETARLLDDDDMLIAFVTKDYANFENHCIEMNKQDLLAHVGLLSKRKGKG

SEQ ID NO: 137235 - protein, 264 aa, Heterodera glycines
QLLREAGIPTTEPEYDAEIYIHQVQGLWNVKYPGEYKIFIFNDYQMSPITKSDITDYQFPILLYHNNNHFDGIKTLSKFFNKKNYCLSCESPYYKKIEHSLKCTSLCHGCREVGVDYPCEPQQGYSKKCEHCNNTFYNNSCYERHLHKDLCTKFQRCEDCGVIYNIKVHGSVGHKCGEQFCKLCKQFHIKEDEDDGMNPCTKCFIQPLKQQRIKSYRIIAYDFEATQDKKVENRFEHEVNFAAATIICTDCIINSDWNKSLQGK

SEQ ID NO: 137236 - protein, 78 aa, Heterodera glycines
STYGAGCVSNIWFGKIIFFDLSEGANINNFFLKTHTYEKVTSIFLIRSEIVRGGNIVLPYQKIVFAFLYISFVLNLLI

SEQ ID NO: 137237 - protein, 24 aa, Heterodera glycines
ITGVSIIAVLFLVFLMLSQNLVRF

SEQ ID NO: 137238 - protein, 115 aa, Heterodera glycines
MAVSISNELSKLEFAAQVIMAPPNQVTSQDRKDAEALFMSLREGVISVEHCRQSLEATKNHFLMFELTRALVARLLKEWAQFSLDDVSNICDYLFNFPAVHTEYFLKVKLFISPN

SEQ ID NO: 137239 - protein, 48 aa, Heterodera glycines
IPIKFFKILPINWLIFSEKLFINDQNFQFFPRRRLSAPPAPPKTPIFS

SEQ ID NO: 137240 - protein, 101 aa, Heterodera glycines
LVAICDASLEYKTKFYDNGCILKHFWMTTKKIGQFYGKIDARYNGEPKHWITEIELGPLLWQFKHLINDPMAEKHPIELENLFVLDPCEEAKLKLKHSGNF

SEQ ID NO: 137241 - protein, 151 aa, Heterodera glycines
CHDQDEAARVMSHFKILIRPMISNPPIHGARIASKILSDPKLRQQWGDVKGMADRIITMRSQLRDLLAKAGSKRNWDHIVNQIGMFCFTGISPEQVDRLAKEFSIYLTRDGVDRLAKEFSIYLTRDGRISVAGISSKNIDYLANALHEVTK

SEQ ID NO: 137242 - protein, 62 aa, Heterodera glycines
MLDQGDIIVPITPISSNVADAVFNQFIKVEQSVARKSLNIYGTPFVITVTVLNINGLRKNKE

SEQ ID NO: 137243 - protein, 112 aa, Heterodera glycines
DLTLFGGPLFTGSFVAKMSNDWLVGAQLKANLEQGTVGPTAISIGRKTAEYSLHSHTTDGTDFGASLYHRVHQNLEYGVQMGWKMRDALASWAIATKYNMSPELTLRAKMDH

SEQ ID NO: 137244 - protein, 92 aa, Heterodera glycines; identical to SEQ ID NO: 124679

SEQ ID NO: 137245 - protein, 104 aa, Heterodera glycines
MQMDYKFDLKDFKSNNCYNPSNLNFVELESELFRLTCHFDRRIRTFAISALEQMCEDASMKMLEKECLSLEYYPHLANLCKNSEQNVRVVALRILTKFALVYPE

SEQ ID NO: 137246 - protein, 103 aa, Heterodera glycines
MDAESQHPFVVDNDSDGLYPHLGVGDLAFSIWRNELLMPLAAQLVAHIIELLGRIRNGISASFGIRISDLRGRRPLFWSMSMNPSIGSKSTVFVHVHWYPTTE

SEQ ID NO: 137247 - protein, 62 aa, Heterodera glycines
ASKDIVAVFHLRHILLDGHCFEDPSGNPPRGLQFVLGTRAEPALFDTIVMANLGYFQLKAGP

SEQ ID NO: 137248 - protein, 18 aa, Heterodera glycines
MGNSGFNAPGVYCVHAKN

SEQ ID NO: 137249 - protein, 428 aa, Heterodera glycines
PPPLPPSLSVPICSVSCPSREELFRLNIGGRSFSFRCEPFSRHASRTHLLLVRLDHSNRLLLTDGFLAKTNEYYLERNVRVAEHVVDYFLTGKLHKPIDVCPQRKLHKPIDVCPQRFSEELLFWRLGPVLLRSGGQQGPVLLRSGGQQPTEEGHRSGRQLDQGGERSEQRHDEFSGEVLPGDRKVIWHMMEAPSSSMVSKLFTIVSVLFILASVVGLVLGSMPEFQADNRFSENYHALLTARKGFGQSQRPQENENGTKNSFSDQFVYRPTDNPQPWLILLEYCCIGWFTFEFILRFLVAPRRMNFLVAPRRMNFLRQPMNLIDLFTVLPVFCEAALSTFGVNAERLKDLAGAMLVIRAMLVIRVLRVLRMARVFKLARYSTGLQMARVFKLARYSTGLQVFVFGMTLRNSLRELCMLSMFLLCGTGV

SEQ ID NO: 137250 - protein, 79 aa, Heterodera glycines
MKGCLLISSLFAFLITILISNNYVGSENKKLEQKSFDEIFGEKWEEKRNEEQKKREIIGKFNKIKEKIKQKGRKYSAKE

SEQ ID NO: 137251 - protein, 24 aa, Heterodera glycines
VTGVSIIAVLFLVFLMPLQNLVRF

SEQ ID NO: 137252 - protein, 282 aa, Heterodera glycines
FQSLGLNPPAFQSLGLNSTAFQSLGLNPPAFQSLGLNPTAFQSLGLSPPAFQSLGLNPTAFQSLGLNPTAFQSLELNPQHSNHWHSILLHFNHWDSTHQNSITGTQPTNISITGTQPNSISITGTQPTSISITGTQPTNISITGTQPNSISITGTQPTSIPITGTQFSCISITGTQPTSISITGTQPNSISITGTQPTSISITGTQPNSISITWTQPTAFQSLALNSPAFQSLGLNPPSFKSLGLNPTAFQSLRLSPPALQSLGLNPTAFQSLGLNPQYSNH

SEQ ID NO: 137253 - protein, 138 aa, Heterodera glycines
RYRTVQLVRVKYGIELADALKKHLTDFEQLIDLLLIRQLERITSVYEEKQITKQMAQLTTAVDYKMVSKLGVSADELSAARCFLLKYDCARDQYVRPFNFRQRATCLHRLSESVAFVPRRATDDGKGQGGRVRVHWER

SEQ ID NO: 137254 - protein, 140 aa, Heterodera glycines
MIEVRQMASYKRRRQLWNAENERFEEEGEKEQEENEEGGGGEGNEWEKEAAEEEVENNEAEEENDDENEELEKEGVVTEEEEEEMSEEEDEEEEEEMMGKEVDYESGDEGIVLVRRKVPADGLKEQKEKPTDDTATNRKL

SEQ ID NO: 137255 - protein, 99 aa, Heterodera glycines
MLTIGSYDYNDFCPIHSTKLTDKDFVSLNFCRVTMTKKIARKAKREMKVGNVFAQFALQNGQIVHVIRNHSTANGTNEHIVNVNLDKSKRNNTMYTENV

SEQ ID NO: 137256 - protein, 515 aa, Heterodera glycines
MTNRSISHSNNGKKPQQRHDATTSAQRVLLLLQPDQLNTDTHKTILDFFNNFKVPVLVEAHLPGERLLLELGDRPRFGLVVFTDYRSFHLLSSTEKDVLSQFCARHSVGVISFLELPSDEEQQHRTEFANFTAFGRQSVTKIVVSGTSPVHNVAKSGTEYSVPQKDGDAKLAFTLFKHALSHMNPILEAENELGHRFSIALQLEEHHVMFGAKPNQHWLVRVALLDAVTFLAPAIHDDDLERFVQIDIDDVFIGAIGSRMVADDVDYLSILQGKLREHIANFHFTLGFSGNFFRHGDPAEIQGDEILVKYPHLKPASGRRAFVHGNITVLPRQTCGLFTHTQFFHAYPDGVDNFLHNVLGGGDLFSSILMNKFSVFMTHQQNYANDRLGGFTFMNIAKFVGCWTNLRLKWTAPKNVADLYMKRFPNERTLLYTGPVRLVCSCRCTQTLAPMCPFPTHLKNSNFLLVQIMRLAWNGTQNSLPTTPPPCPFCLKRLQIILTTRGRPRRCTRWCQMRD

SEQ ID NO: 137257 - protein, 256 aa, Heterodera glycines
MQMVPANTLFARVGLDLAGPFPMTISGNKYILNIICWFSKYITKEQPDFDEFLDYANFCYNTSVHSSTNETPYFLMFGRDPIFCIDQILDPKVRDPIAFTDETEFKQKLVISLRRAWKSASEVHADAQEKMKIQYDKTMRTPKLNCNSPQSNPRRVHINQLKKCVEILGPACTSPWLSPEENNALVEAESEEIADLPGHSHPIIIKEQIELPAQNHANDLVSDTQNIENDTSEPTQLPQYALRNRTKLNKPARYLD

SEQ ID NO: 137258 - protein, 68 aa, Heterodera glycines
MPTLADYKMGTLADLQNAHIGGFTKRDSTKNRHQTMELFGILVKDKLLDGVAFSLGSFFDSVFVIMVH

SEQ ID NO: 137259 - protein, 32 aa, Heterodera glycines
NDQSHKFCVHTRRGDFVKMMLGLEEGTYGERN

SEQ ID NO: 137260 - protein, 275 aa, Heterodera glycines
RGQRNINTGADRRSSSPWASPIVIAKKDGTLRFCVDYRKLNSVTVKDAFPLPNIDHILALGGRRVFSTLDFVSGYWQIKMDHSSMEKTAFSTEFGRHEFLVLPFGLCNAVATFQRFMTRLFSDCLNKFVFIYIDDILIASESWEQHTKHLKAVKRIENASLKLKISKCHFASSELPFLGHILSNEGLKMDMAKVKPVLELPNPATKKQLQSLLGFLAYYRKFIYGFGAAAPLNSLLKKDSDFALGEVEKKAIGALKSKIISAPIQLPQIPSPSYD

SEQ ID NO: 137261 - protein, 150 aa, Heterodera glycines
MAAMLIPADGQYQLCPSKPTEGITVTMSFPEEQNCTLPVEKPPLTVKSNLYIPIRIPRVFPAFKCWNVTTVTCTESFLRIMTLDHPDKKIEADASVEDCQASIHHSPMNRTVIEEGKAGILDGKRLITSWGDSLKIDKSLGEDGSWIRLK

SEQ ID NO: 137262 - protein, 238 aa, Heterodera glycines
MDLDALRRRIVTLEREMRENGGTRPGLPMPTTFDGTTDLQDYLKTFNLIATAHNWTPARCVQVLPLFLRGSARAIYESIEPDIKDNWRSLIDAMADKLKQMSPSLTARQKLAQRKQLTGESLEEFAQAIRNLVLRAYPDNSLEMDFGNLVLGALENDVKQANEVRLRQFRSEIARDFFRANMAPRLKERVIHMEEPQTLEEAVAQARRVEQVQGNLADDMWKNTQDAKAEVALAEVNA

SEQ ID NO: 137263 - protein, 45 aa, Heterodera glycines
MKANCASDSQKKLPSADLCNGRCSAERRIHCRELAKWGRQLTTLV

SEQ ID NO: 137264 - protein, 99 aa, Heterodera glycines
MDNPGPSNGIDLIELGDSDDERMEKFAFGGNDTLSLISLKTDFERPPKEEAMLNLVDASFELIDPNPNVHELFVTFDHQFFSGTLNSNACVVEWSKTMT

SEQ ID NO: 137265 - protein, 138 aa, Heterodera glycines
MREKGKGGEKGEEKEEKKERKRRGKGKEKERKRRRKRRGKGGEKGEEKEEKKERKRRRKRRGKGGEKGEEKERKRRGKGGEKGEEKEEKKERKRRRKRRGKGGEKGEEKERKRRGKGGEKGEEKEEKKERKRRGKGGE

SEQ ID NO: 137266 - protein, 52 aa, Heterodera glycines
MANLCSAKLLKVFVLLLLLLLLNSLLVLPARILVALAPDNKSHLRSMLPLIN

SEQ ID NO: 137267 - protein, 264 aa, Heterodera glycines
MANRMQQTYRRAFSVIQQRVEGVIPSSFMLDFEPAARSAFLDVWPNTMIRHCLFHLAQSVNRRVQREGLAPQFLVDIDFRKSVRSLSAISFLPLIYVEEGYQILRNHAPIQAHPIFDYFASTYLFRVDGNGNRRPALFVPETWNMHDSVLGDLGRTNNGLEGFHDSFNKRFSAPNPPLATFISRIKDEDEYQRNRMRPHELDQTRPVSEVPRSKKYLENDRAIRDLVAQFDEQDPDDRNEQHWLRHLHAISFRLTTKGIDNWIE

SEQ ID NO: 137268 - protein, 79 aa, Heterodera glycines
MYFKKRQRQEQLKDAAMDQPEAAPRNLIGSSREGLSDDQLVRLPTYGASRIKIQRQRQIPGRDAVNAANPLEIEIEVSH

SEQ ID NO: 137269 - protein, 55 aa, Heterodera glycines
MARRKVKNSRADLGLLMLYAVKGEGKQELFGYVLNDCLVLIINNLIAIFSKLRIF

SEQ ID NO: 137270 - protein, 132 aa, Heterodera glycines
MSNITKTLLLLILLVAVSFRFSASTNGKKNANDGNGSNASVGIGTKIKRIVTAGLLFTSLATGGAGEIQRSNVQRRNVMGLTHPMPPRPPPELTPFQKAKAIIEEHAKKNNFTESERGYVSGGPDSLTIIEI

SEQ ID NO: 137271 - protein, 53 aa, Heterodera glycines
MFFYDCFCFLKWSKLWRRWRRLEKLFTMFTRHGLGEYFQRQKMMKLSHNLKAN

SEQ ID NO: 137272 - protein, 77 aa, Heterodera glycines
LDISWAGHFVGQRKKWAALCLPTVSVLCYGQLGHLSYALSPPVSFCESPGGPNPHHHFNFTYPVDPIHSQSLKYRKK

SEQ ID NO: 137273 - protein, 151 aa, Heterodera glycines
LPNPFLLILLVAVSFRFSASTNGKKNANDGNGSNASVGIGTKIKRIVTAGLLFTSLATGGAGAIQRSNVQGGNATGLTHPMVQRIISNPPPPPPELTPFQKAEAIIENPPPPPPELTPFQKAEAIIEEHAKKINFTESKRESPGGPDPHHH

SEQ ID NO: 137274 - protein, 39 aa, Heterodera glycines
MDSIQKFMLLLKLLNKIMPYFVPKKQLKLRILRNDPARF

SEQ ID NO: 137275 - protein, 211 aa, Heterodera glycines
MSNQSTSSAAAAGSTAPPSPSNEASSPSAAQASSQSSSAAGDSSASPNGPRLKPRKVPVNRFRDVRPALQLRLSQLKHPLIRKLEQDTGIDRERLFYMAMAYFVFLLLFTQCKLLLSTLIGSVYPAYQSIVTVHTQAKSEEIQWLTYWCLFSLFSLCDISFSVALPFYALVKTIILLYLALPQTYGAHNFYVIYVDPLVDQWMLMVNEIAG

SEQ ID NO: 137276 - protein, 129 aa, Heterodera glycines
MAKQNTDQLSTSDGIVAKQKLDFPRRKHIGTDLASIGAQNWLFKRKDSIRQRTKGFFRPEENGNLMNKLQGLEASFDDISYLNTKLRLVLESQDKLEKSNFGIGKFTTKDDKYKKRFNHPSFNMKLYDK

SEQ ID NO: 137277 - protein, 119 aa, Heterodera glycines
MKAHFNGISHNGEASMYAKIEQQSAEELIKLHKSAINQFESRGIPSLNPFNESHFVPHATILYLRSESDRKLIKWWAEEEAKWEGRKLGTENVKMLQLCNIDLDDQTEDYEVLYEVRID

SEQ ID NO: 137278 - protein, 32 aa, Heterodera glycines
MLNACDALAATVQHFAQPLVVIYLVFEESIHF

SEQ ID NO: 137279 - protein, 96 aa, Heterodera glycines
MQFSSVGHLRQTLNDIIKDAYKQRFGLSPQKAAGTTVKAKRQIDVTDLFFHDHPGDYWEKIEELEKKLAELKEEIMTKEREHGAKGTEQKRKRNLK

SEQ ID NO: 137280 - protein, 118 aa, Heterodera glycines
MGRALDKIHTFFERIEKHLENGAKPEEMSYEQQFSRMELKRAISSYPAKEVKKGLDNLYKKVEKHLCPGSPLLVVEEFLNQVKHYQELISRCYGASKIELDFSIGDVLQFFSEIAQQH

SEQ ID NO: 137281 - protein, 29 aa, Heterodera glycines
FIIKLYLIQSGEFESDFHLFGDLIEIPVG

SEQ ID NO: 137282 - protein, 95 aa, Heterodera glycines; identical to SEQ ID NO: 130684

SEQ ID NO: 137283 - protein, 84 aa, Heterodera glycines
MNEWMNKKGKRKKQTERNAPPPPHALAPPAAAIAAAAIKKPPASADVPPPTVTGEAPEMAALTVPALPNGKCCDAAVPPNADTT

SEQ ID NO: 137284 - protein, 181 aa, Heterodera glycines
MAMPPQSPASAAAAAAAAAAVVMQHQQQQQQVQSQLSKLDSLFGPGSPAAATAALLQLQQQHQQHQQQSAAAAAQCHQQQQQQANSELAAAALLASQFQRHNSSVVAASVAAQLLAAASPASPAAAAALSLMSSPLGMHNHPQQQQNHHNQQNQQQFANVAAAAASLIHQQQQVAPGLHAY

SEQ ID NO: 137285 - protein, 62 aa, Heterodera glycines
VTDIWRPNGIGEPFGIFPGSLSRFILKNVDQDPDKMDLNLVTLSWPDSQFRSRLLLILALSN

SEQ ID NO: 137286 - protein, 91 aa, Heterodera glycines
MSTKAPPPTAATPSWSSTRWKSGGETNDAKENKKAHETSRTAATERTEGNVNFRLLAIAGIIAAESAFRVWPNPSNTAASSLSSSAHNEWE

SEQ ID NO: 137287 - protein, 260 aa, Heterodera glycines
METTTIPLIIRPTTTIIPPATRTTTTAIPPITHTTTTAIPPTTRTISTAIPPIIRTTTTAIPLIIRPTTTIIPPTIRITTTAIPPTTRATTKAIPLIIRPTTTIIPPATRTTTTAIPPITHTTTTAIPPTTRTISTAIPPIIRTTTTAIPLIIRPTTTIIPPTTRTTTTAIPPITTTAIPPTTRTISTAIPPIIRTTTTAIPLIIRPTTTIIPPTTRTTTTAIPPTTQATTREMPQGTIETIEKLIKKLEKMTEIRTKTK

SEQ ID NO: 137288 - protein, 72 aa, Heterodera glycines
MAYCKDLPVELLIILPAFFYYGSYFSLTKYVRNFVGVNRLRQPEVFGDEIALICKRNRGGNGQTTTKCRVGN

SEQ ID NO: 137289 - protein, 195 aa, Heterodera glycines
MKKQKAKPEEKPAAPAEAKALVPEQKKAEETKEKLKQEEKAAEVPTSPEEKKRKEAEAKAKRDAEEKAKKEAEAKKKEEEIKKQKAKPEEKPAAFDANDFVALFSSYSSINFSVKFPSQTAQIEVVLSDCLLENVDSIKPSREPAPLYMKPKFVRGLSNVIDLMALNEATFECQFQGFPEPNVLWFIDDQPLTQK

SEQ ID NO: 137290 - protein, 23 aa, Heterodera glycines
MKEAKFYHLLYDTLSEQSSEICA

SEQ ID NO: 137291 - protein, 117 aa, Heterodera glycines
MEHEIGTYPSVTLSNSSIIAALQKRGCEGQLCQEKKFDPIPYKENLGIDNQAQGEQQPETPNRSPRRVRFADEQNEPLEQIQPIEPRRSTRQRKAPQQLDMEVTKTKYDYVKQGKTN

SEQ ID NO: 137292 - protein, 48 aa, Heterodera glycines
MNNNWMISVLKRQNIEKSSESADKRRRHKTHILSDQNQFTDNKVAFEI

SEQ ID NO: 137293 - protein, 48 aa, Heterodera glycines
MGRIYKYVKEFGADAIIATPCMDVPPMLGHLASNFNLPMMVWGQSMAS

SEQ ID NO: 137294 - protein, 260 aa, Heterodera glycines
MAPEDQIPKPQAEKENVEPQADPEKQRKRRSPPAPIISELARMMDQLKASMVAEIQDCLEHVRNAMMDEVQLALDNLWAKIQPVMVDHGRSIAALADAFDEMTMKEAKDKMENPTEGGPGVNDPPANSPPESGGQNNQADNNNPPQSGGQNNQADNNNPQQSGGQNVQLANQFERPAQWQGRGSRGTWRGRRGFENGGPGRVSYLRRQLERESGGRVRIQHPYLEFRRGRGYGPSGRIDRAFGQYGGQNSGGPSRGRRGN

SEQ ID NO: 137295 - protein, 68 aa, Heterodera glycines
MAFVQFAVLIWDTIVAYVHGKRADGTNANGEIDEKSEKIGHNRIQAFIAATKCFDLPEWRTNLAFLTL

SEQ ID NO: 137296 - protein, 59 aa, Heterodera glycines
MTDRLVKVPLIKNAEKVFRRIDKARLNESEQNARCNAENEEKAGHHANNLGLGFIDFSA

SEQ ID NO: 137297 - protein, 219 aa, Heterodera glycines
IMTTGSDRTQLQLQLHFNANNSSEASQSQNSSEQMQNCSTNERVSGEDSVPFIDRETFGDAESDRGRGPPPDRFRLVYLIVLLHGMGMLLPWNTFITIAGDNFYNYYVQKAAKARANNGTNILHEEETGEAKANRKVTHPPLKTYIAIFSEPFPDYLSLPICLRLLFLPLFWFCDYQYDNLTPRRFVFIHNQWVFTVLITLMALSHGYCSSLAMVYAPK

SEQ ID NO: 137298 - protein, 120 aa, Heterodera glycines
MLAYFESEEQRLRANESTTGIYRIGDCDGGQNDGKQIVLGTWERFAFANVQPMVAGGHSAGQFHGNVLQFMQFVISSFALQKRRNRVDAQPKSFRGAQRGESSRRLTNRTTNGRRSATDA

SEQ ID NO: 137299 - protein, 270 aa, Heterodera glycines
MFSKFFSKGRNSIFKYIQKYEVNPFEIPNLVFETKCYHDGAEKCELFANLFVNSFNNSEDDPGCYSLGTTFANQCFISDIDFNIIETQKLLKKLPNKNGTSPDDISYKTLKNCHSSLATVITDLFRISLDSGSLPDIWKESIVLPLFKKGDKSNPENYRPISLTCSLCRVMERILSQNIYNFLLKNNKISEYQFGFVRNRSTTSQLITVVEDWYEAIINGKNVTGHVNQITRNAYLRMSSLFRIIKSKSSKIWITLYKTYIRPLLEYAPE

SEQ ID NO: 137300 - protein, 69 aa, Heterodera glycines
MLLRSFVQDRTNFAELCKKLEKLDLMKMITFVTRRRGKAVYDSGETVEYLRQQFEAYLGVMHLMRQTWA

SEQ ID NO: 137301 - protein, 117 aa, Heterodera glycines
MRRLPLTLARTPPSRTIRLAFVTHALQGYPFNPCLMGTTVRASVHIRLPKISANHDDFKSICEELKLQIRGIHGEHSESAGGVYDISNKARLGLTEFEAVKQMYDGVKHLIELEKKA

SEQ ID NO: 137302 - protein, 126 aa, Heterodera glycines
MAHTEEVTWPTISRAYAKNKIGTTAIVESEAEYKKVAQRVKEKLDIIGPKKYFHTVIVFPNWSNAFQLAILATQSHYFFLDGENEIKEKKINVIVVRCENDRFGRAIQAGQWFTQTVENQMKYMIK

SEQ ID NO: 137303 - protein, 94 aa, Heterodera glycines
MPIVMLSNKHCEVITLSDDDGGQQQPMMAQQVQRHQPRQHGLQKSEYYGDCQSSNIAAIPNGRLPPNNQLHPRQQQQAQMQRQTLAQLLKAENV

SEQ ID NO: 137304 - protein, 143 aa, Heterodera glycines
MVMSTGGPHSNLGLMSSSGGPHSNLGPMNPHSVQNPLSVQNPHSVQNPQSVTGIAPGSVKSYNDDMQHQMQQQKASGSKEEGANEELTVVEQYNESRDQFMNVCDNIERNMQLILEVNRQQSKLYNQQQNSAVAWVEVTSMLG

SEQ ID NO: 137305 - protein, 28 aa, Heterodera glycines
LGVFHLSQKNDRNNTNNRNSMTAVNQLA

SEQ ID NO: 137306 - protein, 53 aa, Heterodera glycines
MLSTGFAKNKDADGLSMAEPGAMAEQLNAEVRTHTRISGIDPGHKRLWIGEEQ

SEQ ID NO: 137307 - protein, 58 aa, Heterodera glycines
MSDPALIFLHIPLEDLKSRFIRIAEYEQSLKRYVKLRVTLVAFNNALTPQCQLELMDA

SEQ ID NO: 137308 - protein, 60 aa, Heterodera glycines
MVLLLLLLSLLLSVLALMPLLLLLLSQLLAQCQAVNELTFMLLLMLLSTTRNEFSEFPRL

SEQ ID NO: 137309 - protein, 95 aa, Heterodera glycines
ILKSPSKYLCYTFIISTAALVLLIMLPHESMPVYLGMACTLGFGAIVFTQRAVFFAPIGEAKIAENKTGAAMALGSFIGYAPAMFCFSLYGYILD

SEQ ID NO: 137310 - protein, 93 aa, Heterodera glycines
MAKRHRTERKEGEETEEREEKENKERGKEKETENEQEMRELGQMEKQTVTDANNPGEQKEASQSDAKALGEKQQNCYDEKTKANAEKQYEVGI

SEQ ID NO: 137311 - protein, 95 aa, Heterodera glycines; identical to SEQ ID NO: 130684

SEQ ID NO: 137312 - protein, 33 aa, Heterodera glycines
MTIKIWDFVNTYECLKTLKGPLLFGVWPPKCRK

SEQ ID NO: 137313 - protein, 88 aa, Heterodera glycines
MLTATPASFLYSGATKDELEEIKSQVNEVKQKWRTGDLEGADIQEDSAMRDELEALKGVNVKERFQPGQGEFQKSYDRSELDTSGVCV

SEQ ID NO: 137314 - protein, 140 aa, Heterodera glycines
MADDSRIAGICESPLELGPAKQQQLSDAGGLPSSSSATVAADPKASGSFPLSFTDLTPIRSKSVKIEAKRRKVETALLTTKICETAAAAAAELPTLKEMQLKVLEKEDAKLTLEIRKLELELEVLELKKEKQTRKLLANF

SEQ ID NO: 137315 - protein, 86 aa, Heterodera glycines
MSWQCPWTCNRCPPDGNVPTRPPQILDPPLPNRNCKDFLDCPAWARNGNCSLYSTSTRAAFCPITCQVGCAIGGGEGGVVLTSFNG

SEQ ID NO: 137316 - protein, 166 aa, Heterodera glycines
MSDQIRCLIQSGVGSDHYAITSDGWSKPTLSPQLQSVTVHWIDKSFSRHDAVLAAFSMENFVHSGELISEKIALCLNQNGLTLNKMACCVRDDAKNMQSAIRQLEKESFQCCAHFLNLVVSDAMKTECLSEIIFKTKEVTNEMPDFCACQSGLAWQRWKQYLLLSK

SEQ ID NO: 137317 - protein, 87 aa, Heterodera glycines
MFIINFSVILFVLISPVLSSFATICVRPNTFNYVGRLWYEESGRYSCIAFWVDLGICDQNDTNAMIQIIKADTNETVGIANGCDLCN

SEQ ID NO: 137318 - protein, 25 aa, Heterodera glycines
MFIVLPMNPTYNSSDDNRYLSNSIF

SEQ ID NO: 137319 - protein, 48 aa, Heterodera glycines
MPAARAPRQRVLYMLKMATEACSKSTLQYQANTASAFDLREKCPANLL

SEQ ID NO: 137320 - protein, 108 aa, Heterodera glycines
DDLRFLYSPEHSLSRFEYQIHKEFSGDSVNSSYIAIALEAAPPLAGVDDSSVEDAANLGTMNAILHNMTVELPDGSYHFGNDICARMALCPISNSPVQLFYDAYFSEK

SEQ ID NO: 137321 - protein, 107 aa, Heterodera glycines
MVLKGKGIKRLEQPGYGDQILNIKVNVPKHLTARQRTLMLEFAKLEAGRRGTVDGLDSGGGKGGGAAANDQAEEPEEMPAAGTKKKGTNGGGGEDKGGAGFKWSKFF

SEQ ID NO: 137322 - protein, 136 aa, Heterodera glycines
GPPKAEEFDATGADTETEESLTYNFPTFVSIRRAYNRRRQQKHGISTDPYEIPAQLLLTRQGAIKLALNKPLSKDDNWVIYRNRDEGIIIFDTKTAELLSALAIGAAIATLLTPIVVGSVAIGYVIAYNVHKNNEK

SEQ ID NO: 137323 - protein, 74 aa, Heterodera glycines
VIVHFDLKGAAPKPHYIKELLPFIKKLGFTEILMEYEVQEIDMFPYSFGLSVLRRKTAFDEMTTKQLKEVVYLH

SEQ ID NO: 137324 - protein, 24 aa, Heterodera glycines
RVINSWNLLPKNIMEINDPKKFRE

SEQ ID NO: 137325 - protein, 97 aa, Heterodera glycines
MEPGFASPWMFKIWKQFTRKITEFVMVYDIKINLHDRDNVVKLQSLIHNQFQAPCFNDWLVFAWKKAGYYGDDTLPNFCHPNKYAFDVPKERYLRKI

SEQ ID NO: 137326 - protein, 23 aa, Heterodera glycines
RVPIFRQKPIFFLSSPWPETHAK

SEQ ID NO: 137327 - protein, 56 aa, Heterodera glycines
MDKEKVVYCKKCYINDKSKFINALIKKAFDNGFNSSNDATFFARKTATGDNRRKEE

SEQ ID NO: 137328 - protein, 42 aa, Heterodera glycines
KATEMDSKEPKYDMTNAIWSLLFAASQETQGPHAKHTNGQSE

SEQ ID NO: 137329 - protein, 231 aa, Heterodera glycines
MPYGVASAPAIFQQVMEDVLRGIDGVAVYLDDIVVTAPNDAEHLKRLEMTLQRIQKFGLRVKKENELKSFLGMVGYYRKFIPSMATISEPLNELRRSETKWHWGQQQQKSFEQIKIMLSSNELLAHFDPKKPLYLATDASDYGVGAILFHKDGTTGKFGVIAYASRTLSPAERNYAQIEKEGRAVIFGVEKFNQYLYGRKFILQTYHEPLKRIFGPKGELPVVAARRLHRW

SEQ ID NO: 137330 - protein, 161 aa, Heterodera glycines
LPFCATGDSEVQRTMLELLNQLDGFEPTKNIKVIMATNRIDILDPALLRPGRIDRRIDRKIEFPAPDEKARLDILKIHSRKMNLMRGINMSKIAETIPGASGAEVKAVCTEAGMFAVCTEAGMFALRERRIHVTQEDFEMAVGKVMAKDGEKDMSLRKLFK

SEQ ID NO: 137331 - protein, 19 aa, Heterodera glycines
MSTISCQRQPLRTQFEQFT

SEQ ID NO: 137332 - protein, 857 aa, Heterodera glycines
MALFRARSDKTPTHAGIPAPDEVREGGCGQNRTNPAAPRGKAVAIQRQNGITIPINACAQSGLVRTQRVQQWSAVEESALKDVVVRNTDDRGLINWAKGVLPEWQRLCQLNPTMYMARSSPSLSNKWASLRRTHVGPGCPSKEGSGPSQDLSDVKIQPARLAHDTVAELPQRTVPCGTDGHGVIDSDETETALAEVSRSSPFGEREPLDLGATERITRKRLRNAVRDVVPPRKRRVPSTSSRKEQDLVPEVDRPAPTDVLTHPPTESEPEPMLDPLSLVQLVKPQLGRAMGWAAEEMELGNVVMDVELKREFNREVRRVGRTPPDQMYKRGAGPPLPQKREPERVALLEQLIVARVERDINRGLDWFLELNVAVFAAARVLSRRERVETLADRLHINDSATLSEVSRRRAKAERKLRCAREQPWMSRRIRILGVRVERLKQLADLVRQRIAGRGNRSSYEGPRRRFRLRPSLRSVTEAPVNPPLNGNEVYTFWHSLWAQSLRANTDDCQLREFKNQLSAARHTDLTNVGTSSLVQMFSAALRKMKKGKAPGPDGIRAAWWGVFRRIAPYVATWVVQVIRGAEPVANWICNGLTVLLPKSSDNADPSNYRPITCLNTCYKLFTAVIAQITASYVDVLGGLPRQQVALRKGVWGTSVSLMIDALTVADARRAKRPLGVCWFDFKKAFDSVPHNLIRWILRVIGLPPVILSVIVSVMDQWVTRLKIGGKVMPKTIPVRTGVFQGDTLSPLLFCLSVWPISFALDQFPQYQFRCANHLQQGFSVGHVFYMDDLKCYCPDREVLTAVIQQVQKSASALGLTIHYKKSAWLDQDGGKSGKAVLGVPELVGTYKYLGMHERFMI

SEQ ID NO: 137333 - protein, 159 aa, Heterodera glycines
NQSSPLLMSRSTRATMSCSSRATRSGSRFCGSGGPAPRLYIWSGGVLPTRLTSRLNSLFSSTSITTFPSSISSAAHPIARPNCGFTSWTSESGSSIGSGSDSVGGCVNTSVGAGLSTSGTKSCSLREEVDGTLRFRGGTTSRTALRSRLRVILSVAPKS

SEQ ID NO: 137334 - protein, 158 aa, Heterodera glycines
RLTTGGRGIGSVLAAPSLSDLIRGWYPGVVHATARLTRPLEPILFPKLRIFADFPYLHYSRLEAVHLGDLLRISVRSGRRFKLPSHFQGPCGAHETPQEPRCFTGATSLSQAEPLPGTHTLNEKRTLARTPQNVCEFICVTAQNIGREPSFLAWRGNV

SEQ ID NO: 137335 - protein, 182 aa, Heterodera glycines
  unsure (1)..(182): unsure at all Xaa locations
PTRHLATLRESXTPAVYPRLIKFPWLNIQSTGQKSDTVNVHKDHPSPLFXLDSRIPRVRASSKLVVQRQPNAPQAALTTSPRTIPERTAHSHGQKPPVSRNSPADPTXSQFFSRSYESNLPTSLTYIILSTRGCSPWRPAADIGTIRQEIQIASLAFSRAVWSARDTTGTAVLYGRNIPISG

SEQ ID NO: 137336 - protein, 76 aa, Heterodera glycines
LYEEIVQNELSTFSEDTTLKLEEGGGAAQNIASFGQSDKREQHKDKEDEKRTKGNGKRKDKLVGKSKDKWKKALII

SEQ ID NO: 137337 - protein, 76 aa, Heterodera glycines
MKDVREATDRLTDRIEQAQKNYAYFQVYEENSDVQKWMANANELERWLSEREQFLRDDWHSGATAENVEGVELRIR

SEQ ID NO: 137338 - protein, 551 aa, Heterodera glycines
MVFGRKFTLLTDHKPLLAIFGSKKGIPIYAASRLQRWALILSNYEFDIKYVNTAAFGQADVLSRLIANYPRPEEDILIANICTETECFINSVFQVQIDQLPLTAAEIADATAKDEILSEISRLSKNGWPNKCNDPNIAPFFPKRDEIVEVEGCLLYQQRVIIPGILRDRALKALHLSHPGIVRMKALGRRHIYWPGLDSEIEKTVKSCEECQNAQKNPTKSTLAPWTPTSKVFERVHIDFAGPCDDGFMYFIMVDSYSKWPEVCQMKSINSQATVGFLRSIIYRLGVPEEIVSDNGTQFHSADFAKFCTEFGIKHTFTPPYHPQSNGQAERFVDTFKRAMKKSSKNDKDWAEKALLSYRTTPNATSNGYSPDQLFFGRKLRTKMSLVHLRGEPIEHIDHELIRQAKKEYASKMSNQFDKKHGAKRTDFGPGDPVLLLNYRNNKSHWLQGTILERVKNSPTFRVEVPILGGRIVHRHTNQLRRRFIFEDEQKVIGINRFTLIVDKMMSNSNNPSSQLMMFPNWQCADQNGSSSRGNFTRPARSRSAAATDQE

SEQ ID NO: 137339 - protein, 26 aa, Heterodera glycines
MWGVANRWMDNEAEHFKCYRMVYYMM

SEQ ID NO: 137340 - protein, 103 aa, Heterodera glycines
MVAATSQRRENSKEIEEKILFFLFKTIRRGTTVIRRGTTVIKRGKKVIRRGTTVIKRGTKVIRRGTTVIKRGTKVIRRGTTVIKRGTKVIKIGTTVIKREFLE

SEQ ID NO: 137341 - protein, 115 aa, Heterodera glycines
MLCEILERDELQIREEISMWNAFSTLPQIGTVSARFEALVDKHFDDRTIFFIIPATGFAWCLDGHSPLLTVLNSASNWHCFLPVSMLQWTNISTAEGRRISIIFYYSFSQYTFCY

SEQ ID NO: 137342 - protein, 107 aa, Heterodera glycines
GFALSLDGHSPLLTVLHSASNWHCFRPVSMLQWTNISTAEGIILSLFFCFISAGFLQHFVWAFLTIFNSAQIGIAFAPFQCSGGQTFQWQTGLLASFNFSQSNRSNV

SEQ ID NO: 137343 - protein, 269 aa, Heterodera glycines
MPSKQKNLRKKMQDVYRRQAERSVSRDNSPVSDGSADGNGEASASLRGTSTPSLSALQISTPASSIGSKKRGRPLRAGAKPILATQERVSLIDTPRTAVTQSDQGSPCKKRGKVAECGQPMFANEAIALTPVSTQSRGGRPAKKIRGPGRGRLTDSMSKSSEMDINLENAPIPATLHIVSEKIDFSTVPINFATSRNFACKIWRWAAIGLYERDGETAFGPRSGPRFIETCWNRPNEWLNDSFIVAYLAYIASISQRKTVVGGFFGIEN

SEQ ID NO: 137344 - protein, 1625 aa, Heterodera glycines
MPSKQRNLKKKKQDVYRRQAERSVSRDNSPVSDGSADGNGEASASLRGTSTPSLSALQISTPASSIGSKKRGRPLRAGAKPILATQERVSLIDTPRTAVTQSDQGSPCKKRGKVAECGQPMFANEAIALTPVSTQSRGGRPAKKIRGPGRGRLTDSMSKSSEMDINLENAPIPAPSHIVSEKIDFSTVPINFATSRNFACKIWRWAAIGLYERDGETALGPRSGPRFIETCWNRPNEWLNDSFIVAYLAYIASISQRKTVVVDSLASRTDVSRFSNVKNYTFGYDPNAVPEVVLMPLHFPNHWTLIVYDVAHGAYFLDSLHMSSLSDERMALIQSIIAEIVPGTASFAVEYVQQLTKQNDGNSCGYFVCLYAESWLMNNRTFVLPDLNINYEKKRILWHINELYGSDIVPFHPREGVSTSFAVVSHHNGDVAQTSSKDIVPIEVDDSAVLPSSEDTAVLAQAPVIGENQADTHGVVADTIVQQEPIAQADDVIFVRPKTPPRRSLRVQKRLSASVSRSPSPAPKRPPPANSLGMAMPITRRCSAFHKGWQCAAAAAKHFPEYCDSGKLGDKKCADCGAHLFSHEDSNICCRKGRVVLPMLNPHPDELKELIVGNKQSREGKEFVRHMSRYNNLFQFASVSAGNKPSPAGGPMAVILNGEFHRRISSMQAGTTQIPGFGQLYILDPVEAMEQRRNNPRFTGEKITNEDEFVQGHQLNEQTLEILEQMIQVHHPAAQAYKQAREQLTELLQQQNQEELRFFRMTLLDSRRAPAGLKDPKLHPHQIITPSTGEGMFAIHADPTGAPPPKGIWVENKQGQLNEIAPFSPWTDSLTYPLIKPMGDDGYTTGIKYAKPPSRKRKGAQNASGLFDSEAESDNESCETQSIASSDAGSVADSDAESVASVSSQHRRIDKSKQFISLRDYCKYYLAIRDENVELQYHHILSCGGGLGQRWILDQAAKIDWQIATFLRRPDMDLRISTPKNLLQYLVNQYNRQQARQNPNAQQKTVDDIGSVVRLSEHNVNSLQYWKKMYEDCNTVFARCHDAKKARLFITFTNNREWPEFKENLHKNGQVFTDRFDMWMRVWSSKIAEFREELYDKKFFGTILGYGESMEFQGRGGPHAHIVAQTDLDAVPYVIQEYIWAHIPSLPDKDDDTPIAKMHREIRETMHMQLHRCSDSWCGPSDPIYGRCKKGFPAPYSKCTILRPDRPAMYFRPSPTDGGAQLEVNGLIYDNSHVVPYNPYILLRYRVHHNVLFAYGNKANIKYALKYPFKGPGHCYVECKEESGNKIGIDEPAQYAKMNFRGATEAYAIVHSMPFARLSHHVVKLAIHLPNQQPIVYRAFQLVSKAQQIQQGELPETQCSAYWKQWQNEWKNDPKFKDILFEKVPERFRWAKDKWVLYKRQQIKRPPIGRIVPVPPSDPERFALYSLMRHFPGHPDHLKMVNGLLCTSFTEAAIMHGLLEDDKIWDKTLAEAALSRWPDQMRWLFVSILVYGQPSNAIELWNKYKDQMYNPQGIISAAIRQAREQEALADIDWRLHFFNSSCMHCGLPDPPNSKAKNINLAVEEAFFGDDDLNMPPGQPNPRQQQNAPPPLNSDQQKVFDAVVRAIQSDPKDPTVPRRFFIFGDG

SEQ ID NO: 137345 - protein, 129 aa, Heterodera glycines
AQQHHIDTRRHQQTQDGGNDNDEEGKEDGVVTNKRSKVSVTLDETEEISVLDEEEGKEEEAEEGELTDEEEEEKDENDADVLFVDARSRTTKKKKKGKSGGANVSLEEGEIVDESEEEQQQQMVVTKKF

SEQ ID NO: 137346 - protein, 94 aa, Heterodera glycines
MANSVKMRDSDEKKPGFRRAGDEEELGFWSKKITVRAQIAPDDQVEDMVVRGNIDDVMRMHIRFAFQSVKRAYEGNGLGQFFVHNKVIVSIPPL

SEQ ID NO: 137347 - protein, 133 aa, Heterodera glycines
MTLKKRSAVQFVSNCNVPSGRDALTAQLQRLLQVDVFGKCNNNTNCKEECYQREQESHFFYFAFENAVCPNYVTEKFWKALRNLIVPIVLSRKVMEEVGIPNGTFIAADDFNSVKALAEYLKELQRDKDKYMR

SEQ ID NO: 137348 - protein, 102 aa, Heterodera glycines
VAIRFAFDAVKRTYERRNLGNFFVQHKVIVSIPPTQTRRTGPSASAAAALAILSCAAARANMTKMAFPLEKLNQFKKLDRWIRNQLSRKTLADVDDLFSLLI

SEQ ID NO: 137349 - protein, 158 aa, Heterodera glycines
ALIFNMPNIFGCVWRRPFQIFELLKCVDLIWSPFLQRQSPQAAPAINRCIIVCPSSLVKNWDKEIAKWLHGRVNSLPIDSGKREDIIRNLKQFVSQTGQFVSQTGQRVPTPVIIISYETFRLYTDILHEKEIGLVICDEVGVIWEAEIGTLCQHFSPE

SEQ ID NO: 137350 - protein, 95 aa, Heterodera glycines
KGLCHNPALSDLICGVNESIDRQVDAARSARHFIHKRHKRYILQDAVIMRILADASYNNKGEIRDLMTALGLQIEGYAAKLKDFVNFDDSIVRIP

SEQ ID NO: 137351 - protein, 242 aa, Heterodera glycines
LFGVPMFVGGCAILWIYWDRFKKPKKKIFISADCWLCVFDLLEPSQLGLGISMISHRFDFYVDEHFKTRKWTLGLIRIWSKIGENGTKKMKIVNKYWTPLPIPQIEMPRKVTGFERIDINYIDQNAIAFLRRFRPLFAACQINLSISMRSDRISELILRNIWPMLGKNIHDIEMSASFFHLLRQMAPSILSDCPSLRFVIFYAGDLFAEFPCDDGAAASDGQSVAKWLFTPLQNNVPKVLNC

SEQ ID NO: 137352 - protein, 80 aa, Heterodera glycines
VCAAKSCRKMSSESNMENFPVKLDMDYIKRANFLVAGYRKAVNRDVFGGQMFAQAIAAAEATVDGDEFAPNAAHSMFIRK

SEQ ID NO: 137353 - protein, 28 aa, Heterodera glycines
MTFYASLVGYTGRNNKQGSETHQILFTC

SEQ ID NO: 137354 - protein, 19 aa, Heterodera glycines
NRTLTDDLMEKNPRRREFN

SEQ ID NO: 137355 - protein, 48 aa, Heterodera glycines
MTFYASLVGYTGRNNKILSVESAFGILMSKSGTVNNILCFSCWIHGKK

SEQ ID NO: 137356 - protein, 81 aa, Heterodera glycines
MLSFIYIEDLSELNGDNAMAVLYAANKYNIPGLDGPSLQISFSKLRNVFLAYAQANIFDLKVEFKNDLSPYWFGVILLILI

SEQ ID NO: 137357 - protein, 42 aa, Heterodera glycines
YEEWLPLVLGRERWLRSGLSQEKGQQKADADNDYDLNLDGTH

SEQ ID NO: 137358 - protein, 38 aa, Heterodera glycines
MRRFRECESLEVLIVYAATLGYEADRYRIWTSDMPRKE

SEQ ID NO: 137359 - protein, 121 aa, Heterodera glycines
MEYLEETLYQYSLEPTVNDWWAARRRATIKKFPAESAAEDDKWMNEADMFIAAKMFKINVIFYKLSDNPDHIWQIFTPGMQKSLLNPEQDREVPSIFIYNESGRFEIILEPERLSQKSMTN

SEQ ID NO: 137360 - protein, 48 aa, Heterodera glycines
FRVLNRFKNRFKCFSAPNFKLLYRSQHLRKPIKVFLCDFEPIPYSAIL

SEQ ID NO: 137361 - protein, 51 aa, Heterodera glycines
MQIWYHWKAHKKCYPMNNEQMIERKLKGSERDIMCLFSKCSLKVRDMRIAW

SEQ ID NO: 137362 - protein, 58 aa, Heterodera glycines
MFSTGKGRCGMWSGGHSMVLRLYTTVESCRKNMNKMILLMDLQNASYTITVSRFRISV

SEQ ID NO: 137363 - protein, 50 aa, Heterodera glycines
GNYIVQKCVPDQPGARNYCKDFNNICQMGFFGMPIHCSSCKGDLCNEARN

SEQ ID NO: 137364 - protein, 56 aa, Heterodera glycines
MERLKEGIEEEEKMNGKIQRKQNQRNGEGTAKGGETEEMLTNCRRLVYFCHFPYGH

SEQ ID NO: 137365 - protein, 87 aa, Heterodera glycines
EFRIHRGKAAVHEKGGGNNFGHRVTAQFDKTATVCGGGGGPSEDAIGTRSPTRGPRMDFSDIDVGTSIAIWPVLGRTENGLSVNKNI

SEQ ID NO: 137366 - protein, 174 aa, Heterodera glycines
MMLPGWTLLLVAYCVCLALGIVGTMGASAELIPSKMFNHNNNHNFNNNNDQKQLGANDFAENPQRQAGNNGGDNNNLLLAQPSAFQLQKQMMMRAAMAAAAKVAQQKQRQHHHHHMPHHNHHHHQQNNVDGSSKFGVVEQEEKSGEEFFMFNTGMRSVLIYQKCSDLKGPNLIK

SEQ ID NO: 137367 - protein, 179 aa, Heterodera glycines
LPTKEDRSCDARSPTERLCLANQTAVLGGFHHLTHDCHCVQPCTEHVFETAYSAAAWPASNFNIGGDDCAIVLGANFTRENCTKYFAKNTALIEIYYEQLNYEYFAKNTALIEIYYEQLNYEKLKETPGYTLVNLFSDLGGNIGLLVNLFSDLGGNIGLWIGFSLITVMEVVELIFECC

SEQ ID NO: 137368 - protein, 86 aa, Heterodera glycines
GPERLGPRFWAPAFGPPFLGPGVVWAPVFGPRGRLGPNPKIEKCAFLKIKILKTKPEGSLATWHKLGLINIRSFFTILLIPNPIIF

SEQ ID NO: 137369 - protein, 99 aa, Heterodera glycines
MSLLQLKHKELDLNVKNKAGFTPLHQFVMREDLGMVMCLLSYGAGLGEKADSGKMTALHFAVSKCNLQVTRLLLCLGADPNVTNAHGDSPRHLAAKLKE

SEQ ID NO: 137370 - protein, 19 aa, Heterodera glycines
MRSALKSIRARLMPRMDNE

SEQ ID NO: 137371 - protein, 87 aa, Heterodera glycines
MTWYGVIFCVVPLNISSISIAPLLFFTSTEYHNAFTKEWARLRALFVGLQPSNTIFATTVQPLQPMIMKMNNQNQSPTRIDNFLPNN

SEQ ID NO: 137372 - protein, 120 aa, Heterodera glycines
MDDIGTGNLAYDEIGREINEGLQVSGKPLDERLIHLAKAEELILKQDGTSILDNFLDEMVQFIHEREQKVRCFVISFIEKACKKDTEVFKRAIATLNWAMVDQSSGVIVQKKVSLLFFSI

SEQ ID NO: 137373 - protein, 361 aa, Heterodera glycines
MPTFRKAPQKGGDKDTTKRKKIVGETKDGESSRTSDKAEGRETEGDKHKQEKEGGNELKERGTENREKRDSVEKSDGDQNQQTERENADQQNTETTKQQQKGKESVAKGENKEGRDSETEKVDEKQKQTPNKPSTFSDQNNGQNLLLNEIATTTTEGQQNEEQMPTMPSMGKKQQKTTKSKAKTETETMAEKTNGKSGHSKSKPQQKKTTPTAYYSSTASAQAQYHYQPNNNNQQQQQFQHRPAFVLHRCASGDGRRSVVAIWPIQIPFASAMVAAYAPFLQNFMQNGGAATTSAYADASGTIFALLQQQRQLPTPQHQQHKIGQMFVGKMMGMASAAAANARQAEGKCRRRRQPQKAPAT

SEQ ID NO: 137374 - protein, 77 aa, Heterodera glycines
MRQTLMTFFLPLFIFFAHLTASLFGLKCKFGDEMRPALIKKFMDSGQCPPTTDGQETKHCVAKICTTGPPSPAPNGR

SEQ ID NO: 137375 - protein, 86 aa, Heterodera glycines
HKNPGPADDQWDVLVWGCAETDAGTCAVLETKLSQVMNNTVAFSCECHYGARDVDLANEQLMLRHLFSPIAAPTDAVSIAVMAFII

SEQ ID NO: 137376 - protein, 109 aa, Heterodera glycines
KERIERVQNNNGLDWSVIFGCFSSPKVEKAFENVCFVAELLRRKDRDQKVAQDWKYVASVLDRLFLVLFALCCFCGTAWILLQAPIFYDRRQPIDLQFQPPNAVDVIMG

SEQ ID NO: 137377 - protein, 428 aa, Heterodera glycines
MCSWQQLINSLVTTKEVAEQKQLDETLREVSEFCQNAYFTHRYKLSEVNGCLMFGERVIIPAELRQRILSALHFTHPGIVRMKALAQRHVYWPRMDLDIDRCVRNCDECALAAKAPPKAPLRPWPSTNKVYERLHMDFAGPCSDGRLYLIVVDAFSKWPEIFSVKSTTADNVIVQLEWLFSRYGFPCEIVTDNGPPFHSNAFSHFCRTKGIKQSFCPPYHPKSNGQAERFVDIFKKEMKKGAGKDKQWVTNSLFAYRNTPNIALNGRIPAELFLGRPPRTELSLLKPTVSHPTNGTKDYANNMAKQFNRQNGVRRRTFAIGDDVLIINYRNNKTTWLHGKVVEGSGVVWKVHVPILNAVQQHLQIVHQEPATEPNTPQRHVRFADEQPEEQPVPDEHNQNEVRRSNRNRRPPKLLDMDTSKARYDYTN

SEQ ID NO: 137378 - protein, 86 aa, Heterodera glycines
QIDEPPSYEEALKQGLPTTRPIAPMATGVLGQHTPVTLDLPPPADTQQKPVLPGPSAVVVTRPSRASLRRAASGPRPSSQGLKVVL

SEQ ID NO: 137379 - protein, 214 aa, Heterodera glycines
MGNKRPTSSGFPWTNHWTLQREANQLSNKLFCATSNTVRQMAQSPTTVANPSRRPLQLRFRVLPAARQQFTHLDFSMSKRQLFHVRFPRSRRNPRRIHKLNGQITAFWISDDRQKALTFTETHAVQACDGRQIVLSEQNFGIPKEQFDIMMSNHTRAKRNVQPEQLASQLTAAQLATTMALSQLYLKECQRNVRVSNPTLQARKLLKRENLQAR

SEQ ID NO: 137380 - protein, 173 aa, Heterodera glycines
PHKHTHSSIPTLPQQGGQRRAGRSSSSFKSAIGTHALSKAEKFNLLRNLLGGEARELVAGFRLEDNNYDTALQLLKDTYGAPDEHIRALHFELANLKPCKNLRDTKEFLLQLERLTRELNNTGEDIEGPPTFLMLEKKLTPGFLRTILTKKGEDPARWNTTKFRDVLNEAVRK

SEQ ID NO: 137381 - protein, 255 aa, Heterodera glycines
MRILPLISKIASCSQFRYHHLQVQQKPNLWVRIDSKNGNVQRLSQTAIHELYETILNKTDNDLDLHPLIFHQWQLDNDTDFATFPHIDESEDSEEFKNKLEQHTTQRAEALGALPGGIEGWTVRWLQERLQEIIQWWMRLASAYSTFILCRDVILPCLIAYFLNPIRITLMTLIGFRPKKQPTLQIQAQHEDMPLREMPNTPIRRKRRQLPEQSTPPIRQDTTTATASFRTRARAHSATEDTPFGRLRPMKLADD

SEQ ID NO: 137382 - protein, 188 aa, Heterodera glycines
MKLREFYGSNIEELKKLQPDDLAKDLEDNKVLGIRWKPKHNRLIFKLPIFEGKITKRTILSQIAKVYDPLGLMSPVLLPAKLILQEVQNLNPKWDDELPANINKDWLKLMAQWLNRGEAITIEFPRHIQAIDSVEFHCFCDASKYGMGIAVYQKAKTIIRKDECNLIYAKSLVKPIKVAAHDGTIPKL

SEQ ID NO: 137383 - protein, 753 aa, Heterodera glycines
MAAPIQQKLSAALKVLSRSRTAAELNIQADQAASNLENAFNFEAQLEKVQKEAKTMDIFLDDVRESLTAWADLLRKLPATERDPAEADFNKFEKKERTTDKVDEAALKLRDLRDLISTLTVQSRLYRSKADKEERDAQAAHANAMQHTAQQQPNKTPSFTPPFYQFQPIQLDKFFGNKRKWPEFYESFKSAIGTHALSKAEKFNLLRNLLGGEARELVAGFRLEDNNYDTALQLLKDTYGAPDEHIRALHFELANLKPCKNLRDTKEFLLQLERLTRELNNTGEDIEGPPTFLMLEKKLTPGFLRTILTKKGEDPARWNTTKFRDVLNEAVRKESQIQEVMGEYGHSPQQRPQPQRPNFSASKFRDRAPIPQQRERTFITSAVDDNHKRLINRQPQHRPQQQRPRAPQPQQRNLRTFNNQRQFPTQRANATNNQRQFPTQRTNAINNRRQFPTQHANATFNQRKPPSPCIFCDNDHWNEECRKYSTIQQRREVLRTKALCFKCLKSNHQASNCPQPKKCFKCKQPHPTALCYADEKPPNQITAAMLGQTQQNMSITTQDGSNEPTASTSQMCNAVNGSDTRALLMTATSTVFNPAQPHLSMTAAIFIDPGSHRSFISAKAAQLLDLPVVHTEECHLTSFGEREPKRYISDLVKLGFLCTSGEKLIFNLNAMKFLVNDMPMIQLSELDKTELRQQKHNPPHEQRQPDIMLGIDVWHELQVQPIESCQAVSHCADPKSAKSSVDQDASKCIKRQT

SEQ ID NO: 137384 - protein, 185 aa, Heterodera glycines
MIKMNKLRRSKSPMTRPPTQFNDKQKCEIVHKFDAIKEGIKKRGKYSAKGRGKIEQKIGVKLGINRLKIYKWKKEFGLNLKKDKHYYEKKKQEFVERIEEFKRMYKNGKQKQFAKELGIHKETFIKWKKKFGIEIGKRYSNEEKMNKMYEYLKMKKANPSLSDKEIAEFLKITQRTLIRWKQIFV

SEQ ID NO: 137385 - protein, 87 aa, Heterodera glycines; identical to SEQ ID NO: 134949

SEQ ID NO: 137386 - protein, 46 aa, Heterodera glycines
  unsure (1)..(46): unsure at all Xaa locations
FIXQRSRLIRSSPNFAGKLLRTLQMLINFLRIFCLEEHSSSHLPHK

SEQ ID NO: 137387 - protein, 113 aa, Heterodera glycines
ESKLESEYIQRLLGQLTPLEESRLCELKYGLQSMHKGKMPNDAHLLRFLRARDFDVQKATQLTLNSLLWRKQHKIDSLLDDSLLDDFVPPALFKKYFPGGWHHNDSEVGGLSI

SEQ ID NO: 137388 - protein, 314 aa, Heterodera glycines
MIKLFIMKMPFPHFPCRPIQNVIGYIWGSERPDEWVMLGNHFDAWVFGAIDPNSGTAVLAEVAKGLAETVRTTGWRPKRTIVFCAWDAEEPGLIGSVSTVPSLFHSAVAAAKVVKNPLDDQLTVFDSWAKHFPSKTEWLPDIPEMSIPGGGSDHITFLNFLGVPVIDFLYKDAESPGYSYPLYHSRYELPFVNEHLFDNNQLAPILDLSSQFPSTCGPAKTQLDNLIQNGHQFMAQAEEFERHAQGQSASANLAQLAWANDRLRKLEQCFVNPAMGLAREEPLKRHVLFATSKDNFYASNTMAIVYKKVTKTNL

SEQ ID NO: 137389 - protein, 135 aa, Heterodera glycines
MAELFRIANESSDEFEQRNAKKAIENINENFKLIEENVKKMLEKLGIYQLGMEENVLKIGKNGIEKNDKIVKMVQRLSENSKWEGTIEKTNEIISLIKSAEESARKEAIEALESLEMIDEQNDRDKIVIRKSDRN

SEQ ID NO: 137390 - protein, 122 aa, Heterodera glycines
MCRTNAENGQTFVLHLPNVDEETANFNIFFFFYVKSTKNEYKADIDDENPSDEGPFFDPKFNLELEDIRTMFRMAYVTLYRPNFSKLYTVNLGQIDPTELFLKSRVFLETKIPMRRVLFGYW

SEQ ID NO: 137391 - protein, 188 aa, Heterodera glycines
FKPVIQTVVDKFNRSVIVLQCGADSLGSDRLVCFNLSFDGLGNSDHSIAITGNQLSCISITGNQTTKIQSLGLIAPTFQSVGLNPTAFQSLGLNPPAFQSLGLNPPAFQSLGLNPTAFQSLVFNPPAFQSLALNSHAFQSLGLNPPAFQSLGLNPTAFQSLGLSPPAFQSPGLNPPAFQSLALNPTAC

SEQ ID NO: 137392 - protein, 81 aa, Heterodera glycines
MSQFIRWELNLTELVRRMNLIGYGRDAIMLITLHSADQLNAPGGLRRHASGRRMAETPVSLTRCDFNNSRRKYCVNEVKCR

SEQ ID NO: 137393 - protein, 159 aa, Heterodera glycines
MVILVCSLLQVLISIQGLIFVRHPYFNEPGFEKLQGTSRGDELSRKYNLCIENATLNYAIYEQWKNGSPYFTDVIRRHFWLKRHAVIRQAERWLKEVTENVRNSGKMQLPDTDGMADGVLSSQSLQRQTVRKLLEEFRKMENPLKEAEAEEAKKGGGQA

SEQ ID NO: 137394 - protein, 101 aa, Heterodera glycines
DVSAIYDSLPPEIEFFRFVESLRPCSPNETAEEKEEEQREAKRIFNERLEQLRERQEALKYAEMTKSVDVSRNRSLMQDFGKEMREANRHLVAVINTLITV

SEQ ID NO: 137395 - protein, 58 aa, Heterodera glycines
MASLFRSESVDNPTRLKDEEWDRVVAVFVQERVLKHHHILFSSYFRHSDALYIKKGEE

SEQ ID NO: 137396 - protein, 555 aa, Heterodera glycines
MLLLVLCLFVVPTAHWVQQQMPPAQPLGAAQFFQPIISFKASTAQQQQQQQQQQQIMYNGGGAEQQQQTEHQQQEQQQQAGQAVRISRFDPTLKTKSNDGYLSASAGQGTFVRIGPTANAPPLQILVEDRDLLPGMPSAVYHYILTGYGAERFAVDHLGNLYLNVDELDTDATGTPLFVLHVMAREVDTTPQRSSAPISLTIHLLDDDMDNDEVDGVETEQEQDQPQQHVQQQQLQHLQGTVGGGPTLPQTVYVANVSAAAGPGERRVIAQVKARESESNSAVLYRIVEVVIEARDTDGLVGHAVVLVQALAADHLPSKAAFSSPSSSAARASLFGSGQVPVIADHQPFPLSSSAFVPPLAKAVGVGIPPALPASPPSAQMSSSLSQNVPPAAGSQQMMSSALIASSAGGYWQPISNGGNNKANSNQKPNPFWRVDPTTTLATPAAAVKLNPMLIPFATTTTAVPPPPSQSTFQFLICPFQEQTLFVELSESAPVGTLVTSLGNEFSAGKVHFVLLDEEGNIGTMFGMEDEQEGTIVTKGTLDREQTAQYKLRIE

SEQ ID NO: 137397 - protein, 29 aa, Heterodera glycines
MTTMGQLYQDRHEEDLFMYIAYSEENVYG

SEQ ID NO: 137398 - protein, 211 aa, Heterodera glycines
MGQCRNGKLLSSAPGTKKAMTIMNNVATTTSKMANGGQRNSEGQQKRGPKGGRTENKGKAVHSSKKLTANTPSTVTTLTAIKPKMLGRNIGNGRGRPLGSAHKAVGKAVDGSSSGDSSDDDSSIDQHVQLASESRDVKLNGGGESTIMKGTGRRGRRKGRTRDESSPDLATTTVAEDWTGGNGDPELCAHKKCQRPLHMSINWVQCDDCDK

SEQ ID NO: 137399 - protein, 45 aa, Heterodera glycines
MELLRIAMYHRFMPFLFLCFLLCRGAPANDVKKKKGVWNISVLFL

SEQ ID NO: 137400 - protein, 21 aa, Heterodera glycines
MKYWSGYIKSVLLKVQSETIG

SEQ ID NO: 137401 - protein, 264 aa, Heterodera glycines
MAKRKVLIKLQSKKAAQKRWRMREGRRAKAQIAAQVRWTKKTAPQTDPDADTPQPSEDEPPASEAPARDNDGRPPSTPTPVTPLELDVPSVDMVETDVPITSTPADDDQEAEPVPSTSTARCDLMATPSTSKCAGAFGLDDVHMFDELRRRHVWTEEELQRQRRSNAFLRKQLKAQRDRSTSLERSASACRQRKALSDVTNTQQGDNKLSAANDLLITLDSGISFKAREALKRLFTDQGLDVWSPTREMKRLKAELCEAVNEGC

SEQ ID NO: 137402 - protein, 223 aa, Heterodera glycines
MAKRKVLIKLQSKKAAQKRWRMREGRRAKAQIAAQVRWTKKTAPQTDPDADTPQPSEDEPPASEAPARDNDGRPPSTPTPVTPLELDVPSVDMVETDVPITSTPADDDQEAEPVPSTSTARCDLMATPSTSKCAGAFGLDDVIMFDELRRRHVWTEEELQRQRRSNAFLRKQLKAQCDRSTSLERSASACRQRKALSDITNNQQEDNRLSALNDLLITLDAGI

SEQ ID NO: 137403 - protein, 127 aa, Heterodera glycines
MASQIETKKQKLKLPHGGHLYTFDKMSKDETTKFWRCEFKDSVNKCKGRIWTDLNNNFIRLATPHTCPANSSNVEAQRVKTTIKLRAIATLEPPSIIRSEALQNVPSPAALLVTKRLANDVREFFNK

SEQ ID NO: 137404 - protein, 130 aa, Heterodera glycines
MPDPVLLFSFCTELTKESEAARLMAGFWTICWASSSQWHMVTTIVPSGAVERLPTDIGWRCEDEQHRRSGTKKRGKYLAADRRILNMVRNYIPLNAVNDHDYLPPIPQPNQFHTILEFLRGISHHYQMNP

SEQ ID NO: 137405 - protein, 19 aa, Heterodera glycines
EPVNSCIGCKCRRCCTPNS

SEQ ID NO: 137406 - protein, 83 aa, Heterodera glycines
MHIIWPIVGILMSSIGTTLTIRISPDVNSFEVLSQEAYILLYKQKETLEDEEAMEEDEMLEEEEEWVEANSSDEMETEGGNGT

SEQ ID NO: 137407 - protein, 122 aa, Heterodera glycines
YSASYCNVLKYTEGNNGYWVWFITSKMFELVDTVFLVLRKRPLMFLHWYHHILTMMYAFYSYPITPAFNRWGIYLNYFVHSYVYSVRFFKTIFFSCPCSIFWIFFFEGRATFLIFRKIPHDR

SEQ ID NO: 137408 - protein, 107 aa, Heterodera glycines
MTGNGNELMRTEDDENSVNFMHLFDNLELTDSENLASLREIEKIVADTSPPPAGPSPIESSVLGFVFISHPILWALVQPDILGERNELSDRKNLSLESDQLVFQVHP

SEQ ID NO: 137409 - protein, 109 aa, Heterodera glycines
MGKSFYEEKKRKFIEQFDEFKELYGQGKQKEFAKELGISEKTFWNWKKELVPNYHKSQKQYTNEAKLRKMRKYYEIKEKNQKLSDVLIARKLEIGSSTLKNWKTNLLQH

SEQ ID NO: 137410 - protein, 238 aa, Heterodera glycines
MPRERERNANAKRERKKCQERKKEMPMPREKERNANSKRESKKCQCQERKKEMPMPREKERNANAKRERKKCQCQERKKEMPMPREKERNAKRERKKCQCQERKKEMPREKERNANAKRERKKCQCQERKKEMPREKERNAKRERKKCQCQERRKKCQCQERKKEMPMPREKERNAHAKRERKKCQERKKEMPMPREKERNAKRERKKCQCQERKKEMPMPREKERNAKRERKKCQCQ

SEQ ID NO: 137411 - protein, 75 aa, Heterodera glycines
MGLGIYLLVSSVSFIFGVLRLARERGVAGGVGGDTGTATGSTRTSSGRKSDDDECRQQNGAWECGRQQLSSSDSD

SEQ ID NO: 137412 - protein, 30 aa, Heterodera glycines
ADPQNVQPTKCPSLEFEFFIIQMGLRLGKG

SEQ ID NO: 137413 - protein, 70 aa, Heterodera glycines
MPTLFFRLNSSFEPSKAFPSDSPLASSISSLREVFEEFFPIHVKIWKFWPKFPTKMENFGNLVSIGMLPR

SEQ ID NO: 137414 - protein, 70 aa, Heterodera glycines
MLLTVKSDLIGSIAVTIVCMAVVCSLFIYSRLGVGAIALCITSICFTLVGVLSWCGADLDPVTMVRSFKR

SEQ ID NO: 137415 - protein, 111 aa, Heterodera glycines
MRENKIGIYNNHLNAYVTTDFTKVFASKKSKKELYKIASGEMAPHFLLNVGDNFYDEGVTKEDVAERFEQNFTKVYNYGSLNVPWYTIAGNNDWESKDGIEPQIEHPSGKW

SEQ ID NO: 137416 - protein, 115 aa, Heterodera glycines
HINAVLVGGFDVFFTDRYDLAESEWTHRRIHGNDPQLSLDSLSPSTTYFVRIDVRNSDGTVVKSQSAYRFTTFVRTLANLWTDGTELTWKIPKRFRSLDNIGNYEEINQLSDHLN

SEQ ID NO: 137417 - protein, 188 aa, Heterodera glycines
MATICDAYREDEHVDEKAENAQLIQHKIQSSRKSLSNLTKNGIQNGFKHYVELEHHLGSLLWSYKYKIQEPRTVGLPEKAKQLLMIKHEPCEEAKLKVTRMEKHDQSDVGEIFNQVQDISIGDQSKVIENRKDNKNKDTSDQSNVGEIGNHVQNMSIGDQSNKDGSDQLEVIGSGNDDQNMANDNQSN

SEQ ID NO: 137418 - protein, 90 aa, Heterodera glycines
MYLANKDEWQAELLQNVGLSNFAGIYEEIKEQMERQRIVEQFRIVLFDFLWQLFDLKQSQVPNFTGIHKSIQKIWDNTNELGLGKFYHDQ

SEQ ID NO: 137419 - protein, 93 aa, Heterodera glycines
MELLRSTQNLKNREAENYLVQRGIEKGSTVMAAKKEPGKGGSTVATQVTTNLFGIDMKRPVTRVRYEVKISGHIMLRSGEEVIIDLTEQTKSS

SEQ ID NO: 137420 - protein, 43 aa, Heterodera glycines
MSVIPGVDQKFSQPINKLGSEILFGNPFRTPNPEFEQKILESV

SEQ ID NO: 137421 - protein, 320 aa, Heterodera glycines
MPLAQNYEDLTSSRESATVDKHSPLTPTTNVVVDRIFSGDPEMADEDGKRVSRSENGQHIKKMSVNSALGSSVMIENKSGGDNEPNYEESEPKSLSESENRKSETISTDDKFIVIQTGINWTLASRLTEVSSWPHFLLMKKKSQSDEYFRLGEIIDIKEFVENESNSLNASNKFATNFTLLPEDGCGSIERILKCEKTGKIIAVDVCFDVGESLQRFYSHQFGSDVDVSAIVDDAWVEVITLGFRIQGFEDSLSTLTGLNTLSDEPTQIVPHQYIGTSIDLVIKIVRQIDPVEEDYRQWCEFLAKQRSTSNHDQDYHHRR

SEQ ID NO: 137422 - protein, 41 aa, Heterodera glycines
MTSSANRNVDLAFDSAGITSDNDCLFNMPLIKERNLSLPAA

SEQ ID NO: 137423 - protein, 215 aa, Heterodera glycines
MDKYFDGEVIIFLHRIRRLFSTDVSLQFNIRRTQTRGWKAMARHIWPLLKNGLIMLVNVKRLHLIRMHKYVSPTVLFDCAELFQISGTVLPESPTTYSNSPDLSTRLLYNWLHTPRPDGRPVVFKLSKWKSGWENFVNELITSFTRAVGPVKYMVLASFDVNYTRREQMVNIRTEEKLTLSSDVHQRPDDQCLRTEKPIGLRTEKDNCGSTTDEP

SEQ ID NO: 137424 - protein, 96 aa, Heterodera glycines
MPKRQKEKTLSSLFGSQKNAENKSKIVGTFEQKLELLKKAFAQQKLDQMIFEEYKNNENLTLFIEMKDKINFNEKNAQIFPTEKWHALKFTEEMEN

SEQ ID NO: 137425 - protein, 113 aa, Heterodera glycines
CGFPNCKFRSRYRGQEDNRHFYRYRGQEDNRHFYRIPKRPPILRQAWLCAIGRSEETVVSQLRICSAHFYGGEKHEGDIPVADPQIDPIDPPEFIELPPKEVRSSERRARLKV

SEQ ID NO: 137426 - protein, 18 aa, Heterodera glycines
MYFSRFSLHAVFCGPPPA

SEQ ID NO: 137427 - protein, 176 aa, Heterodera glycines
MKNANSVALPFCPSTSAASDGANSEANRTDKKRRIHTRNVRSVISSIYCRRKNATIGRPSIGCWLALLLPLSSLALVFNDQLDQQSPVFYSAKKKLKEQEIIQKVLRDYDTGGPVIVSVNVCYHCCFLTPFIYVDRFISAQSPKLMTSTWNVSFWEVIETKHQIRSQKMDIWASKN

SEQ ID NO: 137428 - protein, 89 aa, Heterodera glycines
MPQLGVSFIYSTIYEKFRNVLHVNANIQSAPVVSALADSAQFTFREEWWDPRLAYGRFADDETEVPAFVVLATSEQADLTQQIWASVET

SEQ ID NO: 137429 - protein, 105 aa, Heterodera glycines
AVDVWIGVCMAFIFGALLEFIFGALLEFALVNYAARKDISTTQQRMRRVRPPCLPGDRSAFASLCCRLFVRRYKERSKRIDVVSRLVFPIGYACFNVLYWAVYLM

SEQ ID NO: 137430 - protein, 92 aa, Heterodera glycines; identical to SEQ ID NO: 125147

SEQ ID NO: 137431 - protein, 16 aa, Heterodera glycines
MSYKWIKGRQHQGSCH

SEQ ID NO: 137432 - protein, 77 aa, Heterodera glycines
RYLTISAVLGVVFCLGAWVTHGYVSVGFVAALGFANAMMWPAIFPLAIRGLGRFTETGSALLVMGIAGGAIIPQLFA

SEQ ID NO: 137433 - protein, 181 aa, Heterodera glycines
QRTQRQESNFASSISAATTGLDFGQMSTQQPTHQNRSEASDFFSPIAAATMAMDVEQKKTNPKPRQQQTDASNFFGPISAATMGIGAEKPKPKMKQQQQGVASQFASAISAATMGRSNEQPKQQPPIEKQKEQTDEEILDEFLESVSAATTYLDVSQKKKPKKKGKKEAEDEEAAAIASIS

SEQ ID NO: 137434 - protein, 158 aa, Heterodera glycines
MISSGLNETEKMKEHLKQKYEAHLGVMYLMAENWQCDKIAHQLTANENGMNVKNIVNMWTFSMNIFSDSKNLNVSEQLVPLMKPLLITEISLDSLIGVIKNLNYISKCFWQRDKNEPWNFNYWEMDLINEDELNYEIKEEKSGENPSKNEIEKNCKTS

SEQ ID NO: 137435 - protein, 37 aa, Heterodera glycines; identical to SEQ ID NO: 127515

SEQ ID NO: 137436 - protein, 128 aa, Heterodera glycines
STFNSEQSSGQHSRAESCLELEALAAVHRFAGIVQEIAVSEMLPRTADLIFVNVTTLEALPRTADLIFVNVTTLEAQPFCLEQPFCLELTAKGWRVTSLRTDCMQGDFTRMELFTYYQSLHQLMDAIS

SEQ ID NO: 137437 - protein, 165 aa, Heterodera glycines
MASTIFLLNIAGQLQIRRANRANNLLTSVLIINELFISFLPHFLPFICERVFGAGSSLGTGPLSELMNSFEVLFFSSIYSYKFSARNNTSMHGTGGTFNNNAVQQYQQQSYCMEMNYSRQNMERRRADRVVPMAPGQPQPAQILIRQVTPVENVNGRPRTSMARF

SEQ ID NO: 137438 - protein, 105 aa, Heterodera glycines
MNPQQKLTHTAVIGRAVSSSGRPGTWQDLGRTLPDSEILQILESNEKDNFNAIDPNLFVDPSTKTILAPILRLLLDGHFPSYFFFPKKNIQCKKRDILSIVISHL

SEQ ID NO: 137439 - protein, 69 aa, Heterodera glycines
SHFVQHCSEKTFQLLVNDMEQYNARENSEIKSEARFGFSGLDLATKTAFNKFPTDQSKVLTRTIKVIGF

SEQ ID NO: 137440 - protein, 126 aa, Heterodera glycines
MLLLPSFLCPHCLVGVVEKIWIFFEFLTSNNLDNEAADENGDGATNVGYIRKLSNAVVGTLGAMASITGAFGINQNGNGTQNLHWHKTGHHGICKVASKCRHACRFLERSIIQKAQNGTIGKLKMA

SEQ ID NO: 137441 - protein, 48 aa, Heterodera glycines
FWKILGSSAKALAVVCQTPRNLEEMVASFGNLLLFLESSLNLKAFMGF

SEQ ID NO: 137442 - protein, 33 aa, Heterodera glycines; identical to SEQ ID NO: 134141

SEQ ID NO: 137443 - protein, 80 aa, Heterodera glycines
MVMEVKRREYIGDGQGDLLPRAFVIHLHWMMREIKTKMNKLREFLFLDTSKLCPSNNTDELCKYEPIQFFSYTKRSKIHL

SEQ ID NO: 137444 - protein, 17 aa, Heterodera glycines
HKHLFDLFYHIHNLIKI

SEQ ID NO: 137445 - protein, 104 aa, Heterodera glycines
MSGSLFNLVAIYVVKWVVFLDIFFIFALDLSAISSPTRVPEEKEAEFWFSTPTARRGNYRRMRKTNGQGDFPSPPAEPLDPNKKGRSAEAGDADRKIRREDIPG

SEQ ID NO: 137446 - protein, 57 aa, Heterodera glycines
MWNLLGLMKCWRSIAFTAEDASGDGSTKCQTRTIASSRAKNCVIDCCWTSPKNCTKH

SEQ ID NO: 137447 - protein, 142 aa, Heterodera glycines
VLESFLDSEFSSENLRFWCCIQDLKFSPNCQVKTKGQHILDEFLAPVSEEHVFTLMSKDSYPRFLRSGIYKAVLDAAKAKGGRKRIIDLIRELSGSAVNTKKVPAKYHKTSRGSADVDNTQQLSLNANNFPKQCSSDSLPVK

SEQ ID NO: 137448 - protein, 207 aa, Heterodera glycines
GLEKTEKLHFGGGNTDWEERNLGRFKTSETRFVEILDYVCKRDSSAEIGFSGIKDLQFKCHSLLEAHEELLGQWFFEHQENGPTLGKYLCIENLKLCCDEGYFGSDCSPCPGMKLSGKPCFGNGQCQNVSTDVLVVVAVRAQKIVGLAELGIKWIPKSAVMISTNVQRKGNVTSPMKNVSTLLVPSSANVSMGLNDWTPANVPSMSK

SEQ ID NO: 137449 - protein, 220 aa, Heterodera glycines
MFCLLPGREKAEVGQTVGDEPRLLRGSDSLCAPNQQKPFGGQFSLLAAGRPVAAVPNGGKFRREQFAVEQNTTAQATPGGMLKSVFNVPGMPQKAFSPSPRSAMFVSNLGASSASPRGRPSGSAEFVSAKPPLCSDGLSSRPTTAVVDPTESEQFSDGSTASVRLQFRVSFRTDDGQPAGQSQSIFPGAIARRTKNRANVIRIKLKFEQWGRSESKRTMN

SEQ ID NO: 137450 - protein, 233 aa, Heterodera glycines
NKRHESIAEAHVSGWDIEQMEIQVARHADERTNESLPKKDSKYVVQLLGDWRQNPFDIQSTNCELCVQLQRNAVYWLAELLAPALVTAALTLCAVLFQLALPQALLLAFSLFSQLLAMQLMNTRMPSYTGTAPAILKFKFAAFNLLSTGALFVATLLLRRFSQTNSNIPLPRSVYALASILDKLMPLPKGSKELTEENLPQGNYADIALTLNNLLFCLFTFTYGWTIIFTLII

SEQ ID NO: 137451 - protein, 242 aa, Heterodera glycines
CALLLRRSAAAETAARAASPAVQSNCVDSDPKCSLWASQGECQTNAIWMMSNCRRSCQSCQGGDRAWQLRTQLAKSYDNTTNTKTRTVRIESVRISHMEIDETRELARLFGRLVLSWNDSKDETRELARLFGRLVLSWNDSKVSWDREHWGVSWLNFYWVQIWTPQLMQINSSASTTPGQINGKVLASTTPGQINGKVLAANYTGQVYMWTDDAMPNSFRLQFVFPTDAMPNSFRLQFVFPT

SEQ ID NO: 137452 - protein, 128 aa, Heterodera glycines
MNQDRGKRKRNSAQTPFEQIYEAADYLREQSPIPTIYSTMSNGQKSKPKMRIYSEGGGYDNLERLREEIRRQKAELEGKRRKGKETEDSEQLAKGKKPWQSKKETPNWAQNANGTTEHNEEFVGWTKC

SEQ ID NO: 137453 - protein, 96 aa, Heterodera glycines
MNGYQPSRNEHTGDESSKKKRHNTNYFRYIYNGNSEQFGLCVAITEFNTENMPNYITEKLKNEFKIYRKLSKDSKHMLKVFERSLKPKRFFFNFII

SEQ ID NO: 137454 - protein, 444 aa, Heterodera glycines
MRWLFVSISSWGQRSNALELWNKYKDQMYNPQGITSAAIRQAREQEALADIDWRLHFFNSSCVHCGLPDPPNSKAKNINLAVEEAFFGDDDLNMSPGQQNPRQQQNAPPPLNSDQQTVFDAVVKAIQSDPRDATVPRRFFIFGDGGTGKTFLFGQIIRRLRKVPYTYKVLATASTGCAAILLPYGKTAHSTFRLGREVSLDKLPSIPLESFFARRIREAQLIIIDEITMLHNTVIEVIDRVCKEMAIPQHKDLLFGGKTVIFSGDFKQSLPVVPHEGLTAQVTACFQTNPLFGQFTTMKLTINQRLGQGQQAYLQMCRQIGLGETGEHFWIPPQFLVKSREELIDFVYPNFQQLLGNDKELLNRLILAPHIDTCDEINEIMMANVPGQVREYLSSDKPLDERPLDIDEIESEVAALNRRTDSGMPPHRLRLKVGSRRCSPYQQK

SEQ ID NO: 137455 - protein, 101 aa, Heterodera glycines
MPSKDRRRKEADRLRWRAAIQTPDVANALGGPNTSGQQPFGIDQEPSTSTGIRAQIRQLRNDGQAIVGTPAMQLDTSVVSTPTTVGLRALTIVGGLNLSKI

SEQ ID NO: 137456 - protein, 139 aa, Heterodera glycines
MSSSGLFYNALIRRPNERTEEDVSVIFNQLRRLDVFERLHDSPLRSVCRTARLERHPANYVLFRKGQLATCWYILLSGSVFMNKQIYLPIGWYVCFGLIDIIFIYLSMLKISLHFLQTSAPFAPIIFLKSSKWLQILAI

SEQ ID NO: 137457 - protein, 37 aa, Heterodera glycines
MDPKLYFDSDDPQWLSWIGQFSKEMSRCSLNTDELNS

SEQ ID NO: 137458 - protein, 121 aa, Heterodera glycines
SWIGQFSKEMSRSLLNTDELNSVRVCTREQFYGPAGVEAMKRSGELYAEHRNDNVLVLVSGASSVPRGSTKVFHAHLVLPRVGKCEVSERRNANDGFKTFAIAQQLNSHSSKHFHSLFLLN

SEQ ID NO: 137459 - protein, 169 aa, Heterodera glycines
MPRNEELEEELEKEEYGKEAKTEREVGQREEKVEQKIEEDKKMEEKQTSDSPQQCQQLFDMFADGEEDGEEKMGEPMELDRISVETNAQTVICTEGTDLWPDSSVSSHLNEVNSAFAASRTEALRKLFTEPQRFAQPFQRDACSYRSYRAEKRKANDLEYITERHVIHW

SEQ ID NO: 137460 - protein, 23 aa, Heterodera glycines
MAWTWIQEKSMPGSRKKLAFCHN

SEQ ID NO: 137461 - protein, 56 aa, Heterodera glycines
MQLENKFKSTIIFCMMANLEQLKEMILILKHQNQMLCLAALVNIVLTQRREADFHR

SEQ ID NO: 137462 - protein, 51 aa, Heterodera glycines
MIETMFKKSIFEPHVKSLCSKSLKYGHASFDVLNAVLHKKAFLEPFNGIVN

SEQ ID NO: 137463 - protein, 59 aa, Heterodera glycines
MAKSGANFSPDAMPANNSEGIIVDSLYLAWQKFGDPNALLLIVVGQAYQTFEQKQVEYF

SEQ ID NO: 137464 - protein, 24 aa, Heterodera glycines
MPNPKKKSWCQNQDSRGGCRQDNP

SEQ ID NO: 137465 - protein, 182 aa, Heterodera glycines
MARCVTSIAFLPIGDLTPGIIALDMALPDELTPVLDWFVMNYTGRIKHDGSRTRPRFDPNIWSVYTRTLQGDDRTNNHSEAANRRLQCAFACSHPSIWHFIDLLRKDQKLSDDDFAKCSTGQEPPQKAKKYREADRRILTMVQNYLPLNNADTNIFPIHHPFNHHFIITFLIGISRNYEMRP

SEQ ID NO: 137466 - protein, 20 aa, Heterodera glycines
SAFAAAILLMCHSVVRERPQ

SEQ ID NO: 137467 - protein, 94 aa, Heterodera glycines
MTQNILSEHFETPIGQLMAQFDIQIQIRDTDFGDARFVDMEKNWSAEPVDNRGAYKVMLHPKVGARRIVHGQEERSSSQMSNRQNEMFGNQTAF

SEQ ID NO: 137468 - protein, 95 aa, Heterodera glycines; identical to SEQ ID NO: 128262

SEQ ID NO: 137469 - protein, 83 aa, Heterodera glycines
MFFLDKFLQGLKPQFDDDIVDRLNYYYTPMLFIIFALTLSAKQYVGQPYVGQPIQCWIPAQFTGAWVSHFINYFIIIRILFNN

SEQ ID NO: 137470 - protein, 16 aa, Heterodera glycines
MDKKWYSRAGIYEMDQ

SEQ ID NO: 137471 - protein, 129 aa, Heterodera glycines
MAATGEKASNSSSIRSNEIHLIEKCLRACIFHFHFWRYGRWTEVIIDDRLPCRNDNGQLLYSRPPTENVFWAILLEKAYAKMYGGYAVLSGGKVSDSLSDLTGGITEEWDLKSLDVAKRRDMELVIKKI

SEQ ID NO: 137472 - protein, 49 aa, Heterodera glycines
MCARCGRFGRPHSEQLCALGTVQKEAVPTRDDDTLKQASKYNKYILKFF

SEQ ID NO: 137473 - protein, 64 aa, Heterodera glycines
TFLVLFESIRKMLLACKFSKFFIYAQKNQSKKSSNYWGFEFLLAITFLKLNENFCRFCKLIINT

SEQ ID NO: 137474 - protein, 28 aa, Heterodera glycines
VGVKNANAFKYKTKCLNSLTVIKFLIKG

SEQ ID NO: 137475 - protein, 226 aa, Heterodera glycines
MTRPLRTRRKRKWSKEALSPPLLHPDANFDILTNSLAETMHILHGLYRTLKSNMHMTQEEVEQFAMRLQSFSDQNLIPFVEMFKGFRYELTVNNRQMFGDYDPVRPLSDSVFSALELLMADCVLATEPSLNPILVTNNLFSINCGALARGVVFKQFDVQVVSEEMAEHIQSEMRRQRLLQQPSPIAQVPAAALLAMKPTSGTKRSNSQAITGQRDGPSKIAIILDE

SEQ ID NO: 137476 - protein, 335 aa, Heterodera glycines
DLSPNGMDMKSAGGGSSGKRPIFYFYIRATMFSPSGRFADAHTLSLPFTIATRRNQDYQDGLLLQWVETAMGWEKFKFLFMQHFRINAEVERGLQDKDFDLLQVSDTLSSYPSALLMRLSFVTGGTICITLKSTVHSEDRAPSVPMHLEPLDLKKLQAKSLTDYLRDIAVAEKIKYLINSQGEPVLISDLLEQFSERTGGGIEELETSRCISSNVTHSGDIDAMQQITFTAMRIAVVTCKVKPPSADLMEYEEAALLRGDVQPKVHSPVPSSSNGYPSPSFNPASVFPGSAGGGGGGYRLPSVSAANDDFVREVTQLCNFWGKSKQVNSQLANLR

SEQ ID NO: 137477 - protein, 235 aa, Heterodera glycines
MNKSRSKSRGAKPMYNAQPRRTQPEQMLSLETQVVLCPKCSLTFSSHRSLSLHNRIHKKENPKEPRTTRSAGTDAAPLTPPRQRMVNLDESSGPDDVFAEAHPMQPVAADGTPTLPGGIPRNSQAQIDVVRKSTSACGKKNSGEVPIETIHTVFALIIPHGGLFFNLLVDWGIIGDWGIKIEGLFFKPLLDWGIIGDWGINGDWGIIRANTVYSILFPPVQMAHTNGRVHKRKTN

SEQ ID NO: 137478 - protein, 66 aa, Heterodera glycines
MEGYKWHFNETVLTVWSAPNYCYRCGNVAAILELDEQLNKDFTIFEAAPQEVSGVKIKTNNVPNQR

SEQ ID NO: 137479 - protein, 308 aa, Heterodera glycines
MPMRPAKAELTARKRRRRTIKRRKTPRLSVHNEEVAKKESKKGVEDEREDDSFGEKNKRRTSLTDSPLTELSPSSTTSNGDSADDTEVAKSSSKQGSSCGTVSNSSSSNFYVVNAPPSSSYSSVGERQQHQNMHFLSEITEEENINEVEREYAFEIVINQKKVQFLKECERHLIKQLKYNKWTEQLCQSIFGGDFRTFYRRFKMVMICLRKRKSAHYERLTDAQLASHVAEMIIEKFHNKENQTTILMVLLSNSEREVKIAHMLLKLLTRSQLEKLLEVTAAKSGKNALHLATATGQSCQLQVLLALT

SEQ ID NO: 137480 - protein, 282 aa, Heterodera glycines
LTNIRIVTDSTADIPLALRQELNIEMVPLKIHFGDEEYLDTVTLQSEEFYPKLTSSPHFPRTSQPSPAEFLDLYQGLLGEPDTEVISIHLASVLSGTYQSALLASTMLEDCKVHVFDSCSASYGIGALAVAAARAAKAGQSVDEIELVRTMRENFYIYFLVDTLEFLQKGGRIGKASALFGSLLNIKPILSLETGEVAAIDKVRGHKKAVARILELLAADVPGKTIRSLHIAHANNLEGAEQLRAAIMQQFVVEHVDYITLGPVIGAHAGPGTIGVREYGVR

SEQ ID NO: 137481 - protein, 141 aa, Heterodera glycines
LCPVQSIPQGLAAILAFQEKADAKTNTEAMSESLRRVKSGQVTYAVRDTNTDGIDIKQGHFIGIQDGRIVSSQPSLLDACKKLLEEMIEESSEIVTILTGEDAVDAETEELEAFIQAAYPDIEIELHPGGQPLYAYLFSVE

SEQ ID NO: 137482 - protein, 24 aa, Heterodera glycines
MHCLCVASWDHVLVRVLTLLAQLG

SEQ ID NO: 137483 - protein, 23 aa, Heterodera glycines
MRTTLETGFSTQLPARVISSRSE

SEQ ID NO: 137484 - protein, 258 aa, Heterodera glycines
MSDSRKEAEEKMAKAIFISADCWLCVFDLLEPSQLGLGISMISHRFDIYVDEHFKTRKWALKFIRIRGKIGENGTKEMKIVKYYDWKPLPIPQKPLPKRVVGFKAISIEYIDQNAIAFLRRFRQLFAKCQINLSIDIYYIYTDRIMVFLLHNIWPMIGKNIYAIELRVRIFRRLRQFVDPSILNNCSSLRVVISCADDFFIEFPSADNAMASDGQALAKWLFTPLQDNVPKMLKCSLDMDYDGNLVTNVEAFKAVISN

SEQ ID NO: 137485 - protein, 153 aa, Heterodera glycines
MLNKNRQTVAKWLFTPLQENGVPKVLKCSLEKDDGKWPLKIEAFKAAFANASSPANFIVVISFLWSFAVPFVLTNEFTREQLALKRINNSHRFLLDRCPIVRNVSKWTKWEKEAIGWQFNGQWNKINIRIDNERQIGDGLLNAMIGPCVLQKK

SEQ ID NO: 137486 - protein, 40 aa, Heterodera glycines
KPNLCQVARDPSGLVFRILIFKKAHFSIFGLGPKRPWGPK

SEQ ID NO: 137487 - protein, 215 aa, Heterodera glycines
MQQDDLFMGMLTVKEHLMAQDWMVGDTKRTMRRRVNEVIDEFGLEECRHELVGFSGVEKSILGGETRRLLFASELVNNPQIIFADEPTTGLDFSMAESVISVMRALALSGRTIICTIVQPPLDIYWMAAGNNARLTRDELFSAIACQRRSIVRLDTERARFRRLNGAQFRVVVRLKFLDLGGFLPNFAAVMPQQQNVVNVAAVLANANPNGQNYN

SEQ ID NO: 137488 - protein, 309 aa, Heterodera glycines
MIFTENVVPICLANSTSEKVFNNNLHIVGWGHQNEMANPIATKKQKVKLSYEGHLYTFAKMSSDGMTKFWRCEFKNSTDKCNGRIWTDLHDQFIRLATPHTCPADASRVDAQMVTTTIKRRAIATFEPPSVIRAEALQNVPSPSAILVSKQAAKDVKNCTDSVFAENARMITSVAFVPLCDIRMAVAALDTEFGNLAVFQPLIDWLLINYVGQPRPNGTWSQPTFRPEQWNVYTRTLNADARTNNHSEAEHHRLQGAFNCRHPSIFHFIDVLRREQKPTDVKYASFMAGEDPPPKERKFLPTDEQILNL

SEQ ID NO: 137489 - protein, 24 aa, Heterodera glycines
RTLSTAVRQRSYKIYSMPQILWAG

SEQ ID NO: 137490 - protein, 24 aa, Heterodera glycines
RTLSTAVRQRSSKIYSMPQILWAG

SEQ ID NO: 137491 - protein, 538 aa, Heterodera glycines
FGDVLTKDGYSPSLNNREVIEAFPVPKNAKEVKRFLGMMSFFRKFIPDFAKLAYPLNQLTKQEKEFKWADQETEAFENLKRQLLKAPCLRAPDYKLPFYLFTDASATAYAGALMQSEKSDEMHAVGFWSRTLTATEAKLPATHGELAAIVHAVQNFRPIIYGSEIIILTDHRPLTFLFSKSSSNPKLNRWLMALQEFEPKVIYLEGKANRVADALSRVPIKWEQIEAKIKEEIPYLLVSEENENEISRDKIEKETIEDPILSEIVLKIRENWSEPVEEKLKPFYRIRDQLYLEGKLIRKKPLRQIVIPEKMRDPILKLIHRAHFGIVRNKDRAKGLVWWPGINESIEDFVKKCWTCQRNANKPREKPDRRWPEARFPFERVHSDLAGPIWGTNFFIVIDAFSKFQFVYQMSSTHSSTLINALHELFGICGSPKTFVTDNGTQYVSNEMEEFLKGEGVRHLTSAPYHPSSNGEAERFVRTFKEGVGKLLDEGKSLKIAQFVFMQEYRASPCAAAEGESHPKSFWERIRTVLDNIMSTNA

SEQ ID NO: 137492 - protein, 113 aa, Heterodera glycines
MWFSCISRRVKAAEKITFRQRIRLAILSPVQCHHLHPIPMGHRSLHFGVVQLAAVVHKRQISAPINWHFFAKTPFAVNEGTKCCCSIGQKQCLNYSAALSFIKMGSEMTEADN

SEQ ID NO: 137493 - protein, 124 aa, Heterodera glycines
MALGGWKRERARLRSLQNLNRLFVRPALTKEQLKEEYEARVRKRQQNSAPVAPAMQHRQTNVPTPVKKNGPNQKEASDDISKPPEVFDQTILVCYEALKSLPPNDKIVHQIQSLEKQYPRLFNK

SEQ ID NO: 137494 - protein, 95 aa, Heterodera glycines; identical to SEQ ID NO: 124528

SEQ ID NO: 137495 - protein, 189 aa, Heterodera glycines
MLSESADKTLLSHSLTNDSQTAAAIQIVTALKDTILSPNVSLVVICLYSYQKESLQTEFEKQRIEVLVVTVDGYQAQESDLVILVTTRTSLRDGALRALQAARPHLSREKEERMSPTKVRVHAEMRHGGRSNVLDNSAVPFLSEVANQRVLVVLALCANVSGIWQRTVDMRMDNQQDVVNQGAKGNGNK

SEQ ID NO: 137496 - protein, 1168 aa, Heterodera glycines
MYMWAKASAFGDEEAASAILRTPNPKECKRIGSRIRLFGTTALATHKHIPNDVYWGAGVALSDVEKIRDINRWPGKNILGRILSALMKKFLRKKSEMSAPTAPPNVRDLSEFPPLEKLTLEDVRKKNKIASASPSGNSNISKETCSSAISVDLVASASQITWGGEKGNSGQEKGEKNQKLNKNVASASPRDYEKFANQGFDKNPDEMAEEMMEEFSSFNVRENEGKIVEYLVCQVEENIVIGGKLRTMANKGWPHFVAISNEVAEKAREFKKKLQMGDIVGVKKFEWKNDYRYLAKRETDKSHFNKMWYVQKINSQATVIDLGHIRYAILREHPGLVLRIREMVSNGVTKKLCAIIISPGLQLSSRCYRRQLSELELESLQEGQLIKVWTAFVPEQTLVENSFILPPQSQFRLGTEKQIEEGKGVLSIVGNHAPWPYQSNSRNVFFPLLPEMTLPEIELSEQIMSSAIAYSFEDEEKRIVECKFEGRAEWQNDTFWLRFAEIDTEKMKKLKEVWTEEANVFFRTALDLPHFAFGYVKQIDIERIREEGKPKFNFWIMAKVTNVQERKFRDVHAELEAAEEGGVFVVHPIIPIGVKHRRDCFASNLPSKIANLETKQGKMMRAVLGRTEEIIEENVDQNASAIQINHALMKKLNEKQQQTAKLLLSKESHFVFQHAPPGVGKTYVAAIVAAILLSIEKEIKIAIVTAANLPLAKLVQELNDVFGSDEMEESGSVAFFSGYAKEKYKEMLEKLKRHLLISKISNEEIISKFETQDDVKEIETYCKNFEVRPRLTKERKVANLYSEVADLRIVFTTVSMAENLIHTALDGTTVLIFDEATQGSWVCLAHLVARMPKLEKVLVTGDQLQLGVHLQKLPPLLQSGFGLESMVDQLIMSPTVVQTRLTTCYRMHPTLVKAVASAVYEPNGEKFEPGRAAEDRSLLTASKFPLPIQNCPIVLLNVVGKCRQDPLSHSLTNDSQTAAAIQIVTALKDTILSPNVSLVVICLYSYQKESLQTEFEKQRIEVLVVTVDGYQAQESDLVILVTTRTSLRDGALSENSEFLKDSRRATVALSRAKSGLFLIGDFKTLSEGEVWNKFLETASEDSQIVGEEYLQILRNGRYMRDRYGQLIDGIGRVVQDLQWLQKNDENWRTMQQQSTSSSTSTFESRKRN

SEQ ID NO: 137497 - protein, 340 aa, Heterodera glycines
MPTAKVVISQDGRKLVPFFTSAYPFSNHFSCRFVIDGLEFSSSEQMYMWAKASVFGDEEAASAILRTSNPKECKRIGSRIRLFDTTAWRRISIFVMTCANWHKYRQNEHLMRHLFNFGPDAEFVECTANDVYWGAGVAISDVEKIRNTNRWPGKNVLGKILSALMKKFLRKKSDMSAPPAPPNVRDLSEFPPLEKLTLEDVRKKNKIASASPSGNSNISKETCSSAISVDLVASASQITWGGEKGNSGQEKGEKNQKLNKNVASASPRDYEKFANQGFDKNPDEMAEEMMEEFSSFNVRENEGKIVEYLVCQVEENIVIGGKLRTMANKGWPHFVAISNE

SEQ ID NO: 137498 - protein, 369 aa, Heterodera glycines
MCTPPVNTLFAKVGLDLAGPFPKTENGNKHILNIICWFTKFVISVPLPDAKAKTIASAFLKNCYLRFGGCTELITDNATAFTSDFFKSLCALLYINKTYAIPHWSQGNAVTERSFRTFHNILSKYISKDEPDFDEHLDFVSFCYNTSVHRSTNETPFFLMYGRDPIFCIDLILDPKIREPVAFSDDEEIRQKIVVTLRKAWQAANLANQEAQARTKSSYDKLVRNPTISVGDRVLLRNYSGKIGTSKKFHLPWKGVFRVIDIEGVRTTILSCNSPQSNPRVVHINQLKKCIEPLGPACTIPKLDDDEEKALHEANAKELINEPGHYHKLGQKSNSEVEKEVEETDEPEQISPRYNLRKNPRARKLSLNN

SEQ ID NO: 137499 - protein, 368 aa, Heterodera glycines
MVILSQMTYQIHEKDTKITATISQEWEEVESQMIKAVIGNGRLGNLLFGTTIQKAGRRVRKLRETKIQQGEIYEEPINQINWPPRIRRAGNSFKKSFTRPFKRNRHGPNPTQMSTHFELNSLMGQLGSLNNNKMTVTTLVSLNNFQMKCLVDTGSSTSVAPKALADYLGIKTFKSEAHLMSASGHPVHVKEAARVTLKIGNEYVDIIIRLFDDELSWTMKDYNFILGCDALASLPPITFDFQNKWLSIGNATLPLGNATNKILYGLKIYATDTTELSPNEQCIVKAKTKSLQKLRHEIVFNEIDKKLLNEGIGFVPSLSDFKSETISVIITNPTSTVKRIFKGTCLGNANEVLKTENSTIFTEIEKED

SEQ ID NO: 137500 - protein, 63 aa, Heterodera glycines
RHFFRGHFDRSATDVYIDFAVHTGRFRPIRLAHPNVVMQGFDGLKKNMLPIKCITVSPCRIAQ

SEQ ID NO: 137501 - protein, 41 aa, Heterodera glycines
MFFRCDNFTAGPPRPTPSRRRSTSAGSGGGLGFVLRCQVHT

SEQ ID NO: 137502 - protein, 757 aa, Heterodera glycines
MTDQIIDRKSKQNQNFPNPNYGREIGVNHPIQNTRDFGNGPNFQNFHPVRNINQPNYQQRPNPNFENLAPQPNHFPNVQNFEFVPQQNFQQNQIPDIVMELHKVTLSNQYANTLREIPNLYGTEGRDKIKDFFLNVQMCAGEWRPEKQKELLQTKLKGKALKAYHIALNKFGNEATFGILKTEIMSILRETDYKEANAFSELTQNGKRKPNEDIIKFGERIQRLVNCSYIGLDENQLDEVSKKHFISNINDVNLARFLECQTKANQTFDELLMMANRLSLIEDGKNRERNESVGIPVQFQQTGPQQKPYSPFQNPNYGQRFERNFPNFGMGAQNNFRPNRQSGFKNQTFQQENRNYCPNKNFDHFQNQNLVPYQTYGPKNQWVSDPQNGFQNDIFYESNPNSRPSQRFVHFQNQNSDHQQDVNDHKIEAISANRTQFDSNQQSNPMATQNMELNMIKVKGKGTEKCEKKSVKISHIEHSEPPAYEKFFNSLIAHSTEFPSPNPTQISNSECIVLELNVAGLKATALTDSAAEINAANPEFLHKVAVEKGVNLIDWGFSPNKGKSEIPFEVESFTGGRVPVIGVLNVPMEKGNWQGKINCVVTKKPFPYDFVLGQNALSSLGYYIGNVITNEIINFGESPKHSNNSLPNSGRISSLKIVPRPIQSRIISNEVIKSISPVKRIKFIQKVSSNSKIASNKTDQTPFVKLQKIPKKIPSPPIKLVINAIRHKNEDLDQKQTKRERRRVFVNSKYKNVFRQP

SEQ ID NO: 137503 - protein, 111 aa, Heterodera glycines
LEEEHRLVNTVRSLIRIKNPNDRLCLARAVLLGLHDWRSRSPGGGGPTAFKSFANRQHTHGPEARNLLRRAAIPRNKHMYTIDDVQKVQDWIDQRYGPGEIRIAVFEKERE

SEQ ID NO: 137504 - protein, 83 aa, Heterodera glycines
MYTIDDVQKVQDWIDQRYGPGEIRIAVFEKEREYRIVFKAASGEAAKFNLCLLFEPDKIWLYKIGWPFCNKFDLNNLILGFRY

SEQ ID NO: 137505 - protein, 176 aa, Heterodera glycines
MEKSIKNVLERLYNDPKSPAAFAGVDRLWLEAKKELGNKIRKNDVKHYLEGHRTYTLMRPRRVNFLRARTTAAGFMTDCQVDLADFQALSQHNSGNRYLMVVIDVLSKRIFVTPLRTKKSDDMVEGFKRVFSTMPMKPHRIFSDKGTEFRNQQLKKILMKRKLRNMRAHILRRKQH

SEQ ID NO: 137506 - protein, 256 aa, Heterodera glycines
MSNNPLPPTTTLTDTNDLHLLEMLTLEEEEEASKGRITASASQNEDQTRNLSRETCSNEFGVQSVASASKIEGACTGHMVGNGQENSETNKNISQNIASASQSTNEKETKRIAEINHCREMIRKTMAALAIKCDTEKTSELRDTKKRMGECAMAVRLGKEDKWPYFALVHPNVKLNQYPRLGSIISVPKVEKLEYFSSLNSELYSSNPNEESGTIYNIIKSVRNEIKAIDVDFNVYDDESDDNILSASNWTGCKKS

SEQ ID NO: 137507 - protein, 36 aa, Heterodera glycines
ILIDSYASYSADKNRLFQTLVKFECRGIEPTSFDPR

SEQ ID NO: 137508 - protein, 206 aa, Heterodera glycines
MKFLDRDVLQTMQLVTNKHCLIVDKYFDVFPLRAVARCKLRTTRSNDMKLLLIYRGRTIESNSDLHLWLRHCFVGCIEFIEFKFTSEILRDLQGMGQRIFQLNYCVFDYQGRSSSQLISHVWLNSLCDEHCDDSANPKALSLKGFDYSALSLDLIETLHEDFVNSTNKQSFILNVECDDEMNLERKEENRITGEKFKVNATAEGDI

SEQ ID NO: 137509 - protein, 36 aa, Heterodera glycines
DFKVKKCFVCFMPVFALQMSANLIGSLTFVRRITTT

SEQ ID NO: 137510 - protein, 47 aa, Heterodera glycines
KRKHEKILLISAIIKKHKTLNCITKLKKLKSKIFWKRVKMNKSRILS

SEQ ID NO: 137511 - protein, 30 aa, Heterodera glycines
  unsure (1)..(30): unsure at all Xaa locations
AMRKAAVRLCAKMEAXMRAQIDETAKKLLA

SEQ ID NO: 137512 - protein, 229 aa, Heterodera glycines
FKRFAIVYGCLFSFGLLGNGSVLLAFAQNKRLRSARNLFLLNLILTDILLCLTAVPVTPWYALTKDWSFGSLMCRLVPYALTKDWSFGSLMCRLVPLSNSCAVFVTSWSLTAIAVDKFMWSLTAIAVDKFMHIIDLTRQPFSLRTAGFVTFVSLRTAGFVTFVIWTLSSLLNIPYLLSYSLVNGDYYVPKNSTPFCGQFCGDYYVPKNSTPFCGQFCDELNWSDELNWS

SEQ ID NO: 137513 - protein, 50 aa, Heterodera glycines
MVAFGSMARKKSFGRGREPTLKQKVEIEVEKTLACQFKNIKKPKVAFFVL

SEQ ID NO: 137514 - protein, 59 aa, Heterodera glycines
MRKAKCETPKNANNAKGEMRKAKPRPIGYGRVHLWWRTERSADLFNALFICVYLFDFTH

SEQ ID NO: 137515 - protein, 47 aa, Heterodera glycines
MWHHKSRHSLLSFSVANFCLFSLFFWHFDAILAREENYEPIPDEKAT

SEQ ID NO: 137516 - protein, 112 aa, Heterodera glycines
MSCKIGIFTSKSTHSSSRSSYLDKEIANGDKELLNGLIRGLNELIDDYSCPHLCPTDGHIVQKFVPILFDTLRKWHQQKVKYVKRSQTMALACSVVEHLLARLETLITIEAT

SEQ ID NO: 137517 - protein, 184 aa, Heterodera glycines
MSQAGGFFISILALRQVAVELRQNAQFELPSGQQSFNPDNFKQKVKNKFDFVIRTLKEMENTENYEQIWNWKRRRLSSSRSGLSISPPPHNGIVLGCVLLHFGIALSKRANVEHTKFENFSKLKNANGECPTVQYERRDYQCGKVPFRSAPIELQLFNEAISNYTRTIRIISNKCQDWKYNYRD

SEQ ID NO: 137518 - protein, 108 aa, Heterodera glycines
MVIGLKCHFSDLANAFDSQKGIGFQPNELIADQLTGDQFQVQFVAMLATFDLNVQRRVISLTRVLQSEYEAFYAFLDWNSIFGQHQQGTSGQNQQQGPPPPPPAGGTF

SEQ ID NO: 137519 - protein, 84 aa, Heterodera glycines
MHQFQKARDYLISLAYVLEPHYRISLRNHLANAFDCSKGIGFQPNELIADQLTGDQFQVQFVAMLATFDLNVQGKVISLTRVLQ

SEQ ID NO: 137520 - protein, 92 aa, Heterodera glycines
LFEYPKRTLEKIVFFVFGAVPPNRCAQIYGETESFRNSFPIACTLILRWIFAPHNCLSTPNGHLKKSIYFCFRGSPPEPMRPDLWGDRILRE

SEQ ID NO: 137521 - protein, 62 aa, Heterodera glycines
MNTSETQKKHQLTTSTPIGCTVKNHQKPPLRKRSVADGSGDRENGTAATINWAKADLSVCLA

SEQ ID NO: 137522 - protein, 98 aa, Heterodera glycines
MIPSVCNGESSSSDDEYYNNFSKYKAKAALALRRNDCKSGKEITKNGKSTTKKVSSEPSDVEVFTSCPLSEQLISRAEVDPEICVVQIADTSVNSVVD

SEQ ID NO: 137523 - protein, 42 aa, Heterodera glycines
MPNGKKSNKLIYCPIKNEHFIADISVAPKLSIGAFSLIVMAF

SEQ ID NO: 137524 - protein, 43 aa, Heterodera glycines
STVLALSGGDSQRCNACSHVPINLIFVKYVPLCIRLHFCKKIQ

SEQ ID NO: 137525 - protein, 23 aa, Heterodera glycines
MMKLNIFLLLFSRKSPQNDFFFL

SEQ ID NO: 137526 - protein, 155 aa, Heterodera glycines
QFLVFFKALDIIEVSMALVTVNFRALFRTWEPESHPATFLAALLAFNSVSFFGPKGHFTANTKIFDAKKPGHRFDPVPVIAFSYHANFVLTDTFPLENWLKSKFLKKCKKWVNFKLIWLPFQKPQCETYPGIPCPKIFVQPQGVGTKSFVTHANP

SEQ ID NO: 137527 - protein, 23 aa, Heterodera glycines
MADLKKMKRDTEAEKTNYGVMNF

SEQ ID NO: 137528 - protein, 97 aa, Heterodera glycines
WYFLAAATVCSLFYIFISVMPSRQLNFVGKYLTGIEGYKMVDSQSLRRFVFHFLRQDGVFLLRMVATHAGELACYDLAKKLWDNFMVHKEGAKMHDV

SEQ ID NO: 137529 - protein, 100 aa, Heterodera glycines
PNMLLYYFASAVKSIQFHVDDDIIDKLNYYYTTAIIIVFAILVSSKEYLGNPIQCWVPANPIQCWVPATFTEPMEQYTENYCFVQSTYFLPLSTYFLPLN

SEQ ID NO: 137530 - protein, 104 aa, Heterodera glycines
LKKNAPLLRPSADGKSEQLDNHLAELELLMNGAREALSVDELLQNETQLILVLFEMKNSIFGDKITLNSKNLCEGENFLQFLFILHENAIGELMRKAEFTAQLK

SEQ ID NO: 137531 - protein, 92 aa, Heterodera glycines
MVKLSQMTYQIHEKDTKITASISQEWEEVESQMVKAVIGDYRKIWLIIMSLILTILSIDLAIRLTIGLSEIYAGNGRLGNFYLVQQFRKLGK

SEQ ID NO: 137532 - protein, 217 aa, Heterodera glycines
MPHRGRLNVLANVCQQPLSTVLALFNTLKLMDEGSRDVKYHLGVCIERLNRQSQRMIKIALVANSSYLEAVDPVVQGKVRAEAFYSNDLHCDRHMEYVDKELKNYGAILEKAHESAKQVTELCNRNWSDTPLYDGKIPSQLLPTGIERDSLEHIVNKISQVPDGFNLYPRLLRLLKGIHVRLSGQDVERGAFSHRHHALHDQLIDQKTYNPLNDLSE

SEQ ID NO: 137533 - protein, 322 aa, Heterodera glycines
MFPIRPPPSAVHINALLNPPDEFDEKPKHNLFRWLHTPRKDGRPKIVTIRKWRKPQWASFMPSLITFFIAPSAVPVNFLVICHIACNTNFQKMERENEETDERLTPNAQVTAHAVIVRQRNGTDQRTVAKWKWEANRILDTAMHQQFGFSIFSSRMANDVWLDTLFWIDRTEVGTKFCTDRRALRQAGGHAFQTAQMEAGRAGYSSGTKRMGLGRHGDCHRYGRPPVDEATAACQYFEAPSAIAVNYVVVCHRASRRNIEVVERENERTGEWLTLRWRVPVEAVVVRQRSGTDRRTVAKWEWDANHTLDTMLCINIQDSDIG

SEQ ID NO: 137534 - protein, 95 aa, Heterodera glycines; identical to SEQ ID NO: 130305

SEQ ID NO: 137535 - protein, 56 aa, Heterodera glycines
MNVNYIEKRIYNYCRNQPLSNTPAAYPIEKEEQKEEEREDEKGEEKDEGKEEEKEK

SEQ ID NO: 137536 - protein, 84 aa, Heterodera glycines
MASSIGSSDSFFRSTTDQTPAASAAEEVGKYEVFSWHGNLSDQLSAELFVTDQQLLKECREKLAKSELKETKLLWNNGELNAES

SEQ ID NO: 137537 - protein, 128 aa, Heterodera glycines
MARQIGLGETGEHFWIPPKFLVKSKEELIDYVYPNFQQLLGNDNELLNRLILAPHIDTCDEVNEIMMANVPGQVREYLSTDKPLDDRPLDIDEIECEVAALNRRTDSGMPPHSLRLRVGCVVVLLIIK

SEQ ID NO: 137538 - protein, 91 aa, Heterodera glycines
MVISSMMMSCASRIRRANKLSSGMLGSLSNDTSLPRRNVEWAVFPYGSKMTAHPVDAVASTFSAKSFLSKGSVLITIVVGAYNILSVILFS

SEQ ID NO: 137539 - protein, 18 aa, Heterodera glycines
YREAIPEGFGLTINLGAS

SEQ ID NO: 137540 - protein, 328 aa, Heterodera glycines
MPSKQRNLRKNEQERYQRRTEKSVSRDTSPVSVGSADGNGEASASLRGTTTPSLSALQISTPASSIGSKKRGRPLKAGAKPILATQETVSSIGTPRTAVTQSDQGSPCKKRGKVTECDKPTFANEAIASTPVSTQSRGGRPVKQLGGHAGKGRGKTNESMSKCSEMDQSVENALSPAPSHIVFEKIDFSSVQINFATSRNFACKIWKWAAIGLYERDGETPIAPRSGPRYIETCWNDMTQFLNDGFAATYLAYLATISQRKVVVVDPMVWSNGLDRVMPYKNMTFGYDPNVPAEVILLPVHFPGHWTLIVHDVQFGTHFADSLPTTYG

SEQ ID NO: 137541 - protein, 58 aa, Heterodera glycines
MRVVQRHLMNISFFDRLQLGLKLALLSPRFNAFVDKHVDDESELTIWRAIEIRRKYWA

SEQ ID NO: 137542 - protein, 33 aa, Heterodera glycines
MTRVNIWIYYKLEYLEKKLRKFLSLDRLPSALA

SEQ ID NO: 137543 - protein, 16 aa, Heterodera glycines
EAIPEGFGLPINLGAS

SEQ ID NO: 137544 - protein, 42 aa, Heterodera glycines
MSAAQCHVILVRYTNLCYENEIYDEFRMKIRQIKGENRQIII

SEQ ID NO: 137545 - protein, 102 aa, Heterodera glycines
MNCRCWICNDVWMDILPSFDHAQLGLKMALLSPRFDALVDKHFDGKSELTIWRPITICKDAVAAVPNLAVLIDQGNSDNFVPFPLPNHSLPNKIRFNNLWIE

SEQ ID NO: 137546 - protein, 55 aa, Heterodera glycines
MSVPISLFSFHTASKRNQSQQNERAIGLEAALDQLTVGQMTTEKHAVEAAKKLDY

SEQ ID NO: 137547 - protein, 18 aa, Heterodera glycines
PYRDRDLSFSKPGTGNRD

SEQ ID NO: 137548 - protein, 66 aa, Heterodera glycines
MFCVRRPRRRPQCSDPILRSYRRGKEHVVLELGSPMAIRDNDEDGANKEIIDQELEVTLEGNEKEC

SEQ ID NO: 137549 - protein, 28 aa, Heterodera glycines
NFLKYKPKLFGLFKKELKIFKIFIHLPF

SEQ ID NO: 137550 - protein, 73 aa, Heterodera glycines
MTFQSLELNSPAFQSPGLNPPAFQSLGLNPPAIQSLGLNSQAFQSLGLKSPAFQTLGLNPPTFQSLGLNPTAF

SEQ ID NO: 137551 - protein, 89 aa, Heterodera glycines
MPNQIFSPGFLTILELGEMSLDQELQRGKPKKSKNQLITMVKDIVSTLDVLHKVAMHLDFKPLNLLLFKKLSLFSSTDVSIKLTDFDGN

SEQ ID NO: 137552 - protein, 26 aa, Heterodera glycines
HTGASRPFFSLLGRFAALDGRLAPVI

SEQ ID NO: 137553 - protein, 75 aa, Heterodera glycines
FDLGPAHFIAFSTEFYFWPNYYRFESLAAQWHWLIRDLEKANLNRHQVPWIITMGHRPMYCSDFSGDDCTRYDSI

SEQ ID NO: 137554 - protein, 121 aa, Heterodera glycines
FIINYAGRLRNNGTRTRPLFRSEEWSVYERTMNGTDRTNNFAEAYHRTLQHAIGHGHPPIWKFINILRERQKIIDVDFEHFLAGNAPPQKAKRYREADRRILRILERYNREKAQPQINDDH

SEQ ID NO: 137555 - protein, 76 aa, Heterodera glycines
MNLLNGMPSPWKFHLEAKWTTIEPSDCQLMDDPMVEDKRAPFLGRILQFCEENKRKYCSTTLCSTLCDFVLSAAKQ

SEQ ID NO: 137556 - protein, 201 aa, Heterodera glycines
MYKCQSWQGTTRKNDRTRRVFGIAMGIGNDDGDVQFGDAKFHATLPEDELRRRRSDQNPNNDHLAFANATLPVFDMDNSKPITDQGQFFMLVLKHNADKLNGQQVDCMSVDFHGRPSSTTRFMGSKGITKDGFTDEVVTVDGNSKKLTTVVLNWGSFEYLTLEQDWVWSVTTFISAIGGSIGMWLGLSILSLIQAILDCHC

SEQ ID NO: 137557 - protein, 19 aa, Heterodera glycines
LLIVKEEHPEEEATEGVSK

SEQ ID NO: 137558 - protein, 103 aa, Heterodera glycines
MEPFIVRISYAGNLRPYELAEYETISMLKVRVAVFEDDLSRAAVINSPRPKPSFCASNPFSGLIVRRSASMGDARIRQMTAHNRNTENGQNEKDEMAGKKFKN

SEQ ID NO: 137559 - protein, 128 aa, Heterodera glycines
MAHRTPLLFAAAALGAGVAGFTAWWLWTRRDVAGGGGPNFGGDEVPNGGGDEVPNGGGVEVPNGGGDEVTNGGGVEVPNGGGDEVTNGGGVEVPDGGGGGANIGWANEEEEEGGPPHPLQNPLPDQQN

SEQ ID NO: 137560 - protein, 81 aa, Heterodera glycines
MKKKGEREMDRDGESGEEKEIEKYQLTHLYLKIIMIRDFKKRNIKWSNKKRQTHKQKNDWELIVLRKFVVAIHPIQRKMHF

SEQ ID NO: 137561 - protein, 26 aa, Heterodera glycines
MSSLSLFLSLSLSLWSLVCLLLSLVS

SEQ ID NO: 137562 - protein, 227 aa, Heterodera glycines
IVTFTNICSFCTPYDVIKLLNDLYQRFDRIVGDVIKLLNDLYQRFDRIVGLHDVYKVETIGDAYMIVGDAYMIVGGVPKESQNHAEKILNVAIGFLMESRFVTNPTNELAISIRIGVHSVTNPTNELAISIRIGVHSGPVVAGVVGVKVVRYCLFGDTIHLANRMESLGMPSKIHVSKTAKALAIRNNPSFMESLGMPSKIHVSKTAKALAIRNNPSFLFTERGAIK

SEQ ID NO: 137563 - protein, 18 aa, Heterodera glycines
IVDFSVFFIRLIYNKMYF

SEQ ID NO: 137564 - protein, 29 aa, Heterodera glycines
MVDKNLFTKEQQAKDAKRPQPLAGPQFVS

SEQ ID NO: 137565 - protein, 118 aa, Heterodera glycines
MSESLQGILEIFRGKPTKMEKKKTNIGKTVTENEEGEKREDEARKKAVDQYKKEMSPADRKLLSTREASHSAIARASGAYVPTYLRMNGDCTGAAWRRPIPRCKTVKELKMDVVIGQN

SEQ ID NO: 137566 - protein, 81 aa, Heterodera glycines
ANTTSLDNRTCTTVIYNSYRISYAQKMNSALSESIWEASNCHDCLRIDWNFEHGNSTFEFDNKTVQFKNYLWQWRNCVVQQ

SEQ ID NO: 137567 - protein, 95 aa, Heterodera glycines
MAFIYEHGGEKKMDLEKDSAEARKEEPGLFRILLGGKPDNPSDPAANRRVPISARFLTGEPKWRYFVLPLLFGAFVFAIRPWQWQRPGGRKSEGK

SEQ ID NO: 137568 - protein, 102 aa, Heterodera glycines
MDEQLKRSKENADKYRHRAMKLDERLRRKTEKIEEQKTQIEEAINAKRMAEDELSKVKAENALIKQQQEQVDTNWSKCKQSPTCSWCRSNNNISICSGFGPS

SEQ ID NO: 137569 - protein, 40 aa, Heterodera glycines
MLSSFPLLLSLVGLIAVHAEVFFKEEFSDDSWTDRWVTSK

SEQ ID NO: 137570 - protein, 21 aa, Heterodera glycines
MFLLAYLFTGEIYNSATKDIK

SEQ ID NO: 137571 - protein, 155 aa, Heterodera glycines
MVLVIEFCAQILGCSPKSLRDKLNHPEDRVKALKELVGKKVRTTYQDRNEIQKTFFVDGISDHGAALTPAYGRLRQPYNINIAAHFYARHRIKLHLPYVPCIVEKYSGCGEDRYYPMELLEIVDDDYTNKERWLGKLFTEIEDDFIPVKRLGRVD

SEQ ID NO: 137572 - protein, 90 aa, Heterodera glycines
MKLPEEQQVKAKKPNVDERFLWKITRGQFVLAIRLCSEDWKHLFHNKDKACRLEDGRVAIGLEMCEECARIIACVSDMIADPKQSQKPPK

SEQ ID NO: 137573 - protein, 144 aa, Heterodera glycines
MIGLASLEEADQMRRQIHLRLPELVGGEKQRVNELMEMLSIRSSGNDMLGLVQFFYTNVLLSSVNSVANEAKWQNEIAQMNAFALIHRIDAFHWRNGRIANDWAEVRKAVGTLVDELGTEQTGKLTSQVKEEAGDNLEEKIKAN

SEQ ID NO: 137574 - protein, 24 aa, Heterodera glycines
MPFILGFYAFQRHKVNDANQNLIN

SEQ ID NO: 137575 - protein, 311 aa, Heterodera glycines
SDAEHLALAYEQLLSNKSYRFSNQAEFADRINSMPIAVAAPLWLFSAFVDDLLVYLEANFKMDEYYDMPMAKDTVMNELWTAWGRLQLLQATAQGGEREREKVKLCQVYCFLGTTVAHYWAIRKSWPHIGDTASFAIILDNIHWKDFEATTLLKNLNLNSQNGAAPLKGPICTESVADRLFAELTNAQNFGFLHTHAIFTLIKRRTNGILAFLCSKKKLNEIMEVKERIQMLTRSVDKLDWLEMAFPDILHIGKRKEAGSTDAFVAEISLGRNVIDITHIGMINDSRTHLLSTIDINAFFWQGWHWHYFMT

SEQ ID NO: 137576 - protein, 319 aa, Heterodera glycines
MAADITVFVRLIEAVPRGAKFDKIWKEKKENQIIDLYDSFFEMDYSNEYRTQMHFTWKLFDAVRSELADLGFLINEKKLRQKWDGMEKRAQRDAADQTASDDGTVPTAPILVAKLHAQTLQKLAFENAETAKRKTAEMAKHFREKLKTELSESTGARHQLLLFLELSDIKVLLEQLGIEFTEKEFEDDPMEEEGQKSTSDQQQTEKRKKKKKNRKKGGMKKKADKAGETVQNGESAEKPCDQSGRENVQIEEKAAEKLENGRESVQNEENRKNSPAENGEKRVKNEESAEKTEQIICDLQRKTIERADSHPPIIRQDRE

SEQ ID NO: 137577 - protein, 86 aa, Heterodera glycines
MSCLRVVMMGKIVPLEMVEQAFFNMPEDYSLAVQLFFFQELTIRRLSLVLQIQFISFYPDSMCISLSMLTNSFLSPLVPQKIDVPP

SEQ ID NO: 137578 - protein, 26 aa, Heterodera glycines
MNTKHNKTETLSLSLSLSLLLCAFLS

SEQ ID NO: 137579 - protein, 233 aa, Heterodera glycines
MSQHPHQGDLWIKKGIWKFENPKLDSLSVYGTSAGAGGYPPQQQQQQPQQQQAVDQQQQQFLGAASVAAAAAAQQMSNQQNQQYHHQQQQQHIQQPRQVAVVQPQQQQQQQHQQLQQLHQRTIGGATGVGTSTVAIGGSPFMASAVQQNVVHQSAFGVAQQHPQQQQQQPQQHVKQVHQQQQLISQSHVQLQQSPQKQHEKWDPLKEFGLHKDEVALKSPPSNVCSVVPIANS

SEQ ID NO: 137580 - protein, 43 aa, Heterodera glycines
MQQANQVLANTDESLADYLSTLLSDTTDELRKMSILNKKKCRY

SEQ ID NO: 137581 - protein, 32 aa, Heterodera glycines; identical to SEQ ID NO: 125422

SEQ ID NO: 137582 - protein, 173 aa, Heterodera glycines
MDAQPVINKISDDEGRRTEDAFTRFIKSFETDGGNVYIQQIDELRGPERNTLEVEFAHISAYSAVLAATIELQFYRLYPFLCHAICELVVERCDAADQHEHLRRKQYYLAIVGVKTRHQVRHLTSDKIGKLIRISGQVVRTHQVHPELALGTFVCEDCGVVTRDVPQHFKYTP

SEQ ID NO: 137583 - protein, 26 aa, Heterodera glycines
YYYEPPNLAKIGLFIRIKEDSVDCLE

SEQ ID NO: 137584 - protein, 35 aa, Heterodera glycines
GEENIPENAEELEEHNAKVKRDNRQIDNLDEGPKL

SEQ ID NO: 137585 - protein, 51 aa, Heterodera glycines; identical to SEQ ID NO: 126696

SEQ ID NO: 137586 - protein, 62 aa, Heterodera glycines
MDGKYGIYLLYTVAGHFDHQNTTVGTMFSRCAILSFFLPSIVQEELSSSLSDDIKYIQFGQL

SEQ ID NO: 137587 - protein, 159 aa, Heterodera glycines
MRHVPYAYREKIAAMLQDYLGRGVIQSSISPWASPIVLVPKRDGTLRFCVDYRAVNSVTRKDSFPLPNIDNILLMLGGKKFFSTLDFMSGYWQIKMEDNSVEITAFTTEYGLYEFKVMPFGLTNAVATFQRFMTRLFEGMINDFVFIYMDDIVILFRIV

SEQ ID NO: 137588 - protein, 163 aa, Heterodera glycines
MILILLRVNINYTTCFIILEILTKLLNENRLNYEQKLSINEMILQLAIDTANNYKTNETLDKIIQPKFEEYLEEMFKKAEESAKKERPWNANKINYDKHLIILYTKFDDHLIWILNFRNFVKGLATNLEKLFKMAKEYSNYYRQMKEKGFMASYGLYEIEKMK

SEQ ID NO: 137589 - protein, 349 aa, Heterodera glycines
MKQQLDSTDAKSTCAFDELMAGVRRCGNAEKNGSAVGKIMLVKVSILEQKADAMLDGGAQISLISVEFFNKILNSSTLNKEFLKPDRQIARVIDINGKEVKCYGVVTLPVKRQERTVQVRLHVAQTSFGYDLLFGTNSLSELGFKIFYELSKTMVDFKQNVNTQNSVHVIFKTTLMPLATTLVEMTSSTKKDKELAIFPSNDRKKVMRIEPAVVNPNNGKFIAPITNFSALPITLEKDEIVGQFEHFANPRELNDSMLFTLTGKNDEDQNSSKSKNIFAVSDWELTQTNLVQHAIDTKDAEPIRSQMRPIPYAYRGKVTEMVQDYMGRGLIRPSSSPWASPIVLVPKRD

SEQ ID NO: 137590 - protein, 221 aa, Heterodera glycines
FPYNLTELLICLIILNKSINFIFHGRLSISKAFAADNIVPDVVSQAPERLVTVEYDGGVYAELGNELAPKKLAKAPNLSWDAEECKKYTVAMVDPDAPSREHPKNREWLHWLVVNVPGTDVAQGEQLIDYMGPAPPKGTGLHRYVFLVYAQKLHRYVFLVYAQKEEAVVNAILAPHFPGRSHFNIREFAKEIYVGPPLAGNFFNAKYHGIRPNLSGNERTM

SEQ ID NO: 137591 - protein, 245 aa, Heterodera glycines
CDHGFSAHVHLSYSLGYLVGCLMGGFISDRYGRKPAIYGFSILSTIFGFLLSFSREFEVFLVVRFLLAACNEAADLAAYVYCMEITGMQYRSVVGMQYRSVVGSLLQAPWACGYAFLALVAYIWRSWTSIQLITTVFHLLALFLIHHLPESPRWLIATNRDLQAEKIIRKACHFNKNRDLQAEKIIRKACHFNKSSLPSDLELVRSSLPSDLELVRHAEQRKWLKYNQRPHFIDSFKSPTMAFRK

SEQ ID NO: 137592 - protein, 22 aa, Heterodera glycines
MAISFFEKFSMQQTLSNMKRSA

SEQ ID NO: 137593 - protein, 29 aa, Heterodera glycines
MAISFFEKFSMQQTLSNMKRSAKNGYLFF

SEQ ID NO: 137594 - protein, 29 aa, Heterodera glycines
MAISFFEKFSMQQTLSNMKRSAKNGYLFF

SEQ ID NO: 137595 - protein, 29 aa, Heterodera glycines
MAISFFEKFSMQQTLSNMKRSAKNGYLFF

SEQ ID NO: 137596 - protein, 138 aa, Heterodera glycines
MIKKRLERKEEKNATKEELNEDGIMAQMKEMFKQMNLGNLNDLMGGMGEEEEEEMREGEEQLEEEEEEEKEEEKAAEKEGEGEEEKEEGEEEEKEQEKEEGEGQCSKSNEEGGQCMAKEGEENAEKSETKMKEDRDEL

SEQ ID NO: 137597 - protein, 16 aa, Heterodera glycines
EATPEGFGLPINLGAS

SEQ ID NO: 137598 - protein, 636 aa, Heterodera glycines
GRERREEAHSLCTLAEQIVQLLGRRGVRESVFSAIDAALRNAMPFGGTGEQWAERHGAAERALDPFIEEIMPTLRARLQFQPNVSRELVSNLHRYRHFLARKQVKEKLQSEREVLITHLAEQIREVLITHLAEQIRAQRREIERMSAMAVPTGKFLTEIAAKIAWIRSNSTQIDKLIDKLSKASAKFFDDLPMFSSFSQSLRTLAEELKAAEQEQFDAWCRDMLAHVDDRGDSISLQTTGRLMVLERDRGVLNVSYSDRLARLLREVAQLQAMGLRIPTKISQCVRQGEKFYQYGVLLKQVAHFYNTIEQQMLPCQQAMVAHFYNTIEQQMLPCQQAMLLDEALTFERLVLPAGGQREGRGAAAVSITWENPEKLKQYIDKLREAAFNLTSHNRRLRKHAEIGQIVAELADTDLLREEHAEIGQIVAELADTDLLREEEKWTAKLMEVRQIFVEEEAFVAVKTNMQPWANHWNRQLYKVLQLQFRWAMENVDNQMPTLNAQLVFRDQRLQLRPPLEELRLQYYRALRKLLSTPQRLRGVQNNARETELFGRIVARNTRHFQKLYERSEEMFERLRTADREFDEWVALAQVNLEDLLEQKLRNASDEHQLNLLKQKQRSVDKIPNEIRIECVRLSTA

SEQ ID NO: 137599 - protein, 96 aa, Heterodera glycines
VRTQRVQQWSAVEESAIKDVVVRNTDDRGLINWAKGVLPEWQRLCQLNPTMYMSRSSPSLSNKWASMRRSHVGPGCPSKEGSGPSQDLSDVKIQPA

SEQ ID NO: 137600 - protein, 36 aa, Heterodera glycines
MSAVQFKQSFDKVCATTANAFRFSLQWCFVPLVVIL

SEQ ID NO: 137601 - protein, 273 aa, Heterodera glycines
LSVESNLADSFSKLQYLLGNNPFPPETFANLLLLYCKFEYFFEYFDLAADVLAENAHLTYKLLNQHLTYKLLNQFQFDYLFQFDYLDALITQQSSESEAYAKFDALAMDRLNELRKKHQKLQELREEELREEDNGRALQCAVDSVEETIDEFLPALMAQAKLLWDKAQWAQIEQLFRHSAEFCHANETWKLNLAHTLFMQEKYKEASDCYADCYAPLVHASFDRLLDVSAVVLANLCACLLDVSAVVLANLCACYIFHKSASPFFFAFFTFSI

SEQ ID NO: 137602 - protein, 162 aa, Heterodera glycines
SSSTDAILEYKKSLEPPRIEINGTIENYATTTTVSEDKALIAERAPALKFFQRANGSKFAHSLDRYNTVKKKGNLISDQSLKNAIEQILTNAIMLNIYQWKMFVPKCVRCHCAVPPRVPCRRCCTSNGACSASAAARAVAHIAHAEVPAAWPALGKRTYSAG

SEQ ID NO: 137603 - protein, 21 aa, Heterodera glycines
MGFFLLDFCPENRRYGHGFFK

SEQ ID NO: 137604 - protein, 137 aa, Heterodera glycines
NIVEIKRTDFERNGSFPYHLCKIVNLAAKASYKCGNIGRLKDLVVALTAYKPSSSSREILGDSMIREMMANVLRGFKCLVDKQIKAQYGHDIQHLGKLIEHMEAVIGKLKRSSKENKFNQKMINLFVQGWTLSKGTY

SEQ ID NO: 137605 - protein, 40 aa, Heterodera glycines
MNGWRQLKFGCAWDIEAQKCMPNEETVKALARGEKAKQRK

SEQ ID NO: 137606 - protein, 319 aa, Heterodera glycines
MISHRFDFYVDEHFKTRKWTLAFIGIQSKNGENGTKEMEIVNFGHKALPIPQIQMPRKVIGFQWINISFIDQNAIAFLRHFRPLFTACPINLTIITHNARTLEFILPNIWPLFGKNIHGMDLSATFFRHLRKFAPSILNDCPSLRFVNAYYYGFFTGFPADDSAAASDGQALAKWLFTPLQSNVPKMLECGLDMGDGNWSSNIEQFKAAFANASSPVNFIVVMCFIPTSFADSVVPFDLTNELTREQLALKGTNFNNCFLLIRSPIARDANKWAEWEKEAIGWKFIDQCNKIEIQIYDEEQIGDGLLDANPGPSDQQQK

SEQ ID NO: 137607 - protein, 45 aa, Heterodera glycines; identical to SEQ ID NO: 124527

SEQ ID NO: 137608 - protein, 101 aa, Heterodera glycines
MEVKYGNVDKNLKYGKLKTINIRMIPILKITDEQKSYGHSHLKLYETPLYELLSTHFWCHVKEWMDDKMMKMTEKRDEAEGKGGQRKEKGRRIIASGTFPW

SEQ ID NO: 137609 - protein, 80 aa, Heterodera glycines
MNYDLFTFCPIYHPLLNRKAKASLAIIKKFVTNSSAVSPHEGMAQPLDNDGRPFSERIRQEKQDKEAYFKQLASAWGDKA

SEQ ID NO: 137610 - protein, 51 aa, Heterodera glycines
MLIVSSFEFRMLLARNTKLLSTGKLKIHTYAEKLKYVKRSEEMKLRKSNDE

SEQ ID NO: 137611 - protein, 70 aa, Heterodera glycines
MARRILNPDFSYGFRRRIFLVFAGTGIIQMDFATGPTKKFCEVCRSWIDLFEDKIQVEKLMSKPECFELK

SEQ ID NO: 137612 - protein, 51 aa, Heterodera glycines
MAARDLQCVQCQQFMHNWGREGNWRGQLITLLGNYGVENGRNADGVLLRHF

SEQ ID NO: 137613 - protein, 94 aa, Heterodera glycines
MPKQNEIVLKYSFLDLTWFLDIEAVFCAISKTKKCLVVKTIFHISLHNFVSSARIETGIRPLERAARALQKSELILQCGPNFRPPATAPCFSQF

SEQ ID NO: 137614 - protein, 272 aa, Heterodera glycines
ISITGTQPNSISITGTQPTSISITGTQSTNISITGTQPNSIPITGTKPTSISITGTQPTSISITGTQFSAFQSLGLNPPAFQSLGLNPPAFQSLGLNPPAFQSLGLNPPAFQSLGLNPTAFQSLGLSPPAFQSLGLNPTAFQSLGLNSAFQSLVLNPPAFQSLVLNPPAFQSLVLNPPTFQSLVLNPTALQSLVLNPTALQSLVLNSPAFQSLGLNPPSLQSLVLNPPALQSLVLNPPSLQSLVLKPPSLQSLVLNPSSLQSLLLTPAFQSL

SEQ ID NO: 137615 - protein, 16 aa, Heterodera glycines
MMTLLFVKPTLVMVEN

SEQ ID NO: 137616 - protein, 91 aa, Heterodera glycines
MGFLRSLITNRTFILTNFESRTRIRTKSRKFKIFKIHFYDCTGNHLNLRPHEWLCVRENATPEEINENYRKFVRVVHPDKNNQCSDKLFMV

SEQ ID NO: 137617 - protein, 29 aa, Heterodera glycines
FKPIYSQNTFFFCCQNEHGTLFLLSHHLQ

SEQ ID NO: 137618 - protein, 214 aa, Heterodera glycines
MNDDQFSLEEEEGKEQQEDRKTPTKDVSDGHLKAILERIGELEKQQQQQTKGEGNLTKMKFLGFSLELWSNFQRWKMIRRTFWKKSVKWRSRQRKSWVIKIGFAVKQQTKLDETIQLEKGTFAYESDGDIWINGEGKGTNAQYSYGVGDTVGIGVNSATRQIIFTKNGLRLDTSDLVDPSFADGSFYPFVTLVTSGDQIEANFGPNFKFDLATL

SEQ ID NO: 137619 - protein, 63 aa, Heterodera glycines
MATFNGEKRESVAKDEKKGKTKKEVQMTVAKGKFLGKGVTIYTFLTARFFQKLFGKKRVQRCR

SEQ ID NO: 137620 - protein, 78 aa, Heterodera glycines
MFGGFCGIFVGPFKRKITLSPTVETRNPSLCNATNCLASAFFVETFVLMTTTIITAIIITTIALNDKHGCNGCKKEFR

SEQ ID NO: 137621 - protein, 59 aa, Heterodera glycines
VPISARPFTIRPPLLRIRPPITLRPNRNVCQPSQYSSRVCRLDLAPIMQIMAFPGMMSK

SEQ ID NO: 137622 - protein, 95 aa, Heterodera glycines
EMLSSGDPQYAHYGGPLHVKVETTAPPAVAYQRVAGVLAVLAELLQPVKDTHIEGITTEPNPNLNALEGGGDSDGGGDSNGAEGNGEEAGGPSKA

SEQ ID NO: 137623 - protein, 65 aa, Heterodera glycines
KIFPYILVISFCFWWGAWNSGIMRTRPIWQVKQRLLTSQKVRCRDETNQHCLPRGTRHGPPKEWI

SEQ ID NO: 137624 - protein, 76 aa, Heterodera glycines
MKMNKRILKKIWICNDILMDIFPHFDRAQLASKWHFFRLVSMFWWTNISMAKANCQFGDQSELKGWEQKQNYVSLN

SEQ ID NO: 137625 - protein, 122 aa, Heterodera glycines
LIAKTATELTEIVTEKMDRIYVKLEQQQSLLSATIDEKMAKHEVSLLIATDQRIVHFLLLPFLLIAAVCLTLLLIKAIVDQFLKQKFEQNNDTTDGEEEKRTEEKEETEENGKGGEKGRRGE

SEQ ID NO: 137626 - protein, 80 aa, Heterodera glycines
MAQNNQIILQIVVVVVPIALDAEVLLALALAAARAAAEIVAVPLTECLTLADVELYATDDRGTIDSATLDKSKDYNRLNV

SEQ ID NO: 137627 - protein, 218 aa, Heterodera glycines
MKKIDEIANNLRLRTKRAAFQSPKPRSADRKVRRQSVRRPPTNVRRQRAANISSKLQRPLPPLFHNDDEAQKAVVGKRLVTDNAAKSGTSAANPKRVKTTLDDLLMDVEMRAEQDGTQTTQQIASDQTDQQQQNYTLVNVCSTSTTKLCEVQDGVQTTQQIVGDKTDQQQQQQQNNMVIEKPVVHAVIDGDDEDSENVPSLISIGTQTWPKKKISCSF

SEQ ID NO: 137628 - protein, 306 aa, Heterodera glycines
MDSELSSKVQQQAQMCRFLRSHVSDLKNLSLNYSARLELLEKWAGNEQYSPYPSNTHSPVSPAVLHETLEIIQQQSRQHEQLANRVLEKGNTELAVVQVALSSLKRAMTPSLNTDQTSSSSSSVKRRRLMSEEQNEAASLAMAAFTHLQNHIAEKCQILQSRVQKLEDGGAERMEVQVDKMRREMEQNLRQEMMEREQRLDEKWSVLLLKEREKTQQIATQASEVIGNLLENGEKEGKENNQKGKKLIVSERCLWCLGNENMVTFGAKECLHVFSCPKCSIPIIASDEPKCLICFQNISELEYMKN

SEQ ID NO: 137629 - protein, 236 aa, Heterodera glycines
MKISIIDLVFFGMLFAFLGNGASTFPLNSAVMEVEKDEADNSTTVEAEDNSTTADDVTEDADNSTTVEAEDNSTTADDVTEDADNSTTVEVVTEDADNSTTVEAVTEDADNSTTADDVTEDADSSTTLEDVTEDADNSTTVEAVTEDADNSTTAKDVTEDSDNSTTVETVTEDADNSTTAEDVTEDADNSTTAVLDCATENADNSTKEEIQEATMEAKTEDADNSTTVEIGNPDDE

SEQ ID NO: 137630 - protein, 253 aa, Heterodera glycines
MASSGIDIPPPPPPPELAPPEEKKMMLQPDNTGTTDQENVQQQQSVEPSMPCLHVVSDETIIDADVPMEIDDEDDDDNDDDDEDGDGVNDDDADRPYSPSQFYAQAIPPPPPPLQLKTNNEETNSKDEYLDEEEEDEITEEECVEEKLDETKQKVVGHRQKKWTKVKREENESKKVEQQKLMMEEGKNGDEHGQEKEKEDEGQENEGAEEDKVEQQREQQRQNSPVPSEATRKADEEKGIQQVQNHHHHQYQQ

SEQ ID NO: 137631 - protein, 93 aa, Heterodera glycines
MAFFNPIPSPSQDAVSKLLKCTALFPCEHSNRVPEGKSSHQLLLCGIFRGGIDVLCRVRLVMDPSDQTVSMNMVVRTRYPDPVRNLGPGPGKP

SEQ ID NO: 137632 - protein, 165 aa, Heterodera glycines
CQAIERYMKQAIVDKTASVSSAALVSSLHLMRKSPEVVRRWANEVQEAVSAENHMVQFHALSLLVQIRANDRLAILKMVQKFSKSGLRSPLALCQLVRVAARLIAAEAEESRSAFTFIESCLRNKHEMVVSRSAFTFIESCLRNKHEMVVYEAASAIVRLPRISS

SEQ ID NO: 137633 - protein, 126 aa, Heterodera glycines
RRDKKDDESAAGNPYDHLDKATVVQETRAFNETPVNARKCRPILCKLLYLLQHGETIGKTEATDTFFAITKLWQAKDMTLRMLVYLSIKELCQMSSDVIIVTSRLTLDMTGREDVYRAPAIRALCR

SEQ ID NO: 137634 - protein, 67 aa, Heterodera glycines
MPNWGTIQWKDKKTDKLSKVNFMLDGDSIGPLSPPKTDQMNEKSQPEMNPGLSRQRKKVNELLRNEK

SEQ ID NO: 137635 - protein, 16 aa, Heterodera glycines
EAIPEGFGLPINLGAS

SEQ ID NO: 137636 - protein, 95 aa, Heterodera glycines
LFEYPKRTLEKIDFFVFGAVPPNRCAQIYGETESFGSSFPIACTLILRWIFAPHKCLSTPNGHLKKSIFLFSGQSPRTDAPRFMGRPNPSGIASL

SEQ ID NO: 137637 - protein, 158 aa, Heterodera glycines
DNHNNGGTDNHNNGGTDNHNNGGTDNHNNGGTDNHNNGGTDNHNNGGTDNHNNGGTDNHNNGGTDNHNNGGTDNHNNGGTDNHNNGGTDNHNNGGTDNHNNGGTDNHNNGGTDNLYNGGTDNHNNGGTDNHNNGGTDNHNNGGTDNHNNGGTDNHNNG

SEQ ID NO: 137638 - protein, 59 aa, Heterodera glycines
MPTNNMFFIGLFSFFIMLLTIFDAHVRSDHVGTNVWQKDDPSADQMPIKKHQKHNERKQ

SEQ ID NO: 137639 - protein, 149 aa, Heterodera glycines
KSRLFHATARLTRPLEPILFPKLRIFADFPYLHYSRLEAVHLGDLLRISVRSGRRFKLPSHFQGPCGAHETPQEPRCFTGATSLSQAEPLPGTHTLNEKRTLARTPHDVCEFICVTAQNSSCEPSFLAWRGNEPTSLSATGWTNCASTE

SEQ ID NO: 137640 - protein, 52 aa, Heterodera glycines
MRKLEICSRSVPKNDITIFASNLQKIMHEIIQQMMNFSLFIKIITKNMHCPA

SEQ ID NO: 137641 - protein, 1444 aa, Heterodera glycines
KVDEFIQGGSVVIHPVPATAVEDRLFCFRCNVPSIIADEDSPRGRIMAVLLGRPAMEGIRMEKESVDDSTDSWMEEEGPLHPAILALNSRQRVTARLMLGGGLVQQQAPPGTGKTKVAAAIIKAMMDSNPGFRIVVMACANIPVAKLVQEAEGTCAEKDLDGARAIALFSGFARCKYTDQIKDVQRHTLPNKVNSEEFVKQLSPNVQKQVKERFALDESTQAQWAVVVHLVARMPKLKALLLTGDRHQLGVHLQELPDIFHSGYGLESVILQAEASVGTNYTFLTKMYRSHPFLAKLISYASYELHNEQLIPARSAEERSLITGSGFLMPVQECPVGLINAFSSFRVDPKSDSLTDDHQTEVASFLVQALLEHFGNAFSSRIIVLCMYTYQTSEIERKLKHCGVRALTVDAYQAQECDIPKHSNHEVSDQIDDNALTSDARSSSVESPAGTIYESFEALSIDSSKVASSPEGYTNVGAEIVIEGTESNENPEGSGYDEVRNEGSSVTFKAMEVTLDQVDAEGFANNGFDDEEPEACPPAKDVSKSSLLYLVSQAGDGYVIACKKSPKSKPNWPFFMNIEDKLIESAPGFQRKLEVGDFVAVSSFEWNQKLRYLAQHRQDATQSCKFWFNENTQLLPKQADDTGVVQLMYMNIGRKQITGVVYWIKRKIQSVPSSFVHANIACCGLAVSARINRRHLDGINPEDLKLGSLVTVVVANIPQDSLVSMGYILPDASPYKLGTERRAETPEFFGAIASVRPHLLEWPNLNANMTPKVYPCSAELTKHHVVAMEHVVGAALQIEMEREVDMMIEACFEGRARKFDGADCLIVFGSRSKKEVNELAKVWEPESQVKVFKELDEKHFALGVVKDVEVLHAEYEKLELHIVIFLNNIQERKNVDIARKVDEFIQGGSVVIHPVPATAVEDRLFCFRCNVPSIIADEDSPRGRIMAVLLGRPAMEGIRMEKQSVDDSTDSWMEEEGPLHPAILALNSRQRVTARLMLGGGLVQQQAPPGTGKTKVAAAIIKAMMDSNPGFRIVVMACANIPVAKLVQEAEGTCAGNDLDGARAIALFSGFARCKYTDQIKDVQRHTLPNKVNSEEFVKQLSPNVQKQVKEYLAHCEKNPRLAPERAIGKVFNSCMAPKIVFSTAAMAANLLHGEGNITDADVLLFDESTQAQWAVVVHLVARMPKLKALLLTGDRHQLGVHLQELPDIFHSGYGLESVILQAEASIGTNYTFLTKMYRSHPFLAKLISYASYELHNEQLIPARSAEERSLITGSDFLLPVQECPVGLINAFSSFRVDPKSDSLTDDHQTEVASFLVQALLEHFGNAFSSRIIVLCMYTYQTSEIERKLKHCGVRALTVDAYQAQECDIPKHSNHEVSDQIDDNALTSDARSSSVESPAGTIYESFEALSIDSSKVASSPEGYTNVGAEIVIEGTESNENPEGS

SEQ ID NO: 137642 - protein, 59 aa, Heterodera glycines
MSEDSCMIIGTGKKGIFEPSMKNAWIHTEWDPYIFEYAIRINLYKDVTNAKYININKST

SEQ ID NO: 137643 - protein, 131 aa, Heterodera glycines
MLQNGLTILLLISVVIGHSLAKLGPTIKHNPHFKTVQTAHHLHDAIAKKHKAEVTQVICSISNEQAEVTQVICSISNEQRQALALEFKKQFGTDLIAMLRQALALEFKKQFGTDLIAMLKKEFKSDFEELI

SEQ ID NO: 137644 - protein, 18 aa, Heterodera glycines
YREAIPEGFGLPINLGAS

SEQ ID NO: 137645 - protein, 52 aa, Heterodera glycines
STGYREAIPEGFGLPINLGASVRGDCPENKKIDFFKCPSGESNNYGEQKSNA

SEQ ID NO: 137646 - protein, 21 aa, Heterodera glycines
MRTRPIWQVKQRLLTSQKKGF

SEQ ID NO: 137647 - protein, 95 aa, Heterodera glycines
LFEYPKRTLEKIDFFLFGAVPPNRCAQIYGETESFRNSFPIACTLILRWIFAPHNCLSTPNGHLKKSIFLFSGQSPRTDAPRFMGRPNPSGVASL

SEQ ID NO: 137648 - protein, 74 aa, Heterodera glycines
MLIAYIPKRIHLNLNVVGAALRQRMPFSAAVLDPHDQLKDSDKPMSEQMNPSFFKVLYVTFPLRRDDGSYGLNL

SEQ ID NO: 137649 - protein, 60 aa, Heterodera glycines
MSVTPTTIFWGLEYTMNRSAKQIIATTNKYNLGLDLRTAAYANAIEKIYQTYETSGFTFA

SEQ ID NO: 137650 - protein, 248 aa, Heterodera glycines
MAQSQNGGVKNRRISLGSPKDLKEVHFFEEDEVPDVPLNGARVKVCYAGVCLTDKEISNTKQVICSCYEVSGVIDEFGPNATPVEYNLKVGDKVIVWPTEEARPVVEAIASTKGCCNILIVGAGGLGLWILTLAKHFLTAGQENRIKLIVADSKEERLCLAERNGADFVVHWDDSEFEEYLIMRTKDVATNGLHIVFDFVTSPRTVARSLKCLSEVLKQLSMSEVEGRAILEVFNPDTEVKKAEEEQK

SEQ ID NO: 137651 - protein, 255 aa, Heterodera glycines
MRPPNFDHDLTSLIRRAKMKFESRAKEDLLNALNNFTDLQPDVVNFTFPDGVPRWCLSFSGTIPIQYKVITIEFQEKCPVYSVSNNSKNTGHSNNPYPHSGSMTNLPYPNSALPYPTADPPSHIMPQPSSYTPMPQPGVLRVNQQMDIFVFIVSDKKEELESALKVVDSNGTTDNGVAFNEEQAIDAQTPVHRQILKCHVQDSAIDDTIYHLGQALHQGAVNLQTYLKYVRQLSKQQFQHRLLMYKCRDRSRLTI

SEQ ID NO: 137652 - protein, 16 aa, Heterodera glycines
EAIPEGFGLPINLGAS

SEQ ID NO: 137653 - protein, 84 aa, Heterodera glycines
MHTFATQPTTHNWMHFVRFVSCPAPGLASVLALSISAPPFCRPLTFSRTCSTVSAPSTNAFWPSTNNIFDVCLPYVFVIIMNDG

SEQ ID NO: 137654 - protein, 68 aa, Heterodera glycines
AVLVRFITAPNLLASQQSLLNLPDRTGAHDSTVPSTPPKAKRYNQNIRKNFLKIFFSIFLFDTKASEC

SEQ ID NO: 137655 - protein, 158 aa, Heterodera glycines
SSWSDGLLINFTIGTHRGNEPIDRCELWKQLISSLHRSNGSIGNGRLSVASDVGLLDPCAKPAPPGEQCNGAVCKQSLGEVCIGGELCGCPTSQKRASADDQCRLVESFTIPLWVLRRGVHNLVFNSTFANPIDQLNKEYVRQFSTGVAQCYPHTALR

SEQ ID NO: 137656 - protein, 141 aa, Heterodera glycines
MFVDALPASIVSLNLTSNRLVRLTNRICRLQQLGTLRLDHNLFEELPEDLCLINSLCHLSLVGLNRLQFLPPSLCVVKFTAPRFILLDISGNEHAPFITGHGTAHNQHSVHNAATTSSTVVSVTAPPALCEFAAAAVLNNK

SEQ ID NO: 137657 - protein, 444 aa, Heterodera glycines
MGRLIFRMTELLEHIQRLIRTKELSSIFPTLSHFSSRPLSTCRRGEFCVIATALTQHRMCRKQMELPPMKANISFPSPISLCHLEALLCRVSLPSLGEGREECAADWEEGVKMVVWAMPGQMPKTTDAEERITVTVGAVVAEAKETAENVSGAAEAEEDDPNLAKDRRITVSEDHPQQMAETNAFHGMPRSSRPRHIYKKRPIECLYEEDCLVSERYVDIRDEDEDLVVSGDNVEKFTAYETWKDFDLEPKLLDNINRCKYVVPRKIQSYTFPLIRDGFDVKAHAETSSGKSAAFFLPIIDKIMKLKKEGTFKSRRDCPYALILSPTRELAIQVYEQGRKLCNGCDVSISLAYGETVRHENIRNISIDGCDILVGTPGRTCDFFQSKNLMFDLLKVFVLDEADKLLDESFILDMRVLGSISMGTAHFGAGLFGAVANNFFPDQP

SEQ ID NO: 137658 - protein, 263 aa, Heterodera glycines
MYGQPGAGAAVYSSFQQQHAEVVDQQCYQQQSAASVGYGPSMPGASASVPLEQQQQASQKGAVTSSAAKPLPQQHFVPPPPSFYTAGNRSSNAAAAALLGVVPSPPMLPPSVGGSAVVGPPPPTAYATQQQQSINAVTSSSAKLLPQQPPQPFYAAGNYSSKAAAASMFGVMPRPPMLCPWGGGSAVIGPPLPAAYAAQQQQPIDPMPSSSSWNFGQQQQYQFAADLSHQHHKMAGPTSSTADLNPTLFVPTAKVLDPELVSK

SEQ ID NO: 137659 - protein, 66 aa, Heterodera glycines
MAAESQYPIPYRSKLTEPFEPGQTLIVKGKTAEDSVRFTINLHHTSADFSGNDVPLHISVRFDEGK

SEQ ID NO: 137660 - protein, 129 aa, Heterodera glycines
MLFQRQKLPKICATLFPKCQIRRSSNFVELAGFTASTDSKQYAAKKLLLLKNGSSRSYNDVNVAAGRFAALLNKKYGIQKGDTVLCRTSKTVDALALYLAVLRLGAIYVPLNPTYTKRETEHFVNVKIC

SEQ ID NO: 137661 - protein, 188 aa, Heterodera glycines
MAKRTLLRKRQTKNARHTRENKREERKAQTAKAMKARWAKKTSPEPNPNAGTPQQDEAGPSTSAVPAEELMEPPPPAPVPTPEMDKEILEFGFSLPSTSVTPIGDLVPFSTTPTAPMDTGETTPPPLAIDERSERIEQLEKQLKDRDDTIKFLREQVRNREALISDLRRQLDEHMVPPMAPPTTSKSE

SEQ ID NO: 137662 - protein, 45 aa, Heterodera glycines
TRRPETELLYQKRFVCVAKWSVRRSPKGGSQVRFPVHTIDVFQLF

SEQ ID NO: 137663 - protein, 132 aa, Heterodera glycines
MPVLHFLHNAVPALFLLVRLALSPERRPLVPRLLCAIVRAPLRSLLWRPVAAQLLVSALSARVYVHNRAGALYLCRLEFGNIEWDPWALFLAPLLALAQAVHILLLKQAQLAFFAALGMPNGNNVPILWANN

SEQ ID NO: 137664 - protein, 18 aa, Heterodera glycines
YREAIPEGFGLPINLGAS

SEQ ID NO: 137665 - protein, 83 aa, Heterodera glycines
TTLGSGFPSDLGGLGTGTGTTFVQPHNYQFGTATSGSFHSSDDSLSVSMDCAMFAPEELKVSVVGNQIVVEGKHGEKQDSLGS

SEQ ID NO: 137666 - protein, 38 aa, Heterodera glycines
MNMISSIGNQSAKSVWHFRSRAKARDFPSQFSNRQSVA

SEQ ID NO: 137667 - protein, 80 aa, Heterodera glycines
EKDCAAGDDEPGREVCGDRICPVGEFQCSNHNCTRPFQLCDGQDDCGDGSDEKDCDKPCDDWMFKVFVGGSRLPKQFIFN

SEQ ID NO: 137668 - protein, 19 aa, Heterodera glycines
MLNRVWRNDKEFAIKTQEN

SEQ ID NO: 137669 - protein, 90 aa, Heterodera glycines
MAYFAPFPPICLFHLIFIFQLLGPVFCANVYLKKQYGENEFRIESWGKTNCSLNGIDIVQLGIGRPCEEWPDFATIFCDGKILEVIIKNY

SEQ ID NO: 137670 - protein, 47 aa, Heterodera glycines
MSGSLSVGSPKSRTTCEKGVFGVAGHESDIHFNQIRTPNPYPIKKRE

SEQ ID NO: 137671 - protein, 66 aa, Heterodera glycines
MSGSPKSGPQMSGSQVANPQKSGSRQVSQSISHFILQTAEHVISEYLNDVLPEKPEAPKMQKKNVL

SEQ ID NO: 137672 - protein, 392 aa, Heterodera glycines
ADNKELCPIGKIMTTNVKIFDQPAISMMDGGAQVSLIKAEFLKNILESQKLEGTNLKIWPKTRNVVDINGKRVECYGIIVLPVVRRGCEAVEIMFHITDAPVGHPILFGTNALGLLGFKIFDAPNGELVEFECVDNKSDSVQIAAVEEVKEIAKADDCLEDAWLYHSVEMEKCLFEDEFKAEIGQLDEDKHNKLGSLLHVFANISAFNDSDLTQIEVVKHHIDTDRSFPIKNRMRPVPYAYREKVAAMIQDYLGRGIIRPSLSPWASPIVIVPKKDGTLRFCVDYRGLNSVTRKDCFPLPNIERTLLMLWQIKMPEESVEKTAFVTEFGLHEFTVMPFGLCNAVATFQRFMSQLFGQMMNDFVFVYIDDVLVASESFEQHLKHLKLVFEQIR

SEQ ID NO: 137673 - protein, 63 aa, Heterodera glycines
MPVSGPVWHFQNDRFPGPASQKPVKPDFSKKTPDRVNDVQIRIDELNLQFVYRLGVMADKHWE

SEQ ID NO: 137674 - protein, 20 aa, Heterodera glycines
MFKCTILMIENGIFGVFNTF

SEQ ID NO: 137675 - protein, 179 aa, Heterodera glycines
RRNTDRGNDNCLICYTPPQQKQKKEMATREKGWEDVEMPQVKVAAIDNGLAFPFKHPDQWRAYPFQWPFQWAKLSMAQIPFSEETIHKMLPVLEKSEFLRELGNDLRNIFTTDKGFDEKTFNKQLSVLYGQIFNLRETDKGFDEKTFNKQLSVLYGQIFNLREALRERKTPAQLAQVGL

SEQ ID NO: 137676 - protein, 90 aa, Heterodera glycines
IIFIQKIFFWVFGAVPLNRCAQIYGETESFGNSFPIVCTLILRWIFAPHKCLSTPNGHLKKSIFLFSGQSPRTDAPRFMGRPNPSGIASL

SEQ ID NO: 137677 - protein, 43 aa, Heterodera glycines
MSLGQDCMIMIMDGNFICERYLTIMNQLTYNRAVLRGKKTEID

SEQ ID NO: 137678 - protein, 153 aa, Heterodera glycines
MLVFFIFYFVAFAYPFRHNFVSDRTDESNEGLKGSGPALRLRCGEKMPDNRVEFGQLSPPSDWPWAISVRSECLNKRSNRTEVLSTCSGVLIGSKHVLTAAHCLLTTINSYLRCKGNEVAGEFEFPGTTFMSQHYDNDIAILEAIINLICIFL

SEQ ID NO: 137679 - protein, 88 aa, Heterodera glycines
MIVNNTFLWQLRGTPEDRLCANTEENGTSLVWLLANPTCVTINRVSCAQPLIVLGLTERPEGASSANELFINNEDEWLEILDYFMQLY

SEQ ID NO: 137680 - protein, 43 aa, Heterodera glycines
MFVHCFSDWLMTHRCSSVCVHGKVGAVQLAVAVVDSVGQATRV

SEQ ID NO: 137681 - protein, 136 aa, Heterodera glycines
TRAHYRRWRLDGAGFGPISAFFTAIIDKICCCGTFILKKNSQNGIGAEFPQLKFAFSPSGAVLLENVNGCGPNSSANSSSSSGRNGGTTSACSEVSTTELPASSSGDTALLGQQNQPPPPPAALLQLYHEHKRMNS

SEQ ID NO: 137682 - protein, 30 aa, Heterodera glycines
MSLMRSYQLCYHASEVPYYVIAKRPIESSK

SEQ ID NO: 137683 - protein, 87 aa, Heterodera glycines
KFFDSGDYNMNKNKPIPPPIGQNLTAANTPKLAVPIETEPEKKMEESAPIIVSQLLPMMRPLAGSISGCSMDGGESDDEGGQLQVYC

SEQ ID NO: 137684 - protein, 125 aa, Heterodera glycines
MQEQLANLNLNKYKQMQRLLEDAEERAELAENSLYKIRTKSRSSASLRGIVGFDLRPSASSAAVLRSSSASIFASQYSQPNNYDNHSLGGGTKEENPFNPNGNLMSKSIHEEEEEEEEEEDNEVE

SEQ ID NO: 137685 - protein, 91 aa, Heterodera glycines
DANDENALLCAVRSRNLVVISMVRQAGGQLVVPRPRIGVELCLSAGTGGLDALKAWHAAGANLSTPDYEGRTALHIAASRGFDELCFWLCE

SEQ ID NO: 137686 - protein, 92 aa, Heterodera glycines
KNCQKKELLWTAPEHLRQNNRAGTVEGDVYSFAIICTELVNRETVWNGVEREQDIDEILYRLKRTNVPLPHRPQSSRNEEMCDHQRLERGSC

SEQ ID NO: 137687 - protein, 101 aa, Heterodera glycines
GTEAGTGLDFSSEPGNKFSWTLNDFEIGKPLGKGKFGTVYLARERETKYLTALKVLFKKDMDKHGVSHQMKREIEIQYHLRLVAVAGSYRLRFHFLSPQLI

SEQ ID NO: 137688 - protein, 449 aa, Heterodera glycines
MKQLITENPKQQPSQLRAQIRTNVNDEVFELLGTNEALDQMTNRAKNKFVGKVNCGDPLQIQIPAGLLKKDDESVLIYDSRELLSMLKQNRRWSLDGTFRSAPKPWTQVFVIGCYVNNRMVVTAQALLPVMSDFEIGMLKAMRHVFPSCERSGCSFHMAQAVFRKARSMGIFNLLNEDDNEAPVQRKSVHKTFRSVLSLALIPPLYVRRAFSTIVSAAPLGVQGWLAYFAKTYIGTTQFEIDRGAEAFEPHADVGHFLLRRTRSTTPFSISQASIMTGSGPIQFGLHSPQPSTPTIPLSEESSLQLIPRWEQDIVCPPRFPISFWNVYTRAQMAIERTNNGMEAAHGQFARELNHHPSLSDFIAAFIKDIDKQLDIGRAEQLQKSRKRPQRYIIKEQNVVRILDEADFESEEGLTNSLHLLGLVMQGFAEGLHVRGNSESGEETEADEN

SEQ ID NO: 137689 - protein, 228 aa, Heterodera glycines
MLIALGLDNRAYYEHQFEDLFLRETADFYRRASQKFLAENSACVYVHKVNESLIEEVQRSERYLDKITETKIIHVLNEELITKNMTTIVEMDNSGLVYMLLNDRIDGFTFQYKSVYFLLLDLRCLYELLKRVESGPKTMTNTMSRFLRAKGTAVVNDNTQQQPQGETVEPIGGVSNPIIFIQSLIGLKEQFDRFLLEAFNNDREFKQCIQSDFEHFLNISPKAPEYLS

SEQ ID NO: 137690 - protein, 31 aa, Heterodera glycines
MGSKNPPQNYSTGYREAIPEGFGLSINLGAS

SEQ ID NO: 137691 - protein, 239 aa, Heterodera glycines
SVLCDFRLDAACANVVWQRIFYGRDVREKEMIAVAKASANLQVVEAAAINRAQTSFSPRPPGAGPITLDEGFLNTSYIKITLDEGFLNTSYIKAIELVDSYDLDIEAIYRRHSVEEMSVPVECVPVECWTINFGCSINDNEFLYFLAPQQIAHYWMNVFSKVIKRLQDQMRNPNVFSKVIKRLQDQMRNPDRRVLWLKRLYLHLWTEQEHQRGEVSSSSGGSSAGGIAGRNWEGGGWPL

SEQ ID NO: 137692 - protein, 32 aa, Heterodera glycines
MPEIFYLLRNYLWIHPFGFQGVQEVLVVIKRR

SEQ ID NO: 137693 - protein, 575 aa, Heterodera glycines
KFQEKQEKKFLKTPEIYINILEKIFSVGKYHPSLITQIITDDKTKADIFANHFSESFQNLSEYPKPPPIISVNQPSISDVHFNVLDVLEILTHLPNKNNTSPDDLSFNFLKRFHLILTRPLTDLFKLSLKSGKLPKIWKTSIILPLFKNGDKNLASNFRPISITCSCCRIFERILAKRITEFLLEKISDQQFGFLRKRSTTLQLISTLEDWYNAILLNKKIDCIYLDIIKAFDKVPHELLIYKIEKIGIKGNLLNWLKDFLTNRTFKVRINQQFSKEFPIKSGVPQGSVLGPILFLIFINDLSPVIPDGISLKLFADDTKIYFCYDTESQRKKLDEALHCVSQWAKIWGLQFSPEKSASLYLGKDNFKIPYKFNGKTIKETQTIRDLGILIDNKLTFKSHISAILQKAYLRSRTLFQKMKSKSSKTWIKIYKSYIRPLLEYSSENWNPHIKKEIIRLEKFQKFFTRKVFLKCHLPVLPYSDRLKYLYISSLENRRKYLDLITAFKIIKQETHHPLKLYNISQRRNSPFPRLITNLKLLKLNIFTNRTTKNLQEKQNNRPFINKLNSKLQDQTKTV

SEQ ID NO: 137694 - protein, 82 aa, Heterodera glycines
MMFIWLLLLPSFLFLLRLSHANLLIPGIMTERVELAPKSSALNGTEVEIRVKCEEDVEIEFDVEFAIRSSPCAKEFIVDKMR

SEQ ID NO: 137695 - protein, 230 aa, Heterodera glycines
MKRPMDSTATPPSTKTTRISADALAGQIDSLSAAVNALLVQDDISQAVKLQFGVLLTTLHTCQHVIDGLNNNANNNSAEEQERRRSLVIIGMPENPSARPSERVREDQKVVSGILDELGVEAVPTTTYRMGRPDVHRASPRLVKVVLPASVHQHIALGGWKKERTRLRSLPNWGRLLIRPSLSREQLQAEYEQRQAKRNGMANHPPRANNASAISNQLHELGQKMQQNFR

SEQ ID NO: 137696 - protein, 95 aa, Heterodera glycines
LFEYPKRTLEKIDFFVFGAVPPNRCAQIYGETESFGNSFPIACTLILRWIFTPHNCLSTPNGHLKKSIFLFSGQSPRADAPRFMGRPNPSGIASL

SEQ ID NO: 137697 - protein, 159 aa, Heterodera glycines
MHLKLCLLFCLILFLITLTDQIGSENKKLEQKTFDEIFGEKWEEKRNEEQKKREIIGKFNKIKEKIKQKGRKYPRKEWSKIEGKIAKKLGTNRQYIYKWIKELGLNQKTNKCYKSKTDEQKFEIVQKFAEITNEFKQKGRKYSRKEWQQNYAEICKKIR

SEQ ID NO: 137698 - protein, 101 aa, Heterodera glycines
MPQQQQQLYHQQQQHHVLSLPSSATAGGRAVQQHHHRRSAASPAVVYQQPQQQQQHQQHYHHNQQRSTAANMMMSSGPANMNISVREFLSNNNAASRGGDR

SEQ ID NO: 137699 - protein, 270 aa, Heterodera glycines
MERLRSFLAELKAKELDSRTVYEAIVPLKAFCDDTFLYEKFKGTGEKSSTEKQMVLLIGTLVHEIEQRIKTVQQLFRLDPQKYFFDGKKAKNSAQLWTVIKEVAFTLNIDSIENLWAFLNKLFYTLLNLLAHLEGFDFFDGMSKSDTFEIEKLQLMQQIVVRKYAFLIIEDEKYRTKWDELGNEQKAKKLFKIIGTKFDPIHFEHLKREWAKMEQQIKIDSELYAQNLVTKDWHNRQIMPMFAKLSQQITTEAYKMNELTATKKVSLKIK

SEQ ID NO: 137700 - protein, 371 aa, Heterodera glycines
MRDELLEQHTLRMIRLNRSENAFSEFLKNSVAEEKAAVYRLNRFYMDKDRNTGQELSLNIFHKYAELQRMCRNGNINALINQSGILDNVLELFTIHKAKILPKSDEQEILDEAFTITENGMDSVPDLNSVHAINTSMQHLFTLGAIKGKLGGIGQPDDWWHAVIPFLASTHNETLKELLVQNDEFRAKLKTIYIDRERLERMIPKDSQMFEQLIIESMAKKGTKNLTDYENAESFNIMQLYEKLILGDEDNGETKDNLTLSVFCFYFEILLENLLAKLRPLKAKENAKLKRMAIEVEVENAKLKQILSKLSGKDGKLAKVCYLESFTLWAAQNEALANENETKQLTSSEMVDNLWELEKVKRIKKMNSINN

SEQ ID NO: 137701 - protein, 136 aa, Heterodera glycines
MGKQLENGDKMDKTSKKHIEKFVDDRKMLHYSAISFLLLTNSKEEKGEIKIGRNNAKGTAYKWKMSEYFDESKFNVETEFAYKMRTLRSKNLMKNNEKILSIKNEIAKLIGENLVEELEFQHPIIMSIGNKSLSEN

SEQ ID NO: 137702 - protein, 135 aa, Heterodera glycines
MMVLLENSFCLLFLTIFLSVCSLKGAKKTFGIDQIDCFYANFFGLSFETEKKCDKNFEEISLTKIEEIIYFNEMNELLKAVKTKENLDAEHKKLSEKTLEQFLNIENLYQNSTQIVKSCEYWKFFLNIRSVFGMF

SEQ ID NO: 137703 - protein, 46 aa, Heterodera glycines
MFEQGIALEVIERTVNVPTVELKCRFARLWMEILCNTYFSWIPQML

SEQ ID NO: 137704 - protein, 95 aa, Heterodera glycines
LFEYPKRTLEKIDFFVFGAVPPSRCAQIYGETESFGNSFPIACTLILRWIFAPHNCLSTPNGHLKKSIFLFSGQSPRTDAPRFMGRPNPSGIASL

SEQ ID NO: 137705 - protein, 86 aa, Heterodera glycines
MAIQMFSSCSLITFAILLFSMLIEARFLDKRTDNCFYGMRHRNIPSGGLVAKMTKWNTFNMKKGDRMNEHDCRGSFAGCQTYSCID

SEQ ID NO: 137706 - protein, 237 aa, Heterodera glycines
MEIIIILLRITNADKFCLFYALVASKLYLEEHRNIFNRFMKNIVRQRDSAIELLHNCGIDINEYSYGVEQLPNVQKYWDEIYPGKYRVVAFEKSADPRKSIRVLWKGPMGRENVVPLFLENGHWDGLKNFVCFFNRGRKFCIDCECFYDKDVKHAFDCRARCYYCNRVGGMPCEKESGVKIECTKCRRYFYNWECYNYHQGHQTCNLWKRCVICDKTYLFNPKKEHECGETYCQLCS

SEQ ID NO: 137707 - protein, 86 aa, Heterodera glycines; identical to SEQ ID NO: 130750

SEQ ID NO: 137708 - protein, 62 aa, Heterodera glycines
CVDVGSIVLCASYLDIPPEPISSSSDEKSNGKRKKQKGQTKKEGPKIVTDVHEFGCIPWRMF

SEQ ID NO: 137709 - protein, 119 aa, Heterodera glycines
GYVGIKFCPECNNMLYPREDKQNRNNMLYPREDKQNRQLMYVCRNCEHSEPADNPCIYVNKLTHEVDELTQIVADVIELTQIVADVIHDPTLPKTEEHPCPKCKNAESVFFQAQSRRAE

SEQ ID NO: 137710 - protein, 88 aa, Heterodera glycines; identical to SEQ ID NO: 124691

SEQ ID NO: 137711 - protein, 88 aa, Heterodera glycines; identical to SEQ ID NO: 133373

SEQ ID NO: 137712 - protein, 169 aa, Heterodera glycines
MNRSLVKCQIWHNFQKSFKVWPCFEPAKWQEKRCGGCTALGNCDFDQGQPGETSDDAEKQQPQKAINNNTSADSNRNGASAWWPCLCAPAIRICVRVDDNLPETVGSPPLAADNSSDPSPSSADPPLLERVPKIWELKKAEVKRMETPEQKEAREEAYGLRVMRKRTDN

SEQ ID NO: 137713 - protein, 417 aa, Heterodera glycines
LKGVYDPIAIRSKAVENLVFAVSQMSEYEQSQMGYSKREFITKCSFNGRECSVEEDFSLYVDPTYGNCFTFNAHPDKNVLSERAGPNYGLRFLRFQVFVNVSDYLPTTEAAGVRITVHNPEEQPFPDTHGTVHNPEEQPFPDTHGFSAPTGFVSSFGIFSAPTGFVSSFGIRLKCVNRLPSCVNRLPSPYGECVEQGKTDEYIYRDKEYSTEGCGCQRSCIQRMLVRKCGCGDPRFPRYLNFSNCPVGDPRLRECLRREMHSAARSATQPDCVCRQPCREQVFSITYEQVFSITYSCARWPSSDLALHGECDPSLSGAQCLQFHREQSAIVEVYFEQLNYESLQESEAYGMPNLLSDFGGQLGLWMGVSVITIMEVGILISELLVLFFAKNGHLAESIVEHCRTDRVPSGDGPMLPS

SEQ ID NO: 137714 - protein, 113 aa, Heterodera glycines
MDRVVPVSAFGNPALGEFYKVMPSSGLRLEIRHEDYKQQLGDIKQTYWIAEVKEANPIFDYFYDSFYVQPSNFAGQQNKGRSKEQQKKNCAKLAFRCLQLASNNLDNAVSLSL

SEQ ID NO: 137715 - protein, 40 aa, Heterodera glycines
GSMKLLKYTPKLFGLFKKELKIFKNFIHLPFDRKSIRVPS

SEQ ID NO: 137716 - protein, 23 aa, Heterodera glycines
TFSLIIYYFAKLIHKYFLERALK

SEQ ID NO: 137717 - protein, 222 aa, Heterodera glycines
MIDDIFTDKNGQFEAPVGKETFNSIKNCKRAVYIGFYTDKAWLTQKLYSLAQNTLDAKNSSIKKIYAKVETNDCLRFSKKLKTKEEFMNEFKVSFDQKTIYINNAEEKAEIKSNKYFNEETYRISREYFAEKSSSEEASSSAASSTKQKWKQLGKMVKSLPLLGGKDNDKKKFEQYKKKPHVFDIYKKDSRGCEDTVGCCNVRMGFGWNTKGVERIFFFRFS

SEQ ID NO: 137718 - protein, 45 aa, Heterodera glycines
MKIRPKIRTFLRNKNIKKPCINQIKINSNENVNRYRTPNKKYVAN

SEQ ID NO: 137719 - protein, 53 aa, Heterodera glycines
MVQYVKGNAQLNADIVNSDSSKNCPLGEPTFWEKNFLGKKKSFKGCHNFRCLD

SEQ ID NO: 137720 - protein, 96 aa, Heterodera glycines
MASVGQFVVLRAAGAVRFDQSDPVEENGPQERVTEQRTAVRMGRGQKEFAGIGHAPKQKCWANPPDDGPTPEQIVRPPTISHQEYQKIQTFETPKN

SEQ ID NO: 137721 - protein, 91 aa, Heterodera glycines
MHGCFVTTVPHYLMGMPHDLRYFLSDNDHRPWDHCAERLLQPFYDHKGNTVFFSLYNSKNQCVDSVVLMDEVNSRDQFEEVERHQLSFMEQ

SEQ ID NO: 137722 - protein, 350 aa, Heterodera glycines
MLIHSLVSCPFSPGRCRVNNFTDTDYSSVPLGFSIPRVNCEGVLNKSECQFEKCSLGVDGPRCTETGNGFVFDRSIVTYSAIERWEFVCDRQYLKAMIQSSYYIGQMMGSLIFGFLGDRVVPESPRWLVSQKRYVEADQILRNAARINKRELPDKWPVVSMLYYGMSMKTDFLGGDMYMTFIFGGLVEIPALFLMYFLIDRIGRKPIIAGGFTIAALCMISNLLLGEKVNTMVAVAQFLTGKASSTVTYATLYTITPIIYPFAILGICAAAVVIIFLPETTGMKFLETIDEVEGWTKNHEEMQPLSSQSLQGTKSASGEIKTDMELLKDFNIREIDRLPVSRVPSWARCP

SEQ ID NO: 137723 - protein, 66 aa, Heterodera glycines
MPRNTEHRCDGVQSGIMQSAAIVNPPAMIGFRPMRSIRKYIKKRAGISTNPPKMNVMYMSPPRKSV

SEQ ID NO: 137724 - protein, 369 aa, Heterodera glycines
MVCEPNGIEFKEEGSESESCCSSIVQVYNSGSCGSKKWTVEALYESCRMKVRMTGSGLMSECTLMIPLENGLILTISLVDAEIISKRKEPDGTYRFYVHYVDCNRRLDEWVAEDRIDLMSVRIPQRVKKSASQQAIAQSLDQSFDQNFAISDAQSSRSSTPEKVIEMFRTPTRSLTGSRKRKHLGHTIEYVDANSTSSECCPSVTTNGLPNSTAPSGITEQLPSVFHFPLFKFPVCVVPCQRPVGHSEDALTRIRNVEKVQLGRNIIQPWYFSPYPKEMTHLPCIYLCEFCLTYLKSQSALARHVLSYRSYWFQTILETMLKIVSQQGRPIPSQGEDGEEEEDTQVSLSIMDLCELTSIRKEDVLSTLQ

SEQ ID NO: 137725 - protein, 199 aa, Heterodera glycines
MPSSSGSEKGNGRNGVRGEEEVKGGKEIASKTLNIQSKRFYLDVKQNDRGRFVKLAEVAMNGRKNRLFMSMRICKNIKELLGKFEGHVPASEEEAELPHSQMIRTDGKSFFFDPGHNSRGDFLKITELKSFMGVRNSVVLSIRAIPQFTQVLSKLYDDFQELRAVEEVNVNNVLKKEPPKEAITDSNEESPKKETKSTD

SEQ ID NO: 137726 - protein, 108 aa, Heterodera glycines
MVKCHPDKLAKKVQSLDAPKGAYKTLILEYHLDGSINARLILTVPELRELYESVKSQQSVLIEGQKTIQPLEKSIDQTTMRIWEDMECGRNQFLGLLDKLVKVFVCSE

SEQ ID NO: 137727 - protein, 457 aa, Heterodera glycines
MLQQYQLDEGNMNLLTSIASSQKEAGNQKHKIEVVKKLRCVSGEKLKNIRATSKQLNHIETDSSSCEEDFSGNGEQQQPGKSIERMPKLTHQIETCLLAGNNARTAQNLPIDKNEQRYEAASKQNKQHAKGQLQCSNALSRIKGRQIIVPRDENIEKKRRQLPINAEEQPIVEAINEYPVVIICGETGSGKTTQIPQFLYEAGYTSNGHLIGVTEPRRIAAISMASRVGHELDNEKLASYQIRHEGNRSEETKILFMTDGVLLKELQTDFTLSRYSVVVIDEAHERSIYSDVLIGLLSRICALRMKRGYPLKLIIMSATLKLQDFLRQRLFSISQPKVVSVQARQFPVTIYFERRTPTNYLEATFKKVCKIHEEYPAGGILAFVTGQREVTHLVKLLENKYTKISASKLLRKEKMKKCRKKETKEEEEEGLLLDNDEFGTSDMDLEDEAWQNTFFWV

SEQ ID NO: 137728 - protein, 209 aa, Heterodera glycines
HLPPSEAGAQLVERALVEASRISEEIKRRPFGGFIAYEEVKRAVTNGDAKAEGRPAIQSYKEYYPYDFVQFRSTDNEQQLKVLEFDTFSEAVDKFYSSIETQKAEQRILGAEKEAEKKVQMKTKKMSTIRARKSYWFEKFHWFISSDRFLVLAGRDAHQNELLVKRYMRSCDIYVHAEIQGAASVVIRNRDRSGAEPPPRTLNEAVIHS

SEQ ID NO: 137729 - protein, 61 aa, Heterodera glycines
MHQRNPLSYAQQLSMSTNDHPAISGVDFPRVAFSSSWGGRTGNSALILAVDGDLLVHELLL

SEQ ID NO: 137730 - protein, 263 aa, Heterodera glycines
MSSANSSSATASTSGPTNKRQRMRSECNVSNASVQKQNLGNNRYSMTFQLIMPYEPETQRHHRILQLPALSQTGTSQRIFPICQIIYNNSNSVLAVVRPREEPGVSWRKGGFVMLSNSPAIALRTSEQNNLFEGHCSRVLSFGVTVDPNTAKKDTQRMALAEDVGDMASLLDSNGKYRCNTYGLCFEPIDNEICLGSSNRILIDMVLAPADRDVTCLLFATARSFYQEQQHSVGSCPKIVTKCTVNLRPIEFNLSEEVNVLSD

SEQ ID NO: 137731 - protein, 118 aa, Heterodera glycines
MKTKFATFDLCAALHDLRAFVGMRVVNVYDINSKTYLIKLQRPNEKAFILPNEKAFILFESGIRIHSTTYDWPKSTIPSGFSMKFRKHINTRRLTAVSQVGFGTDNQSRFTVLQVGVD

SEQ ID NO: 137732 - protein, 43 aa, Heterodera glycines
MVFCVPKTVERQLPMGPLNTSATGDRKYKEQDSMTYHLFLNSP

SEQ ID NO: 137733 - protein, 75 aa, Heterodera glycines
SECVICGSNSFPLGVRLRDCTHLSCVQCFVAYAEELLSRMSLKWHPQVGYTVGCPFYGCTAVVTDVHTLYLLGKP

SEQ ID NO: 137734 - protein, 197 aa, Heterodera glycines
KSLPLRCSEEMNGSPTNFSKNEKGFEPMAEVQLLKDDDQLVVEERCSALWNEIKDAGNAFLAQLQSESDQLDEQVQKLAQKSETLAANAQLRLCSVWTALEELKRKKQRIAGEMGENGGVIRLPFNLALICFPIATDFHHHRPQIGALRLINSFRKWLKQKEAQQSQVKQRIAHSHDSESSLRELEQEQQERNIIQR

SEQ ID NO: 137735 - protein, 81 aa, Heterodera glycines
FVYSIRYLFPMLSSHHRESLLLQYGHSQVLYSDEFCKLTDEILIIKKFFFGTLRPKVVLLKDIRVVYFDEQKNQQKKYAHR

SEQ ID NO: 137736 - protein, 16 aa, Heterodera glycines
EATPEGFGLPINLGAS

SEQ ID NO: 137737 - protein, 239 aa, Heterodera glycines
MTQTWMHPDETKAQRFKGNGRLFVTPEKMEKIFFEMCERFWSSENYHEQKANCLDFVFNFVNTLCEGNAPKKTLWPDNFIEFDKFMSRKYERSSFNLFDPTFPQSALDRKPIKLPVIIDTNCLLKYHKLEILIKNTNCNSNKNEDNKEENEVANCSNFVLLHTTGHFDKPIKEEEDFENPILIHTLPEKTVQNGKNIAIQFILKAYTCKMKSSKNGQTRTLVTELRLMDETVSRIQYIL

SEQ ID NO: 137738 - protein, 19 aa, Heterodera glycines
MKLDGIGSQNEWLSMFTDS

SEQ ID NO: 137739 - protein, 304 aa, Heterodera glycines
MRANVYIGSAEFRELPTDERMKYQLKKTKKCGRIWTDEKKRIRREHFVARIAKEIGVNFIGNYLINKANAVEGREGRLVASPSLPKVNAQPNRRNELERVARVLVKNGIRVFYDRWDRESIERNLLGWVQNAVTKATKIVLFYDSRAEQLLLVPCAGQNGDLFDRVFCALHQHLDLKKTREYEKMKVIGNPKEMREEKPNERTHLLSEFEDEHMAKNNGGGQFGTKETVTAPTAEGGKGEEGTEASSNCNTTTTQWGTTGMSSDCNTTTAAAAQLEWHNEAEEQRTKNQLAKGKEEGDSGVIVP

SEQ ID NO: 137740 - protein, 43 aa, Heterodera glycines
CCRVVQAVLRAVGPALTFEAGMSRTFFGTFVVTCQANISPHSN

SEQ ID NO: 137741 - protein, 16 aa, Heterodera glycines
EAIPEGFGLPINLGAS

SEQ ID NO: 137742 - protein, 24 aa, Heterodera glycines
SKWGIEPRRKIMKVESLTTTPHVH

SEQ ID NO: 137743 - protein, 18 aa, Heterodera glycines
YREAIPEGFGLPINLGAS

SEQ ID NO: 137744 - protein, 49 aa, Heterodera glycines
KAGTLLSLRRHFSQNHPLRYLLRLILLFDKFSKPFVVFPWFLNDELCFP

SEQ ID NO: 137745 - protein, 114 aa, Heterodera glycines
TVFALIIPHGGLFFNPLVYWGIIGDWGIMIEGLFFKRLLDWGINGDWGINGDWGIIRANTYFMPFIFVYLFFVAFPPIDDKRYLCKKIRTKMANFYIILFNLIIEFFVDRPSTN

SEQ ID NO: 137746 - protein, 37 aa, Heterodera glycines
MDRARQVASDAWAVPAANRRPETVLAGASCGKIMKIL

SEQ ID NO: 137747 - protein, 80 aa, Heterodera glycines
MHMPCSHLEPPPHSTAGEQAEFGGTVTTIQGNTVSRTVLLEKFLFEAKNEKWHHINMEISSVAFLSPFPQIGSDWTDHLS

SEQ ID NO: 137748 - protein, 57 aa, Heterodera glycines
MPILTAMFCRGARAVQPGGECLYSSQCHAVYPGMLCSLSRCRCPNNQAPFFATINCL

SEQ ID NO: 137749 - protein, 362 aa, Heterodera glycines
MFCSFSKTPFHIIIHFFLIHISNAISSGDDKMLIAFVRNDQKIQISEYSMEKYEIHFGILYYMRKNWKCVKIAKEFDENERTECQKYRKYLDILYEYLCREYAGIPTVKPKFVFKNEIEFDGLIEIEGPIIYAVNCLAKISQFYFHKYSAVMMYKRKLNKLFTYHFEPKLLNEHRLNYNVKLVNEKPKVPINEMILQLAIDTAYGCQTNESVDGIFRQNFNEILGEMFKKAEQRAKREDNYGIFVTYDIIVRSIFDDYFVWTDDAIFTEFVKGQETNFEKFYRMLKEYYSNSVKSKEFYLQQYGAFFGLMYLMRKNWQCAKVGEDLKEKCQKYKKYLHILYEYFFRISAEGFCFPFNDHLIN

SEQ ID NO: 137750 - protein, 175 aa, Heterodera glycines
MVRFAGLRGTTFILLDGTELPLVGLGTYGLLTQNDVDVAVDTALLSGYRLFDTANYYQNELELGNAFKKLLPKHNLKREDVFIVTKANIRSPKVEENAIAMVEHSLQSLQTEYNYILEFDLDLDLALQAHISRLFCSNTNFCQKKIQAWFFFLNLSYPEFCAVNPDSTWDPVQAF

SEQ ID NO: 137751 - protein, 639 aa, Heterodera glycines
VLFWYGGGFWSGTASLDVYDGKILSSFWSGTASLDVYDGKILSSEEEEDVIVVTVNYRVTVFGFLYLGRQEAPGNMGLWDQLLALKWVHQEAPGNMGLWDQLLALKWVHQNIESFGGEPALVTLFGESAGAASFGGEPALVTLFGESAGAASINMHMLSPRSQPFFARAIIQSGSLSPRSQPFFARAIIQSGSATAPWAVENKQVALHRAVILYDYMKCGGAKEKMSQYMKCGGAKEKMSQLAPEAWNLDAVLECLLKASSERLRDAEWSPVMEFADFPWVPVIDGDLLEQSVSSSLKQGNFKRTQLLVGSNKDEAIYFIVYQLADIFPPSEFFSKKEFITTREEFITTRELWLKSISNLLPRQILKSSLSLQAIVQQYEPDGELPVEWWQWVDSLDKMLGDLLFTCNVNEFALAHAEHGAPTFYYVFSHRASQQTWPEWMGVLHGYEINFVLHGYEINFIFGEPYNRKQFNYTREERELSSRFMRYWANFARTGDPNRNADGSYTDTWPTYNTKGMEYTWPTYNTKGMEYMNLTVESDYSLRGARRIGTGPRRKQCKFWKQLMPKLLLLSADLGESFIRWKQHMERDLGESFIRWKQHMERWEQEYMADWEAAMNRWSRFQSYRDRDIAESIDQQGTC

SEQ ID NO: 137752 - protein, 44 aa, Heterodera glycines
MGTMEVKKLAKKSYRYLANGQRAEEKAQIIVQVVADVQQMQEVQ

SEQ ID NO: 137753 - protein, 139 aa, Heterodera glycines
MDWVIKKALLQLPNENDGANGQQLATRTDIFGELVALDERMFVGQPRKSVAALVVQQQSDENLWQIGKRKNERIKIKKRYRKTNDPNEQAYCNIDDMVQAVEVASESDHAVVDQRVVQLTANVQPDQCGHHQLISDNFS

SEQ ID NO: 137754 - protein, 35 aa, Heterodera glycines
MMRQMSIRRGPFVFGRVPLTFTFQSEVARRVVGEP

SEQ ID NO: 137755 - protein, 103 aa, Heterodera glycines
MALFVNGHSKLEQNDSRALALGTLLVLVERWSRPFARKHKGKTKCRVFDQTFGQFGRTHRPQFTFADQCHLRIGRPRRKTYDYQSDWTETAGIPTENGKKGNE

SEQ ID NO: 137756 - protein, 93 aa, Heterodera glycines
MAKRHRTEKKEGEETEEREEKENKEKGKEKETENEQEMRELGQMEKQTVTDANNPGEQKEASQSDAKALGEKQQNCYDEKTKANAEKQYEVGI

SEQ ID NO: 137757 - protein, 164 aa, Heterodera glycines
MSAISNSNFAQCFSGLRPDQSSSIGVPSGILTTEEFVGVYQFYCHPNFQWLHPLKFPRHGRISDRHHATLVLDIEKFSEFAQEIVGSERSSEAAFVSGMPWKIRATIKMAKQSTGKCLDIYLWCCAASVEEEGGAESISKIIGPGIPHFLGTGIFLSPISSGPG

SEQ ID NO: 137758 - protein, 45 aa, Heterodera glycines; identical to SEQ ID NO: 124527

SEQ ID NO: 137759 - protein, 83 aa, Heterodera glycines
MAKALALSKTHFWRHMMPGWECFSDRINSRDQLGFQSTGEMDHFCLKWKDMAWAAYVNVLSWECQNGIGGLTSSIALKPINER

SEQ ID NO: 137760 - protein, 55 aa, Heterodera glycines
MAPKVISRRVIIEGTVIVISELANFYAFCANFKFEKKKMIAIVQQYIKEIHTFYM

SEQ ID NO: 137761 - protein, 96 aa, Heterodera glycines
MDFRIPNPGLWARKNFKQDEGEQRIKPVGGRLGKKVDGGMCRALKRLCTSWRMEVIGDELLSVMDHENKAFSLTPKRRAKDVATKAKNTGAEKQRG

SEQ ID NO: 137762 - protein, 63 aa, Heterodera glycines; identical to SEQ ID NO: 130392

SEQ ID NO: 137763 - protein, 36 aa, Heterodera glycines
MAFHSTSKQCAKDARMLDEHGWLLDVNPGPSDQQQK

SEQ ID NO: 137764 - protein, 129 aa, Heterodera glycines
IILPHLMVVLSINLIPPFYHHISPINFYFLQFFPQGSQSRSENRARKALRTITVILGTFILFWTPFYVLATVYGFCERCSSSAGFQALYTISYLLCYMNSPINPFCYAMANQQVKLIILILFNDNIRGG

SEQ ID NO: 137765 - protein, 98 aa, Heterodera glycines
MSQEINEFIEPYSIKQSKRAEIGDFNGQIQKLIEEWVQNIPIANTDDSNFSKKLFFKSSFIRKSAKSKNPKERLLFDELRIGRVRLGFDLCGARPNKH

SEQ ID NO: 137766 - protein, 89 aa, Heterodera glycines
HKLYEHGLTNSDNHERIHLIIHVLLVDAVFDRLARDLCRKTAFEVQFRNWAALAKQMEFQKEEIRSFVCNPLNNVNCLLTGGGGLGCPG

SEQ ID NO: 137767 - protein, 264 aa, Heterodera glycines
MKSDRAKSNNGMKSDRAKSNYGTKSDRTKPNNGMKSDRAKSNNGMKSDRAKSNYGVKSDRTKPNNGMKSDRTKPNNGMKSDRAKSNNGMKSDRAKPNNGIKSDRTKPNNGMKSDRTKPNNGMKSDRAKSNNGMKSDRTKPNNGMKSDRAKSNNGMKSDRAKSNYGVKSDRAKSNNGTKSDRTKPNNGMKSDRAKSNNGMKSDRTKSNNGMKSDRAKSNNGMKSDRAKSNYGMKSDRTKPNNGMKSDRAKSNNGMKSDRTKPTNG

SEQ ID NO: 137768 - protein, 20 aa, Heterodera glycines
MDLLLFVRIGVRAKVTLCKG

SEQ ID NO: 137769 - protein, 131 aa, Heterodera glycines
MGNIKLVLLMLLNSFLFAQSEDRSSSGIGRDAAIEFAKEGANVVIHGRDKERLKETEALIIKEANVSNEKVLKVYGDIEKVETTTAIFDKTIKKFKQIDILVNNAGTVMLKGTKEQFDLNNLDYLYNVGLR

SEQ ID NO: 137770 - protein, 23 aa, Heterodera glycines
MKYFAEIFDYLKKKKIKHGFKFD

SEQ ID NO: 137771 - protein, 97 aa, Heterodera glycines
MHMHIILCPSDRILEFIFRNIWPMIATNIHGLQLSKRSFRRLRQLAPSFLNDCPSLHFVSYYDDLFTEFPANDNATASDRQAVAKWLFTPLQNDVPK

SEQ ID NO: 137772 - protein, 59 aa, Heterodera glycines
MSFFLRTNFNILSIKNAFSACTEYRQAFQTGFPFVFKRFSNANQAIPMHNGLPLGTTQC

SEQ ID NO: 137773 - protein, 92 aa, Heterodera glycines
MAFRAGAGTGRELAQRPDQYLDILTNFDCCWSTPDEVHAIAEQLDEFVHHEIRGPYAGPGSEPSDCLRHCLLVFRVLDWHIGALCTFGQAKM

SEQ ID NO: 137774 - protein, 746 aa, Heterodera glycines
MVCDLKNPYVGIFVKRDDANTSDAVNSIDELYPVGTFGNVVELNRVHPKRLEMFVSAHRRIRLLEKLDTLDNEQVGRTQRRKKRVQPQQLTPNREEGANGTEEPQGEKPLLYARIENVVEPVFKPDDWMKATIDTIIMTIREIASYSPLFQQQIINLLIPKQNVTEDPIALCDLVGTIVETSTATTQDLQDLMEKTDLKAIKRELGIEKEDKQAVLEKMEERLANLKVPEYAMKVIKEEQAKLSFLDPHSSEFSISRNYLDWLTSVPWGKTSEENMDVHKARQILEEDHYGMKDVKERILEFIAVGILKQQTNGKILCFHGPPGVGKTSIAKSIARALNREYYRFSVGGMTDVAEIKGHRRTYVGAMPGKLIQCLKKVQTENPLVLIDEVDKIGREGYHGDPSSALLEVLDPEQNANFLDHFLDVPVDLSKVLFICTANVTDTIPGPLKDRMEMIEVAGYVAEEKLEIARKYLVPKCREKCALPDEKLVIKDDAIDSLIKSYCRESGVRNLEKHIEKIFRKSAYQLVSGEGAQTQILPIVVENSNLKKYVGREKFTSDRLYPTTPVGVVMGLAWTAMGGSALYVEATLARRLGTPSTDVQQVTDEKSHQKTVTGNLEVTGHLGDVMKESMRTAYTVAKNVLLRKDPQNEFLEKAYIHLHLPEGAVPKDGPSAGCTVVSALMSLALDRPVAQQTAMTGEVSLTGKILPVGGIKEKIIAAKRAGVGRIILPSENRKDFEDLADFIKKD

SEQ ID NO: 137775 - protein, 194 aa, Heterodera glycines
MKMKCAKNANTTEEILRKNSKNKEKEKIREKKGQDEEEQIYKEITEIYRQNSETDELMELYEENEKWIRQSQNKKAKKKEKATKKGAKNGKEKEKNLLDDLVVKETFENVLLKKLDGKNIEITKNIILFVRAIETKLKFIKREEKRTENDQILDKFDEKWDSFMQSASIRSEELQFVHDKLYFIHEDIDQIAFE

SEQ ID NO: 137776 - protein, 104 aa, Heterodera glycines
MLVIFPIDISFAIIYPIHNVLVILIRAYRSAFTKADFVSYCYWANTPLFLHSLVTVLLYIRFINRSSKITKRRNFVKRNLNEVGKTHFKFLEEQWNRKSAFSTD

SEQ ID NO: 137777 - protein, 73 aa, Heterodera glycines
QIVNVDNQLNELTFREAEISQLYKKDHPTYRALLEKRQTLEQERKRLNKRVSAMPSTQQEVLRLSRDVEAGRA

SEQ ID NO: 137778 - protein, 73 aa, Heterodera glycines
GCKSRISRQKAKCETPKNANNAKGEMRKAKPRPIPAAHPSVTVFTSFGQFFGFVVLSLGSDANALLDWHSVSQ

SEQ ID NO: 137779 - protein, 156 aa, Heterodera glycines
GRANLSGVASSANSALFGIGTAAVRPSSSSTASSTSTPTQSTTAQRRPIVLSAKASPSPPPPPPLLNIKSGGRTAQRVAVTTKEKQKTKQREEREHNETEDEIFLGGEVSLNGPTKFVENAIVKPKVPPKPDKNALIGVGQQQQKKRKEEVGGDRE

SEQ ID NO: 137780 - protein, 179 aa, Heterodera glycines
MWLSPNGTIRNILGGTVFREPIICKNIPRVVPGWKKEIVIGRHAFGDQYKATDIVVPKGSKFEINIIKSDGQVERHSVFNFADTGGIIMGMEYKSKFEALGIYYEHRLIDDMVAQMLKTVLMCPDGKTIEAEAAHGTVTRHFREHQKGNPTSTNPVASIFAWTRGLEHRGVLDGNDALV

SEQ ID NO: 137781 - protein, 126 aa, Heterodera glycines
MPGQTPAGPASVALHECSVFLLCLERLYEEATRLALRHVGLACAKECARRLDADSAAADAFAPIGHLASFHGPVDEEDFGESGDAGVQKMEQQQQQVQEMRKRVWMEIALWSSEPAIVVRCAVAFC

SEQ ID NO: 137782 - protein, 24 aa, Heterodera glycines
MEKACKIWRDYIDFSALELLELAS

SEQ ID NO: 137783 - protein, 57 aa, Heterodera glycines
MRPFLGVRRIISVYRTISGLRPFDCVQRTLTVPIEGKAPKRCTAEEAVRDIESGPMD

SEQ ID NO: 137784 - protein, 49 aa, Heterodera glycines
MTYYLDEDTPKRSNNDLYSCIRLDMNFTKCDQNDPGATIKISDANTNEW

SEQ ID NO: 137785 - protein, 291 aa, Heterodera glycines
CDGDNDCGDNSDETNDQCKVAVCEPPLRFRCAHSRLCLNILQLCNGFNDCGEHDFSDEHLSMCSSFSMCSSFSEYGDCSTDEFKCSNGKCINATLACDRKDDCGDATDEIGCAKNNGKSCHSKGDNGGCKHLCTDVQDGYYCHCRDGFRPDPANPFDCVDIDECQGNNTCTQQCLNTKGSYLCKCVDDYTSGVVIGAMAGKDCRANGEPALVMVAANNKVMQLNLVGARGRVNAAAESADVQADIAAVEFDPRREQMFWIDAYQKKVFRSALPKGNQSHEGQKLQIHLMTM

SEQ ID NO: 137786 - protein, 143 aa, Heterodera glycines
MAIKYGPKIAKYGHKMAKIAKYGHKWQKCQNMDINFSKLSAKFLQIYWLKLHMRYISKFFDSKFWRKNDFLKNFSGFGLKKANLAAGGRSNRGFFEKCQNMDIKYGPKCQNMEKYGNMDINREIWKNMENMDIEILPRSFKPS

SEQ ID NO: 137787 - protein, 85 aa, Heterodera glycines
MLQAESACARAQCTHLCAELPASGFRCMCPDNVTQFDDGSCGTVRIEELPANRESEELSNDNKNFLIWLIRKKVVSNGAEKAGAR

SEQ ID NO: 137788 - protein, 33 aa, Heterodera glycines
PITFFPLLGNNCTYFFTKNDQILAVLRQKTCKN

SEQ ID NO: 137789 - protein, 38 aa, Heterodera glycines
MVAFAPPPAHANAVTLRANFAKSLIQEISFLKSEFLGA

SEQ ID NO: 137790 - protein, 16 aa, Heterodera glycines
EAIPEGFGLPINLGAS

SEQ ID NO: 137791 - protein, 54 aa, Heterodera glycines
  unsure (1)..(54): unsure at all Xaa locations
RNSFPIACTLILRWIFAPHNCLSTPNGHSKNRFICVFGAVPPNRCAQIYXETRS

SEQ ID NO: 137792 - protein, 47 aa, Heterodera glycines
LCFFFHLFQSASALRFCVLTLLFFPFIPIDHVNSFSIHLVTYFMKLY

SEQ ID NO: 137793 - protein, 45 aa, Heterodera glycines; identical to SEQ ID NO: 132754

SEQ ID NO: 137794 - protein, 17 aa, Heterodera glycines
MGFLNDQTLFDLHVNFC

SEQ ID NO: 137795 - protein, 83 aa, Heterodera glycines
MHYSASSIYLMRPEEHRFTNADSPYFRTNSSFLGIGMDKSVRIVENGLKQGDGAGAKAAMVVQVQKVSILMYLNFISLLDNYF

SEQ ID NO: 137796 - protein, 47 aa, Heterodera glycines
MSTFWRLALVQKRLSDYFNAICEFNGKKADDNAIGTMRPQQLSAASA

SEQ ID NO: 137797 - protein, 192 aa, Heterodera glycines
  unsure (1)..(192): unsure at all Xaa locations
LVEVSLFVLLVSPYLSKLPNSTVVLLDHAIHFNPGGLAQMEHRFGCIFDQNLYETFKRQMNPRNTCDPFLLSSFVPRPLLFVFVLLRLLPISVXLFLFAAPQNALSISLAKCILCVKPTIRYKKNAKSTPSKSFHRNXSHNSSTKTTFGVKENVPXLSPLPCGTQIPPKPPPLGYMDHRRNYNNAAFFAVSG

SEQ ID NO: 137798 - protein, 38 aa, Heterodera glycines
MKLCLFKIIFAFYLLPYACLSLESLESLFDSEEWLVKK

SEQ ID NO: 137799 - protein, 161 aa, Heterodera glycines
AKSPCPSPSSPNSDFCPSFAMRRYAFIRSFYPILRFFADAYFLLADALFALYNAFQPIDQIGWASADPLLFIPANKAAEMIRRGSTDLGELMDVLRFAAKTDRCAVTRTIGVGNGRFGEEKCGGICHRSGFYVSIAPFLHGGFECADRTTLAKRAERSSEK

SEQ ID NO: 137800 - protein, 150 aa, Heterodera glycines
MRQDLIFHYYQAKANCNWPNNSAKQYSQELPKYLRGYHNIGKREAAQIGALILRAQTKDGKEPPLAHIQHILQQLIPNYFHITMEKGNRLLFETTLGHKMDDLLTSYIQAMIARRECITTKCQNERNAKSGNVLPYVPLLAFGDDRREFA

SEQ ID NO: 137801 - protein, 45 aa, Heterodera glycines
MLKCPAWLVDLKRNIFTTRTLSLIRHGQTDGQGIQPEKAEAEMIN

SEQ ID NO: 137802 - protein, 123 aa, Heterodera glycines
MANNNHCPPNVSVENDGGWTLAVRTKHGCRRRRVFSAKTTTKCGANLDGPSTNAFNEDGTEGGEVQAAVEELTLQMERLVCRMPHTFLVRQCTISSFLSWLCGRKEGNSALSDCLPIFPASLV

SEQ ID NO: 137803 - protein, 25 aa, Heterodera glycines
MKNIKNLLNLNKVNASSSLFFIDKK

SEQ ID NO: 137804 - protein, 115 aa, Heterodera glycines
GDERVGEGKEETVQEGGRKGLSFKVVADKNGNTVVYNDRDVPIGTGSVRKVGERSYESDHFAVGQPAVQSPEPKGRQWHDEADLVRPLLYPSLWLKLRVIQARLFRHVHRCHFAT

SEQ ID NO: 137805 - protein, 67 aa, Heterodera glycines
MIKSILHDTGPLQKHKLVKKILETYKLNSKKHVNSRVKKTLRTYVGNGELAVAAGRYSVAASGGGDK

SEQ ID NO: 137806 - protein, 53 aa, Heterodera glycines
MKETPQNRSTFMRDQQFMDRLTVDVFIATKTDPHNRTRFQKRPTKRLSSIKKS

SEQ ID NO: 137807 - protein, 181 aa, Heterodera glycines
MSVNLYCKGITDPVVIPIRPKEQISADTILNEFIKLQQSYSEINLLDQEISVIFTTYSTPAGSGRKSNKLMEKNDLSRIRISNADSFGLFYALELTRHYQLINNGITYKKYLCIINNPKKQKTIVRDLMNEADINQKEKSYGLDHIKLIQNFWDQKYSKIYRIVAFDDVRIFSKKLSLFVF

SEQ ID NO: 137808 - protein, 71 aa, Heterodera glycines
MSSPPPLSEKSQQPLATGNDGTAAATTTAQQASPLKSGGGGVKDSPKLGKKRRTSATTTAPTVNFGSIIAN

SEQ ID NO: 137809 - protein, 74 aa, Heterodera glycines
MKNKVLVPQKPSNWNHKQPSPSFANVKIGNKIQCMAKNICDLFVSLILSLNELPKICSFFKECNVEASKAYETL

SEQ ID NO: 137810 - protein, 26 aa, Heterodera glycines
MVPVWRWCTRRSKSSLRTRRRSMPFW

SEQ ID NO: 137811 - protein, 27 aa, Heterodera glycines
FKSHREAGQFQNFVPHFTAESPSTLNG

SEQ ID NO: 137812 - protein, 35 aa, Heterodera glycines
MPKYGCQIWKYGKKSEIWKIFPGSLCNIYFDIDFI

SEQ ID NO: 137813 - protein, 72 aa, Heterodera glycines
MDPIQARPSNYDDSELISLIQFHSIDIILLTLLAAADLCTSLGIFVLGLMRKALYEQVMETSPIPMRNGEQK

SEQ ID NO: 137814 - protein, 22 aa, Heterodera glycines
ITGSSIIAVLFLSFDASQIWSL

SEQ ID NO: 137815 - protein, 171 aa, Heterodera glycines
MDLDALRRRIVTLEQEMRENGGTRSGLPMPTTFDGTTDLQDYLKSFNLIATAHNWTPARFVQVLPLFLRGSARATYENIEPDIKDNWRSLIDAMADKLKQMSPSLTARQKLAQRKQLTGESLEEFAQAIRNLVLRAYPDNSLEMDFGNLVLGALENDVKQANEVRLRQFRS

SEQ ID NO: 137816 - protein, 163 aa, Heterodera glycines
AEEDSADASAEDEDTTTPQLFIAEILQIHLYKPSEFLKNLIQETLLSLAQNGSLLGLTNLLVLVLVVINRSVDWSKTVNDSSPFRRRETLFQTLVLSLIAFFLSLFSQSFIEMYVMVVNDRREIAWWASVYQLSRIAAFIDPLFNPVLVAVRTPIIRRRVNYH

SEQ ID NO: 137817 - protein, 188 aa, Heterodera glycines
MLSPTFTVRGSIHVDNFGVLLDPDGKLGNHLSLVRVGQLIIAQARLCLVPERQSPLWFIVNVICEEKEEEYVKEEEADVGDEQSHAYDLMSEDNQNKENETEIGGEPDDEFDVIDGGFGGGWKKTEKKRVEAELKREEKSCVEESLDASIGESSISSSESIRSATENLPMSDGIALFIQIRSYEWILA

SEQ ID NO: 137818 - protein, 220 aa, Heterodera glycines
AGTVHGFGPEIWARFRTDPFKVPSVLNAPIVIPEGAHTLHVEWQGVVIPEGAHTLHVEWQGVHDAHGRVAGYIVEIRTSDAPQWTEMGGVVRHEPSRRTYKVRHEPSRRTYKTRLDGLEPDTLYFVRIKVVDHRQRVSDASPEAQGRTGCAPPTLPPTNVELTSPVDCHVRVSWQPPSKESWLCSAIRYRIEYKNGTQPAREAEVPSKIRSHYYKRSCLI

SEQ ID NO: 137819 - protein, 44 aa, Heterodera glycines
DRAQIELARKAKLRVDALFKDVLDKRYDAVVLPGGQPGSDNLAA

SEQ ID NO: 137820 - protein, 30 aa, Heterodera glycines
DYFSKHLVDWGIIGDCGINRDWAIIRAIYG

SEQ ID NO: 137821 - protein, 92 aa, Heterodera glycines
MALTLPLYFFDGIRRLLPPRVSSSPSTSDQYRLASHIIAHCSIFDQVRWRRVSKAFKQAIDARINKYTRIDVRCYPGLSQLSEEGTRGRGFG

SEQ ID NO: 137822 - protein, 22 aa, Heterodera glycines
MLTKRPTTSYMEATRDKIDYNN

SEQ ID NO: 137823 - protein, 32 aa, Heterodera glycines
MHIANAKVQFAICMRVHAHVCACVNERVSICT

SEQ ID NO: 137824 - protein, 234 aa, Heterodera glycines
MQKGDKDWQPSLGSILELQFLSTNNGGLGVPIEGITSPYFYLRKAGSYFTAHTENSDLYSVNLLCPSSGTDNVGITIWYSIPAADFLKFKNLLSTFFVKEFTNDPEYLRNKSILVNPNIIRENRIRCIRTRAGEGIITLPGSVHFGFSTGLNCAVAYNVGPPSWIPYGIDSKPCSGVYKYAFIEAFELAKLYVLKCEDGDTARAAELWNTKYKNILNYGHGFDPIYPNCRPTIT

SEQ ID NO: 137825 - protein, 91 aa, Heterodera glycines
MELPQQAKFVTMERNPEYVAPFSKGDKIGVFHNKRENCLSYFLNGDLLGQNKQFIADSSGLWPAVTLRHPGDRVEFRVDSELGQMPGGLWK

SEQ ID NO: 137826 - protein, 16 aa, Heterodera glycines
EAIPEGFGLPINLGAS

SEQ ID NO: 137827 - protein, 113 aa, Heterodera glycines
MDLVESGLLADSLREEGVQRAELKRKAKVALDLIDAGLTGDALHEEGQRWKKAKTALSVLGNMLLADSLPEKKTAELPLPPAEKIESLPLPPLEKMKTPPLPPADKMPSPLPP

SEQ ID NO: 137828 - protein, 53 aa, Heterodera glycines
LFSFSTKLNILGIIRKHSKNAISLQIFQNFYLYTKKSEPKKVRITGVLSSFWP

SEQ ID NO: 137829 - protein, 30 aa, Heterodera glycines; identical to SEQ ID NO: 126607

SEQ ID NO: 137830 - protein, 224 aa, Heterodera glycines
MRMQNPAGLMGTMYAPASGGFFLPQAIQNQRAAPFMQTPNLSGAQMRGAVPRWNNMGGFNHPMQGYMMGPAGGGQFGGANQIARGGPRSGGGGGMRQYGGQPRQQQNRMPGMGGGHQQQGMRYQGQPRGMQQQQQAQQPQIAYSSYPQQQSRGGMAPQMGGGGGGGVKADHAITATHQEPLNTHDAYRGCHHFVAWRRGNVAFARGRSSNSALPGHGSEGGAVG

SEQ ID NO: 137831 - protein, 101 aa, Heterodera glycines
QFFPLLLTAEAGHLDVCRVLVEKGAALDQQEFFGKTPLICASGAGRLDVVAFLVDMGTAVNKTDGGGYNPLMYAVENGHTEVARLLLEKGADKEQIGADAL

SEQ ID NO: 137832 - protein, 234 aa, Heterodera glycines
MVFARFWDGNDFSVFPHLWYNAGRDGQIEEIGHIFNGNGAEVANLSSGDVVGAKGGRIFGGNDAAWKFWCRKYRTYIDCEGGDMELKRHLQEDEREQVGQTLVDGPPPSEAQHRHALRHAPPPPNPPGGGGSGGSNNKVSSTPAKLRSTNGNNNKRPRPPLLELESDDDDAVVIENAMQTRDAIGRAMPRHEVPRKRTVLEEEENGNGGGEQQRILRPPPIRFGFLLLPKLRHC

SEQ ID NO: 137833 - protein, 629 aa, Heterodera glycines
PPPLKADAQWTWRRRRRQCRNDDSVAPLGGGVGLIITHSGIISSKNSTALGPDNISAAQIRHLGPIAIEYMANLFNLSISSGIIPQMWKNAKVIPIPKPGKDHTNPANFRPISLLSPIAKILERLLLPSLNTHLPPAPHQHGFRHGFSTVTALHSIYRFITDGLNRKQPVERTVAVALDLSKAFDTVDHRLLISNIEHLNNNTPCYKRWLANYLGGRQAQVTFRDTTSPLHTIRMGVPQGSVLSPTLFNFYTANFPSPPPGILVTYADDITILARATQINSASDQINSFLPRVISWLNDRKLILSTSKSSSTIFTTSSHEHRIDPHIHANDCPIPVLRNPKILGITFDPQVTFNAHVSTLRTKLQKRNNILRALAGTTWGQCKEVLSTTYKAIGRSLLNYAAPIWSPQLADSHWSTLQRCQNSALRTTTGCVTMTSSEHLHSETSILPAKDHNFLLSQQFLLACRAPTHPSFDVSPSSISPNEMDPRAFGHIIDSTLSDTRGEILPAQKLLHTRMVATTIRSSTNRILGKPPPPIDNSETSLPRVARSRLAQLRAGFSPLINSYNAKINPHITNSCPACNATPHDTIHLFNCTANPTNLTTQTLWTHPRLAATFLKLMPVIPFTQQGVG

SEQ ID NO: 137834 - protein, 160 aa, Heterodera glycines
MRHTTGQGRSICIGRQGFDDALLIRELPASADDLSVRHAVVRFTDVEPLNVRLAASRLFAFIQMGSLFDAEMAHHKLQRTCLYIDNCADVQIIDQTTHNQSSSSSTANSVNTPFGILPICSEPDPAKFQYEHSSGYFYDPATGFYHDPKTEFYYSAKSRS

SEQ ID NO: 137835 - protein, 87 aa, Heterodera glycines
MFKAGLKLAFLLFAALFPSVPALRCVSSIALTYINNMTGGVMIVDLSKPVECAFGCARGTCSMNFGGELNSHFGLRIVRTLGDDGDY

SEQ ID NO: 137836 - protein, 25 aa, Heterodera glycines
TCTCGVVVKLSTFHNFSPGFNSPLG

SEQ ID NO: 137837 - protein, 20 aa, Heterodera glycines
RRGTTVIRRGTTVIKRGTKV

SEQ ID NO: 137838 - protein, 81 aa, Heterodera glycines
MSSNEEEESGGSNDDQFSSPISPVSPIQPMSTDWSNAIDAQEMGAGGVGGGISSGSLHESLHELSRWKIFGKKIDASLHTL

SEQ ID NO: 137839 - protein, 79 aa, Heterodera glycines
MAIKYGPKIAKYGHKIAKISKYGHKWQKRQNMDINFSKLSVKFLQIYWLKLHMRYISKFFDSRKINNKSEIFAFLLILT

SEQ ID NO: 137840 - protein, 50 aa, Heterodera glycines; identical to SEQ ID NO: 135818

SEQ ID NO: 137841 - protein, 85 aa, Heterodera glycines
MWHTHVRHADVFGLGIYLTTREIVLTKNGTPFGLFEFTAAITVPFPIDHLQQQQQQLFPFVSLLSPADQIEANFGPNFLFTNTQK

SEQ ID NO: 137842 - protein, 27 aa, Heterodera glycines
QGGFMGSARVLPLAQMAALRLHFWRRR

SEQ ID NO: 137843 - protein, 168 aa, Heterodera glycines
MFMTWTNDEKYSGKTMFMDDDDLLKEVLNNYEIINAPSVTEGHIKELNAIARRRIYGGGIYRTGLVGVGDYTAIDAAAVPSAMKELVETINQPKDPLENIKMAISAHLELLKIHPFDDGNGRTSRLLLNVLLFKKGHKPILFKPVDEDKYVSCIKVYTLETPENKFGI

SEQ ID NO: 137844 - protein, 162 aa, Heterodera glycines
MPDFHLRRREDKEKRQSQPGQPFDIDLNENQGTIRAVKTEAHLHIPMSSGNVIKIPLAAIQEPSRNIDIKQMRSDMCASGICGPFLKGHFRTFAKSPPPAQSHFISSRSTHSLTNVLCFGYCVKLFFWGHLLSIGKCRWLLLLVNLTQCFLTSLTNLAWLFY

SEQ ID NO: 137845 - protein, 144 aa, Heterodera glycines
ALPQAKPSGAYVSCFSNASTLVPRQGVPIHELIGLVNHGNTPLTRIPTPPPTLGSASPVLSSPQHLCLRPHLHKSINSPNFFNTQTSCMFIHFDSCQSLEKLRPRQRWHPSSSHHRSMPSTSASKHLNPDGRAPHSEIASFFQP

SEQ ID NO: 137846 - protein, 190 aa, Heterodera glycines
HQKISGQLREKDDVNLKLMSERIRSTQAQKKMRDEKELLDQNIQSLENQLATKLLHCQRIRDQNNETLRKKGIEFSQLATDLRLRLDRLDIQFTELRESVIKKASSYEANANKIKRLEEEKSSLKRKLDRAKRMEKYENVDELLQEENRILKESLTCPSCKVNRKNAILDKCHHVFCFECIRLRYDNRRR

SEQ ID NO: 137847 - protein, 87 aa, Heterodera glycines
MDSCESVGTTDAEGAEQKQNIVELKDSIVGSLIELRDIDKCVEKIMTSKESMNEEDEVNQINWSCWDDAISCFHITWEYSILYSLKR

SEQ ID NO: 137848 - protein, 152 aa, Heterodera glycines
RGRGGRGIAPSQTENGTTHLQNDGLGVISEANLNEGTIIDFSDSQPSQQPPIVNVPTRGILRNCNGIDAASDVQKANGTATNEGEHQLPIADQPVPFGGASVPRVASVTGLLNTHNLVVSTSTKQQHQSSTSECGDFATQIGHLRLDDRFQW

SEQ ID NO: 137849 - protein, 127 aa, Heterodera glycines
MAPNNKKPPTPTKKTSRASSSQFAASCGTDGFDDCPPSLASSSLRAIGLSFVRAKLRWRRLDEFRLECRRAVIGWAFINESLKFSYFSGKACSNISGGRKSGHSTSRLQGKSTKFGLGPFAVQSTHI

SEQ ID NO: 137850 - protein, 28 aa, Heterodera glycines
ISSNYLSGQHNTAKIQYIHIAISDQKRT

SEQ ID NO: 137851 - protein, 184 aa, Heterodera glycines
MTTPSIRLIATSKAPAATGYRWKQWTTIVKAQFFCFLQPGSARQQPDAVRERPDRDDIRKDGCGAGWSARRGEAGDDQHRGDSDVRRLVLQARYQLQHHGDQHERLPGCQRNVQELLHPGHVPCAQLLPGGQVAEECTRHDRCGGGCCGPVSRSAEERTDEQQMYIRVLYIDVIMYSILLYYCV

SEQ ID NO: 137852 - protein, 150 aa, Heterodera glycines
EQTTNVLISETTILQMAAPSIRLITTSKAPPATGHSQAVLLNNQTLYISGQTGIAAGSTNVVPGGARAEAKQAMTNIGEILTYAGSSFKHGADQLQHHGGRMSDFQAVNETIKNFFTEDTYPARSFFQVVKLPKSAYVMIDVVAIVQGQS

SEQ ID NO: 137853 - protein, 73 aa, Heterodera glycines
MCRLCRLDSVVAHLLKDNLEWTFPEAIEHEMDSNNQITLASLAAAENQNFSAQNSKIFLGGTIGGDTLSLSMN

SEQ ID NO: 137854 - protein, 147 aa, Heterodera glycines
MSCSILADSKKILVLLNFQLVQCTLSESQTFNWLTVNSYQLHPTTPVLKCRLSQALEQIQPAMAVGVQPANLHKFNSIFKRTIANWFVQSSAVDFLHLLLVCMRWLCREYEIPARYVISIHDEVRYLVPEKDKYRCALALSLSNMYV

SEQ ID NO: 137855 - protein, 24 aa, Heterodera glycines
ITGVSIIAVLFLVFLMPSQNLVRF

SEQ ID NO: 137856 - protein, 129 aa, Heterodera glycines
NFHKFQPLYFKKAIMESEKEWSNNQKLIDLAKTSKANVRGTIPKGFPYFTVNFGLQPGFAHVVEDERKFPFNFAQEIIGGMLEIIGGMLDLPHSHWRKPKKQSFDQIMERRNKLKKNWTKYDWTEIVRR

SEQ ID NO: 137857 - protein, 125 aa, Heterodera glycines
MWQQHPEFQPNSESGSAKEFSSCLVKCITTIMNDKTDYYGSAASRPRTLLLAFSYGTTGTQFFDIPNTGTQPSGISTLGLNPSAFQTLGLSPPAFQTLGLNPPAFQTLGLNTPAFQTLRLNPPPF

SEQ ID NO: 137858 - protein, 74 aa, Heterodera glycines
MPLFSHRIGQRRVPCVRHVQQQMRSSEWAATATGPWRVRLGQQTFAVRNQRDGVVEATLCQKGKFIQKKEKPFY

SEQ ID NO: 137859 - protein, 84 aa, Heterodera glycines
MNAREWCQESGPLGTPPANFKEFFICMFTPEPRSPQQKFLEISQPKAMLAKCSNSKLENINENSFGLQSVIVPKVCKNPCKTHF

SEQ ID NO: 137860 - protein, 137 aa, Heterodera glycines
SYWATRMGPEYDVIVVDVRPDERVLEDGGLGIEWQGTVDICDEHINFVMPSEQSLPLAYPILASLMSIDQHFIKAKSELRLADLAASVADDDEDDGSGARPLSPGGTAARRRCRASSAAGANRWLRSRSLENLSGFA

SEQ ID NO: 137861 - protein, 251 aa, Heterodera glycines
MVAQQQKPRRKRSRSEDMHKEEPEDDDEEDEEEEATARKRKRSEEAVDEAPQRSSDGGDEEKQQRSSNNHNIHRHKREQHHHREATARSNSGGKTATTKTPPAAQEKRKMKPPRKHADNGGGDDAVKEENAATDDVMRSGAAAAADEAEAAHGLEEVDSVGKQFDWEGGEEEEEDVELGFDLVENDHLDHGNDDGDDETVVVAVVMQNDDEADNGGGDQSVAEHEQQQNGHDQQLQVFLGTCKKWVFDIFG

SEQ ID NO: 137862 - protein, 68 aa, Heterodera glycines
ILYLTKALAYETEGLCTIAILFHRGFLYLEVIPEKWLSLFLINFIHIQMLSSMIERAVRNRPFIFEGI

SEQ ID NO: 137863 - protein, 92 aa, Heterodera glycines; identical to SEQ ID NO: 127421

SEQ ID NO: 137864 - protein, 85 aa, Heterodera glycines
MTLACDTISYVPSYFVLFLPKALTKMGISGTPSINARQFQAAVRVPNGLLKLGQPFVGPGQIEQRLGLHKIVLVTVGQVDLLNGL

SEQ ID NO: 137865 - protein, 251 aa, Heterodera glycines
MPTLQAEQHPPPLSPQTNNVQQQQPTVPSPLNERQQSVQPTQGEHPQIRANATLQTNMVQAQQQQQQSHQFLALDHDNDDQLLNQIFLDLTTSAEMQPIALDNNNNNNMNPQISSSASSSRRRNNANAGRGRGRGGGTRRRANARQQPQSERIQSSQPQTVQILSPSVVQHGQGLTREQCDSILPNLEVNEAMVRNDERCVICQMGFDLGSLNATELPCKHLYHLSCARDWLMHQNRCAICMRRFVLDSDA

SEQ ID NO: 137866 - protein, 127 aa, Heterodera glycines
MSQMLPFVQSPFFNSMPMPHQFPHLPFLNQFAHPIMGPFPHPVFVHTSSPSPFPLPPGITFSNRQQIERIATHVHGQNIAQQQQQQIVPRTNEGIAGVGPWQEEFYQDGTTTNDFLDFNRQIGSYIP

SEQ ID NO: 137867 - protein, 315 aa, Heterodera glycines
MPTNFGELRERICEEIGYGNGTMKLIHKGKYIIAPMDRRLAEHKLKDGDRIFAIGVVATPKPALDFNMSCGVCGGKIWLKWANQCEKCDLVCHTNCLEGAQSKECQSTDQYTFDDDTFIKLASDEIALTLKSVQEYSRRRTVQKGQSAENENSTSDIGWTNPPVLQNRLFRLGRKGLLEWYPLRKCSRWICSTLSRDLAQNRNLVISNLNRVKLFAFIIKCELIGLSFPTGNAYNPQVVCEAKVKGQRLFDWCETEERKKRINGQIDLVQAEIEAVTRLRRSLPNKSGVDFERIEHRLQALAFIMMLYCYALNVL

SEQ ID NO: 137868 - protein, 43 aa, Heterodera glycines
MQLSVLSFAFVALFLTSALIEFTEANAPKQNNGTDTNAEKEEN

SEQ ID NO: 137869 - protein, 120 aa, Heterodera glycines
MSSPARQVSRPELIKYFWSHRHCVLLLEFKLYRAFFVASTNGTDPGTFKNDFIRSDFAVLHNAPTAYNIEFFRIDMAIAREELLASSDIYFFQSCPERFDNLPFSAPPDQMLKTAKFGHF

SEQ ID NO: 137870 - protein, 120 aa, Heterodera glycines
MPMNDDNKNNAQMNDKGKAPQQFLQNPQQVQYAQQQSQLQPAQYPQQQQIMPQQVFLPSEQLQQFPWLYGMPGLNRITLKHNANEAVKPSPAEQLSSFLAEQQRQQQATSQLHRQNLHSR

SEQ ID NO: 137871 - protein, 142 aa, Heterodera glycines
MESVSSSLKSTEGQTQQQRKEIANSSVRPTEGQQSVRYFRRIRICSTSSDSSDEIFNSFERQDNSVINVKNTKQLNMIKSPEKNKKGKSREIIVRQRSLSPRSDITILNTSNKTSVSKAPAGKHKESDDARNARKIFVGGFN

SEQ ID NO: 137872 - protein, 33 aa, Heterodera glycines
SGRALRARLFNFVGNIRPLRGLRTGASRPFFNF

SEQ ID NO: 137873 - protein, 40 aa, Heterodera glycines
MSTEYRQAFQTEFPSVFKRILNVNRVIPLHNGPQLGTTQW

SEQ ID NO: 137874 - protein, 76 aa, Heterodera glycines
MFYLAFKDVHPSWSLIGIAGIYAVIIVIGAILNLSVILITIKTNTEYRQAFQTEFPFVFRRISNVTQVIPLQNTRS

SEQ ID NO: 137875 - protein, 49 aa, Heterodera glycines
LNLKKCQRLLFLKFFEILTFSLIIYYFAKLIHKYFFRTCSETHQMLIKS

SEQ ID NO: 137876 - protein, 111 aa, Heterodera glycines
MAEQWEEERAEKQRLTKKLRRASEWAKGEANKRNYRTNGNFKVIKAELLQRETEEQLEVQRKAKERLETEHNALLRLEKRRTLREETESVGMALIRDKLAAKEREVSAQVI

SEQ ID NO: 137877 - protein, 66 aa, Heterodera glycines
MPKMRHTMPKLHHKSASTDTKYGGKWRKKESQRKINQIFAEGLTKHLCVGWPKRQECAQSLGLPAH

SEQ ID NO: 137878 - protein, 68 aa, Heterodera glycines
MDDTEFRIFGVGIPISEKFMSYGIPISEIFLDLGMPSLVYGSRKELDPRAVGDKWALANWASAHVFPI

SEQ ID NO: 137879 - protein, 47 aa, Heterodera glycines
PQRHAGDHIELIFYEMPVNVKGFAFVARFFQKIDGIFNRIVNETRAL

SEQ ID NO: 137880 - protein, 34 aa, Heterodera glycines
LPIPSTIAFIHPIMNAKIIRVPKIACDLRLTKNG

SEQ ID NO: 137881 - protein, 117 aa, Heterodera glycines
MENLASGAICGVMYHLFSGQPLTIIGSTGPVLVFETIVFDMCTKLSFLNFAPSDQGLSLNYLSFRFWVHVWTALILFVMVATDASSLVSYITRFTEESFAMLIAVIFVYEACMKLFK

SEQ ID NO: 137882 - protein, 107 aa, Heterodera glycines
EIVLIPYPFKKHTVSLTYTFCFPNFAFWNSVFSSHSLHFSSHSLVVRWECHFLLLRRLCHRQRRRRFLAIRRSLLSHHFYSSQPLSTVLFVPEFSLNSMHNYYFVFI

SEQ ID NO: 137883 - protein, 235 aa, Heterodera glycines
VRHSATTNGGSSQGSFLSAVRSISDIGRTFSHGKNLQGRCTDSDSPTKRQTSGNQLELPKVGSLPKDMQKENSQSSDFFARNMHFMKKLPPGAEASNVLVGEVDFLTHHVTAFVRLKKAQVDFLTHHVTAFVRLKKAQLLGDLTEVPVPTRFLFLLLGPSGHAAQFKEIGRAIATLMSDEIFHEVAYKAKQRSDLLDGVDEFLDAVTVLPPGEWDPNIRIEPPSSIPNQQSRVQV

SEQ ID NO: 137884 - protein, 79 aa, Heterodera glycines
MNNSQNNGDKMSSAAPSTMSAAEASGSASKVAITGPAAPVEEPQPAAGQTQPTTSADTLANIHQTDKEIAADRRESLWM

SEQ ID NO: 137885 - protein, 75 aa, Heterodera glycines
MYFDHEMRREKEQRKGKKGQRTNETFDGKLNCGWTQFHFVVPFGVKFGKKAQTEEKDTTQRSAEKERTIDGRKVN

SEQ ID NO: 137886 - protein, 138 aa, Heterodera glycines
MAEYRGFARILTKSDLLSVDRIKEEIGIMLNDKKYKANALRLSKLHRQKPNPPEEQLIRWTDFVLENGPLKELIPESAELGMVEYFCLDIALICLIIAFAILWLCRRLFGALLAPWKRESARQKNDKKKVSERVIKED

SEQ ID NO: 137887 - protein, 57 aa, Heterodera glycines
MSVCRAVHMCPHLRVPSAGIPAEANGGGQKAKECFVERKFQTDVWVVVNENDRGWGH

SEQ ID NO: 137888 - protein, 83 aa, Heterodera glycines
IFFVFGAVPPNRCAQIYGETESFGNSFPIACTLILRWIFAPHNCLSTPNGHLKKSIFLFSGQSPRTDAPRFMGRPNPSGIASL

SEQ ID NO: 137889 - protein, 283 aa, Heterodera glycines
YSDQLYKHYAAASQYEYARHYYTPFNQYPQPQPPQYFNPEHMQKLYREAYTEYDKRELENALRGYLQYIALAYAQPMSVFPRHYDLRDKFPQCAAWIGLARDQGKCGACWAVATAAARDDRACIFLTLRNYLVFTKNPNLYSSTMDLISCTKEADGCNGGTPQLAWKYLEKYGYLTGAPVVNGTGCKPYVFPPLKSDPEKERKAPECTEHCQAGWKRMAMDKLSGRILPPSNETRYRTVIKTNHWGMDDFEGQLKCQERRMDECYGKMLEGSERGIMAEARHH

SEQ ID NO: 137890 - protein, 67 aa, Heterodera glycines
MFDEGKMRGNGDERPKRHQMKHTQWQEKRTNGGKADKWKKSGQMEEMRKSGQMEEKRTNGSSEKRMR

SEQ ID NO: 137891 - protein, 329 aa, Heterodera glycines
LANSLRQQRTEDNHISINGQIYSVDGPNVNVGVEGHDLSVNGRVYQNRATEQYLEIIQDKNIRNVIVSVPLSLFSRENITVGQTRHIHAECDGNLYIDQSADDCIRILCVDVKKDAAAKNFGSTSGGFNFGSTSVFYNFSVRGTLHIHNSSLECANIECDASLNVTHSPIERNAQMKCGGSLSIDESPMGNIRLNCDGSLRIEKSKMESSQIDVGGSIGIVKSPMGSIGIDCGGSLRIEKSKMEIGNLDCGGSLTIVESPAQNLQLDCGGSLNMKESPMKNVGINCGGSATIKKSKMESGRINCGGSFSIDRTPTGSVRINYGGSRINL

SEQ ID NO: 137892 - protein, 137 aa, Heterodera glycines
MFDDRINEEDAKDNDDEIMVTSAENDGITTTAAATCSSSSQTGTDRKSREVQAAIQDQQQTGNTNRSREVHAVQYQLQQQQQQTAVNAERSREVQAVQYQLQQQQQQTAGNAGRGREVQAAQHLHDQHKHNHRVQPP

SEQ ID NO: 137893 - protein, 75 aa, Heterodera glycines
PGLKCPAQAKNFFYFREKIEIFPKKIPVDRARKTMFWKWSPFLWEKSLKNPKIQKPENRFLALARKIFKIFEILK

SEQ ID NO: 137894 - protein, 63 aa, Heterodera glycines
FLADLKPSIACRFSAQQSTNRVFDSLQKIIHYPKVFLQPLIANLISCRFKAIHCLPVLGTAKH

SEQ ID NO: 137895 - protein, 43 aa, Heterodera glycines
MYKHRLFESSAIYSRVRAPWKLKIIKEYLSSKFPYAFKYNTYI

SEQ ID NO: 137896 - protein, 19 aa, Heterodera glycines
KNSNFNLYQVKIIQNYLVF

SEQ ID NO: 137897 - protein, 35 aa, Heterodera glycines
MSAKIIRVPKIACDLSLAKNGRFQFLLQSPLYIPL

SEQ ID NO: 137898 - protein, 172 aa, Heterodera glycines
QGLPGPSGPPGPPSAGPSGSVGDLGFPGDLGFPGPPGPPGPAALTQHKGTIVGPEGHPGAKGEKGEPGDTGPRGYPGQAGIPGQPGLPGMKGEKGLPGPAGPRGKEGRPGQPGPPGFKGDGKEGRPGQPGPPGFKGDRGVDGIPGVPGQLGQKGDQGFPGRDGARQINKELI

SEQ ID NO: 137899 - protein, 113 aa, Heterodera glycines
ANSSVISRHGERQQGNGDNNGKTTMPKSAKAAADQADGANASQLCIMACSMGPPGPQGPPGLAGTRGFPGPEGLQGPKGLKGAQGPPGPFGVKGDRGPVGTPGFPGNDGNPGH

SEQ ID NO: 137900 - protein, 222 aa, Heterodera glycines
MRTILFMAMVCLVMAVLMEMANSKAVKKDNKKGKNNFKNLLKYSLKGAVAASPAKGKASPKGGKSPAKGKAAKAKKVQAAKKAPGKDKKSLVKPIVLKAPVPPHKMHPMIESEAVPPPAHARSLATVPYSTPGAADRNSLPSYTSAGTNLDMADDNDDYQNYYYGTEDSSREFDASAEEEDELYEEEVGAMSGQTDDYGIGSGQDEYGHQPVDVPPKSVMLD

SEQ ID NO: 137901 - protein, 22 aa, Heterodera glycines
KLIRSAPNFAGTLKGREITYFK

SEQ ID NO: 137902 - protein, 38 aa, Heterodera glycines
FKIFRNSDFFINYLFFAKLIHKYFFRKCSETHKTLFTG

SEQ ID NO: 137903 - protein, 76 aa, Heterodera glycines
NTGYREAIPEGFGLPINLGASVRGDCPENKKIDFFKCPFGVLKQLWGAKIQGKNKVVVYRSYSRRIRTPYKSGRIG

SEQ ID NO: 137904 - protein, 31 aa, Heterodera glycines
MGSKNPTQNYSTGYREAIPEGFGLPINLGAS

SEQ ID NO: 137905 - protein, 49 aa, Heterodera glycines
MTPINWQTLEVNTEGPQNFQRSEIGVDKQRQHNAREDEKFDAESVLVFI

SEQ ID NO: 137906 - protein, 184 aa, Heterodera glycines
VLFIGSLFATCYFMFVKFRATYNKDEDTFRVELLVLPCIVLALFVNADFTALEVLWTFSIYLEAVAILPQLFMLQKRGEAETIVAILPQLFMLQKRGEAETITAHYLFLLGIYRALYIFNWVYRYYTEVYRYYTEAFYDPIVIVSGIVQTVLYADFFYLVQTVLYADFFYLYVTRVVKDGAKLE

SEQ ID NO: 137907 - protein, 381 aa, Heterodera glycines
QKYRCGSEEAGHFSTRADELEGGESSDMDGVEDKEEEQYTPLEKRNRRVSALFILVVMLGYTAGGACLMQLWERWSFYTAGGACLMQLWERWSFVDAFYFCFVTVTTIGFGDIVPQNVTFLPATLAYIVIGLIITTMCILIITTMCIDLVGSAYIQDIHLYGRALGSSFLTIGGKVIHLGEVFSYVAFLQKNYGLTPDQLDRLAQLPELTPDQLDRLAQLPEEYLLDCLINGRQPDLNWIGGRPFIPEYLLDCLINGRQPDLNWIGGRPFIPPDIYYFKWIEQPRTLSFTSERQLASPDIYYFKWIEQPRTLSFTSERQLASSESLDLNTSLCSTARTLTPRNTSLCSTARTLTPREYYQRVLVHYCRQMQTEAVAKTPAI

SEQ ID NO: 137908 - protein, 95 aa, Heterodera glycines; identical to SEQ ID NO: 125597

SEQ ID NO: 137909 - protein, 21 aa, Heterodera glycines
MRTRPIWQVKQRLLTSQKKGF

SEQ ID NO: 137910 - protein, 18 aa, Heterodera glycines
FLNRPKSLGLYFNKFHRT

SEQ ID NO: 137911 - protein, 20 aa, Heterodera glycines
MTTSHLTNGMNGSALSLNRR

SEQ ID NO: 137912 - protein, 88 aa, Heterodera glycines
MLRRLRRRYPLFAHLLLRQLVKRKFAKLDRNLSKSDDNWHMTYFANRVLKNGTPQLFNLETCCLIVNQFDEQRCGYIGLAKFPALWDA

SEQ ID NO: 137913 - protein, 28 aa, Heterodera glycines
MEVVGILLTFQNIWVFKYDSSAVCSNHI

SEQ ID NO: 137914 - protein, 428 aa, Heterodera glycines
MSGLKRFRIVSSPKKRMVDDFPTNLKHLRDVILFGFSGLFYVRARVADLQFSLYKACPLKRNGMLCKKKLDEELYCASCDHRANKATRNLYMRLELRDCENPEISQTATVFSAVAEHYLNLKVEQFAKMVEEQPGQLEALLKSKIEQTVAVKLSIKFKAKGELETLDWVAVSVQQENRETTTAEPTMKREQSTAAGILSLLSAAAHNDNTAAASASDSNAKRLRRHSWDFKTMAHFEEERAKAEEDRQKKEKQPQQPAPCLSKNSIMCTEWNGLTDPILLPIRPPEQNTAEVLMAELDKLGQSDGDEDVHGGGISKRSLLLSDPIEVVVTCIAPPVATSRRQPLTEADDDHQRDSVTAEIARRVITRKNFCAGYEALNSLVSNRERMNATVTELMQAAEIPADQESYEMEHIDQIQQFWVGCWCLNEC

SEQ ID NO: 137915 - protein, 18 aa, Heterodera glycines
MPDLTATNISKSKVQLYL

SEQ ID NO: 137916 - protein, 73 aa, Heterodera glycines
MWSAARCIWWAAPWRLPWRRGTYAWKEFVESGEKDRVQEVVERRLHESGWAKRVESMCEEYIAKKVAKVNKAA

SEQ ID NO: 137917 - protein, 23 aa, Heterodera glycines
CIKKKVWGGEKEGRRKEEENVVV

SEQ ID NO: 137918 - protein, 118 aa, Heterodera glycines
MSKIETVKLKSDIEEIKYFLPFCPNVNLHKRTCTVVTFGVGHTVKAEKELLKIYPECHLIAADPSDEINANLTQSIGGTFVHGPIGAETANQQPVISWGGRLNFMEMLFFNIFALHYQ

SEQ ID NO: 137919 - protein, 1016 aa, Heterodera glycines
MGRSTRKTTTTIWSFRQLQLDGDDDDRGAAGGGRVPAARASAPLARRRRTARTAPLWSWLRGTGRGRRRTTTKAEAGDNDDDDDGEVVDDFFTVVGVWERAGSRSRATQTETIQVRFHNWERARRPDLLLARCIARLMARVLDGRAEPLRVGLSVQPPGWDNCFHVPMRPPQQNSAHALAAALETFAKQYDELDLFSADVCFKVSAVWALPGELVLRIPHPCPSTKFDPSPHRLAARVEGACAEDEQRARGTVRCQSFVPVVNGAGGDRWCMARAIVLGLAQRRICVLERRNVVHFRAFCLAQRGEAGAPEARRLLEDAAVPLDRPTYGAAEAQRVQRWLDASLGAHQVRLVIFARELAYRVAWKGARPARFNLCLVVQDGHYGYIQCPEQLFHARQYCVDCEQPVDRRTHPQGCRALCPQCLRFGWGRPCAREPGRAPSRCADCLFVFENADCFEAHRRRVDPPPPGWQHDRRRGRPHRPMCEERRVCARCRQVVWTRHGAHACALNNNVGRQQAAQQQQQCDRCFGIHDAQWTPHFIQPKRAQCQLIANDAERPAAPAEGLEDDNDDDDDDDNDGDADDVNDNDDGGDAEQNRQRRRRRTLRFLFWDVECAQVADENEEGDEGVPARMLKHVPLLVCAEVICERCVAAGVDLEREPDRRAPGCCCGGAAWRDGQHRRWLMRAREDAFSDDDDDDNADADGGRRWRRPNPRRLRFFHDAATGRSPMAQFADFVLHDGPVNVRTVMLAHNGGRYDVHLLMEELQRRGVRPRRLVATGLRVYTLELGGRNQRSVVAKDSLNFFGCALSKLPAMFGLDGVPDKQFFPYNYIRAENMDVAHVGLPPAADYDPDRMRPAERDAFQRWYAAEQQRRPNRLFVLRRELLRYCANDVRILRRACLRFRHVVGELSGGVEPFLAASTIAGLALAIYRQQHLPRDLMVHTPEGGFLRGRRASAASRHFFALLERLHPQWRGRLRTARWSIGEACVEDDGYRLDALLYRPVPLRPLVIEFNGCFFP

SEQ ID NO: 137920 - protein, 92 aa, Heterodera glycines; identical to SEQ ID NO: 131128
  unsure (1)..(92): unsure at all Xaa locations

SEQ ID NO: 137921 - protein, 231 aa, Heterodera glycines
WAASTSHLERPVPISGRGHLVVPTLAQQDSRVVNRNHLGNDPAAGSPTATLLRLLPVQATAIKSSSLHTDRSRNTNRPRISRNGSVPGSDGRCVQRAGTYSERVDDSPYKGIPRSRTIIAMSDPNPRQIFTGLPTPFRGRTSTLILPVRACSRTSGHHRPVIAQFRAAEHRKSLEVVPTEAMSQLFSARVSLVIGINQTNRSTNERPCTTIHRIMKKLSICQSLRCPGRVS

SEQ ID NO: 137922 - protein, 51 aa, Heterodera glycines
HQIFLTEARDRTQIGVPAKAASNRCHDDQQQYQQTLPANSPQVDEKWAQAE

SEQ ID NO: 137923 - protein, 20 aa, Heterodera glycines
MCDEEVAALVVDNGSGMCKA

SEQ ID NO: 137924 - protein, 86 aa, Heterodera glycines
MLITNFNSTNCKRNLFNYLVWPSRDEAVFDDVVMELGVYGFMLGNRVDGTVPYFDQPGHLVRTKLASSNEGGVSVGTGAFDSVYLY

SEQ ID NO: 137925 - protein, 62 aa, Heterodera glycines
MLNTGKFLGKTFVITGASRGIGKEIALKLAKDGANIVICAKTTQDNPKLPGTIYSAAEEIEK

SEQ ID NO: 137926 - protein, 152 aa, Heterodera glycines
MVINWDPFILFISPTILVDLTIDSVHSGELLPDGIDDFDGPNATPTAGQALSKWLHTPRNDGQPKRLICHGFTLGFSKWVIDLKEPTEIVPFELVNERTSEILKLEKGEVDGWVFPWIMKRCQIGGPAVQWEDENLDNLNDVHFMLQADCIG

SEQ ID NO: 137927 - protein, 234 aa, Heterodera glycines
MGARKTDNTKRLAIDNSYNILGEKLANIGRLMDENEDDGNNTDCSISRQLFQICLTLLQQVQSQQSELFTLKQRQIADEAVQDHERRRSVVVMGLLESQKQKPSERVAADRTAISGVLDELGIESPITVYRMGSTDQAKTGQNRPRLMKVIFGCSKHQRQTLTQWNKLRAQISQKPGMSNIKIRPSLSQEELKARRVLQEECSRKRKEDGGEWVVYADKVMLRSDIATFKNNTN

SEQ ID NO: 137928 - protein, 58 aa, Heterodera glycines
CLVNIRSLYNKIDEIALNLVNKNIDIFLLTETWTKEENPILFSPWILENYNFVFCHRK

SEQ ID NO: 137929 - protein, 155 aa, Heterodera glycines
MQLNCKHFEFSEIENDLTDANNRIVDAFSKMEQSFDDAQRQEMQKDGWTFLRQFQYDQLCTDQCDHFYLNHPIFICNLFEFYFSPLKDAQLPEGFRHSIDEFSQMPKETREAMLWKRIERISRNIPDVNRPIMAIIKELIGGYAQKIVQIYEGNR

SEQ ID NO: 137930 - protein, 82 aa, Heterodera glycines
MNVPDSFAVGHRPRRFCSPCIIRFNSIETRPRTLAMIQRCPQINSLSTVVPKVNGYGGSHTPNWAYCYHNSSPPYRNSYYDM

SEQ ID NO: 137931 - protein, 46 aa, Heterodera glycines
MNLICFSFFFVVLVTNVIGEGLAEDKWKKCELNGNRMIRMGKDVKK

SEQ ID NO: 137932 - protein, 185 aa, Heterodera glycines
MSSSSAKLAEFQNALPFGVFLNDFDGAALGIVAFEIHCAIGTNDVNTCKTMATEEKSRKLTTRGIRTSTTTRATPPKTKLKIVTPFKTETPRVPNLFTPRDSTVKHFGTNCVQIDFPAEIAQFSLNVSAALFGIACKQYLRKYKIGQLPKNYDEKMEIKDKMEACGKVPTETNCKKLKKWKLKLN

SEQ ID NO: 137933 - protein, 290 aa, Heterodera glycines
MGRTKASKFSTRKTDTAVDLGLDILRNGNVFQLSVPMLSNTVAHEFLHALALWHEQDRDDANKYIKWNPTPRNQKEPAKTENYGFPYDFHSILHYEAVKTRGKLQKRRKQMPKGRISQPKELQAMPLPDGNCQTDRANEIEADWQIRTLKPKPQDGKKVIIKLKWLHEKVLTCDDPCGTYRVEIKYRKDKRARGAFICCSAQIEEDETKNWIEAGAPGEDILISAYPNQTNFEQLTELFELTYETEARRRDEKLLGLLEGQKQRPNSHWRFSMLELRRSRHHKSARQNSD

SEQ ID NO: 137934 - protein, 27 aa, Heterodera glycines
MANSSKICDRSGPYQGVGSCSYVYDSP

SEQ ID NO: 137935 - protein, 24 aa, Heterodera glycines
MAVFGFHLVLTMIAAEGFPSDWWQ

SEQ ID NO: 137936 - protein, 44 aa, Heterodera glycines
RYKCSLKDIYLRYLIVRLASVISGTKQIWVRERAAAEAAAILYD

SEQ ID NO: 137937 - protein, 84 aa, Heterodera glycines
MTQNENILHLDYNRLKTSKSIRLQRMKILAGQQLNEKGNNWDQLLIHALFDYNIAIHTKKALKAWKIVRKEIEKGQDKFKKEND

SEQ ID NO: 137938 - protein, 41 aa, Heterodera glycines
RSSASDHFHTTRSEQHHDLSVLVLEKIIKIGLFNSTKVATG

SEQ ID NO: 137939 - protein, 61 aa, Heterodera glycines
VFNNENEIIGKKNKLFICCFCHFSSLFRPLFMNSLSVKICTLIIINLPFVKSCSFHCCSRL

SEQ ID NO: 137940 - protein, 112 aa, Heterodera glycines
MEKIIGAYQPSVIVLQCGADSLTGDRLGCFNLTLKGHGKCVEYMKKFDLPVLMLGGGGYTIRNVARCWTYETAVALDTEISNAPEPDAMVMDEEAQLDEANPDERIPGKKEK

SEQ ID NO: 137941 - protein, 1341 aa, Heterodera glycines
MALFRARSDKTPTHAGIPAPDEVREGGCGQNRTNPAAPRGKAAAIQRQNGITIPIKACAQSGLVRTQRVQQWSAVEESALKDVVVRNTDDRGLINWAKGVLPEWQRLCQLNPTMYMARSSPSLSNKWASLRRTHVGPGCPSKEGSGPSQDLSDVKIQPARLAHDTVAELPQRTVPCGTDGHGVIDSDEIEIALAEVSRSSPFEEREPFDLGATERITRKRLRNAVRDVVPPRKRRVPSTPSRKEQDLVPEVDGPAPTDVLTHPPTESEPEPMLDPLSLVQLVRPQLGRAMGWAAEEMELGNVVMDVELKREFNREVRRVGRTPPDQMYKRGAGPPLPQKREPERVALLEQLIAARVERGINRGLDWFLELNVAVFAATRVLSRRERVETLADRLHINDSATLSEVSRRRAKAERKLRCAREQPWMSRRIRKLGVRVERLKQLADLVRQRIAGRGNRSSYEGPRRRFRLRPSLRSVTEAPVNPPLNGNEVYTFWHSLWAQSLRANTDDCQLRKFKNQLSAARHTDLTSVGTSSLVQMFSAALRKMKKGKAPGPDGIRAAWWGVFRRIAPYVATWVVRVIRGAEPVANWICNGLTVLLPKSSDNADPSNYRPITCLNTCYKLFTAVIAQITASYVDVLGGLPRQQVALRKGVWGTSVSLMIDALTVADARKAKRPLGVCWFDFKKAFDSVPHNLIRWILRVIGLPPVILSVIVSVMDQWATRLKIGGKVMPKTIPVRTGVFQGDTLSPLLFCLSVWPISFALDQFPQYQFRCANHLQQGFSVGHVFYMDDLKCYCPDREVLTAVIQQVQKSASALGLTIHYKKSAWLDQDGGKSGKAVLGVPVLVGTYKYLGMHERFMIVSKDSLESVRGKFMGRLKTLWTSKLTFGQAMLGTKSICMPVVRYVLQNLFLPKSEFNQTRLVLREWDRQIRDLLDECNIRQVFRSKTELYVSREEGGWGLPSMEDALEEEVVTKLAILVARQETEPLFRVCEALERKRCPTPLSLGLQILKDWGVGVELQGRTLLLNGNTVGPSQATRKLTGELVLRREAERLSRWRSKVKPGCGMTGGAWRDVPGIDVHLSNRWLVKGALSPTVVSNSLAIRANTVILRGSGGGYTKGTLLRCRGCGNTGETRRHIVSACSLGRQKGAASRRHDNVCRILVRAICHKLNIEPPNSANFPHVVVLEGSGAKMWIDFPFVVPHKIRHTRPDIVVLFEWNGVRRLSVIEVAVSDVANMQTQHIRKSHRYGTNSTEPFVAGVTPTYRNDCLAAQLRAKFKAQQVDVIPIIVGTTGETLDGEFGRIRKGLPMLTKLQMPRLWSEIQRAVILGSYRILVEHLALPKGGA

SEQ ID NO: 137942 - protein, 182 aa, Heterodera glycines
  unsure (1)..(182): unsure at all Xaa locations
PTRHLATLRESXTPAVYPRLIKFPWLNIQSTGQKSDTVNVHKDHPSPLFXLDSRIPRVRASSKLVVQRQPNAPQAALTTSPRTIPERTARSHGQKPPVSRNSPADPTXSQFFSRSYESNLPTSLTYIILSTRGCSPWRPAADIGTIRQEIQIASLAFSRAVWSARDTTGTAVLYGRNIPISG

SEQ ID NO: 137943 - protein, 178 aa, Heterodera glycines
LTTGGRGRFGFGRTLPLGPHQGLVSRRGGKSRLFHATARLTRPLEPILFPKLRIFADFPYLHYSRLEAVHLGDLLRISVRSGRRFKLPSHFQGPCGAHETPQEPRCFTGATSLSQAEPLPGTHTLNEKRTLARTPHDVCEFICVTAQNSSCEPSFLAWRGNEPTSLSATGWTNCASTE

SEQ ID NO: 137944 - protein, 159 aa, Heterodera glycines
NQSSPLLMPRSTRAAMSCSSRATRSGSRFCGSGGPAPRLYIWSGGVLPTRLTSRLNSLFSSTSITTFPSSISSAAHPIARPNCGLTSWTSESGSSIGSGSDSVGGCVNTSVGAGPSTSGTKSCSLREGVDGTLRFRGGTTSRTALRSRLRVILSVAPKS

SEQ ID NO: 137945 - protein, 78 aa, Heterodera glycines
  unsure (1)..(78): unsure at all Xaa locations
MDTLSGALPFYRLSKESMKVVVFHWRLAAPTYATPLMILHKVRLESSSTGSSFPAKFAKPVPLAVVSLDSRXGQWESR

SEQ ID NO: 137946 - protein, 79 aa, Heterodera glycines
TKMDTLSGALPFYRLSKESMKVVVFHWRLAAPTYATPLMILHKVRLESSSTGSSFPAKFAKPVPLAVVSLDSRGQWESR

SEQ ID NO: 137947 - protein, 20 aa, Heterodera glycines
MCQAGHKNKLLGRLMVERQI

SEQ ID NO: 137948 - protein, 280 aa, Heterodera glycines
PNVAPYLGLNNQSKLQETDEPRKIIIPGKRLEEKTPDPESDNDTINELTPEPQTTSTLKTPIPIKTIIHPTLLNGLFRDVLLYLAGKKDETPRGAKFLKDRLLKDPTVKDMVDKSKVMWGRGRKKAIKSIKTPGIAKKIDPKITTDDVNKFLEKQRTYTIHKPIRKRFPRLKTIPSGFHTDWQCDLCIFDQLKKHNDGYKYLLVCIDVLSRMIFSAPAKSKKSEDMIEAFDRVFEKSKIIPMKIYSDSGLEFQAGKMKKYFEEKFIIKNVMYSPDLHAGV

SEQ ID NO: 137949 - protein, 32 aa, Heterodera glycines
MWGIESRYISEDALATEWQFDQDDKNGRMEEK

SEQ ID NO: 137950 - protein, 88 aa, Heterodera glycines
MCDPWHCGVGAQHSPVSIACDGAETERMLGVPKDGELFLSRMKPEETLVEVRSDCAVQICCLTWGIFTMIPGVKRKNRDTVAKFSTYT

SEQ ID NO: 137951 - protein, 172 aa, Heterodera glycines
MIELNFFGIDVDLALVLIPNIEAIPDEPLDATDVKSMMEIMAFSLNPHEGMLKSLSGNYIYGNFVGFFNGAALSILAAKIILWYPNGSVPFMFEKLMFILMNRKWPMPIQLTEELENNGFESMSWNSSDKSTALLMPIITPSCLTQNASQSVNKSTFRIIQNTIRESNNNTF

SEQ ID NO: 137952 - protein, 581 aa, Heterodera glycines
FDANEEAKERLINFIQFELIEDFMTILYSTDQKDFDEKNKKLKDKLEREEDEKKQREADLADQNMEQLIGEEERVKKLGQQMAARQTEKRKRRLESEQKRKLERQRRRLLVPSSHGTIIDQCNDEALFDTPSRYDESPNLSPSRHSDSPSWNSSENMLFSPLRHKVSNSLKISTSNSPRNWSNSVQSPVSNEKWQNRILADEFRTELSNLPKFISDEFLHFAYAQFLTNPTEMQRRILDIGIFVNEILHRTKIVAKINKILAIKRANEEERFKFKQLNEMDTSLFLEERLNETKILAIKTEGDFEKFAHLLYGILKRIIFEMEGKKIDIKLDEEDEEMKMVRKQLHRNKLAQAIEIGTPHGPKSVKSIWQSMDKKLQGKMLAQITGTSKQNLADRFIEYYLNGWRALGEQQRIDRKLYKEYEGKFMDKCKTNLGTNFPQNTQQIYFKSSEEEKHEEFVNFLNLFYFKLIKKNVIMKLVNLLRENGFHEAQPTESISALNTLKSLISAWSNDNARVLETGSQLLGARTTNADIDIICVMRQTLVTQKEEMDTFFGKNYCNLNERICDDNSLYCLLCKALSLN

SEQ ID NO: 137953 - protein, 77 aa, Heterodera glycines
MKDEEEYQNNRVRPFEIDQTRGIADRPRLKKYIENDSAIRQLVIAYDAKEEKNDDDLIRHIHALQYRVGMKGFEGWD

SEQ ID NO: 137954 - protein, 166 aa, Heterodera glycines
MDRNSTKYKDAVVATGALGIGVAIATTQFGLLVGSAATNLLLDCLISTKNAGKDAINRGLSVEQSIEKRIYAAIEATQEIAKRKHFGTAACCGGPRVGAEGARHVSRVAYRSPNQLKDQRTHRGTAAAADVCPHRAVVEVHCPRGLRQAAPGMDVQQSEPIVDIGR

SEQ ID NO: 137955 - protein, 452 aa, Heterodera glycines
MLADQQKMVQDQSQQIAQLIAIRQNAPNAAAQPNQGANSVPILPDISPFEPTDDKSRISEWIERFKFALDCTAPTADDEVKVKCLMNKLSESAFSEYSRSVLPSSVTDFSFKVTTEKLEKLFAKAQSIFIDRYECLKAVRGEGEQFRQFINRHRKLLTDFKFDELTKEQFNCLMLLMALKAPNEAALRQRILTKLSADGANISYDGVVEDLISFQSTISEAKAIEATSSSRPVNSIRQNSKPNNSTNKYVKESPKPNNLPNKFKERTNTEATTICWRCGFGVHRPDECRYKTSKCRKCEFVGHLDKQCERVQEWRKRQNAKKKGNNRVGHLRIGMTTHAVNSISLLKTAVLFNKKPVEFHLDTGSDIVVIDQLTHEYVGRPPIEKCNEIGKAFDGTKISFIGKGFGTFKFGKIEVEQTFYVAKAGSLNLLSCKMMDLFGLLDELKLRISNPT

SEQ ID NO: 137956 - protein, 47 aa, Heterodera glycines
MKFYLLIFVPIREFSGYLMPISCRAGPGPKHGQLSTTEYRGPGFDQF

SEQ ID NO: 137957 - protein, 27 aa, Heterodera glycines
MKFYLLIFVPIREFSGYLMPISCLIIK

SEQ ID NO: 137958 - protein, 52 aa, Heterodera glycines
MTNTRKESKAMNGHGRTQKSKGRPTGEEKKQGQAIDQQKSCLPLNILFSIYY

SEQ ID NO: 137959 - protein, 38 aa, Heterodera glycines; identical to SEQ ID NO: 129423

SEQ ID NO: 137960 - protein, 386 aa, Heterodera glycines
MTPDENYGEHLAMASAGKKHTFLLGHKRFSSRTYMEEHAVSAASAWEVHGEVYEAVRLVKENFTEQSTRWMCFACQRTDHTFHRCPNKAILDEFKKFVHEFPQDQQKFRLVLSDKIAMDGKMLCELVPGFGRVLKWHNISISTIGVSQAPAPLLNADFLIEGRNVALVREKITDSFHCTDLKAAQAFNCTLGIDACTGCLPDHTDGTVSCHCRVANLEGLMEDPQRRLPLSFRHYELRNHGRRIFAITGYSPVQMNIQMDSLQMSLEMHQSLCTITPKHISGCYKCATGAQFSYSCHTDIGQTLADIQCEDGSHFTSKCGPNITDHTVVLPFQHAEISTTCQVMCLAGRTKFSLVGQLHYIPLRQQSEFGARVSESLEEASNSRLG

SEQ ID NO: 137961 - protein, 63 aa, Heterodera glycines
SLSRTSSPSRFYEKLTRGASIGGGGGGDLRTLKPLPSTMSYDLKNIMRMTEIKTDIGFARAFV

SEQ ID NO: 137962 - protein, 65 aa, Heterodera glycines
MGATSSSAEVAQATTSSSSFSVSSGGAFGACRRIASAFAASAAAFAESTAARADAGARIAGAENG

SEQ ID NO: 137963 - protein, 68 aa, Heterodera glycines
SELIFPVLFLLSHCFFCCLCARFAFRSSLESSFFFSSFSALLLFPMILLFFVPQHTARTSCCLCYFCR

SEQ ID NO: 137964 - protein, 97 aa, Heterodera glycines
KSQLNADGHEICYDELLGNAIDGSYTYNPIQSIYDNEDMAKFTPTKNYEIDYLRSLPPLVTNGLFPLLKYAEHLLKLTHPEVIEGIKRPHHLVKEFR

SEQ ID NO: 137965 - protein, 49 aa, Heterodera glycines
MGRTRQVPQTWVIKPKKEVQWGRMTPRMKGIFDAVRTLCDPSLTLPMQQ

SEQ ID NO: 137966 - protein, 24 aa, Heterodera glycines
RTLSTAVRQRSSKIYSMPQILWAG

SEQ ID NO: 137967 - protein, 42 aa, Heterodera glycines; identical to SEQ ID NO: 128558

SEQ ID NO: 137968 - protein, 204 aa, Heterodera glycines
ANYSLSDIVLQPYDAFTKIHTVKLQHILYNERNGIRSGQISHLVEGYLTKYGLPLEHAAHNQCTVLAKFGSLNERTIASFTDALENVLFHYPKKRETAPTYKYDEVQINCYDECEASVDIDDNVSDQRARVRLFCLAFLRGTSFLEIGLNDRRREGKEVVRRKDILPMYTERWIRFEAPEFHETVDKGVWGGGPGEAESRHATD

SEQ ID NO: 137969 - protein, 71 aa, Heterodera glycines
MVNRGWVPNENIESELKKGKQLRESELKDLNAVVRSAEKGSPFVKNDPEKGIWAFKDLEEMARQSDAVPII

SEQ ID NO: 137970 - protein, 134 aa, Heterodera glycines
MPGSMDKYHQTTPLLLKCFVKRFPHIKQPSPKLLAFMRNVLRFADWIRDEEISAEIWSLIVEKLLHIDVALCFEREEEEQQPTNSNRLKQKKLDNETASEETTNPMREKLNTLVEFILNYLGDAEASKVTLIKE

SEQ ID NO: 137971 - protein, 244 aa, Heterodera glycines
SFIHGLFFSFNTITTIGLGNIRVQSWYLLGNIRVQSWYLLLVILYVIIGLAVITASSLDLCSSTLKKTFTKLHYFGRKIRGKTQLKSHFSRDMREAMKIISAKIRGKTQLKSHFSRDMREAMKIISAMKKIRGSKERITLEDLGSKERITLEDLKRFLKRFLEVQEHLLRQPYVPYDVHIFKWQPYVPYDVHIFKWIEDAVGIPFSYDKSPDWHFPLNASKASPPPSVQYMQYCFNNEESVSLG

SEQ ID NO: 137972 - protein, 225 aa, Heterodera glycines
MEKSGGDSELEGGSRTELAQSDKGILLALALVLVDGIMVLALANDCWHGRIGIGIETPSLAPIRGVKWNDEFRRRYDEFEEGMSGEQSSGEHETVLQKTMKVIGLNILLFTYISLGAIVFIFLEADNELEQRRSKLSQILHIYELIMKETVAICRSAGATSLSALNGSMVERRMRPLLSVLSRTHEYDERFTAEAQMWSDSEHTLATKWTFAASSLYALTVITST

SEQ ID NO: 137973 - protein, 30 aa, Heterodera glycines; identical to SEQ ID NO: 126607

SEQ ID NO: 137974 - protein, 43 aa, Heterodera glycines
VVVKNFWVRNYFLKSVKHPISALLCRASAGNGWLSICKKLDWQ

SEQ ID NO: 137975 - protein, 116 aa, Heterodera glycines
MEKIWSTIEKGETSKTEKKNLTKETSEEVKSDERIDEEKSDQKIEEEKSKQKMEEPKSEGEKSDQKIEKENSDQKIEEEKSKQKMEEPKSDQKIEKENSDQKIEEEKSKQKMEEPK

SEQ ID NO: 137976 - protein, 104 aa, Heterodera glycines
MRKTFFIDGITEKGAAFVPAYGRLRQPFNINVAAHFYARHRVKLHHPYIPCIVERFECGENRNYPMELLEIVKEGQQPIGQWLGNLFKERDDIAAARQPCRTKL

SEQ ID NO: 137977 - protein, 87 aa, Heterodera glycines
  unsure (1)..(87): unsure at all Xaa locations
EKNDFFVFGAVPPNRCAQIYGETESFRNSFPIACTLILRWIFAPHNCLSTPNGHLKKSIFLFSGQSPRTDAPRFMGRPNPSGIASXI

SEQ ID NO: 137978 - protein, 80 aa, Heterodera glycines
MNCVALSRKSITFFCELLSPPLPVKLDDLVKRKRQIGDQMAKVQKIEKIKPAQKVWDQKDLNLQKKKLNFLHLSLLVTGG

SEQ ID NO: 137979 - protein, 67 aa, Heterodera glycines
PLDDDQHYKTFPYNKATQREAVRLINEARRKSSSQVRKSSKPTANKMDTLLESNKFIVDEENEEKEE

SEQ ID NO: 137980 - protein, 115 aa, Heterodera glycines
MSDNFTDEVQSSSIFPSLLNTSQVPSESFNNSSVQNVHLAGLTLYAFNSFFHGNPSPIALFLFATLISAVDPVAVICVFEEIHVNQLLYICVFGESLLNDAVTIVRIRPFFSFIL

SEQ ID NO: 137981 - protein, 103 aa, Heterodera glycines
FQSLGLNPPTFRSTGLNPPAFQSLGLNPPTFQSTGLNPPAFQSLGLNPPTFQSPGLNPPVFQSLGLNPPTFQSTGLNPPAFQSLGLNPPAFQSTGLNPPAFNH

SEQ ID NO: 137982 - protein, 50 aa, Heterodera glycines
MDTVDQSRAIDNLPPRATGDQWQCTAQFGKTGVSMSNALFLPPLVKEFFS

SEQ ID NO: 137983 - protein, 328 aa, Heterodera glycines
RSLIIHFYSLVNFLSPSLFSYINSGTGIENLTSLPNMINLTSLPNMIQNIGGQDQQLWMDFIMEASGVVENAEKIEAVRKERYEREIRTKEGTPLYFTKQNIRSTIGEMEKGKIEVFEQLHKLMGSEQIKDMNRTGFALLSKQQLDLLYGPNSEFHDEKVLKRFLALNRSVLKRFLALNRSTIQQHIERDIHSLAQIKSFKITRKFILVSWAWPSNFILVSWAWPSNPIICLQTFLDRSPIILSPIIFSPLILAPAVLGPVILSPWAFVPVILSPWAFVPVILSPRLLDPLILSPPILSPVILVRLLLHRPPILRVPQSPLALHPIIL

SEQ ID NO: 137984 - protein, 109 aa, Heterodera glycines
MVIRLPISPAALFVRPQYSHFLKAELCHFNRYGKKVVVAEIGLSWNEPSASKSMLDDMFKRVKALGNNGIGIFYWEPQASPGWNHYQWGALDNSGKFTAAMESFKTTEE

SEQ ID NO: 137985 - protein, 40 aa, Heterodera glycines
MQTARKGADQANSLLIYGCFSTGHKSQNKAIFAHLQKTAS

SEQ ID NO: 137986 - protein, 128 aa, Heterodera glycines
MAQLNSELIRANCEDSGFIDEIELRLISGALQFVHPNSPIPFERIPLHKIKHIISFENGRGAVNVLLVENFAYSSDHKLGLVSKCHLFETQRGDDDRGVAMVEEFCQGFKQKFGEILEKLSAEQQQKQ

SEQ ID NO: 137987 - protein, 228 aa, Heterodera glycines
MPSLEGICRRHGNGRRRPSEGTLFSSICSRGQSRQFSQLLFFGLIGLMPLSLADSVPLAMRIKVRFCGFGLSLGLRPHCSDFTLSFPASPQCAKNGITSESGEFIGIAFHLFVFRQGTDTSKLEKFMFKMGVFALLFVFPSLIASACDLHQLSVLIQWLPHTVGSAGSDDGIDRGDGLGVMDVVAENTELVEEGIALWKDSGQRHREEKGRNRHENGGNGKRATGDGQ

SEQ ID NO: 137988 - protein, 55 aa, Heterodera glycines
MDMDYSVDVKMEVHPAREPPPVKYEDTEDEAQVDKDDEPVSTDDYTEGTDSETED

SEQ ID NO: 137989 - protein, 95 aa, Heterodera glycines; identical to SEQ ID NO: 129573

SEQ ID NO: 137990 - protein, 16 aa, Heterodera glycines
EAIPEGFGLPINLGAS

SEQ ID NO: 137991 - protein, 53 aa, Heterodera glycines
LFFEKFFVFFSAGTASDNVFYLFRKINFFFLLIYFNYISSLHFLINIFKLSPY

SEQ ID NO: 137992 - protein, 46 aa, Heterodera glycines
INKKHCQRQCLPKKRQKNFRKKAKKIENLNKFTSEKRKKAYNTFDS

SEQ ID NO: 137993 - protein, 76 aa, Heterodera glycines
GIEGVVSFFPFSLVNLFKFSIFLAFFENFFVFFSAGTASDNVFYLFRKINFFFLLIYFNYISSLNFLINIFKLSPY

SEQ ID NO: 137994 - protein, 147 aa, Heterodera glycines
MECALFSTGRDQTNLRGWTATAAETIRQEATAWHPKQWVRLFHMPKFCGLLKSALPEQNQRNCVAAAHEIPLSSSQVAHGADAPPLLFEPLLQMCKSNMNQEVELLSKLSAAASQPAVKKETTTIHRLEFTLITAYFKLFDPTPTSA

SEQ ID NO: 137995 - protein, 282 aa, Heterodera glycines
MSIRALKRRSVRSSTFFEKDLAVLLEFCGQQPADVVSWRDFEASAGSFNGWSKIGEGAFGEVFKGPLDGVCIVLKVFCFNVLPLFQVFFKVIPFAVNEDQCLKLVNGDHLKPAKFVFNELFITNELSKLSEAGNDFVTPSFTQLRMSKVVKGCLPSKLLKAWDDFKKAKPELVENDRPDIYAHEDLHFAIIGLSYGGKDLEKYTIKNGRECYSIFHQVALSLAIAEDVLEFEHRDLHAGNILVEQCPVDEKIRYLYRGEQIDVVSNGVRASIIDFSISHLEK

SEQ ID NO: 137996 - protein, 94 aa, Heterodera glycines
FRMIPPFRIDLVNKEKSYSPPTGLALKRKDSELFSRPCTFLEDTRFYLLSKRQPIPAALRRNGLTSKAIDAIVKDLFGKAKSGEAKSPSPMDHK

SEQ ID NO: 137997 - protein, 51 aa, Heterodera glycines
MGSNGNPEEDLINLTDKLKKKLAKHGEDEEEEAKLKRRKSKKGIFDRTIQK

SEQ ID NO: 137998 - protein, 29 aa, Heterodera glycines
ESDSVDLQCFRHFLEPQFHRKYFPDRLSS

SEQ ID NO: 137999 - protein, 17 aa, Heterodera glycines
HKHLFDLFYHIHNLIKI

SEQ ID NO: 138000 - protein, 21 aa, Heterodera glycines
VTGVSIIAVLFLVFLMPLQNL

SEQ ID NO: 138001 - protein, 57 aa, Heterodera glycines
MNRDRHFEKKPGSVPGFCVGSGSDFLDKNPSPGNQGSSNLDSGLDLDFLKFVLKSQT

SEQ ID NO: 138002 - protein, 28 aa, Heterodera glycines
MHAKFVQIVAIACQWPEATLTDLNILKY

SEQ ID NO: 138003 - protein, 67 aa, Heterodera glycines
MAHSAKQKMVKRSAYANLGPFFVEFYGGNHFIKQFIWQLFRGHFMSLGATFNNVEGRTKESNQNQID

SEQ ID NO: 138004 - protein, 143 aa, Heterodera glycines
MLEWKRKRNKKWKEKRERNRKRERKWKEEKREERQELKEVQKEEEKVEKKVEEKMEEEQKVEEKKAENEKWEEKEEDEQRMEEKEEQKVEGKEGDEQRMEEKEEQKVEGKEGEDSGAVEADEDFILKDFHDECTEEFILKSSN

SEQ ID NO: 138005 - protein, 95 aa, Heterodera glycines
MAHSAKQKMVKRSAYANLGPFFVEFYGGNHFIKQFIWQLFRGHFMSLGDAFLTYVLSLLILKWKDALTIDNTVFLVEREEKRIKRETVKGCAINA

SEQ ID NO: 138006 - protein, 174 aa, Heterodera glycines
MEEPKSEGEKSDQKIEKENSDQKIEEEKSKQKMEEPKSEGEKSDQKIEKENSDQKIEEEKSKQKMEEPKSEGEKSDQKIEKEKVDELGNSESIDESVNKSGEEASNVSQKTEYDIQSEEMDEKWNKIERKRTESQRKRQSQRQKQLISAKICVKMSRLFKNIKMKFCITCSQMP

SEQ ID NO: 138007 - protein, 40 aa, Heterodera glycines
MPSNVRQRIVVLSLAWHCPKFVFRSSLFRISPTMLCLPAC

SEQ ID NO: 138008 - protein, 19 aa, Heterodera glycines
MEKACKIWRDYIDNTGVAS

SEQ ID NO: 138009 - protein, 92 aa, Heterodera glycines
  unsure (1)..(92): unsure at all Xaa locations
FLSKKIFFWVFGAVPLNRCAQIYGETESFGNSFPIACTLILRWIFAPHNCLSTPNGHLKKSIFLFSGQSPRADAPRFMGRPNPSGIASXIAL

SEQ ID NO: 138010 - protein, 219 aa, Heterodera glycines
MSGSALCPWAVNDLVRDGSDRTAKAMGCGGTNGEQNVRDCVKRAELEDLMDAIQKLDLIRLDLAMTRFNPRVDGEFVPSANLSLLIRTAPPKPTIMGFTPHEALFLTEYAFTLGVPLLGNFELDEDDRRVRAEMVHAYGSFVKNGVPNMLNGERDWPPLGTDRGQPVRLVHIKRPNTVAETGPMDVAQKETFWRRLSTLKGYTEVAGFPKEMAQLATEF

SEQ ID NO: 138011 - protein, 56 aa, Heterodera glycines
MLQRLFVGKNFTCLPLFTSHRSYPGSNFTFPIDWYENKNPTFNNWSRKSAWVRLKK

SEQ ID NO: 138012 - protein, 25 aa, Heterodera glycines
MPVVVLRGVDDAYPPQKKAFAMLRW

SEQ ID NO: 138013 - protein, 177 aa, Heterodera glycines
MASEATQNLKTQICIKIFKTENVCGVSVPDDIETNLVEFVFDIGIMPLQNNVFNSEKGQQSGKTTRDDDYIFEVPTDHDHGNAMRSSRTVPITVYEAHKLNGKPIVINLGKIDPYGQFLNRRLFVERKNDLGRNYHALLYAIATKNGETEEKKVFVGFAQLVRANGETSTSEQRQVN

SEQ ID NO: 138014 - protein, 22 aa, Heterodera glycines
MVINSKISEKECNFLGSDKPFL

SEQ ID NO: 138015 - protein, 53 aa, Heterodera glycines
MRHVSVELTPPNGRIRDFHMPTRLLSLDPVDFYPTLQAWIRQEDAFRSELGPS

SEQ ID NO: 138016 - protein, 59 aa, Heterodera glycines
KKGGGKRVGKKVSPSSSSHIHELIHKNKKKMFLRPSSASQAKSSPTHTVIRHAHTIGST

SEQ ID NO: 138017 - protein, 165 aa, Heterodera glycines
MQKLFFPLVNLYKDNCLQLMHEKLKNQQLDTWAQLKNAILKEKEAREQKMNELMSQKTNKSSTKIIQKLSRKSIKNHSKKQLETNLEKGSESIESGQLPSFYGTEQKMLRPKERVNKNIYKVLDVDQTLIVQGIDYHYFYRFDANAISCRHCPYRRPAQKNLKPT

SEQ ID NO: 138018 - protein, 31 aa, Heterodera glycines
MPTVFNRSIRSYSILLTYVWSRGRLDQFPSK

SEQ ID NO: 138019 - protein, 155 aa, Heterodera glycines
MNGSKSDETRAKITADVVEQKIKVVDKEKQQINENLYFAGISTKKTAEENAELKRQPFATEQRVLKLDVRKLFINLKGAKKRIISTIMKNGERTLDEIERVEKGHQIGHGTTKVGKRIAHFQVGSRIGTTKIRIQGTTHEDGNRTREKNDDWVIE

SEQ ID NO: 138020 - protein, 276 aa, Heterodera glycines
MTNSSLKNVLTFANFMDDLFLDYKKNDKMDSVTNEAPYPRDGYCEKQKRTVFNVTFVKWAAELAHFHGKSSEEEYPNFKLVSKELFRYEFVGFDGFFYFDQLLGQQIANKFKNEFFSPQNPMANVVKNQILQLTLSLAARILLCVIIFPFQIIQIGDGQHLWTQFLSPTQNWVEYDTEQQQYIDNFKFILKLSEFKLTYYEMFNVVDTIMNRENEKNGRSQTSPARALYTFIKLHFASLLPPPSLALSLANGALRTNQPGSGAFRFMIFNENIRIN

SEQ ID NO: 138021 - protein, 426 aa, Heterodera glycines
MNKISLLKLASEIFGIKSEQVAKTNKDDWKKFQQLENEVKILEERGARIYSTMNGKRKPHINNKNWVLSMDKPDDVIFGGTKSIKELNSQILKIEKLPWSQAGPGIVVDGKFYPLMSLEIGGIIDQFDIFNEFWKGIERANKTPKNPENLDQNSEEEKINISENSVKKSVENSETIQFEIIGETNEIEFETMCQIFKEERNVHGKDSVKRGDGLLNLKVKGSQPQVRKMSLKGIIKWTILAIFILFGHVKGMDNTKKLDESIIDELSDDGAIEEKDEKSQMHMSILNCPPTTSNAPQIQAEIGTLIQTQISAMAENWLRSAFQQGPMNEATNKKGNGGQKMGKKRAFPFSQSTAESGESWRKVGKTGASQWQRTHELTTAAADAVEALAEHLRDYNVAVSILLVTIAAGLAEMNNHYKGNFKGNRK

SEQ ID NO: 138022 - protein, 39 aa, Heterodera glycines
MFYAPSKFGFYHAFIASLSVIIVSELGDKTWFIAAPKIQ

SEQ ID NO: 138023 - protein, 25 aa, Heterodera glycines
MGQALSEPITTKNSASCSNDRYFVG

SEQ ID NO: 138024 - protein, 100 aa, Heterodera glycines
MKRRRWAIILLGYDFNIEYKSTSEFGHADVLYRLIAKTPLPDDERIVASISTAGSFVLNAIEKGLPIVNEDLIRAADQDQTIQKVKKFVKTQWPNNPPGK

SEQ ID NO: 138025 - protein, 79 aa, Heterodera glycines
TLEEEKSMGRHNHQATDAHIGFTFFENDIEKAKRKSFISRPEASFSKNKKKIYNTKGGGNLPTLKVSFGSPMVTWVPLL

SEQ ID NO: 138026 - protein, 92 aa, Heterodera glycines; identical to SEQ ID NO: 127421

SEQ ID NO: 138027 - protein, 56 aa, Heterodera glycines
SRAGPGILGKTGTGTCRDLRSRDRDRDLDFCSGPGPGTGTNREFLKIQKIKKKIKF

SEQ ID NO: 138028 - protein, 24 aa, Heterodera glycines
RTLSTAVRQRSSKIYSMQQILWAG

SEQ ID NO: 138029 - protein, 128 aa, Heterodera glycines; identical to SEQ ID NO: 125618

SEQ ID NO: 138030 - protein, 105 aa, Heterodera glycines
MASYWRLKSIEEYELEMSTKSKETRRYVFNCLDDIGQVHLPSDLDDIDRMCERSDRLEFVDILKQMLSMDQDRRLTPTRGLQHKFVKMTHMIEMGRTKYCQVMNG

SEQ ID NO: 138031 - protein, 32 aa, Heterodera glycines
QLPRLTPTKNAHIQKSDEFKVNSIIYDKMVGI

SEQ ID NO: 138032 - protein, 212 aa, Heterodera glycines
MFTIRKTSLLRLCLFASLITHPFSVLSDPTADAIDGISVAEMRGFLKREHTFVKPYQYADSDLPFWDIIGNAILTPQYIRLTSDLQSLSGGLWNKMACSIFNGMAIWYVQDPDTLGPVFGSKDYFRGLGIFIDTYSNHNGPHQHSHPYISAMVSNGSLHYDHDVDGTHTQLGGEHNDNHDVLSIRMFEQEFARVEKPFESANRDSVEPFAEK

SEQ ID NO: 138033 - protein, 73 aa, Heterodera glycines
MAKLRNLCWSWFGFYTDNDTQTIVPMEQTELYKQVIHSSLTHRSMNQSEYETQLNRSKTDQKSIDLLFRIALD

SEQ ID NO: 138034 - protein, 48 aa, Heterodera glycines
MVMLTVLKKARRKEQEMRVLILGLDNSGKTTFLKRISGEEIGEIAPTF

SEQ ID NO: 138035 - protein, 87 aa, Heterodera glycines; identical to SEQ ID NO: 129152

SEQ ID NO: 138036 - protein, 118 aa, Heterodera glycines
MEETIWHSIYENNGERKNENLLANKKRKTKRIVTGQFDSGQSDRGGQSDRDGQLDNGQSERDGQSDRDGQLDNGQSNRDGQSDRGGPIGQRWTIGQWTNPTEMDNRTEMDNWTMDNSD

SEQ ID NO: 138037 - protein, 54 aa, Heterodera glycines
MRAKFATIETGKKETMTFFKTPGPSQLSKTYSDRNQESGKTLTRPGLVSASRRQ

SEQ ID NO: 138038 - protein, 72 aa, Heterodera glycines
MPKMDEKGNYWKICTTISQWPANADADAKLAACCQNMAAVKLMIEINIEYNAIISKNEENPSDGTTSSNLLD

SEQ ID NO: 138039 - protein, 64 aa, Heterodera glycines
MFQKEATENANGKIGAKTSAEKDGPVLLTDVDAEAFKVMLRFIYSDDLSELNGQNATEVLYAGE

SEQ ID NO: 138040 - protein, 105 aa, Heterodera glycines
DFHEHRQQRMDHDMYGLRPAHRFFQQHPAVNDCLANLLASGRITITDDISDDISTIGEHSICVKDGREFSADVIILCTGYNFGFPFIRPAELIPIRKQFLNLHFL

SEQ ID NO: 138041 - protein, 111 aa, Heterodera glycines
SLKQRLSDAGVDFKEDLEKLRELKILVDFDEQGYLLQIFSKPCQDRPTLFLEIIQRHNHQGFGAGNFKALFESIEAGFGAGNFKALFESIEAEQNERGNLFYKDVAVGGEK

SEQ ID NO: 138042 - protein, 176 aa, Heterodera glycines
MAEGKHSVNDKNGTSVLQKSDTRTDCIDLRCDGPIDQCTEMLAGKHIRHLLGESVPSDQLLLVPNASVALELFVRCCCSPGGDFLWLAFLHPPTDVVLCPIPFADEFLSEEFRSNSSIDFVTVNFPWNSSLLNCAELQQTTEGLGKVGRVIGPLADQPNQRTKIIERRRNKMRETL

SEQ ID NO: 138043 - protein, 96 aa, Heterodera glycines
AKEIAELSFAFLRTVSNFRVDHLPSERVNLRIGFHSGPAVAGVVGLTMPRYPAVAGVVGLTMPRYCLFGDSVNTASRMESNGKAKKRIPNSANCFS

SEQ ID NO: 138044 - protein, 77 aa, Heterodera glycines
MACTTESNGISYSMFKTAYCLYVFQMTNAQEDSPGFELIKEGCTAVNIRFTEAVPNEGVTLIAYGEADGLILIDRNR

SEQ ID NO: 138045 - protein, 122 aa, Heterodera glycines
MTVTSNTEFRLIECVPILEEVAREFGCITPLPNLGSHRDYRVSGCMMIRTLTSLNRLYIFDAEDCIEVKGFLRQEDGTSQKVVNEYYEKYDGLNGFAEFIRNWAFTFFCFHAFDDDDTSDED

SEQ ID NO: 138046 - protein, 108 aa, Heterodera glycines
MDEELNKKEEPFTLAECCTAFDLVAVMFDCKIPVPYEEEQKRYVFEHQDKPRFIYISEEGDQIEFKGIVKQFGYVLSVETIYFDKEKGIDEFYNFLRNNVMCFFSVDS

SEQ ID NO: 138047 - protein, 151 aa, Heterodera glycines
MADFAAVSVQIDAVLLSALIERPLRTELPHICHLSDVGAMFPNIILTNLIEEVCMACIHNVPEAKCKCPLQWVWRGEIGFCRNAFKRLHDTEEVQQQRRMTATTTICHRKNPSLYVDTDEPTFRYKYKQMRRKANRASEGLSNDIKKVGFG

SEQ ID NO: 138048 - protein, 59 aa, Heterodera glycines
  unsure (1)..(59): unsure at all Xaa locations
GMCLGFAFRISPFALFAFFGVSHFAFRFLARNATFTPLRIGLXSHKIFQNFTYKLANFQ

SEQ ID NO: 138049 - protein, 25 aa, Heterodera glycines
MVTAGQLQDLCSRIPRLADKHQNHK

SEQ ID NO: 138050 - protein, 104 aa, Heterodera glycines
MLHFPLNFFQPKTVSPPKFKPIGELSDYQQQINGSKGMQEFSNIRLATPPPQPSPMLHNVPLPPAISVNDMMVDRNYIAKGVSSPKFKPIGELSDYQQQINGSQ

SEQ ID NO: 138051 - protein, 44 aa, Heterodera glycines; identical to SEQ ID NO: 126591

SEQ ID NO: 138052 - protein, 92 aa, Heterodera glycines; identical to SEQ ID NO: 131128
  unsure (1)..(92): unsure at all Xaa locations

SEQ ID NO: 138053 - protein, 202 aa, Heterodera glycines
MKIALGKEERRKRKRGKGKIRSKEGEKEEEKDENSIGEGGETEEKERKRKNSTEGGGENEAEKRDWICNDVWMDIFPSFDHPQLGLKLALLSPRFDALVDKHFDGKSELTIWRQIKIRKDKGPGPKLFVLFNDKFVEFPLPDDRPLPSKIRFKRLYIEYIDHSVIAFLRSNHQIFDKRGIDLQLWIPLSYTTDGQRIWDILT

SEQ ID NO: 138054 - protein, 45 aa, Heterodera glycines; identical to SEQ ID NO: 124527

SEQ ID NO: 138055 - protein, 135 aa, Heterodera glycines
VFGAVLPNRCAQIYGETESFRNSFPIACTLILRWIFAPHNCLSTPNGHLKKSIFFVFGAVPPNRCAQIYGETESFGSSFPIACTLILRWIFAPHNCLSTPNGHLKKSIFLFSGQSPRTDAPRFMGRPNPSGIASL

SEQ ID NO: 138056 - protein, 19 aa, Heterodera glycines
MTMNGSDNRVERIRNVQKI

SEQ ID NO: 138057 - protein, 113 aa, Heterodera glycines
LIKNKSSFWSIAIANASSPKFHRRCHSPSVSPPPPPVLLFLCSSADLTPSPPFGPQLFLISAILCLFLLLSASSSAVILQLLLSVFCLRFRPFYNCIILSIEQLWHYFLLLVC

SEQ ID NO: 138058 - protein, 394 aa, Heterodera glycines
HQKKIKNAQQTFSQMLLPLFGSEYGTKDRRFVYCLFALSFFANFCIYAPWAFKKIIYQASNDLIDVEYLILRCPLVILRCPLVICDRKDTPWFRIYEWVREFLTRLLPFVLIAYFNVNILITYRTNKKDRLSLSSQSFHRKAVVEKRTNKKDRLSLSSQSFHRKAVVEKSEKEEKRLFTVLFAITVIFFLCTISEKEEKRLFTVLFAITVIFFLCTIPAAPVTIFISDRQSQSLPFQAPVTIFISDRQSQSLPFQIFRSASNLLEITKFALNFYLYCLINPDIRRVCLRVLIRRVCLRVLKCNGWTSAEGTTDQCQSPIGYTERQTNHSNHSSGQRMASRTTPRRSSARNTTDSHRTTICSNKDSSHWHAQLTERMEKKMKKENEGICTFGAII

SEQ ID NO: 138059 - protein, 290 aa, Heterodera glycines
MLPYMASYMRNFTDPSVKIEHLIWVPTFQGCFPLAMVIGGFLSQRVGCFPLAMVIGGFLSQRVGPRLAAAIGCYTMCLGVLLSSWTIRHSYYGFLFTYGLMFGLGQGIAYVIAVSCVINWAPKMVGLGSGIVAAYVIAVSCVINWAPKMVGLGSGIVAAGFGISSSIFAPIQTRIVNPNNVAANKDGYFNDQHLLSRVPGLFVTLSRVPGLFVTLATAYFFMQCIGLLFICDPPDETFGETFIEDDFFLAFAFSLGSVANAIARVGWGLSVANAIARVGWGLLTDRTSFQ

SEQ ID NO: 138060 - protein, 49 aa, Heterodera glycines; identical to SEQ ID NO: 130195

SEQ ID NO: 138061 - protein, 38 aa, Heterodera glycines
  unsure (1)..(38): unsure at all Xaa locations
IFYRFLNISDFFXAYQNFIEPGSFYSLSNRPKFFLQLN

SEQ ID NO: 138062 - protein, 73 aa, Heterodera glycines
MGTAQCAHPCTSVPVLSPADPAVQRNSLALRSYPGPQSLFPQLKQQENVQAALTLRVIHHESCSRILAWRLFD

SEQ ID NO: 138063 - protein, 379 aa, Heterodera glycines
MSASTSQAPTPLPTTSHASVAGPWQRGGSVKSRNSLKLLKRKIFGGTGSKNRENGGCDVAETTISVLFLIKLCRNQFEFQLLQFIKSFLIKTAPTDENIVWTAPSSPQIGRTFNGVTGMPRRRNSARLRELQRLLRAYHEQRRSEWTSTPSSPRIHQRQQMPMKEAPSPVGYHDQNFDHHGTNYPVHIPVAKLSYCRGELGPERPLILQSHSVDQQQQQNLPGPNVLRRKINLSELELALLNGANTSCPSSLFTNSSQTASSLQQPLPTSATVVVHTQPPGHATAEQAATTVVEEKHAYRATNFQHEQQHQQIISLSKHLQYQGATTVTSTTHFSSAVGSPQKQQMDFLIKKANYQPPIDLPLISPSPYEQIISYVAPP

SEQ ID NO: 138064 - protein, 328 aa, Heterodera glycines
MASEKPNNKQKKKKKRRNKSDQMPKTHHGIVGQYAEIQNQQISGNQMASSPKLAKPQQQQNAKTYPKSGSSNILSLGFNQLVQRHFQQSQLPPKQQQQQQQNAVVEPMLKSARSEPRLTARANRREHWLLMSRPEIPGSSFLSPTPSIAALEHLDRVRDRISETKYVTAVFESRGGLGPVLSDVQAELEHWLGDTSLLLAIACEVHWSVPERFRSRQLEIELKQCLHAVLRVNNRRVLSLNDNDNDEETAAVTAKVSPADSPFLMPRHGPRHRSFSTHSLNNRSIGGGSGGRPFPIALARSKTEESCIRDAELDAFQGLECFTDEAPP

SEQ ID NO: 138065 - protein, 377 aa, Heterodera glycines
LFIKNDYFIGRPWLVGKIQAIDEDLLPCNRIFYTVLPKKSDIIKVQTKHHKSALIKKPPLFSTFKPNSTHLAIISRHGIPENFRSILHLQIVPNPSNIAEHHHLPQQMPLGIIRANNSHSLLEHQFLRQQIPIEFDGMALGNGHYNSLPNKVNSSVTYPKLSFDSIKFLPYGQSDQHQKIGTFDVIRQLVGIDSANAKLRFNPAFVEAFENGLYKFGISVQDAIGNKAIVYRNIHLLDDKFRLRFRFNESLHTIGANLTTFIGKLEKRLQGDYRIMPSLPIRDEENPGQNFVMCFHLWSPTNNGSGDAIVEFAESERLLSTNVQNSKANEQLHSLYSEYKVINIESCAAADSSTSSVLLNSDSFGSSMVQPNAKAVL

SEQ ID NO: 138066 - protein, 39 aa, Heterodera glycines
MLHTTPPDNPYSVYAKSNNKLTPSSMFAMPEFIHPKTLR

SEQ ID NO: 138067 - protein, 182 aa, Heterodera glycines
MICFHSLLSLLMLFIAMLLLTMQNRAVDSFLLSHRNLLVPFASTKMAMANNVAKLDTTNNNNIGVRRRHHFVSLFMMKALPKSGDGDDDERQIGAKNVLFQNDGNHLLLQPSANDGAIAPQRVHSRRKRLHMLSTLRRVGTPRRSTELLKRLVVEHQQQKQRHVPLKRILSFDLLWMFKRDF

SEQ ID NO: 138068 - protein, 18 aa, Heterodera glycines
YREAIPEGFGLPINLGAS

SEQ ID NO: 138069 - protein, 70 aa, Heterodera glycines
MSLQIGIPVLGNRLRTIPSLSLVNGFERINWMNEMSKNGRNERKNVRKCFILNSSLGYYVRHYFGVSSLF

SEQ ID NO: 138070 - protein, 41 aa, Heterodera glycines
NFLKYKPKLFGLFKKELKIFKNFIHLPFDRKSIREPYLTFN

SEQ ID NO: 138071 - protein, 348 aa, Heterodera glycines
MHNLSFELRSEDVLKGHDWHCRDSETEVFDRIVKQIQVKRRVDVEEHFRQIVVYKRKRAEEEETDEAEEREEGEKGQRHGEGARGQELTLEQILDPSDQPTTTTAAPSPRSSLLTSSPDVISYSMLQPFLPDRTDQQRNTVAAEPVQTKVLINAGGRKVYNLGVEFSKYRQKRRGQIPDPSERPLQGYSLPNLLKELALLTYELKSLRTMMTVGVGDGERGEGEEKPTTESIEWTEQREQLLGNLNAARHVRLALLGSVQGNFSIPSAPSLSRQFNENELPFSLSVTPSASRMQIETKGDARLLLGVRVLVEKRRRSRREPSDAEPVTLDLVQLRTQTNFIQQTVTIK

SEQ ID NO: 138072 - protein, 19 aa, Heterodera glycines
SVEQRPESLILEFQLSDNL

SEQ ID NO: 138073 - protein, 240 aa, Heterodera glycines
AKGQNAKSLSQLIKKSGRKMVAAGYALYGSATMVVLLYGSATMVVLSTPGRVDGFTLDPSIGEFILTNPAMRVPKKGKIYSINEGYAKKWSKGITEYIRITEYIRSRKFPEEGKSAYGQRYVGSMVADVHRTLLYGGIFMYPATTDVADVHRTLLYGGIFMYPATTDAPNGKLAPNGKLRLLYECNPMAFVMENAGGKAHSGKCPILDIQPKSIHQRAPIFLGSKEDVEELLEYIRKHDQ

SEQ ID NO: 138074 - protein, 29 aa, Heterodera glycines
TRAEIYVQGSLLLAIEASVRHWGQHFMCR

SEQ ID NO: 138075 - protein, 214 aa, Heterodera glycines
TQYFGTILIGFPPQQFQVLFDTGSSNLWVPCKGCNDWVPCKGCNDSACSTHRQFSCHNSVGCQMAGQNFDIVYGTGSASGVLLQDIVCVRINVNLCTNTTQKFGCSVNLCTNTTQKFGCSMSEPGDVFSNAAFDGILGMAWNSINAAFDGILGMAWNSISTDAAVQPLAQIFENEDCDEKVFAFWLVAKESNRAKAKGGQMTLCTDKSRYKVRT

SEQ ID NO: 138076 - protein, 171 aa, Heterodera glycines
SLVRVLYNKSGEWCEVHSQYGQIGWVPSLYIAPANSLDKHSWYHGKVTRAEAEQLLGSWYHGKVTRAEAEQLLGSGINGSFLVRESETNPGQFSISLRHEGRVYHYRISFDANFRLFILFITESAKFKSLGELVHHHSMSASGLICSSSYFLFCHFLKRHFNVSGEPDEWE

SEQ ID NO: 138077 - protein, 64 aa, Heterodera glycines
  unsure (1)..(64): unsure at all Xaa locations
VAERGMSLGVXSEIIEEKAVTGAGQRKVATKSERISGRRRKMPEKRRKRGTNTRKNGNGHLHLK

SEQ ID NO: 138078 - protein, 181 aa, Heterodera glycines
MPKQNEIVLKYSFLDLTWFLDIEAVFYAISKTKKCLVVKTIFHISLHNFVSSARIETGIRPLERAARALQEVKKLFEFLQFCFHNFRKLFGIIMPKQNEIVLKYSFLDLTWFLDIEAVFYAISKTKKCLVVKTIFHISLHNFVSSARIETGIRPLERAARALQERMERKNSYFWDFFRNQN

SEQ ID NO: 138079 - protein, 231 aa, Heterodera glycines
MTEAKNEKQSVVMPPFTLSTGTTTAASVSSIEEDDADEYGMLDEYMANVEKQRKIAPIGSEANHLGNGSKKRPNTLKLSCPKPISVINNGNIPNGLSAAYEPISPGEILRDDQQNFGNNNNDDRKKGSMTDTGDVPYQFNVDKFISDILPQPTAQQQSLLYNSDLSSNNRFFTPLAQQPLTADSPLFTPIVPSIDHYGVKDPWYYGKVNDISSAHPLQQPLMDSTNPWAYP

SEQ ID NO: 138080 - protein, 42 aa, Heterodera glycines
MIRKAPQTLRGKLPGKCSETHQILFTSYFRHSDAFSIKKGDE

SEQ ID NO: 138081 - protein, 80 aa, Heterodera glycines
FLPGGTQFFTLTTPALFFLNYFLHLITQRSRLIRSSPNFAGKLLRTLQMLINFLRIFCLEEHSSSHLPHQHYFFLIIFCI

SEQ ID NO: 138082 - protein, 400 aa, Heterodera glycines
MNFRGATEAYAIVHSLPFAKLSHQVVKLSIHMPNQQPIVYRAFQLVSKAQQIQQGELPETQCSAYWKQWQNEWKHDPKLKDMLFEKVPEHFIWAKDKWNKRKYNLTKRPPIGRIVPVPPSDPERFALYSLMRHFPGDPDHLKMVNGLLCTSFTEAAIMHGLLEDDKMESFFARRIREAQLIIIDEITMLHNTVIEVIDRVCKEMAIRQHKDLLFGGKTVIFSGDFKQSLPVVPHEGLTAQVTACFQTSPLFGQFTTMKLTINQRLGQGQQAYLQMCRQIGLGETGEHFWIPPQFLVKSKEELIDYVYPNFQQLLGNDKELLNRLILAPHIDTCDEVNEIMMANVPGQVREYLSTDKPLDDRPLDIDEIESEVAALNRRTDSGMPPHSLRLKVGLKGPSYQ

SEQ ID NO: 138083 - protein, 1427 aa, Heterodera glycines
MSRYNNLLQFASVSAGNKPSPAGGPMAVILNGEFHRRISSMQAGTTQIPGFGQLYILDPVEAMEQRRKNPTFTGEKITNDEEFVQGHQLNEATLEILEQVIQENHPAASAYKQAREQLQELLKQQRTEELRFFRMTLLDERSAPGGMKDPKLHPHQIITPSTGEGMFAIHADPTGAPAPKGIWVENKQGQLNEIAPFSPWTDSLTYPLIKPKGDDGYKFGIPYAKPAQRKRKSDNSDDMFDTEAMSDDDMCETESIAFSDTGSETSTQSVTSRYDKSKRFVSLRDYCKYHLAIRDENLEWQYHHILSCGGGLGQRWVLDQASKIDWQIATFLRRPDMDLRVSTPKNLLQYLVNQYNKQQARQNPNAQQKSVDDIGSVVRLSERNVNSLQYWKKMYEDCNTIFARCHDAKKARLFITFTNNREWPEFKENIYKNGQMFTDRFDMWMRVWSSKIAVFHQELYEKSFFGTILGSGESMEFQGRGGPHAHIVAQTDLDVVPEVIQEYIWAHIPPLPDKDDDSPIAQMHREVRDYMHMQLHRCSDSWCGPRDPNFGRCKKGFPAPYSKCTILHPDRPALYYRPSPTDGGAKIEVNGLIYDNSQVVPYNPYILLRYRVHHNVLFAYGNKANIKYALKYPFKGPGHCYVECKEESGSKIGIDEPAQYAKMNFRGATEAFAVVHSMQFAKLSHHVVQLSIHLPNQQPVVYRAFQLVSKAEEIQRGELPETPCSAYWKQWQNEWQHVPSLKDMLFEKVPEQFRWAKDRWVLYKRKPTKRPPIGRVVPVPPTDRERFALYALMRHFPGDPDHLKLVNGQQYNTFTEAALQHGLLEDDQIWHKTLGEAALHRWPDQMRWLFVSILVFGQPSNALELWNKYKDQMYNPQGITSAAIRQAREQQALADIDWRLHFFNLSCVHCGLPDPPNSKAKNINLAIEEYFYGDDGLNMPPGQPKQRPQQNTPPPLNSDQQKVFDAVVRAIQSDPKDQTVPRRFFIFGDGGTGKTFLFGQIIKRLRKPPYTYKVLATASTGCAAILLPYGKTAHSTFRLGREVSLDKLPSIPLESFFARRIREAQLIIIDEITMLHNTVIEVIDRVCKEMAIPQHKDLLFGGKTVIFSGDFKQSLPVVPHEGLTAQVTACFQTSPLFCQFTTMKLTINQRLGQGQQAYLQMCRQIGLGETGEYFWIPPQFLVKSREELIDFVYPDFQKLLGNDKELLNRLILAPHIDTCDEINEIMMANVPGQVREYLSTDKPLDERPLDIDEIESEVAALNRRTDSGMPPHRLRLKVGSVVVLLINKSDKEGLINGTRIVLEELGDDRLVGRVINSNAVGGQVKFFIERTRNVYEDKTPGGLKYERLQFPIKPAFAMTILKGQGQTISTVGIDLERDVFSHGQLYTAFSRATDGSNVRVYAPRRETDAQDRVKVLNIVATKMLNLQ

SEQ ID NO: 138084 - protein, 943 aa, Heterodera glycines
MPSKQHAKRKKEQERYQRQMEQSVSPGRSPVPDGSADENGVASHPGTTTPNISALQLSTPASSIGSKRRGRPPKAGAESIMTSQHSVSSADTQVTLATQNVESSPSSKKWKVGEVDRSMSAIGAIASTPVSRQKSRGGRPTKKRGGPGRGQTNYSMSNGSSMNHGSEDTTLLVVLPALPENMNFSTVSINFATSRNFACKIWKWAAIGLYERDGETALAPSSGPRYIETCWNDLTQFLNDGFAATYLAYLATISQRKVVVVDPMVWSNGLDRVMPYKNMTFGYDPNVPAEVILLPVHFPGHWALIVHDVQFGTHFADSLPTPYGRLDPQLTDKIKKIICDILPSTVLTGILNAENLTVQHDGNSCGYFVCLYAESWLMNNRTFVLPSLFINYEKKRILWHINELYGSDNVPYHPREGVPTPCPIVYRHTDEAQSTSKAAESMEVDDKNDIMIIEPQTSGQAANAILTQAQVDGENQVDTLGLVSESCVPQEPIAQADDAIFVRPKTPPRRSTRIGRRQSTSISRSPSPAPRRSSSANAVEKVTAFTKRCYLVHKGWCCAAAAAKHFPEYSDSGKLGEKKCAHCGALLFPHEDSSHCCRQGRVVLPKLNPHPKELEELIVCDKQPRQGKEFVRNMSRYNNLLQFASVSAGNKPCPAGGPMAVILNGEFHRRISSMQAGTTQIPGFGQLYILDPVEAMEQRRKNPTFTGEKITNDKEFVQGHQLNDETLEILEQMIQENHPAASAYKQAREQLQELLRQQRTEELRFFRMTLLNERSAPGGMKDPKLHPHQIITPSTGEGMFAIHADPTGAPAPKGIWVENKQGQLNEIAPFSPWTDSLTYPLIKPKGDDGYQIGIPYAKPAQKKRRSDQCVDQMFDTDAMSDDGCCETESIAASDAESVESTESLIDRIDKTRKFISLRDYCKYHLAIRDENLEWQYHHILSCG

SEQ ID NO: 138085 - protein, 35 aa, Heterodera glycines
FGLENSVLHSFTLLRYRLLVCHFLASLIIKSQIVE

SEQ ID NO: 138086 - protein, 192 aa, Heterodera glycines
MGSDEWCTERNWRQFCAISWLEQLNTLDLSQTNLSICRFVCNDISDGYFPHFGTFSTRTQIGTDFAPFYALVDKHFDGESGLSPHKQQRLDGNFPFFDHAQLGLKLALLSPVSISWWTNILMKKQNDCGPQIERTNLNVLVFSDVWMGIFPLFDRPQLGLKLALISPRFDVLVDKHFDGQTRIFSNFESFSF

SEQ ID NO: 138087 - protein, 32 aa, Heterodera glycines
MYRENARISNSTKNLTNEREVEFGLLKKFRKK

SEQ ID NO: 138088 - protein, 165 aa, Heterodera glycines
FTSPAEKKKKFSSADHCLISSAKIGENQQQSLGSSFETTFGEEQKKKMNDRILKRKIWICSDVLMDILPFFDHFKLGLKLALISDRFDILVDTHFDGKSELTIWRPITIRKGPEPDLFDCGSNSVPFPSPDDSPLQLFVKGKSEGFPLPHRPLPSKMHFKCLQIK

SEQ ID NO: 138089 - protein, 45 aa, Heterodera glycines
MDTAVLVISNPENLRKGEANSQCDKSRDFFFNEFPCLNQNHISAC

SEQ ID NO: 138090 - protein, 124 aa, Heterodera glycines
MVLDSELVEMDAGSVAFLRATTLAAYTVQFSLADTTPIVPFELVNERTQEKLTLMYIIIEHADYNGWQLKRCPISEKAADQWEDEILDDLNGVSIDLHEHFDIGQLSPPPATATEEEEEADQSN

SEQ ID NO: 138091 - protein, 217 aa, Heterodera glycines
MRLPWLSAPAASFEANVQPIWDVFAREIWPIFAPNIRHLLLTVRDHLDNLRRCTSPTILTDLINLNSICSFCLRPDGIADFDGPNLNAGQALAKWLHIPRTDGQPKRLRFCKDLEEQHNFDWVNSFKEAFLRATTLAAAYIVQFPLAPTTPIVPFELVNERTQEKLTLMNVIRIGSVNGWQLKRCPISEKAALQWEFHILDDLNNLSIYLHNHNQIG

SEQ ID NO: 138092 - protein, 39 aa, Heterodera glycines
MGFPKAGQDPGAGFCWVPPVRFLKENDGKANFEEENLDL

SEQ ID NO: 138093 - protein, 96 aa, Heterodera glycines
MFPNKRKCSFNPDWEKQYTFVKRSRKGNGFFYCAFCQKDINVESMGVSAIKSHTENKEHKQIKEERRKSTTIENFVRSKSTLNSIDLQVATAEGHF

SEQ ID NO: 138094 - protein, 59 aa, Heterodera glycines
MKAKSQGIEQKVHEFLSDCPCIFNHLLMKKWCVVSFNLCPYDFGNRMQVHNNGKCTKYA

SEQ ID NO: 138095 - protein, 62 aa, Heterodera glycines
MRMNTGTAYNAKWSLRRADSWSMSAWHNVKKLSKATEKMEKKKRTKKKRESAKKEKLNWKWK

SEQ ID NO: 138096 - protein, 71 aa, Heterodera glycines
MPTGWKCADKATPNFGSAASEQKLQGFFRVSSFGGTDEQQQQQFQCGGKGSTRGREAAEKGSETHQILFTC

SEQ ID NO: 138097 - protein, 132 aa, Heterodera glycines
MSSIIWQIGLFNKLPNGKAECVECKANQLQKFEFERSHGSLKSLIVHLFSKIHANSTYAEKYRQLEKTSNKDESQKKLSTFFPCSSSTLAVMDKKVVNFLVSTNTSFKVVNHPTFQSLLAPQHIKVRYSLVY

SEQ ID NO: 138098 - protein, 430 aa, Heterodera glycines
MNSKSVNRFHSRRMRGVGQQTISYGQHKNVNLLKLHFSLTAHGITQNWTMKNHVLAAFSQTIVDENGLTTQILAYENVSCGAHLLNLVVQKSIKSERIADLLKQCRKVVAHFKHSNKALGMLKDIQIFLDLPDHSLLQEVSVRWNSALGMISRLFEQREALYQYAFENRNFEMTLTNEEWGLIEEMISLLQPIEDASKMLVKAPLSAQIPIALTLHGKLYTAKLINKDIDVVRCSLVNELEKYFFALREKRVHCLSTFLDLRFKDKFLLEGRNIFLAKISSWLKEELDDFILPLVNECDEIALAPSPKKQKLSLFDDLNDIASTSNKENAGNPSQNSSDLDDELNKYLASGCVNSREDPLTAWRQMAPKFPILSKIARKFLTAPATSVPSEATFKVARDVYDYRRSQLKPETAEMLIFLNKALPNINYRY

SEQ ID NO: 138099 - protein, 31 aa, Heterodera glycines
EPQYELECLNSSNNVKDRGRGPGELGDGEQP

SEQ ID NO: 138100 - protein, 58 aa, Heterodera glycines
MAKAIKMLFHFIRIYFHHLFFAIITVIYLNGTLNPQKFERIFFILTVSEFDGCHTLWP

SEQ ID NO: 138101 - protein, 24 aa, Heterodera glycines
VTGVSIIAVLFLVFLMPLQNLVRF

SEQ ID NO: 138102 - protein, 36 aa, Heterodera glycines
NESLIIQNINYHLDFFSPKSNIDGLYSQTKKANAFR

SEQ ID NO: 138103 - protein, 114 aa, Heterodera glycines
MTREYSDSYILEYVSAGPKQYALKLKRKKDGVIWYKTKIRGFTLNKDNRVDYEEFKSMVLSYTEGVKKVFRYPEKIGPTRDSRMLSRDVKKEYSPVQKKGIIDDDYNVLPFGYY

SEQ ID NO: 138104 - protein, 63 aa, Heterodera glycines
MTVDLYCGTLSDPVIIPGRPPGQITADVVFNEFMRRQQSYRDVNLLEERISMKMTTFSLPLRR

SEQ ID NO: 138105 - protein, 122 aa, Heterodera glycines
MQKLPSAVTALLRNGFISTSMKQSTVDSLIWSMTKAKRQRLQVKNGFLSHFYDISQVITGSLTMGLLGGSDKEFQELCAYFKEQVCAFVVDIFNPDKVRFTTVEHLTEDVKKLLMYRIGLIK

SEQ ID NO: 138106 - protein, 21 aa, Heterodera glycines
MIEPIGKANLRKACAVRDTRS

SEQ ID NO: 138107 - protein, 177 aa, Heterodera glycines
KQSDEYKALVNLRDSMQKNHESIMKAISFAQEMIGMERKLDDYTNNVRIPIKNLFVHMRKFWDPSTDKSPEAVEIFSKACYTTELANTPLGILNVYIHTHTVEGCKMGLKPNQISLLSKFVPLLQKIRMKLGDQMDKDDFNTRVPVKEFFFLVLTSWFMEIDTKVARMVLGKIKKLI

SEQ ID NO: 138108 - protein, 93 aa, Heterodera glycines
MVGSFCANVTFKKNPTEIFWFQREILLTAVPIMDHVQNYVENEMEKTFPKIEIGLVKSKIDQMSIDQPVKENATIFKAMVEIFNELNKYGNRR

SEQ ID NO: 138109 - protein, 81 aa, Heterodera glycines
NIDKVALLLELFERRHLPLTNEDFFHNLAILRDFGPTGKCAVRASPFYYPLANYTDTCTASYYFSGSFIHACESYIVYFFV

SEQ ID NO: 138110 - protein, 172 aa, Heterodera glycines
MFGEEKQPLNHKDEEDGIGIKSGRIGRILEGVTRPQYHDGMLLHTVKLYNIVQPNLAFFGKKDAQQKVLIFSNAFYITVLKLFAIQQMTVVMNFPVRVVPVETERDPHGLALSSRNQYLSAEERRRALCLYNMLVAARNAATNGAGLASVAAQAQQMLTQAEKHDGIKQVFI

SEQ ID NO: 138111 - protein, 106 aa, Heterodera glycines
MVDKGEGDSRYQELKDGIYHGYQPLRARKTFTYTYTPEFVPGALNIAVARDLDSIPSGPKDDGAHYQMVTAHKVNRAPKPEDPYAWLQPQAPKQQQQQQEEVTEEA

SEQ ID NO: 138112 - protein, 251 aa, Heterodera glycines
MTSKRNGTLQKGGPSTKKWDFRAIGNNFTEEMENYKLIDERSTICEKFGFTKNITEFRINSDVRRPDEAMRDAIDTMIKAAFKTTEERMKRKVRMFGVAITGAGLASPVWLPYRAYPQNNADVIMQEINKLGQSGDGDENKKTLLLSEPIMMKITCVTVPSGEGPRNVHKFDFGFKEHQRIRISNVDKICLFYALVASKLYLEVHRNIFNRFMNNIMRQREAAVELLRNCGIDINEYSYGVEHLPNVQNYW

SEQ ID NO: 138113 - protein, 49 aa, Heterodera glycines
MFTPKFASLMFTGSCYYVNIRVERYRYRYWPTISVQLYQKRMESRRYIE

SEQ ID NO: 138114 - protein, 25 aa, Heterodera glycines
TCTCGVVVKLSTFHNFSPGFNSPLG

SEQ ID NO: 138115 - protein, 41 aa, Heterodera glycines
MGRKEDNFAAMDPFWSELPARIIGTCCMASEEPKYRGDDGG

SEQ ID NO: 138116 - protein, 62 aa, Heterodera glycines
MGHNLSGLAKFGRRFNAHKEKCAALIKQQQSSPSTELKLELRQEFMDYSKEGSFLIDYLRDH

SEQ ID NO: 138117 - protein, 16 aa, Heterodera glycines
MEGYVSKNPKIVAKNG

SEQ ID NO: 138118 - protein, 50 aa, Heterodera glycines
SFRPSQNFCLVIYFVYFHFYLQQCPIFWCPFFHWCPIFGVQFSGVQFTGS

SEQ ID NO: 138119 - protein, 101 aa, Heterodera glycines
MRRGATVIRRGATVIRRGATVIRRGATVIRRGATVIRRGATVIRRGATVIRRGATVIRRGATVIRRGATVIRRGATVIRRGATVIRRGATVIRRGATVIRR

SEQ ID NO: 138120 - protein, 68 aa, Heterodera glycines; identical to SEQ ID NO: 127362

SEQ ID NO: 138121 - protein, 49 aa, Heterodera glycines
MTFFRLAFFAKLFANIRILFKKNFNLIGVFPFSASLCCPGVHPNVGDTA

SEQ ID NO: 138122 - protein, 23 aa, Heterodera glycines
MALKNFIKMSEWRNIWLSNHIKS

SEQ ID NO: 138123 - protein, 93 aa, Heterodera glycines
MPIQRGRGLAEERFTKQYMNTELKMFSELLNENQLEAIKQINANKTYTMSANSMRAQVKKLKRIALTNCTEKGSDQDQTPNSNKKSKIQNFQI

SEQ ID NO: 138124 - protein, 149 aa, Heterodera glycines
LFEYPKRTLEKIDFFVFGAVPPNRCAQIYGETESFRNSFPIACTLILRWIFAPHNCLSTPNGHLKKSIFLFSGQSPRTDAPRFMGRPNPSGIASLVCTLILRWIFAPHNCLSTPNGHLKKSIFLFSGQSPRTDAPRFMGRPNPSAVASL

SEQ ID NO: 138125 - protein, 199 aa, Heterodera glycines
MAQSKWKLSIPVGNRCQFRRQTKSTDLNASRSRKIGKIQNYIDQNVIKFLLRFHQLFTSCPIHLIINVTDDRILEFILRKIWPVFGNKLRAVRVLSFHNNAMPFGGQAVAKWLFTRLPDNGPKVLSCCLLDDANLKSTIGVIKAVLTNRAAKNMHEKWPKYAHKYANKIVKYASNMHRNCKICIKYAQKNLKIRGANLF

SEQ ID NO: 138126 - protein, 115 aa, Heterodera glycines
MPSNNSSAIERSKIRKKKNEGEMNEPYAVADERFSSKRLIFFCLCMNTDSLRSPSILPFPSSSPCFLRQDAVKLHLGWCKSIDILTLTSQCVHYFEFALATLERLMGFVQRRMNA

SEQ ID NO: 138127 - protein, 375 aa, Heterodera glycines
MNRRWICNDVWMDILPHFDHAQLGLKMALISPRFDALVDKHFDGKTELIIWKWIVIRKDNGPKSKLSVWVDGKFVGFPMPDRPLPIKIRFKKLQINYIDHSVLTFLRSNKQIWDRSGIKLEVFVYSFDTDVQPTWDVFVRQIWPIFAKSIRHLGFRNGDHLDNFRRRTSPTILTDLDQLYSIDSGALFPDGIADDGPNGNAGQALTKWLHTPTKDGQPKRLRCNGYLDLMNLEWVNNFKETFRRATTSVSYHIQLFFHAEPKPLESFELVNEVTNEKLTLKMSKKYNGSVYNWLLQRCPIGETATAPVKWKNRENSDANFNYIIRFDPWHDNNSGANLNSVRFNLCANSCIGPLSPPTEEEKEEDEADQSNKNVV

SEQ ID NO: 138128 - protein, 110 aa, Heterodera glycines
MHESFVAKFRVIRPQANLITLDGDNNNDIILHEEADEDEAIAQPCTSSAGQQPRPIGGGTADELQQEAEDNESVLLNGAESPTPGAGTLGYEILAEDSKTPAPFYEMMSE

SEQ ID NO: 138129 - protein, 68 aa, Heterodera glycines; identical to SEQ ID NO: 127362

SEQ ID NO: 138130 - protein, 99 aa, Heterodera glycines
MFEYPKRTLEKIFFFVFGAVPPNRCAQIYGETESFGNSFPIACTLILRGVFAPHNCLSTPHGHLKKSIFFFSGQSPRTDAPRFMGRPNPSGVNSLYPVL

SEQ ID NO: 138131 - protein, 35 aa, Heterodera glycines
MQLLEIIVSEKTSKEALAVAAKLGLDQKKLIVVVK

SEQ ID NO: 138132 - protein, 108 aa, Heterodera glycines
MVNVVVPVGININYTKNSLFIKMDLEDKSGVIYGINCYEPTVNKIIGYNGEEINVFEQEQNWLAITDAFDKVLYEAAHFFRLFLKTDGAINATDFERTITNSFDYLSV

SEQ ID NO: 138133 - protein, 84 aa, Heterodera glycines
MEMLSILLNYFKNNFKKESFIWYDNKQELKNRLKCQDSNYNLAIHLDTSYPYEEFLDVGGKDFLFTFLFYEKNVRCCCGNVIGT

SEQ ID NO: 138134 - protein, 45 aa, Heterodera glycines; identical to SEQ ID NO: 134303

SEQ ID NO: 138135 - protein, 111 aa, Heterodera glycines
MPFSDFAGRAMQNDFLRSNGPSFLSDYADLWLLALDMLPMAHQTAEEQREQLKMELFISRSSNCSMEAWPNYLIKFNSLKFVQPSDSVGASDPKMPFDDSVCKLNPIGRKT

SEQ ID NO: 138136 - protein, 19 aa, Heterodera glycines
NDHQFNLFRNTDGNKVIIH

SEQ ID NO: 138137 - protein, 47 aa, Heterodera glycines
PEKMPTLVVFKIFRNSDFFITYLFFAKLIHKYFFRKCSETHKTLFTG

SEQ ID NO: 138138 - protein, 71 aa, Heterodera glycines
  unsure (1)..(71): unsure at all Xaa locations
FLKLHYFIFLAKLIHKYFFTNCSETHQILFTSYFRHSDAFTIKKEMNKKSKNFYXLFKHAXNFRLNFFFIN

SEQ ID NO: 138139 - protein, 90 aa, Heterodera glycines
KTTILITDTVAQHPLPQCTLRFVNGSKQLMSLFGFFFKQFSVIAHQLLGVQQRRHLHPMQLFTGSLNLFLFFFYLFSEWSYNNFSQQFCI

SEQ ID NO: 138140 - protein, 121 aa, Heterodera glycines
MSMQQNQGSDDALPMWAVPDFDEMGQMPQRQKQKKIPTLKEFRNQWKERRLLWEREEAEKKDPKTWKKRTDEMKKICEERLEQSKGAGGSNKRQEPDTYTWNWDELLRQEREYLDGGLWGK

SEQ ID NO: 138141 - protein, 347 aa, Heterodera glycines
MKILLIFLLLCALIFKKAINQIEAGKITQEKSFAEIFGQTWDDGAEEENICQNDQIIHGEIADQNNQLGQNVRQFDQNFDENVEVKEEESEEMSTDYDELGQLPMPTKNGQSCDRFSNETNKNKREIVEKFHKIKEKFKQEKKKYYSGKEWHKIERKIAQKSGVNYEKIYEWKREFGMMIHKNSEDEKRQILKRFDQIYDKLKMKLNGKLDGKRMKCKKIIAKHLGIEINSIYKWKRQLKNGKTDEKIENRKRKIVEKYLKTKSEFMQMGKHPDKEWKEFRAKIKQMFGVERKVLTICEKMEKMKKYYQMKKHNPKLTDRQIAAELGISTRALCKYKSDLMRDETKF

SEQ ID NO: 138142 - protein, 102 aa, Heterodera glycines
MYSFRFFLFVFLFIHFRFIGTAQIVNGQQLDSNSEQLQSNQTYSVTNVDRMSNAFHSPTDNQTTSLLGDETLKPSDNEANCTTTENGCELNDGKYCTDCKTI

SEQ ID NO: 138143 - protein, 328 aa, Heterodera glycines
MHREIRETMHMQLHRCSDSWCGPSDPIYGRCKKGFPAPYSKCTILRPDRPAMYFRPSPSDGGAQLEVNGLIYDNSHVVPYNPYILLRYRVHHNVLFAYGNKANIKYALKYPFKGPGHCYVECKEESGNKIGIDEPAQYAKMNFRGATEAYAIVHSMPFARLSHHVVKLAIHLPNQQPIVYRAFQLVSKAQQIQQGELPETQCSAYWKQWQNEWKNDPKFKDILFEKVPERFRWAKDKWVLYKRQQIKRPPIGRIVPVPPSDPERFALYSLMRHFPGDPDHLKMVNGLLCTSFTEAAIMHGLLEDDKIWDKTLAEAALSRWTDQMRWLF

SEQ ID NO: 138144 - protein, 16 aa, Heterodera glycines
EAIPEGFGLPINLGAS

SEQ ID NO: 138145 - protein, 79 aa, Heterodera glycines
AFNCWDILVVAVSLVSFVLKSDAISVVKILRVLRVLRPLRAINPLRAINRAKGLKHVVQCVIVAVKTIGNIMLVTFMLQ

SEQ ID NO: 138146 - protein, 75 aa, Heterodera glycines
YEKSQLMQTLHDASLVKSLLKNAQISCRRCENSRLLQGYNTINNINHAYQNDQNYHTMLILIISSIFSLNFSKIM

SEQ ID NO: 138147 - protein, 45 aa, Heterodera glycines; identical to SEQ ID NO: 124527

SEQ ID NO: 138148 - protein, 226 aa, Heterodera glycines
MKFAHSLAFTSGSQISEQLAGEFCLSRLSHDEAILCYSYSSVLVNSSNELENMKFAHSLAFTSGSQISDHEFCLSRLSHDEAILCYIYSSVLVNSSNELENMKFAHSLAFTSGSQISEHEFCLSRLSHDEAILCYIYSSVLVNSSNELENMKFAHSLAFTSGSQISEQLAGSVLALSRIFCYFLEELFRSFRMVYAFFLLLQYLRRYARPIEYPPIQILMVGFYNF

SEQ ID NO: 138149 - protein, 87 aa, Heterodera glycines
MGRKTMTLTAVVLMVKSANITHSEFGSRTEQAFHLSFNVSFLLLGPAKSYKMIPSPSSADNFFQIARCSDKIVMYHFGCWNPQNLTN

SEQ ID NO: 138150 - protein, 55 aa, Heterodera glycines
QAGIEVIELATAETEPTIPSLFADDLAIVINGTALLTRPKSNNNKKTPVVSRTNE

SEQ ID NO: 138151 - protein, 42 aa, Heterodera glycines
LSLGKGICTYAKIPLLLLITVSAFSLFIGDFDFQLQIKSKQQ

SEQ ID NO: 138152 - protein, 98 aa, Heterodera glycines
MLPLPRELEENRNRTKPLNSPPPAKRNKRDESPPVFDENGNELGSPPSYNGDKEDEEEEGIISESPPHYEGIETVTFDFPHHTMKIMNVLLRIHRLVM

SEQ ID NO: 138153 - protein, 18 aa, Heterodera glycines
YREAIPEGFGLPINLGAS

SEQ ID NO: 138154 - protein, 55 aa, Heterodera glycines
MLDTVVLCGNTVDVQGDSLFSWLFAQKREPNGPSADHRQLAAQQWAWIEQQMRRS

SEQ ID NO: 138155 - protein, 38 aa, Heterodera glycines
MAAAEPCREILTVTDFDSAEQIKHGQLIEKITIVQTFI

SEQ ID NO: 138156 - protein, 196 aa, Heterodera glycines
MHNRFGVLSDVKAGIVSLSQKIVGPCALIQGALPRILRDTPQSFFDNTKALLAKNSEIVYDILCQVPGLKPLRPQGAMYMMVGFDEEMYGDETGFLQRLIAEESVYCLPGSAFSLPNWFRLVLAFPEETTREACERIAAFCTRHMRPCRKQLALWGSQLDEEDGRGSEGAERTAAEESTSGEEEEDGQRQSERSAE

SEQ ID NO: 138157 - protein, 52 aa, Heterodera glycines
MAHFGAPQIREQMLKGIGDDLQKVLDIFGNGSDDDDASIQLLLRYIVEKVSW

SEQ ID NO: 138158 - protein, 139 aa, Heterodera glycines
MEIVSSKIEGQWPTKDSHSQSYKDYFAEQSQSSTSARPPDDDFVIRAWSVYEDLRNGQRDAYGSVIRQPIAPRRAFQLVIDQIREGSSDLGDRQMEWDITDPRNDEEQGLHMCETLLRERMEEDEKEEKEKKEKKYLEF

SEQ ID NO: 138159 - protein, 729 aa, Heterodera glycines
MPCSLAALIPSYGLDVEDKPFFPHLANRPENYGREIRPTPDDYLANGMMPGKRRQFDEWYAAHHHEPFMLDEALASYCTNDVKILMAALVAFRREFFEISRRQEYMDGIDDRENHDGIDVLRECMTIAGACMRHFRTNHLPNDHLAIVPERGYDNAQNQSLLALRFFHWYSEEYGVDVQTAHSAGGEKRIGPYSVDGWIEAEGRAIEVHGCTWHGCKKCYPIDNMLLPNGKTAGQVRERDAKRMEYIWARVNRVDVYWECKITSMLERSKAMRKSFANYVDDGPLVIREAFTGGRTGPLKLLRKAGPGEKISYYDFTSLYPYINFTTRYPVGHPKVHVLNQQVEWISAADNPFPLALLKVWVVPPRQIDVAVLPVKVDDRLCFPLCISCAKEYPTGGVDNDYHCQHTDQQRGWVSTCTSIELNAALDEGYRVTRVFRVLEYEQSDDKLFRPYIAEFMAQKIQASGFDSSIRGDAEKEEQFVRECAEQFGINIDPTKMVVNKGKRSLAKLCLNNLWGRFSLRNFGLCQTLITDDPVTLAEYLDNKSIEVTSIDQLDEAHILITYLHKKDWIDEHACSNIDTDSLILVHPEERCPLKTGPHLGQFTDEYPDHDIVEFCSGGAKQYGLCLRRKGAGADAKKEYVLKVSGLTLNYDVINNQGMRYETFKEEVVRYATTGDYEPIIVTYPNFLRPNIREGGRVVSMPLQKCYRPYVGKGIIGSDFNVKNFGHTL

SEQ ID NO: 138160 - protein, 137 aa, Heterodera glycines
MRLAEDIEGLEMRTRKLEEGAAATTEAQMETMRQQMEQKFRQNLLEAEQRIDHKWATMLSKEQQRTQRIAAQSAAVIGQLMNKRLAEGGEEKENTRETEEKKLIISDRCNWCLEKGQCYLELGDADMCLAVHRALLR

SEQ ID NO: 138161 - protein, 103 aa, Heterodera glycines
MKEKEEEEKKRREGKEKETEKKKEEMKQKDETETKRSLSVGTTKDDEISIVDSEERERDAFENSPKPTNERMAFWESTLNNEAKKDLREDKEKALKTQAKLLS

SEQ ID NO: 138162 - protein, 150 aa, Heterodera glycines
MMGSKWSVREFRRAVAEQVRCMRSAESALASMKDPEVRTDHRTERGQTGRGGKAGREPFQRAFTGQPTNPCETQRNTKRGAVRDERPFRQTIDHTCQRERELRRELAPRRIKRTNCHNGDMELFTMPKKWTSTKQMPRLSDSSGAEEETH

SEQ ID NO: 138163 - protein, 86 aa, Heterodera glycines
MDYAIFVVEQVKKGQKIEILRSLPKKSDVKASNQTFNRAKLMNVGFVEASRLYDWQCFVFHDVDLLPEDDRNLYSCPEHPRHMSVA

SEQ ID NO: 138164 - protein, 61 aa, Heterodera glycines
VILQQIHIIINQLSNSVLMGTDVLQRQTFVHIVHRHHFFVFRGYCRPNPLPFPGGTDAGRG

SEQ ID NO: 138165 - protein, 145 aa, Heterodera glycines
MHFLIFVFVFLFIIISTGKTLSVNNLCEKNGKIRPTFAEIFGQKWDNEKMEENENESVQNTNYNQNYQNELIDQNDQFDDQQKRGIIHRFHAIKEGIKKKGKYSAKIWNKFEQKIGVKLGINGLKIYKWKKELKLKKNKRNLKHY

SEQ ID NO: 138166 - protein, 397 aa, Heterodera glycines
IAHTNCNRAKFCTIFAYFPFISANSAMAIDLGSEYMKMALIKPGVPMETVLNRESQRKTPMALTIRDGERFLGDTAQKKALGMPRHTFAFFLDLVGKQMDDPIVQAFQAEFPHLTLKAHPARGTVQFETDSAGDLSVECALGMVLSNARHEVEAYAGQTVRDAVITVPSYFGLIERALIERAAVEAAAKIADLNLLQLIGSGTAAGLNYGVFRHKEITEQPQRLLIYDVGSSKTLATIVQFRLVNNDTEAAPPQVETLGVGYNRTLGGRQLTLRLRDHLVRAFKQQHPSTSNTVEQNLRAMAKLMKEAERVKQILSANTDHYAHVESVFEDRDFRVKVTRDELEAMFQDFEQFHMEPITDALRMAQLTVDIGRVVLMGAGTRMPRLQTVLLGRNGKK

SEQ ID NO: 138167 - protein, 133 aa, Heterodera glycines
MDGCSYAVYLVPTNFFHFPSKKHTKYIGLRGHLPRIWFFDQNLFKYTKWVLDSDHRPQNLLENVFTSVTLANFQISELDSYMYQSVGSQGIKFYADAIGLPLFQRKISGRPKCVESNTYVQDEEDVVEELYHL

SEQ ID NO: 138168 - protein, 129 aa, Heterodera glycines
YIDKVNLSAVPIVEFNFMISDNFLTINNVSPNPKGFYKEFFEESKLGSFLEEYVGLWLLAADIMPNLRQKLTKLIFMVPDKCRLIRDERHPQNCATFDQMAFEKKHRSVRQINPLVNNFKNIYNLFIFK

SEQ ID NO: 138169 - protein, 130 aa, Heterodera glycines
MKFLCHGRVSDWNIAKGNRATFPMEIEKLSEFARVKVGSKRYSDVVQIKGFQLKIKAQVKMNEQNPAKCLGIYLCCAASEDAEKGTSKIRGSNNPSVDNPSVEDNPSVMDNLSVDNPSVDNSSENFFFEQ

SEQ ID NO: 138170 - protein, 39 aa, Heterodera glycines
MGCIKAIVEGILPAKNVAEYFGSTTAQRIFILSFALIFH

SEQ ID NO: 138171 - protein, 90 aa, Heterodera glycines
NRNYAQKASQTILALPIPSTIAFIHPIMSAKIIRVPKIACDLSLAKNGVSKNRNYAQKASQTILALPIPSTIAFIHPIMSAKIIRVPKIA

SEQ ID NO: 138172 - protein, 96 aa, Heterodera glycines
NRNYAQKASQTILALPIPSTIAFIHPIMNAKIIRVPKIACDLSLAKNGVSKNRNYAQKAFQTILALTIPSTIAFIHPIMSAKIIRVPKIACDLSLA

SEQ ID NO: 138173 - protein, 15 aa, Heterodera glycines
EATPEGFGLHKSGRI

SEQ ID NO: 138174 - protein, 259 aa, Heterodera glycines
MVEMGTEIQTSRNELKAFQEEVDKAKNITLEHVEKNDLKKAKKSADVAKGIARQAKTKYTSTLEGYNDKSEKGFSGIVNRLNEALGEHIKRKDIENIQVSEAEKGPQKRERLANEDVQFQYDSIDQKFIVYLSAAVSHIDLSKHLAYVLGFKNTRLFHAEEANYMPDLTGGVRQLYIYAPNLIENTIIGNQMAPLLRIVNVVDDPGSISEVIYSTEYFHRLQSKRISEITIEIHTPFGEFVKFHWGSCILTLHFKKSIF

SEQ ID NO: 138175 - protein, 333 aa, Heterodera glycines
SFLPLSSFVSLHNLMVLVFHSRNSSIGQTFALGGTFENSSIGQTFALGGTFEFISEAPFLPGPPLPGGPKGCAFLIEPNDDGTGVILSPTYPGVYPSNLQCLFLLRGLAHQRIRNLQCLFLLRGLAHQRIRLFFRDFDVYFGGEHCPYDSLTIYDGASTSDPIIRKLCGLQQRLELFSFGHELLLEFNTTEPPPPPLPPFSFHIEYQFSDKFVAISRLIGAKPSVRHLRGSECDVRVCSGHESVHFVHSPNFPDLYFPDLYPPNTTCTYILDGLQGDQNLEKVILRFESFVVGQSAPSPIVERSAIPSADWSHINSMPGHRLAQSLPAKCSSS

SEQ ID NO: 138176 - protein, 24 aa, Heterodera glycines
YTFETIGQDKKRMKLMPHETRNWL

SEQ ID NO: 138177 - protein, 50 aa, Heterodera glycines
MNKIYILIFNGICIVFFLLFGLCVICNCVVRRVTFHHETEEKKKKPTVSR

SEQ ID NO: 138178 - protein, 56 aa, Heterodera glycines
IMSHPIWQIGLFKRIKEDSVDCLECKQKNVINFSSSSFFGLKIYLNTLLYFERLFY

SEQ ID NO: 138179 - protein, 141 aa, Heterodera glycines
MLRNNNPKNVNNAKPQQTLHLNKNVESRSTVIEALSMIEVEDRRLPLLQYEQEMMIDTFIDDVLFITAKGLGLERIFFNHLHLYSVPSFTVLVLNTTPDDEQKFVQTVIQLNNTQRKVQANLRDIIGTCVRELKQCTKGVD

SEQ ID NO: 138180 - protein, 134 aa, Heterodera glycines
MKCQHCGYQFCWVCSKTWSPHDSKSKEAALVLQEALEKLLEGRKTLKYTVGEFFHNHINTFSYVFSFCHIDEKNDEFHNAQSVLEKSVKALKELCQKFEAEKRALIDLCDEKTVKEMIAEKGPTENETGTSAGL

SEQ ID NO: 138181 - protein, 64 aa, Heterodera glycines
LLRALKTRKLETLISAYKSYIRPQLEYATEIWNPLKKNIRKIEAVQKIFYKKSLQKMWACSHAV

SEQ ID NO: 138182 - protein, 73 aa, Heterodera glycines
MARGAEKAKKKSIFELRRIAAPGEHLRICVDSGGCSGFEYKLTLDKRLDEAEDEVIKASEGAIVVVDKVSCKF

SEQ ID NO: 138183 - protein, 71 aa, Heterodera glycines
MNRNKEMGKLTQRCKKKVQKSRKGEIIEKLSGEMAQNLLIIKANMNKLFLGPSNDIDDEEKDDENNDNEAK

SEQ ID NO: 138184 - protein, 66 aa, Heterodera glycines
TKKVVHHVKAIVHKTSSSAIHRAFVYQAHGNVMANWTVTMEVMSPERPVRRCTAHAPLVISGATMD

SEQ ID NO: 138185 - protein, 50 aa, Heterodera glycines
MTLLGANTLALFFLTLALSSPMLITYSFVCLYAMFGAWVFYSIESPHEDR

SEQ ID NO: 138186 - protein, 121 aa, Heterodera glycines; identical to SEQ ID NO: 128908

SEQ ID NO: 138187 - protein, 73 aa, Heterodera glycines
MVSTRNKTGKFMKLSNSGTEARRKRKEWRREHAKKAGSTPKTLKQTEAETTADGEGTSTQAAEKGPSKRTPDL

SEQ ID NO: 138188 - protein, 60 aa, Heterodera glycines
MPQCPPGMCADALQFDSLKLEFRRTKKVQKSEIGMPTHLWCAHLLIDKKNLNGFFSLERL

SEQ ID NO: 138189 - protein, 224 aa, Heterodera glycines
MDGPTKETVTEQNHPDGTDNQEGISPEKMELINNTLDKLYNDPSSPAAFAGVTALWKEARKKLKHLRKRDVEHYLEGHRTYTLMRPRRVRFPRAKTVAAGFMTDVQVDLADFQALSRHNRGHRYLLVAVDVLSKRLFVVPLKNKRADEMLEAFKQLIDKMPMVPHRIFSDKGTEFKNRLLKEFFEEQEIAKHEPVHSSVKASVAERAIRNGSRNGTDISRKRRH

SEQ ID NO: 138190 - protein, 85 aa, Heterodera glycines
MMTWQSEGQFNGMFTVHTEQESRCCPRWCLSCCWCSVVVVPVGCCRRRRLLLAMFERVEKVDQLGHFGDERSVKKFCQLAFFNPF

SEQ ID NO: 138191 - protein, 16 aa, Heterodera glycines
EAIPEGFGLPINLGAS

SEQ ID NO: 138192 - protein, 222 aa, Heterodera glycines
MPTFLIEFGTDQWKSAIREKGDEKSICEEFKTSNGIGTILNDIEPENANGTLAKIIHFVPPSKDTKMFAFFQIERPKFSKFITNRTKLLPYQNDPNNTKRATPCDYYGADCVPIKNLLLKIEALANCGKKESENNAAFKKPDWAPLPPEMPWKKPSETMLCGGDMLCDKQRLREQYNRLREICGLKPEKVASQRLKRQYQPKEKWTESPIKIAFNKSARNNF

SEQ ID NO: 138193 - protein, 102 aa, Heterodera glycines
MSDEIGNILSHYKCQPQQQSSTADCGGSTVSARLMPADGQPPEVPSSPVVPLALAAAPIDNSFQPKHLTAVANLDDLSGDEEGNLVRNLSATFLYENNYKHF

SEQ ID NO: 138194 - protein, 141 aa, Heterodera glycines
RLAEMHAERETNNALQPAPAAAAQQQLAAAGRRRLSTVCEDGTHLHGKPVALHDSRVLVLYTGGTIGMRACHDGGALVEYEPLLDSSDMTFDDWIRIAKDIRKSYSAYDGFVVIPVAEVRSDGRENMIGALIVAGNLDIPE

SEQ ID NO: 138195 - protein, 40 aa, Heterodera glycines
MSPFFAVANFGLSLCKNRCAEMLLCYAFSLLCPLNRKKKN

SEQ ID NO: 138196 - protein, 75 aa, Heterodera glycines
MCFQPLYSPDEFKDIEEQLCLSESHEIVAEVKEIQTLLPGAEEAEEKCMEYGGEEQFGTELECHGQCRLGLIRVG

SEQ ID NO: 138197 - protein, 90 aa, Heterodera glycines
MLNSKSYSLLKKTNPPRCYVVIRARYFEKSLDLDLDSMFDLDFLDKNPGKYRFRKNPGLDPGPCRALVVIKKPIKKGAIINNWCPDEKKC

SEQ ID NO: 138198 - protein, 47 aa, Heterodera glycines
MAPKFLPPELLFEIVAFMPARGAVPNAFTSCWLLHSLLLQRVTKWKQ

SEQ ID NO: 138199 - protein, 186 aa, Heterodera glycines
MNFQALVKAFAATNATHLSETELEKELDRELDQSVPLILEEIAKTEGAKAAGEPTTELETLVGEGLEQLEENNRTKTKEQQQKQGEGGGEKSGKCKEEEGEKTTRAKTQDGNETEEPFVGVGLEITKVGQGITKTNTEAEEKTETTAETHPETETHPEEKTETTAETHAEIETHPEVETQPEENTT

SEQ ID NO: 138200 - protein, 132 aa, Heterodera glycines
MTTIPEVIVRAREYQGRGLLSALDFYNELFQKTNELKQQLNCERVVPLVEIDKAELDNYLRKPPAGFVGFEELWTQAVLENPDPENLVPYPIQGFEQLLQRKKMQLATVSSLHQGIVYCAFWLHKHFLNALG

SEQ ID NO: 138201 - protein, 87 aa, Heterodera glycines
IIFIQKIFFWVFGAVPLNRCAQIYGETESFRNSFTIACTLILRRIFAPHNCLSTPNGHLKKSIYFCFRGSPPEPMRPDLWGDRILRE

SEQ ID NO: 138202 - protein, 270 aa, Heterodera glycines
LDAYLDSCAITKPDRAPEHDYQYTWSCEPLRFESIKSDELTWHSEWRWMNLDALRNTENEFLDDQGRIHLWARDGFKEFLTQNFEIRDPEVDADMFGRMLDIVMTQDQYDPDGGVKHYGEWTRRSFVPIFLPMSTNSPNSAKDPSALGTGAWATSVLVVLRLFHVTTAGSVGECFRPSQTFICPSVIIRHARAQSLPLTRQAFALCPGQLLTMAKRVTTTIHPFTIRQRRPPFLHSNKRPEPQTLPLIVGHPLILRVFFLDAKKVKSNVQ

SEQ ID NO: 138203 - protein, 30 aa, Heterodera glycines; identical to SEQ ID NO: 126607

SEQ ID NO: 138204 - protein, 204 aa, Heterodera glycines
MPFRHEEEGDSYTQTEEIQVASITWNYRAHDFVVKLDIWDVVDKGRRADPSTGAAAPLKLGFSRKNAYQSAKCSVDIPSAVQEVKSFLKNAMEANLRELRIAEEELDILAKEEGQNPTNWRRKSDESADEGKGEERNRRHSGEEETEEEREEEEEEHTEEEEKGHGERQRRQRDGERTSPAKSAQFAAASRPRPSPSSSSSSEE

SEQ ID NO: 138205 - protein, 231 aa, Heterodera glycines
KIFIFRGFILENFCSILRDPKNLSPYNLRCELTIRSGTIVGDHLDKQLQQRQTEIWTNYVEATVRKIRGHVEKDVQYQKVAQENYALQSFPGLDEIFRKSRFFLVNSQPQVDFDNYNIFNGIEKIKLIGGFQLKQNGRELDEKITANFGDRNGIVFVSFGTVMDTNKSDFSYVIEAIKVTIQKFPDYLFVCKLSKGHMEGIPNVFATDEWLDQQGILGEKKINKTKYDQIH

SEQ ID NO: 138206 - protein, 37 aa, Heterodera glycines
MGRMLPAEAGPRYGLYAALAAIAGLAYCYRDRLGFKK

SEQ ID NO: 138207 - protein, 129 aa, Heterodera glycines
MLLNVSDSDSAREGGLISGESVYKASFRKAGAGADFASSAGANASSTLRLRLLDRSLDGANSAAGSVANGGGGSSRGTPPPQPQTVQLQQQMAFGEERPASEASSSTRRMENNCNEKQQHSRSRRRVEQ

SEQ ID NO: 138208 - protein, 134 aa, Heterodera glycines
MHIEIVHEDRILGTENVPLELTEQQLDKLSLGAYDRLLRQGSFRELVGKMMRNPLASPDLVVATFGQIRIRNRLGQALANHDKQELRGLFLFLRHNLFVASYFDILYDVATVAIGKNCCNYTQIVPLLQLFCCV

SEQ ID NO: 138209 - protein, 238 aa, Heterodera glycines
MNRKGEAMLMLTPSQEPFVALLRQRNVPVTKVTVDSNKVFDVRNKITNLMVPFPSVKQFAQQSLIAYAKALYFSELKEVFDVQSIDFDALSRSYGLVVTPRIRFLRKKGIITRKYVELEKGTSPEMATKTEEILLGNPSGSGGKNPFDIQCQNEMEEEEPFLKVSRRDVFNSITEVDVKEEILSRISSKKPISKTMMARKMIKRMGVVGKRKRFENERESDEEEDTEQQKKKGDAICC

SEQ ID NO: 138210 - protein, 38 aa, Heterodera glycines
MISSKRIRTHYKPIVRIEDDDSAQFGCSEAERYWMGMA

SEQ ID NO: 138211 - protein, 198 aa, Heterodera glycines
PIFGTDVDFEKQRLSSVNIIICTPGRLLQHMDENEHFSCDQLQMLVIDEADRILDMGFRHQIDAIIENLPKERQTLLFIDAIIENLPKERQTLLFSATQTRRTEDLVRVSLRNPVFVAAHEHSGSATPDQLVQSYFVCMEEAKLNMLWSFSFLKNNRTKKTLVFVTCCKQRFITETFTHLRPGLYLPGLWGDLKQSKR

SEQ ID NO: 138212 - protein, 146 aa, Heterodera glycines
MKILLFFIAFIGILCHEVFAKFTKEKKDFFSSVNFKCLKLINEMKKYSTEAEYSEDKLMANFRDLSEKVKTCSCCVDEGNKSFFNSMDNAKEFFENIGKDANKSHIQKWLHQISTDFNTLTIESDLFEIWENFIEYSHAITSENLK

SEQ ID NO: 138213 - protein, 36 aa, Heterodera glycines
MTDGTKSKTRIGAVLNEFRKKIKDEKLAKRCKALIK

SEQ ID NO: 138214 - protein, 205 aa, Heterodera glycines
ILFLIHKQCQKTTSALTKKSLSAAIVGFWCSIFLRLLSSALKLRWSTAVLTASSTNTSKHANGNWAKCEFATKLERMARRKCKLSIPMEIHCQSRKIRCRTKSSDSDTFISSTSIKMSSHLSAVCSTDLYITTGNDRILEFILLNIWPMLHDSIRVMLLNSIAFRRLRQLAPSLLSECPSLRFVSFFDVIFPEFPPDESANASDG

SEQ ID NO: 138215 - protein, 104 aa, Heterodera glycines
MNLAHRSAEECQTSSKVEATTTTTMAKDAIFGTILMNAKSTFMIQTLPSNPESLLRVIFGHCIQSSLNEAQRRGIEPSRLGATITSQLLDPDIWIPIRQITPNT

SEQ ID NO: 138216 - protein, 230 aa, Heterodera glycines
MASKFVLIPDEIYQGLTNNDSGNINLDFAQRTLERTKRRRENVTAKNVHYNQELSRYLHLRDEQQNRPTKVEIAKGLKALIKRGDESDEEPVFNLGSDRQQSHASQIRKPRRHHHSYNEDEEMPLQQPSPPLRAENRGQKRKPNDFYSSWEEGAKRQLRHQDEPVPPSSKIVNRQRRSQPPVSLRREEQQIPVDIPQEEPFQPVPQPSIPIHPQVNRKRKAQHTLNDIRE

SEQ ID NO: 138217 - protein, 16 aa, Heterodera glycines
EATPEGFGLPINLGAS

SEQ ID NO: 138218 - protein, 265 aa, Heterodera glycines
MSRNLLFFASTSLALVKVVKRQSGNGAAGPAEETHVGFEGNDPPPSSLNEPISAIGPDQQAEDGKGLADIAYDTVEEQSQSSAASSSWATSPSSTSAAATVGTVSPGIGDAESAAETRLQDTAASEGTPSATTEEASPVGVEEENNDNNNNSPSSSDSGDAAATASTVAEEGQRLEETVATATTASSTARRIAAVASAGKKQDERKGRKKTGLPTAAVETAATDGTATTPATAQQQQQRNCNSERLRQLIIEVGKAFGQPNNLII

SEQ ID NO: 138219 - protein, 131 aa, Heterodera glycines
MANFKTLIYCFQFLNASHSGGIGLIQTICQHIDEKTSPITSADPRANTTVSNSGPISCAFCHLLHKKALSIINSFVRLFEGFNMMCDRLSDEKNACRLYVKQMTLKMGYIMDLHLEEQNARVYCKYVFNCV

SEQ ID NO: 138220 - protein, 94 aa, Heterodera glycines
YHAILAADAIKLANPAGGNSNIVANLKRARAGFKQAIDIIDTVLGVASKKRPETVAVARKTPTALLRTDDSVAQIVGTLGPCFCKGSSFIIHSV

SEQ ID NO: 138221 - protein, 20 aa, Heterodera glycines
MAKKGSQKFWCLKIRNKFIY

SEQ ID NO: 138222 - protein, 34 aa, Heterodera glycines
MDNFLLSSIQTCPFCMVATTTDREHLGLSNDIKN

SEQ ID NO: 138223 - protein, 88 aa, Heterodera glycines
MALLVSRATVLFASSYTVVYNCQPWSTVGDEECGKVYGIATEEDHPMRGPGRVFLLTMLSSGAVQLLSCSSDLAQPFQLIATTNHFPY

SEQ ID NO: 138224 - protein, 176 aa, Heterodera glycines
MRDDFRQLPSSNGLVEALSASSSSSASSSSSSASSSSSACCCAENRLFLCSPQQRGLTFPSPIRPSGECSSSSSSSASSSASSSSSSSFALSSVTPRRPFFFHKVAKTIVAEDEDEVQQQGTENMWKTNPMIKRRTSKNSAKGKGNKGEEENCQRRTDPKKAIEAADAVSRMGFLN

SEQ ID NO: 138225 - protein, 39 aa, Heterodera glycines
MQNFFLYRYAKFGMNLTSRKKVKQDEVNVVLYIIKNEEI

SEQ ID NO: 138226 - protein, 95 aa, Heterodera glycines; identical to SEQ ID NO: 136988

SEQ ID NO: 138227 - protein, 348 aa, Heterodera glycines
PSIDIGLLVLRGKIRQKLKRLLAITMPKVRQKLYVHLEQMDVIRALLPAIYINAASIAPKIDLRVLLNRTTSVPVDRVFYDEMDSFATSHHKLPEKPYDHVVLGGTFDRLHNGHKLLLSEAAMTARTRITCGVTDGKMNEKKILYELMEPVETRCRSVTEFIGDISEGIECQTVPIYDAYGPAIVGDHYQAIVVSEETLKGGEAVNAKRMENGFKKLDICLVELLKNAEEVLNETKLSSSLKRKEMLGTLLAEPGPPKAAISNAHYVIGLTGGIASGKTHIATFLAEKDYKVIECDTLVHQLYKNNMELREKLSKVFGDEIVKNGDIDRDKLATIVFGDKANFRFFYE

SEQ ID NO: 138228 - protein, 66 aa, Heterodera glycines
MVGGLFHNLRHNLQFFVKNLVHNGPPHDSNFGYSYAKRMIDVLNRGYAQEHNRKYREKINILFLIK

SEQ ID NO: 138229 - protein, 97 aa, Heterodera glycines
MESSTEEKISPKFLQFIPKSPIIVEQPPSYATVTQYQRQQQQQQQPNYNNYQSYPVQPPQHCYGCYDGAGRYGGNGGYNGNGGYNSNSGQGQLNSKN

SEQ ID NO: 138230 - protein, 89 aa, Heterodera glycines
MRGGILSKALRRYAADGHLKGDDVPNKRRVSVVDSSDDDYRYGILGKSLRQFNDGGKLYLHDNHRRNDTETSSSSAEGTMTVQNAIGRK

SEQ ID NO: 138231 - protein, 86 aa, Heterodera glycines
MAKMFFLSPRSLWIDAKYPFRKTPTREALVPRSMPIACEFRGIILCELEICGILTGFPITLPEIFFNGLYQKGKKYLATLTKNSKS

SEQ ID NO: 138232 - protein, 123 aa, Heterodera glycines
MQTIAEIKNFEIIEGGRVFIVRVRIENVVHVEYRFFNACVLCRKGVCSCGVEKALTPYLKVSVADDTGILENVAFFGVRGKKNGMEELRGLSGAVCTMKIGARVKEIGGKKGIYYSLIDIVSL

SEQ ID NO: 138233 - protein, 158 aa, Heterodera glycines
MNSEKSEKANTILVEAAKKETERAWRDVAALAEEVGDFAKSSRETLNRAIKSREKAPYANGVRELYLKMSDSIWEIFKIMDQINLESEKAESAWRIWTKSFEPINPNHEFPTVKYFEVKLVGHGTYGIGFSTRKYGSGEFVGWNDDSIGYDSMGDIIG

SEQ ID NO: 138234 - protein, 132 aa, Heterodera glycines
MINLSFKLAVQIDEGNPDSRIAPDEHGRYLISKVHAVYVHQNNREIIFFHFMACFLSIEFLINQSWPGFEEWVQSEDCENMEQSNQFTELVTVEAIFDLMLKRPIAHHMAKIVETCPKYVQGRYKSGRKPLK

SEQ ID NO: 138235 - protein, 70 aa, Heterodera glycines
MSGQGNGGKGRGKGGAKGYRKTVHGNIRCITNPIRYEAVNGISGAINDQIQPDDPVFGTVKFLGFLSESL

SEQ ID NO: 138236 - protein, 210 aa, Heterodera glycines
ISFQFGFTHTKTGLMFFLCDGSYCLTATLWGVLLDRWNCNNFLMFFGSSATIVSLVLFGVTPIFTSHFHRRLEWICISTPIFTSHFHRRLEWICISLAILGIASGALYIPSFQQCLDVVKKRGYDDSFQTYGCVSGLIQKRGYDDSFQTYGCVSGLIQSSYALGGFMGPTVLGGWGCQGFMGPTVLGGWGCQKFGLRSIVLSIVVINLIF

SEQ ID NO: 138237 - protein, 205 aa, Heterodera glycines
MENRNLQCPSKFSIDYILSIPAKKPRHGVQAGAGTSSAKSAKDFVKKLENSVEHVPRFQYVKAKSKFSIEDVPTNPEGLLAGIFQFCIDEAITDSQERGIKPTHIGCLISSPLLTGGDIPTPIRQITNNTVDTILNQFNKVAQSKQQQNVTLWGEPFTVTVTTVDRTGLPDKRSLKGGARRSLASVHHRINDRCLIKVRSKECQF

SEQ ID NO: 138238 - protein, 94 aa, Heterodera glycines
QKFRLADFCPATNPKVPAQLIRCVYAIESDEKNGIAVYEHEKPAWSDPTILAMFDDFEKLRSATVLKGLHARTLTGFIKSFLQELKVKFYYYYF

SEQ ID NO: 138239 - protein, 49 aa, Heterodera glycines
MSEEEPCENNKTNFTKIEMPNLPEIPLINFRIILMGKEEVINGPKSLKD

SEQ ID NO: 138240 - protein, 157 aa, Heterodera glycines
MNYDTQVKAYKFVAYSALTFSLASVVAAFITLPLMYNYVSHVRRQLNQDMVLCQGSSSDIFREVEVLKNAPFVAHGNRTARQAGYEAHAAGAPSGAGPSGSSVGRAGGANVAGGGGACKPCCVPGPPGPQGRPGRHGKPGKPGAPGVPGAAGAGPAI

SEQ ID NO: 138241 - protein, 75 aa, Heterodera glycines
MRPFQVPYLENVVSELGIYGSIIADSSNGKVLWNSAEGYLSRSKPANLNQGGVCEGSGVVDSVLLFPDNEFVGTN

SEQ ID NO: 138242 - protein, 45 aa, Heterodera glycines
ISKMPKRKVVVTIHQKFKKIYFLRKSKFLINGGEWHTNVAQNKMF

SEQ ID NO: 138243 - protein, 106 aa, Heterodera glycines
MSATITLTDHQQRHANQPPTGANNLSAITISNDAVFRPPIIVEHRRGTTTTNASTMVPRPKSADGEAANDDDGIARPMPIRPMHGATNSNRLLEELVREIIYGCIL

SEQ ID NO: 138244 - protein, 150 aa, Heterodera glycines
MTELPHLVMDLHVRLPNSFKCPDACFILSGFVDALSFRELFPHCATDEFMRRAENAKIKTIGHRSKQQSATSDDSDDEQGQMDNPWVGFLVENPNGTKFELKLHYSPSNYDKWSKMVIRQLADDDHQQAAKELDENAENYDKCICFCFYK

SEQ ID NO: 138245 - protein, 1262 aa, Heterodera glycines
MPNSPPPSKRPRRFFIEELLREPFNQLSPPRKSPKDYVKLLNSETELVPKFQWLKNKSNFIIENVPADPEALLIGIFQECMDEAMNESRVKGIKPTHLGCTISSQLLTSDIWIPIRQLTPDTINTILNRFNDVAQSKKQDGVTLWGEPFTVSVTTVNRNGLPEKRQLKGGAARKLAPVNHKIHQQCLIKIENADNYCLFYAMQATMVRTVGTMTRQHFYDYLHGIKTMIGKLQRETTEMMNAVNAPLNLLNYDAEIYVPRIIDWWNDEKFARQWKFKAFIFGSAGHYKPLFKYGADDYDVSILLYFDEGHFNGVQKNGNLFGRPYCLSCEKTYDRPKQHTKSCKARCIKCSQMGPLFPCKPIDGFRQKCSDCNKMFFNQVCYQHHLSLNFCKTSKECKHCGVVWDLNNNTKNGREGHKCNERWCENCQIFHEFERGCFIRPLEPNHKKETMGWRLVTFDLETTQHTPIDPDFPEKRKHQVNFVTAKVACPDCISSGRWKESLRGKFCNVCGYHRTVTFSQMPFHETTVDKQNIDRHPLVAFVKWILYKLPKQYDTIAYSHFGGRFDMVLVFRELLLEGFNPSMIKKGNRLFEMKASFFLLINVKSRKKMNPNVTFRDSWNLIPGPLASMVPMFGLDVQDKPFFPHLANRPENYGCNLFPTKADYLADGMNIAKRKEFDKWYQENRNAPFLLDESLASYCKNDVDILMAGLIAFRSEFLEMTKRSAGADGKADRAAYTTPHNGIDPIRHCITIASACMRHFRTNHLKPAHLALVPEKGYDSCGDNQSDLALNFMEWYAEKFDVQIQNAYSANGEKRVGNFRLDGWIESQQKGLEIHGCIWHACSNCYPDDNEVLPCGKTAGRIREKNKRRMEIILEQVPNVEIFWQCEIETMLAKDKQMRKKFDEYTGDGGPIDIRASFMGGRTGALKLFHEAAEGQKISYYDVTSLYPFINFTTDYPIGHPTLHVPCEEVDWRRPEDNPYPLAILKVFVIPPRKIDVPVLPVKVDDRLCFPLCMKCCKKFPNVATGFDETIRGNVEAEEQFIAECNEQFGIQIDRTKMVTNKGKRALAKLAVNNLWGRFSLRNFGLSQTHITDDPSELANYLDNKKIEVTGLDMLTPDRILISYQQKKDWIKEHPCSNVVISLFTTSAARLHLLKAMQKVVRTPGCVLLYTDTDSLIYAHPIGLNPLKTGPHLGQFTDEFPEHEILEFVSGGSKQYGLKLRRNDSDQIEHVLKLRGITLNYDVTENQGLRYDTFKDSVIKFA

SEQ ID NO: 138246 - protein, 21 aa, Heterodera glycines
MGAMNAVKVMGIRYEIVSSLH

SEQ ID NO: 138247 - protein, 253 aa, Heterodera glycines
MKSQTRQSKNLLVQIYDTHLGILHYMKQNWHCVGWFGMTHCEEYRKYLGILYQHFSDIYAEIPTKKPSFRTKNGEIRLTFVQVMERLANIFKFCHGSKLAEENAKEWEEMGLILPNEEEINAYKANSEDKTKGKGKQKAKMEESPQAKFDEMMENKFKTIEQNAQRNANSGGRGARGNQSGSSSLARADQSESLTSSPALSSLSSASAFSPLFSSSPLSPPPASLSVSSSTAANAEHIYNIVLNMPIHSMADA

SEQ ID NO: 138248 - protein, 114 aa, Heterodera glycines
MANIISGTNFQKRRKTDPLNYRPVSLTSTVCRVFERILSSKILEFLNGVPQGSVLGPLLFLIFINDQPSVITNEAASVGIKKYADDVKLYYANENDDHSNQLDKAIEALENGQK

SEQ ID NO: 138249 - protein, 224 aa, Heterodera glycines
IVQNNNGSLKIHGFDESTNGSVNIADIFPVVPIAKHTRMDLPSSSGTVELFDRGLAFSVQEQYGLQTAATLRQKDNQFLTTSHAFAPTEISADALFKSVVAAATVQPQQKSPPSSSLSSASPQQQQQQQQSPFLASAPPPPPPPPPPPSSSSLSLAPPQQQQQQSPFLALAPPPPPAPPPPPLPSPAQASYSSVFLISPGDEQISSFLASVPPPAQHRTLRFID

SEQ ID NO: 138250 - protein, 76 aa, Heterodera glycines
MEKHGDIRGSELFQIQEQRSTMSPRMEKETEAPKTKKTDLFKYSRCHKRKVGPPWAEGIKLGLQWKKDSRSYSWEP

SEQ ID NO: 138251 - protein, 194 aa, Heterodera glycines
MGKLRAKIQFDQTILFVLLLFFCITVYLRHTVATCIEESSSSGGTQPTTLPPLTVDYTVCKRMAPDLRQACIMRLQWWQEARKKKYATDKKLPLKVCQPIGKRLRQKKQPNRRRRWPRNDQCISTAKAATQLFETSRPKRQSGEPDKSLARCKRMEYRMLSDDQRERFEVQAPMTKFLSDLKFVHEAIKIDCFK

SEQ ID NO: 138252 - protein, 354 aa, Heterodera glycines
MTEIRDTNSKTLKSSLRESQTETLEYSFTTQTVAMHLDVKPHNFLYVPTVDVESGESEELLKLIDFDGAEPIPGKIRWGLWRKRLAHYKRADYRRVPKNPLYSPLYSSPESYRRKCSSKADMWSMGVITYEIIFVRMVKKEFPDANEETLRLAIAKKLFDIVPVYSGKSTDIKAKWPKPKRFVYDLRWLTSSVKTVKSILRIWLNFPRLAVLITNLLDVMPQRRMTAAGVLEYLAGKCYPAELFRTDYARDGTIFNKISFNKLSDMVNKQQKQQCDSDKCTQKWVKISQMVAKVAEMRQEGIVNKSQEMLDNGDLEECATRHGEGGKKGKVISHSLISQNKQKPDQPNQALRAK

SEQ ID NO: 138253 - protein, 259 aa, Heterodera glycines
MESPPPTPGPVPTPEMDEEILEFGFSLPSTSVTPIGDLVPFSTTPTAPMDTGEMTPPPLVIDERSPRIEHLEKQLKDQEDIIKFLREQVRNRDALISDLRCQLEQCAVPPTAPPTTSKTTPTGRPKKNVDHLQCTSRRKLAKSSNAQPLSPNDLDAFEHQIEEFRVFLAQEQRMRDFLSQKPKAHLLLNHFVPFARQHSFLGLLDEQGDEALHSVWRRLEQWWKCMPDADQILQQFEHHFVSNWLLDTGIIAEMKQASF

SEQ ID NO: 138254 - protein, 44 aa, Heterodera glycines
MKARQFAHCISFPSFYIVSKKDLPMIGKKEIMFLSNNSTKGIQK

SEQ ID NO: 138255 - protein, 240 aa, Heterodera glycines
MKRMGYIIVTAVDKGEILKAATLKASVKLWSIIQAITIDENQSADPRSAAPPIDYTSLCVRFPLPDSLDNAMSLFFDDTRHNRTNVPVEDELCVSNPLLELIKLLLDSSLKSQKILMDALTQNGTHANESIPIDSSLAQLLNSLSLDSLGNGVRGLLGGLSLEPETRKIAGAKALMLPYALKHGTEEEEANAEKWELKLAQVEKRRGIKQNSKQIDSHFSFSSSTISIRLTSKRIGKFLD

SEQ ID NO: 138256 - protein, 322 aa, Heterodera glycines
MPVLRTPPLTRTRALNQGIIVDRDGNAFRAENFGVSGGRPISPLANNENQRLDDNHENVLAETEIRRRLLYGGMEQSAPEEQLEYDEMENGDEQNVNGMVQQNFENGVEAGDRGSFGNDALDAHGLRAFSTPLNEQNLSALQRDLRMQLPENLSVIQNQIRVMNFMQNQMPNPVAHNFPALNHPQAVNPIACRPNGQLYENAAVNFERQREQQIRLTQQPVVEDQQSHVRRIPPPHAYTQGHRRSQDEGFEFHQGQQHPNFKKNLPIRANQQNRPECNQQPVPHPGLVFDGMMAQAIRSLDGFSYTMTLNAIPNLDGTEVLI

SEQ ID NO: 138257 - protein, 1091 aa, Heterodera glycines
LCQADENKRVRPNFFASRQCSKHESNYCPTELEALAVRFGAWKFAQFITGIPTKIITDHKALPPMFRSKKQTGNSRVDRWLMELNARFTLTVEYSPGKSNIVADVLSRSGALISEVTENFDTDSAFVCKLKENEGEKNLEVDEIGEKERIDWVEATKVSEFSEIYNFLQKRILPDEIRKKQKILDTFHKFSIMDGLLYFIPSKPEGPKLFVPSKFRQTFIDQRHSGICSGHFSGKKLFRQLSEKYFWPNMFGDCVKTCLSCRICAHSRKPRSNEPPLRIIQTSEPLELVCVDILSIGMSENGNRYVLVSIDHFTKYIVATPIPDKSKDTVSKAFVKEFVLLFGAPKRFHSDQGKEFVNETLKEISAILGVEKTTTAGYDPQANGAAERANQTLLNMLKKSTSSHWSWDERLPFVVFSYNTTPSEVTGFSPFQLMFGKIANFPGEIDFKKYGNPFYTVDEETYLQAFKENLQLILEYARKNAEISRAETKNRYDSRPNVTANKFAIGDKCMVIYPGSKSRIQHKKLHWNQFGPYKIVKMFESSADVVPVDKSSAEPITVPIERLVRVPVGVPDISTLPHGKNPYRNILATILLANLEIIVQKREQTDETPVSSEEWQKKGITKNSAENFDQNQLGTTDILGGRKMQQDETAGLIWTMKCEGESHEFCGKLLCAELDPVLDAKTEPGNVEIGTPLQAILCLFILRSVATVSSAAAKSLVHLILGSESGMELVVYEGVRKDNIRAGALPREEDVEKIWSMWCEKCAVTKKLLQSSGFEKIRVQNSDGEPKEKPETIQVEMPEAVPKLPESERDGWSTLFEQTGWILEKVRSIAIHRSRTLVETPRVLIGDSTAFQLFPEMRAQTQFVGTERGLLTEVIRPLSECVFSSKVRAAMIILGRDSLVKDETVDQIMEQCQRIQQLCSRFPSVSFIWLPPPYVRQYDLAYHEMIGRLSELLGDWFVFVTPFGRSLIEIWRYGDSFDRSRVNADGWMTENGIKALSAWISTQIPKWPNNRQLGIRTVRSSVSVTRRVYGLGLCDRPETAASSSARGGLGLCDRRPNSRSRSPFRRRDNRQSQPFVRGGHRRDDVTRDRRH

SEQ ID NO: 138258 - protein, 1240 aa, Heterodera glycines
MPVLRTPPLTRTRALNQGIIVDRDGNAIRAENFGVSGGRPISPLANNENQRLDDNHENVLAETEIRRRLLYGGMEQSAPEEQLEYDEMENGDEQNVNGMVQQNFENGVEAGDRGSFGNDALDAHGLRAFSTPLNEQNLSALQRDLRMQLPENLSVIQNQIRVMNFMQNQMPNPVAHNFPALNPIACRPNGQLYENAAVNFERQREQQIRLTQQPVVEDQQSHVRRIPPPHAYTQGHRRSQDERFEFHQGQQHPNFKKNLPIRANQQNRLECNQQPVPHPGLVFDGMMAQAIRSLDGFSYTMTLNAIPNLDGNRGSDSVNAFFKQFDVATEEWPEDKRLRALRSKCFGKAERAFNSAVDANRHDYQLIKRAIIRQLDDTDAKQLTSFDQLMRGIRRRPNESIDELGNRISGLVRRAYPGLTEQQYDEYSIMHFIRAMSNPELAITLEMTRRPGATFDEFIAQAARAEATQLAARSALRPNQQYQRPMTNSTGPANNYAPNNRSNNWPKPELGSNPSYRVTCYNCGQNGHVSRNCTTPPKFCSFQENRNQIAKHQGSGANAAPLNWNRQAPNKNGQQFPASRNFLRHNYLVEQNNEPPKRNDLLAGAVNAEYGPQIESFFQNAVNKTSDVDGSDGSPLVGKIIVAKVSVFERQSDAMLDGGAQISLISAEFFAQIMDKVDKNDIISHLERRIVDINGKEVKCFGIVCLPITRGTQTARVRMFVAQSSFGYDLLFGTNALNQLGFKLIDKVNMNVVEFSPMETHANSAHIIYRVTLLPQSSTLVELSMANGQEDKEVTVIGRNDLDEQLRIEPTLTSCKNGQIAVPITNFSSIPITLEANESVALVEHVDEWHELEHSFFPPFFVSSVTHENENIRTEQIKEILRTRIGMSQQHEADKLERLIIGFEQIFALDDSELTQTEITQHFINTGDASPIRGRMRPLPFAHRKKVSSMLQDYLSRGLIRPSKSPWASPIVLVPKRDGSLRFCVDYRGINSVTVKDAYPLPNIDYILLALGEKKYFSTLDFLSGYWQIRMDEKSVEKTAFVTEFGLHEFTVLPFGLCNAVATYQRFMSRLFEDLINDFVFVYIDDILVASESFEQHLEHLEIVFERIKDSELKLKIEKCRFSASELPFLGHVLTRRGLKMNADKVRPVIELPLPSTKKQLHSFLGFMTYYRKFIYGFGEIAAPLFHLLKKNTPFVLGEKEILVVEKLKEKLLEDAVLYFPDFKSAMNDAERCFIILTDA

SEQ ID NO: 138259 - protein, 86 aa, Heterodera glycines
MYQQRVYLHSLARFARGEQQDGRGPADEQCSLFSDGARLNDCGGAHGRAVQKVGEMAAVDAQSAGQSRIPRNGQKATLFLILNIIR

SEQ ID NO: 138260 - protein, 897 aa, Heterodera glycines
RPISIKFPLFFVYSVLDLRCHREEDTQDWVDTIKRVEETGQIWLHRKRYNSSFPQRLSSYCQWFVDAKDCWEKVASLIEMAREEIFIADWWLSPEIFLRRPMAEGNYWRLDCALKRRAEKGIRIFILIYKEMEMALGLKSLYSKKHLQELHPNIKVIRHPDHYLGSGTFFWAHHEKLLIIDQLIAFVGGIDFCYGRWDDSQHMLTDLGSVVFEPRSEQNEVVKKGENAQRKTTEATTTIIEPIPKDNGKVTEDGQNWQQIHRRTEHIIDEERGHKIGEKTTETISKPSAENGSETHIKLSDLVPIMRINYQGTEHATERGICDAKTAKVERSDATRGGQSARGTARECGRQQRHTDTATNAETTPFRGRKEIVVENGRPMVRFSNFTSNLSALEEHQTTNILDTSEGGPLGTNKCRRGNYKYGKLMHKFKQSKAPSGPKGMTTPTGNAQVMMEPKQNTLIRRALNNLKPEKARRRWRLAMQPSEETADYACDWFSYCRLQYACDWFSYCRLQETKVDMSGLQGAGKLWPGKDYVNFVHKDFVDVDLAFNDFINRYDTFINRYDTPRMPWHDIHSVVYGSAARDVARHFIQRWNAAKTEKLKSDTEKLKSDNRYPYLLPKSYNSIRVPRVLFGENTQRVEVQVLRSCAHWSSLIDKTEDSIQQAYLSLIANARHYVYIENQFFVSMINSADVGNEICRVLCDRIIRAYREKETFREKETFRVFVLIPLLPGFEGDIGATSYSALLAVLHWTMLSIAKGDHSLIQNLQRAGVENVQNYITFCSLRTHSQLYGKSVTELVYIHSKLMIVDDVHTIIGSANINDRSQAGNRDSEVCLLITDHEFVDGRMNGQPFRAGKFASSLRMRLMREHLGLLEQSLPKTSPERAAEINDPTCPSVFED

SEQ ID NO: 138261 - protein, 25 aa, Heterodera glycines
MGGRIHIVDEFPANLKHAVAEAFRK

SEQ ID NO: 138262 - protein, 105 aa, Heterodera glycines
CEDAQCFSVRCIGTDNSTLFHTKGCVNMDKLWDVKLPLKEFGLNECQSMNGTAERNFCDGNRCNGHNEKQSSSEATNARSAETKSRVITGAETVAVSYDGTKKNT

SEQ ID NO: 138263 - protein, 37 aa, Heterodera glycines
RCASCGCQHVIGCVLSGGGCAAARQETRVSTKLIRAA

SEQ ID NO: 138264 - protein, 215 aa, Heterodera glycines
RVDKFIPIVLYCELCFARFGIIQQMKELDDGIAEAVSSLLWVAPRIGHEIAEFKVINDELTHKYGKQFAEAARMNQLPEPSRVSTKLVQKLSVSAPSKLLVEKYLVTIAQSAGVDFAPDAKVMREDDDEIARAERNLINFMNGVVPLGLGGPPPPFRSSTGGLSVNDDPNSKGGGGGHFAAAVGGAIGSADPLMNQGSNNASGNGANAMPMPPNG

SEQ ID NO: 138265 - protein, 58 aa, Heterodera glycines
SKPRKNGLSKNRNYAQKASQTILALPIPSTIAFIHPIMSAKIIRVPKIACDLSLEKMV

SEQ ID NO: 138266 - protein, 302 aa, Heterodera glycines
MALKIPFEGKGNSEMLASCSTPKSSQEDLLCHFRLLDETSVYFRPKPSDDNQQQRHGNNKQRQKRAKCQQKQQQLQIDDYFNAIRRPKHLRGAKRHSKTTERAFLDMEFDHLGKTEMALEEEKQQQMDDEKCSSPILLDFRRNSAGSNETENFLPPPASPAVGLNCQMFSPQLLPRPSDPSANNFSPSGRHYTVLRRIRMKHKMKRDALMKRKSESYGDEQRQQYTNLPMEPIGGSKGSDQNEKEGREEDDSGRKRTNCNSDSGMEEKCEWGLIGGGRRSDGEERNWGGRDRGLIREDGSWD

SEQ ID NO: 138267 - protein, 94 aa, Heterodera glycines
SSVPVPFHSRRCQHFSSVDDSLLKLLLLFRFGVRLGEIPGGESGRTLGRDGVGTHGGEGTVGEHQQSSGGRRTRGRTTINKGTEEWALEGTKSR

SEQ ID NO: 138268 - protein, 99 aa, Heterodera glycines
MPKYVLHPIQLFTSLNNTENVENAQNSPRFARDRFHVQYNATARAFAPLFVLLAHVVYASPPTAQHDNDSDVEFGLAQDAAGAAELVEMAPATGIIVPR

SEQ ID NO: 138269 - protein, 19 aa, Heterodera glycines
MKPTFNFNLFASVFLVLCV

SEQ ID NO: 138270 - protein, 27 aa, Heterodera glycines
MDVSWGSGLKKAPAEGGGRGNQSLIDL

SEQ ID NO: 138271 - protein, 53 aa, Heterodera glycines
FYLDRRKFFVYSTKIILTISGKFYFSKISLNFFAFLLLLVSSRCTFFPRLIHG

SEQ ID NO: 138272 - protein, 129 aa, Heterodera glycines
MADADGGTERQFKLGMRQSICKSFGERRGDKTTNGIEVFGMNMFKEMMEKRSGQQQTTSACEILNSFSDSLLPSAERSAEFVIEKIDDEKFFNFGLKAKDASLSPYFGLFSDGEKYYAVVRNAKQKMDG

SEQ ID NO: 138273 - protein, 167 aa, Heterodera glycines
CRQRWLSLFSLSVIQYPTHKEKIKRRFNRSEVVYNYVQRPFLHCSWEKEEARSRHVDFACPIVKSKSNPSLASAASDPLPQPAPLQQHQQWVGGGEWPVTTHHRPTPPVTTHHRPTPPHSTTPFPTTVVPQCRLGTTQLRSQRQQQHWHNAAATTVPFDQWGRRHTD

SEQ ID NO: 138274 - protein, 83 aa, Heterodera glycines
AVMGAYNENNGTIEVPLHGYNVGKAIVERILNTENGTVHLHGMREPMSLAKAVEIGFFDNLSLTVVDPNTTQRLFLDEALERK

SEQ ID NO: 138275 - protein, 43 aa, Heterodera glycines
MRQRNTMRQKRVEIEKYHQKPLSLNHPLPNSARLRAESAMVDA

SEQ ID NO: 138276 - protein, 26 aa, Heterodera glycines
MFKKLRLSRRLIIHTFLRFSFNRFHF

SEQ ID NO: 138277 - protein, 42 aa, Heterodera glycines
MKCPLMSNFDGREAAGISVIALCPKLSGRRKNGRIFGIFKQQ

SEQ ID NO: 138278 - protein, 29 aa, Heterodera glycines
MNGVIAHNDTICWLYELLDSPIFIDLAID
